United States Patent Application Publication US 2025/0171800 A1 - sequence listing, part 7

SEQ ID NO: 137853 - DNA, 22 bp, synthetic construct
  misc_feature 1..22: note = chemically synthesized
  source 1..22: mol_type = other DNA
gaatccaagcctgatcatttcc

SEQ ID NO: 137854 - DNA, 22 bp, synthetic construct
  misc_feature 1..22: note = chemically synthesized
  source 1..22: mol_type = other DNA
aatccaagcctgatcatttcca

SEQ ID NO: 137855 - DNA, 22 bp, synthetic construct
  misc_feature 1..22: note = chemically synthesized
  source 1..22: mol_type = other DNA
atcatttccatgtcatactgag

SEQ ID NO: 137856 - DNA, 22 bp, synthetic construct
  misc_feature 1..22: note = chemically synthesized
  source 1..22: mol_type = other DNA
ccatgtcatactgagaaagtcc

SEQ ID NO: 137857 - DNA, 22 bp, synthetic construct
  misc_feature 1..22: note = chemically synthesized
  source 1..22: mol_type = other DNA
catgtcatactgagaaagtccc

SEQ ID NO: 137858 - DNA, 22 bp, synthetic construct
  misc_feature 1..22: note = chemically synthesized
  source 1..22: mol_type = other DNA
agaaagtccccacccttctctg

SEQ ID NO: 137859 - DNA, 22 bp, synthetic construct
  misc_feature 1..22: note = chemically synthesized
  source 1..22: mol_type = other DNA
ctctgagcctcagtttctcttt

SEQ ID NO: 137860 - DNA, 22 bp, synthetic construct
  misc_feature 1..22: note = chemically synthesized
  source 1..22: mol_type = other DNA
tctgagcctcagtttctctttt

SEQ ID NO: 137861 - DNA, 22 bp, synthetic construct
  misc_feature 1..22: note = chemically synthesized
  source 1..22: mol_type = other DNA
tgagcctcagtttctcttttta

SEQ ID NO: 137862 - DNA, 22 bp, synthetic construct
  misc_feature 1..22: note = chemically synthesized
  source 1..22: mol_type = other DNA
agcctcagtttctctttttata

SEQ ID NO: 137863 - DNA, 22 bp, synthetic construct
  misc_feature 1..22: note = chemically synthesized
  source 1..22: mol_type = other DNA
agtttctctttttataagtagg

SEQ ID NO: 137864 - DNA, 22 bp, synthetic construct
  misc_feature 1..22: note = chemically synthesized
  source 1..22: mol_type = other DNA
ctctttttataagtaggagtct

SEQ ID NO: 137865 - DNA, 22 bp, synthetic construct
  misc_feature 1..22: note = chemically synthesized
  source 1..22: mol_type = other DNA
tctttttataagtaggagtctg

SEQ ID NO: 137866 - DNA, 22 bp, synthetic construct
  misc_feature 1..22: note = chemically synthesized
  source 1..22: mol_type = other DNA
tttttataagtaggagtctgga

SEQ ID NO: 137867 - DNA, 22 bp, synthetic construct
  misc_feature 1..22: note = chemically synthesized
  source 1..22: mol_type = other DNA
tttataagtaggagtctggagt

SEQ ID NO: 137868 - DNA, 22 bp, synthetic construct
  misc_feature 1..22: note = chemically synthesized
  source 1..22: mol_type = other DNA
ttataagtaggagtctggagta

SEQ ID NO: 137869 - DNA, 22 bp, synthetic construct
  misc_feature 1..22: note = chemically synthesized
  source 1..22: mol_type = other DNA
tataagtaggagtctggagtaa

SEQ ID NO: 137870 - DNA, 22 bp, synthetic construct
  misc_feature 1..22: note = chemically synthesized
  source 1..22: mol_type = other DNA
ataagtaggagtctggagtaaa

SEQ ID NO: 137871 - DNA, 22 bp, synthetic construct
  misc_feature 1..22: note = chemically synthesized
  source 1..22: mol_type = other DNA
taagtaggagtctggagtaaat

SEQ ID NO: 137872 - DNA, 22 bp, synthetic construct
  misc_feature 1..22: note = chemically synthesized
  source 1..22: mol_type = other DNA
gagtaaatgatttccaatggct

SEQ ID NO: 137873 - DNA, 22 bp, synthetic construct
  misc_feature 1..22: note = chemically synthesized
  source 1..22: mol_type = other DNA
ccaatggctctcatttcaatac

SEQ ID NO: 137874 - DNA, 22 bp, synthetic construct
  misc_feature 1..22: note = chemically synthesized
  source 1..22: mol_type = other DNA
caatggctctcatttcaataca

SEQ ID NO: 137875 - DNA, 22 bp, synthetic construct
  misc_feature 1..22: note = chemically synthesized
  source 1..22: mol_type = other DNA
tcatttcaatacaaaatttccg

SEQ ID NO: 137876 - DNA, 22 bp, synthetic construct
  misc_feature 1..22: note = chemically synthesized
  source 1..22: mol_type = other DNA
atttcaatacaaaatttccgtt

SEQ ID NO: 137877 - DNA, 22 bp, synthetic construct
  misc_feature 1..22: note = chemically synthesized
  source 1..22: mol_type = other DNA
caatacaaaatttccgtttatt

SEQ ID NO: 137878 - DNA, 22 bp, synthetic construct
  misc_feature 1..22: note = chemically synthesized
  source 1..22: mol_type = other DNA
aatacaaaatttccgtttatta

SEQ ID NO: 137879 - DNA, 22 bp, synthetic construct
  misc_feature 1..22: note = chemically synthesized
  source 1..22: mol_type = other DNA
ccgtttattaaatgcatgagct

SEQ ID NO: 137880 - DNA, 22 bp, synthetic construct
  misc_feature 1..22: note = chemically synthesized
  source 1..22: mol_type = other DNA
cgtttattaaatgcatgagctt

SEQ ID NO: 137881 - DNA, 22 bp, synthetic construct
  misc_feature 1..22: note = chemically synthesized
  source 1..22: mol_type = other DNA
attaaatgcatgagcttctgtt

SEQ ID NO: 137882 - DNA, 22 bp, synthetic construct
  misc_feature 1..22: note = chemically synthesized
  source 1..22: mol_type = other DNA
ttaaatgcatgagcttctgtta

SEQ ID NO: 137883 - DNA, 22 bp, synthetic construct
  misc_feature 1..22: note = chemically synthesized
  source 1..22: mol_type = other DNA
aatgcatgagcttctgttactc

SEQ ID NO: 137884 - DNA, 22 bp, synthetic construct
  misc_feature 1..22: note = chemically synthesized
  source 1..22: mol_type = other DNA
ctgttactccaagactgagaag

SEQ ID NO: 137885 - DNA, 22 bp, synthetic construct
  misc_feature 1..22: note = chemically synthesized
  source 1..22: mol_type = other DNA
tgttactccaagactgagaagg

SEQ ID NO: 137886 - DNA, 22 bp, synthetic construct
  misc_feature 1..22: note = chemically synthesized
  source 1..22: mol_type = other DNA
ttactccaagactgagaaggaa

SEQ ID NO: 137887 - DNA, 22 bp, synthetic construct
  misc_feature 1..22: note = chemically synthesized
  source 1..22: mol_type = other DNA
ctccaagactgagaaggaaatt

SEQ ID NO: 137888 - DNA, 22 bp, synthetic construct
  misc_feature 1..22: note = chemically synthesized
  source 1..22: mol_type = other DNA
caagactgagaaggaaattgaa

SEQ ID NO: 137889 - DNA, 22 bp, synthetic construct
  misc_feature 1..22: note = chemically synthesized
  source 1..22: mol_type = other DNA
agaaggaaattgaacctgagac

SEQ ID NO: 137890 - DNA, 22 bp, synthetic construct
  misc_feature 1..22: note = chemically synthesized
  source 1..22: mol_type = other DNA
aacctgagactcattgactggc

SEQ ID NO: 137891 - DNA, 22 bp, synthetic construct
  misc_feature 1..22: note = chemically synthesized
  source 1..22: mol_type = other DNA
agactcattgactggcaagatg

SEQ ID NO: 137892 - DNA, 22 bp, synthetic construct
  misc_feature 1..22: note = chemically synthesized
  source 1..22: mol_type = other DNA
attgactggcaagatgtcccca

SEQ ID NO: 137893 - DNA, 22 bp, synthetic construct
  misc_feature 1..22: note = chemically synthesized
  source 1..22: mol_type = other DNA
actggcaagatgtccccagagg

SEQ ID NO: 137894 - DNA, 22 bp, synthetic construct
  misc_feature 1..22: note = chemically synthesized
  source 1..22: mol_type = other DNA
gcaagatgtccccagaggctct

SEQ ID NO: 137895 - DNA, 22 bp, synthetic construct
  misc_feature 1..22: note = chemically synthesized
  source 1..22: mol_type = other DNA
tcattcagcaataaaattctca

SEQ ID NO: 137896 - DNA, 22 bp, synthetic construct
  misc_feature 1..22: note = chemically synthesized
  source 1..22: mol_type = other DNA
attcagcaataaaattctcacc

SEQ ID NO: 137897 - DNA, 22 bp, synthetic construct
  misc_feature 1..22: note = chemically synthesized
  source 1..22: mol_type = other DNA
agcaataaaattctcaccttca

SEQ ID NO: 137898 - DNA, 22 bp, synthetic construct
  misc_feature 1..22: note = chemically synthesized
  source 1..22: mol_type = other DNA
tcaccttcacccaggcccactg

SEQ ID NO: 137899 - DNA, 22 bp, synthetic construct
  misc_feature 1..22: note = chemically synthesized
  source 1..22: mol_type = other DNA
accttcacccaggcccactgag

SEQ ID NO: 137900 - DNA, 22 bp, synthetic construct
  misc_feature 1..22: note = chemically synthesized
  source 1..22: mol_type = other DNA
cacccaggcccactgagtgtca

SEQ ID NO: 137901 - DNA, 22 bp, synthetic construct
  misc_feature 1..22: note = chemically synthesized
  source 1..22: mol_type = other DNA
acccaggcccactgagtgtcag

SEQ ID NO: 137902 - DNA, 22 bp, synthetic construct
  misc_feature 1..22: note = chemically synthesized
  source 1..22: mol_type = other DNA
agtgtcagatttgcatgcacta

SEQ ID NO: 137903 - DNA, 22 bp, synthetic construct
  misc_feature 1..22: note = chemically synthesized
  source 1..22: mol_type = other DNA
gcatgcactagttcacgtgtgt

SEQ ID NO: 137904 - DNA, 22 bp, synthetic construct
  misc_feature 1..22: note = chemically synthesized
  source 1..22: mol_type = other DNA
catgcactagttcacgtgtgta

SEQ ID NO: 137905 - DNA, 22 bp, synthetic construct
  misc_feature 1..22: note = chemically synthesized
  source 1..22: mol_type = other DNA
gttcacgtgtgtaaaaaggagg

SEQ ID NO: 137906 - DNA, 22 bp, synthetic construct
  misc_feature 1..22: note = chemically synthesized
  source 1..22: mol_type = other DNA
acgtgtgtaaaaaggaggatgc

SEQ ID NO: 137907 - DNA, 22 bp, synthetic construct
  misc_feature 1..22: note = chemically synthesized
  source 1..22: mol_type = other DNA
ctttcctttgtattctcacata

SEQ ID NO: 137908 - DNA, 22 bp, synthetic construct
  misc_feature 1..22: note = chemically synthesized
  source 1..22: mol_type = other DNA
tttcctttgtattctcacatac

SEQ ID NO: 137909 - DNA, 22 bp, synthetic construct
  misc_feature 1..22: note = chemically synthesized
  source 1..22: mol_type = other DNA
tcctttgtattctcacatacct

SEQ ID NO: 137910 - DNA, 22 bp, synthetic construct
  misc_feature 1..22: note = chemically synthesized
  source 1..22: mol_type = other DNA
cctttgtattctcacatacctt

SEQ ID NO: 137911 - DNA, 22 bp, synthetic construct
  misc_feature 1..22: note = chemically synthesized
  source 1..22: mol_type = other DNA
ctttgtattctcacataccttt

SEQ ID NO: 137912 - DNA, 22 bp, synthetic construct
  misc_feature 1..22: note = chemically synthesized
  source 1..22: mol_type = other DNA
tgtattctcacatacctttagg

SEQ ID NO: 137913 - DNA, 22 bp, synthetic construct
  misc_feature 1..22: note = chemically synthesized
  source 1..22: mol_type = other DNA
gtattctcacatacctttagga

SEQ ID NO: 137914 - DNA, 22 bp, synthetic construct
  misc_feature 1..22: note = chemically synthesized
  source 1..22: mol_type = other DNA
tattctcacatacctttaggaa

SEQ ID NO: 137915 - DNA, 22 bp, synthetic construct
  misc_feature 1..22: note = chemically synthesized
  source 1..22: mol_type = other DNA
tcacatacctttaggaaagaac

SEQ ID NO: 137916 - DNA, 22 bp, synthetic construct
  misc_feature 1..22: note = chemically synthesized
  source 1..22: mol_type = other DNA
acatacctttaggaaagaactt

SEQ ID NO: 137917 - DNA, 22 bp, synthetic construct
  misc_feature 1..22: note = chemically synthesized
  source 1..22: mol_type = other DNA
taggaaagaacttagcaccctt

SEQ ID NO: 137918 - DNA, 22 bp, synthetic construct
  misc_feature 1..22: note = chemically synthesized
  source 1..22: mol_type = other DNA
aggaaagaacttagcacccttc

SEQ ID NO: 137919 - DNA, 22 bp, synthetic construct
  misc_feature 1..22: note = chemically synthesized
  source 1..22: mol_type = other DNA
ggaaagaacttagcacccttcc

SEQ ID NO: 137920 - DNA, 22 bp, synthetic construct
  misc_feature 1..22: note = chemically synthesized
  source 1..22: mol_type = other DNA
agcacccttcccacacagccat

SEQ ID NO: 137921 - DNA, 22 bp, synthetic construct
  misc_feature 1..22: note = chemically synthesized
  source 1..22: mol_type = other DNA
gcacccttcccacacagccatc

SEQ ID NO: 137922 - DNA, 22 bp, synthetic construct
  misc_feature 1..22: note = chemically synthesized
  source 1..22: mol_type = other DNA
cccacacagccatcccaataac

SEQ ID NO: 137923 - DNA, 22 bp, synthetic construct
  misc_feature 1..22: note = chemically synthesized
  source 1..22: mol_type = other DNA
ccacacagccatcccaataact

SEQ ID NO: 137924 - DNA, 22 bp, synthetic construct
  misc_feature 1..22: note = chemically synthesized
  source 1..22: mol_type = other DNA
atttcagtgactcaacccttga

SEQ ID NO: 137925 - DNA, 22 bp, synthetic construct
  misc_feature 1..22: note = chemically synthesized
  source 1..22: mol_type = other DNA
cagtgactcaacccttgacttt

SEQ ID NO: 137926 - DNA, 22 bp, synthetic construct
  misc_feature 1..22: note = chemically synthesized
  source 1..22: mol_type = other DNA
agtgactcaacccttgacttta

SEQ ID NO: 137927 - DNA, 22 bp, synthetic construct
  misc_feature 1..22: note = chemically synthesized
  source 1..22: mol_type = other DNA
aacccttgactttataaaagtc

SEQ ID NO: 137928 - DNA, 22 bp, synthetic construct
  misc_feature 1..22: note = chemically synthesized
  source 1..22: mol_type = other DNA
gactttataaaagtcttgggca

SEQ ID NO: 137929 - DNA, 22 bp, synthetic construct
  misc_feature 1..22: note = chemically synthesized
  source 1..22: mol_type = other DNA
actttataaaagtcttgggcag

SEQ ID NO: 137930 - DNA, 22 bp, synthetic construct
  misc_feature 1..22: note = chemically synthesized
  source 1..22: mol_type = other DNA
tataaaagtcttgggcagtata

SEQ ID NO: 137931 - DNA, 22 bp, synthetic construct
  misc_feature 1..22: note = chemically synthesized
  source 1..22: mol_type = other DNA
ataaaagtcttgggcagtatag

SEQ ID NO: 137932 - DNA, 22 bp, synthetic construct
  misc_feature 1..22: note = chemically synthesized
  source 1..22: mol_type = other DNA
taaaagtcttgggcagtataga

SEQ ID NO: 137933 - DNA, 22 bp, synthetic construct
  misc_feature 1..22: note = chemically synthesized
  source 1..22: mol_type = other DNA
gggcagtatagagcagagatta

SEQ ID NO: 137934 - DNA, 22 bp, synthetic construct
  misc_feature 1..22: note = chemically synthesized
  source 1..22: mol_type = other DNA
ggcagtatagagcagagattaa

SEQ ID NO: 137935 - DNA, 22 bp, synthetic construct
  misc_feature 1..22: note = chemically synthesized
  source 1..22: mol_type = other DNA
agagtacagatgctggagccag

SEQ ID NO: 137936 - DNA, 22 bp, synthetic construct
  misc_feature 1..22: note = chemically synthesized
  source 1..22: mol_type = other DNA
gagccagaccacctgagtgatt

SEQ ID NO: 137937 - DNA, 22 bp, synthetic construct
  misc_feature 1..22: note = chemically synthesized
  source 1..22: mol_type = other DNA
agtgattagtgactcagtttct

SEQ ID NO: 137938 - DNA, 22 bp, synthetic construct
  misc_feature 1..22: note = chemically synthesized
  source 1..22: mol_type = other DNA
gtgactcagtttctcttagtag

SEQ ID NO: 137939 - DNA, 22 bp, synthetic construct
  misc_feature 1..22: note = chemically synthesized
  source 1..22: mol_type = other DNA
agtttctcttagtagttgtatg

SEQ ID NO: 137940 - DNA, 22 bp, synthetic construct
  misc_feature 1..22: note = chemically synthesized
  source 1..22: mol_type = other DNA
ctcttagtagttgtatgactca

SEQ ID NO: 137941 - DNA, 22 bp, synthetic construct
  misc_feature 1..22: note = chemically synthesized
  source 1..22: mol_type = other DNA
tcttagtagttgtatgactcag

SEQ ID NO: 137942 - DNA, 22 bp, synthetic construct
  misc_feature 1..22: note = chemically synthesized
  source 1..22: mol_type = other DNA
ttagtagttgtatgactcagtt

SEQ ID NO: 137943 - DNA, 22 bp, synthetic construct
  misc_feature 1..22: note = chemically synthesized
  source 1..22: mol_type = other DNA
agtagttgtatgactcagtttc

SEQ ID NO: 137944 - DNA, 22 bp, synthetic construct
  misc_feature 1..22: note = chemically synthesized
  source 1..22: mol_type = other DNA
gtagttgtatgactcagtttct

SEQ ID NO: 137945 - DNA, 22 bp, synthetic construct
  misc_feature 1..22: note = chemically synthesized
  source 1..22: mol_type = other DNA
tatgactcagtttcttcatctg

SEQ ID NO: 137946 - DNA, 22 bp, synthetic construct
  misc_feature 1..22: note = chemically synthesized
  source 1..22: mol_type = other DNA
agtttcttcatctgtaaaatgg

SEQ ID NO: 137947 - DNA, 22 bp, synthetic construct
  misc_feature 1..22: note = chemically synthesized
  source 1..22: mol_type = other DNA
cttcatctgtaaaatggagggt

SEQ ID NO: 137948 - DNA, 22 bp, synthetic construct
  misc_feature 1..22: note = chemically synthesized
  source 1..22: mol_type = other DNA
ttcatctgtaaaatggagggtt

SEQ ID NO: 137949 - DNA, 22 bp, synthetic construct
  misc_feature 1..22: note = chemically synthesized
  source 1..22: mol_type = other DNA
catctgtaaaatggagggtttt

SEQ ID NO: 137950 - DNA, 22 bp, synthetic construct
  misc_feature 1..22: note = chemically synthesized
  source 1..22: mol_type = other DNA
atctgtaaaatggagggttttt

SEQ ID NO: 137951 - DNA, 22 bp, synthetic construct
  misc_feature 1..22: note = chemically synthesized
  source 1..22: mol_type = other DNA
taaaatggagggttttttaatt

SEQ ID NO: 137952 - DNA, 22 bp, synthetic construct
  misc_feature 1..22: note = chemically synthesized
  source 1..22: mol_type = other DNA
tttaattagtttgtttttgaga

SEQ ID NO: 137953 - DNA, 22 bp, synthetic construct
  misc_feature 1..22: note = chemically synthesized
  source 1..22: mol_type = other DNA
ttaattagtttgtttttgagaa

SEQ ID NO: 137954 - DNA, 22 bp, synthetic construct
  misc_feature 1..22: note = chemically synthesized
  source 1..22: mol_type = other DNA
taattagtttgtttttgagaaa

SEQ ID NO: 137955 - DNA, 22 bp, synthetic construct
  misc_feature 1..22: note = chemically synthesized
  source 1..22: mol_type = other DNA
aattagtttgtttttgagaaag

SEQ ID NO: 137956 - DNA, 22 bp, synthetic construct
  misc_feature 1..22: note = chemically synthesized
  source 1..22: mol_type = other DNA
attagtttgtttttgagaaagg

SEQ ID NO: 137957 - DNA, 22 bp, synthetic construct
  misc_feature 1..22: note = chemically synthesized
  source 1..22: mol_type = other DNA
gtttgtttttgagaaagggtct

SEQ ID NO: 137958 - DNA, 22 bp, synthetic construct
  misc_feature 1..22: note = chemically synthesized
  source 1..22: mol_type = other DNA
gtttttgagaaagggtctcact

SEQ ID NO: 137959 - DNA, 22 bp, synthetic construct
  misc_feature 1..22: note = chemically synthesized
  source 1..22: mol_type = other DNA
tttttgagaaagggtctcactc

SEQ ID NO: 137960 - DNA, 22 bp, synthetic construct
  misc_feature 1..22: note = chemically synthesized
  source 1..22: mol_type = other DNA
ttgagaaagggtctcactctgt

SEQ ID NO: 137961 - DNA, 22 bp, synthetic construct
  misc_feature 1..22: note = chemically synthesized
  source 1..22: mol_type = other DNA
tgagaaagggtctcactctgtc

SEQ ID NO: 137962 - DNA, 22 bp, synthetic construct
  misc_feature 1..22: note = chemically synthesized
  source 1..22: mol_type = other DNA
gagaaagggtctcactctgtca

SEQ ID NO: 137963 - DNA, 22 bp, synthetic construct
  misc_feature 1..22: note = chemically synthesized
  source 1..22: mol_type = other DNA
agaaagggtctcactctgtcac

SEQ ID NO: 137964 - DNA, 22 bp, synthetic construct
  misc_feature 1..22: note = chemically synthesized
  source 1..22: mol_type = other DNA
actctgtcacccaaatgggagt

SEQ ID NO: 137965 - DNA, 22 bp, synthetic construct
  misc_feature 1..22: note = chemically synthesized
  source 1..22: mol_type = other DNA
tgtcacccaaatgggagtgtag

SEQ ID NO: 137966 - DNA, 22 bp, synthetic construct
  misc_feature 1..22: note = chemically synthesized
  source 1..22: mol_type = other DNA
tcacccaaatgggagtgtagtg

SEQ ID NO: 137967 - DNA, 22 bp, synthetic construct
  misc_feature 1..22: note = chemically synthesized
  source 1..22: mol_type = other DNA
ggctcactgcaacttgcacttc

SEQ ID NO: 137968 - DNA, 22 bp, synthetic construct
  misc_feature 1..22: note = chemically synthesized
  source 1..22: mol_type = other DNA
actgcaacttgcacttcccagg

SEQ ID NO: 137969 - DNA, 22 bp, synthetic construct
  misc_feature 1..22: note = chemically synthesized
  source 1..22: mol_type = other DNA
caacttgcacttcccaggctca

SEQ ID NO: 137970 - DNA, 22 bp, synthetic construct
  misc_feature 1..22: note = chemically synthesized
  source 1..22: mol_type = other DNA
gcacttcccaggctcaagcggt

SEQ ID NO: 137971 - DNA, 22 bp, synthetic construct
  misc_feature 1..22: note = chemically synthesized
  source 1..22: mol_type = other DNA
cacttcccaggctcaagcggtc

SEQ ID NO: 137972 - DNA, 22 bp, synthetic construct
  misc_feature 1..22: note = chemically synthesized
  source 1..22: mol_type = other DNA
cccaggctcaagcggtcctccc

SEQ ID NO: 137973 - DNA, 22 bp, synthetic construct
  misc_feature 1..22: note = chemically synthesized
  source 1..22: mol_type = other DNA
ccaggctcaagcggtcctccca

SEQ ID NO: 137974 - DNA, 22 bp, synthetic construct
  misc_feature 1..22: note = chemically synthesized
  source 1..22: mol_type = other DNA
aagcggtcctcccacctcaaca

SEQ ID NO: 137975 - DNA, 22 bp, synthetic construct
  misc_feature 1..22: note = chemically synthesized
  source 1..22: mol_type = other DNA
ccacctcaacatcctgagtagc

SEQ ID NO: 137976 - DNA, 22 bp, synthetic construct
  misc_feature 1..22: note = chemically synthesized
  source 1..22: mol_type = other DNA
aacatcctgagtagctggaacc

SEQ ID NO: 137977 - DNA, 22 bp, synthetic construct
  misc_feature 1..22: note = chemically synthesized
  source 1..22: mol_type = other DNA
agtagctggaaccacaggtaca

SEQ ID NO: 137978 - DNA, 22 bp, synthetic construct
  misc_feature 1..22: note = chemically synthesized
  source 1..22: mol_type = other DNA
gaaccacaggtacacaccacca

SEQ ID NO: 137979 - DNA, 22 bp, synthetic construct
  misc_feature 1..22: note = chemically synthesized
  source 1..22: mol_type = other DNA
gctaattttttgtatttttggt

SEQ ID NO: 137980 - DNA, 22 bp, synthetic construct
  misc_feature 1..22: note = chemically synthesized
  source 1..22: mol_type = other DNA
attttttgtatttttggtagag

SEQ ID NO: 137981 - DNA, 22 bp, synthetic construct
  misc_feature 1..22: note = chemically synthesized
  source 1..22: mol_type = other DNA
tttgtatttttggtagagatgg

SEQ ID NO: 137982 - DNA, 22 bp, synthetic construct
  misc_feature 1..22: note = chemically synthesized
  source 1..22: mol_type = other DNA
ttgtatttttggtagagatggg

SEQ ID NO: 137983 - DNA, 22 bp, synthetic construct
  misc_feature 1..22: note = chemically synthesized
  source 1..22: mol_type = other DNA
tgtatttttggtagagatgggg

SEQ ID NO: 137984 - DNA, 22 bp, synthetic construct
  misc_feature 1..22: note = chemically synthesized
  source 1..22: mol_type = other DNA
gtatttttggtagagatggggt

SEQ ID NO: 137985 - DNA, 22 bp, synthetic construct
  misc_feature 1..22: note = chemically synthesized
  source 1..22: mol_type = other DNA
tatttttggtagagatggggtt

SEQ ID NO: 137986 - DNA, 22 bp, synthetic construct
  misc_feature 1..22: note = chemically synthesized
  source 1..22: mol_type = other DNA
ttggtagagatggggtttcaca

SEQ ID NO: 137987 - DNA, 22 bp, synthetic construct
  misc_feature 1..22: note = chemically synthesized
  source 1..22: mol_type = other DNA
tggtagagatggggtttcacat

SEQ ID NO: 137988 - DNA, 22 bp, synthetic construct
  misc_feature 1..22: note = chemically synthesized
  source 1..22: mol_type = other DNA
ggtagagatggggtttcacatg

SEQ ID NO: 137989 - DNA, 22 bp, synthetic construct
  misc_feature 1..22: note = chemically synthesized
  source 1..22: mol_type = other DNA
gtagagatggggtttcacatgt

SEQ ID NO: 137990 - DNA, 22 bp, synthetic construct
  misc_feature 1..22: note = chemically synthesized
  source 1..22: mol_type = other DNA
cacatgttacacaggatggtct

SEQ ID NO: 137991 - DNA, 22 bp, synthetic construct
  misc_feature 1..22: note = chemically synthesized
  source 1..22: mol_type = other DNA
acatgttacacaggatggtctc

SEQ ID NO: 137992 - DNA, 22 bp, synthetic construct
  misc_feature 1..22: note = chemically synthesized
  source 1..22: mol_type = other DNA
cacaggatggtctcagactccg

SEQ ID NO: 137993 - DNA, 22 bp, synthetic construct
  misc_feature 1..22: note = chemically synthesized
  source 1..22: mol_type = other DNA
agactccggagctcaagcaatc

SEQ ID NO: 137994 - DNA, 22 bp, synthetic construct
  misc_feature 1..22: note = chemically synthesized
  source 1..22: mol_type = other DNA
cggagctcaagcaatctgccca

SEQ ID NO: 137995 - DNA, 22 bp, synthetic construct
  misc_feature 1..22: note = chemically synthesized
  source 1..22: mol_type = other DNA
aagcaatctgcccacctcagcc

SEQ ID NO: 137996 - DNA, 22 bp, synthetic construct
  misc_feature 1..22: note = chemically synthesized
  source 1..22: mol_type = other DNA
cccacctcagccttccaaagtg

SEQ ID NO: 137997 - DNA, 22 bp, synthetic construct
  misc_feature 1..22: note = chemically synthesized
  source 1..22: mol_type = other DNA
agccttccaaagtgctgggatt

SEQ ID NO: 137998 - DNA, 22 bp, synthetic construct
  misc_feature 1..22: note = chemically synthesized
  source 1..22: mol_type = other DNA
ccaaagtgctgggattataagc

SEQ ID NO: 137999 - DNA, 22 bp, synthetic construct
  misc_feature 1..22: note = chemically synthesized
  source 1..22: mol_type = other DNA
caaagtgctgggattataagca

SEQ ID NO: 138000 - DNA, 22 bp, synthetic construct
  misc_feature 1..22: note = chemically synthesized
  source 1..22: mol_type = other DNA
ggattataagcatgattacagg

SEQ ID NO: 138001 - DNA, 22 bp, synthetic construct
  misc_feature 1..22: note = chemically synthesized
  source 1..22: mol_type = other DNA
taagcatgattacaggagtttt

SEQ ID NO: 138002 - DNA, 22 bp, synthetic construct
  misc_feature 1..22: note = chemically synthesized
  source 1..22: mol_type = other DNA
caggagttttaacaggctcata

SEQ ID NO: 138003 - DNA, 22 bp, synthetic construct
  misc_feature 1..22: note = chemically synthesized
  source 1..22: mol_type = other DNA
taacaggctcataagattgttc

SEQ ID NO: 138004 - DNA, 22 bp, synthetic construct
  misc_feature 1..22: note = chemically synthesized
  source 1..22: mol_type = other DNA
aacaggctcataagattgttct

SEQ ID NO: 138005 - DNA, 22 bp, synthetic construct
  misc_feature 1..22: note = chemically synthesized
  source 1..22: mol_type = other DNA
acaggctcataagattgttctg

SEQ ID NO: 138006 - DNA, 22 bp, synthetic construct
  misc_feature 1..22: note = chemically synthesized
  source 1..22: mol_type = other DNA
ataagattgttctgcagcccga

SEQ ID NO: 138007 - DNA, 22 bp, synthetic construct
  misc_feature 1..22: note = chemically synthesized
  source 1..22: mol_type = other DNA
ttctgcagcccgagtgagttaa

SEQ ID NO: 138008 - DNA, 22 bp, synthetic construct
  misc_feature 1..22: note = chemically synthesized
  source 1..22: mol_type = other DNA
tgcagcccgagtgagttaatac

SEQ ID NO: 138009 - DNA, 22 bp, synthetic construct
  misc_feature 1..22: note = chemically synthesized
  source 1..22: mol_type = other DNA
cagcccgagtgagttaatacat

SEQ ID NO: 138010 - DNA, 22 bp, synthetic construct
  misc_feature 1..22: note = chemically synthesized
  source 1..22: mol_type = other DNA
atacatgcaaagagtttaaagc

SEQ ID NO: 138011 - DNA, 22 bp, synthetic construct
  misc_feature 1..22: note = chemically synthesized
  source 1..22: mol_type = other DNA
aaagcagtgacttataaatgct

SEQ ID NO: 138012 - DNA, 22 bp, synthetic construct
  misc_feature 1..22: note = chemically synthesized
  source 1..22: mol_type = other DNA
aagcagtgacttataaatgcta

SEQ ID NO: 138013 - DNA, 22 bp, synthetic construct
  misc_feature 1..22: note = chemically synthesized
  source 1..22: mol_type = other DNA
ataaatgctaactactctagaa

SEQ ID NO: 138014 - DNA, 22 bp, synthetic construct
  misc_feature 1..22: note = chemically synthesized
  source 1..22: mol_type = other DNA
taaatgctaactactctagaaa

SEQ ID NO: 138015 - DNA, 22 bp, synthetic construct
  misc_feature 1..22: note = chemically synthesized
  source 1..22: mol_type = other DNA
actactctagaaatgtttgcta

SEQ ID NO: 138016 - DNA, 22 bp, synthetic construct
  misc_feature 1..22: note = chemically synthesized
  source 1..22: mol_type = other DNA
ctctagaaatgtttgctagtat

SEQ ID NO: 138017 - DNA, 22 bp, synthetic construct
  misc_feature 1..22: note = chemically synthesized
  source 1..22: mol_type = other DNA
tagaaatgtttgctagtatttt

SEQ ID NO: 138018 - DNA, 22 bp, synthetic construct
  misc_feature 1..22: note = chemically synthesized
  source 1..22: mol_type = other DNA
gaaatgtttgctagtatttttt

SEQ ID NO: 138019 - DNA, 22 bp, synthetic construct
  misc_feature 1..22: note = chemically synthesized
  source 1..22: mol_type = other DNA
gctagtattttttgtttaactg

SEQ ID NO: 138020 - DNA, 22 bp, synthetic construct
  misc_feature 1..22: note = chemically synthesized
  source 1..22: mol_type = other DNA
ctagtattttttgtttaactgc

SEQ ID NO: 138021 - DNA, 22 bp, synthetic construct
  misc_feature 1..22: note = chemically synthesized
  source 1..22: mol_type = other DNA
gtattttttgtttaactgcaat

SEQ ID NO: 138022 - DNA, 22 bp, synthetic construct
  misc_feature 1..22: note = chemically synthesized
  source 1..22: mol_type = other DNA
tttgtttaactgcaatcattct

SEQ ID NO: 138023 - DNA, 22 bp, synthetic construct
  misc_feature 1..22: note = chemically synthesized
  source 1..22: mol_type = other DNA
ttgtttaactgcaatcattctt

SEQ ID NO: 138024 - DNA, 22 bp, synthetic construct
  misc_feature 1..22: note = chemically synthesized
  source 1..22: mol_type = other DNA
tgtttaactgcaatcattcttg

SEQ ID NO: 138025 - DNA, 22 bp, synthetic construct
  misc_feature 1..22: note = chemically synthesized
  source 1..22: mol_type = other DNA
gtttaactgcaatcattcttgc

SEQ ID NO: 138026 - DNA, 22 bp, synthetic construct
  misc_feature 1..22: note = chemically synthesized
  source 1..22: mol_type = other DNA
tttaactgcaatcattcttgct

SEQ ID NO: 138027 - DNA, 22 bp, synthetic construct
  misc_feature 1..22: note = chemically synthesized
  source 1..22: mol_type = other DNA
aactgcaatcattcttgctgca

SEQ ID NO: 138028 - DNA, 22 bp, synthetic construct
  misc_feature 1..22: note = chemically synthesized
  source 1..22: mol_type = other DNA
actgcaatcattcttgctgcag

SEQ ID NO: 138029 - DNA, 22 bp, synthetic construct
  misc_feature 1..22: note = chemically synthesized
  source 1..22: mol_type = other DNA
caatcattcttgctgcaggtga

SEQ ID NO: 138030 - DNA, 22 bp, synthetic construct
  misc_feature 1..22: note = chemically synthesized
  source 1..22: mol_type = other DNA
ttgctgcaggtgaaaactagtg

SEQ ID NO: 138031 - DNA, 22 bp, synthetic construct
  misc_feature 1..22: note = chemically synthesized
  source 1..22: mol_type = other DNA
gctgcaggtgaaaactagtgtt

SEQ ID NO: 138032 - DNA, 22 bp, synthetic construct
  misc_feature 1..22: note = chemically synthesized
  source 1..22: mol_type = other DNA
ctgcaggtgaaaactagtgttc

SEQ ID NO: 138033 - DNA, 22 bp, synthetic construct
  misc_feature 1..22: note = chemically synthesized
  source 1..22: mol_type = other DNA
caggtgaaaactagtgttctgt

SEQ ID NO: 138034 - DNA, 22 bp, synthetic construct
  misc_feature 1..22: note = chemically synthesized
  source 1..22: mol_type = other DNA
gtgttctgtactttatgcccat

SEQ ID NO: 138035 - DNA, 22 bp, synthetic construct
  misc_feature 1..22: note = chemically synthesized
  source 1..22: mol_type = other DNA
tgtactttatgcccattcatct

SEQ ID NO: 138036 - DNA, 22 bp, synthetic construct
  misc_feature 1..22: note = chemically synthesized
  source 1..22: mol_type = other DNA
tactttatgcccattcatcttt

SEQ ID NO: 138037 - DNA, 22 bp, synthetic construct
  misc_feature 1..22: note = chemically synthesized
  source 1..22: mol_type = other DNA
tatgcccattcatctttaactg

SEQ ID NO: 138038 - DNA, 22 bp, synthetic construct
  misc_feature 1..22: note = chemically synthesized
  source 1..22: mol_type = other DNA
atgcccattcatctttaactgt

SEQ ID NO: 138039 - DNA, 22 bp, synthetic construct
  misc_feature 1..22: note = chemically synthesized
  source 1..22: mol_type = other DNA
tgcccattcatctttaactgta

SEQ ID NO: 138040 - DNA, 22 bp, synthetic construct
  misc_feature 1..22: note = chemically synthesized
  source 1..22: mol_type = other DNA
atctttaactgtaataataaaa

SEQ ID NO: 138041 - DNA, 22 bp, synthetic construct
  misc_feature 1..22: note = chemically synthesized
  source 1..22: mol_type = other DNA
taactgtaataataaaaataac

SEQ ID NO: 138042 - DNA, 22 bp, synthetic construct
  misc_feature 1..22: note = chemically synthesized
  source 1..22: mol_type = other DNA
aactgtaataataaaaataact

SEQ ID NO: 138043 - DNA, 22 bp, synthetic construct
  misc_feature 1..22: note = chemically synthesized
  source 1..22: mol_type = other DNA
actgtaataataaaaataactg

SEQ ID NO: 138044 - DNA, 22 bp, synthetic construct
  misc_feature 1..22: note = chemically synthesized
  source 1..22: mol_type = other DNA
taataataaaaataactgacat

SEQ ID NO: 138045 - DNA, 22 bp, synthetic construct
  misc_feature 1..22: note = chemically synthesized
  source 1..22: mol_type = other DNA
acatttattgaaggctatcaga

SEQ ID NO: 138046 - DNA, 22 bp, synthetic construct
  misc_feature 1..22: note = chemically synthesized
  source 1..22: mol_type = other DNA
attgaaggctatcagagactgt

SEQ ID NO: 138047 - DNA, 22 bp, synthetic construct
  misc_feature 1..22: note = chemically synthesized
  source 1..22: mol_type = other DNA
ttgaaggctatcagagactgta

SEQ ID NO: 138048 - DNA, 22 bp, synthetic construct
  misc_feature 1..22: note = chemically synthesized
  source 1..22: mol_type = other DNA
aaggctatcagagactgtaatt

SEQ ID NO: 138049 - DNA, 22 bp, synthetic construct
  misc_feature 1..22: note = chemically synthesized
  source 1..22: mol_type = other DNA
tcagagactgtaattagtgctt

SEQ ID NO: 138050 - DNA, 22 bp, synthetic construct
  misc_feature 1..22: note = chemically synthesized
  source 1..22: mol_type = other DNA
taattagtgctttgcataatta

SEQ ID NO: 138051 - DNA, 22 bp, synthetic construct
  misc_feature 1..22: note = chemically synthesized
  source 1..22: mol_type = other DNA
gtgctttgcataattaatcata

SEQ ID NO: 138052 - DNA, 22 bp, synthetic construct
  misc_feature 1..22: note = chemically synthesized
  source 1..22: mol_type = other DNA
tgcataattaatcatatttaat

SEQ ID NO: 138053 - DNA, 22 bp, synthetic construct
  misc_feature 1..22: note = chemically synthesized
  source 1..22: mol_type = other DNA
gcataattaatcatatttaata

SEQ ID NO: 138054 - DNA, 22 bp, synthetic construct
  misc_feature 1..22: note = chemically synthesized
  source 1..22: mol_type = other DNA
cataattaatcatatttaatac

SEQ ID NO: 138055 - DNA, 22 bp, synthetic construct
  misc_feature 1..22: note = chemically synthesized
  source 1..22: mol_type = other DNA
atcatatttaatactcttggat

SEQ ID NO: 138056 - DNA, 22 bp, synthetic construct
  misc_feature 1..22: note = chemically synthesized
  source 1..22: mol_type = other DNA
aatactcttggattctttcagg

SEQ ID NO: 138057 - DNA, 22 bp, synthetic construct
  misc_feature 1..22: note = chemically synthesized
  source 1..22: mol_type = other DNA
atactcttggattctttcaggt

SEQ ID NO: 138058 - DNA, 22 bp, synthetic construct
  misc_feature 1..22: note = chemically synthesized
  source 1..22: mol_type = other DNA
ttggattctttcaggtagatac

SEQ ID NO: 138059 - DNA, 22 bp, synthetic construct
  misc_feature 1..22: note = chemically synthesized
  source 1..22: mol_type = other DNA
ggattctttcaggtagatacta

SEQ ID NO: 138060 - DNA, 22 bp, synthetic construct
  misc_feature 1..22: note = chemically synthesized
  source 1..22: mol_type = other DNA
gattctttcaggtagatactat

SEQ ID NO: 138061 - DNA, 22 bp, synthetic construct
  misc_feature 1..22: note = chemically synthesized
  source 1..22: mol_type = other DNA
tttcaggtagatactattatta

SEQ ID NO: 138062 - DNA, 22 bp, synthetic construct
  misc_feature 1..22: note = chemically synthesized
  source 1..22: mol_type = other DNA
tcaggtagatactattattatc

SEQ ID NO: 138063 - DNA, 22 bp, synthetic construct
  misc_feature 1..22: note = chemically synthesized
  source 1..22: mol_type = other DNA
caggtagatactattattatcc

SEQ ID NO: 138064 - DNA, 22 bp, synthetic construct
  misc_feature 1..22: note = chemically synthesized
  source 1..22: mol_type = other DNA
aggtagatactattattatccc

SEQ ID NO: 138065 - DNA, 22 bp, synthetic construct
  misc_feature 1..22: note = chemically synthesized
  source 1..22: mol_type = other DNA
ttattatccccattttactaca

SEQ ID NO: 138066 - DNA, 22 bp, synthetic construct
  misc_feature 1..22: note = chemically synthesized
  source 1..22: mol_type = other DNA
ttatccccattttactacagtt

SEQ ID NO: 138067 - DNA, 22 bp, synthetic construct
  misc_feature 1..22: note = chemically synthesized
  source 1..22: mol_type = other DNA
tccccattttactacagttaaa

SEQ ID NO: 138068 - DNA, 22 bp, synthetic construct
  misc_feature 1..22: note = chemically synthesized
  source 1..22: mol_type = other DNA
tactacagttaaaaaaactacc

SEQ ID NO: 138069 - DNA, 22 bp, synthetic construct
  misc_feature 1..22: note = chemically synthesized
  source 1..22: mol_type = other DNA
actacagttaaaaaaactacct

SEQ ID NO: 138070 - DNA, 22 bp, synthetic construct
  misc_feature 1..22: note = chemically synthesized
  source 1..22: mol_type = other DNA
ctacagttaaaaaaactacctc

SEQ ID NO: 138071 - DNA, 22 bp, synthetic construct
  misc_feature 1..22: note = chemically synthesized
  source 1..22: mol_type = other DNA
cagttaaaaaaactacctctca

SEQ ID NO: 138072 - DNA, 22 bp, synthetic construct
  misc_feature 1..22: note = chemically synthesized
  source 1..22: mol_type = other DNA
aaaaaactacctctcaacttgc

SEQ ID NO: 138073 - DNA, 22 bp, synthetic construct
  misc_feature 1..22: note = chemically synthesized
  source 1..22: mol_type = other DNA
cctctcaacttgctcaagcata

SEQ ID NO: 138074 - DNA, 22 bp, synthetic construct
  misc_feature 1..22: note = chemically synthesized
  source 1..22: mol_type = other DNA
tcaacttgctcaagcatacact

SEQ ID NO: 138075 - DNA, 22 bp, synthetic construct
  misc_feature 1..22: note = chemically synthesized
  source 1..22: mol_type = other DNA
aacttgctcaagcatacactct

SEQ ID NO: 138076 - DNA, 22 bp, synthetic construct
  misc_feature 1..22: note = chemically synthesized
  source 1..22: mol_type = other DNA
gctcaagcatacactctcacac

SEQ ID NO: 138077 - DNA, 22 bp, synthetic construct
  misc_feature 1..22: note = chemically synthesized
  source 1..22: mol_type = other DNA
ctcaagcatacactctcacaca

SEQ ID NO: 138078 - DNA, 22 bp, synthetic construct
  misc_feature 1..22: note = chemically synthesized
  source 1..22: mol_type = other DNA
aagcatacactctcacacacac

SEQ ID NO: 138079 - DNA, 22 bp, synthetic construct
  misc_feature 1..22: note = chemically synthesized
  source 1..22: mol_type = other DNA
tcacacacacaaacataaacta

SEQ ID NO: 138080 - DNA, 22 bp, synthetic construct
  misc_feature 1..22: note = chemically synthesized
  source 1..22: mol_type = other DNA
acacacacaaacataaactact

SEQ ID NO: 138081 - DNA, 22 bp, synthetic construct
  misc_feature 1..22: note = chemically synthesized
  source 1..22: mol_type = other DNA
ctagcaaatagtagaattgaga

SEQ ID NO: 138082 - DNA, 22 bp, synthetic construct
  misc_feature 1..22: note = chemically synthesized
  source 1..22: mol_type = other DNA
gcaaatagtagaattgagattt

SEQ ID NO: 138083 - DNA, 22 bp, synthetic construct
  misc_feature 1..22: note = chemically synthesized
  source 1..22: mol_type = other DNA
agatttggtcctaattatgtct

SEQ ID NO: 138084 - DNA, 22 bp, synthetic construct
  misc_feature 1..22: note = chemically synthesized
  source 1..22: mol_type = other DNA
ggtcctaattatgtctttgctc

SEQ ID NO: 138085 - DNA, 22 bp, synthetic construct
  misc_feature 1..22: note = chemically synthesized
  source 1..22: mol_type = other DNA
gtcctaattatgtctttgctca

SEQ ID NO: 138086 - DNA, 22 bp, synthetic construct
  misc_feature 1..22: note = chemically synthesized
  source 1..22: mol_type = other DNA
attatgtctttgctcactatcc

SEQ ID NO: 138087 - DNA, 22 bp, synthetic construct
  misc_feature 1..22: note = chemically synthesized
  source 1..22: mol_type = other DNA
tgtctttgctcactatccaata

SEQ ID NO: 138088 - DNA, 22 bp, synthetic construct
  misc_feature 1..22: note = chemically synthesized
  source 1..22: mol_type = other DNA
tgctcactatccaataaatatt

SEQ ID NO: 138089 - DNA, 22 bp, synthetic construct
  misc_feature 1..22: note = chemically synthesized
  source 1..22: mol_type = other DNA
gctcactatccaataaatattt

SEQ ID NO: 138090 - DNA, 22 bp, synthetic construct
  misc_feature 1..22: note = chemically synthesized
  source 1..22: mol_type = other DNA
ctcactatccaataaatattta

SEQ ID NO: 138091 - DNA, 22 bp, synthetic construct
  misc_feature 1..22: note = chemically synthesized
  source 1..22: mol_type = other DNA
actatccaataaatatttattg

SEQ ID NO: 138092 - DNA, 22 bp, synthetic construct
  misc_feature 1..22: note = chemically synthesized
  source 1..22: mol_type = other DNA
tccaataaatatttattgacat

SEQ ID NO: 138093 - DNA, 22 bp, synthetic construct
  misc_feature 1..22: note = chemically synthesized
  source 1..22: mol_type = other DNA
attgacatgtacttcttggcag

SEQ ID NO: 138094 - DNA, 22 bp, synthetic construct
  misc_feature 1..22: note = chemically synthesized
  source 1..22: mol_type = other DNA
ttgacatgtacttcttggcagt

SEQ ID NO: 138095 - DNA, 22 bp, synthetic construct
  misc_feature 1..22: note = chemically synthesized
  source 1..22: mol_type = other DNA
acatgtacttcttggcagtctg

SEQ ID NO: 138096 - DNA, 22 bp, synthetic construct
  misc_feature 1..22: note = chemically synthesized
  source 1..22: mol_type = other DNA
cttggcagtctgtatgctggat

SEQ ID NO: 138097 - DNA, 22 bp, synthetic construct
  misc_feature 1..22: note = chemically synthesized
  source 1..22: mol_type = other DNA
ttggcagtctgtatgctggatg

SEQ ID NO: 138098 - DNA, 22 bp, synthetic construct
  misc_feature 1..22: note = chemically synthesized
  source 1..22: mol_type = other DNA
ggcagtctgtatgctggatgct

SEQ ID NO: 138099 - DNA, 22 bp, synthetic construct
  misc_feature 1..22: note = chemically synthesized
  source 1..22: mol_type = other DNA
gcagtctgtatgctggatgctg

SEQ ID NO: 138100 - DNA, 22 bp, synthetic construct
  misc_feature 1..22: note = chemically synthesized
  source 1..22: mol_type = other DNA
tatgctggatgctggggataca

SEQ ID NO: 138101 - DNA, 22 bp, synthetic construct
  misc_feature 1..22: note = chemically synthesized
  source 1..22: mol_type = other DNA
gatgctggggatacaaagatgt

SEQ ID NO: 138102 - DNA, 22 bp, synthetic construct
  misc_feature 1..22: note = chemically synthesized
  source 1..22: mol_type = other DNA
gggatacaaagatgtttaaatt

SEQ ID NO: 138103 - DNA, 22 bp, synthetic construct
  misc_feature 1..22: note = chemically synthesized
  source 1..22: mol_type = other DNA
aaatttaagctccagtctctgc

SEQ ID NO: 138104 - DNA, 22 bp, synthetic construct
  misc_feature 1..22: note = chemically synthesized
  source 1..22: mol_type = other DNA
aatttaagctccagtctctgct

SEQ ID NO: 138105 - DNA, 22 bp, synthetic construct
  misc_feature 1..22: note = chemically synthesized
  source 1..22: mol_type = other DNA
aagctccagtctctgcttccaa

SEQ ID NO: 138106 - DNA, 22 bp, synthetic construct
  misc_feature 1..22: note = chemically synthesized
  source 1..22: mol_type = other DNA
agctccagtctctgcttccaaa

SEQ ID NO: 138107 - DNA, 22 bp, synthetic construct
  misc_feature 1..22: note = chemically synthesized
  source 1..22: mol_type = other DNA
cagtctctgcttccaaaggcct

SEQ ID NO: 138108 - DNA, 22 bp, synthetic construct
  misc_feature 1..22: note = chemically synthesized
  source 1..22: mol_type = other DNA
tgcttccaaaggcctcccaggc

SEQ ID NO: 138109 - DNA, 22 bp, synthetic construct
  misc_feature 1..22: note = chemically synthesized
  source 1..22: mol_type = other DNA
cttccaaaggcctcccaggcca

SEQ ID NO: 138110 - DNA, 22 bp, synthetic construct
  misc_feature 1..22: note = chemically synthesized
  source 1..22: mol_type = other DNA
ccaaaggcctcccaggccaagt

SEQ ID NO: 138111 - DNA, 22 bp, synthetic construct
  misc_feature 1..22: note = chemically synthesized
  source 1..22: mol_type = other DNA
caaaggcctcccaggccaagtt

SEQ ID NO: 138112 - DNA, 22 bp, synthetic construct
  misc_feature 1..22: note = chemically synthesized
  source 1..22: mol_type = other DNA
ccaggccaagttatccattcag

SEQ ID NO: 138113 - DNA, 22 bp, synthetic construct
  misc_feature 1..22: note = chemically synthesized
  source 1..22: mol_type = other DNA
tccattcagaaagcatttttta

SEQ ID NO: 138114 - DNA, 22 bp, synthetic construct
  misc_feature 1..22: note = chemically synthesized
  source 1..22: mol_type = other DNA
agaaagcattttttactctttg

SEQ ID NO: 138115 - DNA, 22 bp, synthetic construct
  misc_feature 1..22: note = chemically synthesized
  source 1..22: mol_type = other DNA
tttactctttgcattccactgt

SEQ ID NO: 138116 - DNA, 22 bp, synthetic construct
  misc_feature 1..22: note = chemically synthesized
  source 1..22: mol_type = other DNA
ttactctttgcattccactgtt

SEQ ID NO: 138117 - DNA, 22 bp, synthetic construct
  misc_feature 1..22: note = chemically synthesized
  source 1..22: mol_type = other DNA
tactctttgcattccactgttt

SEQ ID NO: 138118 - DNA, 22 bp, synthetic construct
  misc_feature 1..22: note = chemically synthesized
  source 1..22: mol_type = other DNA
actctttgcattccactgtttt

SEQ ID NO: 138119 - DNA, 22 bp, synthetic construct
  misc_feature 1..22: note = chemically synthesized
  source 1..22: mol_type = other DNA
ctctttgcattccactgttttt

SEQ ID NO: 138120 - DNA, 22 bp, synthetic construct
  misc_feature 1..22: note = chemically synthesized
  source 1..22: mol_type = other DNA
tttgcattccactgtttttcct

SEQ ID NO: 138121 - DNA, 22 bp, synthetic construct
  misc_feature 1..22: note = chemically synthesized
  source 1..22: mol_type = other DNA
tgcattccactgtttttcctaa

SEQ ID NO: 138122 - DNA, 22 bp, synthetic construct
  misc_feature 1..22: note = chemically synthesized
  source 1..22: mol_type = other DNA
gcattccactgtttttcctaag

SEQ ID NO: 138123 - DNA, 22 bp, synthetic construct
  misc_feature 1..22: note = chemically synthesized
  source 1..22: mol_type = other DNA
cattccactgtttttcctaagt

SEQ ID NO: 138124 - DNA, 22 bp, synthetic construct
  misc_feature 1..22: note = chemically synthesized
  source 1..22: mol_type = other DNA
cactgtttttcctaagtgacta

SEQ ID NO: 138125 - DNA, 22 bp, synthetic construct
  misc_feature 1..22: note = chemically synthesized
  source 1..22: mol_type = other DNA
tttttcctaagtgactaaaaaa

SEQ ID NO: 138126 - DNA, 22 bp, synthetic construct
  misc_feature 1..22: note = chemically synthesized
  source 1..22: mol_type = other DNA
ttcctaagtgactaaaaaatta

SEQ ID NO: 138127 - DNA, 22 bp, synthetic construct
  misc_feature 1..22: note = chemically synthesized
  source 1..22: mol_type = other DNA
tcctaagtgactaaaaaattac

SEQ ID NO: 138128 - DNA, 22 bp, synthetic construct
  misc_feature 1..22: note = chemically synthesized
  source 1..22: mol_type = other DNA
cctaagtgactaaaaaattaca

SEQ ID NO: 138129 - DNA, 22 bp, synthetic construct
  misc_feature 1..22: note = chemically synthesized
  source 1..22: mol_type = other DNA
ctaagtgactaaaaaattacac

SEQ ID NO: 138130 - DNA, 22 bp, synthetic construct
  misc_feature 1..22: note = chemically synthesized
  source 1..22: mol_type = other DNA
agtgactaaaaaattacacttt

SEQ ID NO: 138131 - DNA, 22 bp, synthetic construct
  misc_feature 1..22: note = chemically synthesized
  source 1..22: mol_type = other DNA
aaaaattacactttattcgtct

SEQ ID NO: 138132 - DNA, 22 bp, synthetic construct
  misc_feature 1..22: note = chemically synthesized
  source 1..22: mol_type = other DNA
cactttattcgtctgtgtcctg

SEQ ID NO: 138133 - DNA, 22 bp, synthetic construct
  misc_feature 1..22: note = chemically synthesized
  source 1..22: mol_type = other DNA
tattcgtctgtgtcctgctctg

SEQ ID NO: 138134 - DNA, 22 bp, synthetic construct
  misc_feature 1..22: note = chemically synthesized
  source 1..22: mol_type = other DNA
attcgtctgtgtcctgctctgg

SEQ ID NO: 138135 - DNA, 22 bp, synthetic construct
  misc_feature 1..22: note = chemically synthesized
  source 1..22: mol_type = other DNA
ttcgtctgtgtcctgctctggg

SEQ ID NO: 138136 - DNA, 22 bp, synthetic construct
  misc_feature 1..22: note = chemically synthesized
  source 1..22: mol_type = other DNA
gtctgtgtcctgctctgggatg

SEQ ID NO: 138137 - DNA, 22 bp, synthetic construct
  misc_feature 1..22: note = chemically synthesized
  source 1..22: mol_type = other DNA
tgtcctgctctgggatgatagt

SEQ ID NO: 138138 - DNA, 22 bp, synthetic construct
  misc_feature 1..22: note = chemically synthesized
  source 1..22: mol_type = other DNA
ctctgggatgatagtctgactt

SEQ ID NO: 138139 - DNA, 22 bp, synthetic construct
  misc_feature 1..22: note = chemically synthesized
  source 1..22: mol_type = other DNA
tgggatgatagtctgactttcc

SEQ ID NO: 138140 - DNA, 22 bp, synthetic construct
  misc_feature 1..22: note = chemically synthesized
  source 1..22: mol_type = other DNA
ggatgatagtctgactttccta

SEQ ID NO: 138141 - DNA, 22 bp, synthetic construct
  misc_feature 1..22: note = chemically synthesized
  source 1..22: mol_type = other DNA
actttcctaacctgagcctaac

SEQ ID NO: 138142 - DNA, 22 bp, synthetic construct
  misc_feature 1..22: note = chemically synthesized
  source 1..22: mol_type = other DNA
tcctaacctgagcctaacatcc

SEQ ID NO: 138143 - DNA, 22 bp, synthetic construct
  misc_feature 1..22: note = chemically synthesized
  source 1..22: mol_type = other DNA
cctaacctgagcctaacatccc

SEQ ID NO: 138144 - DNA, 22 bp, synthetic construct
  misc_feature 1..22: note = chemically synthesized
  source 1..22: mol_type = other DNA
ctaacctgagcctaacatccct

SEQ ID NO: 138145 - DNA, 22 bp, synthetic construct
  misc_feature 1..22: note = chemically synthesized
  source 1..22: mol_type = other DNA
acctgagcctaacatccctgac

SEQ ID NO: 138146 - DNA, 22 bp, synthetic construct
  misc_feature 1..22: note = chemically synthesized
  source 1..22: mol_type = other DNA
agcctaacatccctgacatcag

SEQ ID NO: 138147 - DNA, 22 bp, synthetic construct
  misc_feature 1..22: note = chemically synthesized
  source 1..22: mol_type = other DNA
acatccctgacatcaggaaaga

SEQ ID NO: 138148 - DNA, 22 bp, synthetic construct
  misc_feature 1..22: note = chemically synthesized
  source 1..22: mol_type = other DNA
acatcaggaaagactacaccat

SEQ ID NO: 138149 - DNA, 22 bp, synthetic construct
  misc_feature 1..22: note = chemically synthesized
  source 1..22: mol_type = other DNA
caccatgtggagaaggggtggt

SEQ ID NO: 138150 - DNA, 22 bp, synthetic construct
  misc_feature 1..22: note = chemically synthesized
  source 1..22: mol_type = other DNA
tgattgctgctgtcttcagtta

SEQ ID NO: 138151 - DNA, 22 bp, synthetic construct
  misc_feature 1..22: note = chemically synthesized
  source 1..22: mol_type = other DNA
gattgctgctgtcttcagttag

SEQ ID NO: 138152 - DNA, 22 bp, synthetic construct
  misc_feature 1..22: note = chemically synthesized
  source 1..22: mol_type = other DNA
attgctgctgtcttcagttaga

SEQ ID NO: 138153 - DNA, 22 bp, synthetic construct
  misc_feature 1..22: note = chemically synthesized
  source 1..22: mol_type = other DNA
ctgctgtcttcagttagatggt

SEQ ID NO: 138154 - DNA, 22 bp, synthetic construct
  misc_feature 1..22: note = chemically synthesized
  source 1..22: mol_type = other DNA
ctgtcttcagttagatggttaa

SEQ ID NO: 138155 - DNA, 22 bp, synthetic construct
  misc_feature 1..22: note = chemically synthesized
  source 1..22: mol_type = other DNA
tcttcagttagatggttaactt

SEQ ID NO: 138156 - DNA, 22 bp, synthetic construct
  misc_feature 1..22: note = chemically synthesized
  source 1..22: mol_type = other DNA
cagttagatggttaactttgtg

SEQ ID NO: 138157 - DNA, 22 bp, synthetic construct
  misc_feature 1..22: note = chemically synthesized
  source 1..22: mol_type = other DNA
agttagatggttaactttgtga

SEQ ID NO: 138158 - DNA, 22 bp, synthetic construct
  misc_feature 1..22: note = chemically synthesized
  source 1..22: mol_type = other DNA
gatggttaactttgtgaagttg

SEQ ID NO: 138159 - DNA, 22 bp, synthetic construct
  misc_feature 1..22: note = chemically synthesized
  source 1..22: mol_type = other DNA
actttgtgaagttgaaaactgt

SEQ ID NO: 138160 - DNA, 22 bp, synthetic construct
  misc_feature 1..22: note = chemically synthesized
  source 1..22: mol_type = other DNA
tgtgaagttgaaaactgtggct

SEQ ID NO: 138161 - DNA, 22 bp, synthetic construct
  misc_feature 1..22: note = chemically synthesized
  source 1..22: mol_type = other DNA
gtgaagttgaaaactgtggctc

SEQ ID NO: 138162 - DNA, 22 bp, synthetic construct
  misc_feature 1..22: note = chemically synthesized
  source 1..22: mol_type = other DNA
tgaagttgaaaactgtggctct

SEQ ID NO: 138163 - DNA, 22 bp, synthetic construct
  misc_feature 1..22: note = chemically synthesized
  source 1..22: mol_type = other DNA
aaaactgtggctctctggttga

SEQ ID NO: 138164 - DNA, 22 bp, synthetic construct
  misc_feature 1..22: note = chemically synthesized
  source 1..22: mol_type = other DNA
tggctctctggttgactgttag

SEQ ID NO: 138165 - DNA, 22 bp, synthetic construct
  misc_feature 1..22: note = chemically synthesized
  source 1..22: mol_type = other DNA
tctggttgactgttagagttct

SEQ ID NO: 138166 - DNA, 22 bp, synthetic construct
  misc_feature 1..22: note = chemically synthesized
  source 1..22: mol_type = other DNA
tggttgactgttagagttctgg

SEQ ID NO: 138167 - DNA, 22 bp, synthetic construct
  misc_feature 1..22: note = chemically synthesized
  source 1..22: mol_type = other DNA
gttgactgttagagttctggca

SEQ ID NO: 138168 - DNA, 22 bp, synthetic construct
  misc_feature 1..22: note = chemically synthesized
  source 1..22: mol_type = other DNA
actgttagagttctggcacttg

SEQ ID NO: 138169 - DNA, 22 bp, synthetic construct
  misc_feature 1..22: note = chemically synthesized
  source 1..22: mol_type = other DNA
ttagagttctggcacttgtcac

SEQ ID NO: 138170 - DNA, 22 bp, synthetic construct
  misc_feature 1..22: note = chemically synthesized
  source 1..22: mol_type = other DNA
gagttctggcacttgtcactat

SEQ ID NO: 138171 - DNA, 22 bp, synthetic construct
  misc_feature 1..22: note = chemically synthesized
  source 1..22: mol_type = other DNA
tggcacttgtcactatgcctat

SEQ ID NO: 138172 - DNA, 22 bp, synthetic construct
  misc_feature 1..22: note = chemically synthesized
  source 1..22: mol_type = other DNA
gcacttgtcactatgcctatta

SEQ ID NO: 138173 - DNA, 22 bp, synthetic construct
  misc_feature 1..22: note = chemically synthesized
  source 1..22: mol_type = other DNA
gtcactatgcctattatttaac

SEQ ID NO: 138174 - DNA, 22 bp, synthetic construct
  misc_feature 1..22: note = chemically synthesized
  source 1..22: mol_type = other DNA
tcactatgcctattatttaaca

SEQ ID NO: 138175 - DNA, 22 bp, synthetic construct
  misc_feature 1..22: note = chemically synthesized
  source 1..22: mol_type = other DNA
tgcctattatttaacaaatgca

SEQ ID NO: 138176 - DNA, 22 bp, synthetic construct
  misc_feature 1..22: note = chemically synthesized
  source 1..22: mol_type = other DNA
ttatttaacaaatgcatgaatg

SEQ ID NO: 138177 - DNA, 22 bp, synthetic construct
  misc_feature 1..22: note = chemically synthesized
  source 1..22: mol_type = other DNA
tttaacaaatgcatgaatgctt

SEQ ID NO: 138178 - DNA, 22 bp, synthetic construct
  misc_feature 1..22: note = chemically synthesized
  source 1..22: mol_type = other DNA
aacaaatgcatgaatgcttcag

SEQ ID NO: 138179 - DNA, 22 bp, synthetic construct
  misc_feature 1..22: note = chemically synthesized
  source 1..22: mol_type = other DNA
acaaatgcatgaatgcttcaga

SEQ ID NO: 138180 - DNA, 22 bp, synthetic construct
  misc_feature 1..22: note = chemically synthesized
  source 1..22: mol_type = other DNA
cagaatatgggaatattatctt

SEQ ID NO: 138181 - DNA, 22 bp, synthetic construct
  misc_feature 1..22: note = chemically synthesized
  source 1..22: mol_type = other DNA
agaatatgggaatattatcttc

SEQ ID NO: 138182 - DNA, 22 bp, synthetic construct
  misc_feature 1..22: note = chemically synthesized
  source 1..22: mol_type = other DNA
tcttctggaatagggaatcaag

SEQ ID NO: 138183 - DNA, 22 bp, synthetic construct
  misc_feature 1..22: note = chemically synthesized
  source 1..22: mol_type = other DNA
ctggaatagggaatcaagttat

SEQ ID NO: 138184 - DNA, 22 bp, synthetic construct
  misc_feature 1..22: note = chemically synthesized
  source 1..22: mol_type = other DNA
tggaatagggaatcaagttata

SEQ ID NO: 138185 - DNA, 22 bp, synthetic construct
  misc_feature 1..22: note = chemically synthesized
  source 1..22: mol_type = other DNA
gaatagggaatcaagttatatt

SEQ ID NO: 138186 - DNA, 22 bp, synthetic construct
  misc_feature 1..22: note = chemically synthesized
  source 1..22: mol_type = other DNA
tattatgtaacccaggattaga

SEQ ID NO: 138187 - DNA, 22 bp, synthetic construct
  misc_feature 1..22: note = chemically synthesized
  source 1..22: mol_type = other DNA
tgtaacccaggattagaagatt

SEQ ID NO: 138188 - DNA, 22 bp, synthetic construct
  misc_feature 1..22: note = chemically synthesized
  source 1..22: mol_type = other DNA
gaagattcttctgtgtgtaaga

SEQ ID NO: 138189 - DNA, 22 bp, synthetic construct
  misc_feature 1..22: note = chemically synthesized
  source 1..22: mol_type = other DNA
ttctgtgtgtaagaatttcata

SEQ ID NO: 138190 - DNA, 22 bp, synthetic construct
  misc_feature 1..22: note = chemically synthesized
  source 1..22: mol_type = other DNA
ctgtgtgtaagaatttcataaa

SEQ ID NO: 138191 - DNA, 22 bp, synthetic construct
  misc_feature 1..22: note = chemically synthesized
  source 1..22: mol_type = other DNA
tgtgtgtaagaatttcataaac

SEQ ID NO: 138192 - DNA, 22 bp, synthetic construct
  misc_feature 1..22: note = chemically synthesized
  source 1..22: mol_type = other DNA
tgtgtaagaatttcataaacat

SEQ ID NO: 138193 - DNA, 22 bp, synthetic construct
  misc_feature 1..22: note = chemically synthesized
  source 1..22: mol_type = other DNA
cataaacattaagctgtctagc

SEQ ID NO: 138194 - DNA, 22 bp, synthetic construct
  misc_feature 1..22: note = chemically synthesized
  source 1..22: mol_type = other DNA
ataaacattaagctgtctagca

SEQ ID NO: 138195 - DNA, 22 bp, synthetic construct
  misc_feature 1..22: note = chemically synthesized
  source 1..22: mol_type = other DNA
agctgtctagcaaaagcaaggg

SEQ ID NO: 138196 - DNA, 22 bp, synthetic construct
  misc_feature 1..22: note = chemically synthesized
  source 1..22: mol_type = other DNA
tctagcaaaagcaagggcttgg

SEQ ID NO: 138197 - DNA, 22 bp, synthetic construct
  misc_feature 1..22: note = chemically synthesized
  source 1..22: mol_type = other DNA
gcaaaagcaagggcttggaaaa

SEQ ID NO: 138198 - DNA, 22 bp, synthetic construct
  misc_feature 1..22: note = chemically synthesized
  source 1..22: mol_type = other DNA
ggaaaatctgtgagctcctcac

SEQ ID NO: 138199 - DNA, 22 bp, synthetic construct
  misc_feature 1..22: note = chemically synthesized
  source 1..22: mol_type = other DNA
gaaaatctgtgagctcctcacc

SEQ ID NO: 138200 - DNA, 22 bp, synthetic construct
  misc_feature 1..22: note = chemically synthesized
  source 1..22: mol_type = other DNA
tgagctcctcaccatatagaaa

SEQ ID NO: 138201 - DNA, 22 bp, synthetic construct
  misc_feature 1..22: note = chemically synthesized
  source 1..22: mol_type = other DNA
ctcaccatatagaaagctttta

SEQ ID NO: 138202 - DNA, 22 bp, synthetic construct
  misc_feature 1..22: note = chemically synthesized
  source 1..22: mol_type = other DNA
accatatagaaagcttttaacc

SEQ ID NO: 138203 - DNA, 22 bp, synthetic construct
  misc_feature 1..22: note = chemically synthesized
  source 1..22: mol_type = other DNA
ttaacccatcattgaataaatc

SEQ ID NO: 138204 - DNA, 22 bp, synthetic construct
  misc_feature 1..22: note = chemically synthesized
  source 1..22: mol_type = other DNA
taacccatcattgaataaatcc

SEQ ID NO: 138205 - DNA, 22 bp, synthetic construct
  misc_feature 1..22: note = chemically synthesized
  source 1..22: mol_type = other DNA
aacccatcattgaataaatccc

SEQ ID NO: 138206 - DNA, 22 bp, synthetic construct
  misc_feature 1..22: note = chemically synthesized
  source 1..22: mol_type = other DNA
acccatcattgaataaatccct

SEQ ID NO: 138207 - DNA, 22 bp, synthetic construct
  misc_feature 1..22: note = chemically synthesized
  source 1..22: mol_type = other DNA
aataaatccctataggggattt

SEQ ID NO: 138208 - DNA, 22 bp, synthetic construct
  misc_feature 1..22: note = chemically synthesized
  source 1..22: mol_type = other DNA
taggggatttctaccctgagca

SEQ ID NO: 138209 - DNA, 22 bp, synthetic construct
  misc_feature 1..22: note = chemically synthesized
  source 1..22: mol_type = other DNA
ctaccctgagcaaaaggctggt

SEQ ID NO: 138210 - DNA, 22 bp, synthetic construct
  misc_feature 1..22: note = chemically synthesized
  source 1..22: mol_type = other DNA
taccctgagcaaaaggctggtc

SEQ ID NO: 138211 - DNA, 22 bp, synthetic construct
  misc_feature 1..22: note = chemically synthesized
  source 1..22: mol_type = other DNA
ccctgagcaaaaggctggtctt

SEQ ID NO: 138212 - DNA, 22 bp, synthetic construct
  misc_feature 1..22: note = chemically synthesized
  source 1..22: mol_type = other DNA
agcaaaaggctggtcttgatta

SEQ ID NO: 138213 - DNA, 22 bp, synthetic construct
  misc_feature 1..22: note = chemically synthesized
  source 1..22: mol_type = other DNA
gtcttgattaattcccaaactc

SEQ ID NO: 138214 - DNA, 22 bp, synthetic construct
  misc_feature 1..22: note = chemically synthesized
  source 1..22: mol_type = other DNA
gattaattcccaaactcatata

SEQ ID NO: 138215 - DNA, 22 bp, synthetic construct
  misc_feature 1..22: note = chemically synthesized
  source 1..22: mol_type = other DNA
attaattcccaaactcatatag

SEQ ID NO: 138216 - DNA, 22 bp, synthetic construct
  misc_feature 1..22: note = chemically synthesized
  source 1..22: mol_type = other DNA
attcccaaactcatatagctct

SEQ ID NO: 138217 - DNA, 22 bp, synthetic construct
  misc_feature 1..22: note = chemically synthesized
  source 1..22: mol_type = other DNA
ccaaactcatatagctctgaga

SEQ ID NO: 138218 - DNA, 22 bp, synthetic construct
  misc_feature 1..22: note = chemically synthesized
  source 1..22: mol_type = other DNA
atatagctctgagaaagtctat

SEQ ID NO: 138219 - DNA, 22 bp, synthetic construct
  misc_feature 1..22: note = chemically synthesized
  source 1..22: mol_type = other DNA
tgagaaagtctatgctgttaac

SEQ ID NO: 138220 - DNA, 22 bp, synthetic construct
  misc_feature 1..22: note = chemically synthesized
  source 1..22: mol_type = other DNA
agaaagtctatgctgttaacgt

SEQ ID NO: 138221 - DNA, 22 bp, synthetic construct
  misc_feature 1..22: note = chemically synthesized
  source 1..22: mol_type = other DNA
tgctgttaacgttttcttgtct

SEQ ID NO: 138222 - DNA, 22 bp, synthetic construct
  misc_feature 1..22: note = chemically synthesized
  source 1..22: mol_type = other DNA
ttaacgttttcttgtctgctac

SEQ ID NO: 138223 - DNA, 22 bp, synthetic construct
  misc_feature 1..22: note = chemically synthesized
  source 1..22: mol_type = other DNA
acgttttcttgtctgctacccc

SEQ ID NO: 138224 - DNA, 22 bp, synthetic construct
  misc_feature 1..22: note = chemically synthesized
  source 1..22: mol_type = other DNA
tcttgtctgctaccccatcata

SEQ ID NO: 138225 - DNA, 22 bp, synthetic construct
  misc_feature 1..22: note = chemically synthesized
  source 1..22: mol_type = other DNA
cttgtctgctaccccatcatat

SEQ ID NO: 138226 - DNA, 22 bp, synthetic construct
  misc_feature 1..22: note = chemically synthesized
  source 1..22: mol_type = other DNA
ttgtctgctaccccatcatatg

SEQ ID NO: 138227 - DNA, 22 bp, synthetic construct
  misc_feature 1..22: note = chemically synthesized
  source 1..22: mol_type = other DNA
gtctgctaccccatcatatgca

SEQ ID NO: 138228 - DNA, 22 bp, synthetic construct
  misc_feature 1..22: note = chemically synthesized
  source 1..22: mol_type = other DNA
tctgctaccccatcatatgcac

SEQ ID NO: 138229 - DNA, 22 bp, synthetic construct
  misc_feature 1..22: note = chemically synthesized
  source 1..22: mol_type = other DNA
ctaccccatcatatgcacaaca

SEQ ID NO: 138230 - DNA, 22 bp, synthetic construct
  misc_feature 1..22: note = chemically synthesized
  source 1..22: mol_type = other DNA
ccccatcatatgcacaacaata

SEQ ID NO: 138231 - DNA, 22 bp, synthetic construct
  misc_feature 1..22: note = chemically synthesized
  source 1..22: mol_type = other DNA
ggcatgactgaaggctctctca

SEQ ID NO: 138232 - DNA, 22 bp, synthetic construct
  misc_feature 1..22: note = chemically synthesized
  source 1..22: mol_type = other DNA
aaggctctctcataattcttgg

SEQ ID NO: 138233 - DNA, 22 bp, synthetic construct
  misc_feature 1..22: note = chemically synthesized
  source 1..22: mol_type = other DNA
tctcataattcttggttgcatg

SEQ ID NO: 138234 - DNA, 22 bp, synthetic construct
  misc_feature 1..22: note = chemically synthesized
  source 1..22: mol_type = other DNA
tcataattcttggttgcatgaa

SEQ ID NO: 138235 - DNA, 22 bp, synthetic construct
  misc_feature 1..22: note = chemically synthesized
  source 1..22: mol_type = other DNA
ataattcttggttgcatgaatc

SEQ ID NO: 138236 - DNA, 22 bp, synthetic construct
  misc_feature 1..22: note = chemically synthesized
  source 1..22: mol_type = other DNA
ttggttgcatgaatcagattat

SEQ ID NO: 138237 - DNA, 22 bp, synthetic construct
  misc_feature 1..22: note = chemically synthesized
  source 1..22: mol_type = other DNA
ggttgcatgaatcagattatca

SEQ ID NO: 138238 - DNA, 22 bp, synthetic construct
  misc_feature 1..22: note = chemically synthesized
  source 1..22: mol_type = other DNA
gttgcatgaatcagattatcaa

SEQ ID NO: 138239 - DNA, 22 bp, synthetic construct
  misc_feature 1..22: note = chemically synthesized
  source 1..22: mol_type = other DNA
catgaatcagattatcaacaga

SEQ ID NO: 138240 - DNA, 22 bp, synthetic construct
  misc_feature 1..22: note = chemically synthesized
  source 1..22: mol_type = other DNA
tcaacagaaatgttgagacaaa

SEQ ID NO: 138241 - DNA, 22 bp, synthetic construct
  misc_feature 1..22: note = chemically synthesized
  source 1..22: mol_type = other DNA
agacaaactatggggaagcagg

SEQ ID NO: 138242 - DNA, 22 bp, synthetic construct
  misc_feature 1..22: note = chemically synthesized
  source 1..22: mol_type = other DNA
tggggaagcagggtatgaaaga

SEQ ID NO: 138243 - DNA, 22 bp, synthetic construct
  misc_feature 1..22: note = chemically synthesized
  source 1..22: mol_type = other DNA
tgaatgaaatggaaaccgcaat

SEQ ID NO: 138244 - DNA, 22 bp, synthetic construct
  misc_feature 1..22: note = chemically synthesized
  source 1..22: mol_type = other DNA
aatgaaatggaaaccgcaatgc

SEQ ID NO: 138245 - DNA, 22 bp, synthetic construct
  misc_feature 1..22: note = chemically synthesized
  source 1..22: mol_type = other DNA
cctgcccattcagggctccagc

SEQ ID NO: 138246 - DNA, 22 bp, synthetic construct
  misc_feature 1..22: note = chemically synthesized
  source 1..22: mol_type = other DNA
ctgcccattcagggctccagca

SEQ ID NO: 138247 - DNA, 22 bp, synthetic construct
  misc_feature 1..22: note = chemically synthesized
  source 1..22: mol_type = other DNA
cccattcagggctccagcatgt

SEQ ID NO: 138248 - DNA, 22 bp, synthetic construct
  misc_feature 1..22: note = chemically synthesized
  source 1..22: mol_type = other DNA
agggctccagcatgtagaaatc

SEQ ID NO: 138249 - DNA, 22 bp, synthetic construct
  misc_feature 1..22: note = chemically synthesized
  source 1..22: mol_type = other DNA
cagcatgtagaaatctggggct

SEQ ID NO: 138250 - DNA, 22 bp, synthetic construct
  misc_feature 1..22: note = chemically synthesized
  source 1..22: mol_type = other DNA
gggctttgtgaagactggctta

SEQ ID NO: 138251 - DNA, 22 bp, synthetic construct
  misc_feature 1..22: note = chemically synthesized
  source 1..22: mol_type = other DNA
tgtgaagactggcttaaaatca

SEQ ID NO: 138252 - DNA, 22 bp, synthetic construct
  misc_feature 1..22: note = chemically synthesized
  source 1..22: mol_type = other DNA
gtgaagactggcttaaaatcag

SEQ ID NO: 138253 - DNA, 22 bp, synthetic construct
  misc_feature 1..22: note = chemically synthesized
  source 1..22: mol_type = other DNA
tgaagactggcttaaaatcaga

SEQ ID NO: 138254 - DNA, 22 bp, synthetic construct
  misc_feature 1..22: note = chemically synthesized
  source 1..22: mol_type = other DNA
gcttaaaatcagaagccccatt

SEQ ID NO: 138255 - DNA, 22 bp, synthetic construct
  misc_feature 1..22: note = chemically synthesized
  source 1..22: mol_type = other DNA
aaaatcagaagccccattggat

SEQ ID NO: 138256 - DNA, 22 bp, synthetic construct
  misc_feature 1..22: note = chemically synthesized
  source 1..22: mol_type = other DNA
aaatcagaagccccattggata

SEQ ID NO: 138257 - DNA, 22 bp, synthetic construct
  misc_feature 1..22: note = chemically synthesized
  source 1..22: mol_type = other DNA
gataagagtagggaagaaccta

SEQ ID NO: 138258 - DNA, 22 bp, synthetic construct
  misc_feature 1..22: note = chemically synthesized
  source 1..22: mol_type = other DNA
gagcctacgctgagcaggtttc

SEQ ID NO: 138259 - DNA, 22 bp, synthetic construct
  misc_feature 1..22: note = chemically synthesized
  source 1..22: mol_type = other DNA
cgctgagcaggtttccttcatg

SEQ ID NO: 138260 - DNA, 22 bp, synthetic construct
  misc_feature 1..22: note = chemically synthesized
  source 1..22: mol_type = other DNA
agcaggtttccttcatgtgaca

SEQ ID NO: 138261 - DNA, 22 bp, synthetic construct
  misc_feature 1..22: note = chemically synthesized
  source 1..22: mol_type = other DNA
ccttcatgtgacagggagcctc

SEQ ID NO: 138262 - DNA, 22 bp, synthetic construct
  misc_feature 1..22: note = chemically synthesized
  source 1..22: mol_type = other DNA
cttcatgtgacagggagcctcc

SEQ ID NO: 138263 - DNA, 22 bp, synthetic construct
  misc_feature 1..22: note = chemically synthesized
  source 1..22: mol_type = other DNA
catgtgacagggagcctcctgc

SEQ ID NO: 138264 - DNA, 22 bp, synthetic construct
  misc_feature 1..22: note = chemically synthesized
  source 1..22: mol_type = other DNA
atgtgacagggagcctcctgcc

SEQ ID NO: 138265 - DNA, 22 bp, synthetic construct
  misc_feature 1..22: note = chemically synthesized
  source 1..22: mol_type = other DNA
ctgccccgaacttccagggatc

SEQ ID NO: 138266 - DNA, 22 bp, synthetic construct
  misc_feature 1..22: note = chemically synthesized
  source 1..22: mol_type = other DNA
ccccgaacttccagggatcctc

SEQ ID NO: 138267 - DNA, 22 bp, synthetic construct
  misc_feature 1..22: note = chemically synthesized
  source 1..22: mol_type = other DNA
ccagggatcctctcttaagtgt

SEQ ID NO: 138268 - DNA, 22 bp, synthetic construct
  misc_feature 1..22: note = chemically synthesized
  source 1..22: mol_type = other DNA
cagggatcctctcttaagtgtt

SEQ ID NO: 138269 - DNA, 22 bp, synthetic construct
  misc_feature 1..22: note = chemically synthesized
  source 1..22: mol_type = other DNA
tcttaagtgtttcctgctggaa

SEQ ID NO: 138270 - DNA, 22 bp, synthetic construct
  misc_feature 1..22: note = chemically synthesized
  source 1..22: mol_type = other DNA
ttaagtgtttcctgctggaatc

SEQ ID NO: 138271 - DNA, 22 bp, synthetic construct
  misc_feature 1..22: note = chemically synthesized
  source 1..22: mol_type = other DNA
aagtgtttcctgctggaatctc

SEQ ID NO: 138272 - DNA, 22 bp, synthetic construct
  misc_feature 1..22: note = chemically synthesized
  source 1..22: mol_type = other DNA
agtgtttcctgctggaatctcc

SEQ ID NO: 138273 - DNA, 22 bp, synthetic construct
  misc_feature 1..22: note = chemically synthesized
  source 1..22: mol_type = other DNA
cctgctggaatctcctcacttc

SEQ ID NO: 138274 - DNA, 22 bp, synthetic construct
  misc_feature 1..22: note = chemically synthesized
  source 1..22: mol_type = other DNA
ctgctggaatctcctcacttct

SEQ ID NO: 138275 - DNA, 22 bp, synthetic construct
  misc_feature 1..22: note = chemically synthesized
  source 1..22: mol_type = other DNA
ctggaatctcctcacttctatc

SEQ ID NO: 138276 - DNA, 22 bp, synthetic construct
  misc_feature 1..22: note = chemically synthesized
  source 1..22: mol_type = other DNA
gaatctcctcacttctatctgg

SEQ ID NO: 138277 - DNA, 22 bp, synthetic construct
  misc_feature 1..22: note = chemically synthesized
  source 1..22: mol_type = other DNA
ctcacttctatctggaaatggt

SEQ ID NO: 138278 - DNA, 22 bp, synthetic construct
  misc_feature 1..22: note = chemically synthesized
  source 1..22: mol_type = other DNA
acttctatctggaaatggtttc

SEQ ID NO: 138279 - DNA, 22 bp, synthetic construct
  misc_feature 1..22: note = chemically synthesized
  source 1..22: mol_type = other DNA
ctatctggaaatggtttctcca

SEQ ID NO: 138280 - DNA, 22 bp, synthetic construct
  misc_feature 1..22: note = chemically synthesized
  source 1..22: mol_type = other DNA
tatctggaaatggtttctccac

SEQ ID NO: 138281 - DNA, 22 bp, synthetic construct
  misc_feature 1..22: note = chemically synthesized
  source 1..22: mol_type = other DNA
tctggaaatggtttctccacag

SEQ ID NO: 138282 - DNA, 22 bp, synthetic construct
  misc_feature 1..22: note = chemically synthesized
  source 1..22: mol_type = other DNA
gaaatggtttctccacagtcca

SEQ ID NO: 138283 - DNA, 22 bp, synthetic construct
  misc_feature 1..22: note = chemically synthesized
  source 1..22: mol_type = other DNA
ctccacagtccagcccctggct

SEQ ID NO: 138284 - DNA, 22 bp, synthetic construct
  misc_feature 1..22: note = chemically synthesized
  source 1..22: mol_type = other DNA
tccacagtccagcccctggcta

SEQ ID NO: 138285 - DNA, 22 bp, synthetic construct
  misc_feature 1..22: note = chemically synthesized
  source 1..22: mol_type = other DNA
cacagtccagcccctggctagt

SEQ ID NO: 138286 - DNA, 22 bp, synthetic construct
  misc_feature 1..22: note = chemically synthesized
  source 1..22: mol_type = other DNA
gctagttgaaagagttacccat

SEQ ID NO: 138287 - DNA, 22 bp, synthetic construct
  misc_feature 1..22: note = chemically synthesized
  source 1..22: mol_type = other DNA
gttgaaagagttacccatgcag

SEQ ID NO: 138288 - DNA, 22 bp, synthetic construct
  misc_feature 1..22: note = chemically synthesized
  source 1..22: mol_type = other DNA
aaagagttacccatgcagaggc

SEQ ID NO: 138289 - DNA, 22 bp, synthetic construct
  misc_feature 1..22: note = chemically synthesized
  source 1..22: mol_type = other DNA
cccatgcagaggccctcctagc

SEQ ID NO: 138290 - DNA, 22 bp, synthetic construct
  misc_feature 1..22: note = chemically synthesized
  source 1..22: mol_type = other DNA
ctagcatccagagactagtgct

SEQ ID NO: 138291 - DNA, 22 bp, synthetic construct
  misc_feature 1..22: note = chemically synthesized
  source 1..22: mol_type = other DNA
gcatccagagactagtgcttag

SEQ ID NO: 138292 - DNA, 22 bp, synthetic construct
  misc_feature 1..22: note = chemically synthesized
  source 1..22: mol_type = other DNA
gtgcttagattcctactttcag

SEQ ID NO: 138293 - DNA, 22 bp, synthetic construct
  misc_feature 1..22: note = chemically synthesized
  source 1..22: mol_type = other DNA
agattcctactttcagcgttgg

SEQ ID NO: 138294 - DNA, 22 bp, synthetic construct
  misc_feature 1..22: note = chemically synthesized
  source 1..22: mol_type = other DNA
gattcctactttcagcgttgga

SEQ ID NO: 138295 - DNA, 22 bp, synthetic construct
  misc_feature 1..22: note = chemically synthesized
  source 1..22: mol_type = other DNA
ctactttcagcgttggacaacc

SEQ ID NO: 138296 - DNA, 22 bp, synthetic construct
  misc_feature 1..22: note = chemically synthesized
  source 1..22: mol_type = other DNA
ctttcagcgttggacaacctgg

SEQ ID NO: 138297 - DNA, 22 bp, synthetic construct
  misc_feature 1..22: note = chemically synthesized
  source 1..22: mol_type = other DNA
tcagcgttggacaacctggatc

SEQ ID NO: 138298 - DNA, 22 bp, synthetic construct
  misc_feature 1..22: note = chemically synthesized
  source 1..22: mol_type = other DNA
cagcgttggacaacctggatcc

SEQ ID NO: 138299 - DNA, 22 bp, synthetic construct
  misc_feature 1..22: note = chemically synthesized
  source 1..22: mol_type = other DNA
agcgttggacaacctggatcca

SEQ ID NO: 138300 - DNA, 22 bp, synthetic construct
  misc_feature 1..22: note = chemically synthesized
  source 1..22: mol_type = other DNA
gacaacctggatccacttgccc

SEQ ID NO: 138301 - DNA, 22 bp, synthetic construct
  misc_feature 1..22: note = chemically synthesized
  source 1..22: mol_type = other DNA
gatccacttgcccagtgttctt

SEQ ID NO: 138302 - DNA, 22 bp, synthetic construct
  misc_feature 1..22: note = chemically synthesized
  source 1..22: mol_type = other DNA
gcccagtgttcttccttagttc

SEQ ID NO: 138303 - DNA, 22 bp, synthetic construct
  misc_feature 1..22: note = chemically synthesized
  source 1..22: mol_type = other DNA
cccagtgttcttccttagttcc

SEQ ID NO: 138304 - DNA, 22 bp, synthetic construct
  misc_feature 1..22: note = chemically synthesized
  source 1..22: mol_type = other DNA
ttccttagttcctaccttcgac

SEQ ID NO: 138305 - DNA, 22 bp, synthetic construct
  misc_feature 1..22: note = chemically synthesized
  source 1..22: mol_type = other DNA
ccttagttcctaccttcgacct

SEQ ID NO: 138306 - DNA, 22 bp, synthetic construct
  misc_feature 1..22: note = chemically synthesized
  source 1..22: mol_type = other DNA
cttagttcctaccttcgacctt

SEQ ID NO: 138307 - DNA, 22 bp, synthetic construct
  misc_feature 1..22: note = chemically synthesized
  source 1..22: mol_type = other DNA
agttcctaccttcgaccttgat

SEQ ID NO: 138308 - DNA, 22 bp, synthetic construct
  misc_feature 1..22: note = chemically synthesized
  source 1..22: mol_type = other DNA
gttcctaccttcgaccttgatc

SEQ ID NO: 138309 - DNA, 22 bp, synthetic construct
  misc_feature 1..22: note = chemically synthesized
  source 1..22: mol_type = other DNA
ctaccttcgaccttgatcctcc

SEQ ID NO: 138310 - DNA, 22 bp, synthetic construct
  misc_feature 1..22: note = chemically synthesized
  source 1..22: mol_type = other DNA
ccttcgaccttgatcctccttt

SEQ ID NO: 138311 - DNA, 22 bp, synthetic construct
  misc_feature 1..22: note = chemically synthesized
  source 1..22: mol_type = other DNA
cgaccttgatcctcctttatct

SEQ ID NO: 138312 - DNA, 22 bp, synthetic construct
  misc_feature 1..22: note = chemically synthesized
  source 1..22: mol_type = other DNA
gaccttgatcctcctttatctt

SEQ ID NO: 138313 - DNA, 22 bp, synthetic construct
  misc_feature 1..22: note = chemically synthesized
  source 1..22: mol_type = other DNA
gatcctcctttatcttcctgaa

SEQ ID NO: 138314 - DNA, 22 bp, synthetic construct
  misc_feature 1..22: note = chemically synthesized
  source 1..22: mol_type = other DNA
atcctcctttatcttcctgaac

SEQ ID NO: 138315 - DNA, 22 bp, synthetic construct
  misc_feature 1..22: note = chemically synthesized
  source 1..22: mol_type = other DNA
ctttatcttcctgaaccctgct

SEQ ID NO: 138316 - DNA, 22 bp, synthetic construct
  misc_feature 1..22: note = chemically synthesized
  source 1..22: mol_type = other DNA
tatcttcctgaaccctgctgag

SEQ ID NO: 138317 - DNA, 22 bp, synthetic construct
  misc_feature 1..22: note = chemically synthesized
  source 1..22: mol_type = other DNA
atcttcctgaaccctgctgaga

SEQ ID NO: 138318 - DNA, 22 bp, synthetic construct
  misc_feature 1..22: note = chemically synthesized
  source 1..22: mol_type = other DNA
tcttcctgaaccctgctgagat

SEQ ID NO: 138319 - DNA, 22 bp, synthetic construct
  misc_feature 1..22: note = chemically synthesized
  source 1..22: mol_type = other DNA
cctgaaccctgctgagatgatc

SEQ ID NO: 138320 - DNA, 22 bp, synthetic construct
  misc_feature 1..22: note = chemically synthesized
  source 1..22: mol_type = other DNA
ctgaaccctgctgagatgatct

SEQ ID NO: 138321 - DNA, 22 bp, synthetic construct
  misc_feature 1..22: note = chemically synthesized
  source 1..22: mol_type = other DNA
aaccctgctgagatgatctatg

SEQ ID NO: 138322 - DNA, 22 bp, synthetic construct
  misc_feature 1..22: note = chemically synthesized
  source 1..22: mol_type = other DNA
ctgagatgatctatgtggggag

SEQ ID NO: 138323 - DNA, 22 bp, synthetic construct
  misc_feature 1..22: note = chemically synthesized
  source 1..22: mol_type = other DNA
agatgatctatgtggggagaat

SEQ ID NO: 138324 - DNA, 22 bp, synthetic construct
  misc_feature 1..22: note = chemically synthesized
  source 1..22: mol_type = other DNA
tgtggggagaatggcttctttg

SEQ ID NO: 138325 - DNA, 22 bp, synthetic construct
  misc_feature 1..22: note = chemically synthesized
  source 1..22: mol_type = other DNA
ctttgagaaacatcttcttcgt

SEQ ID NO: 138326 - DNA, 22 bp, synthetic construct
  misc_feature 1..22: note = chemically synthesized
  source 1..22: mol_type = other DNA
tttgagaaacatcttcttcgtt

SEQ ID NO: 138327 - DNA, 22 bp, synthetic construct
  misc_feature 1..22: note = chemically synthesized
  source 1..22: mol_type = other DNA
tgagaaacatcttcttcgttag

SEQ ID NO: 138328 - DNA, 22 bp, synthetic construct
  misc_feature 1..22: note = chemically synthesized
  source 1..22: mol_type = other DNA
gagaaacatcttcttcgttagt

SEQ ID NO: 138329 - DNA, 22 bp, synthetic construct
  misc_feature 1..22: note = chemically synthesized
  source 1..22: mol_type = other DNA
agaaacatcttcttcgttagtg

SEQ ID NO: 138330 - DNA, 22 bp, synthetic construct
  misc_feature 1..22: note = chemically synthesized
  source 1..22: mol_type = other DNA
cttcgttagtggcctgcccctc

SEQ ID NO: 138331 - DNA, 22 bp, synthetic construct
  misc_feature 1..22: note = chemically synthesized
  source 1..22: mol_type = other DNA
ttcgttagtggcctgcccctca

SEQ ID NO: 138332 - DNA, 22 bp, synthetic construct
  misc_feature 1..22: note = chemically synthesized
  source 1..22: mol_type = other DNA
cgttagtggcctgcccctcatt

SEQ ID NO: 138333 - DNA, 22 bp, synthetic construct
  misc_feature 1..22: note = chemically synthesized
  source 1..22: mol_type = other DNA
gttagtggcctgcccctcattc

SEQ ID NO: 138334 - DNA, 22 bp, synthetic construct
  misc_feature 1..22: note = chemically synthesized
  source 1..22: mol_type = other DNA
gtggcctgcccctcattcccac

SEQ ID NO: 138335 - DNA, 22 bp, synthetic construct
  misc_feature 1..22: note = chemically synthesized
  source 1..22: mol_type = other DNA
cccctcattcccactttaatat

SEQ ID NO: 138336 - DNA, 22 bp, synthetic construct
  misc_feature 1..22: note = chemically synthesized
  source 1..22: mol_type = other DNA
attcccactttaatatccagaa

SEQ ID NO: 138337 - DNA, 22 bp, synthetic construct
  misc_feature 1..22: note = chemically synthesized
  source 1..22: mol_type = other DNA
ccactttaatatccagaatcac

SEQ ID NO: 138338 - DNA, 22 bp, synthetic construct
  misc_feature 1..22: note = chemically synthesized
  source 1..22: mol_type = other DNA
taatatccagaatcactataag

SEQ ID NO: 138339 - DNA, 22 bp, synthetic construct
  misc_feature 1..22: note = chemically synthesized
  source 1..22: mol_type = other DNA
aatatccagaatcactataaga

SEQ ID NO: 138340 - DNA, 22 bp, synthetic construct
  misc_feature 1..22: note = chemically synthesized
  source 1..22: mol_type = other DNA
atatccagaatcactataagaa

SEQ ID NO: 138341 - DNA, 22 bp, synthetic construct
  misc_feature 1..22: note = chemically synthesized
  source 1..22: mol_type = other DNA
taagaagaatataataagagga

SEQ ID NO: 138342 - DNA, 22 bp, synthetic construct
  misc_feature 1..22: note = chemically synthesized
  source 1..22: mol_type = other DNA
ttattataggtaagggaaaatt

SEQ ID NO: 138343 - DNA, 22 bp, synthetic construct
  misc_feature 1..22: note = chemically synthesized
  source 1..22: mol_type = other DNA
attataggtaagggaaaattaa

SEQ ID NO: 138344 - DNA, 22 bp, synthetic construct
  misc_feature 1..22: note = chemically synthesized
  source 1..22: mol_type = other DNA
ttataggtaagggaaaattaag

SEQ ID NO: 138345 - DNA, 22 bp, synthetic construct
  misc_feature 1..22: note = chemically synthesized
  source 1..22: mol_type = other DNA
taggtaagggaaaattaagagg

SEQ ID NO: 138346 - DNA, 22 bp, synthetic construct
  misc_feature 1..22: note = chemically synthesized
  source 1..22: mol_type = other DNA
agaggcatacgtgatgggatga

SEQ ID NO: 138347 - DNA, 22 bp, synthetic construct
  misc_feature 1..22: note = chemically synthesized
  source 1..22: mol_type = other DNA
atggacgataaaatctactact

SEQ ID NO: 138348 - DNA, 22 bp, synthetic construct
  misc_feature 1..22: note = chemically synthesized
  source 1..22: mol_type = other DNA
ctactatttgttgagacctttt

SEQ ID NO: 138349 - DNA, 22 bp, synthetic construct
  misc_feature 1..22: note = chemically synthesized
  source 1..22: mol_type = other DNA
ctatttgttgagaccttttata

SEQ ID NO: 138350 - DNA, 22 bp, synthetic construct
  misc_feature 1..22: note = chemically synthesized
  source 1..22: mol_type = other DNA
tttgttgagaccttttatagtc

SEQ ID NO: 138351 - DNA, 22 bp, synthetic construct
  misc_feature 1..22: note = chemically synthesized
  source 1..22: mol_type = other DNA
gttgagaccttttatagtctaa

SEQ ID NO: 138352 - DNA, 22 bp, synthetic construct
  misc_feature 1..22: note = chemically synthesized
  source 1..22: mol_type = other DNA
ttgagaccttttatagtctaat

SEQ ID NO: 138353 - DNA, 22 bp, synthetic construct
  misc_feature 1..22: note = chemically synthesized
  source 1..22: mol_type = other DNA
agaccttttatagtctaatcaa

SEQ ID NO: 138354 - DNA, 22 bp, synthetic construct
  misc_feature 1..22: note = chemically synthesized
  source 1..22: mol_type = other DNA
ttatagtctaatcaattttgct

SEQ ID NO: 138355 - DNA, 22 bp, synthetic construct
  misc_feature 1..22: note = chemically synthesized
  source 1..22: mol_type = other DNA
tatagtctaatcaattttgcta

SEQ ID NO: 138356 - DNA, 22 bp, synthetic construct
  misc_feature 1..22: note = chemically synthesized
  source 1..22: mol_type = other DNA
atagtctaatcaattttgctat

SEQ ID NO: 138357 - DNA, 22 bp, synthetic construct
  misc_feature 1..22: note = chemically synthesized
  source 1..22: mol_type = other DNA
tagtctaatcaattttgctatt

SEQ ID NO: 138358 - DNA, 22 bp, synthetic construct
  misc_feature 1..22: note = chemically synthesized
  source 1..22: mol_type = other DNA
atcaattttgctattgttttcc

SEQ ID NO: 138359 - DNA, 22 bp, synthetic construct
  misc_feature 1..22: note = chemically synthesized
  source 1..22: mol_type = other DNA
tgctattgttttccatcctcac

SEQ ID NO: 138360 - DNA, 22 bp, synthetic construct
  misc_feature 1..22: note = chemically synthesized
  source 1..22: mol_type = other DNA
gctattgttttccatcctcacg

SEQ ID NO: 138361 - DNA, 22 bp, synthetic construct
  misc_feature 1..22: note = chemically synthesized
  source 1..22: mol_type = other DNA
ctattgttttccatcctcacgc

SEQ ID NO: 138362 - DNA, 22 bp, synthetic construct
  misc_feature 1..22: note = chemically synthesized
  source 1..22: mol_type = other DNA
ttgttttccatcctcacgctaa

SEQ ID NO: 138363 - DNA, 22 bp, synthetic construct
  misc_feature 1..22: note = chemically synthesized
  source 1..22: mol_type = other DNA
ttttccatcctcacgctaactc

SEQ ID NO: 138364 - DNA, 22 bp, synthetic construct
  misc_feature 1..22: note = chemically synthesized
  source 1..22: mol_type = other DNA
tccatcctcacgctaactccat

SEQ ID NO: 138365 - DNA, 22 bp, synthetic construct
  misc_feature 1..22: note = chemically synthesized
  source 1..22: mol_type = other DNA
ccatcctcacgctaactccata

SEQ ID NO: 138366 - DNA, 22 bp, synthetic construct
  misc_feature 1..22: note = chemically synthesized
  source 1..22: mol_type = other DNA
catcctcacgctaactccataa

SEQ ID NO: 138367 - DNA, 22 bp, synthetic construct
  misc_feature 1..22: note = chemically synthesized
  source 1..22: mol_type = other DNA
acgctaactccataaaaaaaca

SEQ ID NO: 138368 - DNA, 22 bp, synthetic construct
  misc_feature 1..22: note = chemically synthesized
  source 1..22: mol_type = other DNA
actccataaaaaaacactatta

SEQ ID NO: 138369 - DNA, 22 bp, synthetic construct
  misc_feature 1..22: note = chemically synthesized
  source 1..22: mol_type = other DNA
cataaaaaaacactattattat

SEQ ID NO: 138370 - DNA, 22 bp, synthetic construct
  misc_feature 1..22: note = chemically synthesized
  source 1..22: mol_type = other DNA
ttattatctttattttgccatg

SEQ ID NO: 138371 - DNA, 22 bp, synthetic construct
  misc_feature 1..22: note = chemically synthesized
  source 1..22: mol_type = other DNA
ttatctttattttgccatgaca

SEQ ID NO: 138372 - DNA, 22 bp, synthetic construct
  misc_feature 1..22: note = chemically synthesized
  source 1..22: mol_type = other DNA
tctttattttgccatgacaaga

SEQ ID NO: 138373 - DNA, 22 bp, synthetic construct
  misc_feature 1..22: note = chemically synthesized
  source 1..22: mol_type = other DNA
tattttgccatgacaagactga

SEQ ID NO: 138374 - DNA, 22 bp, synthetic construct
  misc_feature 1..22: note = chemically synthesized
  source 1..22: mol_type = other DNA
attttgccatgacaagactgag

SEQ ID NO: 138375 - DNA, 22 bp, synthetic construct
  misc_feature 1..22: note = chemically synthesized
  source 1..22: mol_type = other DNA
ttttgccatgacaagactgagc

SEQ ID NO: 138376 - DNA, 22 bp, synthetic construct
  misc_feature 1..22: note = chemically synthesized
  source 1..22: mol_type = other DNA
tgccatgacaagactgagctca

SEQ ID NO: 138377 - DNA, 22 bp, synthetic construct
  misc_feature 1..22: note = chemically synthesized
  source 1..22: mol_type = other DNA
gccatgacaagactgagctcag

SEQ ID NO: 138378 - DNA, 22 bp, synthetic construct
  misc_feature 1..22: note = chemically synthesized
  source 1..22: mol_type = other DNA
ccatgacaagactgagctcaga

SEQ ID NO: 138379 - DNA, 22 bp, synthetic construct
  misc_feature 1..22: note = chemically synthesized
  source 1..22: mol_type = other DNA
agctcagaagagtcaagcattt

SEQ ID NO: 138380 - DNA, 22 bp, synthetic construct
  misc_feature 1..22: note = chemically synthesized
  source 1..22: mol_type = other DNA
agaagagtcaagcatttgccta

SEQ ID NO: 138381 - DNA, 22 bp, synthetic construct
  misc_feature 1..22: note = chemically synthesized
  source 1..22: mol_type = other DNA
gcctaaggtcggacatgtcaga

SEQ ID NO: 138382 - DNA, 22 bp, synthetic construct
  misc_feature 1..22: note = chemically synthesized
  source 1..22: mol_type = other DNA
cctaaggtcggacatgtcagag

SEQ ID NO: 138383 - DNA, 22 bp, synthetic construct
  misc_feature 1..22: note = chemically synthesized
  source 1..22: mol_type = other DNA
aggtcggacatgtcagaggcag

SEQ ID NO: 138384 - DNA, 22 bp, synthetic construct
  misc_feature 1..22: note = chemically synthesized
  source 1..22: mol_type = other DNA
tgtgagactctgcagctactgc

SEQ ID NO: 138385 - DNA, 22 bp, synthetic construct
  misc_feature 1..22: note = chemically synthesized
  source 1..22: mol_type = other DNA
tgcagctactgctcatgggccc

SEQ ID NO: 138386 - DNA, 22 bp, synthetic construct
  misc_feature 1..22: note = chemically synthesized
  source 1..22: mol_type = other DNA
cagctactgctcatgggccctg

SEQ ID NO: 138387 - DNA, 22 bp, synthetic construct
  misc_feature 1..22: note = chemically synthesized
  source 1..22: mol_type = other DNA
ctgctcatgggccctgtgctgc

SEQ ID NO: 138388 - DNA, 22 bp, synthetic construct
  misc_feature 1..22: note = chemically synthesized
  source 1..22: mol_type = other DNA
ctcatgggccctgtgctgcact

SEQ ID NO: 138389 - DNA, 22 bp, synthetic construct
  misc_feature 1..22: note = chemically synthesized
  source 1..22: mol_type = other DNA
atgggccctgtgctgcactgat

SEQ ID NO: 138390 - DNA, 22 bp, synthetic construct
  misc_feature 1..22: note = chemically synthesized
  source 1..22: mol_type = other DNA
tgctgcactgatgaggaggatc

SEQ ID NO: 138391 - DNA, 22 bp, synthetic construct
  misc_feature 1..22: note = chemically synthesized
  source 1..22: mol_type = other DNA
cactgatgaggaggatcagatg

SEQ ID NO: 138392 - DNA, 22 bp, synthetic construct
  misc_feature 1..22: note = chemically synthesized
  source 1..22: mol_type = other DNA
atgaggaggatcagatggatgg

SEQ ID NO: 138393 - DNA, 22 bp, synthetic construct
  misc_feature 1..22: note = chemically synthesized
  source 1..22: mol_type = other DNA
tgtggataaaggagacagccat

SEQ ID NO: 138394 - DNA, 22 bp, synthetic construct
  misc_feature 1..22: note = chemically synthesized
  source 1..22: mol_type = other DNA
tggataaaggagacagccatga

SEQ ID NO: 138395 - DNA, 22 bp, synthetic construct
  misc_feature 1..22: note = chemically synthesized
  source 1..22: mol_type = other DNA
tgactgtaaatttgggagcagg

SEQ ID NO: 138396 - DNA, 22 bp, synthetic construct
  misc_feature 1..22: note = chemically synthesized
  source 1..22: mol_type = other DNA
taaatttgggagcaggagtctc

SEQ ID NO: 138397 - DNA, 22 bp, synthetic construct
  misc_feature 1..22: note = chemically synthesized
  source 1..22: mol_type = other DNA
gggagcaggagtctctaaggac

SEQ ID NO: 138398 - DNA, 22 bp, synthetic construct
  misc_feature 1..22: note = chemically synthesized
  source 1..22: mol_type = other DNA
ggagcaggagtctctaaggact

SEQ ID NO: 138399 - DNA, 22 bp, synthetic construct
  misc_feature 1..22: note = chemically synthesized
  source 1..22: mol_type = other DNA
taaggacttggatttcaaggaa

SEQ ID NO: 138400 - DNA, 22 bp, synthetic construct
  misc_feature 1..22: note = chemically synthesized
  source 1..22: mol_type = other DNA
aggacttggatttcaaggaatt

SEQ ID NO: 138401 - DNA, 22 bp, synthetic construct
  misc_feature 1..22: note = chemically synthesized
  source 1..22: mol_type = other DNA
ggatttcaaggaattttgactc

SEQ ID NO: 138402 - DNA, 22 bp, synthetic construct
  misc_feature 1..22: note = chemically synthesized
  source 1..22: mol_type = other DNA
gatttcaaggaattttgactca

SEQ ID NO: 138403 - DNA, 22 bp, synthetic construct
  misc_feature 1..22: note = chemically synthesized
  source 1..22: mol_type = other DNA
caaggaattttgactcagcaaa

SEQ ID NO: 138404 - DNA, 22 bp, synthetic construct
  misc_feature 1..22: note = chemically synthesized
  source 1..22: mol_type = other DNA
aaggaattttgactcagcaaac

SEQ ID NO: 138405 - DNA, 22 bp, synthetic construct
  misc_feature 1..22: note = chemically synthesized
  source 1..22: mol_type = other DNA
tgactcagcaaacacaagaccc

SEQ ID NO: 138406 - DNA, 22 bp, synthetic construct
  misc_feature 1..22: note = chemically synthesized
  source 1..22: mol_type = other DNA
gactcagcaaacacaagaccct

SEQ ID NO: 138407 - DNA, 22 bp, synthetic construct
  misc_feature 1..22: note = chemically synthesized
  source 1..22: mol_type = other DNA
actcagcaaacacaagaccctc

SEQ ID NO: 138408 - DNA, 22 bp, synthetic construct
  misc_feature 1..22: note = chemically synthesized
  source 1..22: mol_type = other DNA
agcaaacacaagaccctcacgg

SEQ ID NO: 138409 - DNA, 22 bp, synthetic construct
  misc_feature 1..22: note = chemically synthesized
  source 1..22: mol_type = other DNA
acggtgactttgcgagctggtg

SEQ ID NO: 138410 - DNA, 22 bp, synthetic construct
  misc_feature 1..22: note = chemically synthesized
  source 1..22: mol_type = other DNA
tgcgagctggtgtgccagatgt

SEQ ID NO: 138411 - DNA, 22 bp, synthetic construct
  misc_feature 1..22: note = chemically synthesized
  source 1..22: mol_type = other DNA
gcgagctggtgtgccagatgtg

SEQ ID NO: 138412 - DNA, 22 bp, synthetic construct
  misc_feature 1..22: note = chemically synthesized
  source 1..22: mol_type = other DNA
cgagctggtgtgccagatgtgt

SEQ ID NO: 138413 - DNA, 22 bp, synthetic construct
  misc_feature 1..22: note = chemically synthesized
  source 1..22: mol_type = other DNA
gtgtgccagatgtgtctatcag

SEQ ID NO: 138414 - DNA, 22 bp, synthetic construct
  misc_feature 1..22: note = chemically synthesized
  source 1..22: mol_type = other DNA
tcagaggttccagggagggtgg

SEQ ID NO: 138415 - DNA, 22 bp, synthetic construct
  misc_feature 1..22: note = chemically synthesized
  source 1..22: mol_type = other DNA
cagggagggtggggtggggtca

SEQ ID NO: 138416 - DNA, 22 bp, synthetic construct
  misc_feature 1..22: note = chemically synthesized
  source 1..22: mol_type = other DNA
gccaccagctatcagggcccag

SEQ ID NO: 138417 - DNA, 22 bp, synthetic construct
  misc_feature 1..22: note = chemically synthesized
  source 1..22: mol_type = other DNA
tcagggcccagatgggttatag

SEQ ID NO: 138418 - DNA, 22 bp, synthetic construct
  misc_feature 1..22: note = chemically synthesized
  source 1..22: mol_type = other DNA
taggctggcaggctcagatagg

SEQ ID NO: 138419 - DNA, 22 bp, synthetic construct
  misc_feature 1..22: note = chemically synthesized
  source 1..22: mol_type = other DNA
gcaggctcagataggtggttag

SEQ ID NO: 138420 - DNA, 22 bp, synthetic construct
  misc_feature 1..22: note = chemically synthesized
  source 1..22: mol_type = other DNA
agataggtggttaggtcaggtt

SEQ ID NO: 138421 - DNA, 22 bp, synthetic construct
  misc_feature 1..22: note = chemically synthesized
  source 1..22: mol_type = other DNA
ggtcaggttggtggtgctgggt

SEQ ID NO: 138422 - DNA, 22 bp, synthetic construct
  misc_feature 1..22: note = chemically synthesized
  source 1..22: mol_type = other DNA
gtggtgctgggtggagtccatg

SEQ ID NO: 138423 - DNA, 22 bp, synthetic construct
  misc_feature 1..22: note = chemically synthesized
  source 1..22: mol_type = other DNA
ggtggagtccatgactcccagg

SEQ ID NO: 138424 - DNA, 22 bp, synthetic construct
  misc_feature 1..22: note = chemically synthesized
  source 1..22: mol_type = other DNA
ccaggagccaggagagatagac

SEQ ID NO: 138425 - DNA, 22 bp, synthetic construct
  misc_feature 1..22: note = chemically synthesized
  source 1..22: mol_type = other DNA
ttcattctactactacatggga

SEQ ID NO: 138426 - DNA, 22 bp, synthetic construct
  misc_feature 1..22: note = chemically synthesized
  source 1..22: mol_type = other DNA
tcattctactactacatgggac

SEQ ID NO: 138427 - DNA, 22 bp, synthetic construct
  misc_feature 1..22: note = chemically synthesized
  source 1..22: mol_type = other DNA
cattctactactacatgggact

SEQ ID NO: 138428 - DNA, 22 bp, synthetic construct
  misc_feature 1..22: note = chemically synthesized
  source 1..22: mol_type = other DNA
attctactactacatgggactg

SEQ ID NO: 138429 - DNA, 22 bp, synthetic construct
  misc_feature 1..22: note = chemically synthesized
  source 1..22: mol_type = other DNA
tactactacatgggactgctcc

SEQ ID NO: 138430 - DNA, 22 bp, synthetic construct
  misc_feature 1..22: note = chemically synthesized
  source 1..22: mol_type = other DNA
ctactacatgggactgctcccc

SEQ ID NO: 138431 - DNA, 22 bp, synthetic construct
  misc_feature 1..22: note = chemically synthesized
  source 1..22: mol_type = other DNA
ctacatgggactgctcccctat

SEQ ID NO: 138432 - DNA, 22 bp, synthetic construct
  misc_feature 1..22: note = chemically synthesized
  source 1..22: mol_type = other DNA
catgggactgctcccctatacc

SEQ ID NO: 138433 - DNA, 22 bp, synthetic construct
  misc_feature 1..22: note = chemically synthesized
  source 1..22: mol_type = other DNA
ctcccctatacccccagctagg

SEQ ID NO: 138434 - DNA, 22 bp, synthetic construct
  misc_feature 1..22: note = chemically synthesized
  source 1..22: mol_type = other DNA
ccctatacccccagctaggggc

SEQ ID NO: 138435 - DNA, 22 bp, synthetic construct
  misc_feature 1..22: note = chemically synthesized
  source 1..22: mol_type = other DNA
tacccccagctaggggcaagtg

SEQ ID NO: 138436 - DNA, 22 bp, synthetic construct
  misc_feature 1..22: note = chemically synthesized
  source 1..22: mol_type = other DNA
ggggcaagtgccttgactccta

SEQ ID NO: 138437 - DNA, 22 bp, synthetic construct
  misc_feature 1..22: note = chemically synthesized
  source 1..22: mol_type = other DNA
gactcctatgttttcaggatca

SEQ ID NO: 138438 - DNA, 22 bp, synthetic construct
  misc_feature 1..22: note = chemically synthesized
  source 1..22: mol_type = other DNA
actcctatgttttcaggatcat

SEQ ID NO: 138439 - DNA, 22 bp, synthetic construct
  misc_feature 1..22: note = chemically synthesized
  source 1..22: mol_type = other DNA
ctatgttttcaggatcatcatc

SEQ ID NO: 138440 - DNA, 22 bp, synthetic construct
  misc_feature 1..22: note = chemically synthesized
  source 1..22: mol_type = other DNA
tgttttcaggatcatcatctat

SEQ ID NO: 138441 - DNA, 22 bp, synthetic construct
  misc_feature 1..22: note = chemically synthesized
  source 1..22: mol_type = other DNA
tcaggatcatcatctataaagt

SEQ ID NO: 138442 - DNA, 22 bp, synthetic construct
  misc_feature 1..22: note = chemically synthesized
  source 1..22: mol_type = other DNA
caggatcatcatctataaagta

SEQ ID NO: 138443 - DNA, 22 bp, synthetic construct
  misc_feature 1..22: note = chemically synthesized
  source 1..22: mol_type = other DNA
aggatcatcatctataaagtaa

SEQ ID NO: 138444 - DNA, 22 bp, synthetic construct
  misc_feature 1..22: note = chemically synthesized
  source 1..22: mol_type = other DNA
taaagtaagagtaataattgtg

SEQ ID NO: 138445 - DNA, 22 bp, synthetic construct
  misc_feature 1..22: note = chemically synthesized
  source 1..22: mol_type = other DNA
tgtctatctcatagggttatta

SEQ ID NO: 138446 - DNA, 22 bp, synthetic construct
  misc_feature 1..22: note = chemically synthesized
  source 1..22: mol_type = other DNA
tctcatagggttattatgagga

SEQ ID NO: 138447 - DNA, 22 bp, synthetic construct
  misc_feature 1..22: note = chemically synthesized
  source 1..22: mol_type = other DNA
atagggttattatgaggatcaa

SEQ ID NO: 138448 - DNA, 22 bp, synthetic construct
  misc_feature 1..22: note = chemically synthesized
  source 1..22: mol_type = other DNA
ttatgaggatcaaaggagatgc

SEQ ID NO: 138449 - DNA, 22 bp, synthetic construct
  misc_feature 1..22: note = chemically synthesized
  source 1..22: mol_type = other DNA
tgaggatcaaaggagatgcaca

SEQ ID NO: 138450 - DNA, 22 bp, synthetic construct
  misc_feature 1..22: note = chemically synthesized
  source 1..22: mol_type = other DNA
tctggaccagtggcctaacagt

SEQ ID NO: 138451 - DNA, 22 bp, synthetic construct
  misc_feature 1..22: note = chemically synthesized
  source 1..22: mol_type = other DNA
tggaccagtggcctaacagttc

SEQ ID NO: 138452 - DNA, 22 bp, synthetic construct
  misc_feature 1..22: note = chemically synthesized
  source 1..22: mol_type = other DNA
gaccagtggcctaacagttcag

SEQ ID NO: 138453 - DNA, 22 bp, synthetic construct
  misc_feature 1..22: note = chemically synthesized
  source 1..22: mol_type = other DNA
acagttcaggacagagctatgg

SEQ ID NO: 138454 - DNA, 22 bp, synthetic construct
  misc_feature 1..22: note = chemically synthesized
  source 1..22: mol_type = other DNA
aggacagagctatgggcttcct

SEQ ID NO: 138455 - DNA, 22 bp, synthetic construct
  misc_feature 1..22: note = chemically synthesized
  source 1..22: mol_type = other DNA
tgggcttcctatgtatgggtca

SEQ ID NO: 138456 - DNA, 22 bp, synthetic construct
  misc_feature 1..22: note = chemically synthesized
  source 1..22: mol_type = other DNA
cctatgtatgggtcagtggtct

SEQ ID NO: 138457 - DNA, 22 bp, synthetic construct
  misc_feature 1..22: note = chemically synthesized
  source 1..22: mol_type = other DNA
ctatgtatgggtcagtggtctc

SEQ ID NO: 138458 - DNA, 22 bp, synthetic construct
  misc_feature 1..22: note = chemically synthesized
  source 1..22: mol_type = other DNA
tgtatgggtcagtggtctcaat

SEQ ID NO: 138459 - DNA, 22 bp, synthetic construct
  misc_feature 1..22: note = chemically synthesized
  source 1..22: mol_type = other DNA
aatgtagcaggcaagttccaga

SEQ ID NO: 138460 - DNA, 22 bp, synthetic construct
  misc_feature 1..22: note = chemically synthesized
  source 1..22: mol_type = other DNA
cagaagatagcatcaaccactg

SEQ ID NO: 138461 - DNA, 22 bp, synthetic construct
  misc_feature 1..22: note = chemically synthesized
  source 1..22: mol_type = other DNA
ttagagatatactgccagtctc

SEQ ID NO: 138462 - DNA, 22 bp, synthetic construct
  misc_feature 1..22: note = chemically synthesized
  source 1..22: mol_type = other DNA
gagatatactgccagtctcaga

SEQ ID NO: 138463 - DNA, 22 bp, synthetic construct
  misc_feature 1..22: note = chemically synthesized
  source 1..22: mol_type = other DNA
ccagtctcagagcctgatgtta

SEQ ID NO: 138464 - DNA, 22 bp, synthetic construct
  misc_feature 1..22: note = chemically synthesized
  source 1..22: mol_type = other DNA
agagcctgatgttaatttagca

SEQ ID NO: 138465 - DNA, 22 bp, synthetic construct
  misc_feature 1..22: note = chemically synthesized
  source 1..22: mol_type = other DNA
atgttaatttagcaatgggctg

SEQ ID NO: 138466 - DNA, 22 bp, synthetic construct
  misc_feature 1..22: note = chemically synthesized
  source 1..22: mol_type = other DNA
atttagcaatgggctgggaccc

SEQ ID NO: 138467 - DNA, 22 bp, synthetic construct
  misc_feature 1..22: note = chemically synthesized
  source 1..22: mol_type = other DNA
agcaatgggctgggaccctcct

SEQ ID NO: 138468 - DNA, 22 bp, synthetic construct
  misc_feature 1..22: note = chemically synthesized
  source 1..22: mol_type = other DNA
gcaatgggctgggaccctcctc

SEQ ID NO: 138469 - DNA, 22 bp, synthetic construct
  misc_feature 1..22: note = chemically synthesized
  source 1..22: mol_type = other DNA
ggaccctcctccagtagaacct

SEQ ID NO: 138470 - DNA, 22 bp, synthetic construct
  misc_feature 1..22: note = chemically synthesized
  source 1..22: mol_type = other DNA
ctccagtagaaccttctaacca

SEQ ID NO: 138471 - DNA, 22 bp, synthetic construct
  misc_feature 1..22: note = chemically synthesized
  source 1..22: mol_type = other DNA
cagtagaaccttctaaccagct

SEQ ID NO: 138472 - DNA, 22 bp, synthetic construct
  misc_feature 1..22: note = chemically synthesized
  source 1..22: mol_type = other DNA
ctaaccagctgctgcagtcaaa

SEQ ID NO: 138473 - DNA, 22 bp, synthetic construct
  misc_feature 1..22: note = chemically synthesized
  source 1..22: mol_type = other DNA
taaccagctgctgcagtcaaag

SEQ ID NO: 138474 - DNA, 22 bp, synthetic construct
  misc_feature 1..22: note = chemically synthesized
  source 1..22: mol_type = other DNA
accagctgctgcagtcaaagtc

SEQ ID NO: 138475 - DNA, 22 bp, synthetic construct
  misc_feature 1..22: note = chemically synthesized
  source 1..22: mol_type = other DNA
ctgcagtcaaagtcgaatgcag

SEQ ID NO: 138476 - DNA, 22 bp, synthetic construct
  misc_feature 1..22: note = chemically synthesized
  source 1..22: mol_type = other DNA
cagtcaaagtcgaatgcagctg

SEQ ID NO: 138477 - DNA, 22 bp, synthetic construct
  misc_feature 1..22: note = chemically synthesized
  source 1..22: mol_type = other DNA
gttagactttttttaatgaaag

SEQ ID NO: 138478 - DNA, 22 bp, synthetic construct
  misc_feature 1..22: note = chemically synthesized
  source 1..22: mol_type = other DNA
gactttttttaatgaaagctta

SEQ ID NO: 138479 - DNA, 22 bp, synthetic construct
  misc_feature 1..22: note = chemically synthesized
  source 1..22: mol_type = other DNA
tttttaatgaaagcttagcttt

SEQ ID NO: 138480 - DNA, 22 bp, synthetic construct
  misc_feature 1..22: note = chemically synthesized
  source 1..22: mol_type = other DNA
ttttaatgaaagcttagctttc

SEQ ID NO: 138481 - DNA, 22 bp, synthetic construct
  misc_feature 1..22: note = chemically synthesized
  source 1..22: mol_type = other DNA
tttaatgaaagcttagctttca

SEQ ID NO: 138482 - DNA, 22 bp, synthetic construct
  misc_feature 1..22: note = chemically synthesized
  source 1..22: mol_type = other DNA
ttaatgaaagcttagctttcat

SEQ ID NO: 138483 - DNA, 22 bp, synthetic construct
  misc_feature 1..22: note = chemically synthesized
  source 1..22: mol_type = other DNA
taatgaaagcttagctttcatt

SEQ ID NO: 138484 - DNA, 22 bp, synthetic construct
  misc_feature 1..22: note = chemically synthesized
  source 1..22: mol_type = other DNA
aatgaaagcttagctttcatta

SEQ ID NO: 138485 - DNA, 22 bp, synthetic construct
  misc_feature 1..22: note = chemically synthesized
  source 1..22: mol_type = other DNA
atgaaagcttagctttcattaa

SEQ ID NO: 138486 - DNA, 22 bp, synthetic construct
  misc_feature 1..22: note = chemically synthesized
  source 1..22: mol_type = other DNA
agctttcattaaagattaagct

SEQ ID NO: 138487 - DNA, 22 bp, synthetic construct
  misc_feature 1..22: note = chemically synthesized
  source 1..22: mol_type = other DNA
gctttcattaaagattaagctc

SEQ ID NO: 138488 - DNA, 22 bp, synthetic construct
  misc_feature 1..22: note = chemically synthesized
  source 1..22: mol_type = other DNA
tcattaaagattaagctcctaa

SEQ ID NO: 138489 - DNA, 22 bp, synthetic construct
  misc_feature 1..22: note = chemically synthesized
  source 1..22: mol_type = other DNA
cattaaagattaagctcctaag

SEQ ID NO: 138490 - DNA, 22 bp, synthetic construct
  misc_feature 1..22: note = chemically synthesized
  source 1..22: mol_type = other DNA
attaaagattaagctcctaagc

SEQ ID NO: 138491 - DNA, 22 bp, synthetic construct
  misc_feature 1..22: note = chemically synthesized
  source 1..22: mol_type = other DNA
aagattaagctcctaagcaggg

SEQ ID NO: 138492 - DNA, 22 bp, synthetic construct
  misc_feature 1..22: note = chemically synthesized
  source 1..22: mol_type = other DNA
agctcctaagcagggcacagat

SEQ ID NO: 138493 - DNA, 22 bp, synthetic construct
  misc_feature 1..22: note = chemically synthesized
  source 1..22: mol_type = other DNA
ctaagcagggcacagatgaaat

SEQ ID NO: 138494 - DNA, 22 bp, synthetic construct
  misc_feature 1..22: note = chemically synthesized
  source 1..22: mol_type = other DNA
agcagggcacagatgaaattgt

SEQ ID NO: 138495 - DNA, 22 bp, synthetic construct
  misc_feature 1..22: note = chemically synthesized
  source 1..22: mol_type = other DNA
tctaacagcaactttgccatct

SEQ ID NO: 138496 - DNA, 22 bp, synthetic construct
  misc_feature 1..22: note = chemically synthesized
  source 1..22: mol_type = other DNA
acagcaactttgccatctaaaa

SEQ ID NO: 138497 - DNA, 22 bp, synthetic construct
  misc_feature 1..22: note = chemically synthesized
  source 1..22: mol_type = other DNA
tgccatctaaaaaaatctgact

SEQ ID NO: 138498 - DNA, 22 bp, synthetic construct
  misc_feature 1..22: note = chemically synthesized
  source 1..22: mol_type = other DNA
gccatctaaaaaaatctgactt

SEQ ID NO: 138499 - DNA, 22 bp, synthetic construct
  misc_feature 1..22: note = chemically synthesized
  source 1..22: mol_type = other DNA
ccatctaaaaaaatctgacttc

SEQ ID NO: 138500 - DNA, 22 bp, synthetic construct
  misc_feature 1..22: note = chemically synthesized
  source 1..22: mol_type = other DNA
aaaaaatctgacttcactggaa

SEQ ID NO: 138501 - DNA, 22 bp, synthetic construct
  misc_feature 1..22: note = chemically synthesized
  source 1..22: mol_type = other DNA
acttcactggaaacatggaagc

SEQ ID NO: 138502 - DNA, 22 bp, synthetic construct
  misc_feature 1..22: note = chemically synthesized
  source 1..22: mol_type = other DNA
cactggaaacatggaagcccaa

SEQ ID NO: 138503 - DNA, 22 bp, synthetic construct
  misc_feature 1..22: note = chemically synthesized
  source 1..22: mol_type = other DNA
actggaaacatggaagcccaag

SEQ ID NO: 138504 - DNA, 22 bp, synthetic construct
  misc_feature 1..22: note = chemically synthesized
  source 1..22: mol_type = other DNA
gaaacatggaagcccaaggttc

SEQ ID NO: 138505 - DNA, 22 bp, synthetic construct
  misc_feature 1..22: note = chemically synthesized
  source 1..22: mol_type = other DNA
tgaacatgagaaatttttagga

SEQ ID NO: 138506 - DNA, 22 bp, synthetic construct
  misc_feature 1..22: note = chemically synthesized
  source 1..22: mol_type = other DNA
aacatgagaaatttttaggaat

SEQ ID NO: 138507 - DNA, 22 bp, synthetic construct
  misc_feature 1..22: note = chemically synthesized
  source 1..22: mol_type = other DNA
ttaggaatctgcacaggagttg

SEQ ID NO: 138508 - DNA, 22 bp, synthetic construct
  misc_feature 1..22: note = chemically synthesized
  source 1..22: mol_type = other DNA
taggaatctgcacaggagttga

SEQ ID NO: 138509 - DNA, 22 bp, synthetic construct
  misc_feature 1..22: note = chemically synthesized
  source 1..22: mol_type = other DNA
aggaatctgcacaggagttgag

SEQ ID NO: 138510 - DNA, 22 bp, synthetic construct
  misc_feature 1..22: note = chemically synthesized
  source 1..22: mol_type = other DNA
ggaatctgcacaggagttgaga

SEQ ID NO: 138511 - DNA, 22 bp, synthetic construct
  misc_feature 1..22: note = chemically synthesized
  source 1..22: mol_type = other DNA
cacaggagttgagagggaaaca

SEQ ID NO: 138512 - DNA, 22 bp, synthetic construct
  misc_feature 1..22: note = chemically synthesized
  source 1..22: mol_type = other DNA
agagggaaacaagatggtgaag

SEQ ID NO: 138513 - DNA, 22 bp, synthetic construct
  misc_feature 1..22: note = chemically synthesized
  source 1..22: mol_type = other DNA
gaaaccacatgagagacacgag

SEQ ID NO: 138514 - DNA, 22 bp, synthetic construct
  misc_feature 1..22: note = chemically synthesized
  source 1..22: mol_type = other DNA
aggctggaggtaaatgaaagag

SEQ ID NO: 138515 - DNA, 22 bp, synthetic construct
  misc_feature 1..22: note = chemically synthesized
  source 1..22: mol_type = other DNA
ggctggaggtaaatgaaagaga

SEQ ID NO: 138516 - DNA, 22 bp, synthetic construct
  misc_feature 1..22: note = chemically synthesized
  source 1..22: mol_type = other DNA
gaggtaaatgaaagagaagtgg

SEQ ID NO: 138517 - DNA, 22 bp, synthetic construct
  misc_feature 1..22: note = chemically synthesized
  source 1..22: mol_type = other DNA
atacttactgaaatctttctat

SEQ ID NO: 138518 - DNA, 22 bp, synthetic construct
  misc_feature 1..22: note = chemically synthesized
  source 1..22: mol_type = other DNA
actgaaatctttctatatgtca

SEQ ID NO: 138519 - DNA, 22 bp, synthetic construct
  misc_feature 1..22: note = chemically synthesized
  source 1..22: mol_type = other DNA
ctgaaatctttctatatgtcag

SEQ ID NO: 138520 - DNA, 22 bp, synthetic construct
  misc_feature 1..22: note = chemically synthesized
  source 1..22: mol_type = other DNA
aaatctttctatatgtcaggtg

SEQ ID NO: 138521 - DNA, 22 bp, synthetic construct
  misc_feature 1..22: note = chemically synthesized
  source 1..22: mol_type = other DNA
tctatatgtcaggtgccatttt

SEQ ID NO: 138522 - DNA, 22 bp, synthetic construct
  misc_feature 1..22: note = chemically synthesized
  source 1..22: mol_type = other DNA
ctatatgtcaggtgccatttta

SEQ ID NO: 138523 - DNA, 22 bp, synthetic construct
  misc_feature 1..22: note = chemically synthesized
  source 1..22: mol_type = other DNA
tatatgtcaggtgccattttat

SEQ ID NO: 138524 - DNA, 22 bp, synthetic construct
  misc_feature 1..22: note = chemically synthesized
  source 1..22: mol_type = other DNA
tatgtcaggtgccattttatga

SEQ ID NO: 138525 - DNA, 22 bp, synthetic construct
  misc_feature 1..22: note = chemically synthesized
  source 1..22: mol_type = other DNA
tatgatatttaataatctcatt

SEQ ID NO: 138526 - DNA, 22 bp, synthetic construct
  misc_feature 1..22: note = chemically synthesized
  source 1..22: mol_type = other DNA
atgatatttaataatctcatta

SEQ ID NO: 138527 - DNA, 22 bp, synthetic construct
  misc_feature 1..22: note = chemically synthesized
  source 1..22: mol_type = other DNA
tgatatttaataatctcattac

SEQ ID NO: 138528 - DNA, 22 bp, synthetic construct
  misc_feature 1..22: note = chemically synthesized
  source 1..22: mol_type = other DNA
aataatctcattacatatggta

SEQ ID NO: 138529 - DNA, 22 bp, synthetic construct
  misc_feature 1..22: note = chemically synthesized
  source 1..22: mol_type = other DNA
ataatctcattacatatggtaa

SEQ ID NO: 138530 - DNA, 22 bp, synthetic construct
  misc_feature 1..22: note = chemically synthesized
  source 1..22: mol_type = other DNA
attacatatggtaattctgtga

SEQ ID NO: 138531 - DNA, 22 bp, synthetic construct
  misc_feature 1..22: note = chemically synthesized
  source 1..22: mol_type = other DNA
catatggtaattctgtgagata

SEQ ID NO: 138532 - DNA, 22 bp, synthetic construct
  misc_feature 1..22: note = chemically synthesized
  source 1..22: mol_type = other DNA
tgtgagatatgtattattgaac

SEQ ID NO: 138533 - DNA, 22 bp, synthetic construct
  misc_feature 1..22: note = chemically synthesized
  source 1..22: mol_type = other DNA
tgagatatgtattattgaacat

SEQ ID NO: 138534 - DNA, 22 bp, synthetic construct
  misc_feature 1..22: note = chemically synthesized
  source 1..22: mol_type = other DNA
ttgaacatactataattaatac

SEQ ID NO: 138535 - DNA, 22 bp, synthetic construct
  misc_feature 1..22: note = chemically synthesized
  source 1..22: mol_type = other DNA
aacatactataattaatactaa

SEQ ID NO: 138536 - DNA, 22 bp, synthetic construct
  misc_feature 1..22: note = chemically synthesized
  source 1..22: mol_type = other DNA
taattaatactaatgataagta

SEQ ID NO: 138537 - DNA, 22 bp, synthetic construct
  misc_feature 1..22: note = chemically synthesized
  source 1..22: mol_type = other DNA
atactaatgataagtaacacct

SEQ ID NO: 138538 - DNA, 22 bp, synthetic construct
  misc_feature 1..22: note = chemically synthesized
  source 1..22: mol_type = other DNA
atgataagtaacacctcttgag

SEQ ID NO: 138539 - DNA, 22 bp, synthetic construct
  misc_feature 1..22: note = chemically synthesized
  source 1..22: mol_type = other DNA
ttgagtacttagtatatgctag

SEQ ID NO: 138540 - DNA, 22 bp, synthetic construct
  misc_feature 1..22: note = chemically synthesized
  source 1..22: mol_type = other DNA
gagtacttagtatatgctagaa

SEQ ID NO: 138541 - DNA, 22 bp, synthetic construct
  misc_feature 1..22: note = chemically synthesized
  source 1..22: mol_type = other DNA
agtacttagtatatgctagaat

SEQ ID NO: 138542 - DNA, 22 bp, synthetic construct
  misc_feature 1..22: note = chemically synthesized
  source 1..22: mol_type = other DNA
agtatatgctagaatcaaattt

SEQ ID NO: 138543 - DNA, 22 bp, synthetic construct
  misc_feature 1..22: note = chemically synthesized
  source 1..22: mol_type = other DNA
gtatatgctagaatcaaattta

SEQ ID NO: 138544 - DNA, 22 bp, synthetic construct
  misc_feature 1..22: note = chemically synthesized
  source 1..22: mol_type = other DNA
gaatcaaatttaagtttatcat

SEQ ID NO: 138545 - DNA, 22 bp, synthetic construct
  misc_feature 1..22: note = chemically synthesized
  source 1..22: mol_type = other DNA
aagtttatcatatgaggccggg

SEQ ID NO: 138546 - DNA, 22 bp, synthetic construct
  misc_feature 1..22: note = chemically synthesized
  source 1..22: mol_type = other DNA
agtttatcatatgaggccgggc

SEQ ID NO: 138547 - DNA, 22 bp, synthetic construct
  misc_feature 1..22: note = chemically synthesized
  source 1..22: mol_type = other DNA
atcatatgaggccgggcacggt

SEQ ID NO: 138548 - DNA, 22 bp, synthetic construct
  misc_feature 1..22: note = chemically synthesized
  source 1..22: mol_type = other DNA
tcatatgaggccgggcacggtg

SEQ ID NO: 138549 - DNA, 22 bp, synthetic construct
  misc_feature 1..22: note = chemically synthesized
  source 1..22: mol_type = other DNA
atatatgggattacatgcctgt

SEQ ID NO: 138550 - DNA, 22 bp, synthetic construct
  misc_feature 1..22: note = chemically synthesized
  source 1..22: mol_type = other DNA
catgcctgtaatcccagcactt

SEQ ID NO: 138551 - DNA, 22 bp, synthetic construct
  misc_feature 1..22: note = chemically synthesized
  source 1..22: mol_type = other DNA
taatcccagcactttgggaggc

SEQ ID NO: 138552 - DNA, 22 bp, synthetic construct
  misc_feature 1..22: note = chemically synthesized
  source 1..22: mol_type = other DNA
tgggaggccaaggcaattggat

SEQ ID NO: 138553 - DNA, 22 bp, synthetic construct
  misc_feature 1..22: note = chemically synthesized
  source 1..22: mol_type = other DNA
gggaggccaaggcaattggatc

SEQ ID NO: 138554 - DNA, 22 bp, synthetic construct
  misc_feature 1..22: note = chemically synthesized
  source 1..22: mol_type = other DNA
ggaggccaaggcaattggatca

SEQ ID NO: 138555 - DNA, 22 bp, synthetic construct
  misc_feature 1..22: note = chemically synthesized
  source 1..22: mol_type = other DNA
gatcacctgaggtcaggagttc

SEQ ID NO: 138556 - DNA, 22 bp, synthetic construct
  misc_feature 1..22: note = chemically synthesized
  source 1..22: mol_type = other DNA
aggtcaggagttccagaccagc

SEQ ID NO: 138557 - DNA, 22 bp, synthetic construct
  misc_feature 1..22: note = chemically synthesized
  source 1..22: mol_type = other DNA
cagaccagcctggccaacatgg

SEQ ID NO: 138558 - DNA, 22 bp, synthetic construct
  misc_feature 1..22: note = chemically synthesized
  source 1..22: mol_type = other DNA
gccaacatggtgaaaccccttc

SEQ ID NO: 138559 - DNA, 22 bp, synthetic construct
  misc_feature 1..22: note = chemically synthesized
  source 1..22: mol_type = other DNA
ctctactaaaaaatacaaaaaa

SEQ ID NO: 138560 - DNA, 22 bp, synthetic construct
  misc_feature 1..22: note = chemically synthesized
  source 1..22: mol_type = other DNA
tctactaaaaaatacaaaaaat

SEQ ID NO: 138561 - DNA, 22 bp, synthetic construct
  misc_feature 1..22: note = chemically synthesized
  source 1..22: mol_type = other DNA
tactaaaaaatacaaaaaatca

SEQ ID NO: 138562 - DNA, 22 bp, synthetic construct
  misc_feature 1..22: note = chemically synthesized
  source 1..22: mol_type = other DNA
ctaaaaaatacaaaaaatcagc

SEQ ID NO: 138563 - DNA, 22 bp, synthetic construct
  misc_feature 1..22: note = chemically synthesized
  source 1..22: mol_type = other DNA
aaaaatacaaaaaatcagccag

SEQ ID NO: 138564 - DNA, 22 bp, synthetic construct
  misc_feature 1..22: note = chemically synthesized
  source 1..22: mol_type = other DNA
taatcccagctactcaggaggc

SEQ ID NO: 138565 - DNA, 22 bp, synthetic construct
  misc_feature 1..22: note = chemically synthesized
  source 1..22: mol_type = other DNA
ctcaggaggctgaggcaggaga

SEQ ID NO: 138566 - DNA, 22 bp, synthetic construct
  misc_feature 1..22: note = chemically synthesized
  source 1..22: mol_type = other DNA
aggaggctgaggcaggagaatc

SEQ ID NO: 138567 - DNA, 22 bp, synthetic construct
  misc_feature 1..22: note = chemically synthesized
  source 1..22: mol_type = other DNA
aggcaggagaatcacttgaacc

SEQ ID NO: 138568 - DNA, 22 bp, synthetic construct
  misc_feature 1..22: note = chemically synthesized
  source 1..22: mol_type = other DNA
gaacccaggaggtggaggttgc

SEQ ID NO: 138569 - DNA, 22 bp, synthetic construct
  misc_feature 1..22: note = chemically synthesized
  source 1..22: mol_type = other DNA
aacccaggaggtggaggttgca

SEQ ID NO: 138570 - DNA, 22 bp, synthetic construct
  misc_feature 1..22: note = chemically synthesized
  source 1..22: mol_type = other DNA
cagtgagctaagattgcaccac

SEQ ID NO: 138571 - DNA, 22 bp, synthetic construct
  misc_feature 1..22: note = chemically synthesized
  source 1..22: mol_type = other DNA
agattgcaccactgcactccag

SEQ ID NO: 138572 - DNA, 22 bp, synthetic construct
  misc_feature 1..22: note = chemically synthesized
  source 1..22: mol_type = other DNA
caccactgcactccagcctagg

SEQ ID NO: 138573 - DNA, 22 bp, synthetic construct
  misc_feature 1..22: note = chemically synthesized
  source 1..22: mol_type = other DNA
cactccagcctaggcgacagag

SEQ ID NO: 138574 - DNA, 22 bp, synthetic construct
  misc_feature 1..22: note = chemically synthesized
  source 1..22: mol_type = other DNA
cagcctaggcgacagagtgaga

SEQ ID NO: 138575 - DNA, 22 bp, synthetic construct
  misc_feature 1..22: note = chemically synthesized
  source 1..22: mol_type = other DNA
ggcgacagagtgagactccatc

SEQ ID NO: 138576 - DNA, 22 bp, synthetic construct
  misc_feature 1..22: note = chemically synthesized
  source 1..22: mol_type = other DNA
catctcaaaaaaaaaaaaagaa

SEQ ID NO: 138577 - DNA, 22 bp, synthetic construct
  misc_feature 1..22: note = chemically synthesized
  source 1..22: mol_type = other DNA
aaaaaaaaaaaaagaagtttat

SEQ ID NO: 138578 - DNA, 22 bp, synthetic construct
  misc_feature 1..22: note = chemically synthesized
  source 1..22: mol_type = other DNA
attatatgaattaacttagttt

SEQ ID NO: 138579 - DNA, 22 bp, synthetic construct
  misc_feature 1..22: note = chemically synthesized
  source 1..22: mol_type = other DNA
ttatatgaattaacttagtttt

SEQ ID NO: 138580 - DNA, 22 bp, synthetic construct
  misc_feature 1..22: note = chemically synthesized
  source 1..22: mol_type = other DNA
tatgaattaacttagttttact

SEQ ID NO: 138581 - DNA, 22 bp, synthetic construct
  misc_feature 1..22: note = chemically synthesized
  source 1..22: mol_type = other DNA
acttagttttactcacaccaat

SEQ ID NO: 138582 - DNA, 22 bp, synthetic construct
  misc_feature 1..22: note = chemically synthesized
  source 1..22: mol_type = other DNA
agttttactcacaccaatactc

SEQ ID NO: 138583 - DNA, 22 bp, synthetic construct
  misc_feature 1..22: note = chemically synthesized
  source 1..22: mol_type = other DNA
gttttactcacaccaatactca

SEQ ID NO: 138584 - DNA, 22 bp, synthetic construct
  misc_feature 1..22: note = chemically synthesized
  source 1..22: mol_type = other DNA
tactcacaccaatactcagaag

SEQ ID NO: 138585 - DNA, 22 bp, synthetic construct
  misc_feature 1..22: note = chemically synthesized
  source 1..22: mol_type = other DNA
actcacaccaatactcagaagt

SEQ ID NO: 138586 - DNA, 22 bp, synthetic construct
  misc_feature 1..22: note = chemically synthesized
  source 1..22: mol_type = other DNA
ctcacaccaatactcagaagta

SEQ ID NO: 138587 - DNA, 22 bp, synthetic construct
  misc_feature 1..22: note = chemically synthesized
  source 1..22: mol_type = other DNA
acaccaatactcagaagtagat

SEQ ID NO: 138588 - DNA, 22 bp, synthetic construct
  misc_feature 1..22: note = chemically synthesized
  source 1..22: mol_type = other DNA
agaagtagattattacctcatt

SEQ ID NO: 138589 - DNA, 22 bp, synthetic construct
  misc_feature 1..22: note = chemically synthesized
  source 1..22: mol_type = other DNA
ttacctcatttattgatgagga

SEQ ID NO: 138590 - DNA, 22 bp, synthetic construct
  misc_feature 1..22: note = chemically synthesized
  source 1..22: mol_type = other DNA
cctcatttattgatgaggagcc

SEQ ID NO: 138591 - DNA, 22 bp, synthetic construct
  misc_feature 1..22: note = chemically synthesized
  source 1..22: mol_type = other DNA
atttattgatgaggagcccaat

SEQ ID NO: 138592 - DNA, 22 bp, synthetic construct
  misc_feature 1..22: note = chemically synthesized
  source 1..22: mol_type = other DNA
attgatgaggagcccaatgtac

SEQ ID NO: 138593 - DNA, 22 bp, synthetic construct
  misc_feature 1..22: note = chemically synthesized
  source 1..22: mol_type = other DNA
ttgatgaggagcccaatgtact

SEQ ID NO: 138594 - DNA, 22 bp, synthetic construct
  misc_feature 1..22: note = chemically synthesized
  source 1..22: mol_type = other DNA
atgaggagcccaatgtacttgt

SEQ ID NO: 138595 - DNA, 22 bp, synthetic construct
  misc_feature 1..22: note = chemically synthesized
  source 1..22: mol_type = other DNA
gtagtgtagatcaacttattga

SEQ ID NO: 138596 - DNA, 22 bp, synthetic construct
  misc_feature 1..22: note = chemically synthesized
  source 1..22: mol_type = other DNA
tagtgtagatcaacttattgaa

SEQ ID NO: 138597 - DNA, 22 bp, synthetic construct
  misc_feature 1..22: note = chemically synthesized
  source 1..22: mol_type = other DNA
attgaaagcacaagctaataag

SEQ ID NO: 138598 - DNA, 22 bp, synthetic construct
  misc_feature 1..22: note = chemically synthesized
  source 1..22: mol_type = other DNA
ttgaaagcacaagctaataagt

SEQ ID NO: 138599 - DNA, 22 bp, synthetic construct
  misc_feature 1..22: note = chemically synthesized
  source 1..22: mol_type = other DNA
aaagcacaagctaataagtaga

SEQ ID NO: 138600 - DNA, 22 bp, synthetic construct
  misc_feature 1..22: note = chemically synthesized
  source 1..22: mol_type = other DNA
ataagtagacaattagtaatta

SEQ ID NO: 138601 - DNA, 22 bp, synthetic construct
  misc_feature 1..22: note = chemically synthesized
  source 1..22: mol_type = other DNA
gtaattagaagtcagatggtct

SEQ ID NO: 138602 - DNA, 22 bp, synthetic construct
  misc_feature 1..22: note = chemically synthesized
  source 1..22: mol_type = other DNA
gaagtcagatggtctgagctct

SEQ ID NO: 138603 - DNA, 22 bp, synthetic construct
  misc_feature 1..22: note = chemically synthesized
  source 1..22: mol_type = other DNA
agctctcctactgtctacatta

SEQ ID NO: 138604 - DNA, 22 bp, synthetic construct
  misc_feature 1..22: note = chemically synthesized
  source 1..22: mol_type = other DNA
tcctactgtctacattacatga

SEQ ID NO: 138605 - DNA, 22 bp, synthetic construct
  misc_feature 1..22: note = chemically synthesized
  source 1..22: mol_type = other DNA
ctactgtctacattacatgagc

SEQ ID NO: 138606 - DNA, 22 bp, synthetic construct
  misc_feature 1..22: note = chemically synthesized
  source 1..22: mol_type = other DNA
ctgtctacattacatgagctct

SEQ ID NO: 138607 - DNA, 22 bp, synthetic construct
  misc_feature 1..22: note = chemically synthesized
  source 1..22: mol_type = other DNA
tctacattacatgagctcttat

SEQ ID NO: 138608 - DNA, 22 bp, synthetic construct
  misc_feature 1..22: note = chemically synthesized
  source 1..22: mol_type = other DNA
cattacatgagctcttattaac

SEQ ID NO: 138609 - DNA, 22 bp, synthetic construct
  misc_feature 1..22: note = chemically synthesized
  source 1..22: mol_type = other DNA
catgagctcttattaactgggg

SEQ ID NO: 138610 - DNA, 22 bp, synthetic construct
  misc_feature 1..22: note = chemically synthesized
  source 1..22: mol_type = other DNA
ttattaactggggactcgaaaa

SEQ ID NO: 138611 - DNA, 22 bp, synthetic construct
  misc_feature 1..22: note = chemically synthesized
  source 1..22: mol_type = other DNA
attaactggggactcgaaaatc

SEQ ID NO: 138612 - DNA, 22 bp, synthetic construct
  misc_feature 1..22: note = chemically synthesized
  source 1..22: mol_type = other DNA
ttaactggggactcgaaaatca

SEQ ID NO: 138613 - DNA, 22 bp, synthetic construct
  misc_feature 1..22: note = chemically synthesized
  source 1..22: mol_type = other DNA
actggggactcgaaaatcaaag

SEQ ID NO: 138614 - DNA, 22 bp, synthetic construct
  misc_feature 1..22: note = chemically synthesized
  source 1..22: mol_type = other DNA
gggactcgaaaatcaaagacat

SEQ ID NO: 138615 - DNA, 22 bp, synthetic construct
  misc_feature 1..22: note = chemically synthesized
  source 1..22: mol_type = other DNA
gaaaatcaaagacatgaaataa

SEQ ID NO: 138616 - DNA, 22 bp, synthetic construct
  misc_feature 1..22: note = chemically synthesized
  source 1..22: mol_type = other DNA
gtccaagcttacagaaccacca

SEQ ID NO: 138617 - DNA, 22 bp, synthetic construct
  misc_feature 1..22: note = chemically synthesized
  source 1..22: mol_type = other DNA
tccaagcttacagaaccaccaa

SEQ ID NO: 138618 - DNA, 22 bp, synthetic construct
  misc_feature 1..22: note = chemically synthesized
  source 1..22: mol_type = other DNA
acagaaccaccaagtagtaagg

SEQ ID NO: 138619 - DNA, 22 bp, synthetic construct
  misc_feature 1..22: note = chemically synthesized
  source 1..22: mol_type = other DNA
cagaaccaccaagtagtaaggc

SEQ ID NO: 138620 - DNA, 22 bp, synthetic construct
  misc_feature 1..22: note = chemically synthesized
  source 1..22: mol_type = other DNA
ggatgtagacccagttctgcta

SEQ ID NO: 138621 - DNA, 22 bp, synthetic construct
  misc_feature 1..22: note = chemically synthesized
  source 1..22: mol_type = other DNA
tgctacctctgaagacagtgtt

SEQ ID NO: 138622 - DNA, 22 bp, synthetic construct
  misc_feature 1..22: note = chemically synthesized
  source 1..22: mol_type = other DNA
ctacctctgaagacagtgtttt

SEQ ID NO: 138623 - DNA, 22 bp, synthetic construct
  misc_feature 1..22: note = chemically synthesized
  source 1..22: mol_type = other DNA
cctctgaagacagtgttttttc

SEQ ID NO: 138624 - DNA, 22 bp, synthetic construct
  misc_feature 1..22: note = chemically synthesized
  source 1..22: mol_type = other DNA
tgaagacagtgttttttccaca

SEQ ID NO: 138625 - DNA, 22 bp, synthetic construct
  misc_feature 1..22: note = chemically synthesized
  source 1..22: mol_type = other DNA
aagacagtgttttttccacagc

SEQ ID NO: 138626 - DNA, 22 bp, synthetic construct
  misc_feature 1..22: note = chemically synthesized
  source 1..22: mol_type = other DNA
tttccacagcaaaacacaaact

SEQ ID NO: 138627 - DNA, 22 bp, synthetic construct
  misc_feature 1..22: note = chemically synthesized
  source 1..22: mol_type = other DNA
ttccacagcaaaacacaaactc

SEQ ID NO: 138628 - DNA, 22 bp, synthetic construct
  misc_feature 1..22: note = chemically synthesized
  source 1..22: mol_type = other DNA
tccacagcaaaacacaaactca

SEQ ID NO: 138629 - DNA, 22 bp, synthetic construct
  misc_feature 1..22: note = chemically synthesized
  source 1..22: mol_type = other DNA
ccacagcaaaacacaaactcag

SEQ ID NO: 138630 - DNA, 22 bp, synthetic construct
  misc_feature 1..22: note = chemically synthesized
  source 1..22: mol_type = other DNA
cacagcaaaacacaaactcaga

SEQ ID NO: 138631 - DNA, 22 bp, synthetic construct
  misc_feature 1..22: note = chemically synthesized
  source 1..22: mol_type = other DNA
agatattgtggatgcgagaaat

SEQ ID NO: 138632 - DNA, 22 bp, synthetic construct
  misc_feature 1..22: note = chemically synthesized
  source 1..22: mol_type = other DNA
tggatgcgagaaattagaagta

SEQ ID NO: 138633 - DNA, 22 bp, synthetic construct
  misc_feature 1..22: note = chemically synthesized
  source 1..22: mol_type = other DNA
gaagtagatattcctgccctgt

SEQ ID NO: 138634 - DNA, 22 bp, synthetic construct
  misc_feature 1..22: note = chemically synthesized
  source 1..22: mol_type = other DNA
ctgccctgtggcccttgcttct

SEQ ID NO: 138635 - DNA, 22 bp, synthetic construct
  misc_feature 1..22: note = chemically synthesized
  source 1..22: mol_type = other DNA
ccctgtggcccttgcttcttac

SEQ ID NO: 138636 - DNA, 22 bp, synthetic construct
  misc_feature 1..22: note = chemically synthesized
  source 1..22: mol_type = other DNA
tggcccttgcttcttactttta

SEQ ID NO: 138637 - DNA, 22 bp, synthetic construct
  misc_feature 1..22: note = chemically synthesized
  source 1..22: mol_type = other DNA
gcttcttacttttacttcttgt

SEQ ID NO: 138638 - DNA, 22 bp, synthetic construct
  misc_feature 1..22: note = chemically synthesized
  source 1..22: mol_type = other DNA
cttcttacttttacttcttgtc

SEQ ID NO: 138639 - DNA, 22 bp, synthetic construct
  misc_feature 1..22: note = chemically synthesized
  source 1..22: mol_type = other DNA
cttacttttacttcttgtcgat

SEQ ID NO: 138640 - DNA, 22 bp, synthetic construct
  misc_feature 1..22: note = chemically synthesized
  source 1..22: mol_type = other DNA
ttacttttacttcttgtcgatt

SEQ ID NO: 138641 - DNA, 22 bp, synthetic construct
  misc_feature 1..22: note = chemically synthesized
  source 1..22: mol_type = other DNA
acttttacttcttgtcgattgg

SEQ ID NO: 138642 - DNA, 22 bp, synthetic construct
  misc_feature 1..22: note = chemically synthesized
  source 1..22: mol_type = other DNA
cttttacttcttgtcgattgga

SEQ ID NO: 138643 - DNA, 22 bp, synthetic construct
  misc_feature 1..22: note = chemically synthesized
  source 1..22: mol_type = other DNA
ttacttcttgtcgattggaagt

SEQ ID NO: 138644 - DNA, 22 bp, synthetic construct
  misc_feature 1..22: note = chemically synthesized
  source 1..22: mol_type = other DNA
tacttcttgtcgattggaagtt

SEQ ID NO: 138645 - DNA, 22 bp, synthetic construct
  misc_feature 1..22: note = chemically synthesized
  source 1..22: mol_type = other DNA
acttcttgtcgattggaagttg

SEQ ID NO: 138646 - DNA, 22 bp, synthetic construct
  misc_feature 1..22: note = chemically synthesized
  source 1..22: mol_type = other DNA
cttcttgtcgattggaagttgt

SEQ ID NO: 138647 - DNA, 22 bp, synthetic construct
  misc_feature 1..22: note = chemically synthesized
  source 1..22: mol_type = other DNA
cttgtcgattggaagttgtggt

SEQ ID NO: 138648 - DNA, 22 bp, synthetic construct
  misc_feature 1..22: note = chemically synthesized
  source 1..22: mol_type = other DNA
ttgtcgattggaagttgtggtc

SEQ ID NO: 138649 - DNA, 22 bp, synthetic construct
  misc_feature 1..22: note = chemically synthesized
  source 1..22: mol_type = other DNA
gtcgattggaagttgtggtcca

SEQ ID NO: 138650 - DNA, 22 bp, synthetic construct
  misc_feature 1..22: note = chemically synthesized
  source 1..22: mol_type = other DNA
tcgattggaagttgtggtccaa

SEQ ID NO: 138651 - DNA, 22 bp, synthetic construct
  misc_feature 1..22: note = chemically synthesized
  source 1..22: mol_type = other DNA
gaagttgtggtccaagccacag

SEQ ID NO: 138652 - DNA, 22 bp, synthetic construct
  misc_feature 1..22: note = chemically synthesized
  source 1..22: mol_type = other DNA
tggtccaagccacagttgcaga

SEQ ID NO: 138653 - DNA, 22 bp, synthetic construct
  misc_feature 1..22: note = chemically synthesized
  source 1..22: mol_type = other DNA
cagaccatacttcctcaaccat

SEQ ID NO: 138654 - DNA, 22 bp, synthetic construct
  misc_feature 1..22: note = chemically synthesized
  source 1..22: mol_type = other DNA
cctcaaccataattgcatttct

SEQ ID NO: 138655 - DNA, 22 bp, synthetic construct
  misc_feature 1..22: note = chemically synthesized
  source 1..22: mol_type = other DNA
ctcaaccataattgcatttctt

SEQ ID NO: 138656 - DNA, 22 bp, synthetic construct
  misc_feature 1..22: note = chemically synthesized
  source 1..22: mol_type = other DNA
aaccataattgcatttcttcag

SEQ ID NO: 138657 - DNA, 22 bp, synthetic construct
  misc_feature 1..22: note = chemically synthesized
  source 1..22: mol_type = other DNA
catttcttcaggaaagtttgag

SEQ ID NO: 138658 - DNA, 22 bp, synthetic construct
  misc_feature 1..22: note = chemically synthesized
  source 1..22: mol_type = other DNA
cttcaggaaagtttgagggaga

SEQ ID NO: 138659 - DNA, 22 bp, synthetic construct
  misc_feature 1..22: note = chemically synthesized
  source 1..22: mol_type = other DNA
ttcaggaaagtttgagggagaa

SEQ ID NO: 138660 - DNA, 22 bp, synthetic construct
  misc_feature 1..22: note = chemically synthesized
  source 1..22: mol_type = other DNA
caggaaagtttgagggagaaaa

SEQ ID NO: 138661 - DNA, 22 bp, synthetic construct
  misc_feature 1..22: note = chemically synthesized
  source 1..22: mol_type = other DNA
aggaaagtttgagggagaaaaa

SEQ ID NO: 138662 - DNA, 22 bp, synthetic construct
  misc_feature 1..22: note = chemically synthesized
  source 1..22: mol_type = other DNA
gagggagaaaaaggtaaagaaa

SEQ ID NO: 138663 - DNA, 22 bp, synthetic construct
  misc_feature 1..22: note = chemically synthesized
  source 1..22: mol_type = other DNA
agggagaaaaaggtaaagaaaa

SEQ ID NO: 138664 - DNA, 22 bp, synthetic construct
  misc_feature 1..22: note = chemically synthesized
  source 1..22: mol_type = other DNA
agaaacaacttcagaataaaga

SEQ ID NO: 138665 - DNA, 22 bp, synthetic construct
  misc_feature 1..22: note = chemically synthesized
  source 1..22: mol_type = other DNA
gaaacaacttcagaataaagag

SEQ ID NO: 138666 - DNA, 22 bp, synthetic construct
  misc_feature 1..22: note = chemically synthesized
  source 1..22: mol_type = other DNA
cagaataaagagattttctctt

SEQ ID NO: 138667 - DNA, 22 bp, synthetic construct
  misc_feature 1..22: note = chemically synthesized
  source 1..22: mol_type = other DNA
agaataaagagattttctcttg

SEQ ID NO: 138668 - DNA, 22 bp, synthetic construct
  misc_feature 1..22: note = chemically synthesized
  source 1..22: mol_type = other DNA
tctcttgggttacagagattgt

SEQ ID NO: 138669 - DNA, 22 bp, synthetic construct
  misc_feature 1..22: note = chemically synthesized
  source 1..22: mol_type = other DNA
ctcttgggttacagagattgtc

SEQ ID NO: 138670 - DNA, 22 bp, synthetic construct
  misc_feature 1..22: note = chemically synthesized
  source 1..22: mol_type = other DNA
tcttgggttacagagattgtca

SEQ ID NO: 138671 - DNA, 22 bp, synthetic construct
  misc_feature 1..22: note = chemically synthesized
  source 1..22: mol_type = other DNA
ttgggttacagagattgtcata

SEQ ID NO: 138672 - DNA, 22 bp, synthetic construct
  misc_feature 1..22: note = chemically synthesized
  source 1..22: mol_type = other DNA
gggttacagagattgtcatatg

SEQ ID NO: 138673 - DNA, 22 bp, synthetic construct
  misc_feature 1..22: note = chemically synthesized
  source 1..22: mol_type = other DNA
ggttacagagattgtcatatga

SEQ ID NO: 138674 - DNA, 22 bp, synthetic construct
  misc_feature 1..22: note = chemically synthesized
  source 1..22: mol_type = other DNA
cagagattgtcatatgacaaat

SEQ ID NO: 138675 - DNA, 22 bp, synthetic construct
  misc_feature 1..22: note = chemically synthesized
  source 1..22: mol_type = other DNA
tcatatgacaaattataagcag

SEQ ID NO: 138676 - DNA, 22 bp, synthetic construct
  misc_feature 1..22: note = chemically synthesized
  source 1..22: mol_type = other DNA
taagcagacacttgagaaaact

SEQ ID NO: 138677 - DNA, 22 bp, synthetic construct
  misc_feature 1..22: note = chemically synthesized
  source 1..22: mol_type = other DNA
gagaaaactgaaggcccatgcc

SEQ ID NO: 138678 - DNA, 22 bp, synthetic construct
  misc_feature 1..22: note = chemically synthesized
  source 1..22: mol_type = other DNA
agaaaactgaaggcccatgcct

SEQ ID NO: 138679 - DNA, 22 bp, synthetic construct
  misc_feature 1..22: note = chemically synthesized
  source 1..22: mol_type = other DNA
aaggcccatgcctgcccaaatt

SEQ ID NO: 138680 - DNA, 22 bp, synthetic construct
  misc_feature 1..22: note = chemically synthesized
  source 1..22: mol_type = other DNA
cccaaattaccctttgacccct

SEQ ID NO: 138681 - DNA, 22 bp, synthetic construct
  misc_feature 1..22: note = chemically synthesized
  source 1..22: mol_type = other DNA
ccctttgaccccttggtcaagc

SEQ ID NO: 138682 - DNA, 22 bp, synthetic construct
  misc_feature 1..22: note = chemically synthesized
  source 1..22: mol_type = other DNA
tgaccccttggtcaagctgcaa

SEQ ID NO: 138683 - DNA, 22 bp, synthetic construct
  misc_feature 1..22: note = chemically synthesized
  source 1..22: mol_type = other DNA
gaccccttggtcaagctgcaac

SEQ ID NO: 138684 - DNA, 22 bp, synthetic construct
  misc_feature 1..22: note = chemically synthesized
  source 1..22: mol_type = other DNA
accccttggtcaagctgcaact

SEQ ID NO: 138685 - DNA, 22 bp, synthetic construct
  misc_feature 1..22: note = chemically synthesized
  source 1..22: mol_type = other DNA
ggtcaagctgcaactttggtta

SEQ ID NO: 138686 - DNA, 22 bp, synthetic construct
  misc_feature 1..22: note = chemically synthesized
  source 1..22: mol_type = other DNA
gtcaagctgcaactttggttaa

SEQ ID NO: 138687 - DNA, 22 bp, synthetic construct
  misc_feature 1..22: note = chemically synthesized
  source 1..22: mol_type = other DNA
caactttggttaaagggagtgt

SEQ ID NO: 138688 - DNA, 22 bp, synthetic construct
  misc_feature 1..22: note = chemically synthesized
  source 1..22: mol_type = other DNA
tggttaaagggagtgtttatgt

SEQ ID NO: 138689 - DNA, 22 bp, synthetic construct
  misc_feature 1..22: note = chemically synthesized
  source 1..22: mol_type = other DNA
ggttaaagggagtgtttatgtg

SEQ ID NO: 138690 - DNA, 22 bp, synthetic construct
  misc_feature 1..22: note = chemically synthesized
  source 1..22: mol_type = other DNA
gttaaagggagtgtttatgtgt

SEQ ID NO: 138691 - DNA, 22 bp, synthetic construct
  misc_feature 1..22: note = chemically synthesized
  source 1..22: mol_type = other DNA
aagggagtgtttatgtgttata

SEQ ID NO: 138692 - DNA, 22 bp, synthetic construct
  misc_feature 1..22: note = chemically synthesized
  source 1..22: mol_type = other DNA
atgtgttatagtgttcatttac

SEQ ID NO: 138693 - DNA, 22 bp, synthetic construct
  misc_feature 1..22: note = chemically synthesized
  source 1..22: mol_type = other DNA
tgtgttatagtgttcatttact

SEQ ID NO: 138694 - DNA, 22 bp, synthetic construct
  misc_feature 1..22: note = chemically synthesized
  source 1..22: mol_type = other DNA
tagtgttcatttactcttctgg

SEQ ID NO: 138695 - DNA, 22 bp, synthetic construct
  misc_feature 1..22: note = chemically synthesized
  source 1..22: mol_type = other DNA
atttactcttctggtctaaccc

SEQ ID NO: 138696 - DNA, 22 bp, synthetic construct
  misc_feature 1..22: note = chemically synthesized
  source 1..22: mol_type = other DNA
actcttctggtctaacccattg

SEQ ID NO: 138697 - DNA, 22 bp, synthetic construct
  misc_feature 1..22: note = chemically synthesized
  source 1..22: mol_type = other DNA
ctcttctggtctaacccattgg

SEQ ID NO: 138698 - DNA, 22 bp, synthetic construct
  misc_feature 1..22: note = chemically synthesized
  source 1..22: mol_type = other DNA
ttctggtctaacccattggctc

SEQ ID NO: 138699 - DNA, 22 bp, synthetic construct
  misc_feature 1..22: note = chemically synthesized
  source 1..22: mol_type = other DNA
ctggtctaacccattggctccg

SEQ ID NO: 138700 - DNA, 22 bp, synthetic construct
  misc_feature 1..22: note = chemically synthesized
  source 1..22: mol_type = other DNA
tggtctaacccattggctccgt

SEQ ID NO: 138701 - DNA, 22 bp, synthetic construct
  misc_feature 1..22: note = chemically synthesized
  source 1..22: mol_type = other DNA
gtctaacccattggctccgtct

SEQ ID NO: 138702 - DNA, 22 bp, synthetic construct
  misc_feature 1..22: note = chemically synthesized
  source 1..22: mol_type = other DNA
acccattggctccgtcttcatc

SEQ ID NO: 138703 - DNA, 22 bp, synthetic construct
  misc_feature 1..22: note = chemically synthesized
  source 1..22: mol_type = other DNA
gctccgtcttcatcctgcagtg

SEQ ID NO: 138704 - DNA, 22 bp, synthetic construct
  misc_feature 1..22: note = chemically synthesized
  source 1..22: mol_type = other DNA
cgtcttcatcctgcagtgacct

SEQ ID NO: 138705 - DNA, 22 bp, synthetic construct
  misc_feature 1..22: note = chemically synthesized
  source 1..22: mol_type = other DNA
catcctgcagtgacctcagtgc

SEQ ID NO: 138706 - DNA, 22 bp, synthetic construct
  misc_feature 1..22: note = chemically synthesized
  source 1..22: mol_type = other DNA
atcctgcagtgacctcagtgcc

SEQ ID NO: 138707 - DNA, 22 bp, synthetic construct
  misc_feature 1..22: note = chemically synthesized
  source 1..22: mol_type = other DNA
cagtgacctcagtgcctcagaa

SEQ ID NO: 138708 - DNA, 22 bp, synthetic construct
  misc_feature 1..22: note = chemically synthesized
  source 1..22: mol_type = other DNA
agtgcctcagaaacatacatat

SEQ ID NO: 138709 - DNA, 22 bp, synthetic construct
  misc_feature 1..22: note = chemically synthesized
  source 1..22: mol_type = other DNA
agaaacatacatatgtttgtct

SEQ ID NO: 138710 - DNA, 22 bp, synthetic construct
  misc_feature 1..22: note = chemically synthesized
  source 1..22: mol_type = other DNA
gtctagtttaagtttgtgtgaa

SEQ ID NO: 138711 - DNA, 22 bp, synthetic construct
  misc_feature 1..22: note = chemically synthesized
  source 1..22: mol_type = other DNA
tctagtttaagtttgtgtgaaa

SEQ ID NO: 138712 - DNA, 22 bp, synthetic construct
  misc_feature 1..22: note = chemically synthesized
  source 1..22: mol_type = other DNA
gtttaagtttgtgtgaaattct

SEQ ID NO: 138713 - DNA, 22 bp, synthetic construct
  misc_feature 1..22: note = chemically synthesized
  source 1..22: mol_type = other DNA
aagtttgtgtgaaattctaact

SEQ ID NO: 138714 - DNA, 22 bp, synthetic construct
  misc_feature 1..22: note = chemically synthesized
  source 1..22: mol_type = other DNA
agtttgtgtgaaattctaacta

SEQ ID NO: 138715 - DNA, 22 bp, synthetic construct
  misc_feature 1..22: note = chemically synthesized
  source 1..22: mol_type = other DNA
gtgtgaaattctaactagcgtc

SEQ ID NO: 138716 - DNA, 22 bp, synthetic construct
  misc_feature 1..22: note = chemically synthesized
  source 1..22: mol_type = other DNA
tgtgaaattctaactagcgtca

SEQ ID NO: 138717 - DNA, 22 bp, synthetic construct
  misc_feature 1..22: note = chemically synthesized
  source 1..22: mol_type = other DNA
taactagcgtcaagaactgagg

SEQ ID NO: 138718 - DNA, 22 bp, synthetic construct
  misc_feature 1..22: note = chemically synthesized
  source 1..22: mol_type = other DNA
actagcgtcaagaactgagggc

SEQ ID NO: 138719 - DNA, 22 bp, synthetic construct
  misc_feature 1..22: note = chemically synthesized
  source 1..22: mol_type = other DNA
gcgtcaagaactgagggcccta

SEQ ID NO: 138720 - DNA, 22 bp, synthetic construct
  misc_feature 1..22: note = chemically synthesized
  source 1..22: mol_type = other DNA
agggccctaaactatgctagga

SEQ ID NO: 138721 - DNA, 22 bp, synthetic construct
  misc_feature 1..22: note = chemically synthesized
  source 1..22: mol_type = other DNA
aactatgctaggaatagtgctg

SEQ ID NO: 138722 - DNA, 22 bp, synthetic construct
  misc_feature 1..22: note = chemically synthesized
  source 1..22: mol_type = other DNA
tgctaggaatagtgctgtggtg

SEQ ID NO: 138723 - DNA, 22 bp, synthetic construct
  misc_feature 1..22: note = chemically synthesized
  source 1..22: mol_type = other DNA
ggaatagtgctgtggtgctgtg

SEQ ID NO: 138724 - DNA, 22 bp, synthetic construct
  misc_feature 1..22: note = chemically synthesized
  source 1..22: mol_type = other DNA
tggtgctgtgataggtacacaa

SEQ ID NO: 138725 - DNA, 22 bp, synthetic construct
  misc_feature 1..22: note = chemically synthesized
  source 1..22: mol_type = other DNA
tgataggtacacaagaaatgag

SEQ ID NO: 138726 - DNA, 22 bp, synthetic construct
  misc_feature 1..22: note = chemically synthesized
  source 1..22: mol_type = other DNA
cagattctctgcatctcccttt

SEQ ID NO: 138727 - DNA, 22 bp, synthetic construct
  misc_feature 1..22: note = chemically synthesized
  source 1..22: mol_type = other DNA
tctgcatctccctttgccgggt

SEQ ID NO: 138728 - DNA, 22 bp, synthetic construct
  misc_feature 1..22: note = chemically synthesized
  source 1..22: mol_type = other DNA
tgcatctccctttgccgggtct

SEQ ID NO: 138729 - DNA, 22 bp, synthetic construct
  misc_feature 1..22: note = chemically synthesized
  source 1..22: mol_type = other DNA
catctccctttgccgggtctga

SEQ ID NO: 138730 - DNA, 22 bp, synthetic construct
  misc_feature 1..22: note = chemically synthesized
  source 1..22: mol_type = other DNA
cctttgccgggtctgacaacaa

SEQ ID NO: 138731 - DNA, 22 bp, synthetic construct
  misc_feature 1..22: note = chemically synthesized
  source 1..22: mol_type = other DNA
tgccgggtctgacaacaaagtt

SEQ ID NO: 138732 - DNA, 22 bp, synthetic construct
  misc_feature 1..22: note = chemically synthesized
  source 1..22: mol_type = other DNA
gccgggtctgacaacaaagttt

SEQ ID NO: 138733 - DNA, 22 bp, synthetic construct
  misc_feature 1..22: note = chemically synthesized
  source 1..22: mol_type = other DNA
ccgggtctgacaacaaagtttc

SEQ ID NO: 138734 - DNA, 22 bp, synthetic construct
  misc_feature 1..22: note = chemically synthesized
  source 1..22: mol_type = other DNA
acaacaaagtttccccaaattt

SEQ ID NO: 138735 - DNA, 22 bp, synthetic construct
  misc_feature 1..22: note = chemically synthesized
  source 1..22: mol_type = other DNA
ccccaaattttaccaatgcaag

SEQ ID NO: 138736 - DNA, 22 bp, synthetic construct
  misc_feature 1..22: note = chemically synthesized
  source 1..22: mol_type = other DNA
cccaaattttaccaatgcaagc

SEQ ID NO: 138737 - DNA, 22 bp, synthetic construct
  misc_feature 1..22: note = chemically synthesized
  source 1..22: mol_type = other DNA
taccaatgcaagccatttctcc

SEQ ID NO: 138738 - DNA, 22 bp, synthetic construct
  misc_feature 1..22: note = chemically synthesized
  source 1..22: mol_type = other DNA
accaatgcaagccatttctcca

SEQ ID NO: 138739 - DNA, 22 bp, synthetic construct
  misc_feature 1..22: note = chemically synthesized
  source 1..22: mol_type = other DNA
ccaatgcaagccatttctccat

SEQ ID NO: 138740 - DNA, 22 bp, synthetic construct
  misc_feature 1..22: note = chemically synthesized
  source 1..22: mol_type = other DNA
ctccatatgctaactactttaa

SEQ ID NO: 138741 - DNA, 22 bp, synthetic construct
  misc_feature 1..22: note = chemically synthesized
  source 1..22: mol_type = other DNA
tccatatgctaactactttaaa

SEQ ID NO: 138742 - DNA, 22 bp, synthetic construct
  misc_feature 1..22: note = chemically synthesized
  source 1..22: mol_type = other DNA
catatgctaactactttaaaat

SEQ ID NO: 138743 - DNA, 22 bp, synthetic construct
  misc_feature 1..22: note = chemically synthesized
  source 1..22: mol_type = other DNA
actactttaaaatcatttgggg

SEQ ID NO: 138744 - DNA, 22 bp, synthetic construct
  misc_feature 1..22: note = chemically synthesized
  source 1..22: mol_type = other DNA
ctttaaaatcatttggggcttc

SEQ ID NO: 138745 - DNA, 22 bp, synthetic construct
  misc_feature 1..22: note = chemically synthesized
  source 1..22: mol_type = other DNA
taaaatcatttggggcttcaca

SEQ ID NO: 138746 - DNA, 22 bp, synthetic construct
  misc_feature 1..22: note = chemically synthesized
  source 1..22: mol_type = other DNA
aaaatcatttggggcttcacat

SEQ ID NO: 138747 - DNA, 22 bp, synthetic construct
  misc_feature 1..22: note = chemically synthesized
  source 1..22: mol_type = other DNA
aaatcatttggggcttcacatt

SEQ ID NO: 138748 - DNA, 22 bp, synthetic construct
  misc_feature 1..22: note = chemically synthesized
  source 1..22: mol_type = other DNA
ggggcttcacattgtctttctc

SEQ ID NO: 138749 - DNA, 22 bp, synthetic construct
  misc_feature 1..22: note = chemically synthesized
  source 1..22: mol_type = other DNA
gggcttcacattgtctttctca

SEQ ID NO: 138750 - DNA, 22 bp, synthetic construct
  misc_feature 1..22: note = chemically synthesized
  source 1..22: mol_type = other DNA
cacattgtctttctcatctgta

SEQ ID NO: 138751 - DNA, 22 bp, synthetic construct
  misc_feature 1..22: note = chemically synthesized
  source 1..22: mol_type = other DNA
acattgtctttctcatctgtaa

SEQ ID NO: 138752 - DNA, 22 bp, synthetic construct
  misc_feature 1..22: note = chemically synthesized
  source 1..22: mol_type = other DNA
tctttctcatctgtaaaaagaa

SEQ ID NO: 138753 - DNA, 22 bp, synthetic construct
  misc_feature 1..22: note = chemically synthesized
  source 1..22: mol_type = other DNA
tctcatctgtaaaaagaatgga

SEQ ID NO: 138754 - DNA, 22 bp, synthetic construct
  misc_feature 1..22: note = chemically synthesized
  source 1..22: mol_type = other DNA
ctcatctgtaaaaagaatggaa

SEQ ID NO: 138755 - DNA, 22 bp, synthetic construct
  misc_feature 1..22: note = chemically synthesized
  source 1..22: mol_type = other DNA
tcatctgtaaaaagaatggaag

SEQ ID NO: 138756 - DNA, 22 bp, synthetic construct
  misc_feature 1..22: note = chemically synthesized
  source 1..22: mol_type = other DNA
atctgtaaaaagaatggaagaa

SEQ ID NO: 138757 - DNA, 22 bp, synthetic construct
  misc_feature 1..22: note = chemically synthesized
  source 1..22: mol_type = other DNA
taaaaagaatggaagaactcat

SEQ ID NO: 138758 - DNA, 22 bp, synthetic construct
  misc_feature 1..22: note = chemically synthesized
  source 1..22: mol_type = other DNA
attcctacagaactccctatgt

SEQ ID NO: 138759 - DNA, 22 bp, synthetic construct
  misc_feature 1..22: note = chemically synthesized
  source 1..22: mol_type = other DNA
ctacagaactccctatgtcttc

SEQ ID NO: 138760 - DNA, 22 bp, synthetic construct
  misc_feature 1..22: note = chemically synthesized
  source 1..22: mol_type = other DNA
cagaactccctatgtcttccct

SEQ ID NO: 138761 - DNA, 22 bp, synthetic construct
  misc_feature 1..22: note = chemically synthesized
  source 1..22: mol_type = other DNA
cctatgtcttccctgatgggct

SEQ ID NO: 138762 - DNA, 22 bp, synthetic construct
  misc_feature 1..22: note = chemically synthesized
  source 1..22: mol_type = other DNA
tgtcttccctgatgggctagag

SEQ ID NO: 138763 - DNA, 22 bp, synthetic construct
  misc_feature 1..22: note = chemically synthesized
  source 1..22: mol_type = other DNA
ccctgatgggctagagttcctc

SEQ ID NO: 138764 - DNA, 22 bp, synthetic construct
  misc_feature 1..22: note = chemically synthesized
  source 1..22: mol_type = other DNA
cctgatgggctagagttcctct

SEQ ID NO: 138765 - DNA, 22 bp, synthetic construct
  misc_feature 1..22: note = chemically synthesized
  source 1..22: mol_type = other DNA
atgggctagagttcctctttct

SEQ ID NO: 138766 - DNA, 22 bp, synthetic construct
  misc_feature 1..22: note = chemically synthesized
  source 1..22: mol_type = other DNA
gagttcctctttctcaaaaatt

SEQ ID NO: 138767 - DNA, 22 bp, synthetic construct
  misc_feature 1..22: note = chemically synthesized
  source 1..22: mol_type = other DNA
ctctttctcaaaaattagccat

SEQ ID NO: 138768 - DNA, 22 bp, synthetic construct
  misc_feature 1..22: note = chemically synthesized
  source 1..22: mol_type = other DNA
tttctcaaaaattagccattat

SEQ ID NO: 138769 - DNA, 22 bp, synthetic construct
  misc_feature 1..22: note = chemically synthesized
  source 1..22: mol_type = other DNA
tctcaaaaattagccattattg

SEQ ID NO: 138770 - DNA, 22 bp, synthetic construct
  misc_feature 1..22: note = chemically synthesized
  source 1..22: mol_type = other DNA
ctcaaaaattagccattattgt

SEQ ID NO: 138771 - DNA, 22 bp, synthetic construct
  misc_feature 1..22: note = chemically synthesized
  source 1..22: mol_type = other DNA
tcaaaaattagccattattgta

SEQ ID NO: 138772 - DNA, 22 bp, synthetic construct
  misc_feature 1..22: note = chemically synthesized
  source 1..22: mol_type = other DNA
aaaaattagccattattgtatt

SEQ ID NO: 138773 - DNA, 22 bp, synthetic construct
  misc_feature 1..22: note = chemically synthesized
  source 1..22: mol_type = other DNA
gccattattgtatttccttcta

SEQ ID NO: 138774 - DNA, 22 bp, synthetic construct
  misc_feature 1..22: note = chemically synthesized
  source 1..22: mol_type = other DNA
ttgtatttccttctaagccaaa

SEQ ID NO: 138775 - DNA, 22 bp, synthetic construct
  misc_feature 1..22: note = chemically synthesized
  source 1..22: mol_type = other DNA
tatttccttctaagccaaagct

SEQ ID NO: 138776 - DNA, 22 bp, synthetic construct
  misc_feature 1..22: note = chemically synthesized
  source 1..22: mol_type = other DNA
ccttctaagccaaagctcagag

SEQ ID NO: 138777 - DNA, 22 bp, synthetic construct
  misc_feature 1..22: note = chemically synthesized
  source 1..22: mol_type = other DNA
cttctaagccaaagctcagagg

SEQ ID NO: 138778 - DNA, 22 bp, synthetic construct
  misc_feature 1..22: note = chemically synthesized
  source 1..22: mol_type = other DNA
ctaagccaaagctcagaggtct

SEQ ID NO: 138779 - DNA, 22 bp, synthetic construct
  misc_feature 1..22: note = chemically synthesized
  source 1..22: mol_type = other DNA
taagccaaagctcagaggtctt

SEQ ID NO: 138780 - DNA, 22 bp, synthetic construct
  misc_feature 1..22: note = chemically synthesized
  source 1..22: mol_type = other DNA
agccaaagctcagaggtcttgt

SEQ ID NO: 138781 - DNA, 22 bp, synthetic construct
  misc_feature 1..22: note = chemically synthesized
  source 1..22: mol_type = other DNA
agaggtcttgtattgcccagtg

SEQ ID NO: 138782 - DNA, 22 bp, synthetic construct
  misc_feature 1..22: note = chemically synthesized
  source 1..22: mol_type = other DNA
gtattgcccagtgacatgcaca

SEQ ID NO: 138783 - DNA, 22 bp, synthetic construct
  misc_feature 1..22: note = chemically synthesized
  source 1..22: mol_type = other DNA
tattgcccagtgacatgcacac

SEQ ID NO: 138784 - DNA, 22 bp, synthetic construct
  misc_feature 1..22: note = chemically synthesized
  source 1..22: mol_type = other DNA
cccagtgacatgcacactggtc

SEQ ID NO: 138785 - DNA, 22 bp, synthetic construct
  misc_feature 1..22: note = chemically synthesized
  source 1..22: mol_type = other DNA
gtcaaaagtaggctaagtagaa

SEQ ID NO: 138786 - DNA, 22 bp, synthetic construct
  misc_feature 1..22: note = chemically synthesized
  source 1..22: mol_type = other DNA
agtagaagggtactttcacagg

SEQ ID NO: 138787 - DNA, 22 bp, synthetic construct
  misc_feature 1..22: note = chemically synthesized
  source 1..22: mol_type = other DNA
tcacaggaacagagagcaaaag

SEQ ID NO: 138788 - DNA, 22 bp, synthetic construct
  misc_feature 1..22: note = chemically synthesized
  source 1..22: mol_type = other DNA
cacaggaacagagagcaaaaga

SEQ ID NO: 138789 - DNA, 22 bp, synthetic construct
  misc_feature 1..22: note = chemically synthesized
  source 1..22: mol_type = other DNA
acaggaacagagagcaaaagag

SEQ ID NO: 138790 - DNA, 22 bp, synthetic construct
  misc_feature 1..22: note = chemically synthesized
  source 1..22: mol_type = other DNA
caacatgatggcttgttgtcta

SEQ ID NO: 138791 - DNA, 22 bp, synthetic construct
  misc_feature 1..22: note = chemically synthesized
  source 1..22: mol_type = other DNA
gttgtctaaatatctcctaggg

SEQ ID NO: 138792 - DNA, 22 bp, synthetic construct
  misc_feature 1..22: note = chemically synthesized
  source 1..22: mol_type = other DNA
ttgtctaaatatctcctaggga

SEQ ID NO: 138793 - DNA, 22 bp, synthetic construct
  misc_feature 1..22: note = chemically synthesized
  source 1..22: mol_type = other DNA
tctaaatatctcctagggaatt

SEQ ID NO: 138794 - DNA, 22 bp, synthetic construct
  misc_feature 1..22: note = chemically synthesized
  source 1..22: mol_type = other DNA
aatatctcctagggaattattg

SEQ ID NO: 138795 - DNA, 22 bp, synthetic construct
  misc_feature 1..22: note = chemically synthesized
  source 1..22: mol_type = other DNA
ctagggaattattgtgagaggt

SEQ ID NO: 138796 - DNA, 22 bp, synthetic construct
  misc_feature 1..22: note = chemically synthesized
  source 1..22: mol_type = other DNA
gggaattattgtgagaggtctg

SEQ ID NO: 138797 - DNA, 22 bp, synthetic construct
  misc_feature 1..22: note = chemically synthesized
  source 1..22: mol_type = other DNA
ttgtgagaggtctgaatagtgt

SEQ ID NO: 138798 - DNA, 22 bp, synthetic construct
  misc_feature 1..22: note = chemically synthesized
  source 1..22: mol_type = other DNA
tgagaggtctgaatagtgttgt

SEQ ID NO: 138799 - DNA, 22 bp, synthetic construct
  misc_feature 1..22: note = chemically synthesized
  source 1..22: mol_type = other DNA
aatagtgttgtaaaataagctg

SEQ ID NO: 138800 - DNA, 22 bp, synthetic construct
  misc_feature 1..22: note = chemically synthesized
  source 1..22: mol_type = other DNA
taaaataagctgaatctgctgc

SEQ ID NO: 138801 - DNA, 22 bp, synthetic construct
  misc_feature 1..22: note = chemically synthesized
  source 1..22: mol_type = other DNA
aatctgctgccaacattaacag

SEQ ID NO: 138802 - DNA, 22 bp, synthetic construct
  misc_feature 1..22: note = chemically synthesized
  source 1..22: mol_type = other DNA
ctgccaacattaacagtcaaga

SEQ ID NO: 138803 - DNA, 22 bp, synthetic construct
  misc_feature 1..22: note = chemically synthesized
  source 1..22: mol_type = other DNA
ccaacattaacagtcaagaaat

SEQ ID NO: 138804 - DNA, 22 bp, synthetic construct
  misc_feature 1..22: note = chemically synthesized
  source 1..22: mol_type = other DNA
acagtcaagaaatacctccgaa

SEQ ID NO: 138805 - DNA, 22 bp, synthetic construct
  misc_feature 1..22: note = chemically synthesized
  source 1..22: mol_type = other DNA
cgaataactgtacctccaatta

SEQ ID NO: 138806 - DNA, 22 bp, synthetic construct
  misc_feature 1..22: note = chemically synthesized
  source 1..22: mol_type = other DNA
tacctccaattattctttaagg

SEQ ID NO: 138807 - DNA, 22 bp, synthetic construct
  misc_feature 1..22: note = chemically synthesized
  source 1..22: mol_type = other DNA
caattattctttaaggtagcat

SEQ ID NO: 138808 - DNA, 22 bp, synthetic construct
  misc_feature 1..22: note = chemically synthesized
  source 1..22: mol_type = other DNA
ttctttaaggtagcatgcaact

SEQ ID NO: 138809 - DNA, 22 bp, synthetic construct
  misc_feature 1..22: note = chemically synthesized
  source 1..22: mol_type = other DNA
tttaaggtagcatgcaactgta

SEQ ID NO: 138810 - DNA, 22 bp, synthetic construct
  misc_feature 1..22: note = chemically synthesized
  source 1..22: mol_type = other DNA
taaggtagcatgcaactgtaat

SEQ ID NO: 138811 - DNA, 22 bp, synthetic construct
  misc_feature 1..22: note = chemically synthesized
  source 1..22: mol_type = other DNA
aaggtagcatgcaactgtaata

SEQ ID NO: 138812 - DNA, 22 bp, synthetic construct
  misc_feature 1..22: note = chemically synthesized
  source 1..22: mol_type = other DNA
aggtagcatgcaactgtaatag

SEQ ID NO: 138813 - DNA, 22 bp, synthetic construct
  misc_feature 1..22: note = chemically synthesized
  source 1..22: mol_type = other DNA
taatagttgcatgtatatattt

SEQ ID NO: 138814 - DNA, 22 bp, synthetic construct
  misc_feature 1..22: note = chemically synthesized
  source 1..22: mol_type = other DNA
catgtatatatttatcataata

SEQ ID NO: 138815 - DNA, 22 bp, synthetic construct
  misc_feature 1..22: note = chemically synthesized
  source 1..22: mol_type = other DNA
atcataatactgtaacagaaaa

SEQ ID NO: 138816 - DNA, 22 bp, synthetic construct
  misc_feature 1..22: note = chemically synthesized
  source 1..22: mol_type = other DNA
tcataatactgtaacagaaaac

SEQ ID NO: 138817 - DNA, 22 bp, synthetic construct
  misc_feature 1..22: note = chemically synthesized
  source 1..22: mol_type = other DNA
taacagaaaacacttactgaat

SEQ ID NO: 138818 - DNA, 22 bp, synthetic construct
  misc_feature 1..22: note = chemically synthesized
  source 1..22: mol_type = other DNA
actgaatatatactgtgtccct

SEQ ID NO: 138819 - DNA, 22 bp, synthetic construct
  misc_feature 1..22: note = chemically synthesized
  source 1..22: mol_type = other DNA
ctgaatatatactgtgtcccta

SEQ ID NO: 138820 - DNA, 22 bp, synthetic construct
  misc_feature 1..22: note = chemically synthesized
  source 1..22: mol_type = other DNA
aatatatactgtgtccctagtt

SEQ ID NO: 138821 - DNA, 22 bp, synthetic construct
  misc_feature 1..22: note = chemically synthesized
  source 1..22: mol_type = other DNA
tgtccctagttctttacacaat

SEQ ID NO: 138822 - DNA, 22 bp, synthetic construct
  misc_feature 1..22: note = chemically synthesized
  source 1..22: mol_type = other DNA
gttctttacacaataaactaat

SEQ ID NO: 138823 - DNA, 22 bp, synthetic construct
  misc_feature 1..22: note = chemically synthesized
  source 1..22: mol_type = other DNA
tttacacaataaactaatctca

SEQ ID NO: 138824 - DNA, 22 bp, synthetic construct
  misc_feature 1..22: note = chemically synthesized
  source 1..22: mol_type = other DNA
tacacaataaactaatctcatc

SEQ ID NO: 138825 - DNA, 22 bp, synthetic construct
  misc_feature 1..22: note = chemically synthesized
  source 1..22: mol_type = other DNA
acacaataaactaatctcatcc

SEQ ID NO: 138826 - DNA, 22 bp, synthetic construct
  misc_feature 1..22: note = chemically synthesized
  source 1..22: mol_type = other DNA
cacaataaactaatctcatcct

SEQ ID NO: 138827 - DNA, 22 bp, synthetic construct
  misc_feature 1..22: note = chemically synthesized
  source 1..22: mol_type = other DNA
atctcatcctcataattctatt

SEQ ID NO: 138828 - DNA, 22 bp, synthetic construct
  misc_feature 1..22: note = chemically synthesized
  source 1..22: mol_type = other DNA
atcctcataattctattagcta

SEQ ID NO: 138829 - DNA, 22 bp, synthetic construct
  misc_feature 1..22: note = chemically synthesized
  source 1..22: mol_type = other DNA
ataattctattagctaatacat

SEQ ID NO: 138830 - DNA, 22 bp, synthetic construct
  misc_feature 1..22: note = chemically synthesized
  source 1..22: mol_type = other DNA
tattagctaatacatattatca

SEQ ID NO: 138831 - DNA, 22 bp, synthetic construct
  misc_feature 1..22: note = chemically synthesized
  source 1..22: mol_type = other DNA
ttagctaatacatattatcatc

SEQ ID NO: 138832 - DNA, 22 bp, synthetic construct
  misc_feature 1..22: note = chemically synthesized
  source 1..22: mol_type = other DNA
gctaatacatattatcatccta

SEQ ID NO: 138833 - DNA, 22 bp, synthetic construct
  misc_feature 1..22: note = chemically synthesized
  source 1..22: mol_type = other DNA
atacatattatcatcctatatt

SEQ ID NO: 138834 - DNA, 22 bp, synthetic construct
  misc_feature 1..22: note = chemically synthesized
  source 1..22: mol_type = other DNA
tcatcctatatttcagagactt

SEQ ID NO: 138835 - DNA, 22 bp, synthetic construct
  misc_feature 1..22: note = chemically synthesized
  source 1..22: mol_type = other DNA
tatttcagagacttcaagaagt

SEQ ID NO: 138836 - DNA, 22 bp, synthetic construct
  misc_feature 1..22: note = chemically synthesized
  source 1..22: mol_type = other DNA
cagagacttcaagaagttaagc

SEQ ID NO: 138837 - DNA, 22 bp, synthetic construct
  misc_feature 1..22: note = chemically synthesized
  source 1..22: mol_type = other DNA
agagacttcaagaagttaagca

SEQ ID NO: 138838 - DNA, 22 bp, synthetic construct
  misc_feature 1..22: note = chemically synthesized
  source 1..22: mol_type = other DNA
caagaagttaagcaacttgctc

SEQ ID NO: 138839 - DNA, 22 bp, synthetic construct
  misc_feature 1..22: note = chemically synthesized
  source 1..22: mol_type = other DNA
aagaagttaagcaacttgctca

SEQ ID NO: 138840 - DNA, 22 bp, synthetic construct
  misc_feature 1..22: note = chemically synthesized
  source 1..22: mol_type = other DNA
agcaacttgctcaagatcatct

SEQ ID NO: 138841 - DNA, 22 bp, synthetic construct
  misc_feature 1..22: note = chemically synthesized
  source 1..22: mol_type = other DNA
gctcaagatcatctaagaagta

SEQ ID NO: 138842 - DNA, 22 bp, synthetic construct
  misc_feature 1..22: note = chemically synthesized
  source 1..22: mol_type = other DNA
ctcaagatcatctaagaagtag

SEQ ID NO: 138843 - DNA, 22 bp, synthetic construct
  misc_feature 1..22: note = chemically synthesized
  source 1..22: mol_type = other DNA
aagatcatctaagaagtaggtg

SEQ ID NO: 138844 - DNA, 22 bp, synthetic construct
  misc_feature 1..22: note = chemically synthesized
  source 1..22: mol_type = other DNA
agaagtaggtggtatttctggg

SEQ ID NO: 138845 - DNA, 22 bp, synthetic construct
  misc_feature 1..22: note = chemically synthesized
  source 1..22: mol_type = other DNA
ctgggctcatttggcccctcct

SEQ ID NO: 138846 - DNA, 22 bp, synthetic construct
  misc_feature 1..22: note = chemically synthesized
  source 1..22: mol_type = other DNA
tgggctcatttggcccctccta

SEQ ID NO: 138847 - DNA, 22 bp, synthetic construct
  misc_feature 1..22: note = chemically synthesized
  source 1..22: mol_type = other DNA
ggctcatttggcccctcctaat

SEQ ID NO: 138848 - DNA, 22 bp, synthetic construct
  misc_feature 1..22: note = chemically synthesized
  source 1..22: mol_type = other DNA
atttggcccctcctaatctctc

SEQ ID NO: 138849 - DNA, 22 bp, synthetic construct
  misc_feature 1..22: note = chemically synthesized
  source 1..22: mol_type = other DNA
ggcccctcctaatctctcatgg

SEQ ID NO: 138850 - DNA, 22 bp, synthetic construct
  misc_feature 1..22: note = chemically synthesized
  source 1..22: mol_type = other DNA
gcccctcctaatctctcatggc

SEQ ID NO: 138851 - DNA, 22 bp, synthetic construct
  misc_feature 1..22: note = chemically synthesized
  source 1..22: mol_type = other DNA
ctaatctctcatggcaacatgg

SEQ ID NO: 138852 - DNA, 22 bp, synthetic construct
  misc_feature 1..22: note = chemically synthesized
  source 1..22: mol_type = other DNA
atctctcatggcaacatggctg

SEQ ID NO: 138853 - DNA, 22 bp, synthetic construct
  misc_feature 1..22: note = chemically synthesized
  source 1..22: mol_type = other DNA
tcatggcaacatggctgcctaa

SEQ ID NO: 138854 - DNA, 22 bp, synthetic construct
  misc_feature 1..22: note = chemically synthesized
  source 1..22: mol_type = other DNA
atggcaacatggctgcctaaag

SEQ ID NO: 138855 - DNA, 22 bp, synthetic construct
  misc_feature 1..22: note = chemically synthesized
  source 1..22: mol_type = other DNA
cctaaagtgttgattgccttaa

SEQ ID NO: 138856 - DNA, 22 bp, synthetic construct
  misc_feature 1..22: note = chemically synthesized
  source 1..22: mol_type = other DNA
aagtgttgattgccttaattca

SEQ ID NO: 138857 - DNA, 22 bp, synthetic construct
  misc_feature 1..22: note = chemically synthesized
  source 1..22: mol_type = other DNA
attgccttaattcatcagggat

SEQ ID NO: 138858 - DNA, 22 bp, synthetic construct
  misc_feature 1..22: note = chemically synthesized
  source 1..22: mol_type = other DNA
ccttaattcatcagggatgggc

SEQ ID NO: 138859 - DNA, 22 bp, synthetic construct
  misc_feature 1..22: note = chemically synthesized
  source 1..22: mol_type = other DNA
aattcatcagggatgggctcat

SEQ ID NO: 138860 - DNA, 22 bp, synthetic construct
  misc_feature 1..22: note = chemically synthesized
  source 1..22: mol_type = other DNA
attcatcagggatgggctcata

SEQ ID NO: 138861 - DNA, 22 bp, synthetic construct
  misc_feature 1..22: note = chemically synthesized
  source 1..22: mol_type = other DNA
atcagggatgggctcatactca

SEQ ID NO: 138862 - DNA, 22 bp, synthetic construct
  misc_feature 1..22: note = chemically synthesized
  source 1..22: mol_type = other DNA
atactcactgcagaccttaact

SEQ ID NO: 138863 - DNA, 22 bp, synthetic construct
  misc_feature 1..22: note = chemically synthesized
  source 1..22: mol_type = other DNA
actgcagaccttaactggcatc

SEQ ID NO: 138864 - DNA, 22 bp, synthetic construct
  misc_feature 1..22: note = chemically synthesized
  source 1..22: mol_type = other DNA
cagaccttaactggcatcctct

SEQ ID NO: 138865 - DNA, 22 bp, synthetic construct
  misc_feature 1..22: note = chemically synthesized
  source 1..22: mol_type = other DNA
aactggcatcctcttttcttat

SEQ ID NO: 138866 - DNA, 22 bp, synthetic construct
  misc_feature 1..22: note = chemically synthesized
  source 1..22: mol_type = other DNA
actggcatcctcttttcttatg

SEQ ID NO: 138867 - DNA, 22 bp, synthetic construct
  misc_feature 1..22: note = chemically synthesized
  source 1..22: mol_type = other DNA
gcatcctcttttcttatgtgat

SEQ ID NO: 138868 - DNA, 22 bp, synthetic construct
  misc_feature 1..22: note = chemically synthesized
  source 1..22: mol_type = other DNA
ttttcttatgtgatctgcctga

SEQ ID NO: 138869 - DNA, 22 bp, synthetic construct
  misc_feature 1..22: note = chemically synthesized
  source 1..22: mol_type = other DNA
ttcttatgtgatctgcctgacc

SEQ ID NO: 138870 - DNA, 22 bp, synthetic construct
  misc_feature 1..22: note = chemically synthesized
  source 1..22: mol_type = other DNA
tcttatgtgatctgcctgaccc

SEQ ID NO: 138871 - DNA, 22 bp, synthetic construct
  misc_feature 1..22: note = chemically synthesized
  source 1..22: mol_type = other DNA
cttatgtgatctgcctgaccct

SEQ ID NO: 138872 - DNA, 22 bp, synthetic construct
  misc_feature 1..22: note = chemically synthesized
  source 1..22: mol_type = other DNA
ttatgtgatctgcctgacccta

SEQ ID NO: 138873 - DNA, 22 bp, synthetic construct
  misc_feature 1..22: note = chemically synthesized
  source 1..22: mol_type = other DNA
atgtgatctgcctgaccctagt

SEQ ID NO: 138874 - DNA, 22 bp, synthetic construct
  misc_feature 1..22: note = chemically synthesized
  source 1..22: mol_type = other DNA
tgtgatctgcctgaccctagta

SEQ ID NO: 138875 - DNA, 22 bp, synthetic construct
  misc_feature 1..22: note = chemically synthesized
  source 1..22: mol_type = other DNA
cctgaccctagtagacttatga

SEQ ID NO: 138876 - DNA, 22 bp, synthetic construct
  misc_feature 1..22: note = chemically synthesized
  source 1..22: mol_type = other DNA
accctagtagacttatgaaatt

SEQ ID NO: 138877 - DNA, 22 bp, synthetic construct
  misc_feature 1..22: note = chemically synthesized
  source 1..22: mol_type = other DNA
gtagacttatgaaatttctgat

SEQ ID NO: 138878 - DNA, 22 bp, synthetic construct
  misc_feature 1..22: note = chemically synthesized
  source 1..22: mol_type = other DNA
atgaaatttctgatgagaaagg

SEQ ID NO: 138879 - DNA, 22 bp, synthetic construct
  misc_feature 1..22: note = chemically synthesized
  source 1..22: mol_type = other DNA
tgaaatttctgatgagaaagga

SEQ ID NO: 138880 - DNA, 22 bp, synthetic construct
  misc_feature 1..22: note = chemically synthesized
  source 1..22: mol_type = other DNA
ctgatgagaaaggagagaggag

SEQ ID NO: 138881 - DNA, 22 bp, synthetic construct
  misc_feature 1..22: note = chemically synthesized
  source 1..22: mol_type = other DNA
tgatgagaaaggagagaggaga

SEQ ID NO: 138882 - DNA, 22 bp, synthetic construct
  misc_feature 1..22: note = chemically synthesized
  source 1..22: mol_type = other DNA
atgagaaaggagagaggagaaa

SEQ ID NO: 138883 - DNA, 22 bp, synthetic construct
  misc_feature 1..22: note = chemically synthesized
  source 1..22: mol_type = other DNA
actgtgatgagtgatgaaggtg

SEQ ID NO: 138884 - DNA, 22 bp, synthetic construct
  misc_feature 1..22: note = chemically synthesized
  source 1..22: mol_type = other DNA
tgatgagtgatgaaggtgcctt

SEQ ID NO: 138885 - DNA, 22 bp, synthetic construct
  misc_feature 1..22: note = chemically synthesized
  source 1..22: mol_type = other DNA
ctcatctgggtaccagtggggc

SEQ ID NO: 138886 - DNA, 22 bp, synthetic construct
  misc_feature 1..22: note = chemically synthesized
  source 1..22: mol_type = other DNA
tcatctgggtaccagtggggcc

SEQ ID NO: 138887 - DNA, 22 bp, synthetic construct
  misc_feature 1..22: note = chemically synthesized
  source 1..22: mol_type = other DNA
atctgggtaccagtggggcctc

SEQ ID NO: 138888 - DNA, 22 bp, synthetic construct
  misc_feature 1..22: note = chemically synthesized
  source 1..22: mol_type = other DNA
ggtaccagtggggcctctaaga

SEQ ID NO: 138889 - DNA, 22 bp, synthetic construct
  misc_feature 1..22: note = chemically synthesized
  source 1..22: mol_type = other DNA
taagactaagtcactctgtctc

SEQ ID NO: 138890 - DNA, 22 bp, synthetic construct
  misc_feature 1..22: note = chemically synthesized
  source 1..22: mol_type = other DNA
agactaagtcactctgtctcac

SEQ ID NO: 138891 - DNA, 22 bp, synthetic construct
  misc_feature 1..22: note = chemically synthesized
  source 1..22: mol_type = other DNA
agtcactctgtctcactgtgtc

SEQ ID NO: 138892 - DNA, 22 bp, synthetic construct
  misc_feature 1..22: note = chemically synthesized
  source 1..22: mol_type = other DNA
tgtctcactgtgtcttagccag

SEQ ID NO: 138893 - DNA, 22 bp, synthetic construct
  misc_feature 1..22: note = chemically synthesized
  source 1..22: mol_type = other DNA
tctcactgtgtcttagccagtt

SEQ ID NO: 138894 - DNA, 22 bp, synthetic construct
  misc_feature 1..22: note = chemically synthesized
  source 1..22: mol_type = other DNA
actgtgtcttagccagttcctt

SEQ ID NO: 138895 - DNA, 22 bp, synthetic construct
  misc_feature 1..22: note = chemically synthesized
  source 1..22: mol_type = other DNA
tgtcttagccagttccttacag

SEQ ID NO: 138896 - DNA, 22 bp, synthetic construct
  misc_feature 1..22: note = chemically synthesized
  source 1..22: mol_type = other DNA
agccagttccttacagcttgcc

SEQ ID NO: 138897 - DNA, 22 bp, synthetic construct
  misc_feature 1..22: note = chemically synthesized
  source 1..22: mol_type = other DNA
gccagttccttacagcttgccc

SEQ ID NO: 138898 - DNA, 22 bp, synthetic construct
  misc_feature 1..22: note = chemically synthesized
  source 1..22: mol_type = other DNA
cttacagcttgccctgatggga

SEQ ID NO: 138899 - DNA, 22 bp, synthetic construct
  misc_feature 1..22: note = chemically synthesized
  source 1..22: mol_type = other DNA
acagcttgccctgatgggagat

SEQ ID NO: 138900 - DNA, 22 bp, synthetic construct
  misc_feature 1..22: note = chemically synthesized
  source 1..22: mol_type = other DNA
cagcttgccctgatgggagata

SEQ ID NO: 138901 - DNA, 22 bp, synthetic construct
  misc_feature 1..22: note = chemically synthesized
  source 1..22: mol_type = other DNA
gccctgatgggagatagagaat

SEQ ID NO: 138902 - DNA, 22 bp, synthetic construct
  misc_feature 1..22: note = chemically synthesized
  source 1..22: mol_type = other DNA
ccctgatgggagatagagaatg

SEQ ID NO: 138903 - DNA, 22 bp, synthetic construct
  misc_feature 1..22: note = chemically synthesized
  source 1..22: mol_type = other DNA
atgggagatagagaatgggtat

SEQ ID NO: 138904 - DNA, 22 bp, synthetic construct
  misc_feature 1..22: note = chemically synthesized
  source 1..22: mol_type = other DNA
caacaaaaaaataaattttcat

SEQ ID NO: 138905 - DNA, 22 bp, synthetic construct
  misc_feature 1..22: note = chemically synthesized
  source 1..22: mol_type = other DNA
tcatttctcaaggtccaactta

SEQ ID NO: 138906 - DNA, 22 bp, synthetic construct
  misc_feature 1..22: note = chemically synthesized
  source 1..22: mol_type = other DNA
catttctcaaggtccaacttat

SEQ ID NO: 138907 - DNA, 22 bp, synthetic construct
  misc_feature 1..22: note = chemically synthesized
  source 1..22: mol_type = other DNA
atttctcaaggtccaacttatg

SEQ ID NO: 138908 - DNA, 22 bp, synthetic construct
  misc_feature 1..22: note = chemically synthesized
  source 1..22: mol_type = other DNA
ctcaaggtccaacttatgtttt

SEQ ID NO: 138909 - DNA, 22 bp, synthetic construct
  misc_feature 1..22: note = chemically synthesized
  source 1..22: mol_type = other DNA
tcaaggtccaacttatgttttc

SEQ ID NO: 138910 - DNA, 22 bp, synthetic construct
  misc_feature 1..22: note = chemically synthesized
  source 1..22: mol_type = other DNA
aaggtccaacttatgttttctt

SEQ ID NO: 138911 - DNA, 22 bp, synthetic construct
  misc_feature 1..22: note = chemically synthesized
  source 1..22: mol_type = other DNA
atgttttcttaatttttaaaaa

SEQ ID NO: 138912 - DNA, 22 bp, synthetic construct
  misc_feature 1..22: note = chemically synthesized
  source 1..22: mol_type = other DNA
tgttttcttaatttttaaaaaa

SEQ ID NO: 138913 - DNA, 22 bp, synthetic construct
  misc_feature 1..22: note = chemically synthesized
  source 1..22: mol_type = other DNA
tcttaatttttaaaaaaatctt

SEQ ID NO: 138914 - DNA, 22 bp, synthetic construct
  misc_feature 1..22: note = chemically synthesized
  source 1..22: mol_type = other DNA
cttaatttttaaaaaaatcttg

SEQ ID NO: 138915 - DNA, 22 bp, synthetic construct
  misc_feature 1..22: note = chemically synthesized
  source 1..22: mol_type = other DNA
ttaatttttaaaaaaatcttga

SEQ ID NO: 138916 - DNA, 22 bp, synthetic construct
  misc_feature 1..22: note = chemically synthesized
  source 1..22: mol_type = other DNA
aatttttaaaaaaatcttgacc

SEQ ID NO: 138917 - DNA, 22 bp, synthetic construct
  misc_feature 1..22: note = chemically synthesized
  source 1..22: mol_type = other DNA
atttttaaaaaaatcttgacca

SEQ ID NO: 138918 - DNA, 22 bp, synthetic construct
  misc_feature 1..22: note = chemically synthesized
  source 1..22: mol_type = other DNA
ttaaaaaaatcttgaccattct

SEQ ID NO: 138919 - DNA, 22 bp, synthetic construct
  misc_feature 1..22: note = chemically synthesized
  source 1..22: mol_type = other DNA
taaaaaaatcttgaccattctc

SEQ ID NO: 138920 - DNA, 22 bp, synthetic construct
  misc_feature 1..22: note = chemically synthesized
  source 1..22: mol_type = other DNA
aaaaaaatcttgaccattctcc

SEQ ID NO: 138921 - DNA, 22 bp, synthetic construct
  misc_feature 1..22: note = chemically synthesized
  source 1..22: mol_type = other DNA
aaaaaatcttgaccattctcca

SEQ ID NO: 138922 - DNA, 22 bp, synthetic construct
  misc_feature 1..22: note = chemically synthesized
  source 1..22: mol_type = other DNA
gaccattctccactctctaaaa

SEQ ID NO: 138923 - DNA, 22 bp, synthetic construct
  misc_feature 1..22: note = chemically synthesized
  source 1..22: mol_type = other DNA
accattctccactctctaaaat

SEQ ID NO: 138924 - DNA, 22 bp, synthetic construct
  misc_feature 1..22: note = chemically synthesized
  source 1..22: mol_type = other DNA
tccactctctaaaataatccac

SEQ ID NO: 138925 - DNA, 22 bp, synthetic construct
  misc_feature 1..22: note = chemically synthesized
  source 1..22: mol_type = other DNA
cactctctaaaataatccacag

SEQ ID NO: 138926 - DNA, 22 bp, synthetic construct
  misc_feature 1..22: note = chemically synthesized
  source 1..22: mol_type = other DNA
tctaaaataatccacagtgaga

SEQ ID NO: 138927 - DNA, 22 bp, synthetic construct
  misc_feature 1..22: note = chemically synthesized
  source 1..22: mol_type = other DNA
taaaataatccacagtgagaga

SEQ ID NO: 138928 - DNA, 22 bp, synthetic construct
  misc_feature 1..22: note = chemically synthesized
  source 1..22: mol_type = other DNA
aaataatccacagtgagagaaa

SEQ ID NO: 138929 - DNA, 22 bp, synthetic construct
  misc_feature 1..22: note = chemically synthesized
  source 1..22: mol_type = other DNA
ttttcccccatcccataaatac

SEQ ID NO: 138930 - DNA, 22 bp, synthetic construct
  misc_feature 1..22: note = chemically synthesized
  source 1..22: mol_type = other DNA
ttcccccatcccataaatacct

SEQ ID NO: 138931 - DNA, 22 bp, synthetic construct
  misc_feature 1..22: note = chemically synthesized
  source 1..22: mol_type = other DNA
tcccccatcccataaatacctc

SEQ ID NO: 138932 - DNA, 22 bp, synthetic construct
  misc_feature 1..22: note = chemically synthesized
  source 1..22: mol_type = other DNA
cccccatcccataaatacctct

SEQ ID NO: 138933 - DNA, 22 bp, synthetic construct
  misc_feature 1..22: note = chemically synthesized
  source 1..22: mol_type = other DNA
ccccatcccataaatacctcta

SEQ ID NO: 138934 - DNA, 22 bp, synthetic construct
  misc_feature 1..22: note = chemically synthesized
  source 1..22: mol_type = other DNA
tattaaatatggaaaatctggg

SEQ ID NO: 138935 - DNA, 22 bp, synthetic construct
  misc_feature 1..22: note = chemically synthesized
  source 1..22: mol_type = other DNA
ttaaatatggaaaatctgggca

SEQ ID NO: 138936 - DNA, 22 bp, synthetic construct
  misc_feature 1..22: note = chemically synthesized
  source 1..22: mol_type = other DNA
aatatggaaaatctgggcatgg

SEQ ID NO: 138937 - DNA, 22 bp, synthetic construct
  misc_feature 1..22: note = chemically synthesized
  source 1..22: mol_type = other DNA
ggcatggtgtctcacacctgta

SEQ ID NO: 138938 - DNA, 22 bp, synthetic construct
  misc_feature 1..22: note = chemically synthesized
  source 1..22: mol_type = other DNA
acacctgtaatcccagcacttt

SEQ ID NO: 138939 - DNA, 22 bp, synthetic construct
  misc_feature 1..22: note = chemically synthesized
  source 1..22: mol_type = other DNA
taatcccagcactttgggaggc

SEQ ID NO: 138940 - DNA, 22 bp, synthetic construct
  misc_feature 1..22: note = chemically synthesized
  source 1..22: mol_type = other DNA
tgggaggctgaggtgggtggac

SEQ ID NO: 138941 - DNA, 22 bp, synthetic construct
  misc_feature 1..22: note = chemically synthesized
  source 1..22: mol_type = other DNA
gggaggctgaggtgggtggact

SEQ ID NO: 138942 - DNA, 22 bp, synthetic construct
  misc_feature 1..22: note = chemically synthesized
  source 1..22: mol_type = other DNA
ggaggctgaggtgggtggactg

SEQ ID NO: 138943 - DNA, 22 bp, synthetic construct
  misc_feature 1..22: note = chemically synthesized
  source 1..22: mol_type = other DNA
aggtgggtggactgcttggagc

SEQ ID NO: 138944 - DNA, 22 bp, synthetic construct
  misc_feature 1..22: note = chemically synthesized
  source 1..22: mol_type = other DNA
cttggagctcaggagttcaaga

SEQ ID NO: 138945 - DNA, 22 bp, synthetic construct
  misc_feature 1..22: note = chemically synthesized
  source 1..22: mol_type = other DNA
ggagctcaggagttcaagacca

SEQ ID NO: 138946 - DNA, 22 bp, synthetic construct
  misc_feature 1..22: note = chemically synthesized
  source 1..22: mol_type = other DNA
gagctcaggagttcaagaccat

SEQ ID NO: 138947 - DNA, 22 bp, synthetic construct
  misc_feature 1..22: note = chemically synthesized
  source 1..22: mol_type = other DNA
aggagttcaagaccatcttgga

SEQ ID NO: 138948 - DNA, 22 bp, synthetic construct
  misc_feature 1..22: note = chemically synthesized
  source 1..22: mol_type = other DNA
aagaccatcttggacaacatgg

SEQ ID NO: 138949 - DNA, 22 bp, synthetic construct
  misc_feature 1..22: note = chemically synthesized
  source 1..22: mol_type = other DNA
ggacaacatggtgataccctgc

SEQ ID NO: 138950 - DNA, 22 bp, synthetic construct
  misc_feature 1..22: note = chemically synthesized
  source 1..22: mol_type = other DNA
gacaacatggtgataccctgcc

SEQ ID NO: 138951 - DNA, 22 bp, synthetic construct
  misc_feature 1..22: note = chemically synthesized
  source 1..22: mol_type = other DNA
cctctacaaaaagtacaaaaat

SEQ ID NO: 138952 - DNA, 22 bp, synthetic construct
  misc_feature 1..22: note = chemically synthesized
  source 1..22: mol_type = other DNA
tacaaaaagtacaaaaattagc

SEQ ID NO: 138953 - DNA, 22 bp, synthetic construct
  misc_feature 1..22: note = chemically synthesized
  source 1..22: mol_type = other DNA
caaaaagtacaaaaattagcct

SEQ ID NO: 138954 - DNA, 22 bp, synthetic construct
  misc_feature 1..22: note = chemically synthesized
  source 1..22: mol_type = other DNA
gcctggcatggtggtgtgcacc

SEQ ID NO: 138955 - DNA, 22 bp, synthetic construct
  misc_feature 1..22: note = chemically synthesized
  source 1..22: mol_type = other DNA
gcatggtggtgtgcacctgtaa

SEQ ID NO: 138956 - DNA, 22 bp, synthetic construct
  misc_feature 1..22: note = chemically synthesized
  source 1..22: mol_type = other DNA
taatcccagctattagggtggc

SEQ ID NO: 138957 - DNA, 22 bp, synthetic construct
  misc_feature 1..22: note = chemically synthesized
  source 1..22: mol_type = other DNA
ttagggtggctgaggcaggaga

SEQ ID NO: 138958 - DNA, 22 bp, synthetic construct
  misc_feature 1..22: note = chemically synthesized
  source 1..22: mol_type = other DNA
gggtggctgaggcaggagaatt

SEQ ID NO: 138959 - DNA, 22 bp, synthetic construct
  misc_feature 1..22: note = chemically synthesized
  source 1..22: mol_type = other DNA
aggcaggagaattgcttgaacc

SEQ ID NO: 138960 - DNA, 22 bp, synthetic construct
  misc_feature 1..22: note = chemically synthesized
  source 1..22: mol_type = other DNA
cttgaacccgggaggcggaggt

SEQ ID NO: 138961 - DNA, 22 bp, synthetic construct
  misc_feature 1..22: note = chemically synthesized
  source 1..22: mol_type = other DNA
gaacccgggaggcggaggttgc

SEQ ID NO: 138962 - DNA, 22 bp, synthetic construct
  misc_feature 1..22: note = chemically synthesized
  source 1..22: mol_type = other DNA
aacccgggaggcggaggttgca

SEQ ID NO: 138963 - DNA, 22 bp, synthetic construct
  misc_feature 1..22: note = chemically synthesized
  source 1..22: mol_type = other DNA
cagtgagctgagatcgtgccac

SEQ ID NO: 138964 - DNA, 22 bp, synthetic construct
  misc_feature 1..22: note = chemically synthesized
  source 1..22: mol_type = other DNA
agatcgtgccactgcactccag

SEQ ID NO: 138965 - DNA, 22 bp, synthetic construct
  misc_feature 1..22: note = chemically synthesized
  source 1..22: mol_type = other DNA
cactccagcctgggggacagag

SEQ ID NO: 138966 - DNA, 22 bp, synthetic construct
  misc_feature 1..22: note = chemically synthesized
  source 1..22: mol_type = other DNA
cagcctgggggacagagcacat

SEQ ID NO: 138967 - DNA, 22 bp, synthetic construct
  misc_feature 1..22: note = chemically synthesized
  source 1..22: mol_type = other DNA
ggggacagagcacattataatt

SEQ ID NO: 138968 - DNA, 22 bp, synthetic construct
  misc_feature 1..22: note = chemically synthesized
  source 1..22: mol_type = other DNA
taattaactgttattttttact

SEQ ID NO: 138969 - DNA, 22 bp, synthetic construct
  misc_feature 1..22: note = chemically synthesized
  source 1..22: mol_type = other DNA
actgttattttttacttggact

SEQ ID NO: 138970 - DNA, 22 bp, synthetic construct
  misc_feature 1..22: note = chemically synthesized
  source 1..22: mol_type = other DNA
ttattttttacttggactcttg

SEQ ID NO: 138971 - DNA, 22 bp, synthetic construct
  misc_feature 1..22: note = chemically synthesized
  source 1..22: mol_type = other DNA
ttttttacttggactcttgtgg

SEQ ID NO: 138972 - DNA, 22 bp, synthetic construct
  misc_feature 1..22: note = chemically synthesized
  source 1..22: mol_type = other DNA
tttacttggactcttgtgggga

SEQ ID NO: 138973 - DNA, 22 bp, synthetic construct
  misc_feature 1..22: note = chemically synthesized
  source 1..22: mol_type = other DNA
ttacttggactcttgtggggaa

SEQ ID NO: 138974 - DNA, 22 bp, synthetic construct
  misc_feature 1..22: note = chemically synthesized
  source 1..22: mol_type = other DNA
tacttggactcttgtggggaat

SEQ ID NO: 138975 - DNA, 22 bp, synthetic construct
  misc_feature 1..22: note = chemically synthesized
  source 1..22: mol_type = other DNA
acttggactcttgtggggaata

SEQ ID NO: 138976 - DNA, 22 bp, synthetic construct
  misc_feature 1..22: note = chemically synthesized
  source 1..22: mol_type = other DNA
cttggactcttgtggggaataa

SEQ ID NO: 138977 - DNA, 22 bp, synthetic construct
  misc_feature 1..22: note = chemically synthesized
  source 1..22: mol_type = other DNA
ggactcttgtggggaataagat

SEQ ID NO: 138978 - DNA, 22 bp, synthetic construct
  misc_feature 1..22: note = chemically synthesized
  source 1..22: mol_type = other DNA
gactcttgtggggaataagata

SEQ ID NO: 138979 - DNA, 22 bp, synthetic construct
  misc_feature 1..22: note = chemically synthesized
  source 1..22: mol_type = other DNA
ttgtggggaataagatacatgt

SEQ ID NO: 138980 - DNA, 22 bp, synthetic construct
  misc_feature 1..22: note = chemically synthesized
  source 1..22: mol_type = other DNA
gtggggaataagatacatgttt

SEQ ID NO: 138981 - DNA, 22 bp, synthetic construct
  misc_feature 1..22: note = chemically synthesized
  source 1..22: mol_type = other DNA
tggggaataagatacatgtttt

SEQ ID NO: 138982 - DNA, 22 bp, synthetic construct
  misc_feature 1..22: note = chemically synthesized
  source 1..22: mol_type = other DNA
tattcttatttatgattcaagc

SEQ ID NO: 138983 - DNA, 22 bp, synthetic construct
  misc_feature 1..22: note = chemically synthesized
  source 1..22: mol_type = other DNA
attcttatttatgattcaagca

SEQ ID NO: 138984 - DNA, 22 bp, synthetic construct
  misc_feature 1..22: note = chemically synthesized
  source 1..22: mol_type = other DNA
ttcttatttatgattcaagcac

SEQ ID NO: 138985 - DNA, 22 bp, synthetic construct
  misc_feature 1..22: note = chemically synthesized
  source 1..22: mol_type = other DNA
ttatttatgattcaagcactga

SEQ ID NO: 138986 - DNA, 22 bp, synthetic construct
  misc_feature 1..22: note = chemically synthesized
  source 1..22: mol_type = other DNA
atttatgattcaagcactgaaa

SEQ ID NO: 138987 - DNA, 22 bp, synthetic construct
  misc_feature 1..22: note = chemically synthesized
  source 1..22: mol_type = other DNA
tttatgattcaagcactgaaaa

SEQ ID NO: 138988 - DNA, 22 bp, synthetic construct
  misc_feature 1..22: note = chemically synthesized
  source 1..22: mol_type = other DNA
atgattcaagcactgaaaatag

SEQ ID NO: 138989 - DNA, 22 bp, synthetic construct
  misc_feature 1..22: note = chemically synthesized
  source 1..22: mol_type = other DNA
tgattcaagcactgaaaatagt

SEQ ID NO: 138990 - DNA, 22 bp, synthetic construct
  misc_feature 1..22: note = chemically synthesized
  source 1..22: mol_type = other DNA
aagcactgaaaatagtgtttag

SEQ ID NO: 138991 - DNA, 22 bp, synthetic construct
  misc_feature 1..22: note = chemically synthesized
  source 1..22: mol_type = other DNA
aaaatagtgtttagcatccagc

SEQ ID NO: 138992 - DNA, 22 bp, synthetic construct
  misc_feature 1..22: note = chemically synthesized
  source 1..22: mol_type = other DNA
agcatccagcaggtgcttcaaa

SEQ ID NO: 138993 - DNA, 22 bp, synthetic construct
  misc_feature 1..22: note = chemically synthesized
  source 1..22: mol_type = other DNA
gcatccagcaggtgcttcaaaa

SEQ ID NO: 138994 - DNA, 22 bp, synthetic construct
  misc_feature 1..22: note = chemically synthesized
  source 1..22: mol_type = other DNA
caaaaccatttgctgaatgatt

SEQ ID NO: 138995 - DNA, 22 bp, synthetic construct
  misc_feature 1..22: note = chemically synthesized
  source 1..22: mol_type = other DNA
aaaaccatttgctgaatgatta

SEQ ID NO: 138996 - DNA, 22 bp, synthetic construct
  misc_feature 1..22: note = chemically synthesized
  source 1..22: mol_type = other DNA
gctgaatgattactatactttt

SEQ ID NO: 138997 - DNA, 22 bp, synthetic construct
  misc_feature 1..22: note = chemically synthesized
  source 1..22: mol_type = other DNA
ctgaatgattactatacttttt

SEQ ID NO: 138998 - DNA, 22 bp, synthetic construct
  misc_feature 1..22: note = chemically synthesized
  source 1..22: mol_type = other DNA
aatgattactatactttttaca

SEQ ID NO: 138999 - DNA, 22 bp, synthetic construct
  misc_feature 1..22: note = chemically synthesized
  source 1..22: mol_type = other DNA
ctatactttttacaagctcagc

SEQ ID NO: 139000 - DNA, 22 bp, synthetic construct
  misc_feature 1..22: note = chemically synthesized
  source 1..22: mol_type = other DNA
tactttttacaagctcagctcc

SEQ ID NO: 139001 - DNA, 22 bp, synthetic construct
  misc_feature 1..22: note = chemically synthesized
  source 1..22: mol_type = other DNA
tttacaagctcagctccctcta

SEQ ID NO: 139002 - DNA, 22 bp, synthetic construct
  misc_feature 1..22: note = chemically synthesized
  source 1..22: mol_type = other DNA
ttacaagctcagctccctctat

SEQ ID NO: 139003 - DNA, 22 bp, synthetic construct
  misc_feature 1..22: note = chemically synthesized
  source 1..22: mol_type = other DNA
tacaagctcagctccctctatc

SEQ ID NO: 139004 - DNA, 22 bp, synthetic construct
  misc_feature 1..22: note = chemically synthesized
  source 1..22: mol_type = other DNA
acaagctcagctccctctatcc

SEQ ID NO: 139005 - DNA, 22 bp, synthetic construct
  misc_feature 1..22: note = chemically synthesized
  source 1..22: mol_type = other DNA
caagctcagctccctctatccc

SEQ ID NO: 139006 - DNA, 22 bp, synthetic construct
  misc_feature 1..22: note = chemically synthesized
  source 1..22: mol_type = other DNA
agctccctctatcccttccagc

SEQ ID NO: 139007 - DNA, 22 bp, synthetic construct
  misc_feature 1..22: note = chemically synthesized
  source 1..22: mol_type = other DNA
cctctatcccttccagcatcct

SEQ ID NO: 139008 - DNA, 22 bp, synthetic construct
  misc_feature 1..22: note = chemically synthesized
  source 1..22: mol_type = other DNA
tatcccttccagcatcctcatc

SEQ ID NO: 139009 - DNA, 22 bp, synthetic construct
  misc_feature 1..22: note = chemically synthesized
  source 1..22: mol_type = other DNA
tcccttccagcatcctcatctc

SEQ ID NO: 139010 - DNA, 22 bp, synthetic construct
  misc_feature 1..22: note = chemically synthesized
  source 1..22: mol_type = other DNA
ccagcatcctcatctctgatta

SEQ ID NO: 139011 - DNA, 22 bp, synthetic construct
  misc_feature 1..22: note = chemically synthesized
  source 1..22: mol_type = other DNA
cagcatcctcatctctgattaa

SEQ ID NO: 139012 - DNA, 22 bp, synthetic construct
  misc_feature 1..22: note = chemically synthesized
  source 1..22: mol_type = other DNA
atctctgattaaataagcttca

SEQ ID NO: 139013 - DNA, 22 bp, synthetic construct
  misc_feature 1..22: note = chemically synthesized
  source 1..22: mol_type = other DNA
tgattaaataagcttcagtttt

SEQ ID NO: 139014 - DNA, 22 bp, synthetic construct
  misc_feature 1..22: note = chemically synthesized
  source 1..22: mol_type = other DNA
attaaataagcttcagtttttc

SEQ ID NO: 139015 - DNA, 22 bp, synthetic construct
  misc_feature 1..22: note = chemically synthesized
  source 1..22: mol_type = other DNA
aataagcttcagtttttcctta

SEQ ID NO: 139016 - DNA, 22 bp, synthetic construct
  misc_feature 1..22: note = chemically synthesized
  source 1..22: mol_type = other DNA
cagtttttccttagttcctgtt

SEQ ID NO: 139017 - DNA, 22 bp, synthetic construct
  misc_feature 1..22: note = chemically synthesized
  source 1..22: mol_type = other DNA
agtttttccttagttcctgtta

SEQ ID NO: 139018 - DNA, 22 bp, synthetic construct
  misc_feature 1..22: note = chemically synthesized
  source 1..22: mol_type = other DNA
ttccttagttcctgttacattt

SEQ ID NO: 139019 - DNA, 22 bp, synthetic construct
  misc_feature 1..22: note = chemically synthesized
  source 1..22: mol_type = other DNA
tccttagttcctgttacatttc

SEQ ID NO: 139020 - DNA, 22 bp, synthetic construct
  misc_feature 1..22: note = chemically synthesized
  source 1..22: mol_type = other DNA
ccttagttcctgttacatttct

SEQ ID NO: 139021 - DNA, 22 bp, synthetic construct
  misc_feature 1..22: note = chemically synthesized
  source 1..22: mol_type = other DNA
cttagttcctgttacatttctg

SEQ ID NO: 139022 - DNA, 22 bp, synthetic construct
  misc_feature 1..22: note = chemically synthesized
  source 1..22: mol_type = other DNA
agttcctgttacatttctgtgt

SEQ ID NO: 139023 - DNA, 22 bp, synthetic construct
  misc_feature 1..22: note = chemically synthesized
  source 1..22: mol_type = other DNA
gttcctgttacatttctgtgtg

SEQ ID NO: 139024 - DNA, 22 bp, synthetic construct
  misc_feature 1..22: note = chemically synthesized
  source 1..22: mol_type = other DNA
ctgttacatttctgtgtgtctc

SEQ ID NO: 139025 - DNA, 22 bp, synthetic construct
  misc_feature 1..22: note = chemically synthesized
  source 1..22: mol_type = other DNA
ttacatttctgtgtgtctccat

SEQ ID NO: 139026 - DNA, 22 bp, synthetic construct
  misc_feature 1..22: note = chemically synthesized
  source 1..22: mol_type = other DNA
catttctgtgtgtctccattag

SEQ ID NO: 139027 - DNA, 22 bp, synthetic construct
  misc_feature 1..22: note = chemically synthesized
  source 1..22: mol_type = other DNA
ctgtgtgtctccattagtgacc

SEQ ID NO: 139028 - DNA, 22 bp, synthetic construct
  misc_feature 1..22: note = chemically synthesized
  source 1..22: mol_type = other DNA
tgtgtgtctccattagtgacct

SEQ ID NO: 139029 - DNA, 22 bp, synthetic construct
  misc_feature 1..22: note = chemically synthesized
  source 1..22: mol_type = other DNA
tgtgtctccattagtgacctcc

SEQ ID NO: 139030 - DNA, 22 bp, synthetic construct
  misc_feature 1..22: note = chemically synthesized
  source 1..22: mol_type = other DNA
cattagtgacctcccatagtcc

SEQ ID NO: 139031 - DNA, 22 bp, synthetic construct
  misc_feature 1..22: note = chemically synthesized
  source 1..22: mol_type = other DNA
gtgacctcccatagtccaagca

SEQ ID NO: 139032 - DNA, 22 bp, synthetic construct
  misc_feature 1..22: note = chemically synthesized
  source 1..22: mol_type = other DNA
ccatagtccaagcatgagcagt

SEQ ID NO: 139033 - DNA, 22 bp, synthetic construct
  misc_feature 1..22: note = chemically synthesized
  source 1..22: mol_type = other DNA
tggccaggcccctgtcggggtc

SEQ ID NO: 139034 - DNA, 22 bp, synthetic construct
  misc_feature 1..22: note = chemically synthesized
  source 1..22: mol_type = other DNA
gccaggcccctgtcggggtcag

SEQ ID NO: 139035 - DNA, 22 bp, synthetic construct
  misc_feature 1..22: note = chemically synthesized
  source 1..22: mol_type = other DNA
tcggggtcagtgccccaccccc

SEQ ID NO: 139036 - DNA, 22 bp, synthetic construct
  misc_feature 1..22: note = chemically synthesized
  source 1..22: mol_type = other DNA
ctggttctgtgtaaccttctaa

SEQ ID NO: 139037 - DNA, 22 bp, synthetic construct
  misc_feature 1..22: note = chemically synthesized
  source 1..22: mol_type = other DNA
tggttctgtgtaaccttctaag

SEQ ID NO: 139038 - DNA, 22 bp, synthetic construct
  misc_feature 1..22: note = chemically synthesized
  source 1..22: mol_type = other DNA
gttctgtgtaaccttctaagca

SEQ ID NO: 139039 - DNA, 22 bp, synthetic construct
  misc_feature 1..22: note = chemically synthesized
  source 1..22: mol_type = other DNA
tgtgtaaccttctaagcaaacc

SEQ ID NO: 139040 - DNA, 22 bp, synthetic construct
  misc_feature 1..22: note = chemically synthesized
  source 1..22: mol_type = other DNA
tgtaaccttctaagcaaacctt

SEQ ID NO: 139041 - DNA, 22 bp, synthetic construct
  misc_feature 1..22: note = chemically synthesized
  source 1..22: mol_type = other DNA
ctaagcaaaccttctggctcaa

SEQ ID NO: 139042 - DNA, 22 bp, synthetic construct
  misc_feature 1..22: note = chemically synthesized
  source 1..22: mol_type = other DNA
taagcaaaccttctggctcaag

SEQ ID NO: 139043 - DNA, 22 bp, synthetic construct
  misc_feature 1..22: note = chemically synthesized
  source 1..22: mol_type = other DNA
agcaaaccttctggctcaagca

SEQ ID NO: 139044 - DNA, 22 bp, synthetic construct
  misc_feature 1..22: note = chemically synthesized
  source 1..22: mol_type = other DNA
ctggctcaagcacagcaatgct

SEQ ID NO: 139045 - DNA, 22 bp, synthetic construct
  misc_feature 1..22: note = chemically synthesized
  source 1..22: mol_type = other DNA
tggctcaagcacagcaatgctg

SEQ ID NO: 139046 - DNA, 22 bp, synthetic construct
  misc_feature 1..22: note = chemically synthesized
  source 1..22: mol_type = other DNA
gctcaagcacagcaatgctgag

SEQ ID NO: 139047 - DNA, 22 bp, synthetic construct
  misc_feature 1..22: note = chemically synthesized
  source 1..22: mol_type = other DNA
aagcacagcaatgctgagtcat

SEQ ID NO: 139048 - DNA, 22 bp, synthetic construct
  misc_feature 1..22: note = chemically synthesized
  source 1..22: mol_type = other DNA
agtcatgatgagtcatgctgag

SEQ ID NO: 139049 - DNA, 22 bp, synthetic construct
  misc_feature 1..22: note = chemically synthesized
  source 1..22: mol_type = other DNA
aggcttagggtgtgtgcccaga

SEQ ID NO: 139050 - DNA, 22 bp, synthetic construct
  misc_feature 1..22: note = chemically synthesized
  source 1..22: mol_type = other DNA
agggtgtgtgcccagatgttct

SEQ ID NO: 139051 - DNA, 22 bp, synthetic construct
  misc_feature 1..22: note = chemically synthesized
  source 1..22: mol_type = other DNA
gggtgtgtgcccagatgttctc

SEQ ID NO: 139052 - DNA, 22 bp, synthetic construct
  misc_feature 1..22: note = chemically synthesized
  source 1..22: mol_type = other DNA
tcagcctagagtgatgactcct

SEQ ID NO: 139053 - DNA, 22 bp, synthetic construct
  misc_feature 1..22: note = chemically synthesized
  source 1..22: mol_type = other DNA
agcctagagtgatgactcctat

SEQ ID NO: 139054 - DNA, 22 bp, synthetic construct
  misc_feature 1..22: note = chemically synthesized
  source 1..22: mol_type = other DNA
gagtgatgactcctatctgggt

SEQ ID NO: 139055 - DNA, 22 bp, synthetic construct
  misc_feature 1..22: note = chemically synthesized
  source 1..22: mol_type = other DNA
ctatctgggtccccagcaggat

SEQ ID NO: 139056 - DNA, 22 bp, synthetic construct
  misc_feature 1..22: note = chemically synthesized
  source 1..22: mol_type = other DNA
tctgggtccccagcaggatgct

SEQ ID NO: 139057 - DNA, 22 bp, synthetic construct
  misc_feature 1..22: note = chemically synthesized
  source 1..22: mol_type = other DNA
ggtccccagcaggatgcttaca

SEQ ID NO: 139058 - DNA, 22 bp, synthetic construct
  misc_feature 1..22: note = chemically synthesized
  source 1..22: mol_type = other DNA
acagggcagatggcaaaaaaaa

SEQ ID NO: 139059 - DNA, 22 bp, synthetic construct
  misc_feature 1..22: note = chemically synthesized
  source 1..22: mol_type = other DNA
cagggcagatggcaaaaaaaag

SEQ ID NO: 139060 - DNA, 22 bp, synthetic construct
  misc_feature 1..22: note = chemically synthesized
  source 1..22: mol_type = other DNA
accacctgactaaaactccacc

SEQ ID NO: 139061 - DNA, 22 bp, synthetic construct
  misc_feature 1..22: note = chemically synthesized
  source 1..22: mol_type = other DNA
actaaaactccacctcaaacgg

SEQ ID NO: 139062 - DNA, 22 bp, synthetic construct
  misc_feature 1..22: note = chemically synthesized
  source 1..22: mol_type = other DNA
aaactccacctcaaacggcatc

SEQ ID NO: 139063 - DNA, 22 bp, synthetic construct
  misc_feature 1..22: note = chemically synthesized
  source 1..22: mol_type = other DNA
cacctcaaacggcatcataaag

SEQ ID NO: 139064 - DNA, 22 bp, synthetic construct
  misc_feature 1..22: note = chemically synthesized
  source 1..22: mol_type = other DNA
aaacggcatcataaagaaaatg

SEQ ID NO: 139065 - DNA, 22 bp, synthetic construct
  misc_feature 1..22: note = chemically synthesized
  source 1..22: mol_type = other DNA
agacagaatgtgacatattcta

SEQ ID NO: 139066 - DNA, 22 bp, synthetic construct
  misc_feature 1..22: note = chemically synthesized
  source 1..22: mol_type = other DNA
tagaatatattatttcctgaat

SEQ ID NO: 139067 - DNA, 22 bp, synthetic construct
  misc_feature 1..22: note = chemically synthesized
  source 1..22: mol_type = other DNA
gaatatattatttcctgaatat

SEQ ID NO: 139068 - DNA, 22 bp, synthetic construct
  misc_feature 1..22: note = chemically synthesized
  source 1..22: mol_type = other DNA
tttcctgaatatatatatatat

SEQ ID NO: 139069 - DNA, 22 bp, synthetic construct
  misc_feature 1..22: note = chemically synthesized
  source 1..22: mol_type = other DNA
cctgaatatatatatatatata

SEQ ID NO: 139070 - DNA, 22 bp, synthetic construct
  misc_feature 1..22: note = chemically synthesized
  source 1..22: mol_type = other DNA
ctgaatatatatatatatatac

SEQ ID NO: 139071 - DNA, 22 bp, synthetic construct
  misc_feature 1..22: note = chemically synthesized
  source 1..22: mol_type = other DNA
aatatatatatatatatacaca

SEQ ID NO: 139072 - DNA, 22 bp, synthetic construct
  misc_feature 1..22: note = chemically synthesized
  source 1..22: mol_type = other DNA
gttgttatcaattgccatagaa

SEQ ID NO: 139073 - DNA, 22 bp, synthetic construct
  misc_feature 1..22: note = chemically synthesized
  source 1..22: mol_type = other DNA
ttgttatcaattgccatagaat

SEQ ID NO: 139074 - DNA, 22 bp, synthetic construct
  misc_feature 1..22: note = chemically synthesized
  source 1..22: mol_type = other DNA
ttatcaattgccatagaatgat

SEQ ID NO: 139075 - DNA, 22 bp, synthetic construct
  misc_feature 1..22: note = chemically synthesized
  source 1..22: mol_type = other DNA
tcaattgccatagaatgattag

SEQ ID NO: 139076 - DNA, 22 bp, synthetic construct
  misc_feature 1..22: note = chemically synthesized
  source 1..22: mol_type = other DNA
ccatagaatgattagttattgt

SEQ ID NO: 139077 - DNA, 22 bp, synthetic construct
  misc_feature 1..22: note = chemically synthesized
  source 1..22: mol_type = other DNA
gttattgtgaatcaaatattta

SEQ ID NO: 139078 - DNA, 22 bp, synthetic construct
  misc_feature 1..22: note = chemically synthesized
  source 1..22: mol_type = other DNA
ttgtgaatcaaatatttatctt

SEQ ID NO: 139079 - DNA, 22 bp, synthetic construct
  misc_feature 1..22: note = chemically synthesized
  source 1..22: mol_type = other DNA
tgaatcaaatatttatcttgca

SEQ ID NO: 139080 - DNA, 22 bp, synthetic construct
  misc_feature 1..22: note = chemically synthesized
  source 1..22: mol_type = other DNA
atcttgcaggtggcctctatac

SEQ ID NO: 139081 - DNA, 22 bp, synthetic construct
  misc_feature 1..22: note = chemically synthesized
  source 1..22: mol_type = other DNA
tcttgcaggtggcctctatacc

SEQ ID NO: 139082 - DNA, 22 bp, synthetic construct
  misc_feature 1..22: note = chemically synthesized
  source 1..22: mol_type = other DNA
gcaggtggcctctatacctaga

SEQ ID NO: 139083 - DNA, 22 bp, synthetic construct
  misc_feature 1..22: note = chemically synthesized
  source 1..22: mol_type = other DNA
caggtggcctctatacctagaa

SEQ ID NO: 139084 - DNA, 22 bp, synthetic construct
  misc_feature 1..22: note = chemically synthesized
  source 1..22: mol_type = other DNA
tatacctagaagcggcagaatc

SEQ ID NO: 139085 - DNA, 22 bp, synthetic construct
  misc_feature 1..22: note = chemically synthesized
  source 1..22: mol_type = other DNA
tacctagaagcggcagaatcag

SEQ ID NO: 139086 - DNA, 22 bp, synthetic construct
  misc_feature 1..22: note = chemically synthesized
  source 1..22: mol_type = other DNA
gaagcggcagaatcaggcttta

SEQ ID NO: 139087 - DNA, 22 bp, synthetic construct
  misc_feature 1..22: note = chemically synthesized
  source 1..22: mol_type = other DNA
tattaatacatgtgtatagatt

SEQ ID NO: 139088 - DNA, 22 bp, synthetic construct
  misc_feature 1..22: note = chemically synthesized
  source 1..22: mol_type = other DNA
attaatacatgtgtatagattt

SEQ ID NO: 139089 - DNA, 22 bp, synthetic construct
  misc_feature 1..22: note = chemically synthesized
  source 1..22: mol_type = other DNA
ttaatacatgtgtatagatttt

SEQ ID NO: 139090 - DNA, 22 bp, synthetic construct
  misc_feature 1..22: note = chemically synthesized
  source 1..22: mol_type = other DNA
atacatgtgtatagatttttag

SEQ ID NO: 139091 - DNA, 22 bp, synthetic construct
  misc_feature 1..22: note = chemically synthesized
  source 1..22: mol_type = other DNA
ttaggatctatacacatgtatt

SEQ ID NO: 139092 - DNA, 22 bp, synthetic construct
  misc_feature 1..22: note = chemically synthesized
  source 1..22: mol_type = other DNA
taggatctatacacatgtatta

SEQ ID NO: 139093 - DNA, 22 bp, synthetic construct
  misc_feature 1..22: note = chemically synthesized
  source 1..22: mol_type = other DNA
aggatctatacacatgtattaa

SEQ ID NO: 139094 - DNA, 22 bp, synthetic construct
  misc_feature 1..22: note = chemically synthesized
  source 1..22: mol_type = other DNA
ggatctatacacatgtattaat

SEQ ID NO: 139095 - DNA, 22 bp, synthetic construct
  misc_feature 1..22: note = chemically synthesized
  source 1..22: mol_type = other DNA
tacacatgtattaatatgaaac

SEQ ID NO: 139096 - DNA, 22 bp, synthetic construct
  misc_feature 1..22: note = chemically synthesized
  source 1..22: mol_type = other DNA
atatgaaacaaggatatggaag

SEQ ID NO: 139097 - DNA, 22 bp, synthetic construct
  misc_feature 1..22: note = chemically synthesized
  source 1..22: mol_type = other DNA
gtttgccattttaaggcacccc

SEQ ID NO: 139098 - DNA, 22 bp, synthetic construct
  misc_feature 1..22: note = chemically synthesized
  source 1..22: mol_type = other DNA
tttgccattttaaggcacccct

SEQ ID NO: 139099 - DNA, 22 bp, synthetic construct
  misc_feature 1..22: note = chemically synthesized
  source 1..22: mol_type = other DNA
gccattttaaggcacccctgga

SEQ ID NO: 139100 - DNA, 22 bp, synthetic construct
  misc_feature 1..22: note = chemically synthesized
  source 1..22: mol_type = other DNA
ccattttaaggcacccctggac

SEQ ID NO: 139101 - DNA, 22 bp, synthetic construct
  misc_feature 1..22: note = chemically synthesized
  source 1..22: mol_type = other DNA
taaggcacccctggacagctag

SEQ ID NO: 139102 - DNA, 22 bp, synthetic construct
  misc_feature 1..22: note = chemically synthesized
  source 1..22: mol_type = other DNA
aaggcacccctggacagctagg

SEQ ID NO: 139103 - DNA, 22 bp, synthetic construct
  misc_feature 1..22: note = chemically synthesized
  source 1..22: mol_type = other DNA
aggcacccctggacagctaggt

SEQ ID NO: 139104 - DNA, 22 bp, synthetic construct
  misc_feature 1..22: note = chemically synthesized
  source 1..22: mol_type = other DNA
gacagctaggtggcaaaaggcc

SEQ ID NO: 139105 - DNA, 22 bp, synthetic construct
  misc_feature 1..22: note = chemically synthesized
  source 1..22: mol_type = other DNA
ggtggcaaaaggcctgtgctgt

SEQ ID NO: 139106 - DNA, 22 bp, synthetic construct
  misc_feature 1..22: note = chemically synthesized
  source 1..22: mol_type = other DNA
tgctgttagaggacacatgctc

SEQ ID NO: 139107 - DNA, 22 bp, synthetic construct
  misc_feature 1..22: note = chemically synthesized
  source 1..22: mol_type = other DNA
ttagaggacacatgctcacata

SEQ ID NO: 139108 - DNA, 22 bp, synthetic construct
  misc_feature 1..22: note = chemically synthesized
  source 1..22: mol_type = other DNA
gaggacacatgctcacatacgg

SEQ ID NO: 139109 - DNA, 22 bp, synthetic construct
  misc_feature 1..22: note = chemically synthesized
  source 1..22: mol_type = other DNA
acatacggggtcagatctgact

SEQ ID NO: 139110 - DNA, 22 bp, synthetic construct
  misc_feature 1..22: note = chemically synthesized
  source 1..22: mol_type = other DNA
acttggggtgctactgggaagc

SEQ ID NO: 139111 - DNA, 22 bp, synthetic construct
  misc_feature 1..22: note = chemically synthesized
  source 1..22: mol_type = other DNA
ggggtgctactgggaagctctc

SEQ ID NO: 139112 - DNA, 22 bp, synthetic construct
  misc_feature 1..22: note = chemically synthesized
  source 1..22: mol_type = other DNA
gggtgctactgggaagctctca

SEQ ID NO: 139113 - DNA, 22 bp, synthetic construct
  misc_feature 1..22: note = chemically synthesized
  source 1..22: mol_type = other DNA
ctgggaagctctcatcttaagg

SEQ ID NO: 139114 - DNA, 22 bp, synthetic construct
  misc_feature 1..22: note = chemically synthesized
  source 1..22: mol_type = other DNA
ggaagctctcatcttaaggata

SEQ ID NO: 139115 - DNA, 22 bp, synthetic construct
  misc_feature 1..22: note = chemically synthesized
  source 1..22: mol_type = other DNA
tcatcttaaggatacatctcag

SEQ ID NO: 139116 - DNA, 22 bp, synthetic construct
  misc_feature 1..22: note = chemically synthesized
  source 1..22: mol_type = other DNA
atcttaaggatacatctcaggc

SEQ ID NO: 139117 - DNA, 22 bp, synthetic construct
  misc_feature 1..22: note = chemically synthesized
  source 1..22: mol_type = other DNA
aaggatacatctcaggccagtc

SEQ ID NO: 139118 - DNA, 22 bp, synthetic construct
  misc_feature 1..22: note = chemically synthesized
  source 1..22: mol_type = other DNA
aggatacatctcaggccagtct

SEQ ID NO: 139119 - DNA, 22 bp, synthetic construct
  misc_feature 1..22: note = chemically synthesized
  source 1..22: mol_type = other DNA
aggccagtcttggtgcattagg

SEQ ID NO: 139120 - DNA, 22 bp, synthetic construct
  misc_feature 1..22: note = chemically synthesized
  source 1..22: mol_type = other DNA
ggtgcattaggaagatgtaggc

SEQ ID NO: 139121 - DNA, 22 bp, synthetic construct
  misc_feature 1..22: note = chemically synthesized
  source 1..22: mol_type = other DNA
gtgcattaggaagatgtaggca

SEQ ID NO: 139122 - DNA, 22 bp, synthetic construct
  misc_feature 1..22: note = chemically synthesized
  source 1..22: mol_type = other DNA
ggaagatgtaggcaactctgat

SEQ ID NO: 139123 - DNA, 22 bp, synthetic construct
  misc_feature 1..22: note = chemically synthesized
  source 1..22: mol_type = other DNA
tgatcctgagaggaaagaaaca

SEQ ID NO: 139124 - DNA, 22 bp, synthetic construct
  misc_feature 1..22: note = chemically synthesized
  source 1..22: mol_type = other DNA
atcctgagaggaaagaaacatt

SEQ ID NO: 139125 - DNA, 22 bp, synthetic construct
  misc_feature 1..22: note = chemically synthesized
  source 1..22: mol_type = other DNA
agaggaaagaaacattcctcca

SEQ ID NO: 139126 - DNA, 22 bp, synthetic construct
  misc_feature 1..22: note = chemically synthesized
  source 1..22: mol_type = other DNA
ctccaggagagctaaaagggtt

SEQ ID NO: 139127 - DNA, 22 bp, synthetic construct
  misc_feature 1..22: note = chemically synthesized
  source 1..22: mol_type = other DNA
caggagagctaaaagggttcac

SEQ ID NO: 139128 - DNA, 22 bp, synthetic construct
  misc_feature 1..22: note = chemically synthesized
  source 1..22: mol_type = other DNA
aaagggttcacctgtgtgggta

SEQ ID NO: 139129 - DNA, 22 bp, synthetic construct
  misc_feature 1..22: note = chemically synthesized
  source 1..22: mol_type = other DNA
acctgtgtgggtaactgtgaag

SEQ ID NO: 139130 - DNA, 22 bp, synthetic construct
  misc_feature 1..22: note = chemically synthesized
  source 1..22: mol_type = other DNA
tgtgggtaactgtgaaggacta

SEQ ID NO: 139131 - DNA, 22 bp, synthetic construct
  misc_feature 1..22: note = chemically synthesized
  source 1..22: mol_type = other DNA
tgaaggactacaagaggatgaa

SEQ ID NO: 139132 - DNA, 22 bp, synthetic construct
  misc_feature 1..22: note = chemically synthesized
  source 1..22: mol_type = other DNA
caagaggatgaaaaacaatgac

SEQ ID NO: 139133 - DNA, 22 bp, synthetic construct
  misc_feature 1..22: note = chemically synthesized
  source 1..22: mol_type = other DNA
gtgggagaaaaaacaggaggtc

SEQ ID NO: 139134 - DNA, 22 bp, synthetic construct
  misc_feature 1..22: note = chemically synthesized
  source 1..22: mol_type = other DNA
tgggagaaaaaacaggaggtca

SEQ ID NO: 139135 - DNA, 22 bp, synthetic construct
  misc_feature 1..22: note = chemically synthesized
  source 1..22: mol_type = other DNA
ccagaagaatggctttgaagct

SEQ ID NO: 139136 - DNA, 22 bp, synthetic construct
  misc_feature 1..22: note = chemically synthesized
  source 1..22: mol_type = other DNA
cagaagaatggctttgaagctg

SEQ ID NO: 139137 - DNA, 22 bp, synthetic construct
  misc_feature 1..22: note = chemically synthesized
  source 1..22: mol_type = other DNA
tgaagctggcttctgtaggagt

SEQ ID NO: 139138 - DNA, 22 bp, synthetic construct
  misc_feature 1..22: note = chemically synthesized
  source 1..22: mol_type = other DNA
gaagctggcttctgtaggagtt

SEQ ID NO: 139139 - DNA, 22 bp, synthetic construct
  misc_feature 1..22: note = chemically synthesized
  source 1..22: mol_type = other DNA
aagctggcttctgtaggagttc

SEQ ID NO: 139140 - DNA, 22 bp, synthetic construct
  misc_feature 1..22: note = chemically synthesized
  source 1..22: mol_type = other DNA
gcttctgtaggagttcacagtg

SEQ ID NO: 139141 - DNA, 22 bp, synthetic construct
  misc_feature 1..22: note = chemically synthesized
  source 1..22: mol_type = other DNA
ctgtaggagttcacagtggcaa

SEQ ID NO: 139142 - DNA, 22 bp, synthetic construct
  misc_feature 1..22: note = chemically synthesized
  source 1..22: mol_type = other DNA
tgtaggagttcacagtggcaaa

SEQ ID NO: 139143 - DNA, 22 bp, synthetic construct
  misc_feature 1..22: note = chemically synthesized
  source 1..22: mol_type = other DNA
taggagttcacagtggcaaaga

SEQ ID NO: 139144 - DNA, 22 bp, synthetic construct
  misc_feature 1..22: note = chemically synthesized
  source 1..22: mol_type = other DNA
acagtggcaaagatgtttcaga

SEQ ID NO: 139145 - DNA, 22 bp, synthetic construct
  misc_feature 1..22: note = chemically synthesized
  source 1..22: mol_type = other DNA
cagaaatgtgacatgacttaag

SEQ ID NO: 139146 - DNA, 22 bp, synthetic construct
  misc_feature 1..22: note = chemically synthesized
  source 1..22: mol_type = other DNA
agaaatgtgacatgacttaagg

SEQ ID NO: 139147 - DNA, 22 bp, synthetic construct
  misc_feature 1..22: note = chemically synthesized
  source 1..22: mol_type = other DNA
aaggaactatacaaaaaggaac

SEQ ID NO: 139148 - DNA, 22 bp, synthetic construct
  misc_feature 1..22: note = chemically synthesized
  source 1..22: mol_type = other DNA
aggaactatacaaaaaggaaca

SEQ ID NO: 139149 - DNA, 22 bp, synthetic construct
  misc_feature 1..22: note = chemically synthesized
  source 1..22: mol_type = other DNA
tacaaaaaggaacaaatttaag

SEQ ID NO: 139150 - DNA, 22 bp, synthetic construct
  misc_feature 1..22: note = chemically synthesized
  source 1..22: mol_type = other DNA
aaggagaggcagataaattagt

SEQ ID NO: 139151 - DNA, 22 bp, synthetic construct
  misc_feature 1..22: note = chemically synthesized
  source 1..22: mol_type = other DNA
aggagaggcagataaattagtt

SEQ ID NO: 139152 - DNA, 22 bp, synthetic construct
  misc_feature 1..22: note = chemically synthesized
  source 1..22: mol_type = other DNA
gttcaacagacatgcaaggaat

SEQ ID NO: 139153 - DNA, 22 bp, synthetic construct
  misc_feature 1..22: note = chemically synthesized
  source 1..22: mol_type = other DNA
aacagacatgcaaggaattttc

SEQ ID NO: 139154 - DNA, 22 bp, synthetic construct
  misc_feature 1..22: note = chemically synthesized
  source 1..22: mol_type = other DNA
tcagatgaatgttatgtctcca

SEQ ID NO: 139155 - DNA, 22 bp, synthetic construct
  misc_feature 1..22: note = chemically synthesized
  source 1..22: mol_type = other DNA
cagatgaatgttatgtctccac

SEQ ID NO: 139156 - DNA, 22 bp, synthetic construct
  misc_feature 1..22: note = chemically synthesized
  source 1..22: mol_type = other DNA
agatgaatgttatgtctccact

SEQ ID NO: 139157 - DNA, 22 bp, synthetic construct
  misc_feature 1..22: note = chemically synthesized
  source 1..22: mol_type = other DNA
tgtctccactgagcttcttgag

SEQ ID NO: 139158 - DNA, 22 bp, synthetic construct
  misc_feature 1..22: note = chemically synthesized
  source 1..22: mol_type = other DNA
cactgagcttcttgaggttagc

SEQ ID NO: 139159 - DNA, 22 bp, synthetic construct
  misc_feature 1..22: note = chemically synthesized
  source 1..22: mol_type = other DNA
agcttcttgaggttagcagctg

SEQ ID NO: 139160 - DNA, 22 bp, synthetic construct
  misc_feature 1..22: note = chemically synthesized
  source 1..22: mol_type = other DNA
cttgaggttagcagctgtgagg

SEQ ID NO: 139161 - DNA, 22 bp, synthetic construct
  misc_feature 1..22: note = chemically synthesized
  source 1..22: mol_type = other DNA
ttgaggttagcagctgtgaggg

SEQ ID NO: 139162 - DNA, 22 bp, synthetic construct
  misc_feature 1..22: note = chemically synthesized
  source 1..22: mol_type = other DNA
gaggttagcagctgtgagggtt

SEQ ID NO: 139163 - DNA, 22 bp, synthetic construct
  misc_feature 1..22: note = chemically synthesized
  source 1..22: mol_type = other DNA
aggttagcagctgtgagggttt

SEQ ID NO: 139164 - DNA, 22 bp, synthetic construct
  misc_feature 1..22: note = chemically synthesized
  source 1..22: mol_type = other DNA
gcagctgtgagggttttgcagg

SEQ ID NO: 139165 - DNA, 22 bp, synthetic construct
  misc_feature 1..22: note = chemically synthesized
  source 1..22: mol_type = other DNA
tgagggttttgcaggcccagga

SEQ ID NO: 139166 - DNA, 22 bp, synthetic construct
  misc_feature 1..22: note = chemically synthesized
  source 1..22: mol_type = other DNA
tgcaggcccaggacccattaca

SEQ ID NO: 139167 - DNA, 22 bp, synthetic construct
  misc_feature 1..22: note = chemically synthesized
  source 1..22: mol_type = other DNA
gcaggcccaggacccattacag

SEQ ID NO: 139168 - DNA, 22 bp, synthetic construct
  misc_feature 1..22: note = chemically synthesized
  source 1..22: mol_type = other DNA
caggcccaggacccattacagg

SEQ ID NO: 139169 - DNA, 22 bp, synthetic construct
  misc_feature 1..22: note = chemically synthesized
  source 1..22: mol_type = other DNA
caggacctcacgtatacttgac

SEQ ID NO: 139170 - DNA, 22 bp, synthetic construct
  misc_feature 1..22: note = chemically synthesized
  source 1..22: mol_type = other DNA
acgtatacttgacactgttttt

SEQ ID NO: 139171 - DNA, 22 bp, synthetic construct
  misc_feature 1..22: note = chemically synthesized
  source 1..22: mol_type = other DNA
gacactgttttttgtattcatt

SEQ ID NO: 139172 - DNA, 22 bp, synthetic construct
  misc_feature 1..22: note = chemically synthesized
  source 1..22: mol_type = other DNA
acactgttttttgtattcattt

SEQ ID NO: 139173 - DNA, 22 bp, synthetic construct
  misc_feature 1..22: note = chemically synthesized
  source 1..22: mol_type = other DNA
ttttttgtattcatttgtgaat

SEQ ID NO: 139174 - DNA, 22 bp, synthetic construct
  misc_feature 1..22: note = chemically synthesized
  source 1..22: mol_type = other DNA
tttgtattcatttgtgaatgaa

SEQ ID NO: 139175 - DNA, 22 bp, synthetic construct
  misc_feature 1..22: note = chemically synthesized
  source 1..22: mol_type = other DNA
ttgtattcatttgtgaatgaat

SEQ ID NO: 139176 - DNA, 22 bp, synthetic construct
  misc_feature 1..22: note = chemically synthesized
  source 1..22: mol_type = other DNA
tgtattcatttgtgaatgaatg

SEQ ID NO: 139177 - DNA, 22 bp, synthetic construct
  misc_feature 1..22: note = chemically synthesized
  source 1..22: mol_type = other DNA
gtattcatttgtgaatgaatga

SEQ ID NO: 139178 - DNA, 22 bp, synthetic construct
  misc_feature 1..22: note = chemically synthesized
  source 1..22: mol_type = other DNA
tattcatttgtgaatgaatgac

SEQ ID NO: 139179 - DNA, 22 bp, synthetic construct
  misc_feature 1..22: note = chemically synthesized
  source 1..22: mol_type = other DNA
atttgtgaatgaatgacctctt

SEQ ID NO: 139180 - DNA, 22 bp, synthetic construct
  misc_feature 1..22: note = chemically synthesized
  source 1..22: mol_type = other DNA
gtgaatgaatgacctcttgtca

SEQ ID NO: 139181 - DNA, 22 bp, synthetic construct
  misc_feature 1..22: note = chemically synthesized
  source 1..22: mol_type = other DNA
tgaatgaatgacctcttgtcag

SEQ ID NO: 139182 - DNA, 22 bp, synthetic construct
  misc_feature 1..22: note = chemically synthesized
  source 1..22: mol_type = other DNA
ttgtcagtctactcggtttcgc

SEQ ID NO: 139183 - DNA, 22 bp, synthetic construct
  misc_feature 1..22: note = chemically synthesized
  source 1..22: mol_type = other DNA
gtcagtctactcggtttcgctg

SEQ ID NO: 139184 - DNA, 22 bp, synthetic construct
  misc_feature 1..22: note = chemically synthesized
  source 1..22: mol_type = other DNA
tcagtctactcggtttcgctgt

SEQ ID NO: 139185 - DNA, 22 bp, synthetic construct
  misc_feature 1..22: note = chemically synthesized
  source 1..22: mol_type = other DNA
ctcggtttcgctgtgaatgaat

SEQ ID NO: 139186 - DNA, 22 bp, synthetic construct
  misc_feature 1..22: note = chemically synthesized
  source 1..22: mol_type = other DNA
ggtttcgctgtgaatgaatgat

SEQ ID NO: 139187 - DNA, 22 bp, synthetic construct
  misc_feature 1..22: note = chemically synthesized
  source 1..22: mol_type = other DNA
cgctgtgaatgaatgatgtctt

SEQ ID NO: 139188 - DNA, 22 bp, synthetic construct
  misc_feature 1..22: note = chemically synthesized
  source 1..22: mol_type = other DNA
gctgtgaatgaatgatgtcttg

SEQ ID NO: 139189 - DNA, 22 bp, synthetic construct
  misc_feature 1..22: note = chemically synthesized
  source 1..22: mol_type = other DNA
tgaatgaatgatgtcttgtcag

SEQ ID NO: 139190 - DNA, 22 bp, synthetic construct
  misc_feature 1..22: note = chemically synthesized
  source 1..22: mol_type = other DNA
gtcagcctacttggtttcgcta

SEQ ID NO: 139191 - DNA, 22 bp, synthetic construct
  misc_feature 1..22: note = chemically synthesized
  source 1..22: mol_type = other DNA
tcagcctacttggtttcgctaa

SEQ ID NO: 139192 - DNA, 22 bp, synthetic construct
  misc_feature 1..22: note = chemically synthesized
  source 1..22: mol_type = other DNA
cttggtttcgctaagagcacag

SEQ ID NO: 139193 - DNA, 22 bp, synthetic construct
  misc_feature 1..22: note = chemically synthesized
  source 1..22: mol_type = other DNA
ggtttcgctaagagcacagaga

SEQ ID NO: 139194 - DNA, 22 bp, synthetic construct
  misc_feature 1..22: note = chemically synthesized
  source 1..22: mol_type = other DNA
gtttcgctaagagcacagagag

SEQ ID NO: 139195 - DNA, 22 bp, synthetic construct
  misc_feature 1..22: note = chemically synthesized
  source 1..22: mol_type = other DNA
cgctaagagcacagagagaaga

SEQ ID NO: 139196 - DNA, 22 bp, synthetic construct
  misc_feature 1..22: note = chemically synthesized
  source 1..22: mol_type = other DNA
gctaagagcacagagagaagat

SEQ ID NO: 139197 - DNA, 22 bp, synthetic construct
  misc_feature 1..22: note = chemically synthesized
  source 1..22: mol_type = other DNA
agagcacagagagaagatttag

SEQ ID NO: 139198 - DNA, 22 bp, synthetic construct
  misc_feature 1..22: note = chemically synthesized
  source 1..22: mol_type = other DNA
agtgatgctatgtaaaaacttc

SEQ ID NO: 139199 - DNA, 22 bp, synthetic construct
  misc_feature 1..22: note = chemically synthesized
  source 1..22: mol_type = other DNA
gtgatgctatgtaaaaacttcc

SEQ ID NO: 139200 - DNA, 22 bp, synthetic construct
  misc_feature 1..22: note = chemically synthesized
  source 1..22: mol_type = other DNA
tgtaaaaacttcctttttggtt

SEQ ID NO: 139201 - DNA, 22 bp, synthetic construct
  misc_feature 1..22: note = chemically synthesized
  source 1..22: mol_type = other DNA
cctttttggttcaagtgtatgt

SEQ ID NO: 139202 - DNA, 22 bp, synthetic construct
  misc_feature 1..22: note = chemically synthesized
  source 1..22: mol_type = other DNA
ctttttggttcaagtgtatgtt

SEQ ID NO: 139203 - DNA, 22 bp, synthetic construct
  misc_feature 1..22: note = chemically synthesized
  source 1..22: mol_type = other DNA
tttggttcaagtgtatgtttgt

SEQ ID NO: 139204 - DNA, 22 bp, synthetic construct
  misc_feature 1..22: note = chemically synthesized
  source 1..22: mol_type = other DNA
ttggttcaagtgtatgtttgtg

SEQ ID NO: 139205 - DNA, 22 bp, synthetic construct
  misc_feature 1..22: note = chemically synthesized
  source 1..22: mol_type = other DNA
tggttcaagtgtatgtttgtga

SEQ ID NO: 139206 - DNA, 22 bp, synthetic construct
  misc_feature 1..22: note = chemically synthesized
  source 1..22: mol_type = other DNA
ggttcaagtgtatgtttgtgat

SEQ ID NO: 139207 - DNA, 22 bp, synthetic construct
  misc_feature 1..22: note = chemically synthesized
  source 1..22: mol_type = other DNA
gttcaagtgtatgtttgtgata

SEQ ID NO: 139208 - DNA, 22 bp, synthetic construct
  misc_feature 1..22: note = chemically synthesized
  source 1..22: mol_type = other DNA
aagtgtatgtttgtgatagaaa

SEQ ID NO: 139209 - DNA, 22 bp, synthetic construct
  misc_feature 1..22: note = chemically synthesized
  source 1..22: mol_type = other DNA
gtgatagaaatgaagacaggct

SEQ ID NO: 139210 - DNA, 22 bp, synthetic construct
  misc_feature 1..22: note = chemically synthesized
  source 1..22: mol_type = other DNA
tgatagaaatgaagacaggcta

SEQ ID NO: 139211 - DNA, 22 bp, synthetic construct
  misc_feature 1..22: note = chemically synthesized
  source 1..22: mol_type = other DNA
catgatgcatatctaacataaa

SEQ ID NO: 139212 - DNA, 22 bp, synthetic construct
  misc_feature 1..22: note = chemically synthesized
  source 1..22: mol_type = other DNA
acataaacacaaacattaagaa

SEQ ID NO: 139213 - DNA, 22 bp, synthetic construct
  misc_feature 1..22: note = chemically synthesized
  source 1..22: mol_type = other DNA
agaaaggaaatcaacctgaaga

SEQ ID NO: 139214 - DNA, 22 bp, synthetic construct
  misc_feature 1..22: note = chemically synthesized
  source 1..22: mol_type = other DNA
aagagtatttatacagataaca

SEQ ID NO: 139215 - DNA, 22 bp, synthetic construct
  misc_feature 1..22: note = chemically synthesized
  source 1..22: mol_type = other DNA
atacagataacaaaatacagag

SEQ ID NO: 139216 - DNA, 22 bp, synthetic construct
  misc_feature 1..22: note = chemically synthesized
  source 1..22: mol_type = other DNA
tacagataacaaaatacagaga

SEQ ID NO: 139217 - DNA, 22 bp, synthetic construct
  misc_feature 1..22: note = chemically synthesized
  source 1..22: mol_type = other DNA
aatgtgtaataactgtggcaca

SEQ ID NO: 139218 - DNA, 22 bp, synthetic construct
  misc_feature 1..22: note = chemically synthesized
  source 1..22: mol_type = other DNA
tggcacaggctggaatatgagc

SEQ ID NO: 139219 - DNA, 22 bp, synthetic construct
  misc_feature 1..22: note = chemically synthesized
  source 1..22: mol_type = other DNA
gaatatgagccatttaaatcac

SEQ ID NO: 139220 - DNA, 22 bp, synthetic construct
  misc_feature 1..22: note = chemically synthesized
  source 1..22: mol_type = other DNA
aaatcacaaattaattagaaaa

SEQ ID NO: 139221 - DNA, 22 bp, synthetic construct
  misc_feature 1..22: note = chemically synthesized
  source 1..22: mol_type = other DNA
aatcacaaattaattagaaaaa

SEQ ID NO: 139222 - DNA, 22 bp, synthetic construct
  misc_feature 1..22: note = chemically synthesized
  source 1..22: mol_type = other DNA
attagaaaaaaaacagtgggga

SEQ ID NO: 139223 - DNA, 22 bp, synthetic construct
  misc_feature 1..22: note = chemically synthesized
  source 1..22: mol_type = other DNA
gaaaaaaaacagtggggaaaaa

SEQ ID NO: 139224 - DNA, 22 bp, synthetic construct
  misc_feature 1..22: note = chemically synthesized
  source 1..22: mol_type = other DNA
catggatgggtctagaaagact

SEQ ID NO: 139225 - DNA, 22 bp, synthetic construct
  misc_feature 1..22: note = chemically synthesized
  source 1..22: mol_type = other DNA
gaaagactagcattgttttagg

SEQ ID NO: 139226 - DNA, 22 bp, synthetic construct
  misc_feature 1..22: note = chemically synthesized
  source 1..22: mol_type = other DNA
gcattgttttaggttgagtggc

SEQ ID NO: 139227 - DNA, 22 bp, synthetic construct
  misc_feature 1..22: note = chemically synthesized
  source 1..22: mol_type = other DNA
ttttaggttgagtggcagtgtt

SEQ ID NO: 139228 - DNA, 22 bp, synthetic construct
  misc_feature 1..22: note = chemically synthesized
  source 1..22: mol_type = other DNA
taggttgagtggcagtgtttaa

SEQ ID NO: 139229 - DNA, 22 bp, synthetic construct
  misc_feature 1..22: note = chemically synthesized
  source 1..22: mol_type = other DNA
aggttgagtggcagtgtttaaa

SEQ ID NO: 139230 - DNA, 22 bp, synthetic construct
  misc_feature 1..22: note = chemically synthesized
  source 1..22: mol_type = other DNA
ggttgagtggcagtgtttaaag

SEQ ID NO: 139231 - DNA, 22 bp, synthetic construct
  misc_feature 1..22: note = chemically synthesized
  source 1..22: mol_type = other DNA
agtggcagtgtttaaagggtga

SEQ ID NO: 139232 - DNA, 22 bp, synthetic construct
  misc_feature 1..22: note = chemically synthesized
  source 1..22: mol_type = other DNA
aaagggtgatatcagactaaac

SEQ ID NO: 139233 - DNA, 22 bp, synthetic construct
  misc_feature 1..22: note = chemically synthesized
  source 1..22: mol_type = other DNA
aagggtgatatcagactaaact

SEQ ID NO: 139234 - DNA, 22 bp, synthetic construct
  misc_feature 1..22: note = chemically synthesized
  source 1..22: mol_type = other DNA
aacttgaaatatgtggctaaat

SEQ ID NO: 139235 - DNA, 22 bp, synthetic construct
  misc_feature 1..22: note = chemically synthesized
  source 1..22: mol_type = other DNA
gaaatatgtggctaaataacta

SEQ ID NO: 139236 - DNA, 22 bp, synthetic construct
  misc_feature 1..22: note = chemically synthesized
  source 1..22: mol_type = other DNA
aaatatgtggctaaataactag

SEQ ID NO: 139237 - DNA, 22 bp, synthetic construct
  misc_feature 1..22: note = chemically synthesized
  source 1..22: mol_type = other DNA
aataactagaatactctttatt

SEQ ID NO: 139238 - DNA, 22 bp, synthetic construct
  misc_feature 1..22: note = chemically synthesized
  source 1..22: mol_type = other DNA
gaatactctttattttttcgta

SEQ ID NO: 139239 - DNA, 22 bp, synthetic construct
  misc_feature 1..22: note = chemically synthesized
  source 1..22: mol_type = other DNA
tttattttttcgtatcatgaat

SEQ ID NO: 139240 - DNA, 22 bp, synthetic construct
  misc_feature 1..22: note = chemically synthesized
  source 1..22: mol_type = other DNA
tattttttcgtatcatgaatag

SEQ ID NO: 139241 - DNA, 22 bp, synthetic construct
  misc_feature 1..22: note = chemically synthesized
  source 1..22: mol_type = other DNA
attttttcgtatcatgaatagc

SEQ ID NO: 139242 - DNA, 22 bp, synthetic construct
  misc_feature 1..22: note = chemically synthesized
  source 1..22: mol_type = other DNA
ttttttcgtatcatgaatagca

SEQ ID NO: 139243 - DNA, 22 bp, synthetic construct
  misc_feature 1..22: note = chemically synthesized
  source 1..22: mol_type = other DNA
tttcgtatcatgaatagcagat

SEQ ID NO: 139244 - DNA, 22 bp, synthetic construct
  misc_feature 1..22: note = chemically synthesized
  source 1..22: mol_type = other DNA
ttcgtatcatgaatagcagata

SEQ ID NO: 139245 - DNA, 22 bp, synthetic construct
  misc_feature 1..22: note = chemically synthesized
  source 1..22: mol_type = other DNA
tcgtatcatgaatagcagatat

SEQ ID NO: 139246 - DNA, 22 bp, synthetic construct
  misc_feature 1..22: note = chemically synthesized
  source 1..22: mol_type = other DNA
cgtatcatgaatagcagatata

SEQ ID NO: 139247 - DNA, 22 bp, synthetic construct
  misc_feature 1..22: note = chemically synthesized
  source 1..22: mol_type = other DNA
gtatcatgaatagcagatatag

SEQ ID NO: 139248 - DNA, 22 bp, synthetic construct
  misc_feature 1..22: note = chemically synthesized
  source 1..22: mol_type = other DNA
gatggccccatgcttggtttaa

SEQ ID NO: 139249 - DNA, 22 bp, synthetic construct
  misc_feature 1..22: note = chemically synthesized
  source 1..22: mol_type = other DNA
atggccccatgcttggtttaac

SEQ ID NO: 139250 - DNA, 22 bp, synthetic construct
  misc_feature 1..22: note = chemically synthesized
  source 1..22: mol_type = other DNA
ggtttaacatccttgctgttcc

SEQ ID NO: 139251 - DNA, 22 bp, synthetic construct
  misc_feature 1..22: note = chemically synthesized
  source 1..22: mol_type = other DNA
gtttaacatccttgctgttcct

SEQ ID NO: 139252 - DNA, 22 bp, synthetic construct
  misc_feature 1..22: note = chemically synthesized
  source 1..22: mol_type = other DNA
aacatccttgctgttcctgaca

SEQ ID NO: 139253 - DNA, 22 bp, synthetic construct
  misc_feature 1..22: note = chemically synthesized
  source 1..22: mol_type = other DNA
acatccttgctgttcctgacat

SEQ ID NO: 139254 - DNA, 22 bp, synthetic construct
  misc_feature 1..22: note = chemically synthesized
  source 1..22: mol_type = other DNA
gctgttcctgacatgaaatcct

SEQ ID NO: 139255 - DNA, 22 bp, synthetic construct
  misc_feature 1..22: note = chemically synthesized
  source 1..22: mol_type = other DNA
ctgttcctgacatgaaatcctt

SEQ ID NO: 139256 - DNA, 22 bp, synthetic construct
  misc_feature 1..22: note = chemically synthesized
  source 1..22: mol_type = other DNA
ttcctgacatgaaatccttaat

SEQ ID NO: 139257 - DNA, 22 bp, synthetic construct
  misc_feature 1..22: note = chemically synthesized
  source 1..22: mol_type = other DNA
ctgacatgaaatccttaatttt

SEQ ID NO: 139258 - DNA, 22 bp, synthetic construct
  misc_feature 1..22: note = chemically synthesized
  source 1..22: mol_type = other DNA
acatgaaatccttaatttttga

SEQ ID NO: 139259 - DNA, 22 bp, synthetic construct
  misc_feature 1..22: note = chemically synthesized
  source 1..22: mol_type = other DNA
aatttttgacaaaggggctatt

SEQ ID NO: 139260 - DNA, 22 bp, synthetic construct
  misc_feature 1..22: note = chemically synthesized
  source 1..22: mol_type = other DNA
atttttgacaaaggggctattc

SEQ ID NO: 139261 - DNA, 22 bp, synthetic construct
  misc_feature 1..22: note = chemically synthesized
  source 1..22: mol_type = other DNA
ttgacaaaggggctattcattt

SEQ ID NO: 139262 - DNA, 22 bp, synthetic construct
  misc_feature 1..22: note = chemically synthesized
  source 1..22: mol_type = other DNA
tgacaaaggggctattcatttt

SEQ ID NO: 139263 - DNA, 22 bp, synthetic construct
  misc_feature 1..22: note = chemically synthesized
  source 1..22: mol_type = other DNA
gacaaaggggctattcattttc

SEQ ID NO: 139264 - DNA, 22 bp, synthetic construct
  misc_feature 1..22: note = chemically synthesized
  source 1..22: mol_type = other DNA
acaaaggggctattcattttca

SEQ ID NO: 139265 - DNA, 22 bp, synthetic construct
  misc_feature 1..22: note = chemically synthesized
  source 1..22: mol_type = other DNA
ttcattttcattttatattggg

SEQ ID NO: 139266 - DNA, 22 bp, synthetic construct
  misc_feature 1..22: note = chemically synthesized
  source 1..22: mol_type = other DNA
attttcattttatattgggcct

SEQ ID NO: 139267 - DNA, 22 bp, synthetic construct
  misc_feature 1..22: note = chemically synthesized
  source 1..22: mol_type = other DNA
tcattttatattgggcctagaa

SEQ ID NO: 139268 - DNA, 22 bp, synthetic construct
  misc_feature 1..22: note = chemically synthesized
  source 1..22: mol_type = other DNA
cattttatattgggcctagaaa

SEQ ID NO: 139269 - DNA, 22 bp, synthetic construct
  misc_feature 1..22: note = chemically synthesized
  source 1..22: mol_type = other DNA
attttatattgggcctagaaat

SEQ ID NO: 139270 - DNA, 22 bp, synthetic construct
  misc_feature 1..22: note = chemically synthesized
  source 1..22: mol_type = other DNA
tatattgggcctagaaattatg

SEQ ID NO: 139271 - DNA, 22 bp, synthetic construct
  misc_feature 1..22: note = chemically synthesized
  source 1..22: mol_type = other DNA
atattgggcctagaaattatgt

SEQ ID NO: 139272 - DNA, 22 bp, synthetic construct
  misc_feature 1..22: note = chemically synthesized
  source 1..22: mol_type = other DNA
tattgggcctagaaattatgta

SEQ ID NO: 139273 - DNA, 22 bp, synthetic construct
  misc_feature 1..22: note = chemically synthesized
  source 1..22: mol_type = other DNA
ggcctagaaattatgtagatgg

SEQ ID NO: 139274 - DNA, 22 bp, synthetic construct
  misc_feature 1..22: note = chemically synthesized
  source 1..22: mol_type = other DNA
gaaattatgtagatggtcctga

SEQ ID NO: 139275 - DNA, 22 bp, synthetic construct
  misc_feature 1..22: note = chemically synthesized
  source 1..22: mol_type = other DNA
tgtagatggtcctgaggaaaag

SEQ ID NO: 139276 - DNA, 22 bp, synthetic construct
  misc_feature 1..22: note = chemically synthesized
  source 1..22: mol_type = other DNA
aggaaaagtttatagcttgtct

SEQ ID NO: 139277 - DNA, 22 bp, synthetic construct
  misc_feature 1..22: note = chemically synthesized
  source 1..22: mol_type = other DNA
atagcttgtctatttctctctc

SEQ ID NO: 139278 - DNA, 22 bp, synthetic construct
  misc_feature 1..22: note = chemically synthesized
  source 1..22: mol_type = other DNA
tagcttgtctatttctctctct

SEQ ID NO: 139279 - DNA, 22 bp, synthetic construct
  misc_feature 1..22: note = chemically synthesized
  source 1..22: mol_type = other DNA
gtctatttctctctctaacata

SEQ ID NO: 139280 - DNA, 22 bp, synthetic construct
  misc_feature 1..22: note = chemically synthesized
  source 1..22: mol_type = other DNA
tctatttctctctctaacatag

SEQ ID NO: 139281 - DNA, 22 bp, synthetic construct
  misc_feature 1..22: note = chemically synthesized
  source 1..22: mol_type = other DNA
tttctctctctaacatagttgt

SEQ ID NO: 139282 - DNA, 22 bp, synthetic construct
  misc_feature 1..22: note = chemically synthesized
  source 1..22: mol_type = other DNA
ctctctctaacatagttgtcag

SEQ ID NO: 139283 - DNA, 22 bp, synthetic construct
  misc_feature 1..22: note = chemically synthesized
  source 1..22: mol_type = other DNA
tctctctaacatagttgtcagc

SEQ ID NO: 139284 - DNA, 22 bp, synthetic construct
  misc_feature 1..22: note = chemically synthesized
  source 1..22: mol_type = other DNA
tctctaacatagttgtcagcac

SEQ ID NO: 139285 - DNA, 22 bp, synthetic construct
  misc_feature 1..22: note = chemically synthesized
  source 1..22: mol_type = other DNA
tctaacatagttgtcagcacaa

SEQ ID NO: 139286 - DNA, 22 bp, synthetic construct
  misc_feature 1..22: note = chemically synthesized
  source 1..22: mol_type = other DNA
taacatagttgtcagcacaatg

SEQ ID NO: 139287 - DNA, 22 bp, synthetic construct
  misc_feature 1..22: note = chemically synthesized
  source 1..22: mol_type = other DNA
acatagttgtcagcacaatgcc

SEQ ID NO: 139288 - DNA, 22 bp, synthetic construct
  misc_feature 1..22: note = chemically synthesized
  source 1..22: mol_type = other DNA
tcagcacaatgcctaggctata

SEQ ID NO: 139289 - DNA, 22 bp, synthetic construct
  misc_feature 1..22: note = chemically synthesized
  source 1..22: mol_type = other DNA
ggctataggaagtactcaaagc

SEQ ID NO: 139290 - DNA, 22 bp, synthetic construct
  misc_feature 1..22: note = chemically synthesized
  source 1..22: mol_type = other DNA
taggaagtactcaaagcttgtt

SEQ ID NO: 139291 - DNA, 22 bp, synthetic construct
  misc_feature 1..22: note = chemically synthesized
  source 1..22: mol_type = other DNA
aaagcttgttaaattgaattct

SEQ ID NO: 139292 - DNA, 22 bp, synthetic construct
  misc_feature 1..22: note = chemically synthesized
  source 1..22: mol_type = other DNA
gttaaattgaattctatccttc

SEQ ID NO: 139293 - DNA, 22 bp, synthetic construct
  misc_feature 1..22: note = chemically synthesized
  source 1..22: mol_type = other DNA
ttaaattgaattctatccttct

SEQ ID NO: 139294 - DNA, 22 bp, synthetic construct
  misc_feature 1..22: note = chemically synthesized
  source 1..22: mol_type = other DNA
aattgaattctatccttcttat

SEQ ID NO: 139295 - DNA, 22 bp, synthetic construct
  misc_feature 1..22: note = chemically synthesized
  source 1..22: mol_type = other DNA
aattctatccttcttattcaat

SEQ ID NO: 139296 - DNA, 22 bp, synthetic construct
  misc_feature 1..22: note = chemically synthesized
  source 1..22: mol_type = other DNA
tatccttcttattcaattctac

SEQ ID NO: 139297 - DNA, 22 bp, synthetic construct
  misc_feature 1..22: note = chemically synthesized
  source 1..22: mol_type = other DNA
tccttcttattcaattctacac

SEQ ID NO: 139298 - DNA, 22 bp, synthetic construct
  misc_feature 1..22: note = chemically synthesized
  source 1..22: mol_type = other DNA
cttattcaattctacacatgga

SEQ ID NO: 139299 - DNA, 22 bp, synthetic construct
  misc_feature 1..22: note = chemically synthesized
  source 1..22: mol_type = other DNA
ttattcaattctacacatggag

SEQ ID NO: 139300 - DNA, 22 bp, synthetic construct
  misc_feature 1..22: note = chemically synthesized
  source 1..22: mol_type = other DNA
attcaattctacacatggagga

SEQ ID NO: 139301 - DNA, 22 bp, synthetic construct
  misc_feature 1..22: note = chemically synthesized
  source 1..22: mol_type = other DNA
ttcaattctacacatggaggaa

SEQ ID NO: 139302 - DNA, 22 bp, synthetic construct
  misc_feature 1..22: note = chemically synthesized
  source 1..22: mol_type = other DNA
aattctacacatggaggaaaaa

SEQ ID NO: 139303 - DNA, 22 bp, synthetic construct
  misc_feature 1..22: note = chemically synthesized
  source 1..22: mol_type = other DNA
tacacatggaggaaaaactcat

SEQ ID NO: 139304 - DNA, 22 bp, synthetic construct
  misc_feature 1..22: note = chemically synthesized
  source 1..22: mol_type = other DNA
cacatggaggaaaaactcatca

SEQ ID NO: 139305 - DNA, 22 bp, synthetic construct
  misc_feature 1..22: note = chemically synthesized
  source 1..22: mol_type = other DNA
atcagggatggaggcacgcctc

SEQ ID NO: 139306 - DNA, 22 bp, synthetic construct
  misc_feature 1..22: note = chemically synthesized
  source 1..22: mol_type = other DNA
taaggaaggcaggtgtggctct

SEQ ID NO: 139307 - DNA, 22 bp, synthetic construct
  misc_feature 1..22: note = chemically synthesized
  source 1..22: mol_type = other DNA
aggaaggcaggtgtggctctgc

SEQ ID NO: 139308 - DNA, 22 bp, synthetic construct
  misc_feature 1..22: note = chemically synthesized
  source 1..22: mol_type = other DNA
tgcagtgtgattgggtacttgc

SEQ ID NO: 139309 - DNA, 22 bp, synthetic construct
  misc_feature 1..22: note = chemically synthesized
  source 1..22: mol_type = other DNA
cagtgtgattgggtacttgcag

SEQ ID NO: 139310 - DNA, 22 bp, synthetic construct
  misc_feature 1..22: note = chemically synthesized
  source 1..22: mol_type = other DNA
ggtacttgcaggacgaagggtg

SEQ ID NO: 139311 - DNA, 22 bp, synthetic construct
  misc_feature 1..22: note = chemically synthesized
  source 1..22: mol_type = other DNA
gcaggacgaagggtggggtggg

SEQ ID NO: 139312 - DNA, 22 bp, synthetic construct
  misc_feature 1..22: note = chemically synthesized
  source 1..22: mol_type = other DNA
caggacgaagggtggggtggga

SEQ ID NO: 139313 - DNA, 22 bp, synthetic construct
  misc_feature 1..22: note = chemically synthesized
  source 1..22: mol_type = other DNA
accttccattcctagtgcagag

SEQ ID NO: 139314 - DNA, 22 bp, synthetic construct
  misc_feature 1..22: note = chemically synthesized
  source 1..22: mol_type = other DNA
ccattcctagtgcagaggtcac

SEQ ID NO: 139315 - DNA, 22 bp, synthetic construct
  misc_feature 1..22: note = chemically synthesized
  source 1..22: mol_type = other DNA
cattcctagtgcagaggtcaca

SEQ ID NO: 139316 - DNA, 22 bp, synthetic construct
  misc_feature 1..22: note = chemically synthesized
  source 1..22: mol_type = other DNA
ctagtgcagaggtcacagccta

SEQ ID NO: 139317 - DNA, 22 bp, synthetic construct
  misc_feature 1..22: note = chemically synthesized
  source 1..22: mol_type = other DNA
gtgcagaggtcacagcctaaac

SEQ ID NO: 139318 - DNA, 22 bp, synthetic construct
  misc_feature 1..22: note = chemically synthesized
  source 1..22: mol_type = other DNA
aacatcaaattccttgaggtgc

SEQ ID NO: 139319 - DNA, 22 bp, synthetic construct
  misc_feature 1..22: note = chemically synthesized
  source 1..22: mol_type = other DNA
cttgaggtgcggtggctcactc

SEQ ID NO: 139320 - DNA, 22 bp, synthetic construct
  misc_feature 1..22: note = chemically synthesized
  source 1..22: mol_type = other DNA
gaggtgcggtggctcactcctg

SEQ ID NO: 139321 - DNA, 22 bp, synthetic construct
  misc_feature 1..22: note = chemically synthesized
  source 1..22: mol_type = other DNA
aggtgcggtggctcactcctgt

SEQ ID NO: 139322 - DNA, 22 bp, synthetic construct
  misc_feature 1..22: note = chemically synthesized
  source 1..22: mol_type = other DNA
actcctgtaatcacagcagttt

SEQ ID NO: 139323 - DNA, 22 bp, synthetic construct
  misc_feature 1..22: note = chemically synthesized
  source 1..22: mol_type = other DNA
ctgtaatcacagcagtttggga

SEQ ID NO: 139324 - DNA, 22 bp, synthetic construct
  misc_feature 1..22: note = chemically synthesized
  source 1..22: mol_type = other DNA
taatcacagcagtttgggacgc

SEQ ID NO: 139325 - DNA, 22 bp, synthetic construct
  misc_feature 1..22: note = chemically synthesized
  source 1..22: mol_type = other DNA
gggacgccaaggtgggcagatc

SEQ ID NO: 139326 - DNA, 22 bp, synthetic construct
  misc_feature 1..22: note = chemically synthesized
  source 1..22: mol_type = other DNA
ggacgccaaggtgggcagatca

SEQ ID NO: 139327 - DNA, 22 bp, synthetic construct
  misc_feature 1..22: note = chemically synthesized
  source 1..22: mol_type = other DNA
gaggtcaggagttggacaccag

SEQ ID NO: 139328 - DNA, 22 bp, synthetic construct
  misc_feature 1..22: note = chemically synthesized
  source 1..22: mol_type = other DNA
aggtcaggagttggacaccagc

SEQ ID NO: 139329 - DNA, 22 bp, synthetic construct
  misc_feature 1..22: note = chemically synthesized
  source 1..22: mol_type = other DNA
gacaccagcccagccaacatag

SEQ ID NO: 139330 - DNA, 22 bp, synthetic construct
  misc_feature 1..22: note = chemically synthesized
  source 1..22: mol_type = other DNA
gtctctgcttaaaaatataaaa

SEQ ID NO: 139331 - DNA, 22 bp, synthetic construct
  misc_feature 1..22: note = chemically synthesized
  source 1..22: mol_type = other DNA
tgcttaaaaatataaaaattag

SEQ ID NO: 139332 - DNA, 22 bp, synthetic construct
  misc_feature 1..22: note = chemically synthesized
  source 1..22: mol_type = other DNA
cttaaaaatataaaaattagct

SEQ ID NO: 139333 - DNA, 22 bp, synthetic construct
  misc_feature 1..22: note = chemically synthesized
  source 1..22: mol_type = other DNA
aaaaatataaaaattagctgga

SEQ ID NO: 139334 - DNA, 22 bp, synthetic construct
  misc_feature 1..22: note = chemically synthesized
  source 1..22: mol_type = other DNA
aaaatataaaaattagctggac

SEQ ID NO: 139335 - DNA, 22 bp, synthetic construct
  misc_feature 1..22: note = chemically synthesized
  source 1..22: mol_type = other DNA
gctggacgtggtgacgggagcc

SEQ ID NO: 139336 - DNA, 22 bp, synthetic construct
  misc_feature 1..22: note = chemically synthesized
  source 1..22: mol_type = other DNA
gacgtggtgacgggagcctgta

SEQ ID NO: 139337 - DNA, 22 bp, synthetic construct
  misc_feature 1..22: note = chemically synthesized
  source 1..22: mol_type = other DNA
taatccaactacttgggaggct

SEQ ID NO: 139338 - DNA, 22 bp, synthetic construct
  misc_feature 1..22: note = chemically synthesized
  source 1..22: mol_type = other DNA
cttgggaggctgaggcaggaga

SEQ ID NO: 139339 - DNA, 22 bp, synthetic construct
  misc_feature 1..22: note = chemically synthesized
  source 1..22: mol_type = other DNA
gggaggctgaggcaggagaatc

SEQ ID NO: 139340 - DNA, 22 bp, synthetic construct
  misc_feature 1..22: note = chemically synthesized
  source 1..22: mol_type = other DNA
ggaggctgaggcaggagaatcg

SEQ ID NO: 139341 - DNA, 22 bp, synthetic construct
  misc_feature 1..22: note = chemically synthesized
  source 1..22: mol_type = other DNA
aggcaggagaatcgcttgaacc

SEQ ID NO: 139342 - DNA, 22 bp, synthetic construct
  misc_feature 1..22: note = chemically synthesized
  source 1..22: mol_type = other DNA
gaaccggggaggtggagtttgc

SEQ ID NO: 139343 - DNA, 22 bp, synthetic construct
  misc_feature 1..22: note = chemically synthesized
  source 1..22: mol_type = other DNA
aaccggggaggtggagtttgca

SEQ ID NO: 139344 - DNA, 22 bp, synthetic construct
  misc_feature 1..22: note = chemically synthesized
  source 1..22: mol_type = other DNA
gcactgagcagagatcatgcca

SEQ ID NO: 139345 - DNA, 22 bp, synthetic construct
  misc_feature 1..22: note = chemically synthesized
  source 1..22: mol_type = other DNA
cactgagcagagatcatgccat

SEQ ID NO: 139346 - DNA, 22 bp, synthetic construct
  misc_feature 1..22: note = chemically synthesized
  source 1..22: mol_type = other DNA
agcagagatcatgccattgcac

SEQ ID NO: 139347 - DNA, 22 bp, synthetic construct
  misc_feature 1..22: note = chemically synthesized
  source 1..22: mol_type = other DNA
cactccagcctccagagcgaga

SEQ ID NO: 139348 - DNA, 22 bp, synthetic construct
  misc_feature 1..22: note = chemically synthesized
  source 1..22: mol_type = other DNA
cagcctccagagcgagactctg

SEQ ID NO: 139349 - DNA, 22 bp, synthetic construct
  misc_feature 1..22: note = chemically synthesized
  source 1..22: mol_type = other DNA
cagagcgagactctgtctaaag

SEQ ID NO: 139350 - DNA, 22 bp, synthetic construct
  misc_feature 1..22: note = chemically synthesized
  source 1..22: mol_type = other DNA
tgtctaaagaaaaacgaaaaca

SEQ ID NO: 139351 - DNA, 22 bp, synthetic construct
  misc_feature 1..22: note = chemically synthesized
  source 1..22: mol_type = other DNA
tctaaagaaaaacgaaaacaaa

SEQ ID NO: 139352 - DNA, 22 bp, synthetic construct
  misc_feature 1..22: note = chemically synthesized
  source 1..22: mol_type = other DNA
aagaaaaacgaaaacaaacaaa

SEQ ID NO: 139353 - DNA, 22 bp, synthetic construct
  misc_feature 1..22: note = chemically synthesized
  source 1..22: mol_type = other DNA
cctgaccgaacagaattctgtc

SEQ ID NO: 139354 - DNA, 22 bp, synthetic construct
  misc_feature 1..22: note = chemically synthesized
  source 1..22: mol_type = other DNA
accgaacagaattctgtctgat

SEQ ID NO: 139355 - DNA, 22 bp, synthetic construct
  misc_feature 1..22: note = chemically synthesized
  source 1..22: mol_type = other DNA
tgtctgattgttctctgactta

SEQ ID NO: 139356 - DNA, 22 bp, synthetic construct
  misc_feature 1..22: note = chemically synthesized
  source 1..22: mol_type = other DNA
tctgattgttctctgacttatc

SEQ ID NO: 139357 - DNA, 22 bp, synthetic construct
  misc_feature 1..22: note = chemically synthesized
  source 1..22: mol_type = other DNA
attgttctctgacttatctacc

SEQ ID NO: 139358 - DNA, 22 bp, synthetic construct
  misc_feature 1..22: note = chemically synthesized
  source 1..22: mol_type = other DNA
ttctctgacttatctaccattt

SEQ ID NO: 139359 - DNA, 22 bp, synthetic construct
  misc_feature 1..22: note = chemically synthesized
  source 1..22: mol_type = other DNA
tctgacttatctaccattttcc

SEQ ID NO: 139360 - DNA, 22 bp, synthetic construct
  misc_feature 1..22: note = chemically synthesized
  source 1..22: mol_type = other DNA
tgacttatctaccattttccct

SEQ ID NO: 139361 - DNA, 22 bp, synthetic construct
  misc_feature 1..22: note = chemically synthesized
  source 1..22: mol_type = other DNA
acttatctaccattttccctcc

SEQ ID NO: 139362 - DNA, 22 bp, synthetic construct
  misc_feature 1..22: note = chemically synthesized
  source 1..22: mol_type = other DNA
atctaccattttccctccttaa

SEQ ID NO: 139363 - DNA, 22 bp, synthetic construct
  misc_feature 1..22: note = chemically synthesized
  source 1..22: mol_type = other DNA
tctaccattttccctccttaaa

SEQ ID NO: 139364 - DNA, 22 bp, synthetic construct
  misc_feature 1..22: note = chemically synthesized
  source 1..22: mol_type = other DNA
ccattttccctccttaaagaaa

SEQ ID NO: 139365 - DNA, 22 bp, synthetic construct
  misc_feature 1..22: note = chemically synthesized
  source 1..22: mol_type = other DNA
tccctccttaaagaaactgtga

SEQ ID NO: 139366 - DNA, 22 bp, synthetic construct
  misc_feature 1..22: note = chemically synthesized
  source 1..22: mol_type = other DNA
ccctccttaaagaaactgtgaa

SEQ ID NO: 139367 - DNA, 22 bp, synthetic construct
  misc_feature 1..22: note = chemically synthesized
  source 1..22: mol_type = other DNA
cctccttaaagaaactgtgaac

SEQ ID NO: 139368 - DNA, 22 bp, synthetic construct
  misc_feature 1..22: note = chemically synthesized
  source 1..22: mol_type = other DNA
cttaaagaaactgtgaacttcc

SEQ ID NO: 139369 - DNA, 22 bp, synthetic construct
  misc_feature 1..22: note = chemically synthesized
  source 1..22: mol_type = other DNA
aaagaaactgtgaacttccttc

SEQ ID NO: 139370 - DNA, 22 bp, synthetic construct
  misc_feature 1..22: note = chemically synthesized
  source 1..22: mol_type = other DNA
aagaaactgtgaacttccttca

SEQ ID NO: 139371 - DNA, 22 bp, synthetic construct
  misc_feature 1..22: note = chemically synthesized
  source 1..22: mol_type = other DNA
tgaacttccttcagctagaggg

SEQ ID NO: 139372 - DNA, 22 bp, synthetic construct
  misc_feature 1..22: note = chemically synthesized
  source 1..22: mol_type = other DNA
ccttcagctagaggggcctggc

SEQ ID NO: 139373 - DNA, 22 bp, synthetic construct
  misc_feature 1..22: note = chemically synthesized
  source 1..22: mol_type = other DNA
cttcagctagaggggcctggct

SEQ ID NO: 139374 - DNA, 22 bp, synthetic construct
  misc_feature 1..22: note = chemically synthesized
  source 1..22: mol_type = other DNA
cagctagaggggcctggctcag

SEQ ID NO: 139375 - DNA, 22 bp, synthetic construct
  misc_feature 1..22: note = chemically synthesized
  source 1..22: mol_type = other DNA
agctagaggggcctggctcaga

SEQ ID NO: 139376 - DNA, 22 bp, synthetic construct
  misc_feature 1..22: note = chemically synthesized
  source 1..22: mol_type = other DNA
gaggggcctggctcagaagcct

SEQ ID NO: 139377 - DNA, 22 bp, synthetic construct
  misc_feature 1..22: note = chemically synthesized
  source 1..22: mol_type = other DNA
gctcagaagcctctggtcagca

SEQ ID NO: 139378 - DNA, 22 bp, synthetic construct
  misc_feature 1..22: note = chemically synthesized
  source 1..22: mol_type = other DNA
agaagcctctggtcagcatcca

SEQ ID NO: 139379 - DNA, 22 bp, synthetic construct
  misc_feature 1..22: note = chemically synthesized
  source 1..22: mol_type = other DNA
tggtcagcatccaagaaatact

SEQ ID NO: 139380 - DNA, 22 bp, synthetic construct
  misc_feature 1..22: note = chemically synthesized
  source 1..22: mol_type = other DNA
gtcagcatccaagaaatacttg

SEQ ID NO: 139381 - DNA, 22 bp, synthetic construct
  misc_feature 1..22: note = chemically synthesized
  source 1..22: mol_type = other DNA
gatgtcactttggctaaaggta

SEQ ID NO: 139382 - DNA, 22 bp, synthetic construct
  misc_feature 1..22: note = chemically synthesized
  source 1..22: mol_type = other DNA
atgtcactttggctaaaggtat

SEQ ID NO: 139383 - DNA, 22 bp, synthetic construct
  misc_feature 1..22: note = chemically synthesized
  source 1..22: mol_type = other DNA
tggctaaaggtatgatgtgtag

SEQ ID NO: 139384 - DNA, 22 bp, synthetic construct
  misc_feature 1..22: note = chemically synthesized
  source 1..22: mol_type = other DNA
ggctaaaggtatgatgtgtaga

SEQ ID NO: 139385 - DNA, 22 bp, synthetic construct
  misc_feature 1..22: note = chemically synthesized
  source 1..22: mol_type = other DNA
gctaaaggtatgatgtgtagac

SEQ ID NO: 139386 - DNA, 22 bp, synthetic construct
  misc_feature 1..22: note = chemically synthesized
  source 1..22: mol_type = other DNA
aaggtatgatgtgtagacaagc

SEQ ID NO: 139387 - DNA, 22 bp, synthetic construct
  misc_feature 1..22: note = chemically synthesized
  source 1..22: mol_type = other DNA
cagagatggtttctcatttcca

SEQ ID NO: 139388 - DNA, 22 bp, synthetic construct
  misc_feature 1..22: note = chemically synthesized
  source 1..22: mol_type = other DNA
ctcatttccatatccacccacc

SEQ ID NO: 139389 - DNA, 22 bp, synthetic construct
  misc_feature 1..22: note = chemically synthesized
  source 1..22: mol_type = other DNA
tcatttccatatccacccaccc

SEQ ID NO: 139390 - DNA, 22 bp, synthetic construct
  misc_feature 1..22: note = chemically synthesized
  source 1..22: mol_type = other DNA
atttccatatccacccacccag

SEQ ID NO: 139391 - DNA, 22 bp, synthetic construct
  misc_feature 1..22: note = chemically synthesized
  source 1..22: mol_type = other DNA
ccatatccacccacccagcttt

SEQ ID NO: 139392 - DNA, 22 bp, synthetic construct
  misc_feature 1..22: note = chemically synthesized
  source 1..22: mol_type = other DNA
catatccacccacccagctttc

SEQ ID NO: 139393 - DNA, 22 bp, synthetic construct
  misc_feature 1..22: note = chemically synthesized
  source 1..22: mol_type = other DNA
tccaattttaaagccaattctg

SEQ ID NO: 139394 - DNA, 22 bp, synthetic construct
  misc_feature 1..22: note = chemically synthesized
  source 1..22: mol_type = other DNA
ccaattttaaagccaattctga

SEQ ID NO: 139395 - DNA, 22 bp, synthetic construct
  misc_feature 1..22: note = chemically synthesized
  source 1..22: mol_type = other DNA
caattttaaagccaattctgag

SEQ ID NO: 139396 - DNA, 22 bp, synthetic construct
  misc_feature 1..22: note = chemically synthesized
  source 1..22: mol_type = other DNA
taaagccaattctgaggtagag

SEQ ID NO: 139397 - DNA, 22 bp, synthetic construct
  misc_feature 1..22: note = chemically synthesized
  source 1..22: mol_type = other DNA
aaagccaattctgaggtagaga

SEQ ID NO: 139398 - DNA, 22 bp, synthetic construct
  misc_feature 1..22: note = chemically synthesized
  source 1..22: mol_type = other DNA
aagccaattctgaggtagagac

SEQ ID NO: 139399 - DNA, 22 bp, synthetic construct
  misc_feature 1..22: note = chemically synthesized
  source 1..22: mol_type = other DNA
tgaggtagagactgtgatgaac

SEQ ID NO: 139400 - DNA, 22 bp, synthetic construct
  misc_feature 1..22: note = chemically synthesized
  source 1..22: mol_type = other DNA
aggtagagactgtgatgaacaa

SEQ ID NO: 139401 - DNA, 22 bp, synthetic construct
  misc_feature 1..22: note = chemically synthesized
  source 1..22: mol_type = other DNA
tgatgaacaaacaccttgacaa

SEQ ID NO: 139402 - DNA, 22 bp, synthetic construct
  misc_feature 1..22: note = chemically synthesized
  source 1..22: mol_type = other DNA
gacaaaattcaacccaaagact

SEQ ID NO: 139403 - DNA, 22 bp, synthetic construct
  misc_feature 1..22: note = chemically synthesized
  source 1..22: mol_type = other DNA
acaaaattcaacccaaagactc

SEQ ID NO: 139404 - DNA, 22 bp, synthetic construct
  misc_feature 1..22: note = chemically synthesized
  source 1..22: mol_type = other DNA
aacccaaagactcactttgcct

SEQ ID NO: 139405 - DNA, 22 bp, synthetic construct
  misc_feature 1..22: note = chemically synthesized
  source 1..22: mol_type = other DNA
actttgcctagcttcaaaatcc

SEQ ID NO: 139406 - DNA, 22 bp, synthetic construct
  misc_feature 1..22: note = chemically synthesized
  source 1..22: mol_type = other DNA
tgcctagcttcaaaatccttac

SEQ ID NO: 139407 - DNA, 22 bp, synthetic construct
  misc_feature 1..22: note = chemically synthesized
  source 1..22: mol_type = other DNA
gcctagcttcaaaatccttact

SEQ ID NO: 139408 - DNA, 22 bp, synthetic construct
  misc_feature 1..22: note = chemically synthesized
  source 1..22: mol_type = other DNA
cctagcttcaaaatccttactc

SEQ ID NO: 139409 - DNA, 22 bp, synthetic construct
  misc_feature 1..22: note = chemically synthesized
  source 1..22: mol_type = other DNA
gcttcaaaatccttactctgac

SEQ ID NO: 139410 - DNA, 22 bp, synthetic construct
  misc_feature 1..22: note = chemically synthesized
  source 1..22: mol_type = other DNA
caaaatccttactctgacatat

SEQ ID NO: 139411 - DNA, 22 bp, synthetic construct
  misc_feature 1..22: note = chemically synthesized
  source 1..22: mol_type = other DNA
aaaatccttactctgacatata

SEQ ID NO: 139412 - DNA, 22 bp, synthetic construct
  misc_feature 1..22: note = chemically synthesized
  source 1..22: mol_type = other DNA
actctgacatatactcacagcc

SEQ ID NO: 139413 - DNA, 22 bp, synthetic construct
  misc_feature 1..22: note = chemically synthesized
  source 1..22: mol_type = other DNA
ctctgacatatactcacagcca

SEQ ID NO: 139414 - DNA, 22 bp, synthetic construct
  misc_feature 1..22: note = chemically synthesized
  source 1..22: mol_type = other DNA
tgacatatactcacagccagaa

SEQ ID NO: 139415 - DNA, 22 bp, synthetic construct
  misc_feature 1..22: note = chemically synthesized
  source 1..22: mol_type = other DNA
acatatactcacagccagaaat

SEQ ID NO: 139416 - DNA, 22 bp, synthetic construct
  misc_feature 1..22: note = chemically synthesized
  source 1..22: mol_type = other DNA
acagccagaaattagcatgcac

SEQ ID NO: 139417 - DNA, 22 bp, synthetic construct
  misc_feature 1..22: note = chemically synthesized
  source 1..22: mol_type = other DNA
gcatgcactagagtgtgcatga

SEQ ID NO: 139418 - DNA, 22 bp, synthetic construct
  misc_feature 1..22: note = chemically synthesized
  source 1..22: mol_type = other DNA
gagtgtgcatgagtgcaacaca

SEQ ID NO: 139419 - DNA, 22 bp, synthetic construct
  misc_feature 1..22: note = chemically synthesized
  source 1..22: mol_type = other DNA
catattctctgtcagaaaatcc

SEQ ID NO: 139420 - DNA, 22 bp, synthetic construct
  misc_feature 1..22: note = chemically synthesized
  source 1..22: mol_type = other DNA
tctgtcagaaaatcctgttggt

SEQ ID NO: 139421 - DNA, 22 bp, synthetic construct
  misc_feature 1..22: note = chemically synthesized
  source 1..22: mol_type = other DNA
tgtcagaaaatcctgttggttt

SEQ ID NO: 139422 - DNA, 22 bp, synthetic construct
  misc_feature 1..22: note = chemically synthesized
  source 1..22: mol_type = other DNA
tcagaaaatcctgttggttttt

SEQ ID NO: 139423 - DNA, 22 bp, synthetic construct
  misc_feature 1..22: note = chemically synthesized
  source 1..22: mol_type = other DNA
ttggtttttcgtgaaaggatgt

SEQ ID NO: 139424 - DNA, 22 bp, synthetic construct
  misc_feature 1..22: note = chemically synthesized
  source 1..22: mol_type = other DNA
gtttttcgtgaaaggatgtttt

SEQ ID NO: 139425 - DNA, 22 bp, synthetic construct
  misc_feature 1..22: note = chemically synthesized
  source 1..22: mol_type = other DNA
ttcgtgaaaggatgttttcaga

SEQ ID NO: 139426 - DNA, 22 bp, synthetic construct
  misc_feature 1..22: note = chemically synthesized
  source 1..22: mol_type = other DNA
tcgtgaaaggatgttttcagag

SEQ ID NO: 139427 - DNA, 22 bp, synthetic construct
  misc_feature 1..22: note = chemically synthesized
  source 1..22: mol_type = other DNA
cgtgaaaggatgttttcagagg

SEQ ID NO: 139428 - DNA, 22 bp, synthetic construct
  misc_feature 1..22: note = chemically synthesized
  source 1..22: mol_type = other DNA
gtgaaaggatgttttcagaggc

SEQ ID NO: 139429 - DNA, 22 bp, synthetic construct
  misc_feature 1..22: note = chemically synthesized
  source 1..22: mol_type = other DNA
tcagaggctgaccccttgcctt

SEQ ID NO: 139430 - DNA, 22 bp, synthetic construct
  misc_feature 1..22: note = chemically synthesized
  source 1..22: mol_type = other DNA
cagaggctgaccccttgccttc

SEQ ID NO: 139431 - DNA, 22 bp, synthetic construct
  misc_feature 1..22: note = chemically synthesized
  source 1..22: mol_type = other DNA
agaggctgaccccttgccttca

SEQ ID NO: 139432 - DNA, 22 bp, synthetic construct
  misc_feature 1..22: note = chemically synthesized
  source 1..22: mol_type = other DNA
accccttgccttcacctccaat

SEQ ID NO: 139433 - DNA, 22 bp, synthetic construct
  misc_feature 1..22: note = chemically synthesized
  source 1..22: mol_type = other DNA
gccttcacctccaatgctacca

SEQ ID NO: 139434 - DNA, 22 bp, synthetic construct
  misc_feature 1..22: note = chemically synthesized
  source 1..22: mol_type = other DNA
ccttcacctccaatgctaccac

SEQ ID NO: 139435 - DNA, 22 bp, synthetic construct
  misc_feature 1..22: note = chemically synthesized
  source 1..22: mol_type = other DNA
cacctccaatgctaccactctg

SEQ ID NO: 139436 - DNA, 22 bp, synthetic construct
  misc_feature 1..22: note = chemically synthesized
  source 1..22: mol_type = other DNA
acctccaatgctaccactctgg

SEQ ID NO: 139437 - DNA, 22 bp, synthetic construct
  misc_feature 1..22: note = chemically synthesized
  source 1..22: mol_type = other DNA
caatgctaccactctggtctaa

SEQ ID NO: 139438 - DNA, 22 bp, synthetic construct
  misc_feature 1..22: note = chemically synthesized
  source 1..22: mol_type = other DNA
ccactctggtctaagtcactgt

SEQ ID NO: 139439 - DNA, 22 bp, synthetic construct
  misc_feature 1..22: note = chemically synthesized
  source 1..22: mol_type = other DNA
tggtctaagtcactgtcaccac

SEQ ID NO: 139440 - DNA, 22 bp, synthetic construct
  misc_feature 1..22: note = chemically synthesized
  source 1..22: mol_type = other DNA
gtctaagtcactgtcaccacca

SEQ ID NO: 139441 - DNA, 22 bp, synthetic construct
  misc_feature 1..22: note = chemically synthesized
  source 1..22: mol_type = other DNA
agtcactgtcaccaccacctaa

SEQ ID NO: 139442 - DNA, 22 bp, synthetic construct
  misc_feature 1..22: note = chemically synthesized
  source 1..22: mol_type = other DNA
tcaccaccacctaaattatagc

SEQ ID NO: 139443 - DNA, 22 bp, synthetic construct
  misc_feature 1..22: note = chemically synthesized
  source 1..22: mol_type = other DNA
aattatagctgttgactcataa

SEQ ID NO: 139444 - DNA, 22 bp, synthetic construct
  misc_feature 1..22: note = chemically synthesized
  source 1..22: mol_type = other DNA
tagctgttgactcataacaatc

SEQ ID NO: 139445 - DNA, 22 bp, synthetic construct
  misc_feature 1..22: note = chemically synthesized
  source 1..22: mol_type = other DNA
ttgactcataacaatcttcctg

SEQ ID NO: 139446 - DNA, 22 bp, synthetic construct
  misc_feature 1..22: note = chemically synthesized
  source 1..22: mol_type = other DNA
actcataacaatcttcctgctt

SEQ ID NO: 139447 - DNA, 22 bp, synthetic construct
  misc_feature 1..22: note = chemically synthesized
  source 1..22: mol_type = other DNA
ataacaatcttcctgcttctac

SEQ ID NO: 139448 - DNA, 22 bp, synthetic construct
  misc_feature 1..22: note = chemically synthesized
  source 1..22: mol_type = other DNA
cctgcttctaccactgccccac

SEQ ID NO: 139449 - DNA, 22 bp, synthetic construct
  misc_feature 1..22: note = chemically synthesized
  source 1..22: mol_type = other DNA
ctgcttctaccactgccccact

SEQ ID NO: 139450 - DNA, 22 bp, synthetic construct
  misc_feature 1..22: note = chemically synthesized
  source 1..22: mol_type = other DNA
cttctaccactgccccactaca

SEQ ID NO: 139451 - DNA, 22 bp, synthetic construct
  misc_feature 1..22: note = chemically synthesized
  source 1..22: mol_type = other DNA
ctaccactgccccactacaatt

SEQ ID NO: 139452 - DNA, 22 bp, synthetic construct
  misc_feature 1..22: note = chemically synthesized
  source 1..22: mol_type = other DNA
taccactgccccactacaattt

SEQ ID NO: 139453 - DNA, 22 bp, synthetic construct
  misc_feature 1..22: note = chemically synthesized
  source 1..22: mol_type = other DNA
ccactgccccactacaatttct

SEQ ID NO: 139454 - DNA, 22 bp, synthetic construct
  misc_feature 1..22: note = chemically synthesized
  source 1..22: mol_type = other DNA
ccccactacaatttcttcccaa

SEQ ID NO: 139455 - DNA, 22 bp, synthetic construct
  misc_feature 1..22: note = chemically synthesized
  source 1..22: mol_type = other DNA
caatttcttcccaatatactat

SEQ ID NO: 139456 - DNA, 22 bp, synthetic construct
  misc_feature 1..22: note = chemically synthesized
  source 1..22: mol_type = other DNA
cttcccaatatactatccaaat

SEQ ID NO: 139457 - DNA, 22 bp, synthetic construct
  misc_feature 1..22: note = chemically synthesized
  source 1..22: mol_type = other DNA
ttcccaatatactatccaaatt

SEQ ID NO: 139458 - DNA, 22 bp, synthetic construct
  misc_feature 1..22: note = chemically synthesized
  source 1..22: mol_type = other DNA
cccaatatactatccaaattag

SEQ ID NO: 139459 - DNA, 22 bp, synthetic construct
  misc_feature 1..22: note = chemically synthesized
  source 1..22: mol_type = other DNA
ccaatatactatccaaattagt

SEQ ID NO: 139460 - DNA, 22 bp, synthetic construct
  misc_feature 1..22: note = chemically synthesized
  source 1..22: mol_type = other DNA
tccaaattagtcttttcaaaat

SEQ ID NO: 139461 - DNA, 22 bp, synthetic construct
  misc_feature 1..22: note = chemically synthesized
  source 1..22: mol_type = other DNA
gtcttttcaaaatgtaagtcat

SEQ ID NO: 139462 - DNA, 22 bp, synthetic construct
  misc_feature 1..22: note = chemically synthesized
  source 1..22: mol_type = other DNA
ttcaaaatgtaagtcatatatg

SEQ ID NO: 139463 - DNA, 22 bp, synthetic construct
  misc_feature 1..22: note = chemically synthesized
  source 1..22: mol_type = other DNA
tcaaaatgtaagtcatatatgg

SEQ ID NO: 139464 - DNA, 22 bp, synthetic construct
  misc_feature 1..22: note = chemically synthesized
  source 1..22: mol_type = other DNA
caaaatgtaagtcatatatggt

SEQ ID NO: 139465 - DNA, 22 bp, synthetic construct
  misc_feature 1..22: note = chemically synthesized
  source 1..22: mol_type = other DNA
aaaatgtaagtcatatatggtc

SEQ ID NO: 139466 - DNA, 22 bp, synthetic construct
  misc_feature 1..22: note = chemically synthesized
  source 1..22: mol_type = other DNA
tttgttcaaagtcttctgatag

SEQ ID NO: 139467 - DNA, 22 bp, synthetic construct
  misc_feature 1..22: note = chemically synthesized
  source 1..22: mol_type = other DNA
tgttcaaagtcttctgatagtt

SEQ ID NO: 139468 - DNA, 22 bp, synthetic construct
  misc_feature 1..22: note = chemically synthesized
  source 1..22: mol_type = other DNA
gttcaaagtcttctgatagttt

SEQ ID NO: 139469 - DNA, 22 bp, synthetic construct
  misc_feature 1..22: note = chemically synthesized
  source 1..22: mol_type = other DNA
ttcaaagtcttctgatagtttc

SEQ ID NO: 139470 - DNA, 22 bp, synthetic construct
  misc_feature 1..22: note = chemically synthesized
  source 1..22: mol_type = other DNA
aaagtcttctgatagtttccta

SEQ ID NO: 139471 - DNA, 22 bp, synthetic construct
  misc_feature 1..22: note = chemically synthesized
  source 1..22: mol_type = other DNA
ctgatagtttcctatatcattt

SEQ ID NO: 139472 - DNA, 22 bp, synthetic construct
  misc_feature 1..22: note = chemically synthesized
  source 1..22: mol_type = other DNA
tgatagtttcctatatcattta

SEQ ID NO: 139473 - DNA, 22 bp, synthetic construct
  misc_feature 1..22: note = chemically synthesized
  source 1..22: mol_type = other DNA
atagtttcctatatcatttata

SEQ ID NO: 139474 - DNA, 22 bp, synthetic construct
  misc_feature 1..22: note = chemically synthesized
  source 1..22: mol_type = other DNA
cctatatcatttataataaaac

SEQ ID NO: 139475 - DNA, 22 bp, synthetic construct
  misc_feature 1..22: note = chemically synthesized
  source 1..22: mol_type = other DNA
ctatatcatttataataaaacc

SEQ ID NO: 139476 - DNA, 22 bp, synthetic construct
  misc_feature 1..22: note = chemically synthesized
  source 1..22: mol_type = other DNA
tatcatttataataaaaccaaa

SEQ ID NO: 139477 - DNA, 22 bp, synthetic construct
  misc_feature 1..22: note = chemically synthesized
  source 1..22: mol_type = other DNA
ataataaaaccaaatccttaca

SEQ ID NO: 139478 - DNA, 22 bp, synthetic construct
  misc_feature 1..22: note = chemically synthesized
  source 1..22: mol_type = other DNA
taataaaaccaaatccttacaa

SEQ ID NO: 139479 - DNA, 22 bp, synthetic construct
  misc_feature 1..22: note = chemically synthesized
  source 1..22: mol_type = other DNA
acaattctctacaatagttgtt

SEQ ID NO: 139480 - DNA, 22 bp, synthetic construct
  misc_feature 1..22: note = chemically synthesized
  source 1..22: mol_type = other DNA
caattctctacaatagttgttc

SEQ ID NO: 139481 - DNA, 22 bp, synthetic construct
  misc_feature 1..22: note = chemically synthesized
  source 1..22: mol_type = other DNA
tctacaatagttgttcatgcat

SEQ ID NO: 139482 - DNA, 22 bp, synthetic construct
  misc_feature 1..22: note = chemically synthesized
  source 1..22: mol_type = other DNA
tacaatagttgttcatgcatat

SEQ ID NO: 139483 - DNA, 22 bp, synthetic construct
  misc_feature 1..22: note = chemically synthesized
  source 1..22: mol_type = other DNA
caatagttgttcatgcatatat

SEQ ID NO: 139484 - DNA, 22 bp, synthetic construct
  misc_feature 1..22: note = chemically synthesized
  source 1..22: mol_type = other DNA
ttcatgcatatattatgtttat

SEQ ID NO: 139485 - DNA, 22 bp, synthetic construct
  misc_feature 1..22: note = chemically synthesized
  source 1..22: mol_type = other DNA
atgcatatattatgtttattac

SEQ ID NO: 139486 - DNA, 22 bp, synthetic construct
  misc_feature 1..22: note = chemically synthesized
  source 1..22: mol_type = other DNA
tgtttattacagatacatatat

SEQ ID NO: 139487 - DNA, 22 bp, synthetic construct
  misc_feature 1..22: note = chemically synthesized
  source 1..22: mol_type = other DNA
attacagatacatatatatagc

SEQ ID NO: 139488 - DNA, 22 bp, synthetic construct
  misc_feature 1..22: note = chemically synthesized
  source 1..22: mol_type = other DNA
ttacagatacatatatatagct

SEQ ID NO: 139489 - DNA, 22 bp, synthetic construct
  misc_feature 1..22: note = chemically synthesized
  source 1..22: mol_type = other DNA
cagatacatatatatagctctc

SEQ ID NO: 139490 - DNA, 22 bp, synthetic construct
  misc_feature 1..22: note = chemically synthesized
  source 1..22: mol_type = other DNA
tcatataaataaatatatatat

SEQ ID NO: 139491 - DNA, 22 bp, synthetic construct
  misc_feature 1..22: note = chemically synthesized
  source 1..22: mol_type = other DNA
atataaataaatatatatattt

SEQ ID NO: 139492 - DNA, 22 bp, synthetic construct
  misc_feature 1..22: note = chemically synthesized
  source 1..22: mol_type = other DNA
atgtgtatgtgtgtagagtgtt

SEQ ID NO: 139493 - DNA, 22 bp, synthetic construct
  misc_feature 1..22: note = chemically synthesized
  source 1..22: mol_type = other DNA
tgtgtatgtgtgtagagtgttt

SEQ ID NO: 139494 - DNA, 22 bp, synthetic construct
  misc_feature 1..22: note = chemically synthesized
  source 1..22: mol_type = other DNA
tttcttacaactctatgatgta

SEQ ID NO: 139495 - DNA, 22 bp, synthetic construct
  misc_feature 1..22: note = chemically synthesized
  source 1..22: mol_type = other DNA
ttcttacaactctatgatgtag

SEQ ID NO: 139496 - DNA, 22 bp, synthetic construct
  misc_feature 1..22: note = chemically synthesized
  source 1..22: mol_type = other DNA
tcttacaactctatgatgtagg

SEQ ID NO: 139497 - DNA, 22 bp, synthetic construct
  misc_feature 1..22: note = chemically synthesized
  source 1..22: mol_type = other DNA
cttacaactctatgatgtaggt

SEQ ID NO: 139498 - DNA, 22 bp, synthetic construct
  misc_feature 1..22: note = chemically synthesized
  source 1..22: mol_type = other DNA
ttacaactctatgatgtaggta

SEQ ID NO: 139499 - DNA, 22 bp, synthetic construct
  misc_feature 1..22: note = chemically synthesized
  source 1..22: mol_type = other DNA
acaactctatgatgtaggtatt

SEQ ID NO: 139500 - DNA, 22 bp, synthetic construct
  misc_feature 1..22: note = chemically synthesized
  source 1..22: mol_type = other DNA
caactctatgatgtaggtatta

SEQ ID NO: 139501 - DNA, 22 bp, synthetic construct
  misc_feature 1..22: note = chemically synthesized
  source 1..22: mol_type = other DNA
tatgatgtaggtattattagtg

SEQ ID NO: 139502 - DNA, 22 bp, synthetic construct
  misc_feature 1..22: note = chemically synthesized
  source 1..22: mol_type = other DNA
tgatgtaggtattattagtgtc

SEQ ID NO: 139503 - DNA, 22 bp, synthetic construct
  misc_feature 1..22: note = chemically synthesized
  source 1..22: mol_type = other DNA
ttagtgtcccaaattttataat

SEQ ID NO: 139504 - DNA, 22 bp, synthetic construct
  misc_feature 1..22: note = chemically synthesized
  source 1..22: mol_type = other DNA
gtgtcccaaattttataattta

SEQ ID NO: 139505 - DNA, 22 bp, synthetic construct
  misc_feature 1..22: note = chemically synthesized
  source 1..22: mol_type = other DNA
tataatttaggacttctatgat

SEQ ID NO: 139506 - DNA, 22 bp, synthetic construct
  misc_feature 1..22: note = chemically synthesized
  source 1..22: mol_type = other DNA
ataatttaggacttctatgatc

SEQ ID NO: 139507 - DNA, 22 bp, synthetic construct
  misc_feature 1..22: note = chemically synthesized
  source 1..22: mol_type = other DNA
taatttaggacttctatgatct

SEQ ID NO: 139508 - DNA, 22 bp, synthetic construct
  misc_feature 1..22: note = chemically synthesized
  source 1..22: mol_type = other DNA
aggacttctatgatctcatctt

SEQ ID NO: 139509 - DNA, 22 bp, synthetic construct
  misc_feature 1..22: note = chemically synthesized
  source 1..22: mol_type = other DNA
ggacttctatgatctcatcttt

SEQ ID NO: 139510 - DNA, 22 bp, synthetic construct
  misc_feature 1..22: note = chemically synthesized
  source 1..22: mol_type = other DNA
ctatgatctcatcttttattct

SEQ ID NO: 139511 - DNA, 22 bp, synthetic construct
  misc_feature 1..22: note = chemically synthesized
  source 1..22: mol_type = other DNA
tatgatctcatcttttattctc

SEQ ID NO: 139512 - DNA, 22 bp, synthetic construct
  misc_feature 1..22: note = chemically synthesized
  source 1..22: mol_type = other DNA
tgatctcatcttttattctccc

SEQ ID NO: 139513 - DNA, 22 bp, synthetic construct
  misc_feature 1..22: note = chemically synthesized
  source 1..22: mol_type = other DNA
atcttttattctccccttcacc

SEQ ID NO: 139514 - DNA, 22 bp, synthetic construct
  misc_feature 1..22: note = chemically synthesized
  source 1..22: mol_type = other DNA
ttattctccccttcaccgaatc

SEQ ID NO: 139515 - DNA, 22 bp, synthetic construct
  misc_feature 1..22: note = chemically synthesized
  source 1..22: mol_type = other DNA
tattctccccttcaccgaatct

SEQ ID NO: 139516 - DNA, 22 bp, synthetic construct
  misc_feature 1..22: note = chemically synthesized
  source 1..22: mol_type = other DNA
attctccccttcaccgaatctc

SEQ ID NO: 139517 - DNA, 22 bp, synthetic construct
  misc_feature 1..22: note = chemically synthesized
  source 1..22: mol_type = other DNA
ttctccccttcaccgaatctca

SEQ ID NO: 139518 - DNA, 22 bp, synthetic construct
  misc_feature 1..22: note = chemically synthesized
  source 1..22: mol_type = other DNA
tccccttcaccgaatctcatcc

SEQ ID NO: 139519 - DNA, 22 bp, synthetic construct
  misc_feature 1..22: note = chemically synthesized
  source 1..22: mol_type = other DNA
cccttcaccgaatctcatccta

SEQ ID NO: 139520 - DNA, 22 bp, synthetic construct
  misc_feature 1..22: note = chemically synthesized
  source 1..22: mol_type = other DNA
caccgaatctcatcctacattg

SEQ ID NO: 139521 - DNA, 22 bp, synthetic construct
  misc_feature 1..22: note = chemically synthesized
  source 1..22: mol_type = other DNA
accgaatctcatcctacattgg

SEQ ID NO: 139522 - DNA, 22 bp, synthetic construct
  misc_feature 1..22: note = chemically synthesized
  source 1..22: mol_type = other DNA
atcctacattggccttattgat

SEQ ID NO: 139523 - DNA, 22 bp, synthetic construct
  misc_feature 1..22: note = chemically synthesized
  source 1..22: mol_type = other DNA
cattggccttattgatattcct

SEQ ID NO: 139524 - DNA, 22 bp, synthetic construct
  misc_feature 1..22: note = chemically synthesized
  source 1..22: mol_type = other DNA
gccttattgatattccttgaaa

SEQ ID NO: 139525 - DNA, 22 bp, synthetic construct
  misc_feature 1..22: note = chemically synthesized
  source 1..22: mol_type = other DNA
attgatattccttgaaaattct

SEQ ID NO: 139526 - DNA, 22 bp, synthetic construct
  misc_feature 1..22: note = chemically synthesized
  source 1..22: mol_type = other DNA
ttgatattccttgaaaattcta

SEQ ID NO: 139527 - DNA, 22 bp, synthetic construct
  misc_feature 1..22: note = chemically synthesized
  source 1..22: mol_type = other DNA
atattccttgaaaattctaagc

SEQ ID NO: 139528 - DNA, 22 bp, synthetic construct
  misc_feature 1..22: note = chemically synthesized
  source 1..22: mol_type = other DNA
cttgaaaattctaagcatctta

SEQ ID NO: 139529 - DNA, 22 bp, synthetic construct
  misc_feature 1..22: note = chemically synthesized
  source 1..22: mol_type = other DNA
gaaaattctaagcatcttacat

SEQ ID NO: 139530 - DNA, 22 bp, synthetic construct
  misc_feature 1..22: note = chemically synthesized
  source 1..22: mol_type = other DNA
aaaattctaagcatcttacatc

SEQ ID NO: 139531 - DNA, 22 bp, synthetic construct
  misc_feature 1..22: note = chemically synthesized
  source 1..22: mol_type = other DNA
taagcatcttacatctttaggg

SEQ ID NO: 139532 - DNA, 22 bp, synthetic construct
  misc_feature 1..22: note = chemically synthesized
  source 1..22: mol_type = other DNA
agcatcttacatctttagggta

SEQ ID NO: 139533 - DNA, 22 bp, synthetic construct
  misc_feature 1..22: note = chemically synthesized
  source 1..22: mol_type = other DNA
acatctttagggtatttacatt

SEQ ID NO: 139534 - DNA, 22 bp, synthetic construct
  misc_feature 1..22: note = chemically synthesized
  source 1..22: mol_type = other DNA
catctttagggtatttacattt

SEQ ID NO: 139535 - DNA, 22 bp, synthetic construct
  misc_feature 1..22: note = chemically synthesized
  source 1..22: mol_type = other DNA
tagggtatttacatttgccatt

SEQ ID NO: 139536 - DNA, 22 bp, synthetic construct
  misc_feature 1..22: note = chemically synthesized
  source 1..22: mol_type = other DNA
agggtatttacatttgccattc

SEQ ID NO: 139537 - DNA, 22 bp, synthetic construct
  misc_feature 1..22: note = chemically synthesized
  source 1..22: mol_type = other DNA
gggtatttacatttgccattcc

SEQ ID NO: 139538 - DNA, 22 bp, synthetic construct
  misc_feature 1..22: note = chemically synthesized
  source 1..22: mol_type = other DNA
acatttgccattccctatgccc

SEQ ID NO: 139539 - DNA, 22 bp, synthetic construct
  misc_feature 1..22: note = chemically synthesized
  source 1..22: mol_type = other DNA
catttgccattccctatgccct

SEQ ID NO: 139540 - DNA, 22 bp, synthetic construct
  misc_feature 1..22: note = chemically synthesized
  source 1..22: mol_type = other DNA
gccattccctatgccctaaata

SEQ ID NO: 139541 - DNA, 22 bp, synthetic construct
  misc_feature 1..22: note = chemically synthesized
  source 1..22: mol_type = other DNA
ccattccctatgccctaaatat

SEQ ID NO: 139542 - DNA, 22 bp, synthetic construct
  misc_feature 1..22: note = chemically synthesized
  source 1..22: mol_type = other DNA
cctatgccctaaatatttaatc

SEQ ID NO: 139543 - DNA, 22 bp, synthetic construct
  misc_feature 1..22: note = chemically synthesized
  source 1..22: mol_type = other DNA
tgccctaaatatttaatcatag

SEQ ID NO: 139544 - DNA, 22 bp, synthetic construct
  misc_feature 1..22: note = chemically synthesized
  source 1..22: mol_type = other DNA
aatatttaatcatagtttcata

SEQ ID NO: 139545 - DNA, 22 bp, synthetic construct
  misc_feature 1..22: note = chemically synthesized
  source 1..22: mol_type = other DNA
aatcatagtttcatataaatgg

SEQ ID NO: 139546 - DNA, 22 bp, synthetic construct
  misc_feature 1..22: note = chemically synthesized
  source 1..22: mol_type = other DNA
atcatagtttcatataaatggg

SEQ ID NO: 139547 - DNA, 22 bp, synthetic construct
  misc_feature 1..22: note = chemically synthesized
  source 1..22: mol_type = other DNA
catataaatgggttcctcatca

SEQ ID NO: 139548 - DNA, 22 bp, synthetic construct
  misc_feature 1..22: note = chemically synthesized
  source 1..22: mol_type = other DNA
atataaatgggttcctcatcat

SEQ ID NO: 139549 - DNA, 22 bp, synthetic construct
  misc_feature 1..22: note = chemically synthesized
  source 1..22: mol_type = other DNA
ctcatcatctatgggtactctc

SEQ ID NO: 139550 - DNA, 22 bp, synthetic construct
  misc_feature 1..22: note = chemically synthesized
  source 1..22: mol_type = other DNA
atcatctatgggtactctctca

SEQ ID NO: 139551 - DNA, 22 bp, synthetic construct
  misc_feature 1..22: note = chemically synthesized
  source 1..22: mol_type = other DNA
tgggtactctctcaggtgttaa

SEQ ID NO: 139552 - DNA, 22 bp, synthetic construct
  misc_feature 1..22: note = chemically synthesized
  source 1..22: mol_type = other DNA
tctcaggtgttaactttatagt

SEQ ID NO: 139553 - DNA, 22 bp, synthetic construct
  misc_feature 1..22: note = chemically synthesized
  source 1..22: mol_type = other DNA
tcaggtgttaactttatagtga

SEQ ID NO: 139554 - DNA, 22 bp, synthetic construct
  misc_feature 1..22: note = chemically synthesized
  source 1..22: mol_type = other DNA
aggtgttaactttatagtgagg

SEQ ID NO: 139555 - DNA, 22 bp, synthetic construct
  misc_feature 1..22: note = chemically synthesized
  source 1..22: mol_type = other DNA
actttatagtgaggactttcct

SEQ ID NO: 139556 - DNA, 22 bp, synthetic construct
  misc_feature 1..22: note = chemically synthesized
  source 1..22: mol_type = other DNA
tatagtgaggactttcctgcca

SEQ ID NO: 139557 - DNA, 22 bp, synthetic construct
  misc_feature 1..22: note = chemically synthesized
  source 1..22: mol_type = other DNA
atagtgaggactttcctgccat

SEQ ID NO: 139558 - DNA, 22 bp, synthetic construct
  misc_feature 1..22: note = chemically synthesized
  source 1..22: mol_type = other DNA
tagtgaggactttcctgccata

SEQ ID NO: 139559 - DNA, 22 bp, synthetic construct
  misc_feature 1..22: note = chemically synthesized
  source 1..22: mol_type = other DNA
tcctgccatactacttaaagta

SEQ ID NO: 139560 - DNA, 22 bp, synthetic construct
  misc_feature 1..22: note = chemically synthesized
  source 1..22: mol_type = other DNA
cctgccatactacttaaagtag

SEQ ID NO: 139561 - DNA, 22 bp, synthetic construct
  misc_feature 1..22: note = chemically synthesized
  source 1..22: mol_type = other DNA
ctgccatactacttaaagtagc

SEQ ID NO: 139562 - DNA, 22 bp, synthetic construct
  misc_feature 1..22: note = chemically synthesized
  source 1..22: mol_type = other DNA
ccatactacttaaagtagcgat

SEQ ID NO: 139563 - DNA, 22 bp, synthetic construct
  misc_feature 1..22: note = chemically synthesized
  source 1..22: mol_type = other DNA
cttaaagtagcgataccctttc

SEQ ID NO: 139564 - DNA, 22 bp, synthetic construct
  misc_feature 1..22: note = chemically synthesized
  source 1..22: mol_type = other DNA
aaagtagcgataccctttcacc

SEQ ID NO: 139565 - DNA, 22 bp, synthetic construct
  misc_feature 1..22: note = chemically synthesized
  source 1..22: mol_type = other DNA
aagtagcgataccctttcaccc

SEQ ID NO: 139566 - DNA, 22 bp, synthetic construct
  misc_feature 1..22: note = chemically synthesized
  source 1..22: mol_type = other DNA
tcaccctgtcctaatcacactc

SEQ ID NO: 139567 - DNA, 22 bp, synthetic construct
  misc_feature 1..22: note = chemically synthesized
  source 1..22: mol_type = other DNA
caccctgtcctaatcacactct

SEQ ID NO: 139568 - DNA, 22 bp, synthetic construct
  misc_feature 1..22: note = chemically synthesized
  source 1..22: mol_type = other DNA
accctgtcctaatcacactctg

SEQ ID NO: 139569 - DNA, 22 bp, synthetic construct
  misc_feature 1..22: note = chemically synthesized
  source 1..22: mol_type = other DNA
tcctaatcacactctggccttc

SEQ ID NO: 139570 - DNA, 22 bp, synthetic construct
  misc_feature 1..22: note = chemically synthesized
  source 1..22: mol_type = other DNA
atcacactctggccttcatttc

SEQ ID NO: 139571 - DNA, 22 bp, synthetic construct
  misc_feature 1..22: note = chemically synthesized
  source 1..22: mol_type = other DNA
tggccttcatttcagttttttt

SEQ ID NO: 139572 - DNA, 22 bp, synthetic construct
  misc_feature 1..22: note = chemically synthesized
  source 1..22: mol_type = other DNA
gccttcatttcagttttttttt

SEQ ID NO: 139573 - DNA, 22 bp, synthetic construct
  misc_feature 1..22: note = chemically synthesized
  source 1..22: mol_type = other DNA
catttcagttttttttttttct

SEQ ID NO: 139574 - DNA, 22 bp, synthetic construct
  misc_feature 1..22: note = chemically synthesized
  source 1..22: mol_type = other DNA
atttcagttttttttttttctc

SEQ ID NO: 139575 - DNA, 22 bp, synthetic construct
  misc_feature 1..22: note = chemically synthesized
  source 1..22: mol_type = other DNA
cagttttttttttttctccata

SEQ ID NO: 139576 - DNA, 22 bp, synthetic construct
  misc_feature 1..22: note = chemically synthesized
  source 1..22: mol_type = other DNA
agttttttttttttctccatag

SEQ ID NO: 139577 - DNA, 22 bp, synthetic construct
  misc_feature 1..22: note = chemically synthesized
  source 1..22: mol_type = other DNA
tttttttttctccatagcacct

SEQ ID NO: 139578 - DNA, 22 bp, synthetic construct
  misc_feature 1..22: note = chemically synthesized
  source 1..22: mol_type = other DNA
ttttttttctccatagcaccta

SEQ ID NO: 139579 - DNA, 22 bp, synthetic construct
  misc_feature 1..22: note = chemically synthesized
  source 1..22: mol_type = other DNA
tttttttctccatagcacctaa

SEQ ID NO: 139580 - DNA, 22 bp, synthetic construct
  misc_feature 1..22: note = chemically synthesized
  source 1..22: mol_type = other DNA
ttttttctccatagcacctaat

SEQ ID NO: 139581 - DNA, 22 bp, synthetic construct
  misc_feature 1..22: note = chemically synthesized
  source 1..22: mol_type = other DNA
tttttctccatagcacctaatc

SEQ ID NO: 139582 - DNA, 22 bp, synthetic construct
  misc_feature 1..22: note = chemically synthesized
  source 1..22: mol_type = other DNA
ttttctccatagcacctaatct

SEQ ID NO: 139583 - DNA, 22 bp, synthetic construct
  misc_feature 1..22: note = chemically synthesized
  source 1..22: mol_type = other DNA
tttctccatagcacctaatctc

SEQ ID NO: 139584 - DNA, 22 bp, synthetic construct
  misc_feature 1..22: note = chemically synthesized
  source 1..22: mol_type = other DNA
ttctccatagcacctaatctca

SEQ ID NO: 139585 - DNA, 22 bp, synthetic construct
  misc_feature 1..22: note = chemically synthesized
  source 1..22: mol_type = other DNA
tctccatagcacctaatctcat

SEQ ID NO: 139586 - DNA, 22 bp, synthetic construct
  misc_feature 1..22: note = chemically synthesized
  source 1..22: mol_type = other DNA
ctccatagcacctaatctcatt

SEQ ID NO: 139587 - DNA, 22 bp, synthetic construct
  misc_feature 1..22: note = chemically synthesized
  source 1..22: mol_type = other DNA
tccatagcacctaatctcattg

SEQ ID NO: 139588 - DNA, 22 bp, synthetic construct
  misc_feature 1..22: note = chemically synthesized
  source 1..22: mol_type = other DNA
catagcacctaatctcattggt

SEQ ID NO: 139589 - DNA, 22 bp, synthetic construct
  misc_feature 1..22: note = chemically synthesized
  source 1..22: mol_type = other DNA
atctcattggtatataacatgt

SEQ ID NO: 139590 - DNA, 22 bp, synthetic construct
  misc_feature 1..22: note = chemically synthesized
  source 1..22: mol_type = other DNA
attggtatataacatgtttcat

SEQ ID NO: 139591 - DNA, 22 bp, synthetic construct
  misc_feature 1..22: note = chemically synthesized
  source 1..22: mol_type = other DNA
gtatataacatgtttcatttgc

SEQ ID NO: 139592 - DNA, 22 bp, synthetic construct
  misc_feature 1..22: note = chemically synthesized
  source 1..22: mol_type = other DNA
catttgcttatttaatgtcaag

SEQ ID NO: 139593 - DNA, 22 bp, synthetic construct
  misc_feature 1..22: note = chemically synthesized
  source 1..22: mol_type = other DNA
atttgcttatttaatgtcaagc

SEQ ID NO: 139594 - DNA, 22 bp, synthetic construct
  misc_feature 1..22: note = chemically synthesized
  source 1..22: mol_type = other DNA
gcttatttaatgtcaagctctt

SEQ ID NO: 139595 - DNA, 22 bp, synthetic construct
  misc_feature 1..22: note = chemically synthesized
  source 1..22: mol_type = other DNA
cttatttaatgtcaagctcttt

SEQ ID NO: 139596 - DNA, 22 bp, synthetic construct
  misc_feature 1..22: note = chemically synthesized
  source 1..22: mol_type = other DNA
atttaatgtcaagctctttcca

SEQ ID NO: 139597 - DNA, 22 bp, synthetic construct
  misc_feature 1..22: note = chemically synthesized
  source 1..22: mol_type = other DNA
tttaatgtcaagctctttccac

SEQ ID NO: 139598 - DNA, 22 bp, synthetic construct
  misc_feature 1..22: note = chemically synthesized
  source 1..22: mol_type = other DNA
aatgtcaagctctttccactat

SEQ ID NO: 139599 - DNA, 22 bp, synthetic construct
  misc_feature 1..22: note = chemically synthesized
  source 1..22: mol_type = other DNA
atgtcaagctctttccactatc

SEQ ID NO: 139600 - DNA, 22 bp, synthetic construct
  misc_feature 1..22: note = chemically synthesized
  source 1..22: mol_type = other DNA
tttccactatcaagtccatgaa

SEQ ID NO: 139601 - DNA, 22 bp, synthetic construct
  misc_feature 1..22: note = chemically synthesized
  source 1..22: mol_type = other DNA
tccactatcaagtccatgaaaa

SEQ ID NO: 139602 - DNA, 22 bp, synthetic construct
  misc_feature 1..22: note = chemically synthesized
  source 1..22: mol_type = other DNA
ccactatcaagtccatgaaaac

SEQ ID NO: 139603 - DNA, 22 bp, synthetic construct
  misc_feature 1..22: note = chemically synthesized
  source 1..22: mol_type = other DNA
cactatcaagtccatgaaaaca

SEQ ID NO: 139604 - DNA, 22 bp, synthetic construct
  misc_feature 1..22: note = chemically synthesized
  source 1..22: mol_type = other DNA
tcaagtccatgaaaacaggaac

SEQ ID NO: 139605 - DNA, 22 bp, synthetic construct
  misc_feature 1..22: note = chemically synthesized
  source 1..22: mol_type = other DNA
tattcctctattctgtttttgt

SEQ ID NO: 139606 - DNA, 22 bp, synthetic construct
  misc_feature 1..22: note = chemically synthesized
  source 1..22: mol_type = other DNA
attcctctattctgtttttgtg

SEQ ID NO: 139607 - DNA, 22 bp, synthetic construct
  misc_feature 1..22: note = chemically synthesized
  source 1..22: mol_type = other DNA
ttcctctattctgtttttgtgc

SEQ ID NO: 139608 - DNA, 22 bp, synthetic construct
  misc_feature 1..22: note = chemically synthesized
  source 1..22: mol_type = other DNA
ctctattctgtttttgtgctgt

SEQ ID NO: 139609 - DNA, 22 bp, synthetic construct
  misc_feature 1..22: note = chemically synthesized
  source 1..22: mol_type = other DNA
tattctgtttttgtgctgtatt

SEQ ID NO: 139610 - DNA, 22 bp, synthetic construct
  misc_feature 1..22: note = chemically synthesized
  source 1..22: mol_type = other DNA
ttctgtttttgtgctgtattct

SEQ ID NO: 139611 - DNA, 22 bp, synthetic construct
  misc_feature 1..22: note = chemically synthesized
  source 1..22: mol_type = other DNA
tgtttttgtgctgtattcttag

SEQ ID NO: 139612 - DNA, 22 bp, synthetic construct
  misc_feature 1..22: note = chemically synthesized
  source 1..22: mol_type = other DNA
tttttgtgctgtattcttagca

SEQ ID NO: 139613 - DNA, 22 bp, synthetic construct
  misc_feature 1..22: note = chemically synthesized
  source 1..22: mol_type = other DNA
ttgtgctgtattcttagcaatt

SEQ ID NO: 139614 - DNA, 22 bp, synthetic construct
  misc_feature 1..22: note = chemically synthesized
  source 1..22: mol_type = other DNA
tgtgctgtattcttagcaattt

SEQ ID NO: 139615 - DNA, 22 bp, synthetic construct
  misc_feature 1..22: note = chemically synthesized
  source 1..22: mol_type = other DNA
gtgctgtattcttagcaatttt

SEQ ID NO: 139616 - DNA, 22 bp, synthetic construct
  misc_feature 1..22: note = chemically synthesized
  source 1..22: mol_type = other DNA
tgctgtattcttagcaatttta

SEQ ID NO: 139617 - DNA, 22 bp, synthetic construct
  misc_feature 1..22: note = chemically synthesized
  source 1..22: mol_type = other DNA
tattcttagcaattttacaatt

SEQ ID NO: 139618 - DNA, 22 bp, synthetic construct
  misc_feature 1..22: note = chemically synthesized
  source 1..22: mol_type = other DNA
ttagcaattttacaattttgaa

SEQ ID NO: 139619 - DNA, 22 bp, synthetic construct
  misc_feature 1..22: note = chemically synthesized
  source 1..22: mol_type = other DNA
agcaattttacaattttgaatg

SEQ ID NO: 139620 - DNA, 22 bp, synthetic construct
  misc_feature 1..22: note = chemically synthesized
  source 1..22: mol_type = other DNA
gcaattttacaattttgaatga

SEQ ID NO: 139621 - DNA, 22 bp, synthetic construct
  misc_feature 1..22: note = chemically synthesized
  source 1..22: mol_type = other DNA
tacaattttgaatgaatgaatg

SEQ ID NO: 139622 - DNA, 22 bp, synthetic construct
  misc_feature 1..22: note = chemically synthesized
  source 1..22: mol_type = other DNA
acaattttgaatgaatgaatga

SEQ ID NO: 139623 - DNA, 22 bp, synthetic construct
  misc_feature 1..22: note = chemically synthesized
  source 1..22: mol_type = other DNA
caattttgaatgaatgaatgag

SEQ ID NO: 139624 - DNA, 22 bp, synthetic construct
  misc_feature 1..22: note = chemically synthesized
  source 1..22: mol_type = other DNA
tgaatgaatgaatgagcagtca

SEQ ID NO: 139625 - DNA, 22 bp, synthetic construct
  misc_feature 1..22: note = chemically synthesized
  source 1..22: mol_type = other DNA
gaatgaatgaatgagcagtcaa

SEQ ID NO: 139626 - DNA, 22 bp, synthetic construct
  misc_feature 1..22: note = chemically synthesized
  source 1..22: mol_type = other DNA
aatgaatgaatgagcagtcaaa

SEQ ID NO: 139627 - DNA, 22 bp, synthetic construct
  misc_feature 1..22: note = chemically synthesized
  source 1..22: mol_type = other DNA
taattaaaaggatgtatgctga

SEQ ID NO: 139628 - DNA, 22 bp, synthetic construct
  misc_feature 1..22: note = chemically synthesized
  source 1..22: mol_type = other DNA
aaaggatgtatgctgacacatc

SEQ ID NO: 139629 - DNA, 22 bp, synthetic construct
  misc_feature 1..22: note = chemically synthesized
  source 1..22: mol_type = other DNA
acacatccactgctatgcacac

SEQ ID NO: 139630 - DNA, 22 bp, synthetic construct
  misc_feature 1..22: note = chemically synthesized
  source 1..22: mol_type = other DNA
ctatgcacacacaaagaaatca

SEQ ID NO: 139631 - DNA, 22 bp, synthetic construct
  misc_feature 1..22: note = chemically synthesized
  source 1..22: mol_type = other DNA
tgcacacacaaagaaatcagtg

SEQ ID NO: 139632 - DNA, 22 bp, synthetic construct
  misc_feature 1..22: note = chemically synthesized
  source 1..22: mol_type = other DNA
gaagtgctaagcctgcatagag

SEQ ID NO: 139633 - DNA, 22 bp, synthetic construct
  misc_feature 1..22: note = chemically synthesized
  source 1..22: mol_type = other DNA
agcctgcatagagctagttagc

SEQ ID NO: 139634 - DNA, 22 bp, synthetic construct
  misc_feature 1..22: note = chemically synthesized
  source 1..22: mol_type = other DNA
catagagctagttagccctccg

SEQ ID NO: 139635 - DNA, 22 bp, synthetic construct
  misc_feature 1..22: note = chemically synthesized
  source 1..22: mol_type = other DNA
gttagccctccgcaggcagagc

SEQ ID NO: 139636 - DNA, 22 bp, synthetic construct
  misc_feature 1..22: note = chemically synthesized
  source 1..22: mol_type = other DNA
gccctccgcaggcagagccttg

SEQ ID NO: 139637 - DNA, 22 bp, synthetic construct
  misc_feature 1..22: note = chemically synthesized
  source 1..22: mol_type = other DNA
cgcaggcagagccttgatggga

SEQ ID NO: 139638 - DNA, 22 bp, synthetic construct
  misc_feature 1..22: note = chemically synthesized
  source 1..22: mol_type = other DNA
gatgggattactgagttctaga

SEQ ID NO: 139639 - DNA, 22 bp, synthetic construct
  misc_feature 1..22: note = chemically synthesized
  source 1..22: mol_type = other DNA
atgggattactgagttctagaa

SEQ ID NO: 139640 - DNA, 22 bp, synthetic construct
  misc_feature 1..22: note = chemically synthesized
  source 1..22: mol_type = other DNA
ctgagttctagaattggactca

SEQ ID NO: 139641 - DNA, 22 bp, synthetic construct
  misc_feature 1..22: note = chemically synthesized
  source 1..22: mol_type = other DNA
agttctagaattggactcattt

SEQ ID NO: 139642 - DNA, 22 bp, synthetic construct
  misc_feature 1..22: note = chemically synthesized
  source 1..22: mol_type = other DNA
tagaattggactcatttgtttt

SEQ ID NO: 139643 - DNA, 22 bp, synthetic construct
  misc_feature 1..22: note = chemically synthesized
  source 1..22: mol_type = other DNA
gaattggactcatttgttttgt

SEQ ID NO: 139644 - DNA, 22 bp, synthetic construct
  misc_feature 1..22: note = chemically synthesized
  source 1..22: mol_type = other DNA
gactcatttgttttgtaggctg

SEQ ID NO: 139645 - DNA, 22 bp, synthetic construct
  misc_feature 1..22: note = chemically synthesized
  source 1..22: mol_type = other DNA
atttgttttgtaggctgagatt

SEQ ID NO: 139646 - DNA, 22 bp, synthetic construct
  misc_feature 1..22: note = chemically synthesized
  source 1..22: mol_type = other DNA
gttttgtaggctgagatttgct

SEQ ID NO: 139647 - DNA, 22 bp, synthetic construct
  misc_feature 1..22: note = chemically synthesized
  source 1..22: mol_type = other DNA
ttttgtaggctgagatttgctc

SEQ ID NO: 139648 - DNA, 22 bp, synthetic construct
  misc_feature 1..22: note = chemically synthesized
  source 1..22: mol_type = other DNA
tgtaggctgagatttgctcttg

SEQ ID NO: 139649 - DNA, 22 bp, synthetic construct
  misc_feature 1..22: note = chemically synthesized
  source 1..22: mol_type = other DNA
gtaggctgagatttgctcttga

SEQ ID NO: 139650 - DNA, 22 bp, synthetic construct
  misc_feature 1..22: note = chemically synthesized
  source 1..22: mol_type = other DNA
taggctgagatttgctcttgaa

SEQ ID NO: 139651 - DNA, 22 bp, synthetic construct
  misc_feature 1..22: note = chemically synthesized
  source 1..22: mol_type = other DNA
agatttgctcttgaaaacttgt

SEQ ID NO: 139652 - DNA, 22 bp, synthetic construct
  misc_feature 1..22: note = chemically synthesized
  source 1..22: mol_type = other DNA
gctcttgaaaacttgttctgac

SEQ ID NO: 139653 - DNA, 22 bp, synthetic construct
  misc_feature 1..22: note = chemically synthesized
  source 1..22: mol_type = other DNA
ctcttgaaaacttgttctgacc

SEQ ID NO: 139654 - DNA, 22 bp, synthetic construct
  misc_feature 1..22: note = chemically synthesized
  source 1..22: mol_type = other DNA
ttgaaaacttgttctgaccaaa

SEQ ID NO: 139655 - DNA, 22 bp, synthetic construct
  misc_feature 1..22: note = chemically synthesized
  source 1..22: mol_type = other DNA
gaaaacttgttctgaccaaaat

SEQ ID NO: 139656 - DNA, 22 bp, synthetic construct
  misc_feature 1..22: note = chemically synthesized
  source 1..22: mol_type = other DNA
aaaacttgttctgaccaaaata

SEQ ID NO: 139657 - DNA, 22 bp, synthetic construct
  misc_feature 1..22: note = chemically synthesized
  source 1..22: mol_type = other DNA
gttctgaccaaaataaaaggct

SEQ ID NO: 139658 - DNA, 22 bp, synthetic construct
  misc_feature 1..22: note = chemically synthesized
  source 1..22: mol_type = other DNA
ttctgaccaaaataaaaggctc

SEQ ID NO: 139659 - DNA, 22 bp, synthetic construct
  misc_feature 1..22: note = chemically synthesized
  source 1..22: mol_type = other DNA
tgaccaaaataaaaggctcaaa

SEQ ID NO: 139660 - DNA, 22 bp, synthetic construct
  misc_feature 1..22: note = chemically synthesized
  source 1..22: mol_type = other DNA
accaaaataaaaggctcaaaag

SEQ ID NO: 139661 - DNA, 22 bp, synthetic construct
  misc_feature 1..22: note = chemically synthesized
  source 1..22: mol_type = other DNA
aaaagatgaatatcgaaaccag

SEQ ID NO: 139662 - DNA, 22 bp, synthetic construct
  misc_feature 1..22: note = chemically synthesized
  source 1..22: mol_type = other DNA
tttacactggaatttataacta

SEQ ID NO: 139663 - DNA, 22 bp, synthetic construct
  misc_feature 1..22: note = chemically synthesized
  source 1..22: mol_type = other DNA
ttacactggaatttataactag

SEQ ID NO: 139664 - DNA, 22 bp, synthetic construct
  misc_feature 1..22: note = chemically synthesized
  source 1..22: mol_type = other DNA
tacactggaatttataactaga

SEQ ID NO: 139665 - DNA, 22 bp, synthetic construct
  misc_feature 1..22: note = chemically synthesized
  source 1..22: mol_type = other DNA
acactggaatttataactagag

SEQ ID NO: 139666 - DNA, 22 bp, synthetic construct
  misc_feature 1..22: note = chemically synthesized
  source 1..22: mol_type = other DNA
cactggaatttataactagagc

SEQ ID NO: 139667 - DNA, 22 bp, synthetic construct
  misc_feature 1..22: note = chemically synthesized
  source 1..22: mol_type = other DNA
gaatttataactagagcactca

SEQ ID NO: 139668 - DNA, 22 bp, synthetic construct
  misc_feature 1..22: note = chemically synthesized
  source 1..22: mol_type = other DNA
ataactagagcactcatgttta

SEQ ID NO: 139669 - DNA, 22 bp, synthetic construct
  misc_feature 1..22: note = chemically synthesized
  source 1..22: mol_type = other DNA
taactagagcactcatgtttat

SEQ ID NO: 139670 - DNA, 22 bp, synthetic construct
  misc_feature 1..22: note = chemically synthesized
  source 1..22: mol_type = other DNA
gagcactcatgtttatgtaagc

SEQ ID NO: 139671 - DNA, 22 bp, synthetic construct
  misc_feature 1..22: note = chemically synthesized
  source 1..22: mol_type = other DNA
atgtttatgtaagcaattaatt

SEQ ID NO: 139672 - DNA, 22 bp, synthetic construct
  misc_feature 1..22: note = chemically synthesized
  source 1..22: mol_type = other DNA
atgtaagcaattaattgtttca

SEQ ID NO: 139673 - DNA, 22 bp, synthetic construct
  misc_feature 1..22: note = chemically synthesized
  source 1..22: mol_type = other DNA
tgtaagcaattaattgtttcat

SEQ ID NO: 139674 - DNA, 22 bp, synthetic construct
  misc_feature 1..22: note = chemically synthesized
  source 1..22: mol_type = other DNA
attgtttcatcagtcaggtaaa

SEQ ID NO: 139675 - DNA, 22 bp, synthetic construct
  misc_feature 1..22: note = chemically synthesized
  source 1..22: mol_type = other DNA
tttcatcagtcaggtaaaagta

SEQ ID NO: 139676 - DNA, 22 bp, synthetic construct
  misc_feature 1..22: note = chemically synthesized
  source 1..22: mol_type = other DNA
catcagtcaggtaaaagtaaag

SEQ ID NO: 139677 - DNA, 22 bp, synthetic construct
  misc_feature 1..22: note = chemically synthesized
  source 1..22: mol_type = other DNA
atcagtcaggtaaaagtaaaga

SEQ ID NO: 139678 - DNA, 22 bp, synthetic construct
  misc_feature 1..22: note = chemically synthesized
  source 1..22: mol_type = other DNA
tgccaaggcaggtagcctaatg

SEQ ID NO: 139679 - DNA, 22 bp, synthetic construct
  misc_feature 1..22: note = chemically synthesized
  source 1..22: mol_type = other DNA
atgcaatatgccactaaagtaa

SEQ ID NO: 139680 - DNA, 22 bp, synthetic construct
  misc_feature 1..22: note = chemically synthesized
  source 1..22: mol_type = other DNA
aagtaaacattatttcataggt

SEQ ID NO: 139681 - DNA, 22 bp, synthetic construct
  misc_feature 1..22: note = chemically synthesized
  source 1..22: mol_type = other DNA
tttcataggtgtcagatatggc

SEQ ID NO: 139682 - DNA, 22 bp, synthetic construct
  misc_feature 1..22: note = chemically synthesized
  source 1..22: mol_type = other DNA
cataggtgtcagatatggctta

SEQ ID NO: 139683 - DNA, 22 bp, synthetic construct
  misc_feature 1..22: note = chemically synthesized
  source 1..22: mol_type = other DNA
ataggtgtcagatatggcttat

SEQ ID NO: 139684 - DNA, 22 bp, synthetic construct
  misc_feature 1..22: note = chemically synthesized
  source 1..22: mol_type = other DNA
attcatccatcttcatgggaag

SEQ ID NO: 139685 - DNA, 22 bp, synthetic construct
  misc_feature 1..22: note = chemically synthesized
  source 1..22: mol_type = other DNA
ttcatccatcttcatgggaagg

SEQ ID NO: 139686 - DNA, 22 bp, synthetic construct
  misc_feature 1..22: note = chemically synthesized
  source 1..22: mol_type = other DNA
atccatcttcatgggaaggatg

SEQ ID NO: 139687 - DNA, 22 bp, synthetic construct
  misc_feature 1..22: note = chemically synthesized
  source 1..22: mol_type = other DNA
catgggaaggatggccttggcc

SEQ ID NO: 139688 - DNA, 22 bp, synthetic construct
  misc_feature 1..22: note = chemically synthesized
  source 1..22: mol_type = other DNA
atgggaaggatggccttggcct

SEQ ID NO: 139689 - DNA, 22 bp, synthetic construct
  misc_feature 1..22: note = chemically synthesized
  source 1..22: mol_type = other DNA
ggcctggacatcagtgttatgt

SEQ ID NO: 139690 - DNA, 22 bp, synthetic construct
  misc_feature 1..22: note = chemically synthesized
  source 1..22: mol_type = other DNA
gcctggacatcagtgttatgtg

SEQ ID NO: 139691 - DNA, 22 bp, synthetic construct
  misc_feature 1..22: note = chemically synthesized
  source 1..22: mol_type = other DNA
gacatcagtgttatgtgaggtt

SEQ ID NO: 139692 - DNA, 22 bp, synthetic construct
  misc_feature 1..22: note = chemically synthesized
  source 1..22: mol_type = other DNA
tgtgaggttcaaaacacctcta

SEQ ID NO: 139693 - DNA, 22 bp, synthetic construct
  misc_feature 1..22: note = chemically synthesized
  source 1..22: mol_type = other DNA
aaaacacctctaggctataagg

SEQ ID NO: 139694 - DNA, 22 bp, synthetic construct
  misc_feature 1..22: note = chemically synthesized
  source 1..22: mol_type = other DNA
taggctataaggcaacagagct

SEQ ID NO: 139695 - DNA, 22 bp, synthetic construct
  misc_feature 1..22: note = chemically synthesized
  source 1..22: mol_type = other DNA
ggctataaggcaacagagctcc

SEQ ID NO: 139696 - DNA, 22 bp, synthetic construct
  misc_feature 1..22: note = chemically synthesized
  source 1..22: mol_type = other DNA
taaggcaacagagctccttttt

SEQ ID NO: 139697 - DNA, 22 bp, synthetic construct
  misc_feature 1..22: note = chemically synthesized
  source 1..22: mol_type = other DNA
cttttttttttttctgtgcttt

SEQ ID NO: 139698 - DNA, 22 bp, synthetic construct
  misc_feature 1..22: note = chemically synthesized
  source 1..22: mol_type = other DNA
ttttttttttctgtgctttcct

SEQ ID NO: 139699 - DNA, 22 bp, synthetic construct
  misc_feature 1..22: note = chemically synthesized
  source 1..22: mol_type = other DNA
tttttttttctgtgctttcctg

SEQ ID NO: 139700 - DNA, 22 bp, synthetic construct
  misc_feature 1..22: note = chemically synthesized
  source 1..22: mol_type = other DNA
ttttttttctgtgctttcctgg

SEQ ID NO: 139701 - DNA, 22 bp, synthetic construct
  misc_feature 1..22: note = chemically synthesized
  source 1..22: mol_type = other DNA
tttttttctgtgctttcctggc

SEQ ID NO: 139702 - DNA, 22 bp, synthetic construct
  misc_feature 1..22: note = chemically synthesized
  source 1..22: mol_type = other DNA
ttttttctgtgctttcctggct

SEQ ID NO: 139703 - DNA, 22 bp, synthetic construct
  misc_feature 1..22: note = chemically synthesized
  source 1..22: mol_type = other DNA
tttttctgtgctttcctggctg

SEQ ID NO: 139704 - DNA, 22 bp, synthetic construct
  misc_feature 1..22: note = chemically synthesized
  source 1..22: mol_type = other DNA
ttttctgtgctttcctggctgt

SEQ ID NO: 139705 - DNA, 22 bp, synthetic construct
  misc_feature 1..22: note = chemically synthesized
  source 1..22: mol_type = other DNA
tttctgtgctttcctggctgtc

SEQ ID NO: 139706 - DNA, 22 bp, synthetic construct
  misc_feature 1..22: note = chemically synthesized
  source 1..22: mol_type = other DNA
ttctgtgctttcctggctgtcc

SEQ ID NO: 139707 - DNA, 22 bp, synthetic construct
  misc_feature 1..22: note = chemically synthesized
  source 1..22: mol_type = other DNA
tctgtgctttcctggctgtcca

SEQ ID NO: 139708 - DNA, 22 bp, synthetic construct
  misc_feature 1..22: note = chemically synthesized
  source 1..22: mol_type = other DNA
ctgtgctttcctggctgtccaa

SEQ ID NO: 139709 - DNA, 22 bp, synthetic construct
  misc_feature 1..22: note = chemically synthesized
  source 1..22: mol_type = other DNA
tgtgctttcctggctgtccaaa

SEQ ID NO: 139710 - DNA, 22 bp, synthetic construct
  misc_feature 1..22: note = chemically synthesized
  source 1..22: mol_type = other DNA
tgctttcctggctgtccaaatc

SEQ ID NO: 139711 - DNA, 22 bp, synthetic construct
  misc_feature 1..22: note = chemically synthesized
  source 1..22: mol_type = other DNA
tcctggctgtccaaatctctaa

SEQ ID NO: 139712 - DNA, 22 bp, synthetic construct
  misc_feature 1..22: note = chemically synthesized
  source 1..22: mol_type = other DNA
cctggctgtccaaatctctaat

SEQ ID NO: 139713 - DNA, 22 bp, synthetic construct
  misc_feature 1..22: note = chemically synthesized
  source 1..22: mol_type = other DNA
ctggctgtccaaatctctaatg

SEQ ID NO: 139714 - DNA, 22 bp, synthetic construct
  misc_feature 1..22: note = chemically synthesized
  source 1..22: mol_type = other DNA
gctgtccaaatctctaatgata

SEQ ID NO: 139715 - DNA, 22 bp, synthetic construct
  misc_feature 1..22: note = chemically synthesized
  source 1..22: mol_type = other DNA
tccaaatctctaatgataagca

SEQ ID NO: 139716 - DNA, 22 bp, synthetic construct
  misc_feature 1..22: note = chemically synthesized
  source 1..22: mol_type = other DNA
taatgataagcatacttctatt

SEQ ID NO: 139717 - DNA, 22 bp, synthetic construct
  misc_feature 1..22: note = chemically synthesized
  source 1..22: mol_type = other DNA
atgataagcatacttctattca

SEQ ID NO: 139718 - DNA, 22 bp, synthetic construct
  misc_feature 1..22: note = chemically synthesized
  source 1..22: mol_type = other DNA
ctattcaatgagaatattctgt

SEQ ID NO: 139719 - DNA, 22 bp, synthetic construct
  misc_feature 1..22: note = chemically synthesized
  source 1..22: mol_type = other DNA
tattcaatgagaatattctgta

SEQ ID NO: 139720 - DNA, 22 bp, synthetic construct
  misc_feature 1..22: note = chemically synthesized
  source 1..22: mol_type = other DNA
ttcaatgagaatattctgtaag

SEQ ID NO: 139721 - DNA, 22 bp, synthetic construct
  misc_feature 1..22: note = chemically synthesized
  source 1..22: mol_type = other DNA
aatgagaatattctgtaagatt

SEQ ID NO: 139722 - DNA, 22 bp, synthetic construct
  misc_feature 1..22: note = chemically synthesized
  source 1..22: mol_type = other DNA
tgtaagattatagttaagaatt

SEQ ID NO: 139723 - DNA, 22 bp, synthetic construct
  misc_feature 1..22: note = chemically synthesized
  source 1..22: mol_type = other DNA
taagattatagttaagaattgt

SEQ ID NO: 139724 - DNA, 22 bp, synthetic construct
  misc_feature 1..22: note = chemically synthesized
  source 1..22: mol_type = other DNA
tagttaagaattgtgggagcca

SEQ ID NO: 139725 - DNA, 22 bp, synthetic construct
  misc_feature 1..22: note = chemically synthesized
  source 1..22: mol_type = other DNA
agaattgtgggagccattccgt

SEQ ID NO: 139726 - DNA, 22 bp, synthetic construct
  misc_feature 1..22: note = chemically synthesized
  source 1..22: mol_type = other DNA
tgggagccattccgtctcttat

SEQ ID NO: 139727 - DNA, 22 bp, synthetic construct
  misc_feature 1..22: note = chemically synthesized
  source 1..22: mol_type = other DNA
cgtctcttatagttaaatttga

SEQ ID NO: 139728 - DNA, 22 bp, synthetic construct
  misc_feature 1..22: note = chemically synthesized
  source 1..22: mol_type = other DNA
ttatagttaaatttgagcttct

SEQ ID NO: 139729 - DNA, 22 bp, synthetic construct
  misc_feature 1..22: note = chemically synthesized
  source 1..22: mol_type = other DNA
atagttaaatttgagcttcttt

SEQ ID NO: 139730 - DNA, 22 bp, synthetic construct
  misc_feature 1..22: note = chemically synthesized
  source 1..22: mol_type = other DNA
tagttaaatttgagcttctttt

SEQ ID NO: 139731 - DNA, 22 bp, synthetic construct
  misc_feature 1..22: note = chemically synthesized
  source 1..22: mol_type = other DNA
aatttgagcttcttttatgatc

SEQ ID NO: 139732 - DNA, 22 bp, synthetic construct
  misc_feature 1..22: note = chemically synthesized
  source 1..22: mol_type = other DNA
gagcttcttttatgatcactgt

SEQ ID NO: 139733 - DNA, 22 bp, synthetic construct
  misc_feature 1..22: note = chemically synthesized
  source 1..22: mol_type = other DNA
agcttcttttatgatcactgtt

SEQ ID NO: 139734 - DNA, 22 bp, synthetic construct
  misc_feature 1..22: note = chemically synthesized
  source 1..22: mol_type = other DNA
cttttatgatcactgttttttt

SEQ ID NO: 139735 - DNA, 22 bp, synthetic construct
  misc_feature 1..22: note = chemically synthesized
  source 1..22: mol_type = other DNA
ttttatgatcactgttttttta

SEQ ID NO: 139736 - DNA, 22 bp, synthetic construct
  misc_feature 1..22: note = chemically synthesized
  source 1..22: mol_type = other DNA
ttatgatcactgtttttttaat

SEQ ID NO: 139737 - DNA, 22 bp, synthetic construct
  misc_feature 1..22: note = chemically synthesized
  source 1..22: mol_type = other DNA
tatgatcactgtttttttaata

SEQ ID NO: 139738 - DNA, 22 bp, synthetic construct
  misc_feature 1..22: note = chemically synthesized
  source 1..22: mol_type = other DNA
atgatcactgtttttttaatat

SEQ ID NO: 139739 - DNA, 22 bp, synthetic construct
  misc_feature 1..22: note = chemically synthesized
  source 1..22: mol_type = other DNA
tgatcactgtttttttaatatg

SEQ ID NO: 139740 - DNA, 22 bp, synthetic construct
  misc_feature 1..22: note = chemically synthesized
  source 1..22: mol_type = other DNA
tttttttaatatgctttaagtt

SEQ ID NO: 139741 - DNA, 22 bp, synthetic construct
  misc_feature 1..22: note = chemically synthesized
  source 1..22: mol_type = other DNA
ttttaatatgctttaagttctg

SEQ ID NO: 139742 - DNA, 22 bp, synthetic construct
  misc_feature 1..22: note = chemically synthesized
  source 1..22: mol_type = other DNA
tttaatatgctttaagttctgg

SEQ ID NO: 139743 - DNA, 22 bp, synthetic construct
  misc_feature 1..22: note = chemically synthesized
  source 1..22: mol_type = other DNA
ttaatatgctttaagttctggg

SEQ ID NO: 139744 - DNA, 22 bp, synthetic construct
  misc_feature 1..22: note = chemically synthesized
  source 1..22: mol_type = other DNA
taatatgctttaagttctgggg

SEQ ID NO: 139745 - DNA, 22 bp, synthetic construct
  misc_feature 1..22: note = chemically synthesized
  source 1..22: mol_type = other DNA
aatatgctttaagttctggggt

SEQ ID NO: 139746 - DNA, 22 bp, synthetic construct
  misc_feature 1..22: note = chemically synthesized
  source 1..22: mol_type = other DNA
atatgctttaagttctggggta

SEQ ID NO: 139747 - DNA, 22 bp, synthetic construct
  misc_feature 1..22: note = chemically synthesized
  source 1..22: mol_type = other DNA
taagttctggggtacatgtgcc

SEQ ID NO: 139748 - DNA, 22 bp, synthetic construct
  misc_feature 1..22: note = chemically synthesized
  source 1..22: mol_type = other DNA
aagttctggggtacatgtgcca

SEQ ID NO: 139749 - DNA, 22 bp, synthetic construct
  misc_feature 1..22: note = chemically synthesized
  source 1..22: mol_type = other DNA
agttctggggtacatgtgccat

SEQ ID NO: 139750 - DNA, 22 bp, synthetic construct
  misc_feature 1..22: note = chemically synthesized
  source 1..22: mol_type = other DNA
tggggtacatgtgccatggtgg

SEQ ID NO: 139751 - DNA, 22 bp, synthetic construct
  misc_feature 1..22: note = chemically synthesized
  source 1..22: mol_type = other DNA
gggtacatgtgccatggtggtt

SEQ ID NO: 139752 - DNA, 22 bp, synthetic construct
  misc_feature 1..22: note = chemically synthesized
  source 1..22: mol_type = other DNA
gctgcacccatcaacccgtcat

SEQ ID NO: 139753 - DNA, 22 bp, synthetic construct
  misc_feature 1..22: note = chemically synthesized
  source 1..22: mol_type = other DNA
ctgcacccatcaacccgtcatc

SEQ ID NO: 139754 - DNA, 22 bp, synthetic construct
  misc_feature 1..22: note = chemically synthesized
  source 1..22: mol_type = other DNA
cacccatcaacccgtcatctac

SEQ ID NO: 139755 - DNA, 22 bp, synthetic construct
  misc_feature 1..22: note = chemically synthesized
  source 1..22: mol_type = other DNA
cattaggtatttctcctaatgc

SEQ ID NO: 139756 - DNA, 22 bp, synthetic construct
  misc_feature 1..22: note = chemically synthesized
  source 1..22: mol_type = other DNA
ggtatttctcctaatgctatcc

SEQ ID NO: 139757 - DNA, 22 bp, synthetic construct
  misc_feature 1..22: note = chemically synthesized
  source 1..22: mol_type = other DNA
ctcctaatgctatccttcccct

SEQ ID NO: 139758 - DNA, 22 bp, synthetic construct
  misc_feature 1..22: note = chemically synthesized
  source 1..22: mol_type = other DNA
tcctaatgctatccttccccta

SEQ ID NO: 139759 - DNA, 22 bp, synthetic construct
  misc_feature 1..22: note = chemically synthesized
  source 1..22: mol_type = other DNA
ctaatgctatccttcccctagc

SEQ ID NO: 139760 - DNA, 22 bp, synthetic construct
  misc_feature 1..22: note = chemically synthesized
  source 1..22: mol_type = other DNA
atgctatccttcccctagcccc

SEQ ID NO: 139761 - DNA, 22 bp, synthetic construct
  misc_feature 1..22: note = chemically synthesized
  source 1..22: mol_type = other DNA
tccttcccctagccccccaccc

SEQ ID NO: 139762 - DNA, 22 bp, synthetic construct
  misc_feature 1..22: note = chemically synthesized
  source 1..22: mol_type = other DNA
cccctagccccccacccccaac

SEQ ID NO: 139763 - DNA, 22 bp, synthetic construct
  misc_feature 1..22: note = chemically synthesized
  source 1..22: mol_type = other DNA
ccctagccccccacccccaaca

SEQ ID NO: 139764 - DNA, 22 bp, synthetic construct
  misc_feature 1..22: note = chemically synthesized
  source 1..22: mol_type = other DNA
gccccccacccccaacaggccc

SEQ ID NO: 139765 - DNA, 22 bp, synthetic construct
  misc_feature 1..22: note = chemically synthesized
  source 1..22: mol_type = other DNA
ccctccctgtgtccatggatca

SEQ ID NO: 139766 - DNA, 22 bp, synthetic construct
  misc_feature 1..22: note = chemically synthesized
  source 1..22: mol_type = other DNA
cctgtgtccatggatcactggt

SEQ ID NO: 139767 - DNA, 22 bp, synthetic construct
  misc_feature 1..22: note = chemically synthesized
  source 1..22: mol_type = other DNA
tgtccatggatcactggttttt

SEQ ID NO: 139768 - DNA, 22 bp, synthetic construct
  misc_feature 1..22: note = chemically synthesized
  source 1..22: mol_type = other DNA
gtttttttttgttttttttttt

SEQ ID NO: 139769 - DNA, 22 bp, synthetic construct
  misc_feature 1..22: note = chemically synthesized
  source 1..22: mol_type = other DNA
ttttttgttttttttttttttt

SEQ ID NO: 139770 - DNA, 22 bp, synthetic construct
  misc_feature 1..22: note = chemically synthesized
  source 1..22: mol_type = other DNA
tttttgtttttttttttttttt

SEQ ID NO: 139771 - DNA, 22 bp, synthetic construct
  misc_feature 1..22: note = chemically synthesized
  source 1..22: mol_type = other DNA
ttttgtttttttttttttttta

SEQ ID NO: 139772 - DNA, 22 bp, synthetic construct
  misc_feature 1..22: note = chemically synthesized
  source 1..22: mol_type = other DNA
tttgttttttttttttttttaa

SEQ ID NO: 139773 - DNA, 22 bp, synthetic construct
  misc_feature 1..22: note = chemically synthesized
  source 1..22: mol_type = other DNA
ttgttttttttttttttttaaa

SEQ ID NO: 139774 - DNA, 22 bp, synthetic construct
  misc_feature 1..22: note = chemically synthesized
  source 1..22: mol_type = other DNA
tgttttttttttttttttaaag

SEQ ID NO: 139775 - DNA, 22 bp, synthetic construct
  misc_feature 1..22: note = chemically synthesized
  source 1..22: mol_type = other DNA
gttttttttttttttttaaagt

SEQ ID NO: 139776 - DNA, 22 bp, synthetic construct
  misc_feature 1..22: note = chemically synthesized
  source 1..22: mol_type = other DNA
ttttttttttttttttaaagtc

SEQ ID NO: 139777 - DNA, 22 bp, synthetic construct
  misc_feature 1..22: note = chemically synthesized
  source 1..22: mol_type = other DNA
tttttttttttttaaagtctca

SEQ ID NO: 139778 - DNA, 22 bp, synthetic construct
  misc_feature 1..22: note = chemically synthesized
  source 1..22: mol_type = other DNA
ttttttttttttaaagtctcag

SEQ ID NO: 139779 - DNA, 22 bp, synthetic construct
  misc_feature 1..22: note = chemically synthesized
  source 1..22: mol_type = other DNA
tttttttttttaaagtctcagt

SEQ ID NO: 139780 - DNA, 22 bp, synthetic construct
  misc_feature 1..22: note = chemically synthesized
  source 1..22: mol_type = other DNA
ttttttttttaaagtctcagtt

SEQ ID NO: 139781 - DNA, 22 bp, synthetic construct
  misc_feature 1..22: note = chemically synthesized
  source 1..22: mol_type = other DNA
tttttttttaaagtctcagtta

SEQ ID NO: 139782 - DNA, 22 bp, synthetic construct
  misc_feature 1..22: note = chemically synthesized
  source 1..22: mol_type = other DNA
ttttttttaaagtctcagttaa

SEQ ID NO: 139783 - DNA, 22 bp, synthetic construct
  misc_feature 1..22: note = chemically synthesized
  source 1..22: mol_type = other DNA
tttttttaaagtctcagttaaa

SEQ ID NO: 139784 - DNA, 22 bp, synthetic construct
  misc_feature 1..22: note = chemically synthesized
  source 1..22: mol_type = other DNA
ttttttaaagtctcagttaaat

SEQ ID NO: 139785 - DNA, 22 bp, synthetic construct
  misc_feature 1..22: note = chemically synthesized
  source 1..22: mol_type = other DNA
tttttaaagtctcagttaaatt

SEQ ID NO: 139786 - DNA, 22 bp, synthetic construct
  misc_feature 1..22: note = chemically synthesized
  source 1..22: mol_type = other DNA
ttttaaagtctcagttaaattt

SEQ ID NO: 139787 - DNA, 22 bp, synthetic construct
  misc_feature 1..22: note = chemically synthesized
  source 1..22: mol_type = other DNA
tttaaagtctcagttaaatttt

SEQ ID NO: 139788 - DNA, 22 bp, synthetic construct
  misc_feature 1..22: note = chemically synthesized
  source 1..22: mol_type = other DNA
ttaaagtctcagttaaattttt

SEQ ID NO: 139789 - DNA, 22 bp, synthetic construct
  misc_feature 1..22: note = chemically synthesized
  source 1..22: mol_type = other DNA
taaagtctcagttaaatttttg

SEQ ID NO: 139790 - DNA, 22 bp, synthetic construct
  misc_feature 1..22: note = chemically synthesized
  source 1..22: mol_type = other DNA
aaagtctcagttaaatttttgg

SEQ ID NO: 139791 - DNA, 22 bp, synthetic construct
  misc_feature 1..22: note = chemically synthesized
  source 1..22: mol_type = other DNA
aagtctcagttaaatttttgga

SEQ ID NO: 139792 - DNA, 22 bp, synthetic construct
  misc_feature 1..22: note = chemically synthesized
  source 1..22: mol_type = other DNA
agttaaatttttggaatgtaat

SEQ ID NO: 139793 - DNA, 22 bp, synthetic construct
  misc_feature 1..22: note = chemically synthesized
  source 1..22: mol_type = other DNA
aatttttggaatgtaatttatt

SEQ ID NO: 139794 - DNA, 22 bp, synthetic construct
  misc_feature 1..22: note = chemically synthesized
  source 1..22: mol_type = other DNA
ttggaatgtaatttattttcct

SEQ ID NO: 139795 - DNA, 22 bp, synthetic construct
  misc_feature 1..22: note = chemically synthesized
  source 1..22: mol_type = other DNA
tggaatgtaatttattttcctg

SEQ ID NO: 139796 - DNA, 22 bp, synthetic construct
  misc_feature 1..22: note = chemically synthesized
  source 1..22: mol_type = other DNA
ggaatgtaatttattttcctgg

SEQ ID NO: 139797 - DNA, 22 bp, synthetic construct
  misc_feature 1..22: note = chemically synthesized
  source 1..22: mol_type = other DNA
gaatgtaatttattttcctggt

SEQ ID NO: 139798 - DNA, 22 bp, synthetic construct
  misc_feature 1..22: note = chemically synthesized
  source 1..22: mol_type = other DNA
attttcctggtatcctaggact

SEQ ID NO: 139799 - DNA, 22 bp, synthetic construct
  misc_feature 1..22: note = chemically synthesized
  source 1..22: mol_type = other DNA
ttttcctggtatcctaggactt

SEQ ID NO: 139800 - DNA, 22 bp, synthetic construct
  misc_feature 1..22: note = chemically synthesized
  source 1..22: mol_type = other DNA
tcctggtatcctaggacttgca

SEQ ID NO: 139801 - DNA, 22 bp, synthetic construct
  misc_feature 1..22: note = chemically synthesized
  source 1..22: mol_type = other DNA
cctggtatcctaggacttgcaa

SEQ ID NO: 139802 - DNA, 22 bp, synthetic construct
  misc_feature 1..22: note = chemically synthesized
  source 1..22: mol_type = other DNA
ctggtatcctaggacttgcaag

SEQ ID NO: 139803 - DNA, 22 bp, synthetic construct
  misc_feature 1..22: note = chemically synthesized
  source 1..22: mol_type = other DNA
gtatcctaggacttgcaagtta

SEQ ID NO: 139804 - DNA, 22 bp, synthetic construct
  misc_feature 1..22: note = chemically synthesized
  source 1..22: mol_type = other DNA
ggacttgcaagttatctggtca

SEQ ID NO: 139805 - DNA, 22 bp, synthetic construct
  misc_feature 1..22: note = chemically synthesized
  source 1..22: mol_type = other DNA
gcaagttatctggtcactttag

SEQ ID NO: 139806 - DNA, 22 bp, synthetic construct
  misc_feature 1..22: note = chemically synthesized
  source 1..22: mol_type = other DNA
caagttatctggtcactttagc

SEQ ID NO: 139807 - DNA, 22 bp, synthetic construct
  misc_feature 1..22: note = chemically synthesized
  source 1..22: mol_type = other DNA
tctggtcactttagccctcacg

SEQ ID NO: 139808 - DNA, 22 bp, synthetic construct
  misc_feature 1..22: note = chemically synthesized
  source 1..22: mol_type = other DNA
gtcactttagccctcacgtttt

SEQ ID NO: 139809 - DNA, 22 bp, synthetic construct
  misc_feature 1..22: note = chemically synthesized
  source 1..22: mol_type = other DNA
tagccctcacgttttgatgata

SEQ ID NO: 139810 - DNA, 22 bp, synthetic construct
  misc_feature 1..22: note = chemically synthesized
  source 1..22: mol_type = other DNA
agccctcacgttttgatgataa

SEQ ID NO: 139811 - DNA, 22 bp, synthetic construct
  misc_feature 1..22: note = chemically synthesized
  source 1..22: mol_type = other DNA
gccctcacgttttgatgataat

SEQ ID NO: 139812 - DNA, 22 bp, synthetic construct
  misc_feature 1..22: note = chemically synthesized
  source 1..22: mol_type = other DNA
acgttttgatgataatcacata

SEQ ID NO: 139813 - DNA, 22 bp, synthetic construct
  misc_feature 1..22: note = chemically synthesized
  source 1..22: mol_type = other DNA
tgatgataatcacatatttgta

SEQ ID NO: 139814 - DNA, 22 bp, synthetic construct
  misc_feature 1..22: note = chemically synthesized
  source 1..22: mol_type = other DNA
gatgataatcacatatttgtaa

SEQ ID NO: 139815 - DNA, 22 bp, synthetic construct
  misc_feature 1..22: note = chemically synthesized
  source 1..22: mol_type = other DNA
atgataatcacatatttgtaaa

SEQ ID NO: 139816 - DNA, 22 bp, synthetic construct
  misc_feature 1..22: note = chemically synthesized
  source 1..22: mol_type = other DNA
gtaaacacaacacacacacaca

SEQ ID NO: 139817 - DNA, 22 bp, synthetic construct
  misc_feature 1..22: note = chemically synthesized
  source 1..22: mol_type = other DNA
taaacacaacacacacacacac

SEQ ID NO: 139818 - DNA, 22 bp, synthetic construct
  misc_feature 1..22: note = chemically synthesized
  source 1..22: mol_type = other DNA
atcgggcatttctgagcaacta

SEQ ID NO: 139819 - DNA, 22 bp, synthetic construct
  misc_feature 1..22: note = chemically synthesized
  source 1..22: mol_type = other DNA
tcgggcatttctgagcaactaa

SEQ ID NO: 139820 - DNA, 22 bp, synthetic construct
  misc_feature 1..22: note = chemically synthesized
  source 1..22: mol_type = other DNA
ctgagcaactaatcatgcagga

SEQ ID NO: 139821 - DNA, 22 bp, synthetic construct
  misc_feature 1..22: note = chemically synthesized
  source 1..22: mol_type = other DNA
tgagcaactaatcatgcaggac

SEQ ID NO: 139822 - DNA, 22 bp, synthetic construct
  misc_feature 1..22: note = chemically synthesized
  source 1..22: mol_type = other DNA
agcaactaatcatgcaggactc

SEQ ID NO: 139823 - DNA, 22 bp, synthetic construct
  misc_feature 1..22: note = chemically synthesized
  source 1..22: mol_type = other DNA
atcatgcaggactctcaaacac

SEQ ID NO: 139824 - DNA, 22 bp, synthetic construct
  misc_feature 1..22: note = chemically synthesized
  source 1..22: mol_type = other DNA
tcaaacactaacctatagcctt

SEQ ID NO: 139825 - DNA, 22 bp, synthetic construct
  misc_feature 1..22: note = chemically synthesized
  source 1..22: mol_type = other DNA
aaacactaacctatagcctttt

SEQ ID NO: 139826 - DNA, 22 bp, synthetic construct
  misc_feature 1..22: note = chemically synthesized
  source 1..22: mol_type = other DNA
acctatagccttttctatgtat

SEQ ID NO: 139827 - DNA, 22 bp, synthetic construct
  misc_feature 1..22: note = chemically synthesized
  source 1..22: mol_type = other DNA
tagccttttctatgtatctact

SEQ ID NO: 139828 - DNA, 22 bp, synthetic construct
  misc_feature 1..22: note = chemically synthesized
  source 1..22: mol_type = other DNA
ttctatgtatctacttgtgtag

SEQ ID NO: 139829 - DNA, 22 bp, synthetic construct
  misc_feature 1..22: note = chemically synthesized
  source 1..22: mol_type = other DNA
tctatgtatctacttgtgtaga

SEQ ID NO: 139830 - DNA, 22 bp, synthetic construct
  misc_feature 1..22: note = chemically synthesized
  source 1..22: mol_type = other DNA
ctatgtatctacttgtgtagaa

SEQ ID NO: 139831 - DNA, 22 bp, synthetic construct
  misc_feature 1..22: note = chemically synthesized
  source 1..22: mol_type = other DNA
tatgtatctacttgtgtagaaa

SEQ ID NO: 139832 - DNA, 22 bp, synthetic construct
  misc_feature 1..22: note = chemically synthesized
  source 1..22: mol_type = other DNA
tgtatctacttgtgtagaaacc

SEQ ID NO: 139833 - DNA, 22 bp, synthetic construct
  misc_feature 1..22: note = chemically synthesized
  source 1..22: mol_type = other DNA
cttgtgtagaaaccaagcgtgg

SEQ ID NO: 139834 - DNA, 22 bp, synthetic construct
  misc_feature 1..22: note = chemically synthesized
  source 1..22: mol_type = other DNA
gtgtagaaaccaagcgtgggga

SEQ ID NO: 139835 - DNA, 22 bp, synthetic construct
  misc_feature 1..22: note = chemically synthesized
  source 1..22: mol_type = other DNA
tgtagaaaccaagcgtggggac

SEQ ID NO: 139836 - DNA, 22 bp, synthetic construct
  misc_feature 1..22: note = chemically synthesized
  source 1..22: mol_type = other DNA
agaaggcaatagcaggagcatt

SEQ ID NO: 139837 - DNA, 22 bp, synthetic construct
  misc_feature 1..22: note = chemically synthesized
  source 1..22: mol_type = other DNA
tgactctcactgcctttagcta

SEQ ID NO: 139838 - DNA, 22 bp, synthetic construct
  misc_feature 1..22: note = chemically synthesized
  source 1..22: mol_type = other DNA
actctcactgcctttagctagg

SEQ ID NO: 139839 - DNA, 22 bp, synthetic construct
  misc_feature 1..22: note = chemically synthesized
  source 1..22: mol_type = other DNA
tcactgcctttagctaggcccc

SEQ ID NO: 139840 - DNA, 22 bp, synthetic construct
  misc_feature 1..22: note = chemically synthesized
  source 1..22: mol_type = other DNA
actgcctttagctaggcccctc

SEQ ID NO: 139841 - DNA, 22 bp, synthetic construct
  misc_feature 1..22: note = chemically synthesized
  source 1..22: mol_type = other DNA
cctttagctaggcccctccctc

SEQ ID NO: 139842 - DNA, 22 bp, synthetic construct
  misc_feature 1..22: note = chemically synthesized
  source 1..22: mol_type = other DNA
tagctaggcccctccctcatca

SEQ ID NO: 139843 - DNA, 22 bp, synthetic construct
  misc_feature 1..22: note = chemically synthesized
  source 1..22: mol_type = other DNA
agctaggcccctccctcatcac

SEQ ID NO: 139844 - DNA, 22 bp, synthetic construct
  misc_feature 1..22: note = chemically synthesized
  source 1..22: mol_type = other DNA
gctaggcccctccctcatcaca

SEQ ID NO: 139845 - DNA, 22 bp, synthetic construct
  misc_feature 1..22: note = chemically synthesized
  source 1..22: mol_type = other DNA
ggcccctccctcatcacagctc

SEQ ID NO: 139846 - DNA, 22 bp, synthetic construct
  misc_feature 1..22: note = chemically synthesized
  source 1..22: mol_type = other DNA
cctcatcacagctcagcatagt

SEQ ID NO: 139847 - DNA, 22 bp, synthetic construct
  misc_feature 1..22: note = chemically synthesized
  source 1..22: mol_type = other DNA
atcacagctcagcatagtcctg

SEQ ID NO: 139848 - DNA, 22 bp, synthetic construct
  misc_feature 1..22: note = chemically synthesized
  source 1..22: mol_type = other DNA
agcatagtcctgagctcttatc

SEQ ID NO: 139849 - DNA, 22 bp, synthetic construct
  misc_feature 1..22: note = chemically synthesized
  source 1..22: mol_type = other DNA
agctcttatctatatccacaca

SEQ ID NO: 139850 - DNA, 22 bp, synthetic construct
  misc_feature 1..22: note = chemically synthesized
  source 1..22: mol_type = other DNA
ttatctatatccacacacagtt

SEQ ID NO: 139851 - DNA, 22 bp, synthetic construct
  misc_feature 1..22: note = chemically synthesized
  source 1..22: mol_type = other DNA
atctatatccacacacagtttc

SEQ ID NO: 139852 - DNA, 22 bp, synthetic construct
  misc_feature 1..22: note = chemically synthesized
  source 1..22: mol_type = other DNA
tctatatccacacacagtttct

SEQ ID NO: 139853 - DNA, 22 bp, synthetic construct
  misc_feature 1..22: note = chemically synthesized
  source 1..22: mol_type = other DNA
tatccacacacagtttctgacg

SEQ ID NO: 139854 - DNA, 22 bp, synthetic construct
  misc_feature 1..22: note = chemically synthesized
  source 1..22: mol_type = other DNA
ctgacgctgcccagctatcacc

SEQ ID NO: 139855 - DNA, 22 bp, synthetic construct
  misc_feature 1..22: note = chemically synthesized
  source 1..22: mol_type = other DNA
tgacgctgcccagctatcacca

SEQ ID NO: 139856 - DNA, 22 bp, synthetic construct
  misc_feature 1..22: note = chemically synthesized
  source 1..22: mol_type = other DNA
acgctgcccagctatcaccatc

SEQ ID NO: 139857 - DNA, 22 bp, synthetic construct
  misc_feature 1..22: note = chemically synthesized
  source 1..22: mol_type = other DNA
cccagctatcaccatcccaagt

SEQ ID NO: 139858 - DNA, 22 bp, synthetic construct
  misc_feature 1..22: note = chemically synthesized
  source 1..22: mol_type = other DNA
tcaccatcccaagtctaaagaa

SEQ ID NO: 139859 - DNA, 22 bp, synthetic construct
  misc_feature 1..22: note = chemically synthesized
  source 1..22: mol_type = other DNA
aagaaaaaaataatgggtttgc

SEQ ID NO: 139860 - DNA, 22 bp, synthetic construct
  misc_feature 1..22: note = chemically synthesized
  source 1..22: mol_type = other DNA
gcccatctctgttgattagaaa

SEQ ID NO: 139861 - DNA, 22 bp, synthetic construct
  misc_feature 1..22: note = chemically synthesized
  source 1..22: mol_type = other DNA
cccatctctgttgattagaaaa

SEQ ID NO: 139862 - DNA, 22 bp, synthetic construct
  misc_feature 1..22: note = chemically synthesized
  source 1..22: mol_type = other DNA
tgttgattagaaaacaaaacaa

SEQ ID NO: 139863 - DNA, 22 bp, synthetic construct
  misc_feature 1..22: note = chemically synthesized
  source 1..22: mol_type = other DNA
ttgattagaaaacaaaacaaaa

SEQ ID NO: 139864 - DNA, 22 bp, synthetic construct
  misc_feature 1..22: note = chemically synthesized
  source 1..22: mol_type = other DNA
attagaaaacaaaacaaaataa

SEQ ID NO: 139865 - DNA, 22 bp, synthetic construct
  misc_feature 1..22: note = chemically synthesized
  source 1..22: mol_type = other DNA
gaaaacaaaacaaaataaaata

SEQ ID NO: 139866 - DNA, 22 bp, synthetic construct
  misc_feature 1..22: note = chemically synthesized
  source 1..22: mol_type = other DNA
agctcccagaaaacatgactaa

SEQ ID NO: 139867 - DNA, 22 bp, synthetic construct
  misc_feature 1..22: note = chemically synthesized
  source 1..22: mol_type = other DNA
ccagaaaacatgactaaaccag

SEQ ID NO: 139868 - DNA, 22 bp, synthetic construct
  misc_feature 1..22: note = chemically synthesized
  source 1..22: mol_type = other DNA
aaccagcaagaagaagaaaata

SEQ ID NO: 139869 - DNA, 22 bp, synthetic construct
  misc_feature 1..22: note = chemically synthesized
  source 1..22: mol_type = other DNA
gtgacactagtgtctgaatgag

SEQ ID NO: 139870 - DNA, 22 bp, synthetic construct
  misc_feature 1..22: note = chemically synthesized
  source 1..22: mol_type = other DNA
gtgtctgaatgaggcttgagta

SEQ ID NO: 139871 - DNA, 22 bp, synthetic construct
  misc_feature 1..22: note = chemically synthesized
  source 1..22: mol_type = other DNA
aatgaggcttgagtacagaaaa

SEQ ID NO: 139872 - DNA, 22 bp, synthetic construct
  misc_feature 1..22: note = chemically synthesized
  source 1..22: mol_type = other DNA
gagtacagaaaagaggctctag

SEQ ID NO: 139873 - DNA, 22 bp, synthetic construct
  misc_feature 1..22: note = chemically synthesized
  source 1..22: mol_type = other DNA
agtacagaaaagaggctctagc

SEQ ID NO: 139874 - DNA, 22 bp, synthetic construct
  misc_feature 1..22: note = chemically synthesized
  source 1..22: mol_type = other DNA
tagcagcatagtggtttagagg

SEQ ID NO: 139875 - DNA, 22 bp, synthetic construct
  misc_feature 1..22: note = chemically synthesized
  source 1..22: mol_type = other DNA
gcagcatagtggtttagaggag

SEQ ID NO: 139876 - DNA, 22 bp, synthetic construct
  misc_feature 1..22: note = chemically synthesized
  source 1..22: mol_type = other DNA
agaggagatgtttctttccttc

SEQ ID NO: 139877 - DNA, 22 bp, synthetic construct
  misc_feature 1..22: note = chemically synthesized
  source 1..22: mol_type = other DNA
gaggagatgtttctttccttca

SEQ ID NO: 139878 - DNA, 22 bp, synthetic construct
  misc_feature 1..22: note = chemically synthesized
  source 1..22: mol_type = other DNA
ctttccttcacagatgccttag

SEQ ID NO: 139879 - DNA, 22 bp, synthetic construct
  misc_feature 1..22: note = chemically synthesized
  source 1..22: mol_type = other DNA
tttccttcacagatgccttagc

SEQ ID NO: 139880 - DNA, 22 bp, synthetic construct
  misc_feature 1..22: note = chemically synthesized
  source 1..22: mol_type = other DNA
tccttcacagatgccttagcct

SEQ ID NO: 139881 - DNA, 22 bp, synthetic construct
  misc_feature 1..22: note = chemically synthesized
  source 1..22: mol_type = other DNA
ccttcacagatgccttagcctc

SEQ ID NO: 139882 - DNA, 22 bp, synthetic construct
  misc_feature 1..22: note = chemically synthesized
  source 1..22: mol_type = other DNA
cttcacagatgccttagcctca

SEQ ID NO: 139883 - DNA, 22 bp, synthetic construct
  misc_feature 1..22: note = chemically synthesized
  source 1..22: mol_type = other DNA
cacagatgccttagcctcaata

SEQ ID NO: 139884 - DNA, 22 bp, synthetic construct
  misc_feature 1..22: note = chemically synthesized
  source 1..22: mol_type = other DNA
acagatgccttagcctcaataa

SEQ ID NO: 139885 - DNA, 22 bp, synthetic construct
  misc_feature 1..22: note = chemically synthesized
  source 1..22: mol_type = other DNA
agcctcaataagcttgcggttg

SEQ ID NO: 139886 - DNA, 22 bp, synthetic construct
  misc_feature 1..22: note = chemically synthesized
  source 1..22: mol_type = other DNA
gcctcaataagcttgcggttgt

SEQ ID NO: 139887 - DNA, 22 bp, synthetic construct
  misc_feature 1..22: note = chemically synthesized
  source 1..22: mol_type = other DNA
aataagcttgcggttgtggaag

SEQ ID NO: 139888 - DNA, 22 bp, synthetic construct
  misc_feature 1..22: note = chemically synthesized
  source 1..22: mol_type = other DNA
gcggttgtggaagtttactttc

SEQ ID NO: 139889 - DNA, 22 bp, synthetic construct
  misc_feature 1..22: note = chemically synthesized
  source 1..22: mol_type = other DNA
cggttgtggaagtttactttca

SEQ ID NO: 139890 - DNA, 22 bp, synthetic construct
  misc_feature 1..22: note = chemically synthesized
  source 1..22: mol_type = other DNA
tggaagtttactttcagaacaa

SEQ ID NO: 139891 - DNA, 22 bp, synthetic construct
  misc_feature 1..22: note = chemically synthesized
  source 1..22: mol_type = other DNA
actttcagaacaaactcctgtg

SEQ ID NO: 139892 - DNA, 22 bp, synthetic construct
  misc_feature 1..22: note = chemically synthesized
  source 1..22: mol_type = other DNA
ctttcagaacaaactcctgtgg

SEQ ID NO: 139893 - DNA, 22 bp, synthetic construct
  misc_feature 1..22: note = chemically synthesized
  source 1..22: mol_type = other DNA
tcagaacaaactcctgtggggc

SEQ ID NO: 139894 - DNA, 22 bp, synthetic construct
  misc_feature 1..22: note = chemically synthesized
  source 1..22: mol_type = other DNA
cagaacaaactcctgtggggct

SEQ ID NO: 139895 - DNA, 22 bp, synthetic construct
  misc_feature 1..22: note = chemically synthesized
  source 1..22: mol_type = other DNA
agaacaaactcctgtggggcta

SEQ ID NO: 139896 - DNA, 22 bp, synthetic construct
  misc_feature 1..22: note = chemically synthesized
  source 1..22: mol_type = other DNA
ctgtggggctagaattattgat

SEQ ID NO: 139897 - DNA, 22 bp, synthetic construct
  misc_feature 1..22: note = chemically synthesized
  source 1..22: mol_type = other DNA
tggggctagaattattgatggc

SEQ ID NO: 139898 - DNA, 22 bp, synthetic construct
  misc_feature 1..22: note = chemically synthesized
  source 1..22: mol_type = other DNA
gaattattgatggctaaaagaa

SEQ ID NO: 139899 - DNA, 22 bp, synthetic construct
  misc_feature 1..22: note = chemically synthesized
  source 1..22: mol_type = other DNA
ttgatggctaaaagaagcccgg

SEQ ID NO: 139900 - DNA, 22 bp, synthetic construct
  misc_feature 1..22: note = chemically synthesized
  source 1..22: mol_type = other DNA
atggctaaaagaagcccggggg

SEQ ID NO: 139901 - DNA, 22 bp, synthetic construct
  misc_feature 1..22: note = chemically synthesized
  source 1..22: mol_type = other DNA
aaagaagcccgggggagggaaa

SEQ ID NO: 139902 - DNA, 22 bp, synthetic construct
  misc_feature 1..22: note = chemically synthesized
  source 1..22: mol_type = other DNA
agcatcctcacccttagtgaca

SEQ ID NO: 139903 - DNA, 22 bp, synthetic construct
  misc_feature 1..22: note = chemically synthesized
  source 1..22: mol_type = other DNA
acccttagtgacacaaaacaga

SEQ ID NO: 139904 - DNA, 22 bp, synthetic construct
  misc_feature 1..22: note = chemically synthesized
  source 1..22: mol_type = other DNA
agtgacacaaaacagagggggc

SEQ ID NO: 139905 - DNA, 22 bp, synthetic construct
  misc_feature 1..22: note = chemically synthesized
  source 1..22: mol_type = other DNA
gtgacacaaaacagagggggcc

SEQ ID NO: 139906 - DNA, 22 bp, synthetic construct
  misc_feature 1..22: note = chemically synthesized
  source 1..22: mol_type = other DNA
gttttccatatttcctcatgat

SEQ ID NO: 139907 - DNA, 22 bp, synthetic construct
  misc_feature 1..22: note = chemically synthesized
  source 1..22: mol_type = other DNA
tccatatttcctcatgatggat

SEQ ID NO: 139908 - DNA, 22 bp, synthetic construct
  misc_feature 1..22: note = chemically synthesized
  source 1..22: mol_type = other DNA
ccatatttcctcatgatggatg

SEQ ID NO: 139909 - DNA, 22 bp, synthetic construct
  misc_feature 1..22: note = chemically synthesized
  source 1..22: mol_type = other DNA
catatttcctcatgatggatga

SEQ ID NO: 139910 - DNA, 22 bp, synthetic construct
  misc_feature 1..22: note = chemically synthesized
  source 1..22: mol_type = other DNA
cctcatgatggatgatctcgtt

SEQ ID NO: 139911 - DNA, 22 bp, synthetic construct
  misc_feature 1..22: note = chemically synthesized
  source 1..22: mol_type = other DNA
ctcatgatggatgatctcgtta

SEQ ID NO: 139912 - DNA, 22 bp, synthetic construct
  misc_feature 1..22: note = chemically synthesized
  source 1..22: mol_type = other DNA
atgatggatgatctcgttaatg

SEQ ID NO: 139913 - DNA, 22 bp, synthetic construct
  misc_feature 1..22: note = chemically synthesized
  source 1..22: mol_type = other DNA
gttaatgaaggtggtctgacga

SEQ ID NO: 139914 - DNA, 22 bp, synthetic construct
  misc_feature 1..22: note = chemically synthesized
  source 1..22: mol_type = other DNA
atgaaggtggtctgacgagatc

SEQ ID NO: 139915 - DNA, 22 bp, synthetic construct
  misc_feature 1..22: note = chemically synthesized
  source 1..22: mol_type = other DNA
acgagatcattgcttcttccat

SEQ ID NO: 139916 - DNA, 22 bp, synthetic construct
  misc_feature 1..22: note = chemically synthesized
  source 1..22: mol_type = other DNA
cttcttccatttaagccttgct

SEQ ID NO: 139917 - DNA, 22 bp, synthetic construct
  misc_feature 1..22: note = chemically synthesized
  source 1..22: mol_type = other DNA
cttccatttaagccttgctcac

SEQ ID NO: 139918 - DNA, 22 bp, synthetic construct
  misc_feature 1..22: note = chemically synthesized
  source 1..22: mol_type = other DNA
ttccatttaagccttgctcact

SEQ ID NO: 139919 - DNA, 22 bp, synthetic construct
  misc_feature 1..22: note = chemically synthesized
  source 1..22: mol_type = other DNA
ccatttaagccttgctcacttg

SEQ ID NO: 139920 - DNA, 22 bp, synthetic construct
  misc_feature 1..22: note = chemically synthesized
  source 1..22: mol_type = other DNA
catttaagccttgctcacttgc

SEQ ID NO: 139921 - DNA, 22 bp, synthetic construct
  misc_feature 1..22: note = chemically synthesized
  source 1..22: mol_type = other DNA
aagccttgctcacttgccaatc

SEQ ID NO: 139922 - DNA, 22 bp, synthetic construct
  misc_feature 1..22: note = chemically synthesized
  source 1..22: mol_type = other DNA
agccttgctcacttgccaatcc

SEQ ID NO: 139923 - DNA, 22 bp, synthetic construct
  misc_feature 1..22: note = chemically synthesized
  source 1..22: mol_type = other DNA
gctcacttgccaatcctcagtt

SEQ ID NO: 139924 - DNA, 22 bp, synthetic construct
  misc_feature 1..22: note = chemically synthesized
  source 1..22: mol_type = other DNA
ctcacttgccaatcctcagttt

SEQ ID NO: 139925 - DNA, 22 bp, synthetic construct
  misc_feature 1..22: note = chemically synthesized
  source 1..22: mol_type = other DNA
acttgccaatcctcagttttaa

SEQ ID NO: 139926 - DNA, 22 bp, synthetic construct
  misc_feature 1..22: note = chemically synthesized
  source 1..22: mol_type = other DNA
gccaatcctcagttttaacctt

SEQ ID NO: 139927 - DNA, 22 bp, synthetic construct
  misc_feature 1..22: note = chemically synthesized
  source 1..22: mol_type = other DNA
ccaatcctcagttttaaccttc

SEQ ID NO: 139928 - DNA, 22 bp, synthetic construct
  misc_feature 1..22: note = chemically synthesized
  source 1..22: mol_type = other DNA
agttttaaccttctccagagaa

SEQ ID NO: 139929 - DNA, 22 bp, synthetic construct
  misc_feature 1..22: note = chemically synthesized
  source 1..22: mol_type = other DNA
taaccttctccagagaaataca

SEQ ID NO: 139930 - DNA, 22 bp, synthetic construct
  misc_feature 1..22: note = chemically synthesized
  source 1..22: mol_type = other DNA
aaccttctccagagaaatacac

SEQ ID NO: 139931 - DNA, 22 bp, synthetic construct
  misc_feature 1..22: note = chemically synthesized
  source 1..22: mol_type = other DNA
accttctccagagaaatacaca

SEQ ID NO: 139932 - DNA, 22 bp, synthetic construct
  misc_feature 1..22: note = chemically synthesized
  source 1..22: mol_type = other DNA
ctccagagaaatacacattttt

SEQ ID NO: 139933 - DNA, 22 bp, synthetic construct
  misc_feature 1..22: note = chemically synthesized
  source 1..22: mol_type = other DNA
tccagagaaatacacatttttt

SEQ ID NO: 139934 - DNA, 22 bp, synthetic construct
  misc_feature 1..22: note = chemically synthesized
  source 1..22: mol_type = other DNA
cagagaaatacacattttttat

SEQ ID NO: 139935 - DNA, 22 bp, synthetic construct
  misc_feature 1..22: note = chemically synthesized
  source 1..22: mol_type = other DNA
tttattcaggaaacatactatg

SEQ ID NO: 139936 - DNA, 22 bp, synthetic construct
  misc_feature 1..22: note = chemically synthesized
  source 1..22: mol_type = other DNA
ttattcaggaaacatactatgt

SEQ ID NO: 139937 - DNA, 22 bp, synthetic construct
  misc_feature 1..22: note = chemically synthesized
  source 1..22: mol_type = other DNA
tattcaggaaacatactatgtt

SEQ ID NO: 139938 - DNA, 22 bp, synthetic construct
  misc_feature 1..22: note = chemically synthesized
  source 1..22: mol_type = other DNA
attcaggaaacatactatgtta

SEQ ID NO: 139939 - DNA, 22 bp, synthetic construct
  misc_feature 1..22: note = chemically synthesized
  source 1..22: mol_type = other DNA
ttcaggaaacatactatgttat

SEQ ID NO: 139940 - DNA, 22 bp, synthetic construct
  misc_feature 1..22: note = chemically synthesized
  source 1..22: mol_type = other DNA
aggaaacatactatgttatagt

SEQ ID NO: 139941 - DNA, 22 bp, synthetic construct
  misc_feature 1..22: note = chemically synthesized
  source 1..22: mol_type = other DNA
tgttatagtttcaatactaaat

SEQ ID NO: 139942 - DNA, 22 bp, synthetic construct
  misc_feature 1..22: note = chemically synthesized
  source 1..22: mol_type = other DNA
tagtttcaatactaaataatca

SEQ ID NO: 139943 - DNA, 22 bp, synthetic construct
  misc_feature 1..22: note = chemically synthesized
  source 1..22: mol_type = other DNA
caatactaaataatcaaagtac

SEQ ID NO: 139944 - DNA, 22 bp, synthetic construct
  misc_feature 1..22: note = chemically synthesized
  source 1..22: mol_type = other DNA
aatactaaataatcaaagtact

SEQ ID NO: 139945 - DNA, 22 bp, synthetic construct
  misc_feature 1..22: note = chemically synthesized
  source 1..22: mol_type = other DNA
aataatcaaagtactgaagata

SEQ ID NO: 139946 - DNA, 22 bp, synthetic construct
  misc_feature 1..22: note = chemically synthesized
  source 1..22: mol_type = other DNA
aagatagcatgcataggcaaga

SEQ ID NO: 139947 - DNA, 22 bp, synthetic construct
  misc_feature 1..22: note = chemically synthesized
  source 1..22: mol_type = other DNA
agctttatgttgctgttgtttc

SEQ ID NO: 139948 - DNA, 22 bp, synthetic construct
  misc_feature 1..22: note = chemically synthesized
  source 1..22: mol_type = other DNA
gctttatgttgctgttgtttca

SEQ ID NO: 139949 - DNA, 22 bp, synthetic construct
  misc_feature 1..22: note = chemically synthesized
  source 1..22: mol_type = other DNA
tatgttgctgttgtttcagaat

SEQ ID NO: 139950 - DNA, 22 bp, synthetic construct
  misc_feature 1..22: note = chemically synthesized
  source 1..22: mol_type = other DNA
atgttgctgttgtttcagaatt

SEQ ID NO: 139951 - DNA, 22 bp, synthetic construct
  misc_feature 1..22: note = chemically synthesized
  source 1..22: mol_type = other DNA
tgttgctgttgtttcagaattt

SEQ ID NO: 139952 - DNA, 22 bp, synthetic construct
  misc_feature 1..22: note = chemically synthesized
  source 1..22: mol_type = other DNA
ctgttgtttcagaatttaaaaa

SEQ ID NO: 139953 - DNA, 22 bp, synthetic construct
  misc_feature 1..22: note = chemically synthesized
  source 1..22: mol_type = other DNA
ttgtttcagaatttaaaaaaga

SEQ ID NO: 139954 - DNA, 22 bp, synthetic construct
  misc_feature 1..22: note = chemically synthesized
  source 1..22: mol_type = other DNA
tttcagaatttaaaaaagatca

SEQ ID NO: 139955 - DNA, 22 bp, synthetic construct
  misc_feature 1..22: note = chemically synthesized
  source 1..22: mol_type = other DNA
cagaatttaaaaaagatcacca

SEQ ID NO: 139956 - DNA, 22 bp, synthetic construct
  misc_feature 1..22: note = chemically synthesized
  source 1..22: mol_type = other DNA
agaatttaaaaaagatcaccaa

SEQ ID NO: 139957 - DNA, 22 bp, synthetic construct
  misc_feature 1..22: note = chemically synthesized
  source 1..22: mol_type = other DNA
aaaaaagatcaccaagtcaagg

SEQ ID NO: 139958 - DNA, 22 bp, synthetic construct
  misc_feature 1..22: note = chemically synthesized
  source 1..22: mol_type = other DNA
aaaaagatcaccaagtcaagga

SEQ ID NO: 139959 - DNA, 22 bp, synthetic construct
  misc_feature 1..22: note = chemically synthesized
  source 1..22: mol_type = other DNA
ctcagttctagcactagaggtg

SEQ ID NO: 139960 - DNA, 22 bp, synthetic construct
  misc_feature 1..22: note = chemically synthesized
  source 1..22: mol_type = other DNA
tcagttctagcactagaggtgg

SEQ ID NO: 139961 - DNA, 22 bp, synthetic construct
  misc_feature 1..22: note = chemically synthesized
  source 1..22: mol_type = other DNA
agttctagcactagaggtggaa

SEQ ID NO: 139962 - DNA, 22 bp, synthetic construct
  misc_feature 1..22: note = chemically synthesized
  source 1..22: mol_type = other DNA
tagcactagaggtggaatctta

SEQ ID NO: 139963 - DNA, 22 bp, synthetic construct
  misc_feature 1..22: note = chemically synthesized
  source 1..22: mol_type = other DNA
gcactagaggtggaatcttagc

SEQ ID NO: 139964 - DNA, 22 bp, synthetic construct
  misc_feature 1..22: note = chemically synthesized
  source 1..22: mol_type = other DNA
gaggtggaatcttagcatataa

SEQ ID NO: 139965 - DNA, 22 bp, synthetic construct
  misc_feature 1..22: note = chemically synthesized
  source 1..22: mol_type = other DNA
agcatataatcagaggtttttc

SEQ ID NO: 139966 - DNA, 22 bp, synthetic construct
  misc_feature 1..22: note = chemically synthesized
  source 1..22: mol_type = other DNA
gcatataatcagaggtttttca

SEQ ID NO: 139967 - DNA, 22 bp, synthetic construct
  misc_feature 1..22: note = chemically synthesized
  source 1..22: mol_type = other DNA
ttcaaaatttctagacataaga

SEQ ID NO: 139968 - DNA, 22 bp, synthetic construct
  misc_feature 1..22: note = chemically synthesized
  source 1..22: mol_type = other DNA
tcaaaatttctagacataagat

SEQ ID NO: 139969 - DNA, 22 bp, synthetic construct
  misc_feature 1..22: note = chemically synthesized
  source 1..22: mol_type = other DNA
caaaatttctagacataagatt

SEQ ID NO: 139970 - DNA, 22 bp, synthetic construct
  misc_feature 1..22: note = chemically synthesized
  source 1..22: mol_type = other DNA
aaaatttctagacataagattc

SEQ ID NO: 139971 - DNA, 22 bp, synthetic construct
  misc_feature 1..22: note = chemically synthesized
  source 1..22: mol_type = other DNA
ctagacataagattcaaagccc

SEQ ID NO: 139972 - DNA, 22 bp, synthetic construct
  misc_feature 1..22: note = chemically synthesized
  source 1..22: mol_type = other DNA
tagacataagattcaaagccct

SEQ ID NO: 139973 - DNA, 22 bp, synthetic construct
  misc_feature 1..22: note = chemically synthesized
  source 1..22: mol_type = other DNA
gacataagattcaaagccctgc

SEQ ID NO: 139974 - DNA, 22 bp, synthetic construct
  misc_feature 1..22: note = chemically synthesized
  source 1..22: mol_type = other DNA
aaagccctgcacttaaaatagt

SEQ ID NO: 139975 - DNA, 22 bp, synthetic construct
  misc_feature 1..22: note = chemically synthesized
  source 1..22: mol_type = other DNA
cacttaaaatagtctcatttga

SEQ ID NO: 139976 - DNA, 22 bp, synthetic construct
  misc_feature 1..22: note = chemically synthesized
  source 1..22: mol_type = other DNA
aaaatagtctcatttgaattaa

SEQ ID NO: 139977 - DNA, 22 bp, synthetic construct
  misc_feature 1..22: note = chemically synthesized
  source 1..22: mol_type = other DNA
aaatagtctcatttgaattaac

SEQ ID NO: 139978 - DNA, 22 bp, synthetic construct
  misc_feature 1..22: note = chemically synthesized
  source 1..22: mol_type = other DNA
atttgaattaactctttatata

SEQ ID NO: 139979 - DNA, 22 bp, synthetic construct
  misc_feature 1..22: note = chemically synthesized
  source 1..22: mol_type = other DNA
gaattaactctttatataaatt

SEQ ID NO: 139980 - DNA, 22 bp, synthetic construct
  misc_feature 1..22: note = chemically synthesized
  source 1..22: mol_type = other DNA
aattaactctttatataaattg

SEQ ID NO: 139981 - DNA, 22 bp, synthetic construct
  misc_feature 1..22: note = chemically synthesized
  source 1..22: mol_type = other DNA
actctttatataaattgaaagc

SEQ ID NO: 139982 - DNA, 22 bp, synthetic construct
  misc_feature 1..22: note = chemically synthesized
  source 1..22: mol_type = other DNA
tttatataaattgaaagcacat

SEQ ID NO: 139983 - DNA, 22 bp, synthetic construct
  misc_feature 1..22: note = chemically synthesized
  source 1..22: mol_type = other DNA
tatataaattgaaagcacattc

SEQ ID NO: 139984 - DNA, 22 bp, synthetic construct
  misc_feature 1..22: note = chemically synthesized
  source 1..22: mol_type = other DNA
atataaattgaaagcacattct

SEQ ID NO: 139985 - DNA, 22 bp, synthetic construct
  misc_feature 1..22: note = chemically synthesized
  source 1..22: mol_type = other DNA
tataaattgaaagcacattctg

SEQ ID NO: 139986 - DNA, 22 bp, synthetic construct
  misc_feature 1..22: note = chemically synthesized
  source 1..22: mol_type = other DNA
aaagcacattctgaactacttc

SEQ ID NO: 139987 - DNA, 22 bp, synthetic construct
  misc_feature 1..22: note = chemically synthesized
  source 1..22: mol_type = other DNA
tgaactacttcagagtattgtt

SEQ ID NO: 139988 - DNA, 22 bp, synthetic construct
  misc_feature 1..22: note = chemically synthesized
  source 1..22: mol_type = other DNA
aactacttcagagtattgtttt

SEQ ID NO: 139989 - DNA, 22 bp, synthetic construct
  misc_feature 1..22: note = chemically synthesized
  source 1..22: mol_type = other DNA
cttcagagtattgttttatttc

SEQ ID NO: 139990 - DNA, 22 bp, synthetic construct
  misc_feature 1..22: note = chemically synthesized
  source 1..22: mol_type = other DNA
cagagtattgttttatttctat

SEQ ID NO: 139991 - DNA, 22 bp, synthetic construct
  misc_feature 1..22: note = chemically synthesized
  source 1..22: mol_type = other DNA
agagtattgttttatttctatg

SEQ ID NO: 139992 - DNA, 22 bp, synthetic construct
  misc_feature 1..22: note = chemically synthesized
  source 1..22: mol_type = other DNA
ttttatttctatgttcttagtt

SEQ ID NO: 139993 - DNA, 22 bp, synthetic construct
  misc_feature 1..22: note = chemically synthesized
  source 1..22: mol_type = other DNA
tatttctatgttcttagttcat

SEQ ID NO: 139994 - DNA, 22 bp, synthetic construct
  misc_feature 1..22: note = chemically synthesized
  source 1..22: mol_type = other DNA
atttctatgttcttagttcata

SEQ ID NO: 139995 - DNA, 22 bp, synthetic construct
  misc_feature 1..22: note = chemically synthesized
  source 1..22: mol_type = other DNA
tttctatgttcttagttcataa

SEQ ID NO: 139996 - DNA, 22 bp, synthetic construct
  misc_feature 1..22: note = chemically synthesized
  source 1..22: mol_type = other DNA
ctatgttcttagttcataaata

SEQ ID NO: 139997 - DNA, 22 bp, synthetic construct
  misc_feature 1..22: note = chemically synthesized
  source 1..22: mol_type = other DNA
tatgttcttagttcataaatac

SEQ ID NO: 139998 - DNA, 22 bp, synthetic construct
  misc_feature 1..22: note = chemically synthesized
  source 1..22: mol_type = other DNA
tgttcttagttcataaatacat

SEQ ID NO: 139999 - DNA, 22 bp, synthetic construct
  misc_feature 1..22: note = chemically synthesized
  source 1..22: mol_type = other DNA
ttagttcataaatacattaggc

SEQ ID NO: 140000 - DNA, 22 bp, synthetic construct
  misc_feature 1..22: note = chemically synthesized
  source 1..22: mol_type = other DNA
agttcataaatacattaggcaa

SEQ ID NO: 140001 - DNA, 22 bp, synthetic construct
  misc_feature 1..22: note = chemically synthesized
  source 1..22: mol_type = other DNA
gttcataaatacattaggcaat

SEQ ID NO: 140002 - DNA, 22 bp, synthetic construct
  misc_feature 1..22: note = chemically synthesized
  source 1..22: mol_type = other DNA
ataaatacattaggcaatgcaa

SEQ ID NO: 140003 - DNA, 22 bp, synthetic construct
  misc_feature 1..22: note = chemically synthesized
  source 1..22: mol_type = other DNA
ggcaatgcaatttaattaaaaa

SEQ ID NO: 140004 - DNA, 22 bp, synthetic construct
  misc_feature 1..22: note = chemically synthesized
  source 1..22: mol_type = other DNA
aattaaaaaaacccaagaattt

SEQ ID NO: 140005 - DNA, 22 bp, synthetic construct
  misc_feature 1..22: note = chemically synthesized
  source 1..22: mol_type = other DNA
attaaaaaaacccaagaatttc

SEQ ID NO: 140006 - DNA, 22 bp, synthetic construct
  misc_feature 1..22: note = chemically synthesized
  source 1..22: mol_type = other DNA
aaaaaacccaagaatttcttag

SEQ ID NO: 140007 - DNA, 22 bp, synthetic construct
  misc_feature 1..22: note = chemically synthesized
  source 1..22: mol_type = other DNA
cttagaattttaatcatgaaaa

SEQ ID NO: 140008 - DNA, 22 bp, synthetic construct
  misc_feature 1..22: note = chemically synthesized
  source 1..22: mol_type = other DNA
ttagaattttaatcatgaaaat

SEQ ID NO: 140009 - DNA, 22 bp, synthetic construct
  misc_feature 1..22: note = chemically synthesized
  source 1..22: mol_type = other DNA
agaattttaatcatgaaaataa

SEQ ID NO: 140010 - DNA, 22 bp, synthetic construct
  misc_feature 1..22: note = chemically synthesized
  source 1..22: mol_type = other DNA
gaattttaatcatgaaaataaa

SEQ ID NO: 140011 - DNA, 22 bp, synthetic construct
  misc_feature 1..22: note = chemically synthesized
  source 1..22: mol_type = other DNA
taatcatgaaaataaatgaagg

SEQ ID NO: 140012 - DNA, 22 bp, synthetic construct
  misc_feature 1..22: note = chemically synthesized
  source 1..22: mol_type = other DNA
aatcatgaaaataaatgaaggc

SEQ ID NO: 140013 - DNA, 22 bp, synthetic construct
  misc_feature 1..22: note = chemically synthesized
  source 1..22: mol_type = other DNA
atcatgaaaataaatgaaggca

SEQ ID NO: 140014 - DNA, 22 bp, synthetic construct
  misc_feature 1..22: note = chemically synthesized
  source 1..22: mol_type = other DNA
tacttactcaaggtcccaaaag

SEQ ID NO: 140015 - DNA, 22 bp, synthetic construct
  misc_feature 1..22: note = chemically synthesized
  source 1..22: mol_type = other DNA
acttactcaaggtcccaaaagg

SEQ ID NO: 140016 - DNA, 22 bp, synthetic construct
  misc_feature 1..22: note = chemically synthesized
  source 1..22: mol_type = other DNA
cttactcaaggtcccaaaaggt

SEQ ID NO: 140017 - DNA, 22 bp, synthetic construct
  misc_feature 1..22: note = chemically synthesized
  source 1..22: mol_type = other DNA
actcaaggtcccaaaaggtcaa

SEQ ID NO: 140018 - DNA, 22 bp, synthetic construct
  misc_feature 1..22: note = chemically synthesized
  source 1..22: mol_type = other DNA
ctcaaggtcccaaaaggtcaaa

SEQ ID NO: 140019 - DNA, 22 bp, synthetic construct
  misc_feature 1..22: note = chemically synthesized
  source 1..22: mol_type = other DNA
aaggtcccaaaaggtcaaagaa

SEQ ID NO: 140020 - DNA, 22 bp, synthetic construct
  misc_feature 1..22: note = chemically synthesized
  source 1..22: mol_type = other DNA
tatttcagcggaaaatgggata

SEQ ID NO: 140021 - DNA, 22 bp, synthetic construct
  misc_feature 1..22: note = chemically synthesized
  source 1..22: mol_type = other DNA
cagcggaaaatgggatatttat

SEQ ID NO: 140022 - DNA, 22 bp, synthetic construct
  misc_feature 1..22: note = chemically synthesized
  source 1..22: mol_type = other DNA
agcggaaaatgggatatttatg

SEQ ID NO: 140023 - DNA, 22 bp, synthetic construct
  misc_feature 1..22: note = chemically synthesized
  source 1..22: mol_type = other DNA
atgagttttctaagttgacaga

SEQ ID NO: 140024 - DNA, 22 bp, synthetic construct
  misc_feature 1..22: note = chemically synthesized
  source 1..22: mol_type = other DNA
tgagttttctaagttgacagac

SEQ ID NO: 140025 - DNA, 22 bp, synthetic construct
  misc_feature 1..22: note = chemically synthesized
  source 1..22: mol_type = other DNA
tctaagttgacagactcaagtt

SEQ ID NO: 140026 - DNA, 22 bp, synthetic construct
  misc_feature 1..22: note = chemically synthesized
  source 1..22: mol_type = other DNA
ctaagttgacagactcaagttt

SEQ ID NO: 140027 - DNA, 22 bp, synthetic construct
  misc_feature 1..22: note = chemically synthesized
  source 1..22: mol_type = other DNA
taagttgacagactcaagtttt

SEQ ID NO: 140028 - DNA, 22 bp, synthetic construct
  misc_feature 1..22: note = chemically synthesized
  source 1..22: mol_type = other DNA
agttgacagactcaagttttaa

SEQ ID NO: 140029 - DNA, 22 bp, synthetic construct
  misc_feature 1..22: note = chemically synthesized
  source 1..22: mol_type = other DNA
acagactcaagttttaaccttc

SEQ ID NO: 140030 - DNA, 22 bp, synthetic construct
  misc_feature 1..22: note = chemically synthesized
  source 1..22: mol_type = other DNA
aagttttaaccttcagtgccca

SEQ ID NO: 140031 - DNA, 22 bp, synthetic construct
  misc_feature 1..22: note = chemically synthesized
  source 1..22: mol_type = other DNA
taaccttcagtgcccatcatgt

SEQ ID NO: 140032 - DNA, 22 bp, synthetic construct
  misc_feature 1..22: note = chemically synthesized
  source 1..22: mol_type = other DNA
aaccttcagtgcccatcatgta

SEQ ID NO: 140033 - DNA, 22 bp, synthetic construct
  misc_feature 1..22: note = chemically synthesized
  source 1..22: mol_type = other DNA
accttcagtgcccatcatgtag

SEQ ID NO: 140034 - DNA, 22 bp, synthetic construct
  misc_feature 1..22: note = chemically synthesized
  source 1..22: mol_type = other DNA
cagtgcccatcatgtaggaaag

SEQ ID NO: 140035 - DNA, 22 bp, synthetic construct
  misc_feature 1..22: note = chemically synthesized
  source 1..22: mol_type = other DNA
agtgcccatcatgtaggaaagt

SEQ ID NO: 140036 - DNA, 22 bp, synthetic construct
  misc_feature 1..22: note = chemically synthesized
  source 1..22: mol_type = other DNA
gctgattctggctttctactcc

SEQ ID NO: 140037 - DNA, 22 bp, synthetic construct
  misc_feature 1..22: note = chemically synthesized
  source 1..22: mol_type = other DNA
attctggctttctactcctttt

SEQ ID NO: 140038 - DNA, 22 bp, synthetic construct
  misc_feature 1..22: note = chemically synthesized
  source 1..22: mol_type = other DNA
tggctttctactcctttttccc

SEQ ID NO: 140039 - DNA, 22 bp, synthetic construct
  misc_feature 1..22: note = chemically synthesized
  source 1..22: mol_type = other DNA
gctttctactcctttttcccat

SEQ ID NO: 140040 - DNA, 22 bp, synthetic construct
  misc_feature 1..22: note = chemically synthesized
  source 1..22: mol_type = other DNA
tctactcctttttcccattaaa

SEQ ID NO: 140041 - DNA, 22 bp, synthetic construct
  misc_feature 1..22: note = chemically synthesized
  source 1..22: mol_type = other DNA
ctactcctttttcccattaaag

SEQ ID NO: 140042 - DNA, 22 bp, synthetic construct
  misc_feature 1..22: note = chemically synthesized
  source 1..22: mol_type = other DNA
tactcctttttcccattaaaga

SEQ ID NO: 140043 - DNA, 22 bp, synthetic construct
  misc_feature 1..22: note = chemically synthesized
  source 1..22: mol_type = other DNA
ctcctttttcccattaaagatc

SEQ ID NO: 140044 - DNA, 22 bp, synthetic construct
  misc_feature 1..22: note = chemically synthesized
  source 1..22: mol_type = other DNA
ctttttcccattaaagatccct

SEQ ID NO: 140045 - DNA, 22 bp, synthetic construct
  misc_feature 1..22: note = chemically synthesized
  source 1..22: mol_type = other DNA
tttcccattaaagatccctcct

SEQ ID NO: 140046 - DNA, 22 bp, synthetic construct
  misc_feature 1..22: note = chemically synthesized
  source 1..22: mol_type = other DNA
ttcccattaaagatccctcctg

SEQ ID NO: 140047 - DNA, 22 bp, synthetic construct
  misc_feature 1..22: note = chemically synthesized
  source 1..22: mol_type = other DNA
tcccattaaagatccctcctgc

SEQ ID NO: 140048 - DNA, 22 bp, synthetic construct
  misc_feature 1..22: note = chemically synthesized
  source 1..22: mol_type = other DNA
cccattaaagatccctcctgct

SEQ ID NO: 140049 - DNA, 22 bp, synthetic construct
  misc_feature 1..22: note = chemically synthesized
  source 1..22: mol_type = other DNA
ccattaaagatccctcctgctt

SEQ ID NO: 140050 - DNA, 22 bp, synthetic construct
  misc_feature 1..22: note = chemically synthesized
  source 1..22: mol_type = other DNA
aagatccctcctgcttaattaa

SEQ ID NO: 140051 - DNA, 22 bp, synthetic construct
  misc_feature 1..22: note = chemically synthesized
  source 1..22: mol_type = other DNA
ctgcttaattaacattcacaag

SEQ ID NO: 140052 - DNA, 22 bp, synthetic construct
  misc_feature 1..22: note = chemically synthesized
  source 1..22: mol_type = other DNA
cttaattaacattcacaagtaa

SEQ ID NO: 140053 - DNA, 22 bp, synthetic construct
  misc_feature 1..22: note = chemically synthesized
  source 1..22: mol_type = other DNA
aattaacattcacaagtaactc

SEQ ID NO: 140054 - DNA, 22 bp, synthetic construct
  misc_feature 1..22: note = chemically synthesized
  source 1..22: mol_type = other DNA
attaacattcacaagtaactct

SEQ ID NO: 140055 - DNA, 22 bp, synthetic construct
  misc_feature 1..22: note = chemically synthesized
  source 1..22: mol_type = other DNA
acattcacaagtaactctggtt

SEQ ID NO: 140056 - DNA, 22 bp, synthetic construct
  misc_feature 1..22: note = chemically synthesized
  source 1..22: mol_type = other DNA
acaagtaactctggttgtactt

SEQ ID NO: 140057 - DNA, 22 bp, synthetic construct
  misc_feature 1..22: note = chemically synthesized
  source 1..22: mol_type = other DNA
tggttgtactttaggcacagtg

SEQ ID NO: 140058 - DNA, 22 bp, synthetic construct
  misc_feature 1..22: note = chemically synthesized
  source 1..22: mol_type = other DNA
gttgtactttaggcacagtggc

SEQ ID NO: 140059 - DNA, 22 bp, synthetic construct
  misc_feature 1..22: note = chemically synthesized
  source 1..22: mol_type = other DNA
tactttaggcacagtggctccc

SEQ ID NO: 140060 - DNA, 22 bp, synthetic construct
  misc_feature 1..22: note = chemically synthesized
  source 1..22: mol_type = other DNA
taggcacagtggctcccgaggt

SEQ ID NO: 140061 - DNA, 22 bp, synthetic construct
  misc_feature 1..22: note = chemically synthesized
  source 1..22: mol_type = other DNA
aggcacagtggctcccgaggtc

SEQ ID NO: 140062 - DNA, 22 bp, synthetic construct
  misc_feature 1..22: note = chemically synthesized
  source 1..22: mol_type = other DNA
ggcacagtggctcccgaggtca

SEQ ID NO: 140063 - DNA, 22 bp, synthetic construct
  misc_feature 1..22: note = chemically synthesized
  source 1..22: mol_type = other DNA
ccgaggtcagtcacacaatagg

SEQ ID NO: 140064 - DNA, 22 bp, synthetic construct
  misc_feature 1..22: note = chemically synthesized
  source 1..22: mol_type = other DNA
tgctccaagttgccagagagag

SEQ ID NO: 140065 - DNA, 22 bp, synthetic construct
  misc_feature 1..22: note = chemically synthesized
  source 1..22: mol_type = other DNA
caagttgccagagagagagatt

SEQ ID NO: 140066 - DNA, 22 bp, synthetic construct
  misc_feature 1..22: note = chemically synthesized
  source 1..22: mol_type = other DNA
ccagagagagagattactcttg

SEQ ID NO: 140067 - DNA, 22 bp, synthetic construct
  misc_feature 1..22: note = chemically synthesized
  source 1..22: mol_type = other DNA
ctcttgagaatgagcctcagcc

SEQ ID NO: 140068 - DNA, 22 bp, synthetic construct
  misc_feature 1..22: note = chemically synthesized
  source 1..22: mol_type = other DNA
ttgagaatgagcctcagccctg

SEQ ID NO: 140069 - DNA, 22 bp, synthetic construct
  misc_feature 1..22: note = chemically synthesized
  source 1..22: mol_type = other DNA
gagaatgagcctcagccctggc

SEQ ID NO: 140070 - DNA, 22 bp, synthetic construct
  misc_feature 1..22: note = chemically synthesized
  source 1..22: mol_type = other DNA
agaatgagcctcagccctggct

SEQ ID NO: 140071 - DNA, 22 bp, synthetic construct
  misc_feature 1..22: note = chemically synthesized
  source 1..22: mol_type = other DNA
agccctggctcaaactcacctg

SEQ ID NO: 140072 - DNA, 22 bp, synthetic construct
  misc_feature 1..22: note = chemically synthesized
  source 1..22: mol_type = other DNA
gctcaaactcacctgcaaactt

SEQ ID NO: 140073 - DNA, 22 bp, synthetic construct
  misc_feature 1..22: note = chemically synthesized
  source 1..22: mol_type = other DNA
aaactcacctgcaaacttcgtg

SEQ ID NO: 140074 - DNA, 22 bp, synthetic construct
  misc_feature 1..22: note = chemically synthesized
  source 1..22: mol_type = other DNA
acctgcaaacttcgtgagagat

SEQ ID NO: 140075 - DNA, 22 bp, synthetic construct
  misc_feature 1..22: note = chemically synthesized
  source 1..22: mol_type = other DNA
caaacttcgtgagagatgaggc

SEQ ID NO: 140076 - DNA, 22 bp, synthetic construct
  misc_feature 1..22: note = chemically synthesized
  source 1..22: mol_type = other DNA
cgtgagagatgaggcagaggta

SEQ ID NO: 140077 - DNA, 22 bp, synthetic construct
  misc_feature 1..22: note = chemically synthesized
  source 1..22: mol_type = other DNA
gtgagagatgaggcagaggtac

SEQ ID NO: 140078 - DNA, 22 bp, synthetic construct
  misc_feature 1..22: note = chemically synthesized
  source 1..22: mol_type = other DNA
cgaaagcaacagttagaagcta

SEQ ID NO: 140079 - DNA, 22 bp, synthetic construct
  misc_feature 1..22: note = chemically synthesized
  source 1..22: mol_type = other DNA
gaagctaaatgatgagaacaca

SEQ ID NO: 140080 - DNA, 22 bp, synthetic construct
  misc_feature 1..22: note = chemically synthesized
  source 1..22: mol_type = other DNA
aatgatgagaacacatggactc

SEQ ID NO: 140081 - DNA, 22 bp, synthetic construct
  misc_feature 1..22: note = chemically synthesized
  source 1..22: mol_type = other DNA
atagagggaaacaacgcatact

SEQ ID NO: 140082 - DNA, 22 bp, synthetic construct
  misc_feature 1..22: note = chemically synthesized
  source 1..22: mol_type = other DNA
gggcctatcagagggtggaggg

SEQ ID NO: 140083 - DNA, 22 bp, synthetic construct
  misc_feature 1..22: note = chemically synthesized
  source 1..22: mol_type = other DNA
tcagagggtggagggtgagaga

SEQ ID NO: 140084 - DNA, 22 bp, synthetic construct
  misc_feature 1..22: note = chemically synthesized
  source 1..22: mol_type = other DNA
atggatgctaagcgtaatacct

SEQ ID NO: 140085 - DNA, 22 bp, synthetic construct
  misc_feature 1..22: note = chemically synthesized
  source 1..22: mol_type = other DNA
agcgtaatacctgagtgatgag

SEQ ID NO: 140086 - DNA, 22 bp, synthetic construct
  misc_feature 1..22: note = chemically synthesized
  source 1..22: mol_type = other DNA
agtgatgagatcatctatacaa

SEQ ID NO: 140087 - DNA, 22 bp, synthetic construct
  misc_feature 1..22: note = chemically synthesized
  source 1..22: mol_type = other DNA
tacaacaaacccccttgacatt

SEQ ID NO: 140088 - DNA, 22 bp, synthetic construct
  misc_feature 1..22: note = chemically synthesized
  source 1..22: mol_type = other DNA
gacattcatttatctatgtaac

SEQ ID NO: 140089 - DNA, 22 bp, synthetic construct
  misc_feature 1..22: note = chemically synthesized
  source 1..22: mol_type = other DNA
acattcatttatctatgtaaca

SEQ ID NO: 140090 - DNA, 22 bp, synthetic construct
  misc_feature 1..22: note = chemically synthesized
  source 1..22: mol_type = other DNA
atttatctatgtaacaaacctg

SEQ ID NO: 140091 - DNA, 22 bp, synthetic construct
  misc_feature 1..22: note = chemically synthesized
  source 1..22: mol_type = other DNA
atctatgtaacaaacctgcaca

SEQ ID NO: 140092 - DNA, 22 bp, synthetic construct
  misc_feature 1..22: note = chemically synthesized
  source 1..22: mol_type = other DNA
tctatgtaacaaacctgcacat

SEQ ID NO: 140093 - DNA, 22 bp, synthetic construct
  misc_feature 1..22: note = chemically synthesized
  source 1..22: mol_type = other DNA
tgtaacaaacctgcacatcctg

SEQ ID NO: 140094 - DNA, 22 bp, synthetic construct
  misc_feature 1..22: note = chemically synthesized
  source 1..22: mol_type = other DNA
cacatcctgtacatgtacccct

SEQ ID NO: 140095 - DNA, 22 bp, synthetic construct
  misc_feature 1..22: note = chemically synthesized
  source 1..22: mol_type = other DNA
tacatgtacccctgaacttaaa

SEQ ID NO: 140096 - DNA, 22 bp, synthetic construct
  misc_feature 1..22: note = chemically synthesized
  source 1..22: mol_type = other DNA
aacttaaaataaaagttgaaaa

SEQ ID NO: 140097 - DNA, 22 bp, synthetic construct
  misc_feature 1..22: note = chemically synthesized
  source 1..22: mol_type = other DNA
aaaataaaagttgaaaacaaga

SEQ ID NO: 140098 - DNA, 22 bp, synthetic construct
  misc_feature 1..22: note = chemically synthesized
  source 1..22: mol_type = other DNA
aaataaaagttgaaaacaagaa

SEQ ID NO: 140099 - DNA, 22 bp, synthetic construct
  misc_feature 1..22: note = chemically synthesized
  source 1..22: mol_type = other DNA
aaaacaagaaagcaacagtttg

SEQ ID NO: 140100 - DNA, 22 bp, synthetic construct
  misc_feature 1..22: note = chemically synthesized
  source 1..22: mol_type = other DNA
gaacacttgttatggtctattc

SEQ ID NO: 140101 - DNA, 22 bp, synthetic construct
  misc_feature 1..22: note = chemically synthesized
  source 1..22: mol_type = other DNA
aacacttgttatggtctattct

SEQ ID NO: 140102 - DNA, 22 bp, synthetic construct
  misc_feature 1..22: note = chemically synthesized
  source 1..22: mol_type = other DNA
gttatggtctattctctcattc

SEQ ID NO: 140103 - DNA, 22 bp, synthetic construct
  misc_feature 1..22: note = chemically synthesized
  source 1..22: mol_type = other DNA
ttatggtctattctctcattct

SEQ ID NO: 140104 - DNA, 22 bp, synthetic construct
  misc_feature 1..22: note = chemically synthesized
  source 1..22: mol_type = other DNA
tggtctattctctcattcttta

SEQ ID NO: 140105 - DNA, 22 bp, synthetic construct
  misc_feature 1..22: note = chemically synthesized
  source 1..22: mol_type = other DNA
ttctctcattctttacaattac

SEQ ID NO: 140106 - DNA, 22 bp, synthetic construct
  misc_feature 1..22: note = chemically synthesized
  source 1..22: mol_type = other DNA
tctcattctttacaattacact

SEQ ID NO: 140107 - DNA, 22 bp, synthetic construct
  misc_feature 1..22: note = chemically synthesized
  source 1..22: mol_type = other DNA
tcattctttacaattacactag

SEQ ID NO: 140108 - DNA, 22 bp, synthetic construct
  misc_feature 1..22: note = chemically synthesized
  source 1..22: mol_type = other DNA
attctttacaattacactagaa

SEQ ID NO: 140109 - DNA, 22 bp, synthetic construct
  misc_feature 1..22: note = chemically synthesized
  source 1..22: mol_type = other DNA
tttacaattacactagaaaata

SEQ ID NO: 140110 - DNA, 22 bp, synthetic construct
  misc_feature 1..22: note = chemically synthesized
  source 1..22: mol_type = other DNA
tacaattacactagaaaatagc

SEQ ID NO: 140111 - DNA, 22 bp, synthetic construct
  misc_feature 1..22: note = chemically synthesized
  source 1..22: mol_type = other DNA
acaattacactagaaaatagcc

SEQ ID NO: 140112 - DNA, 22 bp, synthetic construct
  misc_feature 1..22: note = chemically synthesized
  source 1..22: mol_type = other DNA
caattacactagaaaatagcca

SEQ ID NO: 140113 - DNA, 22 bp, synthetic construct
  misc_feature 1..22: note = chemically synthesized
  source 1..22: mol_type = other DNA
cactagaaaatagccacaggct

SEQ ID NO: 140114 - DNA, 22 bp, synthetic construct
  misc_feature 1..22: note = chemically synthesized
  source 1..22: mol_type = other DNA
gaaaatagccacaggcttcctg

SEQ ID NO: 140115 - DNA, 22 bp, synthetic construct
  misc_feature 1..22: note = chemically synthesized
  source 1..22: mol_type = other DNA
cctgcaaggcagccacagaatt

SEQ ID NO: 140116 - DNA, 22 bp, synthetic construct
  misc_feature 1..22: note = chemically synthesized
  source 1..22: mol_type = other DNA
ctgcaaggcagccacagaattt

SEQ ID NO: 140117 - DNA, 22 bp, synthetic construct
  misc_feature 1..22: note = chemically synthesized
  source 1..22: mol_type = other DNA
caaggcagccacagaatttatg

SEQ ID NO: 140118 - DNA, 22 bp, synthetic construct
  misc_feature 1..22: note = chemically synthesized
  source 1..22: mol_type = other DNA
atgacttgtgatatccaagtca

SEQ ID NO: 140119 - DNA, 22 bp, synthetic construct
  misc_feature 1..22: note = chemically synthesized
  source 1..22: mol_type = other DNA
tgacttgtgatatccaagtcat

SEQ ID NO: 140120 - DNA, 22 bp, synthetic construct
  misc_feature 1..22: note = chemically synthesized
  source 1..22: mol_type = other DNA
gtgatatccaagtcattcctgg

SEQ ID NO: 140121 - DNA, 22 bp, synthetic construct
  misc_feature 1..22: note = chemically synthesized
  source 1..22: mol_type = other DNA
tgatatccaagtcattcctgga

SEQ ID NO: 140122 - DNA, 22 bp, synthetic construct
  misc_feature 1..22: note = chemically synthesized
  source 1..22: mol_type = other DNA
ctggataatgcaaaatctaaca

SEQ ID NO: 140123 - DNA, 22 bp, synthetic construct
  misc_feature 1..22: note = chemically synthesized
  source 1..22: mol_type = other DNA
gataatgcaaaatctaacacaa

SEQ ID NO: 140124 - DNA, 22 bp, synthetic construct
  misc_feature 1..22: note = chemically synthesized
  source 1..22: mol_type = other DNA
acacaaaatctagtagaatcat

SEQ ID NO: 140125 - DNA, 22 bp, synthetic construct
  misc_feature 1..22: note = chemically synthesized
  source 1..22: mol_type = other DNA
gtagaatcatttgcttacatct

SEQ ID NO: 140126 - DNA, 22 bp, synthetic construct
  misc_feature 1..22: note = chemically synthesized
  source 1..22: mol_type = other DNA
gcttacatctatttttgttctg

SEQ ID NO: 140127 - DNA, 22 bp, synthetic construct
  misc_feature 1..22: note = chemically synthesized
  source 1..22: mol_type = other DNA
cttacatctatttttgttctga

SEQ ID NO: 140128 - DNA, 22 bp, synthetic construct
  misc_feature 1..22: note = chemically synthesized
  source 1..22: mol_type = other DNA
acatctatttttgttctgagaa

SEQ ID NO: 140129 - DNA, 22 bp, synthetic construct
  misc_feature 1..22: note = chemically synthesized
  source 1..22: mol_type = other DNA
catctatttttgttctgagaat

SEQ ID NO: 140130 - DNA, 22 bp, synthetic construct
  misc_feature 1..22: note = chemically synthesized
  source 1..22: mol_type = other DNA
tttttgttctgagaatatagat

SEQ ID NO: 140131 - DNA, 22 bp, synthetic construct
  misc_feature 1..22: note = chemically synthesized
  source 1..22: mol_type = other DNA
ttgttctgagaatatagattta

SEQ ID NO: 140132 - DNA, 22 bp, synthetic construct
  misc_feature 1..22: note = chemically synthesized
  source 1..22: mol_type = other DNA
tgttctgagaatatagatttag

SEQ ID NO: 140133 - DNA, 22 bp, synthetic construct
  misc_feature 1..22: note = chemically synthesized
  source 1..22: mol_type = other DNA
gttctgagaatatagatttaga

SEQ ID NO: 140134 - DNA, 22 bp, synthetic construct
  misc_feature 1..22: note = chemically synthesized
  source 1..22: mol_type = other DNA
ttctgagaatatagatttagat

SEQ ID NO: 140135 - DNA, 22 bp, synthetic construct
  misc_feature 1..22: note = chemically synthesized
  source 1..22: mol_type = other DNA
tgagaatatagatttagataca

SEQ ID NO: 140136 - DNA, 22 bp, synthetic construct
  misc_feature 1..22: note = chemically synthesized
  source 1..22: mol_type = other DNA
agaatatagatttagatacata

SEQ ID NO: 140137 - DNA, 22 bp, synthetic construct
  misc_feature 1..22: note = chemically synthesized
  source 1..22: mol_type = other DNA
agatacataatggaagcagaat

SEQ ID NO: 140138 - DNA, 22 bp, synthetic construct
  misc_feature 1..22: note = chemically synthesized
  source 1..22: mol_type = other DNA
gatacataatggaagcagaata

SEQ ID NO: 140139 - DNA, 22 bp, synthetic construct
  misc_feature 1..22: note = chemically synthesized
  source 1..22: mol_type = other DNA
aaaatctggctaatttagaatc

SEQ ID NO: 140140 - DNA, 22 bp, synthetic construct
  misc_feature 1..22: note = chemically synthesized
  source 1..22: mol_type = other DNA
aaatctggctaatttagaatcc

SEQ ID NO: 140141 - DNA, 22 bp, synthetic construct
  misc_feature 1..22: note = chemically synthesized
  source 1..22: mol_type = other DNA
gctaatttagaatcctaagcag

SEQ ID NO: 140142 - DNA, 22 bp, synthetic construct
  misc_feature 1..22: note = chemically synthesized
  source 1..22: mol_type = other DNA
atttagaatcctaagcagctct

SEQ ID NO: 140143 - DNA, 22 bp, synthetic construct
  misc_feature 1..22: note = chemically synthesized
  source 1..22: mol_type = other DNA
agaatcctaagcagctcttttc

SEQ ID NO: 140144 - DNA, 22 bp, synthetic construct
  misc_feature 1..22: note = chemically synthesized
  source 1..22: mol_type = other DNA
gaatcctaagcagctcttttcc

SEQ ID NO: 140145 - DNA, 22 bp, synthetic construct
  misc_feature 1..22: note = chemically synthesized
  source 1..22: mol_type = other DNA
agcagctcttttcctatcagtg

SEQ ID NO: 140146 - DNA, 22 bp, synthetic construct
  misc_feature 1..22: note = chemically synthesized
  source 1..22: mol_type = other DNA
ttttcctatcagtggtttacaa

SEQ ID NO: 140147 - DNA, 22 bp, synthetic construct
  misc_feature 1..22: note = chemically synthesized
  source 1..22: mol_type = other DNA
ttcctatcagtggtttacaagc

SEQ ID NO: 140148 - DNA, 22 bp, synthetic construct
  misc_feature 1..22: note = chemically synthesized
  source 1..22: mol_type = other DNA
tcctatcagtggtttacaagcc

SEQ ID NO: 140149 - DNA, 22 bp, synthetic construct
  misc_feature 1..22: note = chemically synthesized
  source 1..22: mol_type = other DNA
cctatcagtggtttacaagcct

SEQ ID NO: 140150 - DNA, 22 bp, synthetic construct
  misc_feature 1..22: note = chemically synthesized
  source 1..22: mol_type = other DNA
ctatcagtggtttacaagcctt

SEQ ID NO: 140151 - DNA, 22 bp, synthetic construct
  misc_feature 1..22: note = chemically synthesized
  source 1..22: mol_type = other DNA
tcagtggtttacaagccttgtt

SEQ ID NO: 140152 - DNA, 22 bp, synthetic construct
  misc_feature 1..22: note = chemically synthesized
  source 1..22: mol_type = other DNA
acaagccttgtttatatttttc

SEQ ID NO: 140153 - DNA, 22 bp, synthetic construct
  misc_feature 1..22: note = chemically synthesized
  source 1..22: mol_type = other DNA
caagccttgtttatatttttcc

SEQ ID NO: 140154 - DNA, 22 bp, synthetic construct
  misc_feature 1..22: note = chemically synthesized
  source 1..22: mol_type = other DNA
gtttatatttttcctattttaa

SEQ ID NO: 140155 - DNA, 22 bp, synthetic construct
  misc_feature 1..22: note = chemically synthesized
  source 1..22: mol_type = other DNA
tttatatttttcctattttaaa

SEQ ID NO: 140156 - DNA, 22 bp, synthetic construct
  misc_feature 1..22: note = chemically synthesized
  source 1..22: mol_type = other DNA
atatttttcctattttaaaaat

SEQ ID NO: 140157 - DNA, 22 bp, synthetic construct
  misc_feature 1..22: note = chemically synthesized
  source 1..22: mol_type = other DNA
tatttttcctattttaaaaata

SEQ ID NO: 140158 - DNA, 22 bp, synthetic construct
  misc_feature 1..22: note = chemically synthesized
  source 1..22: mol_type = other DNA
ttcctattttaaaaataaaaat

SEQ ID NO: 140159 - DNA, 22 bp, synthetic construct
  misc_feature 1..22: note = chemically synthesized
  source 1..22: mol_type = other DNA
tcctattttaaaaataaaaata

SEQ ID NO: 140160 - DNA, 22 bp, synthetic construct
  misc_feature 1..22: note = chemically synthesized
  source 1..22: mol_type = other DNA
cctattttaaaaataaaaataa

SEQ ID NO: 140161 - DNA, 22 bp, synthetic construct
  misc_feature 1..22: note = chemically synthesized
  source 1..22: mol_type = other DNA
ctattttaaaaataaaaataaa

SEQ ID NO: 140162 - DNA, 22 bp, synthetic construct
  misc_feature 1..22: note = chemically synthesized
  source 1..22: mol_type = other DNA
ttttaaaaataaaaataaagta

SEQ ID NO: 140163 - DNA, 22 bp, synthetic construct
  misc_feature 1..22: note = chemically synthesized
  source 1..22: mol_type = other DNA
taaaaataaaaataaagtaagt

SEQ ID NO: 140164 - DNA, 22 bp, synthetic construct
  misc_feature 1..22: note = chemically synthesized
  source 1..22: mol_type = other DNA
aaaaataaaaataaagtaagtt

SEQ ID NO: 140165 - DNA, 22 bp, synthetic construct
  misc_feature 1..22: note = chemically synthesized
  source 1..22: mol_type = other DNA
aaaataaaaataaagtaagtta

SEQ ID NO: 140166 - DNA, 22 bp, synthetic construct
  misc_feature 1..22: note = chemically synthesized
  source 1..22: mol_type = other DNA
tttgtggtaaagaatattcatt

SEQ ID NO: 140167 - DNA, 22 bp, synthetic construct
  misc_feature 1..22: note = chemically synthesized
  source 1..22: mol_type = other DNA
gtggtaaagaatattcattaaa

SEQ ID NO: 140168 - DNA, 22 bp, synthetic construct
  misc_feature 1..22: note = chemically synthesized
  source 1..22: mol_type = other DNA
tggtaaagaatattcattaaag

SEQ ID NO: 140169 - DNA, 22 bp, synthetic construct
  misc_feature 1..22: note = chemically synthesized
  source 1..22: mol_type = other DNA
attaaagtatttatttcttaga

SEQ ID NO: 140170 - DNA, 22 bp, synthetic construct
  misc_feature 1..22: note = chemically synthesized
  source 1..22: mol_type = other DNA
aagtatttatttcttagataat

SEQ ID NO: 140171 - DNA, 22 bp, synthetic construct
  misc_feature 1..22: note = chemically synthesized
  source 1..22: mol_type = other DNA
atttcttagataataccatgaa

SEQ ID NO: 140172 - DNA, 22 bp, synthetic construct
  misc_feature 1..22: note = chemically synthesized
  source 1..22: mol_type = other DNA
tttcttagataataccatgaaa

SEQ ID NO: 140173 - DNA, 22 bp, synthetic construct
  misc_feature 1..22: note = chemically synthesized
  source 1..22: mol_type = other DNA
cttagataataccatgaaaaac

SEQ ID NO: 140174 - DNA, 22 bp, synthetic construct
  misc_feature 1..22: note = chemically synthesized
  source 1..22: mol_type = other DNA
ttagataataccatgaaaaaca

SEQ ID NO: 140175 - DNA, 22 bp, synthetic construct
  misc_feature 1..22: note = chemically synthesized
  source 1..22: mol_type = other DNA
agataataccatgaaaaacatt

SEQ ID NO: 140176 - DNA, 22 bp, synthetic construct
  misc_feature 1..22: note = chemically synthesized
  source 1..22: mol_type = other DNA
gataataccatgaaaaacattc

SEQ ID NO: 140177 - DNA, 22 bp, synthetic construct
  misc_feature 1..22: note = chemically synthesized
  source 1..22: mol_type = other DNA
agtgaagtgaagggcctacttt

SEQ ID NO: 140178 - DNA, 22 bp, synthetic construct
  misc_feature 1..22: note = chemically synthesized
  source 1..22: mol_type = other DNA
ctttacttaacaagaatctaat

SEQ ID NO: 140179 - DNA, 22 bp, synthetic construct
  misc_feature 1..22: note = chemically synthesized
  source 1..22: mol_type = other DNA
tacttaacaagaatctaattta

SEQ ID NO: 140180 - DNA, 22 bp, synthetic construct
  misc_feature 1..22: note = chemically synthesized
  source 1..22: mol_type = other DNA
acttaacaagaatctaatttat

SEQ ID NO: 140181 - DNA, 22 bp, synthetic construct
  misc_feature 1..22: note = chemically synthesized
  source 1..22: mol_type = other DNA
cttaacaagaatctaatttata

SEQ ID NO: 140182 - DNA, 22 bp, synthetic construct
  misc_feature 1..22: note = chemically synthesized
  source 1..22: mol_type = other DNA
aacaagaatctaatttatataa

SEQ ID NO: 140183 - DNA, 22 bp, synthetic construct
  misc_feature 1..22: note = chemically synthesized
  source 1..22: mol_type = other DNA
acaagaatctaatttatataat

SEQ ID NO: 140184 - DNA, 22 bp, synthetic construct
  misc_feature 1..22: note = chemically synthesized
  source 1..22: mol_type = other DNA
atttatataatttttcatacta

SEQ ID NO: 140185 - DNA, 22 bp, synthetic construct
  misc_feature 1..22: note = chemically synthesized
  source 1..22: mol_type = other DNA
atataatttttcatactaatag

SEQ ID NO: 140186 - DNA, 22 bp, synthetic construct
  misc_feature 1..22: note = chemically synthesized
  source 1..22: mol_type = other DNA
tataatttttcatactaatagc

SEQ ID NO: 140187 - DNA, 22 bp, synthetic construct
  misc_feature 1..22: note = chemically synthesized
  source 1..22: mol_type = other DNA
ttcatactaatagcatctaaga

SEQ ID NO: 140188 - DNA, 22 bp, synthetic construct
  misc_feature 1..22: note = chemically synthesized
  source 1..22: mol_type = other DNA
tcatactaatagcatctaagaa

SEQ ID NO: 140189 - DNA, 22 bp, synthetic construct
  misc_feature 1..22: note = chemically synthesized
  source 1..22: mol_type = other DNA
catactaatagcatctaagaac

SEQ ID NO: 140190 - DNA, 22 bp, synthetic construct
  misc_feature 1..22: note = chemically synthesized
  source 1..22: mol_type = other DNA
atactaatagcatctaagaaca

SEQ ID NO: 140191 - DNA, 22 bp, synthetic construct
  misc_feature 1..22: note = chemically synthesized
  source 1..22: mol_type = other DNA
atagcatctaagaacagtacaa

SEQ ID NO: 140192 - DNA, 22 bp, synthetic construct
  misc_feature 1..22: note = chemically synthesized
  source 1..22: mol_type = other DNA
agaacagtacaatatttgactc

SEQ ID NO: 140193 - DNA, 22 bp, synthetic construct
  misc_feature 1..22: note = chemically synthesized
  source 1..22: mol_type = other DNA
gactcttcaggttaaacatatg

SEQ ID NO: 140194 - DNA, 22 bp, synthetic construct
  misc_feature 1..22: note = chemically synthesized
  source 1..22: mol_type = other DNA
actcttcaggttaaacatatgt

SEQ ID NO: 140195 - DNA, 22 bp, synthetic construct
  misc_feature 1..22: note = chemically synthesized
  source 1..22: mol_type = other DNA
ttcaggttaaacatatgtcata

SEQ ID NO: 140196 - DNA, 22 bp, synthetic construct
  misc_feature 1..22: note = chemically synthesized
  source 1..22: mol_type = other DNA
caggttaaacatatgtcataaa

SEQ ID NO: 140197 - DNA, 22 bp, synthetic construct
  misc_feature 1..22: note = chemically synthesized
  source 1..22: mol_type = other DNA
aggttaaacatatgtcataaat

SEQ ID NO: 140198 - DNA, 22 bp, synthetic construct
  misc_feature 1..22: note = chemically synthesized
  source 1..22: mol_type = other DNA
aacatatgtcataaattagcca

SEQ ID NO: 140199 - DNA, 22 bp, synthetic construct
  misc_feature 1..22: note = chemically synthesized
  source 1..22: mol_type = other DNA
gccagaaagatttaagaaaata

SEQ ID NO: 140200 - DNA, 22 bp, synthetic construct
  misc_feature 1..22: note = chemically synthesized
  source 1..22: mol_type = other DNA
aagaaaatattggatgtttcct

SEQ ID NO: 140201 - DNA, 22 bp, synthetic construct
  misc_feature 1..22: note = chemically synthesized
  source 1..22: mol_type = other DNA
agaaaatattggatgtttcctt

SEQ ID NO: 140202 - DNA, 22 bp, synthetic construct
  misc_feature 1..22: note = chemically synthesized
  source 1..22: mol_type = other DNA
gatgtttccttgtttaaattag

SEQ ID NO: 140203 - DNA, 22 bp, synthetic construct
  misc_feature 1..22: note = chemically synthesized
  source 1..22: mol_type = other DNA
ccttgtttaaattaggcatctt

SEQ ID NO: 140204 - DNA, 22 bp, synthetic construct
  misc_feature 1..22: note = chemically synthesized
  source 1..22: mol_type = other DNA
cttgtttaaattaggcatctta

SEQ ID NO: 140205 - DNA, 22 bp, synthetic construct
  misc_feature 1..22: note = chemically synthesized
  source 1..22: mol_type = other DNA
gtttaaattaggcatcttacag

SEQ ID NO: 140206 - DNA, 22 bp, synthetic construct
  misc_feature 1..22: note = chemically synthesized
  source 1..22: mol_type = other DNA
tttaaattaggcatcttacagt

SEQ ID NO: 140207 - DNA, 22 bp, synthetic construct
  misc_feature 1..22: note = chemically synthesized
  source 1..22: mol_type = other DNA
aaattaggcatcttacagtttt

SEQ ID NO: 140208 - DNA, 22 bp, synthetic construct
  misc_feature 1..22: note = chemically synthesized
  source 1..22: mol_type = other DNA
aattaggcatcttacagttttt

SEQ ID NO: 140209 - DNA, 22 bp, synthetic construct
  misc_feature 1..22: note = chemically synthesized
  source 1..22: mol_type = other DNA
ggcatcttacagtttttagaat

SEQ ID NO: 140210 - DNA, 22 bp, synthetic construct
  misc_feature 1..22: note = chemically synthesized
  source 1..22: mol_type = other DNA
acagtttttagaatcctgcata

SEQ ID NO: 140211 - DNA, 22 bp, synthetic construct
  misc_feature 1..22: note = chemically synthesized
  source 1..22: mol_type = other DNA
cagtttttagaatcctgcatag

SEQ ID NO: 140212 - DNA, 22 bp, synthetic construct
  misc_feature 1..22: note = chemically synthesized
  source 1..22: mol_type = other DNA
ttagaatcctgcatagaactta

SEQ ID NO: 140213 - DNA, 22 bp, synthetic construct
  misc_feature 1..22: note = chemically synthesized
  source 1..22: mol_type = other DNA
tagaatcctgcatagaacttaa

SEQ ID NO: 140214 - DNA, 22 bp, synthetic construct
  misc_feature 1..22: note = chemically synthesized
  source 1..22: mol_type = other DNA
agaatcctgcatagaacttaag

SEQ ID NO: 140215 - DNA, 22 bp, synthetic construct
  misc_feature 1..22: note = chemically synthesized
  source 1..22: mol_type = other DNA
gaatcctgcatagaacttaaga

SEQ ID NO: 140216 - DNA, 22 bp, synthetic construct
  misc_feature 1..22: note = chemically synthesized
  source 1..22: mol_type = other DNA
catagaacttaagaaattacaa

SEQ ID NO: 140217 - DNA, 22 bp, synthetic construct
  misc_feature 1..22: note = chemically synthesized
  source 1..22: mol_type = other DNA
aagaaattacaaatgctaaagc

SEQ ID NO: 140218 - DNA, 22 bp, synthetic construct
  misc_feature 1..22: note = chemically synthesized
  source 1..22: mol_type = other DNA
agaaattacaaatgctaaagca

SEQ ID NO: 140219 - DNA, 22 bp, synthetic construct
  misc_feature 1..22: note = chemically synthesized
  source 1..22: mol_type = other DNA
caaatgctaaagcaaacccaaa

SEQ ID NO: 140220 - DNA, 22 bp, synthetic construct
  misc_feature 1..22: note = chemically synthesized
  source 1..22: mol_type = other DNA
aagcaaacccaaacaggcagga

SEQ ID NO: 140221 - DNA, 22 bp, synthetic construct
  misc_feature 1..22: note = chemically synthesized
  source 1..22: mol_type = other DNA
atcttcatcgaatttgggtgtt

SEQ ID NO: 140222 - DNA, 22 bp, synthetic construct
  misc_feature 1..22: note = chemically synthesized
  source 1..22: mol_type = other DNA
catcgaatttgggtgtttcttt

SEQ ID NO: 140223 - DNA, 22 bp, synthetic construct
  misc_feature 1..22: note = chemically synthesized
  source 1..22: mol_type = other DNA
atcgaatttgggtgtttctttc

SEQ ID NO: 140224 - DNA, 22 bp, synthetic construct
  misc_feature 1..22: note = chemically synthesized
  source 1..22: mol_type = other DNA
gggtgtttctttctaaaagtcc

SEQ ID NO: 140225 - DNA, 22 bp, synthetic construct
  misc_feature 1..22: note = chemically synthesized
  source 1..22: mol_type = other DNA
ggtgtttctttctaaaagtcct

SEQ ID NO: 140226 - DNA, 22 bp, synthetic construct
  misc_feature 1..22: note = chemically synthesized
  source 1..22: mol_type = other DNA
ctttctaaaagtcctttatact

SEQ ID NO: 140227 - DNA, 22 bp, synthetic construct
  misc_feature 1..22: note = chemically synthesized
  source 1..22: mol_type = other DNA
tttctaaaagtcctttatactt

SEQ ID NO: 140228 - DNA, 22 bp, synthetic construct
  misc_feature 1..22: note = chemically synthesized
  source 1..22: mol_type = other DNA
tctaaaagtcctttatacttaa

SEQ ID NO: 140229 - DNA, 22 bp, synthetic construct
  misc_feature 1..22: note = chemically synthesized
  source 1..22: mol_type = other DNA
ctaaaagtcctttatacttaaa

SEQ ID NO: 140230 - DNA, 22 bp, synthetic construct
  misc_feature 1..22: note = chemically synthesized
  source 1..22: mol_type = other DNA
taaaagtcctttatacttaaat

SEQ ID NO: 140231 - DNA, 22 bp, synthetic construct
  misc_feature 1..22: note = chemically synthesized
  source 1..22: mol_type = other DNA
aaagtcctttatacttaaatgt

SEQ ID NO: 140232 - DNA, 22 bp, synthetic construct
  misc_feature 1..22: note = chemically synthesized
  source 1..22: mol_type = other DNA
tatacttaaatgtcttaagaca

SEQ ID NO: 140233 - DNA, 22 bp, synthetic construct
  misc_feature 1..22: note = chemically synthesized
  source 1..22: mol_type = other DNA
atacttaaatgtcttaagacat

SEQ ID NO: 140234 - DNA, 22 bp, synthetic construct
  misc_feature 1..22: note = chemically synthesized
  source 1..22: mol_type = other DNA
tacttaaatgtcttaagacata

SEQ ID NO: 140235 - DNA, 22 bp, synthetic construct
  misc_feature 1..22: note = chemically synthesized
  source 1..22: mol_type = other DNA
aaatgtcttaagacatacatag

SEQ ID NO: 140236 - DNA, 22 bp, synthetic construct
  misc_feature 1..22: note = chemically synthesized
  source 1..22: mol_type = other DNA
aatgtcttaagacatacataga

SEQ ID NO: 140237 - DNA, 22 bp, synthetic construct
  misc_feature 1..22: note = chemically synthesized
  source 1..22: mol_type = other DNA
aagacatacatagattttattt

SEQ ID NO: 140238 - DNA, 22 bp, synthetic construct
  misc_feature 1..22: note = chemically synthesized
  source 1..22: mol_type = other DNA
agacatacatagattttatttt

SEQ ID NO: 140239 - DNA, 22 bp, synthetic construct
  misc_feature 1..22: note = chemically synthesized
  source 1..22: mol_type = other DNA
tattttactaattttaattata

SEQ ID NO: 140240 - DNA, 22 bp, synthetic construct
  misc_feature 1..22: note = chemically synthesized
  source 1..22: mol_type = other DNA
attttactaattttaattatat

SEQ ID NO: 140241 - DNA, 22 bp, synthetic construct
  misc_feature 1..22: note = chemically synthesized
  source 1..22: mol_type = other DNA
ttttactaattttaattatata

SEQ ID NO: 140242 - DNA, 22 bp, synthetic construct
  misc_feature 1..22: note = chemically synthesized
  source 1..22: mol_type = other DNA
tactaattttaattatatagac

SEQ ID NO: 140243 - DNA, 22 bp, synthetic construct
  misc_feature 1..22: note = chemically synthesized
  source 1..22: mol_type = other DNA
actaattttaattatatagaca

SEQ ID NO: 140244 - DNA, 22 bp, synthetic construct
  misc_feature 1..22: note = chemically synthesized
  source 1..22: mol_type = other DNA
ctaattttaattatatagacaa

SEQ ID NO: 140245 - DNA, 22 bp, synthetic construct
  misc_feature 1..22: note = chemically synthesized
  source 1..22: mol_type = other DNA
attttaattatatagacaataa

SEQ ID NO: 140246 - DNA, 22 bp, synthetic construct
  misc_feature 1..22: note = chemically synthesized
  source 1..22: mol_type = other DNA
taattatatagacaataaatga

SEQ ID NO: 140247 - DNA, 22 bp, synthetic construct
  misc_feature 1..22: note = chemically synthesized
  source 1..22: mol_type = other DNA
aattatatagacaataaatgaa

SEQ ID NO: 140248 - DNA, 22 bp, synthetic construct
  misc_feature 1..22: note = chemically synthesized
  source 1..22: mol_type = other DNA
attatatagacaataaatgaat

SEQ ID NO: 140249 - DNA, 22 bp, synthetic construct
  misc_feature 1..22: note = chemically synthesized
  source 1..22: mol_type = other DNA
tatagacaataaatgaatattc

SEQ ID NO: 140250 - DNA, 22 bp, synthetic construct
  misc_feature 1..22: note = chemically synthesized
  source 1..22: mol_type = other DNA
ttactgattactttttctgact

SEQ ID NO: 140251 - DNA, 22 bp, synthetic construct
  misc_feature 1..22: note = chemically synthesized
  source 1..22: mol_type = other DNA
actgattactttttctgactgt

SEQ ID NO: 140252 - DNA, 22 bp, synthetic construct
  misc_feature 1..22: note = chemically synthesized
  source 1..22: mol_type = other DNA
ctgattactttttctgactgtc

SEQ ID NO: 140253 - DNA, 22 bp, synthetic construct
  misc_feature 1..22: note = chemically synthesized
  source 1..22: mol_type = other DNA
attactttttctgactgtctaa

SEQ ID NO: 140254 - DNA, 22 bp, synthetic construct
  misc_feature 1..22: note = chemically synthesized
  source 1..22: mol_type = other DNA
ctttttctgactgtctaatctt

SEQ ID NO: 140255 - DNA, 22 bp, synthetic construct
  misc_feature 1..22: note = chemically synthesized
  source 1..22: mol_type = other DNA
tttctgactgtctaatctttct

SEQ ID NO: 140256 - DNA, 22 bp, synthetic construct
  misc_feature 1..22: note = chemically synthesized
  source 1..22: mol_type = other DNA
ttctgactgtctaatctttctg

SEQ ID NO: 140257 - DNA, 22 bp, synthetic construct
  misc_feature 1..22: note = chemically synthesized
  source 1..22: mol_type = other DNA
tctgactgtctaatctttctga

SEQ ID NO: 140258 - DNA, 22 bp, synthetic construct
  misc_feature 1..22: note = chemically synthesized
  source 1..22: mol_type = other DNA
ctgactgtctaatctttctgat

SEQ ID NO: 140259 - DNA, 22 bp, synthetic construct
  misc_feature 1..22: note = chemically synthesized
  source 1..22: mol_type = other DNA
tgactgtctaatctttctgatc

SEQ ID NO: 140260 - DNA, 22 bp, synthetic construct
  misc_feature 1..22: note = chemically synthesized
  source 1..22: mol_type = other DNA
actgtctaatctttctgatcta

SEQ ID NO: 140261 - DNA, 22 bp, synthetic construct
  misc_feature 1..22: note = chemically synthesized
  source 1..22: mol_type = other DNA
tctaatctttctgatctatcct

SEQ ID NO: 140262 - DNA, 22 bp, synthetic construct
  misc_feature 1..22: note = chemically synthesized
  source 1..22: mol_type = other DNA
atctttctgatctatcctggat

SEQ ID NO: 140263 - DNA, 22 bp, synthetic construct
  misc_feature 1..22: note = chemically synthesized
  source 1..22: mol_type = other DNA
tctgatctatcctggatggcca

SEQ ID NO: 140264 - DNA, 22 bp, synthetic construct
  misc_feature 1..22: note = chemically synthesized
  source 1..22: mol_type = other DNA
ctgatctatcctggatggccat

SEQ ID NO: 140265 - DNA, 22 bp, synthetic construct
  misc_feature 1..22: note = chemically synthesized
  source 1..22: mol_type = other DNA
tgatctatcctggatggccata

SEQ ID NO: 140266 - DNA, 22 bp, synthetic construct
  misc_feature 1..22: note = chemically synthesized
  source 1..22: mol_type = other DNA
atctatcctggatggccataac

SEQ ID NO: 140267 - DNA, 22 bp, synthetic construct
  misc_feature 1..22: note = chemically synthesized
  source 1..22: mol_type = other DNA
tcctggatggccataacactta

SEQ ID NO: 140268 - DNA, 22 bp, synthetic construct
  misc_feature 1..22: note = chemically synthesized
  source 1..22: mol_type = other DNA
gatggccataacacttatctct

SEQ ID NO: 140269 - DNA, 22 bp, synthetic construct
  misc_feature 1..22: note = chemically synthesized
  source 1..22: mol_type = other DNA
atctctctgaactttgggcttt

SEQ ID NO: 140270 - DNA, 22 bp, synthetic construct
  misc_feature 1..22: note = chemically synthesized
  source 1..22: mol_type = other DNA
tctctctgaactttgggctttt

SEQ ID NO: 140271 - DNA, 22 bp, synthetic construct
  misc_feature 1..22: note = chemically synthesized
  source 1..22: mol_type = other DNA
tctgaactttgggcttttaata

SEQ ID NO: 140272 - DNA, 22 bp, synthetic construct
  misc_feature 1..22: note = chemically synthesized
  source 1..22: mol_type = other DNA
tgaactttgggcttttaatata

SEQ ID NO: 140273 - DNA, 22 bp, synthetic construct
  misc_feature 1..22: note = chemically synthesized
  source 1..22: mol_type = other DNA
aactttgggcttttaatatagg

SEQ ID NO: 140274 - DNA, 22 bp, synthetic construct
  misc_feature 1..22: note = chemically synthesized
  source 1..22: mol_type = other DNA
tgggcttttaatataggaaaga

SEQ ID NO: 140275 - DNA, 22 bp, synthetic construct
  misc_feature 1..22: note = chemically synthesized
  source 1..22: mol_type = other DNA
gggcttttaatataggaaagaa

SEQ ID NO: 140276 - DNA, 22 bp, synthetic construct
  misc_feature 1..22: note = chemically synthesized
  source 1..22: mol_type = other DNA
ggcttttaatataggaaagaaa

SEQ ID NO: 140277 - DNA, 22 bp, synthetic construct
  misc_feature 1..22: note = chemically synthesized
  source 1..22: mol_type = other DNA
ttaatataggaaagaaaagcaa

SEQ ID NO: 140278 - DNA, 22 bp, synthetic construct
  misc_feature 1..22: note = chemically synthesized
  source 1..22: mol_type = other DNA
taatataggaaagaaaagcaat

SEQ ID NO: 140279 - DNA, 22 bp, synthetic construct
  misc_feature 1..22: note = chemically synthesized
  source 1..22: mol_type = other DNA
aatataggaaagaaaagcaata

SEQ ID NO: 140280 - DNA, 22 bp, synthetic construct
  misc_feature 1..22: note = chemically synthesized
  source 1..22: mol_type = other DNA
atataggaaagaaaagcaataa

SEQ ID NO: 140281 - DNA, 22 bp, synthetic construct
  misc_feature 1..22: note = chemically synthesized
  source 1..22: mol_type = other DNA
ttcatggtatctcatatgataa

SEQ ID NO: 140282 - DNA, 22 bp, synthetic construct
  misc_feature 1..22: note = chemically synthesized
  source 1..22: mol_type = other DNA
tcatggtatctcatatgataaa

SEQ ID NO: 140283 - DNA, 22 bp, synthetic construct
  misc_feature 1..22: note = chemically synthesized
  source 1..22: mol_type = other DNA
catggtatctcatatgataaac

SEQ ID NO: 140284 - DNA, 22 bp, synthetic construct
  misc_feature 1..22: note = chemically synthesized
  source 1..22: mol_type = other DNA
atggtatctcatatgataaaca

SEQ ID NO: 140285 - DNA, 22 bp, synthetic construct
  misc_feature 1..22: note = chemically synthesized
  source 1..22: mol_type = other DNA
atatgataaacaaataaaatgc

SEQ ID NO: 140286 - DNA, 22 bp, synthetic construct
  misc_feature 1..22: note = chemically synthesized
  source 1..22: mol_type = other DNA
aaaaatgagcaggtgaagcaat

SEQ ID NO: 140287 - DNA, 22 bp, synthetic construct
  misc_feature 1..22: note = chemically synthesized
  source 1..22: mol_type = other DNA
aaaatgagcaggtgaagcaatt

SEQ ID NO: 140288 - DNA, 22 bp, synthetic construct
  misc_feature 1..22: note = chemically synthesized
  source 1..22: mol_type = other DNA
atcttgaaccaacaagcatcga

SEQ ID NO: 140289 - DNA, 22 bp, synthetic construct
  misc_feature 1..22: note = chemically synthesized
  source 1..22: mol_type = other DNA
tcttgaaccaacaagcatcgaa

SEQ ID NO: 140290 - DNA, 22 bp, synthetic construct
  misc_feature 1..22: note = chemically synthesized
  source 1..22: mol_type = other DNA
gaaccaacaagcatcgaagcaa

SEQ ID NO: 140291 - DNA, 22 bp, synthetic construct
  misc_feature 1..22: note = chemically synthesized
  source 1..22: mol_type = other DNA
aaccaacaagcatcgaagcaat

SEQ ID NO: 140292 - DNA, 22 bp, synthetic construct
  misc_feature 1..22: note = chemically synthesized
  source 1..22: mol_type = other DNA
cccgcagcctacctgacttctg

SEQ ID NO: 140293 - DNA, 22 bp, synthetic construct
  misc_feature 1..22: note = chemically synthesized
  source 1..22: mol_type = other DNA
cctgacttctgagtcaggattt

SEQ ID NO: 140294 - DNA, 22 bp, synthetic construct
  misc_feature 1..22: note = chemically synthesized
  source 1..22: mol_type = other DNA
acttctgagtcaggatttataa

SEQ ID NO: 140295 - DNA, 22 bp, synthetic construct
  misc_feature 1..22: note = chemically synthesized
  source 1..22: mol_type = other DNA
ctgagtcaggatttataagcct

SEQ ID NO: 140296 - DNA, 22 bp, synthetic construct
  misc_feature 1..22: note = chemically synthesized
  source 1..22: mol_type = other DNA
tgagtcaggatttataagcctt

SEQ ID NO: 140297 - DNA, 22 bp, synthetic construct
  misc_feature 1..22: note = chemically synthesized
  source 1..22: mol_type = other DNA
agtcaggatttataagccttgt

SEQ ID NO: 140298 - DNA, 22 bp, synthetic construct
  misc_feature 1..22: note = chemically synthesized
  source 1..22: mol_type = other DNA
ataagccttgttactgagacac

SEQ ID NO: 140299 - DNA, 22 bp, synthetic construct
  misc_feature 1..22: note = chemically synthesized
  source 1..22: mol_type = other DNA
taagccttgttactgagacaca

SEQ ID NO: 140300 - DNA, 22 bp, synthetic construct
  misc_feature 1..22: note = chemically synthesized
  source 1..22: mol_type = other DNA
gttactgagacacaaacctggg

SEQ ID NO: 140301 - DNA, 22 bp, synthetic construct
  misc_feature 1..22: note = chemically synthesized
  source 1..22: mol_type = other DNA
ttactgagacacaaacctgggc

SEQ ID NO: 140302 - DNA, 22 bp, synthetic construct
  misc_feature 1..22: note = chemically synthesized
  source 1..22: mol_type = other DNA
ctgagacacaaacctgggcctt

SEQ ID NO: 140303 - DNA, 22 bp, synthetic construct
  misc_feature 1..22: note = chemically synthesized
  source 1..22: mol_type = other DNA
agacacaaacctgggcctttca

SEQ ID NO: 140304 - DNA, 22 bp, synthetic construct
  misc_feature 1..22: note = chemically synthesized
  source 1..22: mol_type = other DNA
ggcctttcaatgctataacctt

SEQ ID NO: 140305 - DNA, 22 bp, synthetic construct
  misc_feature 1..22: note = chemically synthesized
  source 1..22: mol_type = other DNA
tcaatgctataacctttcttga

SEQ ID NO: 140306 - DNA, 22 bp, synthetic construct
  misc_feature 1..22: note = chemically synthesized
  source 1..22: mol_type = other DNA
caatgctataacctttcttgaa

SEQ ID NO: 140307 - DNA, 22 bp, synthetic construct
  misc_feature 1..22: note = chemically synthesized
  source 1..22: mol_type = other DNA
aatgctataacctttcttgaag

SEQ ID NO: 140308 - DNA, 22 bp, synthetic construct
  misc_feature 1..22: note = chemically synthesized
  source 1..22: mol_type = other DNA
taacctttcttgaagctcctcc

SEQ ID NO: 140309 - DNA, 22 bp, synthetic construct
  misc_feature 1..22: note = chemically synthesized
  source 1..22: mol_type = other DNA
tcttgaagctcctccctaccac

SEQ ID NO: 140310 - DNA, 22 bp, synthetic construct
  misc_feature 1..22: note = chemically synthesized
  source 1..22: mol_type = other DNA
cttgaagctcctccctaccacc

SEQ ID NO: 140311 - DNA, 22 bp, synthetic construct
  misc_feature 1..22: note = chemically synthesized
  source 1..22: mol_type = other DNA
ttgaagctcctccctaccacct

SEQ ID NO: 140312 - DNA, 22 bp, synthetic construct
  misc_feature 1..22: note = chemically synthesized
  source 1..22: mol_type = other DNA
gaagctcctccctaccaccttt

SEQ ID NO: 140313 - DNA, 22 bp, synthetic construct
  misc_feature 1..22: note = chemically synthesized
  source 1..22: mol_type = other DNA
aagctcctccctaccaccttta

SEQ ID NO: 140314 - DNA, 22 bp, synthetic construct
  misc_feature 1..22: note = chemically synthesized
  source 1..22: mol_type = other DNA
ctccctaccacctttagccata

SEQ ID NO: 140315 - DNA, 22 bp, synthetic construct
  misc_feature 1..22: note = chemically synthesized
  source 1..22: mol_type = other DNA
cctaccacctttagccataagg

SEQ ID NO: 140316 - DNA, 22 bp, synthetic construct
  misc_feature 1..22: note = chemically synthesized
  source 1..22: mol_type = other DNA
ccacctttagccataaggaaac

SEQ ID NO: 140317 - DNA, 22 bp, synthetic construct
  misc_feature 1..22: note = chemically synthesized
  source 1..22: mol_type = other DNA
tagccataaggaaacatggaat

SEQ ID NO: 140318 - DNA, 22 bp, synthetic construct
  misc_feature 1..22: note = chemically synthesized
  source 1..22: mol_type = other DNA
agccataaggaaacatggaatg

SEQ ID NO: 140319 - DNA, 22 bp, synthetic construct
  misc_feature 1..22: note = chemically synthesized
  source 1..22: mol_type = other DNA
gccataaggaaacatggaatgg

SEQ ID NO: 140320 - DNA, 22 bp, synthetic construct
  misc_feature 1..22: note = chemically synthesized
  source 1..22: mol_type = other DNA
gatgcaagccaggtctggaacc

SEQ ID NO: 140321 - DNA, 22 bp, synthetic construct
  misc_feature 1..22: note = chemically synthesized
  source 1..22: mol_type = other DNA
gaaccataggcagtaaggagag

SEQ ID NO: 140322 - DNA, 22 bp, synthetic construct
  misc_feature 1..22: note = chemically synthesized
  source 1..22: mol_type = other DNA
tgcaactggctccgagggagca

SEQ ID NO: 140323 - DNA, 22 bp, synthetic construct
  misc_feature 1..22: note = chemically synthesized
  source 1..22: mol_type = other DNA
caactggctccgagggagcagg

SEQ ID NO: 140324 - DNA, 22 bp, synthetic construct
  misc_feature 1..22: note = chemically synthesized
  source 1..22: mol_type = other DNA
gctccgagggagcaggagagga

SEQ ID NO: 140325 - DNA, 22 bp, synthetic construct
  misc_feature 1..22: note = chemically synthesized
  source 1..22: mol_type = other DNA
cgagggagcaggagaggatcaa

SEQ ID NO: 140326 - DNA, 22 bp, synthetic construct
  misc_feature 1..22: note = chemically synthesized
  source 1..22: mol_type = other DNA
tgaatctaagagaagactggtg

SEQ ID NO: 140327 - DNA, 22 bp, synthetic construct
  misc_feature 1..22: note = chemically synthesized
  source 1..22: mol_type = other DNA
aatctaagagaagactggtgtc

SEQ ID NO: 140328 - DNA, 22 bp, synthetic construct
  misc_feature 1..22: note = chemically synthesized
  source 1..22: mol_type = other DNA
agagaagactggtgtccatact

SEQ ID NO: 140329 - DNA, 22 bp, synthetic construct
  misc_feature 1..22: note = chemically synthesized
  source 1..22: mol_type = other DNA
gtgtccatactctgaatgggaa

SEQ ID NO: 140330 - DNA, 22 bp, synthetic construct
  misc_feature 1..22: note = chemically synthesized
  source 1..22: mol_type = other DNA
tgaatgggaagaatgatgggat

SEQ ID NO: 140331 - DNA, 22 bp, synthetic construct
  misc_feature 1..22: note = chemically synthesized
  source 1..22: mol_type = other DNA
aatgggaagaatgatgggatta

SEQ ID NO: 140332 - DNA, 22 bp, synthetic construct
  misc_feature 1..22: note = chemically synthesized
  source 1..22: mol_type = other DNA
cccatagggcttgttttaggga

SEQ ID NO: 140333 - DNA, 22 bp, synthetic construct
  misc_feature 1..22: note = chemically synthesized
  source 1..22: mol_type = other DNA
gttttagggagaaacctgttct

SEQ ID NO: 140334 - DNA, 22 bp, synthetic construct
  misc_feature 1..22: note = chemically synthesized
  source 1..22: mol_type = other DNA
ttttagggagaaacctgttctc

SEQ ID NO: 140335 - DNA, 22 bp, synthetic construct
  misc_feature 1..22: note = chemically synthesized
  source 1..22: mol_type = other DNA
tagggagaaacctgttctccaa

SEQ ID NO: 140336 - DNA, 22 bp, synthetic construct
  misc_feature 1..22: note = chemically synthesized
  source 1..22: mol_type = other DNA
agggagaaacctgttctccaaa

SEQ ID NO: 140337 - DNA, 22 bp, synthetic construct
  misc_feature 1..22: note = chemically synthesized
  source 1..22: mol_type = other DNA
gggagaaacctgttctccaaac

SEQ ID NO: 140338 - DNA, 22 bp, synthetic construct
  misc_feature 1..22: note = chemically synthesized
  source 1..22: mol_type = other DNA
ttctccaaactcttggccttga

SEQ ID NO: 140339 - DNA, 22 bp, synthetic construct
  misc_feature 1..22: note = chemically synthesized
  source 1..22: mol_type = other DNA
tccaaactcttggccttgagat

SEQ ID NO: 140340 - DNA, 22 bp, synthetic construct
  misc_feature 1..22: note = chemically synthesized
  source 1..22: mol_type = other DNA
caaactcttggccttgagatac

SEQ ID NO: 140341 - DNA, 22 bp, synthetic construct
  misc_feature 1..22: note = chemically synthesized
  source 1..22: mol_type = other DNA
ttggccttgagatacctggtcc

SEQ ID NO: 140342 - DNA, 22 bp, synthetic construct
  misc_feature 1..22: note = chemically synthesized
  source 1..22: mol_type = other DNA
ggccttgagatacctggtcctt

SEQ ID NO: 140343 - DNA, 22 bp, synthetic construct
  misc_feature 1..22: note = chemically synthesized
  source 1..22: mol_type = other DNA
gccttgagatacctggtcctta

SEQ ID NO: 140344 - DNA, 22 bp, synthetic construct
  misc_feature 1..22: note = chemically synthesized
  source 1..22: mol_type = other DNA
gagatacctggtccttattcct

SEQ ID NO: 140345 - DNA, 22 bp, synthetic construct
  misc_feature 1..22: note = chemically synthesized
  source 1..22: mol_type = other DNA
agatacctggtccttattcctt

SEQ ID NO: 140346 - DNA, 22 bp, synthetic construct
  misc_feature 1..22: note = chemically synthesized
  source 1..22: mol_type = other DNA
gtccttattccttggactttgg

SEQ ID NO: 140347 - DNA, 22 bp, synthetic construct
  misc_feature 1..22: note = chemically synthesized
  source 1..22: mol_type = other DNA
attccttggactttggcaatgt

SEQ ID NO: 140348 - DNA, 22 bp, synthetic construct
  misc_feature 1..22: note = chemically synthesized
  source 1..22: mol_type = other DNA
ttccttggactttggcaatgtc

SEQ ID NO: 140349 - DNA, 22 bp, synthetic construct
  misc_feature 1..22: note = chemically synthesized
  source 1..22: mol_type = other DNA
cttggactttggcaatgtctga

SEQ ID NO: 140350 - DNA, 22 bp, synthetic construct
  misc_feature 1..22: note = chemically synthesized
  source 1..22: mol_type = other DNA
ggactttggcaatgtctgaccc

SEQ ID NO: 140351 - DNA, 22 bp, synthetic construct
  misc_feature 1..22: note = chemically synthesized
  source 1..22: mol_type = other DNA
gactttggcaatgtctgaccct

SEQ ID NO: 140352 - DNA, 22 bp, synthetic construct
  misc_feature 1..22: note = chemically synthesized
  source 1..22: mol_type = other DNA
tggcaatgtctgaccctcacat

SEQ ID NO: 140353 - DNA, 22 bp, synthetic construct
  misc_feature 1..22: note = chemically synthesized
  source 1..22: mol_type = other DNA
ggcaatgtctgaccctcacatt

SEQ ID NO: 140354 - DNA, 22 bp, synthetic construct
  misc_feature 1..22: note = chemically synthesized
  source 1..22: mol_type = other DNA
gcaatgtctgaccctcacattc

SEQ ID NO: 140355 - DNA, 22 bp, synthetic construct
  misc_feature 1..22: note = chemically synthesized
  source 1..22: mol_type = other DNA
accctcacattcaagttctgag

SEQ ID NO: 140356 - DNA, 22 bp, synthetic construct
  misc_feature 1..22: note = chemically synthesized
  source 1..22: mol_type = other DNA
acattcaagttctgaggaaggg

SEQ ID NO: 140357 - DNA, 22 bp, synthetic construct
  misc_feature 1..22: note = chemically synthesized
  source 1..22: mol_type = other DNA
aagttctgaggaagggccactg

SEQ ID NO: 140358 - DNA, 22 bp, synthetic construct
  misc_feature 1..22: note = chemically synthesized
  source 1..22: mol_type = other DNA
tgaggaagggccactgccttca

SEQ ID NO: 140359 - DNA, 22 bp, synthetic construct
  misc_feature 1..22: note = chemically synthesized
  source 1..22: mol_type = other DNA
aggaagggccactgccttcata

SEQ ID NO: 140360 - DNA, 22 bp, synthetic construct
  misc_feature 1..22: note = chemically synthesized
  source 1..22: mol_type = other DNA
ccttcatactgtggatctgtag

SEQ ID NO: 140361 - DNA, 22 bp, synthetic construct
  misc_feature 1..22: note = chemically synthesized
  source 1..22: mol_type = other DNA
catactgtggatctgtagcaaa

SEQ ID NO: 140362 - DNA, 22 bp, synthetic construct
  misc_feature 1..22: note = chemically synthesized
  source 1..22: mol_type = other DNA
atactgtggatctgtagcaaat

SEQ ID NO: 140363 - DNA, 22 bp, synthetic construct
  misc_feature 1..22: note = chemically synthesized
  source 1..22: mol_type = other DNA
tggatctgtagcaaattccccc

SEQ ID NO: 140364 - DNA, 22 bp, synthetic construct
  misc_feature 1..22: note = chemically synthesized
  source 1..22: mol_type = other DNA
tagcaaattccccctgaaaacc

SEQ ID NO: 140365 - DNA, 22 bp, synthetic construct
  misc_feature 1..22: note = chemically synthesized
  source 1..22: mol_type = other DNA
cccctgaaaacccagagctgta

SEQ ID NO: 140366 - DNA, 22 bp, synthetic construct
  misc_feature 1..22: note = chemically synthesized
  source 1..22: mol_type = other DNA
aaaacccagagctgtatcttaa

SEQ ID NO: 140367 - DNA, 22 bp, synthetic construct
  misc_feature 1..22: note = chemically synthesized
  source 1..22: mol_type = other DNA
tatcttaattggttaaaaaaaa

SEQ ID NO: 140368 - DNA, 22 bp, synthetic construct
  misc_feature 1..22: note = chemically synthesized
  source 1..22: mol_type = other DNA
aattggttaaaaaaaattatat

SEQ ID NO: 140369 - DNA, 22 bp, synthetic construct
  misc_feature 1..22: note = chemically synthesized
  source 1..22: mol_type = other DNA
attggttaaaaaaaattatatt

SEQ ID NO: 140370 - DNA, 22 bp, synthetic construct
  misc_feature 1..22: note = chemically synthesized
  source 1..22: mol_type = other DNA
gttaaaaaaaattatattatct

SEQ ID NO: 140371 - DNA, 22 bp, synthetic construct
  misc_feature 1..22: note = chemically synthesized
  source 1..22: mol_type = other DNA
aaaaaaattatattatctcaac

SEQ ID NO: 140372 - DNA, 22 bp, synthetic construct
  misc_feature 1..22: note = chemically synthesized
  source 1..22: mol_type = other DNA
tattatctcaacgactgttctt

SEQ ID NO: 140373 - DNA, 22 bp, synthetic construct
  misc_feature 1..22: note = chemically synthesized
  source 1..22: mol_type = other DNA
tctcaacgactgttcttctctg

SEQ ID NO: 140374 - DNA, 22 bp, synthetic construct
  misc_feature 1..22: note = chemically synthesized
  source 1..22: mol_type = other DNA
aacgactgttcttctctgagta

SEQ ID NO: 140375 - DNA, 22 bp, synthetic construct
  misc_feature 1..22: note = chemically synthesized
  source 1..22: mol_type = other DNA
ttcttctctgagtagccaagct

SEQ ID NO: 140376 - DNA, 22 bp, synthetic construct
  misc_feature 1..22: note = chemically synthesized
  source 1..22: mol_type = other DNA
ttctctgagtagccaagctcag

SEQ ID NO: 140377 - DNA, 22 bp, synthetic construct
  misc_feature 1..22: note = chemically synthesized
  source 1..22: mol_type = other DNA
ctctgagtagccaagctcagct

SEQ ID NO: 140378 - DNA, 22 bp, synthetic construct
  misc_feature 1..22: note = chemically synthesized
  source 1..22: mol_type = other DNA
tctgagtagccaagctcagctt

SEQ ID NO: 140379 - DNA, 22 bp, synthetic construct
  misc_feature 1..22: note = chemically synthesized
  source 1..22: mol_type = other DNA
tgagtagccaagctcagcttgg

SEQ ID NO: 140380 - DNA, 22 bp, synthetic construct
  misc_feature 1..22: note = chemically synthesized
  source 1..22: mol_type = other DNA
agtagccaagctcagcttggtt

SEQ ID NO: 140381 - DNA, 22 bp, synthetic construct
  misc_feature 1..22: note = chemically synthesized
  source 1..22: mol_type = other DNA
agcttggttcaagctacaagca

SEQ ID NO: 140382 - DNA, 22 bp, synthetic construct
  misc_feature 1..22: note = chemically synthesized
  source 1..22: mol_type = other DNA
ggttcaagctacaagcagctga

SEQ ID NO: 140383 - DNA, 22 bp, synthetic construct
  misc_feature 1..22: note = chemically synthesized
  source 1..22: mol_type = other DNA
gttcaagctacaagcagctgag

SEQ ID NO: 140384 - DNA, 22 bp, synthetic construct
  misc_feature 1..22: note = chemically synthesized
  source 1..22: mol_type = other DNA
aagctacaagcagctgagctgc

SEQ ID NO: 140385 - DNA, 22 bp, synthetic construct
  misc_feature 1..22: note = chemically synthesized
  source 1..22: mol_type = other DNA
caagcagctgagctgctttttg

SEQ ID NO: 140386 - DNA, 22 bp, synthetic construct
  misc_feature 1..22: note = chemically synthesized
  source 1..22: mol_type = other DNA
agctgctttttgtctagtcatt

SEQ ID NO: 140387 - DNA, 22 bp, synthetic construct
  misc_feature 1..22: note = chemically synthesized
  source 1..22: mol_type = other DNA
ctttttgtctagtcattgttct

SEQ ID NO: 140388 - DNA, 22 bp, synthetic construct
  misc_feature 1..22: note = chemically synthesized
  source 1..22: mol_type = other DNA
tttgtctagtcattgttctttt

SEQ ID NO: 140389 - DNA, 22 bp, synthetic construct
  misc_feature 1..22: note = chemically synthesized
  source 1..22: mol_type = other DNA
ttgtctagtcattgttctttta

SEQ ID NO: 140390 - DNA, 22 bp, synthetic construct
  misc_feature 1..22: note = chemically synthesized
  source 1..22: mol_type = other DNA
tgtctagtcattgttcttttat

SEQ ID NO: 140391 - DNA, 22 bp, synthetic construct
  misc_feature 1..22: note = chemically synthesized
  source 1..22: mol_type = other DNA
gtctagtcattgttcttttatt

SEQ ID NO: 140392 - DNA, 22 bp, synthetic construct
  misc_feature 1..22: note = chemically synthesized
  source 1..22: mol_type = other DNA
tctagtcattgttcttttattt

SEQ ID NO: 140393 - DNA, 22 bp, synthetic construct
  misc_feature 1..22: note = chemically synthesized
  source 1..22: mol_type = other DNA
gtcattgttcttttatttcagt

SEQ ID NO: 140394 - DNA, 22 bp, synthetic construct
  misc_feature 1..22: note = chemically synthesized
  source 1..22: mol_type = other DNA
ttcttttatttcagtggatcaa

SEQ ID NO: 140395 - DNA, 22 bp, synthetic construct
  misc_feature 1..22: note = chemically synthesized
  source 1..22: mol_type = other DNA
ttttatttcagtggatcaaata

SEQ ID NO: 140396 - DNA, 22 bp, synthetic construct
  misc_feature 1..22: note = chemically synthesized
  source 1..22: mol_type = other DNA
ttatttcagtggatcaaatacg

SEQ ID NO: 140397 - DNA, 22 bp, synthetic construct
  misc_feature 1..22: note = chemically synthesized
  source 1..22: mol_type = other DNA
tatttcagtggatcaaatacgt

SEQ ID NO: 140398 - DNA, 22 bp, synthetic construct
  misc_feature 1..22: note = chemically synthesized
  source 1..22: mol_type = other DNA
atttcagtggatcaaatacgtt

SEQ ID NO: 140399 - DNA, 22 bp, synthetic construct
  misc_feature 1..22: note = chemically synthesized
  source 1..22: mol_type = other DNA
tttcagtggatcaaatacgttc

SEQ ID NO: 140400 - DNA, 22 bp, synthetic construct
  misc_feature 1..22: note = chemically synthesized
  source 1..22: mol_type = other DNA
cagtggatcaaatacgttcttt

SEQ ID NO: 140401 - DNA, 22 bp, synthetic construct
  misc_feature 1..22: note = chemically synthesized
  source 1..22: mol_type = other DNA
agtggatcaaatacgttctttc

SEQ ID NO: 140402 - DNA, 22 bp, synthetic construct
  misc_feature 1..22: note = chemically synthesized
  source 1..22: mol_type = other DNA
tttccaaacctaggatcttgtc

SEQ ID NO: 140403 - DNA, 22 bp, synthetic construct
  misc_feature 1..22: note = chemically synthesized
  source 1..22: mol_type = other DNA
tccaaacctaggatcttgtctt

SEQ ID NO: 140404 - DNA, 22 bp, synthetic construct
  misc_feature 1..22: note = chemically synthesized
  source 1..22: mol_type = other DNA
ccaaacctaggatcttgtcttc

SEQ ID NO: 140405 - DNA, 22 bp, synthetic construct
  misc_feature 1..22: note = chemically synthesized
  source 1..22: mol_type = other DNA
caaacctaggatcttgtcttcc

SEQ ID NO: 140406 - DNA, 22 bp, synthetic construct
  misc_feature 1..22: note = chemically synthesized
  source 1..22: mol_type = other DNA
ggatcttgtcttcctaggctat

SEQ ID NO: 140407 - DNA, 22 bp, synthetic construct
  misc_feature 1..22: note = chemically synthesized
  source 1..22: mol_type = other DNA
gtcttcctaggctatatatttt

SEQ ID NO: 140408 - DNA, 22 bp, synthetic construct
  misc_feature 1..22: note = chemically synthesized
  source 1..22: mol_type = other DNA
tcttcctaggctatatattttg

SEQ ID NO: 140409 - DNA, 22 bp, synthetic construct
  misc_feature 1..22: note = chemically synthesized
  source 1..22: mol_type = other DNA
cctaggctatatattttgtccc

SEQ ID NO: 140410 - DNA, 22 bp, synthetic construct
  misc_feature 1..22: note = chemically synthesized
  source 1..22: mol_type = other DNA
ctaggctatatattttgtccca

SEQ ID NO: 140411 - DNA, 22 bp, synthetic construct
  misc_feature 1..22: note = chemically synthesized
  source 1..22: mol_type = other DNA
ggctatatattttgtcccagga

SEQ ID NO: 140412 - DNA, 22 bp, synthetic construct
  misc_feature 1..22: note = chemically synthesized
  source 1..22: mol_type = other DNA
tatattttgtcccaggaagtct

SEQ ID NO: 140413 - DNA, 22 bp, synthetic construct
  misc_feature 1..22: note = chemically synthesized
  source 1..22: mol_type = other DNA
tgtcccaggaagtcttaatctg

SEQ ID NO: 140414 - DNA, 22 bp, synthetic construct
  misc_feature 1..22: note = chemically synthesized
  source 1..22: mol_type = other DNA
gtcccaggaagtcttaatctgg

SEQ ID NO: 140415 - DNA, 22 bp, synthetic construct
  misc_feature 1..22: note = chemically synthesized
  source 1..22: mol_type = other DNA
tcccaggaagtcttaatctggg

SEQ ID NO: 140416 - DNA, 22 bp, synthetic construct
  misc_feature 1..22: note = chemically synthesized
  source 1..22: mol_type = other DNA
aatctggggtccacagaacact

SEQ ID NO: 140417 - DNA, 22 bp, synthetic construct
  misc_feature 1..22: note = chemically synthesized
  source 1..22: mol_type = other DNA
atctggggtccacagaacacta

SEQ ID NO: 140418 - DNA, 22 bp, synthetic construct
  misc_feature 1..22: note = chemically synthesized
  source 1..22: mol_type = other DNA
gggtccacagaacactaggggg

SEQ ID NO: 140419 - DNA, 22 bp, synthetic construct
  misc_feature 1..22: note = chemically synthesized
  source 1..22: mol_type = other DNA
gggggctggtgaagtttataga

SEQ ID NO: 140420 - DNA, 22 bp, synthetic construct
  misc_feature 1..22: note = chemically synthesized
  source 1..22: mol_type = other DNA
gtgaagtttatagaaaaaaaat

SEQ ID NO: 140421 - DNA, 22 bp, synthetic construct
  misc_feature 1..22: note = chemically synthesized
  source 1..22: mol_type = other DNA
atagaaaaaaaatctgtatttt

SEQ ID NO: 140422 - DNA, 22 bp, synthetic construct
  misc_feature 1..22: note = chemically synthesized
  source 1..22: mol_type = other DNA
tagaaaaaaaatctgtattttt

SEQ ID NO: 140423 - DNA, 22 bp, synthetic construct
  misc_feature 1..22: note = chemically synthesized
  source 1..22: mol_type = other DNA
tatttttacttacatgtaactg

SEQ ID NO: 140424 - DNA, 22 bp, synthetic construct
  misc_feature 1..22: note = chemically synthesized
  source 1..22: mol_type = other DNA
ttacttacatgtaactgaaatt

SEQ ID NO: 140425 - DNA, 22 bp, synthetic construct
  misc_feature 1..22: note = chemically synthesized
  source 1..22: mol_type = other DNA
tacttacatgtaactgaaattt

SEQ ID NO: 140426 - DNA, 22 bp, synthetic construct
  misc_feature 1..22: note = chemically synthesized
  source 1..22: mol_type = other DNA
acttacatgtaactgaaattta

SEQ ID NO: 140427 - DNA, 22 bp, synthetic construct
  misc_feature 1..22: note = chemically synthesized
  source 1..22: mol_type = other DNA
cttacatgtaactgaaatttag

SEQ ID NO: 140428 - DNA, 22 bp, synthetic construct
  misc_feature 1..22: note = chemically synthesized
  source 1..22: mol_type = other DNA
acatgtaactgaaatttagcat

SEQ ID NO: 140429 - DNA, 22 bp, synthetic construct
  misc_feature 1..22: note = chemically synthesized
  source 1..22: mol_type = other DNA
catgtaactgaaatttagcatt

SEQ ID NO: 140430 - DNA, 22 bp, synthetic construct
  misc_feature 1..22: note = chemically synthesized
  source 1..22: mol_type = other DNA
aaatttagcattttcttctact

SEQ ID NO: 140431 - DNA, 22 bp, synthetic construct
  misc_feature 1..22: note = chemically synthesized
  source 1..22: mol_type = other DNA
agcattttcttctactttgaat

SEQ ID NO: 140432 - DNA, 22 bp, synthetic construct
  misc_feature 1..22: note = chemically synthesized
  source 1..22: mol_type = other DNA
gcattttcttctactttgaatg

SEQ ID NO: 140433 - DNA, 22 bp, synthetic construct
  misc_feature 1..22: note = chemically synthesized
  source 1..22: mol_type = other DNA
tcttctactttgaatgcaaagg

SEQ ID NO: 140434 - DNA, 22 bp, synthetic construct
  misc_feature 1..22: note = chemically synthesized
  source 1..22: mol_type = other DNA
cttctactttgaatgcaaagga

SEQ ID NO: 140435 - DNA, 22 bp, synthetic construct
  misc_feature 1..22: note = chemically synthesized
  source 1..22: mol_type = other DNA
ttctactttgaatgcaaaggac

SEQ ID NO: 140436 - DNA, 22 bp, synthetic construct
  misc_feature 1..22: note = chemically synthesized
  source 1..22: mol_type = other DNA
ctactttgaatgcaaaggacaa

SEQ ID NO: 140437 - DNA, 22 bp, synthetic construct
  misc_feature 1..22: note = chemically synthesized
  source 1..22: mol_type = other DNA
tactttgaatgcaaaggacaaa

SEQ ID NO: 140438 - DNA, 22 bp, synthetic construct
  misc_feature 1..22: note = chemically synthesized
  source 1..22: mol_type = other DNA
ctttgaatgcaaaggacaaact

SEQ ID NO: 140439 - DNA, 22 bp, synthetic construct
  misc_feature 1..22: note = chemically synthesized
  source 1..22: mol_type = other DNA
tgaatgcaaaggacaaactaga

SEQ ID NO: 140440 - DNA, 22 bp, synthetic construct
  misc_feature 1..22: note = chemically synthesized
  source 1..22: mol_type = other DNA
gaatgcaaaggacaaactagaa

SEQ ID NO: 140441 - DNA, 22 bp, synthetic construct
  misc_feature 1..22: note = chemically synthesized
  source 1..22: mol_type = other DNA
aatgcaaaggacaaactagaat

SEQ ID NO: 140442 - DNA, 22 bp, synthetic construct
  misc_feature 1..22: note = chemically synthesized
  source 1..22: mol_type = other DNA
gaatgacatcatcagtacctat

SEQ ID NO: 140443 - DNA, 22 bp, synthetic construct
  misc_feature 1..22: note = chemically synthesized
  source 1..22: mol_type = other DNA
ttgcatagttataaagagaaac

SEQ ID NO: 140444 - DNA, 22 bp, synthetic construct
  misc_feature 1..22: note = chemically synthesized
  source 1..22: mol_type = other DNA
catagttataaagagaaaccac

SEQ ID NO: 140445 - DNA, 22 bp, synthetic construct
  misc_feature 1..22: note = chemically synthesized
  source 1..22: mol_type = other DNA
taaagagaaaccacagatattt

SEQ ID NO: 140446 - DNA, 22 bp, synthetic construct
  misc_feature 1..22: note = chemically synthesized
  source 1..22: mol_type = other DNA
tcatactacaccataggtattg

SEQ ID NO: 140447 - DNA, 22 bp, synthetic construct
  misc_feature 1..22: note = chemically synthesized
  source 1..22: mol_type = other DNA
catactacaccataggtattgc

SEQ ID NO: 140448 - DNA, 22 bp, synthetic construct
  misc_feature 1..22: note = chemically synthesized
  source 1..22: mol_type = other DNA
atactacaccataggtattgca

SEQ ID NO: 140449 - DNA, 22 bp, synthetic construct
  misc_feature 1..22: note = chemically synthesized
  source 1..22: mol_type = other DNA
caccataggtattgcagatctt

SEQ ID NO: 140450 - DNA, 22 bp, synthetic construct
  misc_feature 1..22: note = chemically synthesized
  source 1..22: mol_type = other DNA
cagatctttttgtttttgtttt

SEQ ID NO: 140451 - DNA, 22 bp, synthetic construct
  misc_feature 1..22: note = chemically synthesized
  source 1..22: mol_type = other DNA
tttgtttttgtttttgtttgag

SEQ ID NO: 140452 - DNA, 22 bp, synthetic construct
  misc_feature 1..22: note = chemically synthesized
  source 1..22: mol_type = other DNA
ttgtttttgtttttgtttgaga

SEQ ID NO: 140453 - DNA, 22 bp, synthetic construct
  misc_feature 1..22: note = chemically synthesized
  source 1..22: mol_type = other DNA
tgtttttgtttttgtttgagat

SEQ ID NO: 140454 - DNA, 22 bp, synthetic construct
  misc_feature 1..22: note = chemically synthesized
  source 1..22: mol_type = other DNA
gtttttgtttttgtttgagatg

SEQ ID NO: 140455 - DNA, 22 bp, synthetic construct
  misc_feature 1..22: note = chemically synthesized
  source 1..22: mol_type = other DNA
tttttgtttttgtttgagatgg

SEQ ID NO: 140456 - DNA, 22 bp, synthetic construct
  misc_feature 1..22: note = chemically synthesized
  source 1..22: mol_type = other DNA
ttgtttttgtttgagatggagt

SEQ ID NO: 140457 - DNA, 22 bp, synthetic construct
  misc_feature 1..22: note = chemically synthesized
  source 1..22: mol_type = other DNA
tgtttttgtttgagatggagtt

SEQ ID NO: 140458 - DNA, 22 bp, synthetic construct
  misc_feature 1..22: note = chemically synthesized
  source 1..22: mol_type = other DNA
gtttttgtttgagatggagttt

SEQ ID NO: 140459 - DNA, 22 bp, synthetic construct
  misc_feature 1..22: note = chemically synthesized
  source 1..22: mol_type = other DNA
tttttgtttgagatggagtttc

SEQ ID NO: 140460 - DNA, 22 bp, synthetic construct
  misc_feature 1..22: note = chemically synthesized
  source 1..22: mol_type = other DNA
ttgtttgagatggagtttcgct

SEQ ID NO: 140461 - DNA, 22 bp, synthetic construct
  misc_feature 1..22: note = chemically synthesized
  source 1..22: mol_type = other DNA
tgtttgagatggagtttcgctc

SEQ ID NO: 140462 - DNA, 22 bp, synthetic construct
  misc_feature 1..22: note = chemically synthesized
  source 1..22: mol_type = other DNA
gtttgagatggagtttcgctct

SEQ ID NO: 140463 - DNA, 22 bp, synthetic construct
  misc_feature 1..22: note = chemically synthesized
  source 1..22: mol_type = other DNA
tttgagatggagtttcgctctt

SEQ ID NO: 140464 - DNA, 22 bp, synthetic construct
  misc_feature 1..22: note = chemically synthesized
  source 1..22: mol_type = other DNA
gagatggagtttcgctcttatt

SEQ ID NO: 140465 - DNA, 22 bp, synthetic construct
  misc_feature 1..22: note = chemically synthesized
  source 1..22: mol_type = other DNA
agatggagtttcgctcttattg

SEQ ID NO: 140466 - DNA, 22 bp, synthetic construct
  misc_feature 1..22: note = chemically synthesized
  source 1..22: mol_type = other DNA
cgctcttattgcccaggctgga

SEQ ID NO: 140467 - DNA, 22 bp, synthetic construct
  misc_feature 1..22: note = chemically synthesized
  source 1..22: mol_type = other DNA
gctcttattgcccaggctggag

SEQ ID NO: 140468 - DNA, 22 bp, synthetic construct
  misc_feature 1..22: note = chemically synthesized
  source 1..22: mol_type = other DNA
ttattgcccaggctggagtgca

SEQ ID NO: 140469 - DNA, 22 bp, synthetic construct
  misc_feature 1..22: note = chemically synthesized
  source 1..22: mol_type = other DNA
attgcccaggctggagtgcagt

SEQ ID NO: 140470 - DNA, 22 bp, synthetic construct
  misc_feature 1..22: note = chemically synthesized
  source 1..22: mol_type = other DNA
ttgcccaggctggagtgcagtg

SEQ ID NO: 140471 - DNA, 22 bp, synthetic construct
  misc_feature 1..22: note = chemically synthesized
  source 1..22: mol_type = other DNA
cccaggctggagtgcagtggca

SEQ ID NO: 140472 - DNA, 22 bp, synthetic construct
  misc_feature 1..22: note = chemically synthesized
  source 1..22: mol_type = other DNA
gagtgcagtggcatgatttcgg

SEQ ID NO: 140473 - DNA, 22 bp, synthetic construct
  misc_feature 1..22: note = chemically synthesized
  source 1..22: mol_type = other DNA
cggctcactgcaacctcccctt

SEQ ID NO: 140474 - DNA, 22 bp, synthetic construct
  misc_feature 1..22: note = chemically synthesized
  source 1..22: mol_type = other DNA
ggctcactgcaacctccccttc

SEQ ID NO: 140475 - DNA, 22 bp, synthetic construct
  misc_feature 1..22: note = chemically synthesized
  source 1..22: mol_type = other DNA
actgcaacctccccttcctgca

SEQ ID NO: 140476 - DNA, 22 bp, synthetic construct
  misc_feature 1..22: note = chemically synthesized
  source 1..22: mol_type = other DNA
caacctccccttcctgcattca

SEQ ID NO: 140477 - DNA, 22 bp, synthetic construct
  misc_feature 1..22: note = chemically synthesized
  source 1..22: mol_type = other DNA
cccttcctgcattcaagcaatt

SEQ ID NO: 140478 - DNA, 22 bp, synthetic construct
  misc_feature 1..22: note = chemically synthesized
  source 1..22: mol_type = other DNA
cctgcattcaagcaattctcct

SEQ ID NO: 140479 - DNA, 22 bp, synthetic construct
  misc_feature 1..22: note = chemically synthesized
  source 1..22: mol_type = other DNA
ctgcattcaagcaattctcctg

SEQ ID NO: 140480 - DNA, 22 bp, synthetic construct
  misc_feature 1..22: note = chemically synthesized
  source 1..22: mol_type = other DNA
cattcaagcaattctcctgcct

SEQ ID NO: 140481 - DNA, 22 bp, synthetic construct
  misc_feature 1..22: note = chemically synthesized
  source 1..22: mol_type = other DNA
aagcaattctcctgccttggcc

SEQ ID NO: 140482 - DNA, 22 bp, synthetic construct
  misc_feature 1..22: note = chemically synthesized
  source 1..22: mol_type = other DNA
tcctgccttggcctcctgagta

SEQ ID NO: 140483 - DNA, 22 bp, synthetic construct
  misc_feature 1..22: note = chemically synthesized
  source 1..22: mol_type = other DNA
ctgccttggcctcctgagtagc

SEQ ID NO: 140484 - DNA, 22 bp, synthetic construct
  misc_feature 1..22: note = chemically synthesized
  source 1..22: mol_type = other DNA
ccttggcctcctgagtagctgg

SEQ ID NO: 140485 - DNA, 22 bp, synthetic construct
  misc_feature 1..22: note = chemically synthesized
  source 1..22: mol_type = other DNA
ggcctcctgagtagctggggat

SEQ ID NO: 140486 - DNA, 22 bp, synthetic construct
  misc_feature 1..22: note = chemically synthesized
  source 1..22: mol_type = other DNA
gcctcctgagtagctggggatt

SEQ ID NO: 140487 - DNA, 22 bp, synthetic construct
  misc_feature 1..22: note = chemically synthesized
  source 1..22: mol_type = other DNA
ctgagtagctggggattacagg

SEQ ID NO: 140488 - DNA, 22 bp, synthetic construct
  misc_feature 1..22: note = chemically synthesized
  source 1..22: mol_type = other DNA
agtagctggggattacaggcac

SEQ ID NO: 140489 - DNA, 22 bp, synthetic construct
  misc_feature 1..22: note = chemically synthesized
  source 1..22: mol_type = other DNA
gggattacaggcacctgccacc

SEQ ID NO: 140490 - DNA, 22 bp, synthetic construct
  misc_feature 1..22: note = chemically synthesized
  source 1..22: mol_type = other DNA
caggcacctgccaccatgccag

SEQ ID NO: 140491 - DNA, 22 bp, synthetic construct
  misc_feature 1..22: note = chemically synthesized
  source 1..22: mol_type = other DNA
ccaccatgccagtctaattttt

SEQ ID NO: 140492 - DNA, 22 bp, synthetic construct
  misc_feature 1..22: note = chemically synthesized
  source 1..22: mol_type = other DNA
atttttgtatttttagtagaga

SEQ ID NO: 140493 - DNA, 22 bp, synthetic construct
  misc_feature 1..22: note = chemically synthesized
  source 1..22: mol_type = other DNA
ttgtatttttagtagagatggg

SEQ ID NO: 140494 - DNA, 22 bp, synthetic construct
  misc_feature 1..22: note = chemically synthesized
  source 1..22: mol_type = other DNA
tgtatttttagtagagatgggg

SEQ ID NO: 140495 - DNA, 22 bp, synthetic construct
  misc_feature 1..22: note = chemically synthesized
  source 1..22: mol_type = other DNA
gtatttttagtagagatggggt

SEQ ID NO: 140496 - DNA, 22 bp, synthetic construct
  misc_feature 1..22: note = chemically synthesized
  source 1..22: mol_type = other DNA
tatttttagtagagatggggtt

SEQ ID NO: 140497 - DNA, 22 bp, synthetic construct
  misc_feature 1..22: note = chemically synthesized
  source 1..22: mol_type = other DNA
ttagtagagatggggtttcgcc

SEQ ID NO: 140498 - DNA, 22 bp, synthetic construct
  misc_feature 1..22: note = chemically synthesized
  source 1..22: mol_type = other DNA
tagtagagatggggtttcgcca

SEQ ID NO: 140499 - DNA, 22 bp, synthetic construct
  misc_feature 1..22: note = chemically synthesized
  source 1..22: mol_type = other DNA
agtagagatggggtttcgccat

SEQ ID NO: 140500 - DNA, 22 bp, synthetic construct
  misc_feature 1..22: note = chemically synthesized
  source 1..22: mol_type = other DNA
gtagagatggggtttcgccatg

SEQ ID NO: 140501 - DNA, 22 bp, synthetic construct
  misc_feature 1..22: note = chemically synthesized
  source 1..22: mol_type = other DNA
cgccatgttggccaggctggtc

SEQ ID NO: 140502 - DNA, 22 bp, synthetic construct
  misc_feature 1..22: note = chemically synthesized
  source 1..22: mol_type = other DNA
gccatgttggccaggctggtct

SEQ ID NO: 140503 - DNA, 22 bp, synthetic construct
  misc_feature 1..22: note = chemically synthesized
  source 1..22: mol_type = other DNA
gccaggctggtcttgaactcct

SEQ ID NO: 140504 - DNA, 22 bp, synthetic construct
  misc_feature 1..22: note = chemically synthesized
  source 1..22: mol_type = other DNA
gtcttgaactcctgacctcaga

SEQ ID NO: 140505 - DNA, 22 bp, synthetic construct
  misc_feature 1..22: note = chemically synthesized
  source 1..22: mol_type = other DNA
gaactcctgacctcagatgatc

SEQ ID NO: 140506 - DNA, 22 bp, synthetic construct
  misc_feature 1..22: note = chemically synthesized
  source 1..22: mol_type = other DNA
aactcctgacctcagatgatct

SEQ ID NO: 140507 - DNA, 22 bp, synthetic construct
  misc_feature 1..22: note = chemically synthesized
  source 1..22: mol_type = other DNA
ctgacctcagatgatctgcccg

SEQ ID NO: 140508 - DNA, 22 bp, synthetic construct
  misc_feature 1..22: note = chemically synthesized
  source 1..22: mol_type = other DNA
acctcagatgatctgcccgcct

SEQ ID NO: 140509 - DNA, 22 bp, synthetic construct
  misc_feature 1..22: note = chemically synthesized
  source 1..22: mol_type = other DNA
agatgatctgcccgccttggcc

SEQ ID NO: 140510 - DNA, 22 bp, synthetic construct
  misc_feature 1..22: note = chemically synthesized
  source 1..22: mol_type = other DNA
cccgccttggcctcctgaagtg

SEQ ID NO: 140511 - DNA, 22 bp, synthetic construct
  misc_feature 1..22: note = chemically synthesized
  source 1..22: mol_type = other DNA
ggcctcctgaagtgctgggatt

SEQ ID NO: 140512 - DNA, 22 bp, synthetic construct
  misc_feature 1..22: note = chemically synthesized
  source 1..22: mol_type = other DNA
gcctcctgaagtgctgggatta

SEQ ID NO: 140513 - DNA, 22 bp, synthetic construct
  misc_feature 1..22: note = chemically synthesized
  source 1..22: mol_type = other DNA
ctgaagtgctgggattataggt

SEQ ID NO: 140514 - DNA, 22 bp, synthetic construct
  misc_feature 1..22: note = chemically synthesized
  source 1..22: mol_type = other DNA
aagtgctgggattataggtgtg

SEQ ID NO: 140515 - DNA, 22 bp, synthetic construct
  misc_feature 1..22: note = chemically synthesized
  source 1..22: mol_type = other DNA
ggattataggtgtgagccacca

SEQ ID NO: 140516 - DNA, 22 bp, synthetic construct
  misc_feature 1..22: note = chemically synthesized
  source 1..22: mol_type = other DNA
taggtgtgagccaccacgcctg

SEQ ID NO: 140517 - DNA, 22 bp, synthetic construct
  misc_feature 1..22: note = chemically synthesized
  source 1..22: mol_type = other DNA
gcccattgcagatatttttaat

SEQ ID NO: 140518 - DNA, 22 bp, synthetic construct
  misc_feature 1..22: note = chemically synthesized
  source 1..22: mol_type = other DNA
cagatatttttaattcacattt

SEQ ID NO: 140519 - DNA, 22 bp, synthetic construct
  misc_feature 1..22: note = chemically synthesized
  source 1..22: mol_type = other DNA
ttaattcacatttatctgcatc

SEQ ID NO: 140520 - DNA, 22 bp, synthetic construct
  misc_feature 1..22: note = chemically synthesized
  source 1..22: mol_type = other DNA
taattcacatttatctgcatca

SEQ ID NO: 140521 - DNA, 22 bp, synthetic construct
  misc_feature 1..22: note = chemically synthesized
  source 1..22: mol_type = other DNA
aattcacatttatctgcatcac

SEQ ID NO: 140522 - DNA, 22 bp, synthetic construct
  misc_feature 1..22: note = chemically synthesized
  source 1..22: mol_type = other DNA
attcacatttatctgcatcact

SEQ ID NO: 140523 - DNA, 22 bp, synthetic construct
  misc_feature 1..22: note = chemically synthesized
  source 1..22: mol_type = other DNA
acatttatctgcatcactactt

SEQ ID NO: 140524 - DNA, 22 bp, synthetic construct
  misc_feature 1..22: note = chemically synthesized
  source 1..22: mol_type = other DNA
atctgcatcactacttggatct

SEQ ID NO: 140525 - DNA, 22 bp, synthetic construct
  misc_feature 1..22: note = chemically synthesized
  source 1..22: mol_type = other DNA
tctgcatcactacttggatctt

SEQ ID NO: 140526 - DNA, 22 bp, synthetic construct
  misc_feature 1..22: note = chemically synthesized
  source 1..22: mol_type = other DNA
catcactacttggatcttaagg

SEQ ID NO: 140527 - DNA, 22 bp, synthetic construct
  misc_feature 1..22: note = chemically synthesized
  source 1..22: mol_type = other DNA
cttggatcttaaggtagctgta

SEQ ID NO: 140528 - DNA, 22 bp, synthetic construct
  misc_feature 1..22: note = chemically synthesized
  source 1..22: mol_type = other DNA
ggatcttaaggtagctgtagac

SEQ ID NO: 140529 - DNA, 22 bp, synthetic construct
  misc_feature 1..22: note = chemically synthesized
  source 1..22: mol_type = other DNA
gatcttaaggtagctgtagacc

SEQ ID NO: 140530 - DNA, 22 bp, synthetic construct
  misc_feature 1..22: note = chemically synthesized
  source 1..22: mol_type = other DNA
aaggtagctgtagacccaatcc

SEQ ID NO: 140531 - DNA, 22 bp, synthetic construct
  misc_feature 1..22: note = chemically synthesized
  source 1..22: mol_type = other DNA
aggtagctgtagacccaatcct

SEQ ID NO: 140532 - DNA, 22 bp, synthetic construct
  misc_feature 1..22: note = chemically synthesized
  source 1..22: mol_type = other DNA
tagacccaatcctagatctaat

SEQ ID NO: 140533 - DNA, 22 bp, synthetic construct
  misc_feature 1..22: note = chemically synthesized
  source 1..22: mol_type = other DNA
gatctaatgctttcataaagaa

SEQ ID NO: 140534 - DNA, 22 bp, synthetic construct
  misc_feature 1..22: note = chemically synthesized
  source 1..22: mol_type = other DNA
atgctttcataaagaagcaaat

SEQ ID NO: 140535 - DNA, 22 bp, synthetic construct
  misc_feature 1..22: note = chemically synthesized
  source 1..22: mol_type = other DNA
tcataaagaagcaaatataata

SEQ ID NO: 140536 - DNA, 22 bp, synthetic construct
  misc_feature 1..22: note = chemically synthesized
  source 1..22: mol_type = other DNA
cataaagaagcaaatataataa

SEQ ID NO: 140537 - DNA, 22 bp, synthetic construct
  misc_feature 1..22: note = chemically synthesized
  source 1..22: mol_type = other DNA
ataaagaagcaaatataataaa

SEQ ID NO: 140538 - DNA, 22 bp, synthetic construct
  misc_feature 1..22: note = chemically synthesized
  source 1..22: mol_type = other DNA
taccacaaatgtaatgtttgat

SEQ ID NO: 140539 - DNA, 22 bp, synthetic construct
  misc_feature 1..22: note = chemically synthesized
  source 1..22: mol_type = other DNA
gatgtctgataatgatatttca

SEQ ID NO: 140540 - DNA, 22 bp, synthetic construct
  misc_feature 1..22: note = chemically synthesized
  source 1..22: mol_type = other DNA
atgtctgataatgatatttcag

SEQ ID NO: 140541 - DNA, 22 bp, synthetic construct
  misc_feature 1..22: note = chemically synthesized
  source 1..22: mol_type = other DNA
ataatgatatttcagtgtaatt

SEQ ID NO: 140542 - DNA, 22 bp, synthetic construct
  misc_feature 1..22: note = chemically synthesized
  source 1..22: mol_type = other DNA
cagtgtaattaaacttagcact

SEQ ID NO: 140543 - DNA, 22 bp, synthetic construct
  misc_feature 1..22: note = chemically synthesized
  source 1..22: mol_type = other DNA
agtgtaattaaacttagcactc

SEQ ID NO: 140544 - DNA, 22 bp, synthetic construct
  misc_feature 1..22: note = chemically synthesized
  source 1..22: mol_type = other DNA
aacttagcactcctatgtatat

SEQ ID NO: 140545 - DNA, 22 bp, synthetic construct
  misc_feature 1..22: note = chemically synthesized
  source 1..22: mol_type = other DNA
agcactcctatgtatattattt

SEQ ID NO: 140546 - DNA, 22 bp, synthetic construct
  misc_feature 1..22: note = chemically synthesized
  source 1..22: mol_type = other DNA
gcactcctatgtatattatttg

SEQ ID NO: 140547 - DNA, 22 bp, synthetic construct
  misc_feature 1..22: note = chemically synthesized
  source 1..22: mol_type = other DNA
ctatgtatattatttgatgcaa

SEQ ID NO: 140548 - DNA, 22 bp, synthetic construct
  misc_feature 1..22: note = chemically synthesized
  source 1..22: mol_type = other DNA
tgtatattatttgatgcaataa

SEQ ID NO: 140549 - DNA, 22 bp, synthetic construct
  misc_feature 1..22: note = chemically synthesized
  source 1..22: mol_type = other DNA
tttgatgcaataaaaacatatt

SEQ ID NO: 140550 - DNA, 22 bp, synthetic construct
  misc_feature 1..22: note = chemically synthesized
  source 1..22: mol_type = other DNA
gatgcaataaaaacatattttt

SEQ ID NO: 140551 - DNA, 22 bp, synthetic construct
  misc_feature 1..22: note = chemically synthesized
  source 1..22: mol_type = other DNA
atgcaataaaaacatatttttt

SEQ ID NO: 140552 - DNA, 22 bp, synthetic construct
  misc_feature 1..22: note = chemically synthesized
  source 1..22: mol_type = other DNA
ttttagcacttacagtctgcca

SEQ ID NO: 140553 - DNA, 22 bp, synthetic construct
  misc_feature 1..22: note = chemically synthesized
  source 1..22: mol_type = other DNA
tttagcacttacagtctgccaa

SEQ ID NO: 140554 - DNA, 22 bp, synthetic construct
  misc_feature 1..22: note = chemically synthesized
  source 1..22: mol_type = other DNA
ttagcacttacagtctgccaaa

SEQ ID NO: 140555 - DNA, 22 bp, synthetic construct
  misc_feature 1..22: note = chemically synthesized
  source 1..22: mol_type = other DNA
tagcacttacagtctgccaaac

SEQ ID NO: 140556 - DNA, 22 bp, synthetic construct
  misc_feature 1..22: note = chemically synthesized
  source 1..22: mol_type = other DNA
agcacttacagtctgccaaact

SEQ ID NO: 140557 - DNA, 22 bp, synthetic construct
  misc_feature 1..22: note = chemically synthesized
  source 1..22: mol_type = other DNA
gcacttacagtctgccaaactg

SEQ ID NO: 140558 - DNA, 22 bp, synthetic construct
  misc_feature 1..22: note = chemically synthesized
  source 1..22: mol_type = other DNA
acagtctgccaaactggcctgt

SEQ ID NO: 140559 - DNA, 22 bp, synthetic construct
  misc_feature 1..22: note = chemically synthesized
  source 1..22: mol_type = other DNA
cagtctgccaaactggcctgtg

SEQ ID NO: 140560 - DNA, 22 bp, synthetic construct
  misc_feature 1..22: note = chemically synthesized
  source 1..22: mol_type = other DNA
ccaaactggcctgtgacacaaa

SEQ ID NO: 140561 - DNA, 22 bp, synthetic construct
  misc_feature 1..22: note = chemically synthesized
  source 1..22: mol_type = other DNA
gcctgtgacacaaaaaaagttt

SEQ ID NO: 140562 - DNA, 22 bp, synthetic construct
  misc_feature 1..22: note = chemically synthesized
  source 1..22: mol_type = other DNA
tgacacaaaaaaagtttaggaa

SEQ ID NO: 140563 - DNA, 22 bp, synthetic construct
  misc_feature 1..22: note = chemically synthesized
  source 1..22: mol_type = other DNA
aggaattcctggttttgtctgt

SEQ ID NO: 140564 - DNA, 22 bp, synthetic construct
  misc_feature 1..22: note = chemically synthesized
  source 1..22: mol_type = other DNA
ggaattcctggttttgtctgtg

SEQ ID NO: 140565 - DNA, 22 bp, synthetic construct
  misc_feature 1..22: note = chemically synthesized
  source 1..22: mol_type = other DNA
ctggttttgtctgtgttagcca

SEQ ID NO: 140566 - DNA, 22 bp, synthetic construct
  misc_feature 1..22: note = chemically synthesized
  source 1..22: mol_type = other DNA
gttttgtctgtgttagccaatg

SEQ ID NO: 140567 - DNA, 22 bp, synthetic construct
  misc_feature 1..22: note = chemically synthesized
  source 1..22: mol_type = other DNA
tgtctgtgttagccaatggtta

SEQ ID NO: 140568 - DNA, 22 bp, synthetic construct
  misc_feature 1..22: note = chemically synthesized
  source 1..22: mol_type = other DNA
gtctgtgttagccaatggttag

SEQ ID NO: 140569 - DNA, 22 bp, synthetic construct
  misc_feature 1..22: note = chemically synthesized
  source 1..22: mol_type = other DNA
tctgtgttagccaatggttaga

SEQ ID NO: 140570 - DNA, 22 bp, synthetic construct
  misc_feature 1..22: note = chemically synthesized
  source 1..22: mol_type = other DNA
tgttagccaatggttagaatat

SEQ ID NO: 140571 - DNA, 22 bp, synthetic construct
  misc_feature 1..22: note = chemically synthesized
  source 1..22: mol_type = other DNA
gccaatggttagaatatatgct

SEQ ID NO: 140572 - DNA, 22 bp, synthetic construct
  misc_feature 1..22: note = chemically synthesized
  source 1..22: mol_type = other DNA
gaatatatgctcagaaagatac

SEQ ID NO: 140573 - DNA, 22 bp, synthetic construct
  misc_feature 1..22: note = chemically synthesized
  source 1..22: mol_type = other DNA
agaaagataccattggttaata

SEQ ID NO: 140574 - DNA, 22 bp, synthetic construct
  misc_feature 1..22: note = chemically synthesized
  source 1..22: mol_type = other DNA
gttaatagctaaaagaaaatgg

SEQ ID NO: 140575 - DNA, 22 bp, synthetic construct
  misc_feature 1..22: note = chemically synthesized
  source 1..22: mol_type = other DNA
atagctaaaagaaaatggagta

SEQ ID NO: 140576 - DNA, 22 bp, synthetic construct
  misc_feature 1..22: note = chemically synthesized
  source 1..22: mol_type = other DNA
aaagaaaatggagtagaaattc

SEQ ID NO: 140577 - DNA, 22 bp, synthetic construct
  misc_feature 1..22: note = chemically synthesized
  source 1..22: mol_type = other DNA
agtggcctggaataataacaat

SEQ ID NO: 140578 - DNA, 22 bp, synthetic construct
  misc_feature 1..22: note = chemically synthesized
  source 1..22: mol_type = other DNA
gaataataacaatttgggcagt

SEQ ID NO: 140579 - DNA, 22 bp, synthetic construct
  misc_feature 1..22: note = chemically synthesized
  source 1..22: mol_type = other DNA
gggcagtcattaagtcaggtga

SEQ ID NO: 140580 - DNA, 22 bp, synthetic construct
  misc_feature 1..22: note = chemically synthesized
  source 1..22: mol_type = other DNA
ggcagtcattaagtcaggtgaa

SEQ ID NO: 140581 - DNA, 22 bp, synthetic construct
  misc_feature 1..22: note = chemically synthesized
  source 1..22: mol_type = other DNA
agtcaggtgaagacttctggaa

SEQ ID NO: 140582 - DNA, 22 bp, synthetic construct
  misc_feature 1..22: note = chemically synthesized
  source 1..22: mol_type = other DNA
ctggaatcatgggagaaaagca

SEQ ID NO: 140583 - DNA, 22 bp, synthetic construct
  misc_feature 1..22: note = chemically synthesized
  source 1..22: mol_type = other DNA
tggaatcatgggagaaaagcaa

SEQ ID NO: 140584 - DNA, 22 bp, synthetic construct
  misc_feature 1..22: note = chemically synthesized
  source 1..22: mol_type = other DNA
gaatcatgggagaaaagcaagg

SEQ ID NO: 140585 - DNA, 22 bp, synthetic construct
  misc_feature 1..22: note = chemically synthesized
  source 1..22: mol_type = other DNA
ttacttgccacaagtgtttttt

SEQ ID NO: 140586 - DNA, 22 bp, synthetic construct
  misc_feature 1..22: note = chemically synthesized
  source 1..22: mol_type = other DNA
acttgccacaagtgtttttttt

SEQ ID NO: 140587 - DNA, 22 bp, synthetic construct
  misc_feature 1..22: note = chemically synthesized
  source 1..22: mol_type = other DNA
cttgccacaagtgttttttttt

SEQ ID NO: 140588 - DNA, 22 bp, synthetic construct
  misc_feature 1..22: note = chemically synthesized
  source 1..22: mol_type = other DNA
gccacaagtgtttttttttttt

SEQ ID NO: 140589 - DNA, 22 bp, synthetic construct
  misc_feature 1..22: note = chemically synthesized
  source 1..22: mol_type = other DNA
ccacaagtgttttttttttttt

SEQ ID NO: 140590 - DNA, 22 bp, synthetic construct
  misc_feature 1..22: note = chemically synthesized
  source 1..22: mol_type = other DNA
ttttttttttttttttttatca

SEQ ID NO: 140591 - DNA, 22 bp, synthetic construct
  misc_feature 1..22: note = chemically synthesized
  source 1..22: mol_type = other DNA
tttttttttttttttttatcac

SEQ ID NO: 140592 - DNA, 22 bp, synthetic construct
  misc_feature 1..22: note = chemically synthesized
  source 1..22: mol_type = other DNA
ttttttttttttttttatcaca

SEQ ID NO: 140593 - DNA, 22 bp, synthetic construct
  misc_feature 1..22: note = chemically synthesized
  source 1..22: mol_type = other DNA
tttttttttttttttatcacaa

SEQ ID NO: 140594 - DNA, 22 bp, synthetic construct
  misc_feature 1..22: note = chemically synthesized
  source 1..22: mol_type = other DNA
ttttttttttttttatcacaaa

SEQ ID NO: 140595 - DNA, 22 bp, synthetic construct
  misc_feature 1..22: note = chemically synthesized
  source 1..22: mol_type = other DNA
tttttttttttttatcacaaac

SEQ ID NO: 140596 - DNA, 22 bp, synthetic construct
  misc_feature 1..22: note = chemically synthesized
  source 1..22: mol_type = other DNA
ttttttttttttatcacaaaca

SEQ ID NO: 140597 - DNA, 22 bp, synthetic construct
  misc_feature 1..22: note = chemically synthesized
  source 1..22: mol_type = other DNA
tttttttttttatcacaaacat

SEQ ID NO: 140598 - DNA, 22 bp, synthetic construct
  misc_feature 1..22: note = chemically synthesized
  source 1..22: mol_type = other DNA
ttttttttttatcacaaacata

SEQ ID NO: 140599 - DNA, 22 bp, synthetic construct
  misc_feature 1..22: note = chemically synthesized
  source 1..22: mol_type = other DNA
tttttttttatcacaaacataa

SEQ ID NO: 140600 - DNA, 22 bp, synthetic construct
  misc_feature 1..22: note = chemically synthesized
  source 1..22: mol_type = other DNA
ttttttttatcacaaacataag

SEQ ID NO: 140601 - DNA, 22 bp, synthetic construct
  misc_feature 1..22: note = chemically synthesized
  source 1..22: mol_type = other DNA
tttttttatcacaaacataaga

SEQ ID NO: 140602 - DNA, 22 bp, synthetic construct
  misc_feature 1..22: note = chemically synthesized
  source 1..22: mol_type = other DNA
ttttttatcacaaacataagaa

SEQ ID NO: 140603 - DNA, 22 bp, synthetic construct
  misc_feature 1..22: note = chemically synthesized
  source 1..22: mol_type = other DNA
tttttatcacaaacataagaaa

SEQ ID NO: 140604 - DNA, 22 bp, synthetic construct
  misc_feature 1..22: note = chemically synthesized
  source 1..22: mol_type = other DNA
ttttatcacaaacataagaaaa

SEQ ID NO: 140605 - DNA, 22 bp, synthetic construct
  misc_feature 1..22: note = chemically synthesized
  source 1..22: mol_type = other DNA
tttatcacaaacataagaaaat

SEQ ID NO: 140606 - DNA, 22 bp, synthetic construct
  misc_feature 1..22: note = chemically synthesized
  source 1..22: mol_type = other DNA
ttatcacaaacataagaaaata

SEQ ID NO: 140607 - DNA, 22 bp, synthetic construct
  misc_feature 1..22: note = chemically synthesized
  source 1..22: mol_type = other DNA
tatcacaaacataagaaaatat

SEQ ID NO: 140608 - DNA, 22 bp, synthetic construct
  misc_feature 1..22: note = chemically synthesized
  source 1..22: mol_type = other DNA
atcacaaacataagaaaatata

SEQ ID NO: 140609 - DNA, 22 bp, synthetic construct
  misc_feature 1..22: note = chemically synthesized
  source 1..22: mol_type = other DNA
tcacaaacataagaaaatataa

SEQ ID NO: 140610 - DNA, 22 bp, synthetic construct
  misc_feature 1..22: note = chemically synthesized
  source 1..22: mol_type = other DNA
tagaagagagaaacgctcttag

SEQ ID NO: 140611 - DNA, 22 bp, synthetic construct
  misc_feature 1..22: note = chemically synthesized
  source 1..22: mol_type = other DNA
ttagtaaacttggaatatggaa

SEQ ID NO: 140612 - DNA, 22 bp, synthetic construct
  misc_feature 1..22: note = chemically synthesized
  source 1..22: mol_type = other DNA
agtaaacttggaatatggaatc

SEQ ID NO: 140613 - DNA, 22 bp, synthetic construct
  misc_feature 1..22: note = chemically synthesized
  source 1..22: mol_type = other DNA
gtaaacttggaatatggaatcc

SEQ ID NO: 140614 - DNA, 22 bp, synthetic construct
  misc_feature 1..22: note = chemically synthesized
  source 1..22: mol_type = other DNA
ggaatatggaatccccaaaggc

SEQ ID NO: 140615 - DNA, 22 bp, synthetic construct
  misc_feature 1..22: note = chemically synthesized
  source 1..22: mol_type = other DNA
gaatatggaatccccaaaggca

SEQ ID NO: 140616 - DNA, 22 bp, synthetic construct
  misc_feature 1..22: note = chemically synthesized
  source 1..22: mol_type = other DNA
gacttgggagacaggagccata

SEQ ID NO: 140617 - DNA, 22 bp, synthetic construct
  misc_feature 1..22: note = chemically synthesized
  source 1..22: mol_type = other DNA
acttgggagacaggagccatac

SEQ ID NO: 140618 - DNA, 22 bp, synthetic construct
  misc_feature 1..22: note = chemically synthesized
  source 1..22: mol_type = other DNA
gggagacaggagccatactgct

SEQ ID NO: 140619 - DNA, 22 bp, synthetic construct
  misc_feature 1..22: note = chemically synthesized
  source 1..22: mol_type = other DNA
ggagacaggagccatactgcta

SEQ ID NO: 140620 - DNA, 22 bp, synthetic construct
  misc_feature 1..22: note = chemically synthesized
  source 1..22: mol_type = other DNA
ctaagtgaaaaagacgaagaac

SEQ ID NO: 140621 - DNA, 22 bp, synthetic construct
  misc_feature 1..22: note = chemically synthesized
  source 1..22: mol_type = other DNA
agtgaaaaagacgaagaacctc

SEQ ID NO: 140622 - DNA, 22 bp, synthetic construct
  misc_feature 1..22: note = chemically synthesized
  source 1..22: mol_type = other DNA
tagggcctgaacatacaggaaa

SEQ ID NO: 140623 - DNA, 22 bp, synthetic construct
  misc_feature 1..22: note = chemically synthesized
  source 1..22: mol_type = other DNA
gggcctgaacatacaggaaatt

SEQ ID NO: 140624 - DNA, 22 bp, synthetic construct
  misc_feature 1..22: note = chemically synthesized
  source 1..22: mol_type = other DNA
aacatacaggaaattgtaggaa

SEQ ID NO: 140625 - DNA, 22 bp, synthetic construct
  misc_feature 1..22: note = chemically synthesized
  source 1..22: mol_type = other DNA
taggaacagaaattcctagatc

SEQ ID NO: 140626 - DNA, 22 bp, synthetic construct
  misc_feature 1..22: note = chemically synthesized
  source 1..22: mol_type = other DNA
ctagatctggtggggcaagggg

SEQ ID NO: 140627 - DNA, 22 bp, synthetic construct
  misc_feature 1..22: note = chemically synthesized
  source 1..22: mol_type = other DNA
gatctggtggggcaaggggagc

SEQ ID NO: 140628 - DNA, 22 bp, synthetic construct
  misc_feature 1..22: note = chemically synthesized
  source 1..22: mol_type = other DNA
gtggggcaaggggagccatagg

SEQ ID NO: 140629 - DNA, 22 bp, synthetic construct
  misc_feature 1..22: note = chemically synthesized
  source 1..22: mol_type = other DNA
gcaaacatggtgaaatcccgtc

SEQ ID NO: 140630 - DNA, 22 bp, synthetic construct
  misc_feature 1..22: note = chemically synthesized
  source 1..22: mol_type = other DNA
tactaaaaataaaaaaattagc

SEQ ID NO: 140631 - DNA, 22 bp, synthetic construct
  misc_feature 1..22: note = chemically synthesized
  source 1..22: mol_type = other DNA
ctaaaaataaaaaaattagctg

SEQ ID NO: 140632 - DNA, 22 bp, synthetic construct
  misc_feature 1..22: note = chemically synthesized
  source 1..22: mol_type = other DNA
aaaataaaaaaattagctgggc

SEQ ID NO: 140633 - DNA, 22 bp, synthetic construct
  misc_feature 1..22: note = chemically synthesized
  source 1..22: mol_type = other DNA
gctgggcatggtggcatgcgcc

SEQ ID NO: 140634 - DNA, 22 bp, synthetic construct
  misc_feature 1..22: note = chemically synthesized
  source 1..22: mol_type = other DNA
ggcatggtggcatgcgcctgta

SEQ ID NO: 140635 - DNA, 22 bp, synthetic construct
  misc_feature 1..22: note = chemically synthesized
  source 1..22: mol_type = other DNA
tagtcccagctgctcgggaggc

SEQ ID NO: 140636 - DNA, 22 bp, synthetic construct
  misc_feature 1..22: note = chemically synthesized
  source 1..22: mol_type = other DNA
ctcgggaggctgaggcaggaga

SEQ ID NO: 140637 - DNA, 22 bp, synthetic construct
  misc_feature 1..22: note = chemically synthesized
  source 1..22: mol_type = other DNA
gggaggctgaggcaggagaatc

SEQ ID NO: 140638 - DNA, 22 bp, synthetic construct
  misc_feature 1..22: note = chemically synthesized
  source 1..22: mol_type = other DNA
aggcaggagaatcgtttgaacc

SEQ ID NO: 140639 - DNA, 22 bp, synthetic construct
  misc_feature 1..22: note = chemically synthesized
  source 1..22: mol_type = other DNA
gaacccaggaggcgaaggttgc

SEQ ID NO: 140640 - DNA, 22 bp, synthetic construct
  misc_feature 1..22: note = chemically synthesized
  source 1..22: mol_type = other DNA
aacccaggaggcgaaggttgca

SEQ ID NO: 140641 - DNA, 22 bp, synthetic construct
  misc_feature 1..22: note = chemically synthesized
  source 1..22: mol_type = other DNA
cagtgagctgagatagtgccat

SEQ ID NO: 140642 - DNA, 22 bp, synthetic construct
  misc_feature 1..22: note = chemically synthesized
  source 1..22: mol_type = other DNA
agatagtgccattgcactccag

SEQ ID NO: 140643 - DNA, 22 bp, synthetic construct
  misc_feature 1..22: note = chemically synthesized
  source 1..22: mol_type = other DNA
cactccagtctggcaacagagt

SEQ ID NO: 140644 - DNA, 22 bp, synthetic construct
  misc_feature 1..22: note = chemically synthesized
  source 1..22: mol_type = other DNA
cagtctggcaacagagtgagac

SEQ ID NO: 140645 - DNA, 22 bp, synthetic construct
  misc_feature 1..22: note = chemically synthesized
  source 1..22: mol_type = other DNA
gcaacagagtgagactccgtct

SEQ ID NO: 140646 - DNA, 22 bp, synthetic construct
  misc_feature 1..22: note = chemically synthesized
  source 1..22: mol_type = other DNA
cgtctcaaaaaaaaaaaaaaaa

SEQ ID NO: 140647 - DNA, 22 bp, synthetic construct
  misc_feature 1..22: note = chemically synthesized
  source 1..22: mol_type = other DNA
aaaaaaaaaaaaaaaagaaaga

SEQ ID NO: 140648 - DNA, 22 bp, synthetic construct
  misc_feature 1..22: note = chemically synthesized
  source 1..22: mol_type = other DNA
ggctggggcaatgagattatgg

SEQ ID NO: 140649 - DNA, 22 bp, synthetic construct
  misc_feature 1..22: note = chemically synthesized
  source 1..22: mol_type = other DNA
gggcaatgagattatggtgatg

SEQ ID NO: 140650 - DNA, 22 bp, synthetic construct
  misc_feature 1..22: note = chemically synthesized
  source 1..22: mol_type = other DNA
tggtgatgtaagggacttttat

SEQ ID NO: 140651 - DNA, 22 bp, synthetic construct
  misc_feature 1..22: note = chemically synthesized
  source 1..22: mol_type = other DNA
ttatagaattaacaatgctgga

SEQ ID NO: 140652 - DNA, 22 bp, synthetic construct
  misc_feature 1..22: note = chemically synthesized
  source 1..22: mol_type = other DNA
tatagaattaacaatgctggaa

SEQ ID NO: 140653 - DNA, 22 bp, synthetic construct
  misc_feature 1..22: note = chemically synthesized
  source 1..22: mol_type = other DNA
atagaattaacaatgctggaat

SEQ ID NO: 140654 - DNA, 22 bp, synthetic construct
  misc_feature 1..22: note = chemically synthesized
  source 1..22: mol_type = other DNA
tagaattaacaatgctggaatt

SEQ ID NO: 140655 - DNA, 22 bp, synthetic construct
  misc_feature 1..22: note = chemically synthesized
  source 1..22: mol_type = other DNA
acaatgctggaatttgtggaac

SEQ ID NO: 140656 - DNA, 22 bp, synthetic construct
  misc_feature 1..22: note = chemically synthesized
  source 1..22: mol_type = other DNA
gaatttgtggaactctgcttct

SEQ ID NO: 140657 - DNA, 22 bp, synthetic construct
  misc_feature 1..22: note = chemically synthesized
  source 1..22: mol_type = other DNA
gtggaactctgcttctattatt

SEQ ID NO: 140658 - DNA, 22 bp, synthetic construct
  misc_feature 1..22: note = chemically synthesized
  source 1..22: mol_type = other DNA
tggaactctgcttctattattc

SEQ ID NO: 140659 - DNA, 22 bp, synthetic construct
  misc_feature 1..22: note = chemically synthesized
  source 1..22: mol_type = other DNA
tgcttctattattcccccaatc

SEQ ID NO: 140660 - DNA, 22 bp, synthetic construct
  misc_feature 1..22: note = chemically synthesized
  source 1..22: mol_type = other DNA
cttctattattcccccaatcat

SEQ ID NO: 140661 - DNA, 22 bp, synthetic construct
  misc_feature 1..22: note = chemically synthesized
  source 1..22: mol_type = other DNA
ctattattcccccaatcattac

SEQ ID NO: 140662 - DNA, 22 bp, synthetic construct
  misc_feature 1..22: note = chemically synthesized
  source 1..22: mol_type = other DNA
tattattcccccaatcattact

SEQ ID NO: 140663 - DNA, 22 bp, synthetic construct
  misc_feature 1..22: note = chemically synthesized
  source 1..22: mol_type = other DNA
ttattcccccaatcattacttc

SEQ ID NO: 140664 - DNA, 22 bp, synthetic construct
  misc_feature 1..22: note = chemically synthesized
  source 1..22: mol_type = other DNA
ttcccccaatcattacttctgt

SEQ ID NO: 140665 - DNA, 22 bp, synthetic construct
  misc_feature 1..22: note = chemically synthesized
  source 1..22: mol_type = other DNA
ccccaatcattacttctgtcac

SEQ ID NO: 140666 - DNA, 22 bp, synthetic construct
  misc_feature 1..22: note = chemically synthesized
  source 1..22: mol_type = other DNA
cttctgtcacattgatagttaa

SEQ ID NO: 140667 - DNA, 22 bp, synthetic construct
  misc_feature 1..22: note = chemically synthesized
  source 1..22: mol_type = other DNA
ctgtcacattgatagttaaata

SEQ ID NO: 140668 - DNA, 22 bp, synthetic construct
  misc_feature 1..22: note = chemically synthesized
  source 1..22: mol_type = other DNA
tgtcacattgatagttaaataa

SEQ ID NO: 140669 - DNA, 22 bp, synthetic construct
  misc_feature 1..22: note = chemically synthesized
  source 1..22: mol_type = other DNA
tcacattgatagttaaataatt

SEQ ID NO: 140670 - DNA, 22 bp, synthetic construct
  misc_feature 1..22: note = chemically synthesized
  source 1..22: mol_type = other DNA
atagttaaataatttctgtgaa

SEQ ID NO: 140671 - DNA, 22 bp, synthetic construct
  misc_feature 1..22: note = chemically synthesized
  source 1..22: mol_type = other DNA
aataatttctgtgaatttattc

SEQ ID NO: 140672 - DNA, 22 bp, synthetic construct
  misc_feature 1..22: note = chemically synthesized
  source 1..22: mol_type = other DNA
ctgtgaatttattccttgattc

SEQ ID NO: 140673 - DNA, 22 bp, synthetic construct
  misc_feature 1..22: note = chemically synthesized
  source 1..22: mol_type = other DNA
tgtgaatttattccttgattct

SEQ ID NO: 140674 - DNA, 22 bp, synthetic construct
  misc_feature 1..22: note = chemically synthesized
  source 1..22: mol_type = other DNA
tgaatttattccttgattctaa

SEQ ID NO: 140675 - DNA, 22 bp, synthetic construct
  misc_feature 1..22: note = chemically synthesized
  source 1..22: mol_type = other DNA
attccttgattctaaaatatga

SEQ ID NO: 140676 - DNA, 22 bp, synthetic construct
  misc_feature 1..22: note = chemically synthesized
  source 1..22: mol_type = other DNA
ttccttgattctaaaatatgag

SEQ ID NO: 140677 - DNA, 22 bp, synthetic construct
  misc_feature 1..22: note = chemically synthesized
  source 1..22: mol_type = other DNA
cttgattctaaaatatgaggat

SEQ ID NO: 140678 - DNA, 22 bp, synthetic construct
  misc_feature 1..22: note = chemically synthesized
  source 1..22: mol_type = other DNA
gattctaaaatatgaggataat

SEQ ID NO: 140679 - DNA, 22 bp, synthetic construct
  misc_feature 1..22: note = chemically synthesized
  source 1..22: mol_type = other DNA
attctaaaatatgaggataatg

SEQ ID NO: 140680 - DNA, 22 bp, synthetic construct
  misc_feature 1..22: note = chemically synthesized
  source 1..22: mol_type = other DNA
taaaatatgaggataatgacaa

SEQ ID NO: 140681 - DNA, 22 bp, synthetic construct
  misc_feature 1..22: note = chemically synthesized
  source 1..22: mol_type = other DNA
aaatatgaggataatgacaatg

SEQ ID NO: 140682 - DNA, 22 bp, synthetic construct
  misc_feature 1..22: note = chemically synthesized
  source 1..22: mol_type = other DNA
taagggcagattaagtgatata

SEQ ID NO: 140683 - DNA, 22 bp, synthetic construct
  misc_feature 1..22: note = chemically synthesized
  source 1..22: mol_type = other DNA
agtgatatagcatgagcaatat

SEQ ID NO: 140684 - DNA, 22 bp, synthetic construct
  misc_feature 1..22: note = chemically synthesized
  source 1..22: mol_type = other DNA
ttcaggcacatggatcgaattg

SEQ ID NO: 140685 - DNA, 22 bp, synthetic construct
  misc_feature 1..22: note = chemically synthesized
  source 1..22: mol_type = other DNA
caggcacatggatcgaattgaa

SEQ ID NO: 140686 - DNA, 22 bp, synthetic construct
  misc_feature 1..22: note = chemically synthesized
  source 1..22: mol_type = other DNA
aggcacatggatcgaattgaat

SEQ ID NO: 140687 - DNA, 22 bp, synthetic construct
  misc_feature 1..22: note = chemically synthesized
  source 1..22: mol_type = other DNA
aatacactgtaaatcccaactt

SEQ ID NO: 140688 - DNA, 22 bp, synthetic construct
  misc_feature 1..22: note = chemically synthesized
  source 1..22: mol_type = other DNA
taaatcccaacttccagtttca

SEQ ID NO: 140689 - DNA, 22 bp, synthetic construct
  misc_feature 1..22: note = chemically synthesized
  source 1..22: mol_type = other DNA
ccagtttcagctctaccaagta

SEQ ID NO: 140690 - DNA, 22 bp, synthetic construct
  misc_feature 1..22: note = chemically synthesized
  source 1..22: mol_type = other DNA
cagtttcagctctaccaagtaa

SEQ ID NO: 140691 - DNA, 22 bp, synthetic construct
  misc_feature 1..22: note = chemically synthesized
  source 1..22: mol_type = other DNA
cagctctaccaagtaaagagct

SEQ ID NO: 140692 - DNA, 22 bp, synthetic construct
  misc_feature 1..22: note = chemically synthesized
  source 1..22: mol_type = other DNA
agctctaccaagtaaagagcta

SEQ ID NO: 140693 - DNA, 22 bp, synthetic construct
  misc_feature 1..22: note = chemically synthesized
  source 1..22: mol_type = other DNA
taccaagtaaagagctagcaag

SEQ ID NO: 140694 - DNA, 22 bp, synthetic construct
  misc_feature 1..22: note = chemically synthesized
  source 1..22: mol_type = other DNA
ccaagtaaagagctagcaagtc

SEQ ID NO: 140695 - DNA, 22 bp, synthetic construct
  misc_feature 1..22: note = chemically synthesized
  source 1..22: mol_type = other DNA
gcaagtcatcaaaatggggaca

SEQ ID NO: 140696 - DNA, 22 bp, synthetic construct
  misc_feature 1..22: note = chemically synthesized
  source 1..22: mol_type = other DNA
gaggaataatataccctgactc

SEQ ID NO: 140697 - DNA, 22 bp, synthetic construct
  misc_feature 1..22: note = chemically synthesized
  source 1..22: mol_type = other DNA
actcctagcctgattaatatat

SEQ ID NO: 140698 - DNA, 22 bp, synthetic construct
  misc_feature 1..22: note = chemically synthesized
  source 1..22: mol_type = other DNA
ctagcctgattaatatatcgat

SEQ ID NO: 140699 - DNA, 22 bp, synthetic construct
  misc_feature 1..22: note = chemically synthesized
  source 1..22: mol_type = other DNA
gcctgattaatatatcgattca

SEQ ID NO: 140700 - DNA, 22 bp, synthetic construct
  misc_feature 1..22: note = chemically synthesized
  source 1..22: mol_type = other DNA
attaatatatcgattcactttt

SEQ ID NO: 140701 - DNA, 22 bp, synthetic construct
  misc_feature 1..22: note = chemically synthesized
  source 1..22: mol_type = other DNA
atatatcgattcacttttttct

SEQ ID NO: 140702 - DNA, 22 bp, synthetic construct
  misc_feature 1..22: note = chemically synthesized
  source 1..22: mol_type = other DNA
acttttttctctgtttgatgac

SEQ ID NO: 140703 - DNA, 22 bp, synthetic construct
  misc_feature 1..22: note = chemically synthesized
  source 1..22: mol_type = other DNA
ttttctctgtttgatgacaaat

SEQ ID NO: 140704 - DNA, 22 bp, synthetic construct
  misc_feature 1..22: note = chemically synthesized
  source 1..22: mol_type = other DNA
tttctctgtttgatgacaaatt

SEQ ID NO: 140705 - DNA, 22 bp, synthetic construct
  misc_feature 1..22: note = chemically synthesized
  source 1..22: mol_type = other DNA
ttctctgtttgatgacaaattc

SEQ ID NO: 140706 - DNA, 22 bp, synthetic construct
  misc_feature 1..22: note = chemically synthesized
  source 1..22: mol_type = other DNA
tctctgtttgatgacaaattct

SEQ ID NO: 140707 - DNA, 22 bp, synthetic construct
  misc_feature 1..22: note = chemically synthesized
  source 1..22: mol_type = other DNA
ctctgtttgatgacaaattctg

SEQ ID NO: 140708 - DNA, 22 bp, synthetic construct
  misc_feature 1..22: note = chemically synthesized
  source 1..22: mol_type = other DNA
tctgtttgatgacaaattctgg

SEQ ID NO: 140709 - DNA, 22 bp, synthetic construct
  misc_feature 1..22: note = chemically synthesized
  source 1..22: mol_type = other DNA
tgtttgatgacaaattctggct

SEQ ID NO: 140710 - DNA, 22 bp, synthetic construct
  misc_feature 1..22: note = chemically synthesized
  source 1..22: mol_type = other DNA
tttgatgacaaattctggcttt

SEQ ID NO: 140711 - DNA, 22 bp, synthetic construct
  misc_feature 1..22: note = chemically synthesized
  source 1..22: mol_type = other DNA
gatgacaaattctggctttaaa

SEQ ID NO: 140712 - DNA, 22 bp, synthetic construct
  misc_feature 1..22: note = chemically synthesized
  source 1..22: mol_type = other DNA
atgacaaattctggctttaaat

SEQ ID NO: 140713 - DNA, 22 bp, synthetic construct
  misc_feature 1..22: note = chemically synthesized
  source 1..22: mol_type = other DNA
tggctttaaataattttaggat

SEQ ID NO: 140714 - DNA, 22 bp, synthetic construct
  misc_feature 1..22: note = chemically synthesized
  source 1..22: mol_type = other DNA
gctttaaataattttaggattt

SEQ ID NO: 140715 - DNA, 22 bp, synthetic construct
  misc_feature 1..22: note = chemically synthesized
  source 1..22: mol_type = other DNA
taaataattttaggattttagg

SEQ ID NO: 140716 - DNA, 22 bp, synthetic construct
  misc_feature 1..22: note = chemically synthesized
  source 1..22: mol_type = other DNA
aaataattttaggattttaggc

SEQ ID NO: 140717 - DNA, 22 bp, synthetic construct
  misc_feature 1..22: note = chemically synthesized
  source 1..22: mol_type = other DNA
aataattttaggattttaggct

SEQ ID NO: 140718 - DNA, 22 bp, synthetic construct
  misc_feature 1..22: note = chemically synthesized
  source 1..22: mol_type = other DNA
taggattttaggcttctcagct

SEQ ID NO: 140719 - DNA, 22 bp, synthetic construct
  misc_feature 1..22: note = chemically synthesized
  source 1..22: mol_type = other DNA
aggattttaggcttctcagctc

SEQ ID NO: 140720 - DNA, 22 bp, synthetic construct
  misc_feature 1..22: note = chemically synthesized
  source 1..22: mol_type = other DNA
ggattttaggcttctcagctcc

SEQ ID NO: 140721 - DNA, 22 bp, synthetic construct
  misc_feature 1..22: note = chemically synthesized
  source 1..22: mol_type = other DNA
taggcttctcagctcccttccc

SEQ ID NO: 140722 - DNA, 22 bp, synthetic construct
  misc_feature 1..22: note = chemically synthesized
  source 1..22: mol_type = other DNA
aggcttctcagctcccttccca

SEQ ID NO: 140723 - DNA, 22 bp, synthetic construct
  misc_feature 1..22: note = chemically synthesized
  source 1..22: mol_type = other DNA
ggcttctcagctcccttcccag

SEQ ID NO: 140724 - DNA, 22 bp, synthetic construct
  misc_feature 1..22: note = chemically synthesized
  source 1..22: mol_type = other DNA
ctcagctcccttcccagtgaga

SEQ ID NO: 140725 - DNA, 22 bp, synthetic construct
  misc_feature 1..22: note = chemically synthesized
  source 1..22: mol_type = other DNA
tcagctcccttcccagtgagaa

SEQ ID NO: 140726 - DNA, 22 bp, synthetic construct
  misc_feature 1..22: note = chemically synthesized
  source 1..22: mol_type = other DNA
agctcccttcccagtgagaagt

SEQ ID NO: 140727 - DNA, 22 bp, synthetic construct
  misc_feature 1..22: note = chemically synthesized
  source 1..22: mol_type = other DNA
ccttcccagtgagaagtataag

SEQ ID NO: 140728 - DNA, 22 bp, synthetic construct
  misc_feature 1..22: note = chemically synthesized
  source 1..22: mol_type = other DNA
cccagtgagaagtataagcagg

SEQ ID NO: 140729 - DNA, 22 bp, synthetic construct
  misc_feature 1..22: note = chemically synthesized
  source 1..22: mol_type = other DNA
ccagtgagaagtataagcagga

SEQ ID NO: 140730 - DNA, 22 bp, synthetic construct
  misc_feature 1..22: note = chemically synthesized
  source 1..22: mol_type = other DNA
acaaagtagccaatgtcccctg

SEQ ID NO: 140731 - DNA, 22 bp, synthetic construct
  misc_feature 1..22: note = chemically synthesized
  source 1..22: mol_type = other DNA
tggtcatagagaaatgaaaaga

SEQ ID NO: 140732 - DNA, 22 bp, synthetic construct
  misc_feature 1..22: note = chemically synthesized
  source 1..22: mol_type = other DNA
tctggaagcactggatgtaatc

SEQ ID NO: 140733 - DNA, 22 bp, synthetic construct
  misc_feature 1..22: note = chemically synthesized
  source 1..22: mol_type = other DNA
tggaagcactggatgtaatctt

SEQ ID NO: 140734 - DNA, 22 bp, synthetic construct
  misc_feature 1..22: note = chemically synthesized
  source 1..22: mol_type = other DNA
gaagcactggatgtaatctttt

SEQ ID NO: 140735 - DNA, 22 bp, synthetic construct
  misc_feature 1..22: note = chemically synthesized
  source 1..22: mol_type = other DNA
gatgtaatcttttctgtctgtc

SEQ ID NO: 140736 - DNA, 22 bp, synthetic construct
  misc_feature 1..22: note = chemically synthesized
  source 1..22: mol_type = other DNA
ttctgtctgtcctctctaggga

SEQ ID NO: 140737 - DNA, 22 bp, synthetic construct
  misc_feature 1..22: note = chemically synthesized
  source 1..22: mol_type = other DNA
tctgtctgtcctctctagggaa

SEQ ID NO: 140738 - DNA, 22 bp, synthetic construct
  misc_feature 1..22: note = chemically synthesized
  source 1..22: mol_type = other DNA
ctgtctgtcctctctagggaat

SEQ ID NO: 140739 - DNA, 22 bp, synthetic construct
  misc_feature 1..22: note = chemically synthesized
  source 1..22: mol_type = other DNA
tgtctgtcctctctagggaatc

SEQ ID NO: 140740 - DNA, 22 bp, synthetic construct
  misc_feature 1..22: note = chemically synthesized
  source 1..22: mol_type = other DNA
tctgtcctctctagggaatcac

SEQ ID NO: 140741 - DNA, 22 bp, synthetic construct
  misc_feature 1..22: note = chemically synthesized
  source 1..22: mol_type = other DNA
tcctctctagggaatcacccca

SEQ ID NO: 140742 - DNA, 22 bp, synthetic construct
  misc_feature 1..22: note = chemically synthesized
  source 1..22: mol_type = other DNA
tctagggaatcaccccaaggta

SEQ ID NO: 140743 - DNA, 22 bp, synthetic construct
  misc_feature 1..22: note = chemically synthesized
  source 1..22: mol_type = other DNA
tagggaatcaccccaaggtact

SEQ ID NO: 140744 - DNA, 22 bp, synthetic construct
  misc_feature 1..22: note = chemically synthesized
  source 1..22: mol_type = other DNA
gggaatcaccccaaggtactgt

SEQ ID NO: 140745 - DNA, 22 bp, synthetic construct
  misc_feature 1..22: note = chemically synthesized
  source 1..22: mol_type = other DNA
tactttgggattaaggctttag

SEQ ID NO: 140746 - DNA, 22 bp, synthetic construct
  misc_feature 1..22: note = chemically synthesized
  source 1..22: mol_type = other DNA
tgggattaaggctttagtccca

SEQ ID NO: 140747 - DNA, 22 bp, synthetic construct
  misc_feature 1..22: note = chemically synthesized
  source 1..22: mol_type = other DNA
gggattaaggctttagtcccac

SEQ ID NO: 140748 - DNA, 22 bp, synthetic construct
  misc_feature 1..22: note = chemically synthesized
  source 1..22: mol_type = other DNA
ggattaaggctttagtcccact

SEQ ID NO: 140749 - DNA, 22 bp, synthetic construct
  misc_feature 1..22: note = chemically synthesized
  source 1..22: mol_type = other DNA
aggctttagtcccactgtggac

SEQ ID NO: 140750 - DNA, 22 bp, synthetic construct
  misc_feature 1..22: note = chemically synthesized
  source 1..22: mol_type = other DNA
tagtcccactgtggactacttg

SEQ ID NO: 140751 - DNA, 22 bp, synthetic construct
  misc_feature 1..22: note = chemically synthesized
  source 1..22: mol_type = other DNA
agtcccactgtggactacttgc

SEQ ID NO: 140752 - DNA, 22 bp, synthetic construct
  misc_feature 1..22: note = chemically synthesized
  source 1..22: mol_type = other DNA
gtcccactgtggactacttgct

SEQ ID NO: 140753 - DNA, 22 bp, synthetic construct
  misc_feature 1..22: note = chemically synthesized
  source 1..22: mol_type = other DNA
tggactacttgctattctgttc

SEQ ID NO: 140754 - DNA, 22 bp, synthetic construct
  misc_feature 1..22: note = chemically synthesized
  source 1..22: mol_type = other DNA
cttgctattctgttcagtttct

SEQ ID NO: 140755 - DNA, 22 bp, synthetic construct
  misc_feature 1..22: note = chemically synthesized
  source 1..22: mol_type = other DNA
gctattctgttcagtttctaga

SEQ ID NO: 140756 - DNA, 22 bp, synthetic construct
  misc_feature 1..22: note = chemically synthesized
  source 1..22: mol_type = other DNA
ctattctgttcagtttctagaa

SEQ ID NO: 140757 - DNA, 22 bp, synthetic construct
  misc_feature 1..22: note = chemically synthesized
  source 1..22: mol_type = other DNA
ttctgttcagtttctagaagga

SEQ ID NO: 140758 - DNA, 22 bp, synthetic construct
  misc_feature 1..22: note = chemically synthesized
  source 1..22: mol_type = other DNA
tgttcagtttctagaaggaact

SEQ ID NO: 140759 - DNA, 22 bp, synthetic construct
  misc_feature 1..22: note = chemically synthesized
  source 1..22: mol_type = other DNA
ttcagtttctagaaggaactat

SEQ ID NO: 140760 - DNA, 22 bp, synthetic construct
  misc_feature 1..22: note = chemically synthesized
  source 1..22: mol_type = other DNA
agtttctagaaggaactatgta

SEQ ID NO: 140761 - DNA, 22 bp, synthetic construct
  misc_feature 1..22: note = chemically synthesized
  source 1..22: mol_type = other DNA
ctagaaggaactatgtacggtt

SEQ ID NO: 140762 - DNA, 22 bp, synthetic construct
  misc_feature 1..22: note = chemically synthesized
  source 1..22: mol_type = other DNA
tagaaggaactatgtacggttt

SEQ ID NO: 140763 - DNA, 22 bp, synthetic construct
  misc_feature 1..22: note = chemically synthesized
  source 1..22: mol_type = other DNA
gaaggaactatgtacggttttt

SEQ ID NO: 140764 - DNA, 22 bp, synthetic construct
  misc_feature 1..22: note = chemically synthesized
  source 1..22: mol_type = other DNA
tgtacggtttttgtctccctag

SEQ ID NO: 140765 - DNA, 22 bp, synthetic construct
  misc_feature 1..22: note = chemically synthesized
  source 1..22: mol_type = other DNA
ttgtctccctagagaaactaag

SEQ ID NO: 140766 - DNA, 22 bp, synthetic construct
  misc_feature 1..22: note = chemically synthesized
  source 1..22: mol_type = other DNA
tgtctccctagagaaactaagg

SEQ ID NO: 140767 - DNA, 22 bp, synthetic construct
  misc_feature 1..22: note = chemically synthesized
  source 1..22: mol_type = other DNA
gtctccctagagaaactaaggt

SEQ ID NO: 140768 - DNA, 22 bp, synthetic construct
  misc_feature 1..22: note = chemically synthesized
  source 1..22: mol_type = other DNA
tctccctagagaaactaaggta

SEQ ID NO: 140769 - DNA, 22 bp, synthetic construct
  misc_feature 1..22: note = chemically synthesized
  source 1..22: mol_type = other DNA
cctagagaaactaaggtacaga

SEQ ID NO: 140770 - DNA, 22 bp, synthetic construct
  misc_feature 1..22: note = chemically synthesized
  source 1..22: mol_type = other DNA
gagaaactaaggtacagaagtt

SEQ ID NO: 140771 - DNA, 22 bp, synthetic construct
  misc_feature 1..22: note = chemically synthesized
  source 1..22: mol_type = other DNA
aggtacagaagttttgtttaca

SEQ ID NO: 140772 - DNA, 22 bp, synthetic construct
  misc_feature 1..22: note = chemically synthesized
  source 1..22: mol_type = other DNA
tgtttacaatgcactccttaag

SEQ ID NO: 140773 - DNA, 22 bp, synthetic construct
  misc_feature 1..22: note = chemically synthesized
  source 1..22: mol_type = other DNA
gtttacaatgcactccttaaga

SEQ ID NO: 140774 - DNA, 22 bp, synthetic construct
  misc_feature 1..22: note = chemically synthesized
  source 1..22: mol_type = other DNA
tttacaatgcactccttaagag

SEQ ID NO: 140775 - DNA, 22 bp, synthetic construct
  misc_feature 1..22: note = chemically synthesized
  source 1..22: mol_type = other DNA
acaatgcactccttaagagagc

SEQ ID NO: 140776 - DNA, 22 bp, synthetic construct
  misc_feature 1..22: note = chemically synthesized
  source 1..22: mol_type = other DNA
caatgcactccttaagagagct

SEQ ID NO: 140777 - DNA, 22 bp, synthetic construct
  misc_feature 1..22: note = chemically synthesized
  source 1..22: mol_type = other DNA
cttaagagagctagaactgggt

SEQ ID NO: 140778 - DNA, 22 bp, synthetic construct
  misc_feature 1..22: note = chemically synthesized
  source 1..22: mol_type = other DNA
aagagagctagaactgggtgag

SEQ ID NO: 140779 - DNA, 22 bp, synthetic construct
  misc_feature 1..22: note = chemically synthesized
  source 1..22: mol_type = other DNA
agagagctagaactgggtgaga

SEQ ID NO: 140780 - DNA, 22 bp, synthetic construct
  misc_feature 1..22: note = chemically synthesized
  source 1..22: mol_type = other DNA
gaactgggtgagattctgtttt

SEQ ID NO: 140781 - DNA, 22 bp, synthetic construct
  misc_feature 1..22: note = chemically synthesized
  source 1..22: mol_type = other DNA
ggtgagattctgttttaacagc

SEQ ID NO: 140782 - DNA, 22 bp, synthetic construct
  misc_feature 1..22: note = chemically synthesized
  source 1..22: mol_type = other DNA
tgttttaacagctttattttct

SEQ ID NO: 140783 - DNA, 22 bp, synthetic construct
  misc_feature 1..22: note = chemically synthesized
  source 1..22: mol_type = other DNA
ttttaacagctttattttcttt

SEQ ID NO: 140784 - DNA, 22 bp, synthetic construct
  misc_feature 1..22: note = chemically synthesized
  source 1..22: mol_type = other DNA
taacagctttattttcttttcc

SEQ ID NO: 140785 - DNA, 22 bp, synthetic construct
  misc_feature 1..22: note = chemically synthesized
  source 1..22: mol_type = other DNA
aacagctttattttcttttcct

SEQ ID NO: 140786 - DNA, 22 bp, synthetic construct
  misc_feature 1..22: note = chemically synthesized
  source 1..22: mol_type = other DNA
acagctttattttcttttcctt

SEQ ID NO: 140787 - DNA, 22 bp, synthetic construct
  misc_feature 1..22: note = chemically synthesized
  source 1..22: mol_type = other DNA
tattttcttttccttggccctg

SEQ ID NO: 140788 - DNA, 22 bp, synthetic construct
  misc_feature 1..22: note = chemically synthesized
  source 1..22: mol_type = other DNA
attttcttttccttggccctgt

SEQ ID NO: 140789 - DNA, 22 bp, synthetic construct
  misc_feature 1..22: note = chemically synthesized
  source 1..22: mol_type = other DNA
ttttcttttccttggccctgtt

SEQ ID NO: 140790 - DNA, 22 bp, synthetic construct
  misc_feature 1..22: note = chemically synthesized
  source 1..22: mol_type = other DNA
tcttttccttggccctgttttt

SEQ ID NO: 140791 - DNA, 22 bp, synthetic construct
  misc_feature 1..22: note = chemically synthesized
  source 1..22: mol_type = other DNA
cttttccttggccctgtttttg

SEQ ID NO: 140792 - DNA, 22 bp, synthetic construct
  misc_feature 1..22: note = chemically synthesized
  source 1..22: mol_type = other DNA
ttttccttggccctgtttttgt

SEQ ID NO: 140793 - DNA, 22 bp, synthetic construct
  misc_feature 1..22: note = chemically synthesized
  source 1..22: mol_type = other DNA
ttccttggccctgtttttgtca

SEQ ID NO: 140794 - DNA, 22 bp, synthetic construct
  misc_feature 1..22: note = chemically synthesized
  source 1..22: mol_type = other DNA
tccttggccctgtttttgtcac

SEQ ID NO: 140795 - DNA, 22 bp, synthetic construct
  misc_feature 1..22: note = chemically synthesized
  source 1..22: mol_type = other DNA
ccttggccctgtttttgtcact

SEQ ID NO: 140796 - DNA, 22 bp, synthetic construct
  misc_feature 1..22: note = chemically synthesized
  source 1..22: mol_type = other DNA
cttggccctgtttttgtcactg

SEQ ID NO: 140797 - DNA, 22 bp, synthetic construct
  misc_feature 1..22: note = chemically synthesized
  source 1..22: mol_type = other DNA
ggccctgtttttgtcactgtca

SEQ ID NO: 140798 - DNA, 22 bp, synthetic construct
  misc_feature 1..22: note = chemically synthesized
  source 1..22: mol_type = other DNA
gccctgtttttgtcactgtcac

SEQ ID NO: 140799 - DNA, 22 bp, synthetic construct
  misc_feature 1..22: note = chemically synthesized
  source 1..22: mol_type = other DNA
tttttgtcactgtcaccacctt

SEQ ID NO: 140800 - DNA, 22 bp, synthetic construct
  misc_feature 1..22: note = chemically synthesized
  source 1..22: mol_type = other DNA
ttgtcactgtcaccacctttaa

SEQ ID NO: 140801 - DNA, 22 bp, synthetic construct
  misc_feature 1..22: note = chemically synthesized
  source 1..22: mol_type = other DNA
tgtcactgtcaccacctttaag

SEQ ID NO: 140802 - DNA, 22 bp, synthetic construct
  misc_feature 1..22: note = chemically synthesized
  source 1..22: mol_type = other DNA
gtcactgtcaccacctttaagg

SEQ ID NO: 140803 - DNA, 22 bp, synthetic construct
  misc_feature 1..22: note = chemically synthesized
  source 1..22: mol_type = other DNA
tcactgtcaccacctttaaggc

SEQ ID NO: 140804 - DNA, 22 bp, synthetic construct
  misc_feature 1..22: note = chemically synthesized
  source 1..22: mol_type = other DNA
tcaccacctttaaggcaaatgt

SEQ ID NO: 140805 - DNA, 22 bp, synthetic construct
  misc_feature 1..22: note = chemically synthesized
  source 1..22: mol_type = other DNA
taaggcaaatgttaaatgcgct

SEQ ID NO: 140806 - DNA, 22 bp, synthetic construct
  misc_feature 1..22: note = chemically synthesized
  source 1..22: mol_type = other DNA
aaggcaaatgttaaatgcgctt

SEQ ID NO: 140807 - DNA, 22 bp, synthetic construct
  misc_feature 1..22: note = chemically synthesized
  source 1..22: mol_type = other DNA
aggcaaatgttaaatgcgcttt

SEQ ID NO: 140808 - DNA, 22 bp, synthetic construct
  misc_feature 1..22: note = chemically synthesized
  source 1..22: mol_type = other DNA
aatgcgctttggctgaaacttt

SEQ ID NO: 140809 - DNA, 22 bp, synthetic construct
  misc_feature 1..22: note = chemically synthesized
  source 1..22: mol_type = other DNA
tggctgaaactttttttcctat

SEQ ID NO: 140810 - DNA, 22 bp, synthetic construct
  misc_feature 1..22: note = chemically synthesized
  source 1..22: mol_type = other DNA
ggctgaaactttttttcctatt

SEQ ID NO: 140811 - DNA, 22 bp, synthetic construct
  misc_feature 1..22: note = chemically synthesized
  source 1..22: mol_type = other DNA
gctgaaactttttttcctattt

SEQ ID NO: 140812 - DNA, 22 bp, synthetic construct
  misc_feature 1..22: note = chemically synthesized
  source 1..22: mol_type = other DNA
aaactttttttcctattttgag

SEQ ID NO: 140813 - DNA, 22 bp, synthetic construct
  misc_feature 1..22: note = chemically synthesized
  source 1..22: mol_type = other DNA
tttttcctattttgagatttgc

SEQ ID NO: 140814 - DNA, 22 bp, synthetic construct
  misc_feature 1..22: note = chemically synthesized
  source 1..22: mol_type = other DNA
ttttcctattttgagatttgct

SEQ ID NO: 140815 - DNA, 22 bp, synthetic construct
  misc_feature 1..22: note = chemically synthesized
  source 1..22: mol_type = other DNA
tttcctattttgagatttgctc

SEQ ID NO: 140816 - DNA, 22 bp, synthetic construct
  misc_feature 1..22: note = chemically synthesized
  source 1..22: mol_type = other DNA
ttcctattttgagatttgctcc

SEQ ID NO: 140817 - DNA, 22 bp, synthetic construct
  misc_feature 1..22: note = chemically synthesized
  source 1..22: mol_type = other DNA
tcctattttgagatttgctcct

SEQ ID NO: 140818 - DNA, 22 bp, synthetic construct
  misc_feature 1..22: note = chemically synthesized
  source 1..22: mol_type = other DNA
cctattttgagatttgctcctt

SEQ ID NO: 140819 - DNA, 22 bp, synthetic construct
  misc_feature 1..22: note = chemically synthesized
  source 1..22: mol_type = other DNA
ctattttgagatttgctccttt

SEQ ID NO: 140820 - DNA, 22 bp, synthetic construct
  misc_feature 1..22: note = chemically synthesized
  source 1..22: mol_type = other DNA
ttttgagatttgctcctttata

SEQ ID NO: 140821 - DNA, 22 bp, synthetic construct
  misc_feature 1..22: note = chemically synthesized
  source 1..22: mol_type = other DNA
tgagatttgctcctttatatga

SEQ ID NO: 140822 - DNA, 22 bp, synthetic construct
  misc_feature 1..22: note = chemically synthesized
  source 1..22: mol_type = other DNA
gagatttgctcctttatatgag

SEQ ID NO: 140823 - DNA, 22 bp, synthetic construct
  misc_feature 1..22: note = chemically synthesized
  source 1..22: mol_type = other DNA
agatttgctcctttatatgagg

SEQ ID NO: 140824 - DNA, 22 bp, synthetic construct
  misc_feature 1..22: note = chemically synthesized
  source 1..22: mol_type = other DNA
gctcctttatatgaggctttct

SEQ ID NO: 140825 - DNA, 22 bp, synthetic construct
  misc_feature 1..22: note = chemically synthesized
  source 1..22: mol_type = other DNA
ctcctttatatgaggctttctt

SEQ ID NO: 140826 - DNA, 22 bp, synthetic construct
  misc_feature 1..22: note = chemically synthesized
  source 1..22: mol_type = other DNA
ctttatatgaggctttcttgga

SEQ ID NO: 140827 - DNA, 22 bp, synthetic construct
  misc_feature 1..22: note = chemically synthesized
  source 1..22: mol_type = other DNA
tatatgaggctttcttggaaaa

SEQ ID NO: 140828 - DNA, 22 bp, synthetic construct
  misc_feature 1..22: note = chemically synthesized
  source 1..22: mol_type = other DNA
atatgaggctttcttggaaaag

SEQ ID NO: 140829 - DNA, 22 bp, synthetic construct
  misc_feature 1..22: note = chemically synthesized
  source 1..22: mol_type = other DNA
tatgaggctttcttggaaaagg

SEQ ID NO: 140830 - DNA, 22 bp, synthetic construct
  misc_feature 1..22: note = chemically synthesized
  source 1..22: mol_type = other DNA
tcttggaaaaggagaatgggag

SEQ ID NO: 140831 - DNA, 22 bp, synthetic construct
  misc_feature 1..22: note = chemically synthesized
  source 1..22: mol_type = other DNA
cttggaaaaggagaatgggaga

SEQ ID NO: 140832 - DNA, 22 bp, synthetic construct
  misc_feature 1..22: note = chemically synthesized
  source 1..22: mol_type = other DNA
ttggaaaaggagaatgggagag

SEQ ID NO: 140833 - DNA, 22 bp, synthetic construct
  misc_feature 1..22: note = chemically synthesized
  source 1..22: mol_type = other DNA
ggaaaaggagaatgggagagat

SEQ ID NO: 140834 - DNA, 22 bp, synthetic construct
  misc_feature 1..22: note = chemically synthesized
  source 1..22: mol_type = other DNA
gaaaaggagaatgggagagatg

SEQ ID NO: 140835 - DNA, 22 bp, synthetic construct
  misc_feature 1..22: note = chemically synthesized
  source 1..22: mol_type = other DNA
tggaagatgatgaagagggtaa

SEQ ID NO: 140836 - DNA, 22 bp, synthetic construct
  misc_feature 1..22: note = chemically synthesized
  source 1..22: mol_type = other DNA
ggaagatgatgaagagggtaaa

SEQ ID NO: 140837 - DNA, 22 bp, synthetic construct
  misc_feature 1..22: note = chemically synthesized
  source 1..22: mol_type = other DNA
gaagatgatgaagagggtaaaa

SEQ ID NO: 140838 - DNA, 22 bp, synthetic construct
  misc_feature 1..22: note = chemically synthesized
  source 1..22: mol_type = other DNA
gtgttgcagatagatgaggagc

SEQ ID NO: 140839 - DNA, 22 bp, synthetic construct
  misc_feature 1..22: note = chemically synthesized
  source 1..22: mol_type = other DNA
tgttgcagatagatgaggagcc

SEQ ID NO: 140840 - DNA, 22 bp, synthetic construct
  misc_feature 1..22: note = chemically synthesized
  source 1..22: mol_type = other DNA
cagatagatgaggagccaacaa

SEQ ID NO: 140841 - DNA, 22 bp, synthetic construct
  misc_feature 1..22: note = chemically synthesized
  source 1..22: mol_type = other DNA
aggatccagcacacattatcac

SEQ ID NO: 140842 - DNA, 22 bp, synthetic construct
  misc_feature 1..22: note = chemically synthesized
  source 1..22: mol_type = other DNA
tcacaaacttagtgtccatcca

SEQ ID NO: 140843 - DNA, 22 bp, synthetic construct
  misc_feature 1..22: note = chemically synthesized
  source 1..22: mol_type = other DNA
agtgtccatccatcactgctga

SEQ ID NO: 140844 - DNA, 22 bp, synthetic construct
  misc_feature 1..22: note = chemically synthesized
  source 1..22: mol_type = other DNA
gtgtccatccatcactgctgac

SEQ ID NO: 140845 - DNA, 22 bp, synthetic construct
  misc_feature 1..22: note = chemically synthesized
  source 1..22: mol_type = other DNA
ctgaccctctccggacctgact

SEQ ID NO: 140846 - DNA, 22 bp, synthetic construct
  misc_feature 1..22: note = chemically synthesized
  source 1..22: mol_type = other DNA
accctctccggacctgactcca

SEQ ID NO: 140847 - DNA, 22 bp, synthetic construct
  misc_feature 1..22: note = chemically synthesized
  source 1..22: mol_type = other DNA
tccggacctgactccacccctg

SEQ ID NO: 140848 - DNA, 22 bp, synthetic construct
  misc_feature 1..22: note = chemically synthesized
  source 1..22: mol_type = other DNA
cggacctgactccacccctgag

SEQ ID NO: 140849 - DNA, 22 bp, synthetic construct
  misc_feature 1..22: note = chemically synthesized
  source 1..22: mol_type = other DNA
actccacccctgagggacacag

SEQ ID NO: 140850 - DNA, 22 bp, synthetic construct
  misc_feature 1..22: note = chemically synthesized
  source 1..22: mol_type = other DNA
cacccctgagggacacaggtca

SEQ ID NO: 140851 - DNA, 22 bp, synthetic construct
  misc_feature 1..22: note = chemically synthesized
  source 1..22: mol_type = other DNA
agggacacaggtcagccttgac

SEQ ID NO: 140852 - DNA, 22 bp, synthetic construct
  misc_feature 1..22: note = chemically synthesized
  source 1..22: mol_type = other DNA
gaccaatgacttttaagtacca

SEQ ID NO: 140853 - DNA, 22 bp, synthetic construct
  misc_feature 1..22: note = chemically synthesized
  source 1..22: mol_type = other DNA
accaatgacttttaagtaccat

SEQ ID NO: 140854 - DNA, 22 bp, synthetic construct
  misc_feature 1..22: note = chemically synthesized
  source 1..22: mol_type = other DNA
ttaagtaccatggagaacaggg

SEQ ID NO: 140855 - DNA, 22 bp, synthetic construct
  misc_feature 1..22: note = chemically synthesized
  source 1..22: mol_type = other DNA
taagtaccatggagaacagggg

SEQ ID NO: 140856 - DNA, 22 bp, synthetic construct
  misc_feature 1..22: note = chemically synthesized
  source 1..22: mol_type = other DNA
aagtaccatggagaacaggggg

SEQ ID NO: 140857 - DNA, 22 bp, synthetic construct
  misc_feature 1..22: note = chemically synthesized
  source 1..22: mol_type = other DNA
agtaccatggagaacagggggc

SEQ ID NO: 140858 - DNA, 22 bp, synthetic construct
  misc_feature 1..22: note = chemically synthesized
  source 1..22: mol_type = other DNA
cggcagtaaagaataaaaggcc

SEQ ID NO: 140859 - DNA, 22 bp, synthetic construct
  misc_feature 1..22: note = chemically synthesized
  source 1..22: mol_type = other DNA
ggcagtaaagaataaaaggcca

SEQ ID NO: 140860 - DNA, 22 bp, synthetic construct
  misc_feature 1..22: note = chemically synthesized
  source 1..22: mol_type = other DNA
cttccgacacagctgcaatcac

SEQ ID NO: 140861 - DNA, 22 bp, synthetic construct
  misc_feature 1..22: note = chemically synthesized
  source 1..22: mol_type = other DNA
ccgacacagctgcaatcactag

SEQ ID NO: 140862 - DNA, 22 bp, synthetic construct
  misc_feature 1..22: note = chemically synthesized
  source 1..22: mol_type = other DNA
cgacacagctgcaatcactagc

SEQ ID NO: 140863 - DNA, 22 bp, synthetic construct
  misc_feature 1..22: note = chemically synthesized
  source 1..22: mol_type = other DNA
caatcactagcaagctctcagg

SEQ ID NO: 140864 - DNA, 22 bp, synthetic construct
  misc_feature 1..22: note = chemically synthesized
  source 1..22: mol_type = other DNA
gcaagctctcaggcctggcatc

SEQ ID NO: 140865 - DNA, 22 bp, synthetic construct
  misc_feature 1..22: note = chemically synthesized
  source 1..22: mol_type = other DNA
tcaggcctggcatcatggtgca

SEQ ID NO: 140866 - DNA, 22 bp, synthetic construct
  misc_feature 1..22: note = chemically synthesized
  source 1..22: mol_type = other DNA
aggcctggcatcatggtgcatt

SEQ ID NO: 140867 - DNA, 22 bp, synthetic construct
  misc_feature 1..22: note = chemically synthesized
  source 1..22: mol_type = other DNA
gcatcatggtgcattttactgc

SEQ ID NO: 140868 - DNA, 22 bp, synthetic construct
  misc_feature 1..22: note = chemically synthesized
  source 1..22: mol_type = other DNA
tactgctgaggagaaggctgcc

SEQ ID NO: 140869 - DNA, 22 bp, synthetic construct
  misc_feature 1..22: note = chemically synthesized
  source 1..22: mol_type = other DNA
actgctgaggagaaggctgccg

SEQ ID NO: 140870 - DNA, 22 bp, synthetic construct
  misc_feature 1..22: note = chemically synthesized
  source 1..22: mol_type = other DNA
ctgctgaggagaaggctgccgt

SEQ ID NO: 140871 - DNA, 22 bp, synthetic construct
  misc_feature 1..22: note = chemically synthesized
  source 1..22: mol_type = other DNA
ctgaggagaaggctgccgtcac

SEQ ID NO: 140872 - DNA, 22 bp, synthetic construct
  misc_feature 1..22: note = chemically synthesized
  source 1..22: mol_type = other DNA
aggagaaggctgccgtcactag

SEQ ID NO: 140873 - DNA, 22 bp, synthetic construct
  misc_feature 1..22: note = chemically synthesized
  source 1..22: mol_type = other DNA
ccgtcactagcctgtggagcaa

SEQ ID NO: 140874 - DNA, 22 bp, synthetic construct
  misc_feature 1..22: note = chemically synthesized
  source 1..22: mol_type = other DNA
gcctgtggagcaagatgaatgt

SEQ ID NO: 140875 - DNA, 22 bp, synthetic construct
  misc_feature 1..22: note = chemically synthesized
  source 1..22: mol_type = other DNA
tggagcaagatgaatgtggaag

SEQ ID NO: 140876 - DNA, 22 bp, synthetic construct
  misc_feature 1..22: note = chemically synthesized
  source 1..22: mol_type = other DNA
gaggtgaagccttgggcaggta

SEQ ID NO: 140877 - DNA, 22 bp, synthetic construct
  misc_feature 1..22: note = chemically synthesized
  source 1..22: mol_type = other DNA
gggcaggtaagcattggttctc

SEQ ID NO: 140878 - DNA, 22 bp, synthetic construct
  misc_feature 1..22: note = chemically synthesized
  source 1..22: mol_type = other DNA
ggcaggtaagcattggttctca

SEQ ID NO: 140879 - DNA, 22 bp, synthetic construct
  misc_feature 1..22: note = chemically synthesized
  source 1..22: mol_type = other DNA
gttctcaatgcatgggaatgaa

SEQ ID NO: 140880 - DNA, 22 bp, synthetic construct
  misc_feature 1..22: note = chemically synthesized
  source 1..22: mol_type = other DNA
tcaatgcatgggaatgaagggt

SEQ ID NO: 140881 - DNA, 22 bp, synthetic construct
  misc_feature 1..22: note = chemically synthesized
  source 1..22: mol_type = other DNA
aatgcatgggaatgaagggtga

SEQ ID NO: 140882 - DNA, 22 bp, synthetic construct
  misc_feature 1..22: note = chemically synthesized
  source 1..22: mol_type = other DNA
ccctagcaagttgattgggaaa

SEQ ID NO: 140883 - DNA, 22 bp, synthetic construct
  misc_feature 1..22: note = chemically synthesized
  source 1..22: mol_type = other DNA
gcaagttgattgggaaagtcct

SEQ ID NO: 140884 - DNA, 22 bp, synthetic construct
  misc_feature 1..22: note = chemically synthesized
  source 1..22: mol_type = other DNA
attgggaaagtcctcaagattt

SEQ ID NO: 140885 - DNA, 22 bp, synthetic construct
  misc_feature 1..22: note = chemically synthesized
  source 1..22: mol_type = other DNA
ggaaagtcctcaagattttttg

SEQ ID NO: 140886 - DNA, 22 bp, synthetic construct
  misc_feature 1..22: note = chemically synthesized
  source 1..22: mol_type = other DNA
aagattttttgcatctctaatt

SEQ ID NO: 140887 - DNA, 22 bp, synthetic construct
  misc_feature 1..22: note = chemically synthesized
  source 1..22: mol_type = other DNA
tttgcatctctaattttgtatc

SEQ ID NO: 140888 - DNA, 22 bp, synthetic construct
  misc_feature 1..22: note = chemically synthesized
  source 1..22: mol_type = other DNA
ttgcatctctaattttgtatct

SEQ ID NO: 140889 - DNA, 22 bp, synthetic construct
  misc_feature 1..22: note = chemically synthesized
  source 1..22: mol_type = other DNA
tgcatctctaattttgtatctg

SEQ ID NO: 140890 - DNA, 22 bp, synthetic construct
  misc_feature 1..22: note = chemically synthesized
  source 1..22: mol_type = other DNA
gcatctctaattttgtatctga

SEQ ID NO: 140891 - DNA, 22 bp, synthetic construct
  misc_feature 1..22: note = chemically synthesized
  source 1..22: mol_type = other DNA
catctctaattttgtatctgat

SEQ ID NO: 140892 - DNA, 22 bp, synthetic construct
  misc_feature 1..22: note = chemically synthesized
  source 1..22: mol_type = other DNA
taattttgtatctgatatggtg

SEQ ID NO: 140893 - DNA, 22 bp, synthetic construct
  misc_feature 1..22: note = chemically synthesized
  source 1..22: mol_type = other DNA
attttgtatctgatatggtgtc

SEQ ID NO: 140894 - DNA, 22 bp, synthetic construct
  misc_feature 1..22: note = chemically synthesized
  source 1..22: mol_type = other DNA
tgtatctgatatggtgtcattt

SEQ ID NO: 140895 - DNA, 22 bp, synthetic construct
  misc_feature 1..22: note = chemically synthesized
  source 1..22: mol_type = other DNA
gtatctgatatggtgtcatttc

SEQ ID NO: 140896 - DNA, 22 bp, synthetic construct
  misc_feature 1..22: note = chemically synthesized
  source 1..22: mol_type = other DNA
tatctgatatggtgtcatttca

SEQ ID NO: 140897 - DNA, 22 bp, synthetic construct
  misc_feature 1..22: note = chemically synthesized
  source 1..22: mol_type = other DNA
atatggtgtcatttcatagact

SEQ ID NO: 140898 - DNA, 22 bp, synthetic construct
  misc_feature 1..22: note = chemically synthesized
  source 1..22: mol_type = other DNA
catagactcctcgttgtttacc

SEQ ID NO: 140899 - DNA, 22 bp, synthetic construct
  misc_feature 1..22: note = chemically synthesized
  source 1..22: mol_type = other DNA
atagactcctcgttgtttaccc

SEQ ID NO: 140900 - DNA, 22 bp, synthetic construct
  misc_feature 1..22: note = chemically synthesized
  source 1..22: mol_type = other DNA
ctcgttgtttacccctggaccc

SEQ ID NO: 140901 - DNA, 22 bp, synthetic construct
  misc_feature 1..22: note = chemically synthesized
  source 1..22: mol_type = other DNA
gttgtttacccctggacccaga

SEQ ID NO: 140902 - DNA, 22 bp, synthetic construct
  misc_feature 1..22: note = chemically synthesized
  source 1..22: mol_type = other DNA
tttacccctggacccagagatt

SEQ ID NO: 140903 - DNA, 22 bp, synthetic construct
  misc_feature 1..22: note = chemically synthesized
  source 1..22: mol_type = other DNA
acccctggacccagagattttt

SEQ ID NO: 140904 - DNA, 22 bp, synthetic construct
  misc_feature 1..22: note = chemically synthesized
  source 1..22: mol_type = other DNA
cccctggacccagagatttttt

SEQ ID NO: 140905 - DNA, 22 bp, synthetic construct
  misc_feature 1..22: note = chemically synthesized
  source 1..22: mol_type = other DNA
gacccagagattttttgacagc

SEQ ID NO: 140906 - DNA, 22 bp, synthetic construct
  misc_feature 1..22: note = chemically synthesized
  source 1..22: mol_type = other DNA
tttgacagctttggaaacctgt

SEQ ID NO: 140907 - DNA, 22 bp, synthetic construct
  misc_feature 1..22: note = chemically synthesized
  source 1..22: mol_type = other DNA
ttgacagctttggaaacctgtc

SEQ ID NO: 140908 - DNA, 22 bp, synthetic construct
  misc_feature 1..22: note = chemically synthesized
  source 1..22: mol_type = other DNA
tgacagctttggaaacctgtcg

SEQ ID NO: 140909 - DNA, 22 bp, synthetic construct
  misc_feature 1..22: note = chemically synthesized
  source 1..22: mol_type = other DNA
gacagctttggaaacctgtcgt

SEQ ID NO: 140910 - DNA, 22 bp, synthetic construct
  misc_feature 1..22: note = chemically synthesized
  source 1..22: mol_type = other DNA
acagctttggaaacctgtcgtc

SEQ ID NO: 140911 - DNA, 22 bp, synthetic construct
  misc_feature 1..22: note = chemically synthesized
  source 1..22: mol_type = other DNA
tggaaacctgtcgtctccctct

SEQ ID NO: 140912 - DNA, 22 bp, synthetic construct
  misc_feature 1..22: note = chemically synthesized
  source 1..22: mol_type = other DNA
ggaaacctgtcgtctccctctg

SEQ ID NO: 140913 - DNA, 22 bp, synthetic construct
  misc_feature 1..22: note = chemically synthesized
  source 1..22: mol_type = other DNA
gaaacctgtcgtctccctctgc

SEQ ID NO: 140914 - DNA, 22 bp, synthetic construct
  misc_feature 1..22: note = chemically synthesized
  source 1..22: mol_type = other DNA
tcgtctccctctgccatcctgg

SEQ ID NO: 140915 - DNA, 22 bp, synthetic construct
  misc_feature 1..22: note = chemically synthesized
  source 1..22: mol_type = other DNA
cctctgccatcctgggcaaccc

SEQ ID NO: 140916 - DNA, 22 bp, synthetic construct
  misc_feature 1..22: note = chemically synthesized
  source 1..22: mol_type = other DNA
tgccatcctgggcaaccccaag

SEQ ID NO: 140917 - DNA, 22 bp, synthetic construct
  misc_feature 1..22: note = chemically synthesized
  source 1..22: mol_type = other DNA
ccatcctgggcaaccccaaggt

SEQ ID NO: 140918 - DNA, 22 bp, synthetic construct
  misc_feature 1..22: note = chemically synthesized
  source 1..22: mol_type = other DNA
ggcaaccccaaggtcaaggccc

SEQ ID NO: 140919 - DNA, 22 bp, synthetic construct
  misc_feature 1..22: note = chemically synthesized
  source 1..22: mol_type = other DNA
acttcctttggagatgctatta

SEQ ID NO: 140920 - DNA, 22 bp, synthetic construct
  misc_feature 1..22: note = chemically synthesized
  source 1..22: mol_type = other DNA
cctttggagatgctattaaaaa

SEQ ID NO: 140921 - DNA, 22 bp, synthetic construct
  misc_feature 1..22: note = chemically synthesized
  source 1..22: mol_type = other DNA
ctttggagatgctattaaaaac

SEQ ID NO: 140922 - DNA, 22 bp, synthetic construct
  misc_feature 1..22: note = chemically synthesized
  source 1..22: mol_type = other DNA
tggagatgctattaaaaacatg

SEQ ID NO: 140923 - DNA, 22 bp, synthetic construct
  misc_feature 1..22: note = chemically synthesized
  source 1..22: mol_type = other DNA
ggagatgctattaaaaacatgg

SEQ ID NO: 140924 - DNA, 22 bp, synthetic construct
  misc_feature 1..22: note = chemically synthesized
  source 1..22: mol_type = other DNA
gagatgctattaaaaacatgga

SEQ ID NO: 140925 - DNA, 22 bp, synthetic construct
  misc_feature 1..22: note = chemically synthesized
  source 1..22: mol_type = other DNA
ttaaaaacatggacaacctcaa

SEQ ID NO: 140926 - DNA, 22 bp, synthetic construct
  misc_feature 1..22: note = chemically synthesized
  source 1..22: mol_type = other DNA
aaaacatggacaacctcaagcc

SEQ ID NO: 140927 - DNA, 22 bp, synthetic construct
  misc_feature 1..22: note = chemically synthesized
  source 1..22: mol_type = other DNA
aagcccgcctttgctaagctga

SEQ ID NO: 140928 - DNA, 22 bp, synthetic construct
  misc_feature 1..22: note = chemically synthesized
  source 1..22: mol_type = other DNA
tgctaagctgagtgagctgcac

SEQ ID NO: 140929 - DNA, 22 bp, synthetic construct
  misc_feature 1..22: note = chemically synthesized
  source 1..22: mol_type = other DNA
gctaagctgagtgagctgcact

SEQ ID NO: 140930 - DNA, 22 bp, synthetic construct
  misc_feature 1..22: note = chemically synthesized
  source 1..22: mol_type = other DNA
ctaagctgagtgagctgcactg

SEQ ID NO: 140931 - DNA, 22 bp, synthetic construct
  misc_feature 1..22: note = chemically synthesized
  source 1..22: mol_type = other DNA
agctgagtgagctgcactgtga

SEQ ID NO: 140932 - DNA, 22 bp, synthetic construct
  misc_feature 1..22: note = chemically synthesized
  source 1..22: mol_type = other DNA
agtgagctgcactgtgacaagc

SEQ ID NO: 140933 - DNA, 22 bp, synthetic construct
  misc_feature 1..22: note = chemically synthesized
  source 1..22: mol_type = other DNA
cactgtgacaagctgcatgtgg

SEQ ID NO: 140934 - DNA, 22 bp, synthetic construct
  misc_feature 1..22: note = chemically synthesized
  source 1..22: mol_type = other DNA
tgacaagctgcatgtggatcct

SEQ ID NO: 140935 - DNA, 22 bp, synthetic construct
  misc_feature 1..22: note = chemically synthesized
  source 1..22: mol_type = other DNA
catgtggatcctgagaacttca

SEQ ID NO: 140936 - DNA, 22 bp, synthetic construct
  misc_feature 1..22: note = chemically synthesized
  source 1..22: mol_type = other DNA
agaacttcaaggtgagttcagg

SEQ ID NO: 140937 - DNA, 22 bp, synthetic construct
  misc_feature 1..22: note = chemically synthesized
  source 1..22: mol_type = other DNA
caaggtgagttcaggtgctggt

SEQ ID NO: 140938 - DNA, 22 bp, synthetic construct
  misc_feature 1..22: note = chemically synthesized
  source 1..22: mol_type = other DNA
aaggtgagttcaggtgctggtg

SEQ ID NO: 140939 - DNA, 22 bp, synthetic construct
  misc_feature 1..22: note = chemically synthesized
  source 1..22: mol_type = other DNA
aggtgctggtgatgtgattttt

SEQ ID NO: 140940 - DNA, 22 bp, synthetic construct
  misc_feature 1..22: note = chemically synthesized
  source 1..22: mol_type = other DNA
gtgatgtgattttttggcttta

SEQ ID NO: 140941 - DNA, 22 bp, synthetic construct
  misc_feature 1..22: note = chemically synthesized
  source 1..22: mol_type = other DNA
tttggctttatattttgacatt

SEQ ID NO: 140942 - DNA, 22 bp, synthetic construct
  misc_feature 1..22: note = chemically synthesized
  source 1..22: mol_type = other DNA
ttggctttatattttgacatta

SEQ ID NO: 140943 - DNA, 22 bp, synthetic construct
  misc_feature 1..22: note = chemically synthesized
  source 1..22: mol_type = other DNA
tggctttatattttgacattaa

SEQ ID NO: 140944 - DNA, 22 bp, synthetic construct
  misc_feature 1..22: note = chemically synthesized
  source 1..22: mol_type = other DNA
ggctttatattttgacattaat

SEQ ID NO: 140945 - DNA, 22 bp, synthetic construct
  misc_feature 1..22: note = chemically synthesized
  source 1..22: mol_type = other DNA
gctttatattttgacattaatt

SEQ ID NO: 140946 - DNA, 22 bp, synthetic construct
  misc_feature 1..22: note = chemically synthesized
  source 1..22: mol_type = other DNA
tatattttgacattaattgaag

SEQ ID NO: 140947 - DNA, 22 bp, synthetic construct
  misc_feature 1..22: note = chemically synthesized
  source 1..22: mol_type = other DNA
atattttgacattaattgaagc

SEQ ID NO: 140948 - DNA, 22 bp, synthetic construct
  misc_feature 1..22: note = chemically synthesized
  source 1..22: mol_type = other DNA
tattttgacattaattgaagct

SEQ ID NO: 140949 - DNA, 22 bp, synthetic construct
  misc_feature 1..22: note = chemically synthesized
  source 1..22: mol_type = other DNA
tgacattaattgaagctcataa

SEQ ID NO: 140950 - DNA, 22 bp, synthetic construct
  misc_feature 1..22: note = chemically synthesized
  source 1..22: mol_type = other DNA
gacattaattgaagctcataat

SEQ ID NO: 140951 - DNA, 22 bp, synthetic construct
  misc_feature 1..22: note = chemically synthesized
  source 1..22: mol_type = other DNA
acattaattgaagctcataatc

SEQ ID NO: 140952 - DNA, 22 bp, synthetic construct
  misc_feature 1..22: note = chemically synthesized
  source 1..22: mol_type = other DNA
attgaagctcataatcttattg

SEQ ID NO: 140953 - DNA, 22 bp, synthetic construct
  misc_feature 1..22: note = chemically synthesized
  source 1..22: mol_type = other DNA
aagctcataatcttattggaaa

SEQ ID NO: 140954 - DNA, 22 bp, synthetic construct
  misc_feature 1..22: note = chemically synthesized
  source 1..22: mol_type = other DNA
ataatcttattggaaagaccaa

SEQ ID NO: 140955 - DNA, 22 bp, synthetic construct
  misc_feature 1..22: note = chemically synthesized
  source 1..22: mol_type = other DNA
attggaaagaccaacaaagatc

SEQ ID NO: 140956 - DNA, 22 bp, synthetic construct
  misc_feature 1..22: note = chemically synthesized
  source 1..22: mol_type = other DNA
ttggaaagaccaacaaagatct

SEQ ID NO: 140957 - DNA, 22 bp, synthetic construct
  misc_feature 1..22: note = chemically synthesized
  source 1..22: mol_type = other DNA
gaaagaccaacaaagatctcag

SEQ ID NO: 140958 - DNA, 22 bp, synthetic construct
  misc_feature 1..22: note = chemically synthesized
  source 1..22: mol_type = other DNA
agaaatcatgggtcgagcttga

SEQ ID NO: 140959 - DNA, 22 bp, synthetic construct
  misc_feature 1..22: note = chemically synthesized
  source 1..22: mol_type = other DNA
gatgttagaacagcagacttct

SEQ ID NO: 140960 - DNA, 22 bp, synthetic construct
  misc_feature 1..22: note = chemically synthesized
  source 1..22: mol_type = other DNA
atgttagaacagcagacttcta

SEQ ID NO: 140961 - DNA, 22 bp, synthetic construct
  misc_feature 1..22: note = chemically synthesized
  source 1..22: mol_type = other DNA
gaacagcagacttctagtgagc

SEQ ID NO: 140962 - DNA, 22 bp, synthetic construct
  misc_feature 1..22: note = chemically synthesized
  source 1..22: mol_type = other DNA
ctagtgagcataaccaaaactt

SEQ ID NO: 140963 - DNA, 22 bp, synthetic construct
  misc_feature 1..22: note = chemically synthesized
  source 1..22: mol_type = other DNA
tagtgagcataaccaaaactta

SEQ ID NO: 140964 - DNA, 22 bp, synthetic construct
  misc_feature 1..22: note = chemically synthesized
  source 1..22: mol_type = other DNA
gtgagcataaccaaaacttaca

SEQ ID NO: 140965 - DNA, 22 bp, synthetic construct
  misc_feature 1..22: note = chemically synthesized
  source 1..22: mol_type = other DNA
acatgattcagaactagtgaca

SEQ ID NO: 140966 - DNA, 22 bp, synthetic construct
  misc_feature 1..22: note = chemically synthesized
  source 1..22: mol_type = other DNA
catgattcagaactagtgacag

SEQ ID NO: 140967 - DNA, 22 bp, synthetic construct
  misc_feature 1..22: note = chemically synthesized
  source 1..22: mol_type = other DNA
agaactagtgacagtaaaggac

SEQ ID NO: 140968 - DNA, 22 bp, synthetic construct
  misc_feature 1..22: note = chemically synthesized
  source 1..22: mol_type = other DNA
gtgacagtaaaggactactaac

SEQ ID NO: 140969 - DNA, 22 bp, synthetic construct
  misc_feature 1..22: note = chemically synthesized
  source 1..22: mol_type = other DNA
ctaacagcctgaattggcttaa

SEQ ID NO: 140970 - DNA, 22 bp, synthetic construct
  misc_feature 1..22: note = chemically synthesized
  source 1..22: mol_type = other DNA
acagcctgaattggcttaactt

SEQ ID NO: 140971 - DNA, 22 bp, synthetic construct
  misc_feature 1..22: note = chemically synthesized
  source 1..22: mol_type = other DNA
aattggcttaacttttcaggaa

SEQ ID NO: 140972 - DNA, 22 bp, synthetic construct
  misc_feature 1..22: note = chemically synthesized
  source 1..22: mol_type = other DNA
gcttaacttttcaggaaatctt

SEQ ID NO: 140973 - DNA, 22 bp, synthetic construct
  misc_feature 1..22: note = chemically synthesized
  source 1..22: mol_type = other DNA
aacttttcaggaaatcttgcca

SEQ ID NO: 140974 - DNA, 22 bp, synthetic construct
  misc_feature 1..22: note = chemically synthesized
  source 1..22: mol_type = other DNA
acttttcaggaaatcttgccag

SEQ ID NO: 140975 - DNA, 22 bp, synthetic construct
  misc_feature 1..22: note = chemically synthesized
  source 1..22: mol_type = other DNA
ttcaggaaatcttgccagaact

SEQ ID NO: 140976 - DNA, 22 bp, synthetic construct
  misc_feature 1..22: note = chemically synthesized
  source 1..22: mol_type = other DNA
tcaggaaatcttgccagaactt

SEQ ID NO: 140977 - DNA, 22 bp, synthetic construct
  misc_feature 1..22: note = chemically synthesized
  source 1..22: mol_type = other DNA
caggaaatcttgccagaacttg

SEQ ID NO: 140978 - DNA, 22 bp, synthetic construct
  misc_feature 1..22: note = chemically synthesized
  source 1..22: mol_type = other DNA
aggaaatcttgccagaacttga

SEQ ID NO: 140979 - DNA, 22 bp, synthetic construct
  misc_feature 1..22: note = chemically synthesized
  source 1..22: mol_type = other DNA
gccagaacttgatgtgtttatc

SEQ ID NO: 140980 - DNA, 22 bp, synthetic construct
  misc_feature 1..22: note = chemically synthesized
  source 1..22: mol_type = other DNA
ccagaacttgatgtgtttatcc

SEQ ID NO: 140981 - DNA, 22 bp, synthetic construct
  misc_feature 1..22: note = chemically synthesized
  source 1..22: mol_type = other DNA
gatgtgtttatcccagagaatt

SEQ ID NO: 140982 - DNA, 22 bp, synthetic construct
  misc_feature 1..22: note = chemically synthesized
  source 1..22: mol_type = other DNA
atgtgtttatcccagagaattg

SEQ ID NO: 140983 - DNA, 22 bp, synthetic construct
  misc_feature 1..22: note = chemically synthesized
  source 1..22: mol_type = other DNA
atcccagagaattgtattatag

SEQ ID NO: 140984 - DNA, 22 bp, synthetic construct
  misc_feature 1..22: note = chemically synthesized
  source 1..22: mol_type = other DNA
tcccagagaattgtattataga

SEQ ID NO: 140985 - DNA, 22 bp, synthetic construct
  misc_feature 1..22: note = chemically synthesized
  source 1..22: mol_type = other DNA
tattatagaattgtagacttgt

SEQ ID NO: 140986 - DNA, 22 bp, synthetic construct
  misc_feature 1..22: note = chemically synthesized
  source 1..22: mol_type = other DNA
tagaattgtagacttgtgaaag

SEQ ID NO: 140987 - DNA, 22 bp, synthetic construct
  misc_feature 1..22: note = chemically synthesized
  source 1..22: mol_type = other DNA
tagacttgtgaaagaagaatga

SEQ ID NO: 140988 - DNA, 22 bp, synthetic construct
  misc_feature 1..22: note = chemically synthesized
  source 1..22: mol_type = other DNA
gtgaaagaagaatgaaatttgg

SEQ ID NO: 140989 - DNA, 22 bp, synthetic construct
  misc_feature 1..22: note = chemically synthesized
  source 1..22: mol_type = other DNA
tgaaagaagaatgaaatttggc

SEQ ID NO: 140990 - DNA, 22 bp, synthetic construct
  misc_feature 1..22: note = chemically synthesized
  source 1..22: mol_type = other DNA
ggcttttggtagatgaaagtcc

SEQ ID NO: 140991 - DNA, 22 bp, synthetic construct
  misc_feature 1..22: note = chemically synthesized
  source 1..22: mol_type = other DNA
gcttttggtagatgaaagtcca

SEQ ID NO: 140992 - DNA, 22 bp, synthetic construct
  misc_feature 1..22: note = chemically synthesized
  source 1..22: mol_type = other DNA
ttggtagatgaaagtccatttc

SEQ ID NO: 140993 - DNA, 22 bp, synthetic construct
  misc_feature 1..22: note = chemically synthesized
  source 1..22: mol_type = other DNA
tggtagatgaaagtccatttca

SEQ ID NO: 140994 - DNA, 22 bp, synthetic construct
  misc_feature 1..22: note = chemically synthesized
  source 1..22: mol_type = other DNA
ggtagatgaaagtccatttcaa

SEQ ID NO: 140995 - DNA, 22 bp, synthetic construct
  misc_feature 1..22: note = chemically synthesized
  source 1..22: mol_type = other DNA
gtagatgaaagtccatttcaag

SEQ ID NO: 140996 - DNA, 22 bp, synthetic construct
  misc_feature 1..22: note = chemically synthesized
  source 1..22: mol_type = other DNA
caaggaaatagaaatgccttat

SEQ ID NO: 140997 - DNA, 22 bp, synthetic construct
  misc_feature 1..22: note = chemically synthesized
  source 1..22: mol_type = other DNA
aaggaaatagaaatgccttatt

SEQ ID NO: 140998 - DNA, 22 bp, synthetic construct
  misc_feature 1..22: note = chemically synthesized
  source 1..22: mol_type = other DNA
attttatgtgggtcatgataat

SEQ ID NO: 140999 - DNA, 22 bp, synthetic construct
  misc_feature 1..22: note = chemically synthesized
  source 1..22: mol_type = other DNA
ttttatgtgggtcatgataatt

SEQ ID NO: 141000 - DNA, 22 bp, synthetic construct
  misc_feature 1..22: note = chemically synthesized
  source 1..22: mol_type = other DNA
tatgtgggtcatgataattgag

SEQ ID NO: 141001 - DNA, 22 bp, synthetic construct
  misc_feature 1..22: note = chemically synthesized
  source 1..22: mol_type = other DNA
atgtgggtcatgataattgagg

SEQ ID NO: 141002 - DNA, 22 bp, synthetic construct
  misc_feature 1..22: note = chemically synthesized
  source 1..22: mol_type = other DNA
tgtgggtcatgataattgaggt

SEQ ID NO: 141003 - DNA, 22 bp, synthetic construct
  misc_feature 1..22: note = chemically synthesized
  source 1..22: mol_type = other DNA
aggtttagaaagagatttttgc

SEQ ID NO: 141004 - DNA, 22 bp, synthetic construct
  misc_feature 1..22: note = chemically synthesized
  source 1..22: mol_type = other DNA
agaaagagatttttgcaaaaaa

SEQ ID NO: 141005 - DNA, 22 bp, synthetic construct
  misc_feature 1..22: note = chemically synthesized
  source 1..22: mol_type = other DNA
gaaagagatttttgcaaaaaaa

SEQ ID NO: 141006 - DNA, 22 bp, synthetic construct
  misc_feature 1..22: note = chemically synthesized
  source 1..22: mol_type = other DNA
ttgcaaaaaaaataaaagattt

SEQ ID NO: 141007 - DNA, 22 bp, synthetic construct
  misc_feature 1..22: note = chemically synthesized
  source 1..22: mol_type = other DNA
tgcaaaaaaaataaaagatttg

SEQ ID NO: 141008 - DNA, 22 bp, synthetic construct
  misc_feature 1..22: note = chemically synthesized
  source 1..22: mol_type = other DNA
gcaaaaaaaataaaagatttgc

SEQ ID NO: 141009 - DNA, 22 bp, synthetic construct
  misc_feature 1..22: note = chemically synthesized
  source 1..22: mol_type = other DNA
caaaaaaaataaaagatttgct

SEQ ID NO: 141010 - DNA, 22 bp, synthetic construct
  misc_feature 1..22: note = chemically synthesized
  source 1..22: mol_type = other DNA
gctcaaagaaaaataagacaca

SEQ ID NO: 141011 - DNA, 22 bp, synthetic construct
  misc_feature 1..22: note = chemically synthesized
  source 1..22: mol_type = other DNA
ctcaaagaaaaataagacacat

SEQ ID NO: 141012 - DNA, 22 bp, synthetic construct
  misc_feature 1..22: note = chemically synthesized
  source 1..22: mol_type = other DNA
aaagaaaaataagacacatttt

SEQ ID NO: 141013 - DNA, 22 bp, synthetic construct
  misc_feature 1..22: note = chemically synthesized
  source 1..22: mol_type = other DNA
tctaaaatatgttaaatttccc

SEQ ID NO: 141014 - DNA, 22 bp, synthetic construct
  misc_feature 1..22: note = chemically synthesized
  source 1..22: mol_type = other DNA
ctaaaatatgttaaatttccca

SEQ ID NO: 141015 - DNA, 22 bp, synthetic construct
  misc_feature 1..22: note = chemically synthesized
  source 1..22: mol_type = other DNA
taaaatatgttaaatttcccat

SEQ ID NO: 141016 - DNA, 22 bp, synthetic construct
  misc_feature 1..22: note = chemically synthesized
  source 1..22: mol_type = other DNA
aaatatgttaaatttcccatca

SEQ ID NO: 141017 - DNA, 22 bp, synthetic construct
  misc_feature 1..22: note = chemically synthesized
  source 1..22: mol_type = other DNA
aatttcccatcagtattgtgac

SEQ ID NO: 141018 - DNA, 22 bp, synthetic construct
  misc_feature 1..22: note = chemically synthesized
  source 1..22: mol_type = other DNA
cccatcagtattgtgaccaagt

SEQ ID NO: 141019 - DNA, 22 bp, synthetic construct
  misc_feature 1..22: note = chemically synthesized
  source 1..22: mol_type = other DNA
ccatcagtattgtgaccaagtg

SEQ ID NO: 141020 - DNA, 22 bp, synthetic construct
  misc_feature 1..22: note = chemically synthesized
  source 1..22: mol_type = other DNA
tgaccaagtgaaggcttgtttc

SEQ ID NO: 141021 - DNA, 22 bp, synthetic construct
  misc_feature 1..22: note = chemically synthesized
  source 1..22: mol_type = other DNA
gtttccgaatttgttggggatt

SEQ ID NO: 141022 - DNA, 22 bp, synthetic construct
  misc_feature 1..22: note = chemically synthesized
  source 1..22: mol_type = other DNA
tttccgaatttgttggggattt

SEQ ID NO: 141023 - DNA, 22 bp, synthetic construct
  misc_feature 1..22: note = chemically synthesized
  source 1..22: mol_type = other DNA
ccgaatttgttggggattttaa

SEQ ID NO: 141024 - DNA, 22 bp, synthetic construct
  misc_feature 1..22: note = chemically synthesized
  source 1..22: mol_type = other DNA
cgaatttgttggggattttaaa

SEQ ID NO: 141025 - DNA, 22 bp, synthetic construct
  misc_feature 1..22: note = chemically synthesized
  source 1..22: mol_type = other DNA
gttggggattttaaactcccgc

SEQ ID NO: 141026 - DNA, 22 bp, synthetic construct
  misc_feature 1..22: note = chemically synthesized
  source 1..22: mol_type = other DNA
ttggggattttaaactcccgct

SEQ ID NO: 141027 - DNA, 22 bp, synthetic construct
  misc_feature 1..22: note = chemically synthesized
  source 1..22: mol_type = other DNA
gggattttaaactcccgctgag

SEQ ID NO: 141028 - DNA, 22 bp, synthetic construct
  misc_feature 1..22: note = chemically synthesized
  source 1..22: mol_type = other DNA
taaactcccgctgagaactctt

SEQ ID NO: 141029 - DNA, 22 bp, synthetic construct
  misc_feature 1..22: note = chemically synthesized
  source 1..22: mol_type = other DNA
aaactcccgctgagaactcttg

SEQ ID NO: 141030 - DNA, 22 bp, synthetic construct
  misc_feature 1..22: note = chemically synthesized
  source 1..22: mol_type = other DNA
aactcccgctgagaactcttgc

SEQ ID NO: 141031 - DNA, 22 bp, synthetic construct
  misc_feature 1..22: note = chemically synthesized
  source 1..22: mol_type = other DNA
ccgctgagaactcttgcagcac

SEQ ID NO: 141032 - DNA, 22 bp, synthetic construct
  misc_feature 1..22: note = chemically synthesized
  source 1..22: mol_type = other DNA
agaactcttgcagcactcacat

SEQ ID NO: 141033 - DNA, 22 bp, synthetic construct
  misc_feature 1..22: note = chemically synthesized
  source 1..22: mol_type = other DNA
ttgcagcactcacattctacat

SEQ ID NO: 141034 - DNA, 22 bp, synthetic construct
  misc_feature 1..22: note = chemically synthesized
  source 1..22: mol_type = other DNA
gcagcactcacattctacattt

SEQ ID NO: 141035 - DNA, 22 bp, synthetic construct
  misc_feature 1..22: note = chemically synthesized
  source 1..22: mol_type = other DNA
cagcactcacattctacattta

SEQ ID NO: 141036 - DNA, 22 bp, synthetic construct
  misc_feature 1..22: note = chemically synthesized
  source 1..22: mol_type = other DNA
acattctacatttacaaaaatt

SEQ ID NO: 141037 - DNA, 22 bp, synthetic construct
  misc_feature 1..22: note = chemically synthesized
  source 1..22: mol_type = other DNA
tacatttacaaaaattagacaa

SEQ ID NO: 141038 - DNA, 22 bp, synthetic construct
  misc_feature 1..22: note = chemically synthesized
  source 1..22: mol_type = other DNA
catttacaaaaattagacaatt

SEQ ID NO: 141039 - DNA, 22 bp, synthetic construct
  misc_feature 1..22: note = chemically synthesized
  source 1..22: mol_type = other DNA
acaaaaattagacaattgctta

SEQ ID NO: 141040 - DNA, 22 bp, synthetic construct
  misc_feature 1..22: note = chemically synthesized
  source 1..22: mol_type = other DNA
caaaaattagacaattgcttaa

SEQ ID NO: 141041 - DNA, 22 bp, synthetic construct
  misc_feature 1..22: note = chemically synthesized
  source 1..22: mol_type = other DNA
gacaattgcttaaagaaaaaca

SEQ ID NO: 141042 - DNA, 22 bp, synthetic construct
  misc_feature 1..22: note = chemically synthesized
  source 1..22: mol_type = other DNA
cttaaagaaaaacagggagaga

SEQ ID NO: 141043 - DNA, 22 bp, synthetic construct
  misc_feature 1..22: note = chemically synthesized
  source 1..22: mol_type = other DNA
aaagaaaaacagggagagaggg

SEQ ID NO: 141044 - DNA, 22 bp, synthetic construct
  misc_feature 1..22: note = chemically synthesized
  source 1..22: mol_type = other DNA
aagaaaaacagggagagaggga

SEQ ID NO: 141045 - DNA, 22 bp, synthetic construct
  misc_feature 1..22: note = chemically synthesized
  source 1..22: mol_type = other DNA
gtaaaatggggaagggggtgag

SEQ ID NO: 141046 - DNA, 22 bp, synthetic construct
  misc_feature 1..22: note = chemically synthesized
  source 1..22: mol_type = other DNA
aatgtagggctcatagaataaa

SEQ ID NO: 141047 - DNA, 22 bp, synthetic construct
  misc_feature 1..22: note = chemically synthesized
  source 1..22: mol_type = other DNA
atagaataaaattgaacctaag

SEQ ID NO: 141048 - DNA, 22 bp, synthetic construct
  misc_feature 1..22: note = chemically synthesized
  source 1..22: mol_type = other DNA
aacctaagctcatctgaatttt

SEQ ID NO: 141049 - DNA, 22 bp, synthetic construct
  misc_feature 1..22: note = chemically synthesized
  source 1..22: mol_type = other DNA
agctcatctgaattttttgggt

SEQ ID NO: 141050 - DNA, 22 bp, synthetic construct
  misc_feature 1..22: note = chemically synthesized
  source 1..22: mol_type = other DNA
atctgaattttttgggtgggca

SEQ ID NO: 141051 - DNA, 22 bp, synthetic construct
  misc_feature 1..22: note = chemically synthesized
  source 1..22: mol_type = other DNA
aattttttgggtgggcacaaac

SEQ ID NO: 141052 - DNA, 22 bp, synthetic construct
  misc_feature 1..22: note = chemically synthesized
  source 1..22: mol_type = other DNA
tttgggtgggcacaaaccttgg

SEQ ID NO: 141053 - DNA, 22 bp, synthetic construct
  misc_feature 1..22: note = chemically synthesized
  source 1..22: mol_type = other DNA
ttgggtgggcacaaaccttgga

SEQ ID NO: 141054 - DNA, 22 bp, synthetic construct
  misc_feature 1..22: note = chemically synthesized
  source 1..22: mol_type = other DNA
tgggtgggcacaaaccttggaa

SEQ ID NO: 141055 - DNA, 22 bp, synthetic construct
  misc_feature 1..22: note = chemically synthesized
  source 1..22: mol_type = other DNA
gggtgggcacaaaccttggaac

SEQ ID NO: 141056 - DNA, 22 bp, synthetic construct
  misc_feature 1..22: note = chemically synthesized
  source 1..22: mol_type = other DNA
ggtgggcacaaaccttggaaca

SEQ ID NO: 141057 - DNA, 22 bp, synthetic construct
  misc_feature 1..22: note = chemically synthesized
  source 1..22: mol_type = other DNA
ggaacagtttgaggtcagggtt

SEQ ID NO: 141058 - DNA, 22 bp, synthetic construct
  misc_feature 1..22: note = chemically synthesized
  source 1..22: mol_type = other DNA
gaacagtttgaggtcagggttg

SEQ ID NO: 141059 - DNA, 22 bp, synthetic construct
  misc_feature 1..22: note = chemically synthesized
  source 1..22: mol_type = other DNA
gaggtcagggttgtctaggaat

SEQ ID NO: 141060 - DNA, 22 bp, synthetic construct
  misc_feature 1..22: note = chemically synthesized
  source 1..22: mol_type = other DNA
aggtcagggttgtctaggaatg

SEQ ID NO: 141061 - DNA, 22 bp, synthetic construct
  misc_feature 1..22: note = chemically synthesized
  source 1..22: mol_type = other DNA
tctaggaatgtaggtataaagc

SEQ ID NO: 141062 - DNA, 22 bp, synthetic construct
  misc_feature 1..22: note = chemically synthesized
  source 1..22: mol_type = other DNA
ggaatgtaggtataaagccgtt

SEQ ID NO: 141063 - DNA, 22 bp, synthetic construct
  misc_feature 1..22: note = chemically synthesized
  source 1..22: mol_type = other DNA
ttgtttgtttgtttgttttttc

SEQ ID NO: 141064 - DNA, 22 bp, synthetic construct
  misc_feature 1..22: note = chemically synthesized
  source 1..22: mol_type = other DNA
tgtttgtttgtttgttttttca

SEQ ID NO: 141065 - DNA, 22 bp, synthetic construct
  misc_feature 1..22: note = chemically synthesized
  source 1..22: mol_type = other DNA
gtttgtttgtttgttttttcat

SEQ ID NO: 141066 - DNA, 22 bp, synthetic construct
  misc_feature 1..22: note = chemically synthesized
  source 1..22: mol_type = other DNA
tttgtttgtttgttttttcatc

SEQ ID NO: 141067 - DNA, 22 bp, synthetic construct
  misc_feature 1..22: note = chemically synthesized
  source 1..22: mol_type = other DNA
gtttgtttgttttttcatcaag

SEQ ID NO: 141068 - DNA, 22 bp, synthetic construct
  misc_feature 1..22: note = chemically synthesized
  source 1..22: mol_type = other DNA
tttgtttgttttttcatcaagt

SEQ ID NO: 141069 - DNA, 22 bp, synthetic construct
  misc_feature 1..22: note = chemically synthesized
  source 1..22: mol_type = other DNA
gtttgttttttcatcaagttgt

SEQ ID NO: 141070 - DNA, 22 bp, synthetic construct
  misc_feature 1..22: note = chemically synthesized
  source 1..22: mol_type = other DNA
tttgttttttcatcaagttgtt

SEQ ID NO: 141071 - DNA, 22 bp, synthetic construct
  misc_feature 1..22: note = chemically synthesized
  source 1..22: mol_type = other DNA
gttttttcatcaagttgttttc

SEQ ID NO: 141072 - DNA, 22 bp, synthetic construct
  misc_feature 1..22: note = chemically synthesized
  source 1..22: mol_type = other DNA
ttttttcatcaagttgttttcg

SEQ ID NO: 141073 - DNA, 22 bp, synthetic construct
  misc_feature 1..22: note = chemically synthesized
  source 1..22: mol_type = other DNA
tttcatcaagttgttttcggaa

SEQ ID NO: 141074 - DNA, 22 bp, synthetic construct
  misc_feature 1..22: note = chemically synthesized
  source 1..22: mol_type = other DNA
ttcatcaagttgttttcggaaa

SEQ ID NO: 141075 - DNA, 22 bp, synthetic construct
  misc_feature 1..22: note = chemically synthesized
  source 1..22: mol_type = other DNA
tcatcaagttgttttcggaaac

SEQ ID NO: 141076 - DNA, 22 bp, synthetic construct
  misc_feature 1..22: note = chemically synthesized
  source 1..22: mol_type = other DNA
catcaagttgttttcggaaact

SEQ ID NO: 141077 - DNA, 22 bp, synthetic construct
  misc_feature 1..22: note = chemically synthesized
  source 1..22: mol_type = other DNA
atcaagttgttttcggaaactt

SEQ ID NO: 141078 - DNA, 22 bp, synthetic construct
  misc_feature 1..22: note = chemically synthesized
  source 1..22: mol_type = other DNA
ttttcggaaacttctactcaac

SEQ ID NO: 141079 - DNA, 22 bp, synthetic construct
  misc_feature 1..22: note = chemically synthesized
  source 1..22: mol_type = other DNA
tcggaaacttctactcaacatg

SEQ ID NO: 141080 - DNA, 22 bp, synthetic construct
  misc_feature 1..22: note = chemically synthesized
  source 1..22: mol_type = other DNA
cggaaacttctactcaacatgc

SEQ ID NO: 141081 - DNA, 22 bp, synthetic construct
  misc_feature 1..22: note = chemically synthesized
  source 1..22: mol_type = other DNA
ggaaacttctactcaacatgcc

SEQ ID NO: 141082 - DNA, 22 bp, synthetic construct
  misc_feature 1..22: note = chemically synthesized
  source 1..22: mol_type = other DNA
ctactcaacatgcctgtgtgtt

SEQ ID NO: 141083 - DNA, 22 bp, synthetic construct
  misc_feature 1..22: note = chemically synthesized
  source 1..22: mol_type = other DNA
tactcaacatgcctgtgtgtta

SEQ ID NO: 141084 - DNA, 22 bp, synthetic construct
  misc_feature 1..22: note = chemically synthesized
  source 1..22: mol_type = other DNA
ctcaacatgcctgtgtgttatt

SEQ ID NO: 141085 - DNA, 22 bp, synthetic construct
  misc_feature 1..22: note = chemically synthesized
  source 1..22: mol_type = other DNA
aacatgcctgtgtgttattttg

SEQ ID NO: 141086 - DNA, 22 bp, synthetic construct
  misc_feature 1..22: note = chemically synthesized
  source 1..22: mol_type = other DNA
tgtgttattttgtcttttgcct

SEQ ID NO: 141087 - DNA, 22 bp, synthetic construct
  misc_feature 1..22: note = chemically synthesized
  source 1..22: mol_type = other DNA
ttttgtcttttgcctaacagct

SEQ ID NO: 141088 - DNA, 22 bp, synthetic construct
  misc_feature 1..22: note = chemically synthesized
  source 1..22: mol_type = other DNA
tgtcttttgcctaacagctcct

SEQ ID NO: 141089 - DNA, 22 bp, synthetic construct
  misc_feature 1..22: note = chemically synthesized
  source 1..22: mol_type = other DNA
gtcttttgcctaacagctcctg

SEQ ID NO: 141090 - DNA, 22 bp, synthetic construct
  misc_feature 1..22: note = chemically synthesized
  source 1..22: mol_type = other DNA
tcttttgcctaacagctcctgg

SEQ ID NO: 141091 - DNA, 22 bp, synthetic construct
  misc_feature 1..22: note = chemically synthesized
  source 1..22: mol_type = other DNA
ttgcctaacagctcctgggtaa

SEQ ID NO: 141092 - DNA, 22 bp, synthetic construct
  misc_feature 1..22: note = chemically synthesized
  source 1..22: mol_type = other DNA
tgcctaacagctcctgggtaac

SEQ ID NO: 141093 - DNA, 22 bp, synthetic construct
  misc_feature 1..22: note = chemically synthesized
  source 1..22: mol_type = other DNA
gcctaacagctcctgggtaacg

SEQ ID NO: 141094 - DNA, 22 bp, synthetic construct
  misc_feature 1..22: note = chemically synthesized
  source 1..22: mol_type = other DNA
cctaacagctcctgggtaacgt

SEQ ID NO: 141095 - DNA, 22 bp, synthetic construct
  misc_feature 1..22: note = chemically synthesized
  source 1..22: mol_type = other DNA
acagctcctgggtaacgtgatg

SEQ ID NO: 141096 - DNA, 22 bp, synthetic construct
  misc_feature 1..22: note = chemically synthesized
  source 1..22: mol_type = other DNA
ctgggtaacgtgatggtgatta

SEQ ID NO: 141097 - DNA, 22 bp, synthetic construct
  misc_feature 1..22: note = chemically synthesized
  source 1..22: mol_type = other DNA
ggtaacgtgatggtgattattc

SEQ ID NO: 141098 - DNA, 22 bp, synthetic construct
  misc_feature 1..22: note = chemically synthesized
  source 1..22: mol_type = other DNA
ttctggctactcactttggcaa

SEQ ID NO: 141099 - DNA, 22 bp, synthetic construct
  misc_feature 1..22: note = chemically synthesized
  source 1..22: mol_type = other DNA
tggctactcactttggcaagga

SEQ ID NO: 141100 - DNA, 22 bp, synthetic construct
  misc_feature 1..22: note = chemically synthesized
  source 1..22: mol_type = other DNA
gctactcactttggcaaggagt

SEQ ID NO: 141101 - DNA, 22 bp, synthetic construct
  misc_feature 1..22: note = chemically synthesized
  source 1..22: mol_type = other DNA
ctcactttggcaaggagttcac

SEQ ID NO: 141102 - DNA, 22 bp, synthetic construct
  misc_feature 1..22: note = chemically synthesized
  source 1..22: mol_type = other DNA
actttggcaaggagttcacccc

SEQ ID NO: 141103 - DNA, 22 bp, synthetic construct
  misc_feature 1..22: note = chemically synthesized
  source 1..22: mol_type = other DNA
tggcaaggagttcacccctgaa

SEQ ID NO: 141104 - DNA, 22 bp, synthetic construct
  misc_feature 1..22: note = chemically synthesized
  source 1..22: mol_type = other DNA
ggcaaggagttcacccctgaag

SEQ ID NO: 141105 - DNA, 22 bp, synthetic construct
  misc_feature 1..22: note = chemically synthesized
  source 1..22: mol_type = other DNA
gcaaggagttcacccctgaagt

SEQ ID NO: 141106 - DNA, 22 bp, synthetic construct
  misc_feature 1..22: note = chemically synthesized
  source 1..22: mol_type = other DNA
acccctgaagtgcaggctgcct

SEQ ID NO: 141107 - DNA, 22 bp, synthetic construct
  misc_feature 1..22: note = chemically synthesized
  source 1..22: mol_type = other DNA
aagtgcaggctgcctggcagaa

SEQ ID NO: 141108 - DNA, 22 bp, synthetic construct
  misc_feature 1..22: note = chemically synthesized
  source 1..22: mol_type = other DNA
cctggcagaagctggtgtctgc

SEQ ID NO: 141109 - DNA, 22 bp, synthetic construct
  misc_feature 1..22: note = chemically synthesized
  source 1..22: mol_type = other DNA
gcagaagctggtgtctgctgtc

SEQ ID NO: 141110 - DNA, 22 bp, synthetic construct
  misc_feature 1..22: note = chemically synthesized
  source 1..22: mol_type = other DNA
gtgtctgctgtcgccattgccc

SEQ ID NO: 141111 - DNA, 22 bp, synthetic construct
  misc_feature 1..22: note = chemically synthesized
  source 1..22: mol_type = other DNA
ctgtcgccattgccctggccca

SEQ ID NO: 141112 - DNA, 22 bp, synthetic construct
  misc_feature 1..22: note = chemically synthesized
  source 1..22: mol_type = other DNA
tcgccattgccctggcccataa

SEQ ID NO: 141113 - DNA, 22 bp, synthetic construct
  misc_feature 1..22: note = chemically synthesized
  source 1..22: mol_type = other DNA
ccctggcccataagtaccactg

SEQ ID NO: 141114 - DNA, 22 bp, synthetic construct
  misc_feature 1..22: note = chemically synthesized
  source 1..22: mol_type = other DNA
gcccataagtaccactgagttc

SEQ ID NO: 141115 - DNA, 22 bp, synthetic construct
  misc_feature 1..22: note = chemically synthesized
  source 1..22: mol_type = other DNA
agttctcttccagtttgcaggt

SEQ ID NO: 141116 - DNA, 22 bp, synthetic construct
  misc_feature 1..22: note = chemically synthesized
  source 1..22: mol_type = other DNA
tcttccagtttgcaggtgttcc

SEQ ID NO: 141117 - DNA, 22 bp, synthetic construct
  misc_feature 1..22: note = chemically synthesized
  source 1..22: mol_type = other DNA
ttccagtttgcaggtgttcctg

SEQ ID NO: 141118 - DNA, 22 bp, synthetic construct
  misc_feature 1..22: note = chemically synthesized
  source 1..22: mol_type = other DNA
ccagtttgcaggtgttcctgtg

SEQ ID NO: 141119 - DNA, 22 bp, synthetic construct
  misc_feature 1..22: note = chemically synthesized
  source 1..22: mol_type = other DNA
cagtttgcaggtgttcctgtga

SEQ ID NO: 141120 - DNA, 22 bp, synthetic construct
  misc_feature 1..22: note = chemically synthesized
  source 1..22: mol_type = other DNA
gcaggtgttcctgtgaccctga

SEQ ID NO: 141121 - DNA, 22 bp, synthetic construct
  misc_feature 1..22: note = chemically synthesized
  source 1..22: mol_type = other DNA
caggtgttcctgtgaccctgac

SEQ ID NO: 141122 - DNA, 22 bp, synthetic construct
  misc_feature 1..22: note = chemically synthesized
  source 1..22: mol_type = other DNA
ctgtgaccctgacaccctcctt

SEQ ID NO: 141123 - DNA, 22 bp, synthetic construct
  misc_feature 1..22: note = chemically synthesized
  source 1..22: mol_type = other DNA
tgaccctgacaccctccttctg

SEQ ID NO: 141124 - DNA, 22 bp, synthetic construct
  misc_feature 1..22: note = chemically synthesized
  source 1..22: mol_type = other DNA
acaccctccttctgcacatggg

SEQ ID NO: 141125 - DNA, 22 bp, synthetic construct
  misc_feature 1..22: note = chemically synthesized
  source 1..22: mol_type = other DNA
cttctgcacatggggactgggc

SEQ ID NO: 141126 - DNA, 22 bp, synthetic construct
  misc_feature 1..22: note = chemically synthesized
  source 1..22: mol_type = other DNA
ctgcacatggggactgggcttg

SEQ ID NO: 141127 - DNA, 22 bp, synthetic construct
  misc_feature 1..22: note = chemically synthesized
  source 1..22: mol_type = other DNA
tgcacatggggactgggcttgg

SEQ ID NO: 141128 - DNA, 22 bp, synthetic construct
  misc_feature 1..22: note = chemically synthesized
  source 1..22: mol_type = other DNA
cacatggggactgggcttggcc

SEQ ID NO: 141129 - DNA, 22 bp, synthetic construct
  misc_feature 1..22: note = chemically synthesized
  source 1..22: mol_type = other DNA
ggcttggccttgagagaaagcc

SEQ ID NO: 141130 - DNA, 22 bp, synthetic construct
  misc_feature 1..22: note = chemically synthesized
  source 1..22: mol_type = other DNA
ggccttgagagaaagccttctg

SEQ ID NO: 141131 - DNA, 22 bp, synthetic construct
  misc_feature 1..22: note = chemically synthesized
  source 1..22: mol_type = other DNA
gccttgagagaaagccttctgt

SEQ ID NO: 141132 - DNA, 22 bp, synthetic construct
  misc_feature 1..22: note = chemically synthesized
  source 1..22: mol_type = other DNA
gagagaaagccttctgtttaat

SEQ ID NO: 141133 - DNA, 22 bp, synthetic construct
  misc_feature 1..22: note = chemically synthesized
  source 1..22: mol_type = other DNA
agagaaagccttctgtttaata

SEQ ID NO: 141134 - DNA, 22 bp, synthetic construct
  misc_feature 1..22: note = chemically synthesized
  source 1..22: mol_type = other DNA
ctgtttaataaagtacattttc

SEQ ID NO: 141135 - DNA, 22 bp, synthetic construct
  misc_feature 1..22: note = chemically synthesized
  source 1..22: mol_type = other DNA
tgtttaataaagtacattttct

SEQ ID NO: 141136 - DNA, 22 bp, synthetic construct
  misc_feature 1..22: note = chemically synthesized
  source 1..22: mol_type = other DNA
tttaataaagtacattttcttc

SEQ ID NO: 141137 - DNA, 22 bp, synthetic construct
  misc_feature 1..22: note = chemically synthesized
  source 1..22: mol_type = other DNA
aataaagtacattttcttcagt

SEQ ID NO: 141138 - DNA, 22 bp, synthetic construct
  misc_feature 1..22: note = chemically synthesized
  source 1..22: mol_type = other DNA
ataaagtacattttcttcagta

SEQ ID NO: 141139 - DNA, 22 bp, synthetic construct
  misc_feature 1..22: note = chemically synthesized
  source 1..22: mol_type = other DNA
tcttcagtaatcaaaaattgca

SEQ ID NO: 141140 - DNA, 22 bp, synthetic construct
  misc_feature 1..22: note = chemically synthesized
  source 1..22: mol_type = other DNA
cttcagtaatcaaaaattgcaa

SEQ ID NO: 141141 - DNA, 22 bp, synthetic construct
  misc_feature 1..22: note = chemically synthesized
  source 1..22: mol_type = other DNA
ttcagtaatcaaaaattgcaat

SEQ ID NO: 141142 - DNA, 22 bp, synthetic construct
  misc_feature 1..22: note = chemically synthesized
  source 1..22: mol_type = other DNA
cagtaatcaaaaattgcaattt

SEQ ID NO: 141143 - DNA, 22 bp, synthetic construct
  misc_feature 1..22: note = chemically synthesized
  source 1..22: mol_type = other DNA
agtaatcaaaaattgcaatttt

SEQ ID NO: 141144 - DNA, 22 bp, synthetic construct
  misc_feature 1..22: note = chemically synthesized
  source 1..22: mol_type = other DNA
caattttatcttctccatcttt

SEQ ID NO: 141145 - DNA, 22 bp, synthetic construct
  misc_feature 1..22: note = chemically synthesized
  source 1..22: mol_type = other DNA
tatcttctccatcttttactct

SEQ ID NO: 141146 - DNA, 22 bp, synthetic construct
  misc_feature 1..22: note = chemically synthesized
  source 1..22: mol_type = other DNA
atcttctccatcttttactctt

SEQ ID NO: 141147 - DNA, 22 bp, synthetic construct
  misc_feature 1..22: note = chemically synthesized
  source 1..22: mol_type = other DNA
tcttctccatcttttactcttg

SEQ ID NO: 141148 - DNA, 22 bp, synthetic construct
  misc_feature 1..22: note = chemically synthesized
  source 1..22: mol_type = other DNA
ctccatcttttactcttgtgtt

SEQ ID NO: 141149 - DNA, 22 bp, synthetic construct
  misc_feature 1..22: note = chemically synthesized
  source 1..22: mol_type = other DNA
tccatcttttactcttgtgtta

SEQ ID NO: 141150 - DNA, 22 bp, synthetic construct
  misc_feature 1..22: note = chemically synthesized
  source 1..22: mol_type = other DNA
catcttttactcttgtgttaaa

SEQ ID NO: 141151 - DNA, 22 bp, synthetic construct
  misc_feature 1..22: note = chemically synthesized
  source 1..22: mol_type = other DNA
ttactcttgtgttaaaaggaaa

SEQ ID NO: 141152 - DNA, 22 bp, synthetic construct
  misc_feature 1..22: note = chemically synthesized
  source 1..22: mol_type = other DNA
tactcttgtgttaaaaggaaaa

SEQ ID NO: 141153 - DNA, 22 bp, synthetic construct
  misc_feature 1..22: note = chemically synthesized
  source 1..22: mol_type = other DNA
actcttgtgttaaaaggaaaaa

SEQ ID NO: 141154 - DNA, 22 bp, synthetic construct
  misc_feature 1..22: note = chemically synthesized
  source 1..22: mol_type = other DNA
ctcttgtgttaaaaggaaaaag

SEQ ID NO: 141155 - DNA, 22 bp, synthetic construct
  misc_feature 1..22: note = chemically synthesized
  source 1..22: mol_type = other DNA
ttgtgttaaaaggaaaaagtgt

SEQ ID NO: 141156 - DNA, 22 bp, synthetic construct
  misc_feature 1..22: note = chemically synthesized
  source 1..22: mol_type = other DNA
gtgttaaaaggaaaaagtgttc

SEQ ID NO: 141157 - DNA, 22 bp, synthetic construct
  misc_feature 1..22: note = chemically synthesized
  source 1..22: mol_type = other DNA
tgttaaaaggaaaaagtgttca

SEQ ID NO: 141158 - DNA, 22 bp, synthetic construct
  misc_feature 1..22: note = chemically synthesized
  source 1..22: mol_type = other DNA
aaaggaaaaagtgttcatgggc

SEQ ID NO: 141159 - DNA, 22 bp, synthetic construct
  misc_feature 1..22: note = chemically synthesized
  source 1..22: mol_type = other DNA
atgggctgagggatggagagaa

SEQ ID NO: 141160 - DNA, 22 bp, synthetic construct
  misc_feature 1..22: note = chemically synthesized
  source 1..22: mol_type = other DNA
agggatggagagaaacatagga

SEQ ID NO: 141161 - DNA, 22 bp, synthetic construct
  misc_feature 1..22: note = chemically synthesized
  source 1..22: mol_type = other DNA
ccttaagaaatgtatgggggct

SEQ ID NO: 141162 - DNA, 22 bp, synthetic construct
  misc_feature 1..22: note = chemically synthesized
  source 1..22: mol_type = other DNA
cttaagaaatgtatgggggctt

SEQ ID NO: 141163 - DNA, 22 bp, synthetic construct
  misc_feature 1..22: note = chemically synthesized
  source 1..22: mol_type = other DNA
aagaaatgtatgggggcttgta

SEQ ID NO: 141164 - DNA, 22 bp, synthetic construct
  misc_feature 1..22: note = chemically synthesized
  source 1..22: mol_type = other DNA
agaaatgtatgggggcttgtaa

SEQ ID NO: 141165 - DNA, 22 bp, synthetic construct
  misc_feature 1..22: note = chemically synthesized
  source 1..22: mol_type = other DNA
gtaaaattaatgtggatgttat

SEQ ID NO: 141166 - DNA, 22 bp, synthetic construct
  misc_feature 1..22: note = chemically synthesized
  source 1..22: mol_type = other DNA
taaaattaatgtggatgttatg

SEQ ID NO: 141167 - DNA, 22 bp, synthetic construct
  misc_feature 1..22: note = chemically synthesized
  source 1..22: mol_type = other DNA
atgtggatgttatgggagaatt

SEQ ID NO: 141168 - DNA, 22 bp, synthetic construct
  misc_feature 1..22: note = chemically synthesized
  source 1..22: mol_type = other DNA
tgggagaattccaggattccaa

SEQ ID NO: 141169 - DNA, 22 bp, synthetic construct
  misc_feature 1..22: note = chemically synthesized
  source 1..22: mol_type = other DNA
caggattccaaggaggatgata

SEQ ID NO: 141170 - DNA, 22 bp, synthetic construct
  misc_feature 1..22: note = chemically synthesized
  source 1..22: mol_type = other DNA
caaggaggatgatatgatggag

SEQ ID NO: 141171 - DNA, 22 bp, synthetic construct
  misc_feature 1..22: note = chemically synthesized
  source 1..22: mol_type = other DNA
tatcggggtgggaaaatggtta

SEQ ID NO: 141172 - DNA, 22 bp, synthetic construct
  misc_feature 1..22: note = chemically synthesized
  source 1..22: mol_type = other DNA
atcggggtgggaaaatggttaa

SEQ ID NO: 141173 - DNA, 22 bp, synthetic construct
  misc_feature 1..22: note = chemically synthesized
  source 1..22: mol_type = other DNA
tcggggtgggaaaatggttaat

SEQ ID NO: 141174 - DNA, 22 bp, synthetic construct
  misc_feature 1..22: note = chemically synthesized
  source 1..22: mol_type = other DNA
attaagtggacagagactccta

SEQ ID NO: 141175 - DNA, 22 bp, synthetic construct
  misc_feature 1..22: note = chemically synthesized
  source 1..22: mol_type = other DNA
agtggacagagactcctaggca

SEQ ID NO: 141176 - DNA, 22 bp, synthetic construct
  misc_feature 1..22: note = chemically synthesized
  source 1..22: mol_type = other DNA
ctaggcagtttttactgcaccg

SEQ ID NO: 141177 - DNA, 22 bp, synthetic construct
  misc_feature 1..22: note = chemically synthesized
  source 1..22: mol_type = other DNA
ggcagtttttactgcaccgggg

SEQ ID NO: 141178 - DNA, 22 bp, synthetic construct
  misc_feature 1..22: note = chemically synthesized
  source 1..22: mol_type = other DNA
ttactgcaccggggaaagaagg

SEQ ID NO: 141179 - DNA, 22 bp, synthetic construct
  misc_feature 1..22: note = chemically synthesized
  source 1..22: mol_type = other DNA
tactgcaccggggaaagaagga

SEQ ID NO: 141180 - DNA, 22 bp, synthetic construct
  misc_feature 1..22: note = chemically synthesized
  source 1..22: mol_type = other DNA
actgcaccggggaaagaaggag

SEQ ID NO: 141181 - DNA, 22 bp, synthetic construct
  misc_feature 1..22: note = chemically synthesized
  source 1..22: mol_type = other DNA
ctgcaccggggaaagaaggagc

SEQ ID NO: 141182 - DNA, 22 bp, synthetic construct
  misc_feature 1..22: note = chemically synthesized
  source 1..22: mol_type = other DNA
caccggggaaagaaggagctgt

SEQ ID NO: 141183 - DNA, 22 bp, synthetic construct
  misc_feature 1..22: note = chemically synthesized
  source 1..22: mol_type = other DNA
ttagtggtacctgagaaagcag

SEQ ID NO: 141184 - DNA, 22 bp, synthetic construct
  misc_feature 1..22: note = chemically synthesized
  source 1..22: mol_type = other DNA
gtggtacctgagaaagcagatt

SEQ ID NO: 141185 - DNA, 22 bp, synthetic construct
  misc_feature 1..22: note = chemically synthesized
  source 1..22: mol_type = other DNA
agaaagcagatttgtggtacat

SEQ ID NO: 141186 - DNA, 22 bp, synthetic construct
  misc_feature 1..22: note = chemically synthesized
  source 1..22: mol_type = other DNA
gtggtacatgtcacttttcatt

SEQ ID NO: 141187 - DNA, 22 bp, synthetic construct
  misc_feature 1..22: note = chemically synthesized
  source 1..22: mol_type = other DNA
tggtacatgtcacttttcatta

SEQ ID NO: 141188 - DNA, 22 bp, synthetic construct
  misc_feature 1..22: note = chemically synthesized
  source 1..22: mol_type = other DNA
ttcattaaaaacaaaaacaaaa

SEQ ID NO: 141189 - DNA, 22 bp, synthetic construct
  misc_feature 1..22: note = chemically synthesized
  source 1..22: mol_type = other DNA
tcattaaaaacaaaaacaaaac

SEQ ID NO: 141190 - DNA, 22 bp, synthetic construct
  misc_feature 1..22: note = chemically synthesized
  source 1..22: mol_type = other DNA
cattaaaaacaaaaacaaaaca

SEQ ID NO: 141191 - DNA, 22 bp, synthetic construct
  misc_feature 1..22: note = chemically synthesized
  source 1..22: mol_type = other DNA
attaaaaacaaaaacaaaacaa

SEQ ID NO: 141192 - DNA, 22 bp, synthetic construct
  misc_feature 1..22: note = chemically synthesized
  source 1..22: mol_type = other DNA
aaaacaaaaacaaaacaaaaca

SEQ ID NO: 141193 - DNA, 22 bp, synthetic construct
  misc_feature 1..22: note = chemically synthesized
  source 1..22: mol_type = other DNA
catagatatccaagatataggc

SEQ ID NO: 141194 - DNA, 22 bp, synthetic construct
  misc_feature 1..22: note = chemically synthesized
  source 1..22: mol_type = other DNA
atagatatccaagatataggct

SEQ ID NO: 141195 - DNA, 22 bp, synthetic construct
  misc_feature 1..22: note = chemically synthesized
  source 1..22: mol_type = other DNA
gaattactattttaatttactc

SEQ ID NO: 141196 - DNA, 22 bp, synthetic construct
  misc_feature 1..22: note = chemically synthesized
  source 1..22: mol_type = other DNA
ctattttaatttactcttattt

SEQ ID NO: 141197 - DNA, 22 bp, synthetic construct
  misc_feature 1..22: note = chemically synthesized
  source 1..22: mol_type = other DNA
ttttaatttactcttatttaca

SEQ ID NO: 141198 - DNA, 22 bp, synthetic construct
  misc_feature 1..22: note = chemically synthesized
  source 1..22: mol_type = other DNA
taatttactcttatttacattt

SEQ ID NO: 141199 - DNA, 22 bp, synthetic construct
  misc_feature 1..22: note = chemically synthesized
  source 1..22: mol_type = other DNA
aatttactcttatttacatttt

SEQ ID NO: 141200 - DNA, 22 bp, synthetic construct
  misc_feature 1..22: note = chemically synthesized
  source 1..22: mol_type = other DNA
atttactcttatttacattttg

SEQ ID NO: 141201 - DNA, 22 bp, synthetic construct
  misc_feature 1..22: note = chemically synthesized
  source 1..22: mol_type = other DNA
actcttatttacattttgaagt

SEQ ID NO: 141202 - DNA, 22 bp, synthetic construct
  misc_feature 1..22: note = chemically synthesized
  source 1..22: mol_type = other DNA
ctcttatttacattttgaagta

SEQ ID NO: 141203 - DNA, 22 bp, synthetic construct
  misc_feature 1..22: note = chemically synthesized
  source 1..22: mol_type = other DNA
ttatttacattttgaagtagct

SEQ ID NO: 141204 - DNA, 22 bp, synthetic construct
  misc_feature 1..22: note = chemically synthesized
  source 1..22: mol_type = other DNA
atttacattttgaagtagctag

SEQ ID NO: 141205 - DNA, 22 bp, synthetic construct
  misc_feature 1..22: note = chemically synthesized
  source 1..22: mol_type = other DNA
tttacattttgaagtagctagc

SEQ ID NO: 141206 - DNA, 22 bp, synthetic construct
  misc_feature 1..22: note = chemically synthesized
  source 1..22: mol_type = other DNA
acattttgaagtagctagcttg

SEQ ID NO: 141207 - DNA, 22 bp, synthetic construct
  misc_feature 1..22: note = chemically synthesized
  source 1..22: mol_type = other DNA
cattttgaagtagctagcttgt

SEQ ID NO: 141208 - DNA, 22 bp, synthetic construct
  misc_feature 1..22: note = chemically synthesized
  source 1..22: mol_type = other DNA
tgaagtagctagcttgtcacat

SEQ ID NO: 141209 - DNA, 22 bp, synthetic construct
  misc_feature 1..22: note = chemically synthesized
  source 1..22: mol_type = other DNA
gaagtagctagcttgtcacatg

SEQ ID NO: 141210 - DNA, 22 bp, synthetic construct
  misc_feature 1..22: note = chemically synthesized
  source 1..22: mol_type = other DNA
aagtagctagcttgtcacatgt

SEQ ID NO: 141211 - DNA, 22 bp, synthetic construct
  misc_feature 1..22: note = chemically synthesized
  source 1..22: mol_type = other DNA
gcttgtcacatgttttatgaaa

SEQ ID NO: 141212 - DNA, 22 bp, synthetic construct
  misc_feature 1..22: note = chemically synthesized
  source 1..22: mol_type = other DNA
gtcacatgttttatgaaattga

SEQ ID NO: 141213 - DNA, 22 bp, synthetic construct
  misc_feature 1..22: note = chemically synthesized
  source 1..22: mol_type = other DNA
tcacatgttttatgaaattgat

SEQ ID NO: 141214 - DNA, 22 bp, synthetic construct
  misc_feature 1..22: note = chemically synthesized
  source 1..22: mol_type = other DNA
tatgaaattgatttggagataa

SEQ ID NO: 141215 - DNA, 22 bp, synthetic construct
  misc_feature 1..22: note = chemically synthesized
  source 1..22: mol_type = other DNA
atgaaattgatttggagataag

SEQ ID NO: 141216 - DNA, 22 bp, synthetic construct
  misc_feature 1..22: note = chemically synthesized
  source 1..22: mol_type = other DNA
tgaaattgatttggagataaga

SEQ ID NO: 141217 - DNA, 22 bp, synthetic construct
  misc_feature 1..22: note = chemically synthesized
  source 1..22: mol_type = other DNA
atttggagataagatgagtgtg

SEQ ID NO: 141218 - DNA, 22 bp, synthetic construct
  misc_feature 1..22: note = chemically synthesized
  source 1..22: mol_type = other DNA
ggagataagatgagtgtgtatc

SEQ ID NO: 141219 - DNA, 22 bp, synthetic construct
  misc_feature 1..22: note = chemically synthesized
  source 1..22: mol_type = other DNA
gagataagatgagtgtgtatca

SEQ ID NO: 141220 - DNA, 22 bp, synthetic construct
  misc_feature 1..22: note = chemically synthesized
  source 1..22: mol_type = other DNA
ctctttccatgaaggattccat

SEQ ID NO: 141221 - DNA, 22 bp, synthetic construct
  misc_feature 1..22: note = chemically synthesized
  source 1..22: mol_type = other DNA
tttccatgaaggattccattat

SEQ ID NO: 141222 - DNA, 22 bp, synthetic construct
  misc_feature 1..22: note = chemically synthesized
  source 1..22: mol_type = other DNA
tccatgaaggattccattattt

SEQ ID NO: 141223 - DNA, 22 bp, synthetic construct
  misc_feature 1..22: note = chemically synthesized
  source 1..22: mol_type = other DNA
ccatgaaggattccattatttc

SEQ ID NO: 141224 - DNA, 22 bp, synthetic construct
  misc_feature 1..22: note = chemically synthesized
  source 1..22: mol_type = other DNA
catgaaggattccattatttca

SEQ ID NO: 141225 - DNA, 22 bp, synthetic construct
  misc_feature 1..22: note = chemically synthesized
  source 1..22: mol_type = other DNA
cattatttcatgggttagctga

SEQ ID NO: 141226 - DNA, 22 bp, synthetic construct
  misc_feature 1..22: note = chemically synthesized
  source 1..22: mol_type = other DNA
tttcatgggttagctgaagcta

SEQ ID NO: 141227 - DNA, 22 bp, synthetic construct
  misc_feature 1..22: note = chemically synthesized
  source 1..22: mol_type = other DNA
catgggttagctgaagctaaga

SEQ ID NO: 141228 - DNA, 22 bp, synthetic construct
  misc_feature 1..22: note = chemically synthesized
  source 1..22: mol_type = other DNA
atgggttagctgaagctaagac

SEQ ID NO: 141229 - DNA, 22 bp, synthetic construct
  misc_feature 1..22: note = chemically synthesized
  source 1..22: mol_type = other DNA
gctgaagctaagacacatgata

SEQ ID NO: 141230 - DNA, 22 bp, synthetic construct
  misc_feature 1..22: note = chemically synthesized
  source 1..22: mol_type = other DNA
aagctaagacacatgatatcat

SEQ ID NO: 141231 - DNA, 22 bp, synthetic construct
  misc_feature 1..22: note = chemically synthesized
  source 1..22: mol_type = other DNA
agacacatgatatcattgtgca

SEQ ID NO: 141232 - DNA, 22 bp, synthetic construct
  misc_feature 1..22: note = chemically synthesized
  source 1..22: mol_type = other DNA
tgcattatcttctgatagaatg

SEQ ID NO: 141233 - DNA, 22 bp, synthetic construct
  misc_feature 1..22: note = chemically synthesized
  source 1..22: mol_type = other DNA
tcttctgatagaatgtaacatg

SEQ ID NO: 141234 - DNA, 22 bp, synthetic construct
  misc_feature 1..22: note = chemically synthesized
  source 1..22: mol_type = other DNA
ctgatagaatgtaacatgcact

SEQ ID NO: 141235 - DNA, 22 bp, synthetic construct
  misc_feature 1..22: note = chemically synthesized
  source 1..22: mol_type = other DNA
tgatagaatgtaacatgcacta

SEQ ID NO: 141236 - DNA, 22 bp, synthetic construct
  misc_feature 1..22: note = chemically synthesized
  source 1..22: mol_type = other DNA
atagaatgtaacatgcactaaa

SEQ ID NO: 141237 - DNA, 22 bp, synthetic construct
  misc_feature 1..22: note = chemically synthesized
  source 1..22: mol_type = other DNA
aaataaagttagagttaggacc

SEQ ID NO: 141238 - DNA, 22 bp, synthetic construct
  misc_feature 1..22: note = chemically synthesized
  source 1..22: mol_type = other DNA
gagttaggacctgagtgggaaa

SEQ ID NO: 141239 - DNA, 22 bp, synthetic construct
  misc_feature 1..22: note = chemically synthesized
  source 1..22: mol_type = other DNA
ggacctgagtgggaaagttttt

SEQ ID NO: 141240 - DNA, 22 bp, synthetic construct
  misc_feature 1..22: note = chemically synthesized
  source 1..22: mol_type = other DNA
agtgggaaagtttttggagagt

SEQ ID NO: 141241 - DNA, 22 bp, synthetic construct
  misc_feature 1..22: note = chemically synthesized
  source 1..22: mol_type = other DNA
ttggagagtgtgatgaagactt

SEQ ID NO: 141242 - DNA, 22 bp, synthetic construct
  misc_feature 1..22: note = chemically synthesized
  source 1..22: mol_type = other DNA
tggagagtgtgatgaagacttt

SEQ ID NO: 141243 - DNA, 22 bp, synthetic construct
  misc_feature 1..22: note = chemically synthesized
  source 1..22: mol_type = other DNA
ggagagtgtgatgaagactttc

SEQ ID NO: 141244 - DNA, 22 bp, synthetic construct
  misc_feature 1..22: note = chemically synthesized
  source 1..22: mol_type = other DNA
gagagtgtgatgaagactttcc

SEQ ID NO: 141245 - DNA, 22 bp, synthetic construct
  misc_feature 1..22: note = chemically synthesized
  source 1..22: mol_type = other DNA
tccgtgggagatagaatactaa

SEQ ID NO: 141246 - DNA, 22 bp, synthetic construct
  misc_feature 1..22: note = chemically synthesized
  source 1..22: mol_type = other DNA
ccgtgggagatagaatactaat

SEQ ID NO: 141247 - DNA, 22 bp, synthetic construct
  misc_feature 1..22: note = chemically synthesized
  source 1..22: mol_type = other DNA
cgtgggagatagaatactaata

SEQ ID NO: 141248 - DNA, 22 bp, synthetic construct
  misc_feature 1..22: note = chemically synthesized
  source 1..22: mol_type = other DNA
ataaaggcttaaattctaaaac

SEQ ID NO: 141249 - DNA, 22 bp, synthetic construct
  misc_feature 1..22: note = chemically synthesized
  source 1..22: mol_type = other DNA
aaattctaaaaccagcaagcta

SEQ ID NO: 141250 - DNA, 22 bp, synthetic construct
  misc_feature 1..22: note = chemically synthesized
  source 1..22: mol_type = other DNA
aattctaaaaccagcaagctag

SEQ ID NO: 141251 - DNA, 22 bp, synthetic construct
  misc_feature 1..22: note = chemically synthesized
  source 1..22: mol_type = other DNA
taaaaccagcaagctagggctt

SEQ ID NO: 141252 - DNA, 22 bp, synthetic construct
  misc_feature 1..22: note = chemically synthesized
  source 1..22: mol_type = other DNA
aaaccagcaagctagggcttcg

SEQ ID NO: 141253 - DNA, 22 bp, synthetic construct
  misc_feature 1..22: note = chemically synthesized
  source 1..22: mol_type = other DNA
gggcttcgtgacttgcatgaaa

SEQ ID NO: 141254 - DNA, 22 bp, synthetic construct
  misc_feature 1..22: note = chemically synthesized
  source 1..22: mol_type = other DNA
cgtgacttgcatgaaactggct

SEQ ID NO: 141255 - DNA, 22 bp, synthetic construct
  misc_feature 1..22: note = chemically synthesized
  source 1..22: mol_type = other DNA
gtgacttgcatgaaactggctc

SEQ ID NO: 141256 - DNA, 22 bp, synthetic construct
  misc_feature 1..22: note = chemically synthesized
  source 1..22: mol_type = other DNA
gcatgaaactggctctctggaa

SEQ ID NO: 141257 - DNA, 22 bp, synthetic construct
  misc_feature 1..22: note = chemically synthesized
  source 1..22: mol_type = other DNA
catgaaactggctctctggaag

SEQ ID NO: 141258 - DNA, 22 bp, synthetic construct
  misc_feature 1..22: note = chemically synthesized
  source 1..22: mol_type = other DNA
gctctctggaagtagaagggag

SEQ ID NO: 141259 - DNA, 22 bp, synthetic construct
  misc_feature 1..22: note = chemically synthesized
  source 1..22: mol_type = other DNA
tctggaagtagaagggagagta

SEQ ID NO: 141260 - DNA, 22 bp, synthetic construct
  misc_feature 1..22: note = chemically synthesized
  source 1..22: mol_type = other DNA
tggaagtagaagggagagtaag

SEQ ID NO: 141261 - DNA, 22 bp, synthetic construct
  misc_feature 1..22: note = chemically synthesized
  source 1..22: mol_type = other DNA
gaagtagaagggagagtaagac

SEQ ID NO: 141262 - DNA, 22 bp, synthetic construct
  misc_feature 1..22: note = chemically synthesized
  source 1..22: mol_type = other DNA
ggaaagaccagatagtacaggg

SEQ ID NO: 141263 - DNA, 22 bp, synthetic construct
  misc_feature 1..22: note = chemically synthesized
  source 1..22: mol_type = other DNA
gctacaaaaatacaagctttta

SEQ ID NO: 141264 - DNA, 22 bp, synthetic construct
  misc_feature 1..22: note = chemically synthesized
  source 1..22: mol_type = other DNA
caaaaatacaagcttttactat

SEQ ID NO: 141265 - DNA, 22 bp, synthetic construct
  misc_feature 1..22: note = chemically synthesized
  source 1..22: mol_type = other DNA
ttactatgctattgcaatacta

SEQ ID NO: 141266 - DNA, 22 bp, synthetic construct
  misc_feature 1..22: note = chemically synthesized
  source 1..22: mol_type = other DNA
tactatgctattgcaatactaa

SEQ ID NO: 141267 - DNA, 22 bp, synthetic construct
  misc_feature 1..22: note = chemically synthesized
  source 1..22: mol_type = other DNA
actatgctattgcaatactaaa

SEQ ID NO: 141268 - DNA, 22 bp, synthetic construct
  misc_feature 1..22: note = chemically synthesized
  source 1..22: mol_type = other DNA
ctatgctattgcaatactaaac

SEQ ID NO: 141269 - DNA, 22 bp, synthetic construct
  misc_feature 1..22: note = chemically synthesized
  source 1..22: mol_type = other DNA
tgctattgcaatactaaacgat

SEQ ID NO: 141270 - DNA, 22 bp, synthetic construct
  misc_feature 1..22: note = chemically synthesized
  source 1..22: mol_type = other DNA
ttgcaatactaaacgataagca

SEQ ID NO: 141271 - DNA, 22 bp, synthetic construct
  misc_feature 1..22: note = chemically synthesized
  source 1..22: mol_type = other DNA
caatactaaacgataagcatta

SEQ ID NO: 141272 - DNA, 22 bp, synthetic construct
  misc_feature 1..22: note = chemically synthesized
  source 1..22: mol_type = other DNA
aacgataagcattaggatgtta

SEQ ID NO: 141273 - DNA, 22 bp, synthetic construct
  misc_feature 1..22: note = chemically synthesized
  source 1..22: mol_type = other DNA
ggatgttaagtgactcaggaaa

SEQ ID NO: 141274 - DNA, 22 bp, synthetic construct
  misc_feature 1..22: note = chemically synthesized
  source 1..22: mol_type = other DNA
agtgactcaggaaataagattt

SEQ ID NO: 141275 - DNA, 22 bp, synthetic construct
  misc_feature 1..22: note = chemically synthesized
  source 1..22: mol_type = other DNA
aggaaataagattttgggaaaa

SEQ ID NO: 141276 - DNA, 22 bp, synthetic construct
  misc_feature 1..22: note = chemically synthesized
  source 1..22: mol_type = other DNA
tgggaaaaagtaatctgcttat

SEQ ID NO: 141277 - DNA, 22 bp, synthetic construct
  misc_feature 1..22: note = chemically synthesized
  source 1..22: mol_type = other DNA
gggaaaaagtaatctgcttatg

SEQ ID NO: 141278 - DNA, 22 bp, synthetic construct
  misc_feature 1..22: note = chemically synthesized
  source 1..22: mol_type = other DNA
ggaaaaagtaatctgcttatgt

SEQ ID NO: 141279 - DNA, 22 bp, synthetic construct
  misc_feature 1..22: note = chemically synthesized
  source 1..22: mol_type = other DNA
cttatgtgcacaaaatggattc

SEQ ID NO: 141280 - DNA, 22 bp, synthetic construct
  misc_feature 1..22: note = chemically synthesized
  source 1..22: mol_type = other DNA
atgtgcacaaaatggattcaag

SEQ ID NO: 141281 - DNA, 22 bp, synthetic construct
  misc_feature 1..22: note = chemically synthesized
  source 1..22: mol_type = other DNA
tgtgcacaaaatggattcaagt

SEQ ID NO: 141282 - DNA, 22 bp, synthetic construct
  misc_feature 1..22: note = chemically synthesized
  source 1..22: mol_type = other DNA
aagtttgcagataaaataaaat

SEQ ID NO: 141283 - DNA, 22 bp, synthetic construct
  misc_feature 1..22: note = chemically synthesized
  source 1..22: mol_type = other DNA
gcagataaaataaaatatggat

SEQ ID NO: 141284 - DNA, 22 bp, synthetic construct
  misc_feature 1..22: note = chemically synthesized
  source 1..22: mol_type = other DNA
cagataaaataaaatatggatg

SEQ ID NO: 141285 - DNA, 22 bp, synthetic construct
  misc_feature 1..22: note = chemically synthesized
  source 1..22: mol_type = other DNA
aaggggacagatacaatggttc

SEQ ID NO: 141286 - DNA, 22 bp, synthetic construct
  misc_feature 1..22: note = chemically synthesized
  source 1..22: mol_type = other DNA
aaacccaagaggagcagtgagt

SEQ ID NO: 141287 - DNA, 22 bp, synthetic construct
  misc_feature 1..22: note = chemically synthesized
  source 1..22: mol_type = other DNA
tggaatttgaaggatggacaaa

SEQ ID NO: 141288 - DNA, 22 bp, synthetic construct
  misc_feature 1..22: note = chemically synthesized
  source 1..22: mol_type = other DNA
gaaggatggacaaaggtggggt

SEQ ID NO: 141289 - DNA, 22 bp, synthetic construct
  misc_feature 1..22: note = chemically synthesized
  source 1..22: mol_type = other DNA
aaggatggacaaaggtggggtg

SEQ ID NO: 141290 - DNA, 22 bp, synthetic construct
  misc_feature 1..22: note = chemically synthesized
  source 1..22: mol_type = other DNA
gactgactgtgggagatgagaa

SEQ ID NO: 141291 - DNA, 22 bp, synthetic construct
  misc_feature 1..22: note = chemically synthesized
  source 1..22: mol_type = other DNA
actgtgggagatgagaaggaag

SEQ ID NO: 141292 - DNA, 22 bp, synthetic construct
  misc_feature 1..22: note = chemically synthesized
  source 1..22: mol_type = other DNA
tgggagatgagaaggaagaagg

SEQ ID NO: 141293 - DNA, 22 bp, synthetic construct
  misc_feature 1..22: note = chemically synthesized
  source 1..22: mol_type = other DNA
aaagctcccagactggtgaaga

SEQ ID NO: 141294 - DNA, 22 bp, synthetic construct
  misc_feature 1..22: note = chemically synthesized
  source 1..22: mol_type = other DNA
ccagactggtgaagataacagg

SEQ ID NO: 141295 - DNA, 22 bp, synthetic construct
  misc_feature 1..22: note = chemically synthesized
  source 1..22: mol_type = other DNA
gtgaagataacaggaggaaacc

SEQ ID NO: 141296 - DNA, 22 bp, synthetic construct
  misc_feature 1..22: note = chemically synthesized
  source 1..22: mol_type = other DNA
acctggtgactctcatgtgtga

SEQ ID NO: 141297 - DNA, 22 bp, synthetic construct
  misc_feature 1..22: note = chemically synthesized
  source 1..22: mol_type = other DNA
gtgactctcatgtgtgaagggt

SEQ ID NO: 141298 - DNA, 22 bp, synthetic construct
  misc_feature 1..22: note = chemically synthesized
  source 1..22: mol_type = other DNA
tcatgtgtgaagggtagaggga

SEQ ID NO: 141299 - DNA, 22 bp, synthetic construct
  misc_feature 1..22: note = chemically synthesized
  source 1..22: mol_type = other DNA
atgtgtgaagggtagagggata

SEQ ID NO: 141300 - DNA, 22 bp, synthetic construct
  misc_feature 1..22: note = chemically synthesized
  source 1..22: mol_type = other DNA
acagatttactttttaggaagt

SEQ ID NO: 141301 - DNA, 22 bp, synthetic construct
  misc_feature 1..22: note = chemically synthesized
  source 1..22: mol_type = other DNA
actttttaggaagtgctagatt

SEQ ID NO: 141302 - DNA, 22 bp, synthetic construct
  misc_feature 1..22: note = chemically synthesized
  source 1..22: mol_type = other DNA
ctttttaggaagtgctagattg

SEQ ID NO: 141303 - DNA, 22 bp, synthetic construct
  misc_feature 1..22: note = chemically synthesized
  source 1..22: mol_type = other DNA
tttaggaagtgctagattggtc

SEQ ID NO: 141304 - DNA, 22 bp, synthetic construct
  misc_feature 1..22: note = chemically synthesized
  source 1..22: mol_type = other DNA
ttaggaagtgctagattggtca

SEQ ID NO: 141305 - DNA, 22 bp, synthetic construct
  misc_feature 1..22: note = chemically synthesized
  source 1..22: mol_type = other DNA
taggaagtgctagattggtcag

SEQ ID NO: 141306 - DNA, 22 bp, synthetic construct
  misc_feature 1..22: note = chemically synthesized
  source 1..22: mol_type = other DNA
aggaagtgctagattggtcagg

SEQ ID NO: 141307 - DNA, 22 bp, synthetic construct
  misc_feature 1..22: note = chemically synthesized
  source 1..22: mol_type = other DNA
ggaagtgctagattggtcaggg

SEQ ID NO: 141308 - DNA, 22 bp, synthetic construct
  misc_feature 1..22: note = chemically synthesized
  source 1..22: mol_type = other DNA
gattggtcagggagttttgacc

SEQ ID NO: 141309 - DNA, 22 bp, synthetic construct
  misc_feature 1..22: note = chemically synthesized
  source 1..22: mol_type = other DNA
gtcagggagttttgaccttcag

SEQ ID NO: 141310 - DNA, 22 bp, synthetic construct
  misc_feature 1..22: note = chemically synthesized
  source 1..22: mol_type = other DNA
tgaccttcaggtcttgtgtctt

SEQ ID NO: 141311 - DNA, 22 bp, synthetic construct
  misc_feature 1..22: note = chemically synthesized
  source 1..22: mol_type = other DNA
gaccttcaggtcttgtgtcttt

SEQ ID NO: 141312 - DNA, 22 bp, synthetic construct
  misc_feature 1..22: note = chemically synthesized
  source 1..22: mol_type = other DNA
accttcaggtcttgtgtctttc

SEQ ID NO: 141313 - DNA, 22 bp, synthetic construct
  misc_feature 1..22: note = chemically synthesized
  source 1..22: mol_type = other DNA
caggtcttgtgtctttcatatc

SEQ ID NO: 141314 - DNA, 22 bp, synthetic construct
  misc_feature 1..22: note = chemically synthesized
  source 1..22: mol_type = other DNA
aggtcttgtgtctttcatatca

SEQ ID NO: 141315 - DNA, 22 bp, synthetic construct
  misc_feature 1..22: note = chemically synthesized
  source 1..22: mol_type = other DNA
gtgtctttcatatcaaggaacc

SEQ ID NO: 141316 - DNA, 22 bp, synthetic construct
  misc_feature 1..22: note = chemically synthesized
  source 1..22: mol_type = other DNA
tgtctttcatatcaaggaacct

SEQ ID NO: 141317 - DNA, 22 bp, synthetic construct
  misc_feature 1..22: note = chemically synthesized
  source 1..22: mol_type = other DNA
tcatatcaaggaacctttgcat

SEQ ID NO: 141318 - DNA, 22 bp, synthetic construct
  misc_feature 1..22: note = chemically synthesized
  source 1..22: mol_type = other DNA
catatcaaggaacctttgcatt

SEQ ID NO: 141319 - DNA, 22 bp, synthetic construct
  misc_feature 1..22: note = chemically synthesized
  source 1..22: mol_type = other DNA
atatcaaggaacctttgcattt

SEQ ID NO: 141320 - DNA, 22 bp, synthetic construct
  misc_feature 1..22: note = chemically synthesized
  source 1..22: mol_type = other DNA
tgcattttccaagttagagtgc

SEQ ID NO: 141321 - DNA, 22 bp, synthetic construct
  misc_feature 1..22: note = chemically synthesized
  source 1..22: mol_type = other DNA
gcattttccaagttagagtgcc

SEQ ID NO: 141322 - DNA, 22 bp, synthetic construct
  misc_feature 1..22: note = chemically synthesized
  source 1..22: mol_type = other DNA
cattttccaagttagagtgcca

SEQ ID NO: 141323 - DNA, 22 bp, synthetic construct
  misc_feature 1..22: note = chemically synthesized
  source 1..22: mol_type = other DNA
tccaagttagagtgccatattt

SEQ ID NO: 141324 - DNA, 22 bp, synthetic construct
  misc_feature 1..22: note = chemically synthesized
  source 1..22: mol_type = other DNA
ccaagttagagtgccatatttt

SEQ ID NO: 141325 - DNA, 22 bp, synthetic construct
  misc_feature 1..22: note = chemically synthesized
  source 1..22: mol_type = other DNA
caagttagagtgccatattttg

SEQ ID NO: 141326 - DNA, 22 bp, synthetic construct
  misc_feature 1..22: note = chemically synthesized
  source 1..22: mol_type = other DNA
gagtgccatattttggcaaata

SEQ ID NO: 141327 - DNA, 22 bp, synthetic construct
  misc_feature 1..22: note = chemically synthesized
  source 1..22: mol_type = other DNA
tggcaaatataactttattagt

SEQ ID NO: 141328 - DNA, 22 bp, synthetic construct
  misc_feature 1..22: note = chemically synthesized
  source 1..22: mol_type = other DNA
ggcaaatataactttattagta

SEQ ID NO: 141329 - DNA, 22 bp, synthetic construct
  misc_feature 1..22: note = chemically synthesized
  source 1..22: mol_type = other DNA
gcaaatataactttattagtaa

SEQ ID NO: 141330 - DNA, 22 bp, synthetic construct
  misc_feature 1..22: note = chemically synthesized
  source 1..22: mol_type = other DNA
tattagtaattttatagtgctc

SEQ ID NO: 141331 - DNA, 22 bp, synthetic construct
  misc_feature 1..22: note = chemically synthesized
  source 1..22: mol_type = other DNA
attagtaattttatagtgctct

SEQ ID NO: 141332 - DNA, 22 bp, synthetic construct
  misc_feature 1..22: note = chemically synthesized
  source 1..22: mol_type = other DNA
ttagtaattttatagtgctctc

SEQ ID NO: 141333 - DNA, 22 bp, synthetic construct
  misc_feature 1..22: note = chemically synthesized
  source 1..22: mol_type = other DNA
gtaattttatagtgctctcaca

SEQ ID NO: 141334 - DNA, 22 bp, synthetic construct
  misc_feature 1..22: note = chemically synthesized
  source 1..22: mol_type = other DNA
tatagtgctctcacattgatca

SEQ ID NO: 141335 - DNA, 22 bp, synthetic construct
  misc_feature 1..22: note = chemically synthesized
  source 1..22: mol_type = other DNA
atagtgctctcacattgatcag

SEQ ID NO: 141336 - DNA, 22 bp, synthetic construct
  misc_feature 1..22: note = chemically synthesized
  source 1..22: mol_type = other DNA
tagtgctctcacattgatcaga

SEQ ID NO: 141337 - DNA, 22 bp, synthetic construct
  misc_feature 1..22: note = chemically synthesized
  source 1..22: mol_type = other DNA
tcacattgatcagactttttcc

SEQ ID NO: 141338 - DNA, 22 bp, synthetic construct
  misc_feature 1..22: note = chemically synthesized
  source 1..22: mol_type = other DNA
acattgatcagactttttcctg

SEQ ID NO: 141339 - DNA, 22 bp, synthetic construct
  misc_feature 1..22: note = chemically synthesized
  source 1..22: mol_type = other DNA
atcagactttttcctgtgaatt

SEQ ID NO: 141340 - DNA, 22 bp, synthetic construct
  misc_feature 1..22: note = chemically synthesized
  source 1..22: mol_type = other DNA
tttcctgtgaattacttttgaa

SEQ ID NO: 141341 - DNA, 22 bp, synthetic construct
  misc_feature 1..22: note = chemically synthesized
  source 1..22: mol_type = other DNA
ttcctgtgaattacttttgaat

SEQ ID NO: 141342 - DNA, 22 bp, synthetic construct
  misc_feature 1..22: note = chemically synthesized
  source 1..22: mol_type = other DNA
tcctgtgaattacttttgaatt

SEQ ID NO: 141343 - DNA, 22 bp, synthetic construct
  misc_feature 1..22: note = chemically synthesized
  source 1..22: mol_type = other DNA
cctgtgaattacttttgaattt

SEQ ID NO: 141344 - DNA, 22 bp, synthetic construct
  misc_feature 1..22: note = chemically synthesized
  source 1..22: mol_type = other DNA
ctgtgaattacttttgaatttg

SEQ ID NO: 141345 - DNA, 22 bp, synthetic construct
  misc_feature 1..22: note = chemically synthesized
  source 1..22: mol_type = other DNA
tgaattacttttgaatttggct

SEQ ID NO: 141346 - DNA, 22 bp, synthetic construct
  misc_feature 1..22: note = chemically synthesized
  source 1..22: mol_type = other DNA
cttttgaatttggctgtatata

SEQ ID NO: 141347 - DNA, 22 bp, synthetic construct
  misc_feature 1..22: note = chemically synthesized
  source 1..22: mol_type = other DNA
ttgaatttggctgtatatatcc

SEQ ID NO: 141348 - DNA, 22 bp, synthetic construct
  misc_feature 1..22: note = chemically synthesized
  source 1..22: mol_type = other DNA
tgaatttggctgtatatatcca

SEQ ID NO: 141349 - DNA, 22 bp, synthetic construct
  misc_feature 1..22: note = chemically synthesized
  source 1..22: mol_type = other DNA
gaatttggctgtatatatccag

SEQ ID NO: 141350 - DNA, 22 bp, synthetic construct
  misc_feature 1..22: note = chemically synthesized
  source 1..22: mol_type = other DNA
aatttggctgtatatatccaga

SEQ ID NO: 141351 - DNA, 22 bp, synthetic construct
  misc_feature 1..22: note = chemically synthesized
  source 1..22: mol_type = other DNA
ggctgtatatatccagaatatg

SEQ ID NO: 141352 - DNA, 22 bp, synthetic construct
  misc_feature 1..22: note = chemically synthesized
  source 1..22: mol_type = other DNA
gctgtatatatccagaatatgg

SEQ ID NO: 141353 - DNA, 22 bp, synthetic construct
  misc_feature 1..22: note = chemically synthesized
  source 1..22: mol_type = other DNA
tatatatccagaatatgggaga

SEQ ID NO: 141354 - DNA, 22 bp, synthetic construct
  misc_feature 1..22: note = chemically synthesized
  source 1..22: mol_type = other DNA
ttgtagttgcaggctatcaaca

SEQ ID NO: 141355 - DNA, 22 bp, synthetic construct
  misc_feature 1..22: note = chemically synthesized
  source 1..22: mol_type = other DNA
tagttgcaggctatcaacaata

SEQ ID NO: 141356 - DNA, 22 bp, synthetic construct
  misc_feature 1..22: note = chemically synthesized
  source 1..22: mol_type = other DNA
caggctatcaacaatactggtc

SEQ ID NO: 141357 - DNA, 22 bp, synthetic construct
  misc_feature 1..22: note = chemically synthesized
  source 1..22: mol_type = other DNA
tcaacaatactggtctctctga

SEQ ID NO: 141358 - DNA, 22 bp, synthetic construct
  misc_feature 1..22: note = chemically synthesized
  source 1..22: mol_type = other DNA
gtctctctgagccttataacct

SEQ ID NO: 141359 - DNA, 22 bp, synthetic construct
  misc_feature 1..22: note = chemically synthesized
  source 1..22: mol_type = other DNA
tctgagccttataacctttcaa

SEQ ID NO: 141360 - DNA, 22 bp, synthetic construct
  misc_feature 1..22: note = chemically synthesized
  source 1..22: mol_type = other DNA
tgagccttataacctttcaata

SEQ ID NO: 141361 - DNA, 22 bp, synthetic construct
  misc_feature 1..22: note = chemically synthesized
  source 1..22: mol_type = other DNA
agccttataacctttcaatatg

SEQ ID NO: 141362 - DNA, 22 bp, synthetic construct
  misc_feature 1..22: note = chemically synthesized
  source 1..22: mol_type = other DNA
ataacctttcaatatgcccata

SEQ ID NO: 141363 - DNA, 22 bp, synthetic construct
  misc_feature 1..22: note = chemically synthesized
  source 1..22: mol_type = other DNA
taacctttcaatatgcccataa

SEQ ID NO: 141364 - DNA, 22 bp, synthetic construct
  misc_feature 1..22: note = chemically synthesized
  source 1..22: mol_type = other DNA
tcaatatgcccataaacagagt

SEQ ID NO: 141365 - DNA, 22 bp, synthetic construct
  misc_feature 1..22: note = chemically synthesized
  source 1..22: mol_type = other DNA
caatatgcccataaacagagta

SEQ ID NO: 141366 - DNA, 22 bp, synthetic construct
  misc_feature 1..22: note = chemically synthesized
  source 1..22: mol_type = other DNA
aatatgcccataaacagagtaa

SEQ ID NO: 141367 - DNA, 22 bp, synthetic construct
  misc_feature 1..22: note = chemically synthesized
  source 1..22: mol_type = other DNA
ttcatggcactaaatattttca

SEQ ID NO: 141368 - DNA, 22 bp, synthetic construct
  misc_feature 1..22: note = chemically synthesized
  source 1..22: mol_type = other DNA
atggcactaaatattttcacct

SEQ ID NO: 141369 - DNA, 22 bp, synthetic construct
  misc_feature 1..22: note = chemically synthesized
  source 1..22: mol_type = other DNA
aatattttcacctagtcagtca

SEQ ID NO: 141370 - DNA, 22 bp, synthetic construct
  misc_feature 1..22: note = chemically synthesized
  source 1..22: mol_type = other DNA
tcacctagtcagtcaacaaatg

SEQ ID NO: 141371 - DNA, 22 bp, synthetic construct
  misc_feature 1..22: note = chemically synthesized
  source 1..22: mol_type = other DNA
cacctagtcagtcaacaaatgg

SEQ ID NO: 141372 - DNA, 22 bp, synthetic construct
  misc_feature 1..22: note = chemically synthesized
  source 1..22: mol_type = other DNA
acctagtcagtcaacaaatggg

SEQ ID NO: 141373 - DNA, 22 bp, synthetic construct
  misc_feature 1..22: note = chemically synthesized
  source 1..22: mol_type = other DNA
gtcagtcaacaaatgggagcaa

SEQ ID NO: 141374 - DNA, 22 bp, synthetic construct
  misc_feature 1..22: note = chemically synthesized
  source 1..22: mol_type = other DNA
tttgatacatatttttatatat

SEQ ID NO: 141375 - DNA, 22 bp, synthetic construct
  misc_feature 1..22: note = chemically synthesized
  source 1..22: mol_type = other DNA
ttgatacatatttttatatatt

SEQ ID NO: 141376 - DNA, 22 bp, synthetic construct
  misc_feature 1..22: note = chemically synthesized
  source 1..22: mol_type = other DNA
tgatacatatttttatatattt

SEQ ID NO: 141377 - DNA, 22 bp, synthetic construct
  misc_feature 1..22: note = chemically synthesized
  source 1..22: mol_type = other DNA
gatacatatttttatatattta

SEQ ID NO: 141378 - DNA, 22 bp, synthetic construct
  misc_feature 1..22: note = chemically synthesized
  source 1..22: mol_type = other DNA
atacatatttttatatatttat

SEQ ID NO: 141379 - DNA, 22 bp, synthetic construct
  misc_feature 1..22: note = chemically synthesized
  source 1..22: mol_type = other DNA
ttatatatttatggggtacatg

SEQ ID NO: 141380 - DNA, 22 bp, synthetic construct
  misc_feature 1..22: note = chemically synthesized
  source 1..22: mol_type = other DNA
tatatatttatggggtacatgt

SEQ ID NO: 141381 - DNA, 22 bp, synthetic construct
  misc_feature 1..22: note = chemically synthesized
  source 1..22: mol_type = other DNA
atatatttatggggtacatgtg

SEQ ID NO: 141382 - DNA, 22 bp, synthetic construct
  misc_feature 1..22: note = chemically synthesized
  source 1..22: mol_type = other DNA
tatatttatggggtacatgtga

SEQ ID NO: 141383 - DNA, 22 bp, synthetic construct
  misc_feature 1..22: note = chemically synthesized
  source 1..22: mol_type = other DNA
atggggtacatgtgatacttac

SEQ ID NO: 141384 - DNA, 22 bp, synthetic construct
  misc_feature 1..22: note = chemically synthesized
  source 1..22: mol_type = other DNA
tggggtacatgtgatacttaca

SEQ ID NO: 141385 - DNA, 22 bp, synthetic construct
  misc_feature 1..22: note = chemically synthesized
  source 1..22: mol_type = other DNA
acatgcctagaacatgtgatga

SEQ ID NO: 141386 - DNA, 22 bp, synthetic construct
  misc_feature 1..22: note = chemically synthesized
  source 1..22: mol_type = other DNA
catgcctagaacatgtgatgat

SEQ ID NO: 141387 - DNA, 22 bp, synthetic construct
  misc_feature 1..22: note = chemically synthesized
  source 1..22: mol_type = other DNA
gaacatgtgatgattaagtcta

SEQ ID NO: 141388 - DNA, 22 bp, synthetic construct
  misc_feature 1..22: note = chemically synthesized
  source 1..22: mol_type = other DNA
agtctagatatttaggatatcc

SEQ ID NO: 141389 - DNA, 22 bp, synthetic construct
  misc_feature 1..22: note = chemically synthesized
  source 1..22: mol_type = other DNA
gatatttaggatatccattgct

SEQ ID NO: 141390 - DNA, 22 bp, synthetic construct
  misc_feature 1..22: note = chemically synthesized
  source 1..22: mol_type = other DNA
aggatatccattgctttgagca

SEQ ID NO: 141391 - DNA, 22 bp, synthetic construct
  misc_feature 1..22: note = chemically synthesized
  source 1..22: mol_type = other DNA
ggatatccattgctttgagcat

SEQ ID NO: 141392 - DNA, 22 bp, synthetic construct
  misc_feature 1..22: note = chemically synthesized
  source 1..22: mol_type = other DNA
ctttgagcatttatcatttcta

SEQ ID NO: 141393 - DNA, 22 bp, synthetic construct
  misc_feature 1..22: note = chemically synthesized
  source 1..22: mol_type = other DNA
tgagcatttatcatttctatgt

SEQ ID NO: 141394 - DNA, 22 bp, synthetic construct
  misc_feature 1..22: note = chemically synthesized
  source 1..22: mol_type = other DNA
gagcatttatcatttctatgta

SEQ ID NO: 141395 - DNA, 22 bp, synthetic construct
  misc_feature 1..22: note = chemically synthesized
  source 1..22: mol_type = other DNA
agcatttatcatttctatgtat

SEQ ID NO: 141396 - DNA, 22 bp, synthetic construct
  misc_feature 1..22: note = chemically synthesized
  source 1..22: mol_type = other DNA
atcatttctatgtattgagaaa

SEQ ID NO: 141397 - DNA, 22 bp, synthetic construct
  misc_feature 1..22: note = chemically synthesized
  source 1..22: mol_type = other DNA
tcatttctatgtattgagaaaa

SEQ ID NO: 141398 - DNA, 22 bp, synthetic construct
  misc_feature 1..22: note = chemically synthesized
  source 1..22: mol_type = other DNA
ctatgtattgagaaaatttcaa

SEQ ID NO: 141399 - DNA, 22 bp, synthetic construct
  misc_feature 1..22: note = chemically synthesized
  source 1..22: mol_type = other DNA
tatgtattgagaaaatttcaaa

SEQ ID NO: 141400 - DNA, 22 bp, synthetic construct
  misc_feature 1..22: note = chemically synthesized
  source 1..22: mol_type = other DNA
tgtattgagaaaatttcaaatc

SEQ ID NO: 141401 - DNA, 22 bp, synthetic construct
  misc_feature 1..22: note = chemically synthesized
  source 1..22: mol_type = other DNA
agaaaatttcaaatcctcattt

SEQ ID NO: 141402 - DNA, 22 bp, synthetic construct
  misc_feature 1..22: note = chemically synthesized
  source 1..22: mol_type = other DNA
caaatcctcatttctagccatt

SEQ ID NO: 141403 - DNA, 22 bp, synthetic construct
  misc_feature 1..22: note = chemically synthesized
  source 1..22: mol_type = other DNA
aaatcctcatttctagccattt

SEQ ID NO: 141404 - DNA, 22 bp, synthetic construct
  misc_feature 1..22: note = chemically synthesized
  source 1..22: mol_type = other DNA
atttctagccattttgaaatat

SEQ ID NO: 141405 - DNA, 22 bp, synthetic construct
  misc_feature 1..22: note = chemically synthesized
  source 1..22: mol_type = other DNA
ctagccattttgaaatatataa

SEQ ID NO: 141406 - DNA, 22 bp, synthetic construct
  misc_feature 1..22: note = chemically synthesized
  source 1..22: mol_type = other DNA
tagccattttgaaatatataat

SEQ ID NO: 141407 - DNA, 22 bp, synthetic construct
  misc_feature 1..22: note = chemically synthesized
  source 1..22: mol_type = other DNA
gccattttgaaatatataataa

SEQ ID NO: 141408 - DNA, 22 bp, synthetic construct
  misc_feature 1..22: note = chemically synthesized
  source 1..22: mol_type = other DNA
tgaaatatataataaatagtaa

SEQ ID NO: 141409 - DNA, 22 bp, synthetic construct
  misc_feature 1..22: note = chemically synthesized
  source 1..22: mol_type = other DNA
gaaatatataataaatagtaat

SEQ ID NO: 141410 - DNA, 22 bp, synthetic construct
  misc_feature 1..22: note = chemically synthesized
  source 1..22: mol_type = other DNA
aaatatataataaatagtaatt

SEQ ID NO: 141411 - DNA, 22 bp, synthetic construct
  misc_feature 1..22: note = chemically synthesized
  source 1..22: mol_type = other DNA
actatagtcaccctactcaaat

SEQ ID NO: 141412 - DNA, 22 bp, synthetic construct
  misc_feature 1..22: note = chemically synthesized
  source 1..22: mol_type = other DNA
tagtcaccctactcaaatatca

SEQ ID NO: 141413 - DNA, 22 bp, synthetic construct
  misc_feature 1..22: note = chemically synthesized
  source 1..22: mol_type = other DNA
ctcaaatatcaaacattatggc

SEQ ID NO: 141414 - DNA, 22 bp, synthetic construct
  misc_feature 1..22: note = chemically synthesized
  source 1..22: mol_type = other DNA
aaatatcaaacattatggctta

SEQ ID NO: 141415 - DNA, 22 bp, synthetic construct
  misc_feature 1..22: note = chemically synthesized
  source 1..22: mol_type = other DNA
tggcttaatccttctatccaac

SEQ ID NO: 141416 - DNA, 22 bp, synthetic construct
  misc_feature 1..22: note = chemically synthesized
  source 1..22: mol_type = other DNA
aatccttctatccaactgtgtt

SEQ ID NO: 141417 - DNA, 22 bp, synthetic construct
  misc_feature 1..22: note = chemically synthesized
  source 1..22: mol_type = other DNA
atccttctatccaactgtgttt

SEQ ID NO: 141418 - DNA, 22 bp, synthetic construct
  misc_feature 1..22: note = chemically synthesized
  source 1..22: mol_type = other DNA
ctatccaactgtgtttgtacct

SEQ ID NO: 141419 - DNA, 22 bp, synthetic construct
  misc_feature 1..22: note = chemically synthesized
  source 1..22: mol_type = other DNA
tatccaactgtgtttgtaccta

SEQ ID NO: 141420 - DNA, 22 bp, synthetic construct
  misc_feature 1..22: note = chemically synthesized
  source 1..22: mol_type = other DNA
tccaactgtgtttgtacctatt

SEQ ID NO: 141421 - DNA, 22 bp, synthetic construct
  misc_feature 1..22: note = chemically synthesized
  source 1..22: mol_type = other DNA
tgtttgtacctattaaccaaca

SEQ ID NO: 141422 - DNA, 22 bp, synthetic construct
  misc_feature 1..22: note = chemically synthesized
  source 1..22: mol_type = other DNA
gtacctattaaccaacatctct

SEQ ID NO: 141423 - DNA, 22 bp, synthetic construct
  misc_feature 1..22: note = chemically synthesized
  source 1..22: mol_type = other DNA
tacctattaaccaacatctctt

SEQ ID NO: 141424 - DNA, 22 bp, synthetic construct
  misc_feature 1..22: note = chemically synthesized
  source 1..22: mol_type = other DNA
ttaaccaacatctcttaaatcc

SEQ ID NO: 141425 - DNA, 22 bp, synthetic construct
  misc_feature 1..22: note = chemically synthesized
  source 1..22: mol_type = other DNA
accaacatctcttaaatcccct

SEQ ID NO: 141426 - DNA, 22 bp, synthetic construct
  misc_feature 1..22: note = chemically synthesized
  source 1..22: mol_type = other DNA
ttaaatcccctcccatacacac

SEQ ID NO: 141427 - DNA, 22 bp, synthetic construct
  misc_feature 1..22: note = chemically synthesized
  source 1..22: mol_type = other DNA
aaatcccctcccatacacactc

SEQ ID NO: 141428 - DNA, 22 bp, synthetic construct
  misc_feature 1..22: note = chemically synthesized
  source 1..22: mol_type = other DNA
aatcccctcccatacacactca

SEQ ID NO: 141429 - DNA, 22 bp, synthetic construct
  misc_feature 1..22: note = chemically synthesized
  source 1..22: mol_type = other DNA
ccatacacactcacactttttc

SEQ ID NO: 141430 - DNA, 22 bp, synthetic construct
  misc_feature 1..22: note = chemically synthesized
  source 1..22: mol_type = other DNA
acactttttccagcctctgata

SEQ ID NO: 141431 - DNA, 22 bp, synthetic construct
  misc_feature 1..22: note = chemically synthesized
  source 1..22: mol_type = other DNA
tttccagcctctgataactatc

SEQ ID NO: 141432 - DNA, 22 bp, synthetic construct
  misc_feature 1..22: note = chemically synthesized
  source 1..22: mol_type = other DNA
ttccagcctctgataactatca

SEQ ID NO: 141433 - DNA, 22 bp, synthetic construct
  misc_feature 1..22: note = chemically synthesized
  source 1..22: mol_type = other DNA
tccagcctctgataactatcat

SEQ ID NO: 141434 - DNA, 22 bp, synthetic construct
  misc_feature 1..22: note = chemically synthesized
  source 1..22: mol_type = other DNA
ccagcctctgataactatcatt

SEQ ID NO: 141435 - DNA, 22 bp, synthetic construct
  misc_feature 1..22: note = chemically synthesized
  source 1..22: mol_type = other DNA
cagcctctgataactatcattc

SEQ ID NO: 141436 - DNA, 22 bp, synthetic construct
  misc_feature 1..22: note = chemically synthesized
  source 1..22: mol_type = other DNA
tgataactatcattctactctc

SEQ ID NO: 141437 - DNA, 22 bp, synthetic construct
  misc_feature 1..22: note = chemically synthesized
  source 1..22: mol_type = other DNA
ataactatcattctactctcta

SEQ ID NO: 141438 - DNA, 22 bp, synthetic construct
  misc_feature 1..22: note = chemically synthesized
  source 1..22: mol_type = other DNA
tcattctactctctaccaccat

SEQ ID NO: 141439 - DNA, 22 bp, synthetic construct
  misc_feature 1..22: note = chemically synthesized
  source 1..22: mol_type = other DNA
tactctctaccaccatgagacc

SEQ ID NO: 141440 - DNA, 22 bp, synthetic construct
  misc_feature 1..22: note = chemically synthesized
  source 1..22: mol_type = other DNA
ctctctaccaccatgagaccca

SEQ ID NO: 141441 - DNA, 22 bp, synthetic construct
  misc_feature 1..22: note = chemically synthesized
  source 1..22: mol_type = other DNA
tctaccaccatgagacccactt

SEQ ID NO: 141442 - DNA, 22 bp, synthetic construct
  misc_feature 1..22: note = chemically synthesized
  source 1..22: mol_type = other DNA
taccaccatgagacccactttt

SEQ ID NO: 141443 - DNA, 22 bp, synthetic construct
  misc_feature 1..22: note = chemically synthesized
  source 1..22: mol_type = other DNA
ccaccatgagacccactttttt

SEQ ID NO: 141444 - DNA, 22 bp, synthetic construct
  misc_feature 1..22: note = chemically synthesized
  source 1..22: mol_type = other DNA
ttttagctcccacagatgaata

SEQ ID NO: 141445 - DNA, 22 bp, synthetic construct
  misc_feature 1..22: note = chemically synthesized
  source 1..22: mol_type = other DNA
tttagctcccacagatgaataa

SEQ ID NO: 141446 - DNA, 22 bp, synthetic construct
  misc_feature 1..22: note = chemically synthesized
  source 1..22: mol_type = other DNA
ttagctcccacagatgaataaa

SEQ ID NO: 141447 - DNA, 22 bp, synthetic construct
  misc_feature 1..22: note = chemically synthesized
  source 1..22: mol_type = other DNA
tagctcccacagatgaataaaa

SEQ ID NO: 141448 - DNA, 22 bp, synthetic construct
  misc_feature 1..22: note = chemically synthesized
  source 1..22: mol_type = other DNA
agctcccacagatgaataaaaa

SEQ ID NO: 141449 - DNA, 22 bp, synthetic construct
  misc_feature 1..22: note = chemically synthesized
  source 1..22: mol_type = other DNA
gctcccacagatgaataaaaac

SEQ ID NO: 141450 - DNA, 22 bp, synthetic construct
  misc_feature 1..22: note = chemically synthesized
  source 1..22: mol_type = other DNA
ccacagatgaataaaaacatgt

SEQ ID NO: 141451 - DNA, 22 bp, synthetic construct
  misc_feature 1..22: note = chemically synthesized
  source 1..22: mol_type = other DNA
gactttctgtatctggcttatt

SEQ ID NO: 141452 - DNA, 22 bp, synthetic construct
  misc_feature 1..22: note = chemically synthesized
  source 1..22: mol_type = other DNA
actttctgtatctggcttattt

SEQ ID NO: 141453 - DNA, 22 bp, synthetic construct
  misc_feature 1..22: note = chemically synthesized
  source 1..22: mol_type = other DNA
tctgtatctggcttattttatt

SEQ ID NO: 141454 - DNA, 22 bp, synthetic construct
  misc_feature 1..22: note = chemically synthesized
  source 1..22: mol_type = other DNA
ctgtatctggcttattttatta

SEQ ID NO: 141455 - DNA, 22 bp, synthetic construct
  misc_feature 1..22: note = chemically synthesized
  source 1..22: mol_type = other DNA
tgtatctggcttattttattat

SEQ ID NO: 141456 - DNA, 22 bp, synthetic construct
  misc_feature 1..22: note = chemically synthesized
  source 1..22: mol_type = other DNA
tatctggcttattttattatct

SEQ ID NO: 141457 - DNA, 22 bp, synthetic construct
  misc_feature 1..22: note = chemically synthesized
  source 1..22: mol_type = other DNA
gcttattttattatctatctct

SEQ ID NO: 141458 - DNA, 22 bp, synthetic construct
  misc_feature 1..22: note = chemically synthesized
  source 1..22: mol_type = other DNA
attttattatctatctctttgg

SEQ ID NO: 141459 - DNA, 22 bp, synthetic construct
  misc_feature 1..22: note = chemically synthesized
  source 1..22: mol_type = other DNA
ttttattatctatctctttggc

SEQ ID NO: 141460 - DNA, 22 bp, synthetic construct
  misc_feature 1..22: note = chemically synthesized
  source 1..22: mol_type = other DNA
tattatctatctctttggcata

SEQ ID NO: 141461 - DNA, 22 bp, synthetic construct
  misc_feature 1..22: note = chemically synthesized
  source 1..22: mol_type = other DNA
attatctatctctttggcatac

SEQ ID NO: 141462 - DNA, 22 bp, synthetic construct
  misc_feature 1..22: note = chemically synthesized
  source 1..22: mol_type = other DNA
ttatctatctctttggcatacc

SEQ ID NO: 141463 - DNA, 22 bp, synthetic construct
  misc_feature 1..22: note = chemically synthesized
  source 1..22: mol_type = other DNA
tctatctctttggcataccaag

SEQ ID NO: 141464 - DNA, 22 bp, synthetic construct
  misc_feature 1..22: note = chemically synthesized
  source 1..22: mol_type = other DNA
tctctttggcataccaagagtt

SEQ ID NO: 141465 - DNA, 22 bp, synthetic construct
  misc_feature 1..22: note = chemically synthesized
  source 1..22: mol_type = other DNA
tttggcataccaagagtttgtt

SEQ ID NO: 141466 - DNA, 22 bp, synthetic construct
  misc_feature 1..22: note = chemically synthesized
  source 1..22: mol_type = other DNA
tggcataccaagagtttgtttt

SEQ ID NO: 141467 - DNA, 22 bp, synthetic construct
  misc_feature 1..22: note = chemically synthesized
  source 1..22: mol_type = other DNA
ggcataccaagagtttgttttt

SEQ ID NO: 141468 - DNA, 22 bp, synthetic construct
  misc_feature 1..22: note = chemically synthesized
  source 1..22: mol_type = other DNA
gcataccaagagtttgtttttg

SEQ ID NO: 141469 - DNA, 22 bp, synthetic construct
  misc_feature 1..22: note = chemically synthesized
  source 1..22: mol_type = other DNA
gtttttgttctgcttcagggct

SEQ ID NO: 141470 - DNA, 22 bp, synthetic construct
  misc_feature 1..22: note = chemically synthesized
  source 1..22: mol_type = other DNA
tttttgttctgcttcagggctt

SEQ ID NO: 141471 - DNA, 22 bp, synthetic construct
  misc_feature 1..22: note = chemically synthesized
  source 1..22: mol_type = other DNA
ttgttctgcttcagggctttca

SEQ ID NO: 141472 - DNA, 22 bp, synthetic construct
  misc_feature 1..22: note = chemically synthesized
  source 1..22: mol_type = other DNA
tgttctgcttcagggctttcaa

SEQ ID NO: 141473 - DNA, 22 bp, synthetic construct
  misc_feature 1..22: note = chemically synthesized
  source 1..22: mol_type = other DNA
gttctgcttcagggctttcaat

SEQ ID NO: 141474 - DNA, 22 bp, synthetic construct
  misc_feature 1..22: note = chemically synthesized
  source 1..22: mol_type = other DNA
ttctgcttcagggctttcaatt

SEQ ID NO: 141475 - DNA, 22 bp, synthetic construct
  misc_feature 1..22: note = chemically synthesized
  source 1..22: mol_type = other DNA
tgcttcagggctttcaattaac

SEQ ID NO: 141476 - DNA, 22 bp, synthetic construct
  misc_feature 1..22: note = chemically synthesized
  source 1..22: mol_type = other DNA
cttcagggctttcaattaacat

SEQ ID NO: 141477 - DNA, 22 bp, synthetic construct
  misc_feature 1..22: note = chemically synthesized
  source 1..22: mol_type = other DNA
cagggctttcaattaacataat

SEQ ID NO: 141478 - DNA, 22 bp, synthetic construct
  misc_feature 1..22: note = chemically synthesized
  source 1..22: mol_type = other DNA
agggctttcaattaacataatg

SEQ ID NO: 141479 - DNA, 22 bp, synthetic construct
  misc_feature 1..22: note = chemically synthesized
  source 1..22: mol_type = other DNA
tcaattaacataatgacctctg

SEQ ID NO: 141480 - DNA, 22 bp, synthetic construct
  misc_feature 1..22: note = chemically synthesized
  source 1..22: mol_type = other DNA
caattaacataatgacctctgg

SEQ ID NO: 141481 - DNA, 22 bp, synthetic construct
  misc_feature 1..22: note = chemically synthesized
  source 1..22: mol_type = other DNA
aattaacataatgacctctggt

SEQ ID NO: 141482 - DNA, 22 bp, synthetic construct
  misc_feature 1..22: note = chemically synthesized
  source 1..22: mol_type = other DNA
acataatgacctctggttccat

SEQ ID NO: 141483 - DNA, 22 bp, synthetic construct
  misc_feature 1..22: note = chemically synthesized
  source 1..22: mol_type = other DNA
tggttccatccatgttgctaca

SEQ ID NO: 141484 - DNA, 22 bp, synthetic construct
  misc_feature 1..22: note = chemically synthesized
  source 1..22: mol_type = other DNA
gttccatccatgttgctacaaa

SEQ ID NO: 141485 - DNA, 22 bp, synthetic construct
  misc_feature 1..22: note = chemically synthesized
  source 1..22: mol_type = other DNA
catccatgttgctacaaatgac

SEQ ID NO: 141486 - DNA, 22 bp, synthetic construct
  misc_feature 1..22: note = chemically synthesized
  source 1..22: mol_type = other DNA
ctacaaatgacaagatttcatt

SEQ ID NO: 141487 - DNA, 22 bp, synthetic construct
  misc_feature 1..22: note = chemically synthesized
  source 1..22: mol_type = other DNA
caaatgacaagatttcattctt

SEQ ID NO: 141488 - DNA, 22 bp, synthetic construct
  misc_feature 1..22: note = chemically synthesized
  source 1..22: mol_type = other DNA
cattctttttcatggcaaaata

SEQ ID NO: 141489 - DNA, 22 bp, synthetic construct
  misc_feature 1..22: note = chemically synthesized
  source 1..22: mol_type = other DNA
attctttttcatggcaaaatag

SEQ ID NO: 141490 - DNA, 22 bp, synthetic construct
  misc_feature 1..22: note = chemically synthesized
  source 1..22: mol_type = other DNA
tttttcatggcaaaatagtact

SEQ ID NO: 141491 - DNA, 22 bp, synthetic construct
  misc_feature 1..22: note = chemically synthesized
  source 1..22: mol_type = other DNA
tttcatggcaaaatagtactgt

SEQ ID NO: 141492 - DNA, 22 bp, synthetic construct
  misc_feature 1..22: note = chemically synthesized
  source 1..22: mol_type = other DNA
ttcatggcaaaatagtactgtg

SEQ ID NO: 141493 - DNA, 22 bp, synthetic construct
  misc_feature 1..22: note = chemically synthesized
  source 1..22: mol_type = other DNA
tcatggcaaaatagtactgtgc

SEQ ID NO: 141494 - DNA, 22 bp, synthetic construct
  misc_feature 1..22: note = chemically synthesized
  source 1..22: mol_type = other DNA
catggcaaaatagtactgtgca

SEQ ID NO: 141495 - DNA, 22 bp, synthetic construct
  misc_feature 1..22: note = chemically synthesized
  source 1..22: mol_type = other DNA
atggcaaaatagtactgtgcaa

SEQ ID NO: 141496 - DNA, 22 bp, synthetic construct
  misc_feature 1..22: note = chemically synthesized
  source 1..22: mol_type = other DNA
tgcaaaaatacaattttttaat

SEQ ID NO: 141497 - DNA, 22 bp, synthetic construct
  misc_feature 1..22: note = chemically synthesized
  source 1..22: mol_type = other DNA
tttaatccgttcatctgttgat

SEQ ID NO: 141498 - DNA, 22 bp, synthetic construct
  misc_feature 1..22: note = chemically synthesized
  source 1..22: mol_type = other DNA
ttaatccgttcatctgttgata

SEQ ID NO: 141499 - DNA, 22 bp, synthetic construct
  misc_feature 1..22: note = chemically synthesized
  source 1..22: mol_type = other DNA
taatccgttcatctgttgatag

SEQ ID NO: 141500 - DNA, 22 bp, synthetic construct
  misc_feature 1..22: note = chemically synthesized
  source 1..22: mol_type = other DNA
aatccgttcatctgttgataga

SEQ ID NO: 141501 - DNA, 22 bp, synthetic construct
  misc_feature 1..22: note = chemically synthesized
  source 1..22: mol_type = other DNA
atccgttcatctgttgatagac

SEQ ID NO: 141502 - DNA, 22 bp, synthetic construct
  misc_feature 1..22: note = chemically synthesized
  source 1..22: mol_type = other DNA
atctgttgatagacacttaggt

SEQ ID NO: 141503 - DNA, 22 bp, synthetic construct
  misc_feature 1..22: note = chemically synthesized
  source 1..22: mol_type = other DNA
ttgatagacacttaggttgatc

SEQ ID NO: 141504 - DNA, 22 bp, synthetic construct
  misc_feature 1..22: note = chemically synthesized
  source 1..22: mol_type = other DNA
atagacacttaggttgatccca

SEQ ID NO: 141505 - DNA, 22 bp, synthetic construct
  misc_feature 1..22: note = chemically synthesized
  source 1..22: mol_type = other DNA
aggttgatcccaaaccttaact

SEQ ID NO: 141506 - DNA, 22 bp, synthetic construct
  misc_feature 1..22: note = chemically synthesized
  source 1..22: mol_type = other DNA
ggttgatcccaaaccttaacta

SEQ ID NO: 141507 - DNA, 22 bp, synthetic construct
  misc_feature 1..22: note = chemically synthesized
  source 1..22: mol_type = other DNA
atcccaaaccttaactattgtg

SEQ ID NO: 141508 - DNA, 22 bp, synthetic construct
  misc_feature 1..22: note = chemically synthesized
  source 1..22: mol_type = other DNA
aactattgtgaatagtgcttca

SEQ ID NO: 141509 - DNA, 22 bp, synthetic construct
  misc_feature 1..22: note = chemically synthesized
  source 1..22: mol_type = other DNA
actattgtgaatagtgcttcaa

SEQ ID NO: 141510 - DNA, 22 bp, synthetic construct
  misc_feature 1..22: note = chemically synthesized
  source 1..22: mol_type = other DNA
ttgtgaatagtgcttcaataaa

SEQ ID NO: 141511 - DNA, 22 bp, synthetic construct
  misc_feature 1..22: note = chemically synthesized
  source 1..22: mol_type = other DNA
tgaatagtgcttcaataaacat

SEQ ID NO: 141512 - DNA, 22 bp, synthetic construct
  misc_feature 1..22: note = chemically synthesized
  source 1..22: mol_type = other DNA
caataaacatgagtgtaatgtg

SEQ ID NO: 141513 - DNA, 22 bp, synthetic construct
  misc_feature 1..22: note = chemically synthesized
  source 1..22: mol_type = other DNA
aataaacatgagtgtaatgtgt

SEQ ID NO: 141514 - DNA, 22 bp, synthetic construct
  misc_feature 1..22: note = chemically synthesized
  source 1..22: mol_type = other DNA
gatatactgatttcctttcttt

SEQ ID NO: 141515 - DNA, 22 bp, synthetic construct
  misc_feature 1..22: note = chemically synthesized
  source 1..22: mol_type = other DNA
atttcctttcttttggataaat

SEQ ID NO: 141516 - DNA, 22 bp, synthetic construct
  misc_feature 1..22: note = chemically synthesized
  source 1..22: mol_type = other DNA
cctttcttttggataaataacc

SEQ ID NO: 141517 - DNA, 22 bp, synthetic construct
  misc_feature 1..22: note = chemically synthesized
  source 1..22: mol_type = other DNA
ctttcttttggataaataacca

SEQ ID NO: 141518 - DNA, 22 bp, synthetic construct
  misc_feature 1..22: note = chemically synthesized
  source 1..22: mol_type = other DNA
tcttttggataaataaccacta

SEQ ID NO: 141519 - DNA, 22 bp, synthetic construct
  misc_feature 1..22: note = chemically synthesized
  source 1..22: mol_type = other DNA
cttttggataaataaccactag

SEQ ID NO: 141520 - DNA, 22 bp, synthetic construct
  misc_feature 1..22: note = chemically synthesized
  source 1..22: mol_type = other DNA
ttttggataaataaccactagt

SEQ ID NO: 141521 - DNA, 22 bp, synthetic construct
  misc_feature 1..22: note = chemically synthesized
  source 1..22: mol_type = other DNA
ttggataaataaccactagtga

SEQ ID NO: 141522 - DNA, 22 bp, synthetic construct
  misc_feature 1..22: note = chemically synthesized
  source 1..22: mol_type = other DNA
tggataaataaccactagtgag

SEQ ID NO: 141523 - DNA, 22 bp, synthetic construct
  misc_feature 1..22: note = chemically synthesized
  source 1..22: mol_type = other DNA
ggataaataaccactagtgaga

SEQ ID NO: 141524 - DNA, 22 bp, synthetic construct
  misc_feature 1..22: note = chemically synthesized
  source 1..22: mol_type = other DNA
gataaataaccactagtgagat

SEQ ID NO: 141525 - DNA, 22 bp, synthetic construct
  misc_feature 1..22: note = chemically synthesized
  source 1..22: mol_type = other DNA
gtgagattgctggattgtatga

SEQ ID NO: 141526 - DNA, 22 bp, synthetic construct
  misc_feature 1..22: note = chemically synthesized
  source 1..22: mol_type = other DNA
ctggattgtatgatagttctgt

SEQ ID NO: 141527 - DNA, 22 bp, synthetic construct
  misc_feature 1..22: note = chemically synthesized
  source 1..22: mol_type = other DNA
gattgtatgatagttctgtttt

SEQ ID NO: 141528 - DNA, 22 bp, synthetic construct
  misc_feature 1..22: note = chemically synthesized
  source 1..22: mol_type = other DNA
tatgatagttctgtttttagtt

SEQ ID NO: 141529 - DNA, 22 bp, synthetic construct
  misc_feature 1..22: note = chemically synthesized
  source 1..22: mol_type = other DNA
tgtttttagtttactgagaaat

SEQ ID NO: 141530 - DNA, 22 bp, synthetic construct
  misc_feature 1..22: note = chemically synthesized
  source 1..22: mol_type = other DNA
tttttagtttactgagaaatct

SEQ ID NO: 141531 - DNA, 22 bp, synthetic construct
  misc_feature 1..22: note = chemically synthesized
  source 1..22: mol_type = other DNA
ttagtttactgagaaatcttca

SEQ ID NO: 141532 - DNA, 22 bp, synthetic construct
  misc_feature 1..22: note = chemically synthesized
  source 1..22: mol_type = other DNA
tagtttactgagaaatcttcat

SEQ ID NO: 141533 - DNA, 22 bp, synthetic construct
  misc_feature 1..22: note = chemically synthesized
  source 1..22: mol_type = other DNA
agtttactgagaaatcttcata

SEQ ID NO: 141534 - DNA, 22 bp, synthetic construct
  misc_feature 1..22: note = chemically synthesized
  source 1..22: mol_type = other DNA
gtttactgagaaatcttcatac

SEQ ID NO: 141535 - DNA, 22 bp, synthetic construct
  misc_feature 1..22: note = chemically synthesized
  source 1..22: mol_type = other DNA
actgagaaatcttcatactgtt

SEQ ID NO: 141536 - DNA, 22 bp, synthetic construct
  misc_feature 1..22: note = chemically synthesized
  source 1..22: mol_type = other DNA
ctgagaaatcttcatactgttt

SEQ ID NO: 141537 - DNA, 22 bp, synthetic construct
  misc_feature 1..22: note = chemically synthesized
  source 1..22: mol_type = other DNA
agaaatcttcatactgttttcc

SEQ ID NO: 141538 - DNA, 22 bp, synthetic construct
  misc_feature 1..22: note = chemically synthesized
  source 1..22: mol_type = other DNA
catactgttttccataatggtt

SEQ ID NO: 141539 - DNA, 22 bp, synthetic construct
  misc_feature 1..22: note = chemically synthesized
  source 1..22: mol_type = other DNA
atactgttttccataatggttg

SEQ ID NO: 141540 - DNA, 22 bp, synthetic construct
  misc_feature 1..22: note = chemically synthesized
  source 1..22: mol_type = other DNA
ttttccataatggttgtactat

SEQ ID NO: 141541 - DNA, 22 bp, synthetic construct
  misc_feature 1..22: note = chemically synthesized
  source 1..22: mol_type = other DNA
tccataatggttgtactatttt

SEQ ID NO: 141542 - DNA, 22 bp, synthetic construct
  misc_feature 1..22: note = chemically synthesized
  source 1..22: mol_type = other DNA
ccataatggttgtactatttta

SEQ ID NO: 141543 - DNA, 22 bp, synthetic construct
  misc_feature 1..22: note = chemically synthesized
  source 1..22: mol_type = other DNA
cataatggttgtactattttac

SEQ ID NO: 141544 - DNA, 22 bp, synthetic construct
  misc_feature 1..22: note = chemically synthesized
  source 1..22: mol_type = other DNA
tactattttacattcccaccaa

SEQ ID NO: 141545 - DNA, 22 bp, synthetic construct
  misc_feature 1..22: note = chemically synthesized
  source 1..22: mol_type = other DNA
ttttacattcccaccaacagtg

SEQ ID NO: 141546 - DNA, 22 bp, synthetic construct
  misc_feature 1..22: note = chemically synthesized
  source 1..22: mol_type = other DNA
tacattcccaccaacagtgtgt

SEQ ID NO: 141547 - DNA, 22 bp, synthetic construct
  misc_feature 1..22: note = chemically synthesized
  source 1..22: mol_type = other DNA
acattcccaccaacagtgtgta

SEQ ID NO: 141548 - DNA, 22 bp, synthetic construct
  misc_feature 1..22: note = chemically synthesized
  source 1..22: mol_type = other DNA
cattcccaccaacagtgtgtaa

SEQ ID NO: 141549 - DNA, 22 bp, synthetic construct
  misc_feature 1..22: note = chemically synthesized
  source 1..22: mol_type = other DNA
ccaccaacagtgtgtaagaaag

SEQ ID NO: 141550 - DNA, 22 bp, synthetic construct
  misc_feature 1..22: note = chemically synthesized
  source 1..22: mol_type = other DNA
ccttttctccatatcctcacaa

SEQ ID NO: 141551 - DNA, 22 bp, synthetic construct
  misc_feature 1..22: note = chemically synthesized
  source 1..22: mol_type = other DNA
ttctccatatcctcacaaggat

SEQ ID NO: 141552 - DNA, 22 bp, synthetic construct
  misc_feature 1..22: note = chemically synthesized
  source 1..22: mol_type = other DNA
tctccatatcctcacaaggatc

SEQ ID NO: 141553 - DNA, 22 bp, synthetic construct
  misc_feature 1..22: note = chemically synthesized
  source 1..22: mol_type = other DNA
ctccatatcctcacaaggatct

SEQ ID NO: 141554 - DNA, 22 bp, synthetic construct
  misc_feature 1..22: note = chemically synthesized
  source 1..22: mol_type = other DNA
tccatatcctcacaaggatctg

SEQ ID NO: 141555 - DNA, 22 bp, synthetic construct
  misc_feature 1..22: note = chemically synthesized
  source 1..22: mol_type = other DNA
catatcctcacaaggatctgtt

SEQ ID NO: 141556 - DNA, 22 bp, synthetic construct
  misc_feature 1..22: note = chemically synthesized
  source 1..22: mol_type = other DNA
acaaggatctgttattttttgt

SEQ ID NO: 141557 - DNA, 22 bp, synthetic construct
  misc_feature 1..22: note = chemically synthesized
  source 1..22: mol_type = other DNA
ttattttttgtcttttttgtta

SEQ ID NO: 141558 - DNA, 22 bp, synthetic construct
  misc_feature 1..22: note = chemically synthesized
  source 1..22: mol_type = other DNA
ttttttgtcttttttgttaata

SEQ ID NO: 141559 - DNA, 22 bp, synthetic construct
  misc_feature 1..22: note = chemically synthesized
  source 1..22: mol_type = other DNA
tttgtcttttttgttaatagcc

SEQ ID NO: 141560 - DNA, 22 bp, synthetic construct
  misc_feature 1..22: note = chemically synthesized
  source 1..22: mol_type = other DNA
ttgtcttttttgttaatagccg

SEQ ID NO: 141561 - DNA, 22 bp, synthetic construct
  misc_feature 1..22: note = chemically synthesized
  source 1..22: mol_type = other DNA
tgtcttttttgttaatagccgt

SEQ ID NO: 141562 - DNA, 22 bp, synthetic construct
  misc_feature 1..22: note = chemically synthesized
  source 1..22: mol_type = other DNA
gtcttttttgttaatagccgtt

SEQ ID NO: 141563 - DNA, 22 bp, synthetic construct
  misc_feature 1..22: note = chemically synthesized
  source 1..22: mol_type = other DNA
tcttttttgttaatagccgttt

SEQ ID NO: 141564 - DNA, 22 bp, synthetic construct
  misc_feature 1..22: note = chemically synthesized
  source 1..22: mol_type = other DNA
ttttgttaatagccgttttaac

SEQ ID NO: 141565 - DNA, 22 bp, synthetic construct
  misc_feature 1..22: note = chemically synthesized
  source 1..22: mol_type = other DNA
tttgttaatagccgttttaact

SEQ ID NO: 141566 - DNA, 22 bp, synthetic construct
  misc_feature 1..22: note = chemically synthesized
  source 1..22: mol_type = other DNA
ttgttaatagccgttttaacta

SEQ ID NO: 141567 - DNA, 22 bp, synthetic construct
  misc_feature 1..22: note = chemically synthesized
  source 1..22: mol_type = other DNA
tgttaatagccgttttaactag

SEQ ID NO: 141568 - DNA, 22 bp, synthetic construct
  misc_feature 1..22: note = chemically synthesized
  source 1..22: mol_type = other DNA
gttaatagccgttttaactaga

SEQ ID NO: 141569 - DNA, 22 bp, synthetic construct
  misc_feature 1..22: note = chemically synthesized
  source 1..22: mol_type = other DNA
ttaatagccgttttaactagag

SEQ ID NO: 141570 - DNA, 22 bp, synthetic construct
  misc_feature 1..22: note = chemically synthesized
  source 1..22: mol_type = other DNA
atagccgttttaactagagtaa

SEQ ID NO: 141571 - DNA, 22 bp, synthetic construct
  misc_feature 1..22: note = chemically synthesized
  source 1..22: mol_type = other DNA
taactagagtaagtagatatct

SEQ ID NO: 141572 - DNA, 22 bp, synthetic construct
  misc_feature 1..22: note = chemically synthesized
  source 1..22: mol_type = other DNA
aactagagtaagtagatatctc

SEQ ID NO: 141573 - DNA, 22 bp, synthetic construct
  misc_feature 1..22: note = chemically synthesized
  source 1..22: mol_type = other DNA
actagagtaagtagatatctca

SEQ ID NO: 141574 - DNA, 22 bp, synthetic construct
  misc_feature 1..22: note = chemically synthesized
  source 1..22: mol_type = other DNA
gagtaagtagatatctcattgt

SEQ ID NO: 141575 - DNA, 22 bp, synthetic construct
  misc_feature 1..22: note = chemically synthesized
  source 1..22: mol_type = other DNA
attgtagttttgatttgcattt

SEQ ID NO: 141576 - DNA, 22 bp, synthetic construct
  misc_feature 1..22: note = chemically synthesized
  source 1..22: mol_type = other DNA
tagttttgatttgcatttccct

SEQ ID NO: 141577 - DNA, 22 bp, synthetic construct
  misc_feature 1..22: note = chemically synthesized
  source 1..22: mol_type = other DNA
tgatttgcatttccctgatcat

SEQ ID NO: 141578 - DNA, 22 bp, synthetic construct
  misc_feature 1..22: note = chemically synthesized
  source 1..22: mol_type = other DNA
gatttgcatttccctgatcatt

SEQ ID NO: 141579 - DNA, 22 bp, synthetic construct
  misc_feature 1..22: note = chemically synthesized
  source 1..22: mol_type = other DNA
atttgcatttccctgatcatta

SEQ ID NO: 141580 - DNA, 22 bp, synthetic construct
  misc_feature 1..22: note = chemically synthesized
  source 1..22: mol_type = other DNA
gcatttccctgatcattagtga

SEQ ID NO: 141581 - DNA, 22 bp, synthetic construct
  misc_feature 1..22: note = chemically synthesized
  source 1..22: mol_type = other DNA
catttccctgatcattagtgat

SEQ ID NO: 141582 - DNA, 22 bp, synthetic construct
  misc_feature 1..22: note = chemically synthesized
  source 1..22: mol_type = other DNA
ccctgatcattagtgatgttga

SEQ ID NO: 141583 - DNA, 22 bp, synthetic construct
  misc_feature 1..22: note = chemically synthesized
  source 1..22: mol_type = other DNA
cctgatcattagtgatgttgag

SEQ ID NO: 141584 - DNA, 22 bp, synthetic construct
  misc_feature 1..22: note = chemically synthesized
  source 1..22: mol_type = other DNA
atcattagtgatgttgagaatt

SEQ ID NO: 141585 - DNA, 22 bp, synthetic construct
  misc_feature 1..22: note = chemically synthesized
  source 1..22: mol_type = other DNA
gtgatgttgagaattttttcat

SEQ ID NO: 141586 - DNA, 22 bp, synthetic construct
  misc_feature 1..22: note = chemically synthesized
  source 1..22: mol_type = other DNA
agaattttttcatatgtttgtt

SEQ ID NO: 141587 - DNA, 22 bp, synthetic construct
  misc_feature 1..22: note = chemically synthesized
  source 1..22: mol_type = other DNA
tttcatatgtttgttggtcatt

SEQ ID NO: 141588 - DNA, 22 bp, synthetic construct
  misc_feature 1..22: note = chemically synthesized
  source 1..22: mol_type = other DNA
ttcatatgtttgttggtcattt

SEQ ID NO: 141589 - DNA, 22 bp, synthetic construct
  misc_feature 1..22: note = chemically synthesized
  source 1..22: mol_type = other DNA
tcatatgtttgttggtcatttg

SEQ ID NO: 141590 - DNA, 22 bp, synthetic construct
  misc_feature 1..22: note = chemically synthesized
  source 1..22: mol_type = other DNA
catatgtttgttggtcatttgt

SEQ ID NO: 141591 - DNA, 22 bp, synthetic construct
  misc_feature 1..22: note = chemically synthesized
  source 1..22: mol_type = other DNA
atatgtttgttggtcatttgta

SEQ ID NO: 141592 - DNA, 22 bp, synthetic construct
  misc_feature 1..22: note = chemically synthesized
  source 1..22: mol_type = other DNA
gttggtcatttgtatatctttt

SEQ ID NO: 141593 - DNA, 22 bp, synthetic construct
  misc_feature 1..22: note = chemically synthesized
  source 1..22: mol_type = other DNA
ttggtcatttgtatatcttttt

SEQ ID NO: 141594 - DNA, 22 bp, synthetic construct
  misc_feature 1..22: note = chemically synthesized
  source 1..22: mol_type = other DNA
gtcatttgtatatctttttctg

SEQ ID NO: 141595 - DNA, 22 bp, synthetic construct
  misc_feature 1..22: note = chemically synthesized
  source 1..22: mol_type = other DNA
gtatatctttttctgagaattg

SEQ ID NO: 141596 - DNA, 22 bp, synthetic construct
  misc_feature 1..22: note = chemically synthesized
  source 1..22: mol_type = other DNA
tatatctttttctgagaattgt

SEQ ID NO: 141597 - DNA, 22 bp, synthetic construct
  misc_feature 1..22: note = chemically synthesized
  source 1..22: mol_type = other DNA
tttctgagaattgtctgttcat

SEQ ID NO: 141598 - DNA, 22 bp, synthetic construct
  misc_feature 1..22: note = chemically synthesized
  source 1..22: mol_type = other DNA
ttctgagaattgtctgttcatg

SEQ ID NO: 141599 - DNA, 22 bp, synthetic construct
  misc_feature 1..22: note = chemically synthesized
  source 1..22: mol_type = other DNA
tctgagaattgtctgttcatgt

SEQ ID NO: 141600 - DNA, 22 bp, synthetic construct
  misc_feature 1..22: note = chemically synthesized
  source 1..22: mol_type = other DNA
ctgagaattgtctgttcatgtc

SEQ ID NO: 141601 - DNA, 22 bp, synthetic construct
  misc_feature 1..22: note = chemically synthesized
  source 1..22: mol_type = other DNA
tgagaattgtctgttcatgtcc

SEQ ID NO: 141602 - DNA, 22 bp, synthetic construct
  misc_feature 1..22: note = chemically synthesized
  source 1..22: mol_type = other DNA
agaattgtctgttcatgtcctt

SEQ ID NO: 141603 - DNA, 22 bp, synthetic construct
  misc_feature 1..22: note = chemically synthesized
  source 1..22: mol_type = other DNA
tctgttcatgtccttagcctac

SEQ ID NO: 141604 - DNA, 22 bp, synthetic construct
  misc_feature 1..22: note = chemically synthesized
  source 1..22: mol_type = other DNA
ttcatgtccttagcctactttt

SEQ ID NO: 141605 - DNA, 22 bp, synthetic construct
  misc_feature 1..22: note = chemically synthesized
  source 1..22: mol_type = other DNA
atgtccttagcctactttttat

SEQ ID NO: 141606 - DNA, 22 bp, synthetic construct
  misc_feature 1..22: note = chemically synthesized
  source 1..22: mol_type = other DNA
agcctactttttattgggattg

SEQ ID NO: 141607 - DNA, 22 bp, synthetic construct
  misc_feature 1..22: note = chemically synthesized
  source 1..22: mol_type = other DNA
gcctactttttattgggattgt

SEQ ID NO: 141608 - DNA, 22 bp, synthetic construct
  misc_feature 1..22: note = chemically synthesized
  source 1..22: mol_type = other DNA
ctttttattgggattgtttgtt

SEQ ID NO: 141609 - DNA, 22 bp, synthetic construct
  misc_feature 1..22: note = chemically synthesized
  source 1..22: mol_type = other DNA
tttattgggattgtttgttatt

SEQ ID NO: 141610 - DNA, 22 bp, synthetic construct
  misc_feature 1..22: note = chemically synthesized
  source 1..22: mol_type = other DNA
ttattgggattgtttgttattt

SEQ ID NO: 141611 - DNA, 22 bp, synthetic construct
  misc_feature 1..22: note = chemically synthesized
  source 1..22: mol_type = other DNA
tattgggattgtttgttatttt

SEQ ID NO: 141612 - DNA, 22 bp, synthetic construct
  misc_feature 1..22: note = chemically synthesized
  source 1..22: mol_type = other DNA
attgggattgtttgttattttc

SEQ ID NO: 141613 - DNA, 22 bp, synthetic construct
  misc_feature 1..22: note = chemically synthesized
  source 1..22: mol_type = other DNA
ttgggattgtttgttattttct

SEQ ID NO: 141614 - DNA, 22 bp, synthetic construct
  misc_feature 1..22: note = chemically synthesized
  source 1..22: mol_type = other DNA
ggattgtttgttattttcttga

SEQ ID NO: 141615 - DNA, 22 bp, synthetic construct
  misc_feature 1..22: note = chemically synthesized
  source 1..22: mol_type = other DNA
tttgttattttcttgataatct

SEQ ID NO: 141616 - DNA, 22 bp, synthetic construct
  misc_feature 1..22: note = chemically synthesized
  source 1..22: mol_type = other DNA
gttattttcttgataatctatt

SEQ ID NO: 141617 - DNA, 22 bp, synthetic construct
  misc_feature 1..22: note = chemically synthesized
  source 1..22: mol_type = other DNA
ttattttcttgataatctattt

SEQ ID NO: 141618 - DNA, 22 bp, synthetic construct
  misc_feature 1..22: note = chemically synthesized
  source 1..22: mol_type = other DNA
ttttcttgataatctatttgtg

SEQ ID NO: 141619 - DNA, 22 bp, synthetic construct
  misc_feature 1..22: note = chemically synthesized
  source 1..22: mol_type = other DNA
tcttgataatctatttgtgttc

SEQ ID NO: 141620 - DNA, 22 bp, synthetic construct
  misc_feature 1..22: note = chemically synthesized
  source 1..22: mol_type = other DNA
cttgataatctatttgtgttca

SEQ ID NO: 141621 - DNA, 22 bp, synthetic construct
  misc_feature 1..22: note = chemically synthesized
  source 1..22: mol_type = other DNA
ttgataatctatttgtgttcat

SEQ ID NO: 141622 - DNA, 22 bp, synthetic construct
  misc_feature 1..22: note = chemically synthesized
  source 1..22: mol_type = other DNA
gataatctatttgtgttcattt

SEQ ID NO: 141623 - DNA, 22 bp, synthetic construct
  misc_feature 1..22: note = chemically synthesized
  source 1..22: mol_type = other DNA
ataatctatttgtgttcatttt

SEQ ID NO: 141624 - DNA, 22 bp, synthetic construct
  misc_feature 1..22: note = chemically synthesized
  source 1..22: mol_type = other DNA
tttgtgttcattttagagcctg

SEQ ID NO: 141625 - DNA, 22 bp, synthetic construct
  misc_feature 1..22: note = chemically synthesized
  source 1..22: mol_type = other DNA
gtgttcattttagagcctggat

SEQ ID NO: 141626 - DNA, 22 bp, synthetic construct
  misc_feature 1..22: note = chemically synthesized
  source 1..22: mol_type = other DNA
tgttcattttagagcctggata

SEQ ID NO: 141627 - DNA, 22 bp, synthetic construct
  misc_feature 1..22: note = chemically synthesized
  source 1..22: mol_type = other DNA
attttagagcctggatattatt

SEQ ID NO: 141628 - DNA, 22 bp, synthetic construct
  misc_feature 1..22: note = chemically synthesized
  source 1..22: mol_type = other DNA
tagagcctggatattattcttt

SEQ ID NO: 141629 - DNA, 22 bp, synthetic construct
  misc_feature 1..22: note = chemically synthesized
  source 1..22: mol_type = other DNA
agagcctggatattattctttt

SEQ ID NO: 141630 - DNA, 22 bp, synthetic construct
  misc_feature 1..22: note = chemically synthesized
  source 1..22: mol_type = other DNA
gagcctggatattattcttttg

SEQ ID NO: 141631 - DNA, 22 bp, synthetic construct
  misc_feature 1..22: note = chemically synthesized
  source 1..22: mol_type = other DNA
gatattattcttttgtcagatg

SEQ ID NO: 141632 - DNA, 22 bp, synthetic construct
  misc_feature 1..22: note = chemically synthesized
  source 1..22: mol_type = other DNA
ttcttttgtcagatgtatagat

SEQ ID NO: 141633 - DNA, 22 bp, synthetic construct
  misc_feature 1..22: note = chemically synthesized
  source 1..22: mol_type = other DNA
ttttgtcagatgtatagattgt

SEQ ID NO: 141634 - DNA, 22 bp, synthetic construct
  misc_feature 1..22: note = chemically synthesized
  source 1..22: mol_type = other DNA
ttgtcagatgtatagattgtga

SEQ ID NO: 141635 - DNA, 22 bp, synthetic construct
  misc_feature 1..22: note = chemically synthesized
  source 1..22: mol_type = other DNA
tgtcagatgtatagattgtgaa

SEQ ID NO: 141636 - DNA, 22 bp, synthetic construct
  misc_feature 1..22: note = chemically synthesized
  source 1..22: mol_type = other DNA
gtcagatgtatagattgtgaag

SEQ ID NO: 141637 - DNA, 22 bp, synthetic construct
  misc_feature 1..22: note = chemically synthesized
  source 1..22: mol_type = other DNA
tcagatgtatagattgtgaaga

SEQ ID NO: 141638 - DNA, 22 bp, synthetic construct
  misc_feature 1..22: note = chemically synthesized
  source 1..22: mol_type = other DNA
tgaagattttctcccactctgt

SEQ ID NO: 141639 - DNA, 22 bp, synthetic construct
  misc_feature 1..22: note = chemically synthesized
  source 1..22: mol_type = other DNA
tctcccactctgtgggttgtct

SEQ ID NO: 141640 - DNA, 22 bp, synthetic construct
  misc_feature 1..22: note = chemically synthesized
  source 1..22: mol_type = other DNA
ctcccactctgtgggttgtctg

SEQ ID NO: 141641 - DNA, 22 bp, synthetic construct
  misc_feature 1..22: note = chemically synthesized
  source 1..22: mol_type = other DNA
tcccactctgtgggttgtctgt

SEQ ID NO: 141642 - DNA, 22 bp, synthetic construct
  misc_feature 1..22: note = chemically synthesized
  source 1..22: mol_type = other DNA
ccactctgtgggttgtctgttt

SEQ ID NO: 141643 - DNA, 22 bp, synthetic construct
  misc_feature 1..22: note = chemically synthesized
  source 1..22: mol_type = other DNA
tgtgggttgtctgtttattctg

SEQ ID NO: 141644 - DNA, 22 bp, synthetic construct
  misc_feature 1..22: note = chemically synthesized
  source 1..22: mol_type = other DNA
tgggttgtctgtttattctgca

SEQ ID NO: 141645 - DNA, 22 bp, synthetic construct
  misc_feature 1..22: note = chemically synthesized
  source 1..22: mol_type = other DNA
tctgtttattctgcagactctt

SEQ ID NO: 141646 - DNA, 22 bp, synthetic construct
  misc_feature 1..22: note = chemically synthesized
  source 1..22: mol_type = other DNA
tttattctgcagactcttcctt

SEQ ID NO: 141647 - DNA, 22 bp, synthetic construct
  misc_feature 1..22: note = chemically synthesized
  source 1..22: mol_type = other DNA
attctgcagactcttccttttg

SEQ ID NO: 141648 - DNA, 22 bp, synthetic construct
  misc_feature 1..22: note = chemically synthesized
  source 1..22: mol_type = other DNA
ttctgcagactcttccttttgc

SEQ ID NO: 141649 - DNA, 22 bp, synthetic construct
  misc_feature 1..22: note = chemically synthesized
  source 1..22: mol_type = other DNA
tgcagactcttccttttgccat

SEQ ID NO: 141650 - DNA, 22 bp, synthetic construct
  misc_feature 1..22: note = chemically synthesized
  source 1..22: mol_type = other DNA
cagactcttccttttgccatgc

SEQ ID NO: 141651 - DNA, 22 bp, synthetic construct
  misc_feature 1..22: note = chemically synthesized
  source 1..22: mol_type = other DNA
ttccttttgccatgcaaaagct

SEQ ID NO: 141652 - DNA, 22 bp, synthetic construct
  misc_feature 1..22: note = chemically synthesized
  source 1..22: mol_type = other DNA
ccttttgccatgcaaaagctct

SEQ ID NO: 141653 - DNA, 22 bp, synthetic construct
  misc_feature 1..22: note = chemically synthesized
  source 1..22: mol_type = other DNA
cttttgccatgcaaaagctctt

SEQ ID NO: 141654 - DNA, 22 bp, synthetic construct
  misc_feature 1..22: note = chemically synthesized
  source 1..22: mol_type = other DNA
ttgccatgcaaaagctctttag

SEQ ID NO: 141655 - DNA, 22 bp, synthetic construct
  misc_feature 1..22: note = chemically synthesized
  source 1..22: mol_type = other DNA
tgccatgcaaaagctctttagt

SEQ ID NO: 141656 - DNA, 22 bp, synthetic construct
  misc_feature 1..22: note = chemically synthesized
  source 1..22: mol_type = other DNA
gccatgcaaaagctctttagtt

SEQ ID NO: 141657 - DNA, 22 bp, synthetic construct
  misc_feature 1..22: note = chemically synthesized
  source 1..22: mol_type = other DNA
ccatgcaaaagctctttagttt

SEQ ID NO: 141658 - DNA, 22 bp, synthetic construct
  misc_feature 1..22: note = chemically synthesized
  source 1..22: mol_type = other DNA
tttagtttaatttagtcccaga

SEQ ID NO: 141659 - DNA, 22 bp, synthetic construct
  misc_feature 1..22: note = chemically synthesized
  source 1..22: mol_type = other DNA
tagtttaatttagtcccagata

SEQ ID NO: 141660 - DNA, 22 bp, synthetic construct
  misc_feature 1..22: note = chemically synthesized
  source 1..22: mol_type = other DNA
agtttaatttagtcccagatat

SEQ ID NO: 141661 - DNA, 22 bp, synthetic construct
  misc_feature 1..22: note = chemically synthesized
  source 1..22: mol_type = other DNA
gtttaatttagtcccagatatt

SEQ ID NO: 141662 - DNA, 22 bp, synthetic construct
  misc_feature 1..22: note = chemically synthesized
  source 1..22: mol_type = other DNA
aatttagtcccagatattttct

SEQ ID NO: 141663 - DNA, 22 bp, synthetic construct
  misc_feature 1..22: note = chemically synthesized
  source 1..22: mol_type = other DNA
atttagtcccagatattttctt

SEQ ID NO: 141664 - DNA, 22 bp, synthetic construct
  misc_feature 1..22: note = chemically synthesized
  source 1..22: mol_type = other DNA
agtcccagatattttctttgtt

SEQ ID NO: 141665 - DNA, 22 bp, synthetic construct
  misc_feature 1..22: note = chemically synthesized
  source 1..22: mol_type = other DNA
gtcccagatattttctttgttt

SEQ ID NO: 141666 - DNA, 22 bp, synthetic construct
  misc_feature 1..22: note = chemically synthesized
  source 1..22: mol_type = other DNA
tctttgtttttatgtatttgca

SEQ ID NO: 141667 - DNA, 22 bp, synthetic construct
  misc_feature 1..22: note = chemically synthesized
  source 1..22: mol_type = other DNA
ctttgtttttatgtatttgcat

SEQ ID NO: 141668 - DNA, 22 bp, synthetic construct
  misc_feature 1..22: note = chemically synthesized
  source 1..22: mol_type = other DNA
tttgtttttatgtatttgcatt

SEQ ID NO: 141669 - DNA, 22 bp, synthetic construct
  misc_feature 1..22: note = chemically synthesized
  source 1..22: mol_type = other DNA
tgtttttatgtatttgcatttg

SEQ ID NO: 141670 - DNA, 22 bp, synthetic construct
  misc_feature 1..22: note = chemically synthesized
  source 1..22: mol_type = other DNA
gtttttatgtatttgcatttgt

SEQ ID NO: 141671 - DNA, 22 bp, synthetic construct
  misc_feature 1..22: note = chemically synthesized
  source 1..22: mol_type = other DNA
tttttatgtatttgcatttgtg

SEQ ID NO: 141672 - DNA, 22 bp, synthetic construct
  misc_feature 1..22: note = chemically synthesized
  source 1..22: mol_type = other DNA
ttatgtatttgcatttgtgttc

SEQ ID NO: 141673 - DNA, 22 bp, synthetic construct
  misc_feature 1..22: note = chemically synthesized
  source 1..22: mol_type = other DNA
tatgtatttgcatttgtgttct

SEQ ID NO: 141674 - DNA, 22 bp, synthetic construct
  misc_feature 1..22: note = chemically synthesized
  source 1..22: mol_type = other DNA
atgtatttgcatttgtgttctt

SEQ ID NO: 141675 - DNA, 22 bp, synthetic construct
  misc_feature 1..22: note = chemically synthesized
  source 1..22: mol_type = other DNA
tgtatttgcatttgtgttcttg

SEQ ID NO: 141676 - DNA, 22 bp, synthetic construct
  misc_feature 1..22: note = chemically synthesized
  source 1..22: mol_type = other DNA
gcatttgtgttcttggtcatga

SEQ ID NO: 141677 - DNA, 22 bp, synthetic construct
  misc_feature 1..22: note = chemically synthesized
  source 1..22: mol_type = other DNA
catttgtgttcttggtcatgaa

SEQ ID NO: 141678 - DNA, 22 bp, synthetic construct
  misc_feature 1..22: note = chemically synthesized
  source 1..22: mol_type = other DNA
gtgttcttggtcatgaaatcct

SEQ ID NO: 141679 - DNA, 22 bp, synthetic construct
  misc_feature 1..22: note = chemically synthesized
  source 1..22: mol_type = other DNA
tgttcttggtcatgaaatcctt

SEQ ID NO: 141680 - DNA, 22 bp, synthetic construct
  misc_feature 1..22: note = chemically synthesized
  source 1..22: mol_type = other DNA
ttggtcatgaaatcctttccta

SEQ ID NO: 141681 - DNA, 22 bp, synthetic construct
  misc_feature 1..22: note = chemically synthesized
  source 1..22: mol_type = other DNA
ggtcatgaaatcctttcctaag

SEQ ID NO: 141682 - DNA, 22 bp, synthetic construct
  misc_feature 1..22: note = chemically synthesized
  source 1..22: mol_type = other DNA
gtcatgaaatcctttcctaagc

SEQ ID NO: 141683 - DNA, 22 bp, synthetic construct
  misc_feature 1..22: note = chemically synthesized
  source 1..22: mol_type = other DNA
tcctaagccaatgtgtagaagg

SEQ ID NO: 141684 - DNA, 22 bp, synthetic construct
  misc_feature 1..22: note = chemically synthesized
  source 1..22: mol_type = other DNA
cctaagccaatgtgtagaaggg

SEQ ID NO: 141685 - DNA, 22 bp, synthetic construct
  misc_feature 1..22: note = chemically synthesized
  source 1..22: mol_type = other DNA
ctaagccaatgtgtagaagggt

SEQ ID NO: 141686 - DNA, 22 bp, synthetic construct
  misc_feature 1..22: note = chemically synthesized
  source 1..22: mol_type = other DNA
agccaatgtgtagaagggtttt

SEQ ID NO: 141687 - DNA, 22 bp, synthetic construct
  misc_feature 1..22: note = chemically synthesized
  source 1..22: mol_type = other DNA
ttccgatgttattttctagaat

SEQ ID NO: 141688 - DNA, 22 bp, synthetic construct
  misc_feature 1..22: note = chemically synthesized
  source 1..22: mol_type = other DNA
tccgatgttattttctagaatt

SEQ ID NO: 141689 - DNA, 22 bp, synthetic construct
  misc_feature 1..22: note = chemically synthesized
  source 1..22: mol_type = other DNA
ccgatgttattttctagaattg

SEQ ID NO: 141690 - DNA, 22 bp, synthetic construct
  misc_feature 1..22: note = chemically synthesized
  source 1..22: mol_type = other DNA
cgatgttattttctagaattgt

SEQ ID NO: 141691 - DNA, 22 bp, synthetic construct
  misc_feature 1..22: note = chemically synthesized
  source 1..22: mol_type = other DNA
ttttctagaattgttacagttt

SEQ ID NO: 141692 - DNA, 22 bp, synthetic construct
  misc_feature 1..22: note = chemically synthesized
  source 1..22: mol_type = other DNA
tctagaattgttacagtttcag

SEQ ID NO: 141693 - DNA, 22 bp, synthetic construct
  misc_feature 1..22: note = chemically synthesized
  source 1..22: mol_type = other DNA
ctagaattgttacagtttcagg

SEQ ID NO: 141694 - DNA, 22 bp, synthetic construct
  misc_feature 1..22: note = chemically synthesized
  source 1..22: mol_type = other DNA
tagaattgttacagtttcaggg

SEQ ID NO: 141695 - DNA, 22 bp, synthetic construct
  misc_feature 1..22: note = chemically synthesized
  source 1..22: mol_type = other DNA
gaattgttacagtttcagggct

SEQ ID NO: 141696 - DNA, 22 bp, synthetic construct
  misc_feature 1..22: note = chemically synthesized
  source 1..22: mol_type = other DNA
ttacagtttcagggcttagatt

SEQ ID NO: 141697 - DNA, 22 bp, synthetic construct
  misc_feature 1..22: note = chemically synthesized
  source 1..22: mol_type = other DNA
cagtttcagggcttagatttaa

SEQ ID NO: 141698 - DNA, 22 bp, synthetic construct
  misc_feature 1..22: note = chemically synthesized
  source 1..22: mol_type = other DNA
cagggcttagatttaagtcctt

SEQ ID NO: 141699 - DNA, 22 bp, synthetic construct
  misc_feature 1..22: note = chemically synthesized
  source 1..22: mol_type = other DNA
agggcttagatttaagtccttg

SEQ ID NO: 141700 - DNA, 22 bp, synthetic construct
  misc_feature 1..22: note = chemically synthesized
  source 1..22: mol_type = other DNA
agatttaagtccttgatccatc

SEQ ID NO: 141701 - DNA, 22 bp, synthetic construct
  misc_feature 1..22: note = chemically synthesized
  source 1..22: mol_type = other DNA
gatttaagtccttgatccatct

SEQ ID NO: 141702 - DNA, 22 bp, synthetic construct
  misc_feature 1..22: note = chemically synthesized
  source 1..22: mol_type = other DNA
aagtccttgatccatcttgagt

SEQ ID NO: 141703 - DNA, 22 bp, synthetic construct
  misc_feature 1..22: note = chemically synthesized
  source 1..22: mol_type = other DNA
agtccttgatccatcttgagtt

SEQ ID NO: 141704 - DNA, 22 bp, synthetic construct
  misc_feature 1..22: note = chemically synthesized
  source 1..22: mol_type = other DNA
gatccatcttgagttgattttt

SEQ ID NO: 141705 - DNA, 22 bp, synthetic construct
  misc_feature 1..22: note = chemically synthesized
  source 1..22: mol_type = other DNA
atccatcttgagttgatttttg

SEQ ID NO: 141706 - DNA, 22 bp, synthetic construct
  misc_feature 1..22: note = chemically synthesized
  source 1..22: mol_type = other DNA
gagttgatttttgtataaggtg

SEQ ID NO: 141707 - DNA, 22 bp, synthetic construct
  misc_feature 1..22: note = chemically synthesized
  source 1..22: mol_type = other DNA
agttgatttttgtataaggtga

SEQ ID NO: 141708 - DNA, 22 bp, synthetic construct
  misc_feature 1..22: note = chemically synthesized
  source 1..22: mol_type = other DNA
atttttgtataaggtgagagat

SEQ ID NO: 141709 - DNA, 22 bp, synthetic construct
  misc_feature 1..22: note = chemically synthesized
  source 1..22: mol_type = other DNA
ttgtataaggtgagagatgaag

SEQ ID NO: 141710 - DNA, 22 bp, synthetic construct
  misc_feature 1..22: note = chemically synthesized
  source 1..22: mol_type = other DNA
tgtataaggtgagagatgaaga

SEQ ID NO: 141711 - DNA, 22 bp, synthetic construct
  misc_feature 1..22: note = chemically synthesized
  source 1..22: mol_type = other DNA
gtataaggtgagagatgaagat

SEQ ID NO: 141712 - DNA, 22 bp, synthetic construct
  misc_feature 1..22: note = chemically synthesized
  source 1..22: mol_type = other DNA
tataaggtgagagatgaagatc

SEQ ID NO: 141713 - DNA, 22 bp, synthetic construct
  misc_feature 1..22: note = chemically synthesized
  source 1..22: mol_type = other DNA
cattctcctacatgtagcttgc

SEQ ID NO: 141714 - DNA, 22 bp, synthetic construct
  misc_feature 1..22: note = chemically synthesized
  source 1..22: mol_type = other DNA
attctcctacatgtagcttgcc

SEQ ID NO: 141715 - DNA, 22 bp, synthetic construct
  misc_feature 1..22: note = chemically synthesized
  source 1..22: mol_type = other DNA
tcctacatgtagcttgccagct

SEQ ID NO: 141716 - DNA, 22 bp, synthetic construct
  misc_feature 1..22: note = chemically synthesized
  source 1..22: mol_type = other DNA
ctacatgtagcttgccagctat

SEQ ID NO: 141717 - DNA, 22 bp, synthetic construct
  misc_feature 1..22: note = chemically synthesized
  source 1..22: mol_type = other DNA
catgtagcttgccagctatccc

SEQ ID NO: 141718 - DNA, 22 bp, synthetic construct
  misc_feature 1..22: note = chemically synthesized
  source 1..22: mol_type = other DNA
gccagctatccccgcaccattt

SEQ ID NO: 141719 - DNA, 22 bp, synthetic construct
  misc_feature 1..22: note = chemically synthesized
  source 1..22: mol_type = other DNA
ccagctatccccgcaccatttg

SEQ ID NO: 141720 - DNA, 22 bp, synthetic construct
  misc_feature 1..22: note = chemically synthesized
  source 1..22: mol_type = other DNA
tccccgcaccatttgttgaata

SEQ ID NO: 141721 - DNA, 22 bp, synthetic construct
  misc_feature 1..22: note = chemically synthesized
  source 1..22: mol_type = other DNA
gttgaatagggtgccctttccc

SEQ ID NO: 141722 - DNA, 22 bp, synthetic construct
  misc_feature 1..22: note = chemically synthesized
  source 1..22: mol_type = other DNA
ttgaatagggtgccctttcccc

SEQ ID NO: 141723 - DNA, 22 bp, synthetic construct
  misc_feature 1..22: note = chemically synthesized
  source 1..22: mol_type = other DNA
aatagggtgccctttccccact

SEQ ID NO: 141724 - DNA, 22 bp, synthetic construct
  misc_feature 1..22: note = chemically synthesized
  source 1..22: mol_type = other DNA
tccccactttatgtttttgttt

SEQ ID NO: 141725 - DNA, 22 bp, synthetic construct
  misc_feature 1..22: note = chemically synthesized
  source 1..22: mol_type = other DNA
ccccactttatgtttttgtttg

SEQ ID NO: 141726 - DNA, 22 bp, synthetic construct
  misc_feature 1..22: note = chemically synthesized
  source 1..22: mol_type = other DNA
cccactttatgtttttgtttgc

SEQ ID NO: 141727 - DNA, 22 bp, synthetic construct
  misc_feature 1..22: note = chemically synthesized
  source 1..22: mol_type = other DNA
tatgtttttgtttgctttgtca

SEQ ID NO: 141728 - DNA, 22 bp, synthetic construct
  misc_feature 1..22: note = chemically synthesized
  source 1..22: mol_type = other DNA
atgtttttgtttgctttgtcaa

SEQ ID NO: 141729 - DNA, 22 bp, synthetic construct
  misc_feature 1..22: note = chemically synthesized
  source 1..22: mol_type = other DNA
tgtttttgtttgctttgtcaaa

SEQ ID NO: 141730 - DNA, 22 bp, synthetic construct
  misc_feature 1..22: note = chemically synthesized
  source 1..22: mol_type = other DNA
ttgtttgctttgtcaaagatca

SEQ ID NO: 141731 - DNA, 22 bp, synthetic construct
  misc_feature 1..22: note = chemically synthesized
  source 1..22: mol_type = other DNA
tgtttgctttgtcaaagatcag

SEQ ID NO: 141732 - DNA, 22 bp, synthetic construct
  misc_feature 1..22: note = chemically synthesized
  source 1..22: mol_type = other DNA
gtttgctttgtcaaagatcagt

SEQ ID NO: 141733 - DNA, 22 bp, synthetic construct
  misc_feature 1..22: note = chemically synthesized
  source 1..22: mol_type = other DNA
tttgctttgtcaaagatcagtt

SEQ ID NO: 141734 - DNA, 22 bp, synthetic construct
  misc_feature 1..22: note = chemically synthesized
  source 1..22: mol_type = other DNA
gctttgtcaaagatcagttgga

SEQ ID NO: 141735 - DNA, 22 bp, synthetic construct
  misc_feature 1..22: note = chemically synthesized
  source 1..22: mol_type = other DNA
ctttgtcaaagatcagttggat

SEQ ID NO: 141736 - DNA, 22 bp, synthetic construct
  misc_feature 1..22: note = chemically synthesized
  source 1..22: mol_type = other DNA
tgtcaaagatcagttggatgta

SEQ ID NO: 141737 - DNA, 22 bp, synthetic construct
  misc_feature 1..22: note = chemically synthesized
  source 1..22: mol_type = other DNA
gtcaaagatcagttggatgtaa

SEQ ID NO: 141738 - DNA, 22 bp, synthetic construct
  misc_feature 1..22: note = chemically synthesized
  source 1..22: mol_type = other DNA
tcaaagatcagttggatgtaag

SEQ ID NO: 141739 - DNA, 22 bp, synthetic construct
  misc_feature 1..22: note = chemically synthesized
  source 1..22: mol_type = other DNA
gatgtaagtatttgagtttatt

SEQ ID NO: 141740 - DNA, 22 bp, synthetic construct
  misc_feature 1..22: note = chemically synthesized
  source 1..22: mol_type = other DNA
gagtttatttctgggttctcta

SEQ ID NO: 141741 - DNA, 22 bp, synthetic construct
  misc_feature 1..22: note = chemically synthesized
  source 1..22: mol_type = other DNA
agtttatttctgggttctctat

SEQ ID NO: 141742 - DNA, 22 bp, synthetic construct
  misc_feature 1..22: note = chemically synthesized
  source 1..22: mol_type = other DNA
atttctgggttctctattctgt

SEQ ID NO: 141743 - DNA, 22 bp, synthetic construct
  misc_feature 1..22: note = chemically synthesized
  source 1..22: mol_type = other DNA
tttctgggttctctattctgtt

SEQ ID NO: 141744 - DNA, 22 bp, synthetic construct
  misc_feature 1..22: note = chemically synthesized
  source 1..22: mol_type = other DNA
ctgggttctctattctgttcca

SEQ ID NO: 141745 - DNA, 22 bp, synthetic construct
  misc_feature 1..22: note = chemically synthesized
  source 1..22: mol_type = other DNA
tgggttctctattctgttccat

SEQ ID NO: 141746 - DNA, 22 bp, synthetic construct
  misc_feature 1..22: note = chemically synthesized
  source 1..22: mol_type = other DNA
ggttctctattctgttccattg

SEQ ID NO: 141747 - DNA, 22 bp, synthetic construct
  misc_feature 1..22: note = chemically synthesized
  source 1..22: mol_type = other DNA
tctattctgttccattggtcga

SEQ ID NO: 141748 - DNA, 22 bp, synthetic construct
  misc_feature 1..22: note = chemically synthesized
  source 1..22: mol_type = other DNA
tattctgttccattggtcgatg

SEQ ID NO: 141749 - DNA, 22 bp, synthetic construct
  misc_feature 1..22: note = chemically synthesized
  source 1..22: mol_type = other DNA
ttctgttccattggtcgatgtg

SEQ ID NO: 141750 - DNA, 22 bp, synthetic construct
  misc_feature 1..22: note = chemically synthesized
  source 1..22: mol_type = other DNA
tgttccattggtcgatgtgcct

SEQ ID NO: 141751 - DNA, 22 bp, synthetic construct
  misc_feature 1..22: note = chemically synthesized
  source 1..22: mol_type = other DNA
ttccattggtcgatgtgcctat

SEQ ID NO: 141752 - DNA, 22 bp, synthetic construct
  misc_feature 1..22: note = chemically synthesized
  source 1..22: mol_type = other DNA
cattggtcgatgtgcctatttg

SEQ ID NO: 141753 - DNA, 22 bp, synthetic construct
  misc_feature 1..22: note = chemically synthesized
  source 1..22: mol_type = other DNA
gtcgatgtgcctatttgtacac

SEQ ID NO: 141754 - DNA, 22 bp, synthetic construct
  misc_feature 1..22: note = chemically synthesized
  source 1..22: mol_type = other DNA
tttgtacaccagcatcatgctg

SEQ ID NO: 141755 - DNA, 22 bp, synthetic construct
  misc_feature 1..22: note = chemically synthesized
  source 1..22: mol_type = other DNA
gtacaccagcatcatgctgttt

SEQ ID NO: 141756 - DNA, 22 bp, synthetic construct
  misc_feature 1..22: note = chemically synthesized
  source 1..22: mol_type = other DNA
tacaccagcatcatgctgtttt

SEQ ID NO: 141757 - DNA, 22 bp, synthetic construct
  misc_feature 1..22: note = chemically synthesized
  source 1..22: mol_type = other DNA
ttttggtgactatggccttatt

SEQ ID NO: 141758 - DNA, 22 bp, synthetic construct
  misc_feature 1..22: note = chemically synthesized
  source 1..22: mol_type = other DNA
tggtgactatggccttattgta

SEQ ID NO: 141759 - DNA, 22 bp, synthetic construct
  misc_feature 1..22: note = chemically synthesized
  source 1..22: mol_type = other DNA
ggtgactatggccttattgtat

SEQ ID NO: 141760 - DNA, 22 bp, synthetic construct
  misc_feature 1..22: note = chemically synthesized
  source 1..22: mol_type = other DNA
gtgactatggccttattgtata

SEQ ID NO: 141761 - DNA, 22 bp, synthetic construct
  misc_feature 1..22: note = chemically synthesized
  source 1..22: mol_type = other DNA
tggccttattgtatagtttgaa

SEQ ID NO: 141762 - DNA, 22 bp, synthetic construct
  misc_feature 1..22: note = chemically synthesized
  source 1..22: mol_type = other DNA
attgtatagtttgaaatgaggt

SEQ ID NO: 141763 - DNA, 22 bp, synthetic construct
  misc_feature 1..22: note = chemically synthesized
  source 1..22: mol_type = other DNA
ttgtatagtttgaaatgaggta

SEQ ID NO: 141764 - DNA, 22 bp, synthetic construct
  misc_feature 1..22: note = chemically synthesized
  source 1..22: mol_type = other DNA
tatagtttgaaatgaggtaatg

SEQ ID NO: 141765 - DNA, 22 bp, synthetic construct
  misc_feature 1..22: note = chemically synthesized
  source 1..22: mol_type = other DNA
gaaatgaggtaatgtaatgcct

SEQ ID NO: 141766 - DNA, 22 bp, synthetic construct
  misc_feature 1..22: note = chemically synthesized
  source 1..22: mol_type = other DNA
aaatgaggtaatgtaatgcctt

SEQ ID NO: 141767 - DNA, 22 bp, synthetic construct
  misc_feature 1..22: note = chemically synthesized
  source 1..22: mol_type = other DNA
cagatttgttcttttttttaga

SEQ ID NO: 141768 - DNA, 22 bp, synthetic construct
  misc_feature 1..22: note = chemically synthesized
  source 1..22: mol_type = other DNA
agatttgttcttttttttagac

SEQ ID NO: 141769 - DNA, 22 bp, synthetic construct
  misc_feature 1..22: note = chemically synthesized
  source 1..22: mol_type = other DNA
gttcttttttttagacttgctt

SEQ ID NO: 141770 - DNA, 22 bp, synthetic construct
  misc_feature 1..22: note = chemically synthesized
  source 1..22: mol_type = other DNA
ttcttttttttagacttgcttg

SEQ ID NO: 141771 - DNA, 22 bp, synthetic construct
  misc_feature 1..22: note = chemically synthesized
  source 1..22: mol_type = other DNA
ttttttttagacttgcttgttt

SEQ ID NO: 141772 - DNA, 22 bp, synthetic construct
  misc_feature 1..22: note = chemically synthesized
  source 1..22: mol_type = other DNA
ttttttagacttgcttgtttat

SEQ ID NO: 141773 - DNA, 22 bp, synthetic construct
  misc_feature 1..22: note = chemically synthesized
  source 1..22: mol_type = other DNA
tttttagacttgcttgtttatt

SEQ ID NO: 141774 - DNA, 22 bp, synthetic construct
  misc_feature 1..22: note = chemically synthesized
  source 1..22: mol_type = other DNA
ttttagacttgcttgtttattg

SEQ ID NO: 141775 - DNA, 22 bp, synthetic construct
  misc_feature 1..22: note = chemically synthesized
  source 1..22: mol_type = other DNA
tttagacttgcttgtttattgg

SEQ ID NO: 141776 - DNA, 22 bp, synthetic construct
  misc_feature 1..22: note = chemically synthesized
  source 1..22: mol_type = other DNA
ttagacttgcttgtttattggg

SEQ ID NO: 141777 - DNA, 22 bp, synthetic construct
  misc_feature 1..22: note = chemically synthesized
  source 1..22: mol_type = other DNA
tagacttgcttgtttattgggc

SEQ ID NO: 141778 - DNA, 22 bp, synthetic construct
  misc_feature 1..22: note = chemically synthesized
  source 1..22: mol_type = other DNA
agacttgcttgtttattgggct

SEQ ID NO: 141779 - DNA, 22 bp, synthetic construct
  misc_feature 1..22: note = chemically synthesized
  source 1..22: mol_type = other DNA
gacttgcttgtttattgggctc

SEQ ID NO: 141780 - DNA, 22 bp, synthetic construct
  misc_feature 1..22: note = chemically synthesized
  source 1..22: mol_type = other DNA
gcttgtttattgggctcttttt

SEQ ID NO: 141781 - DNA, 22 bp, synthetic construct
  misc_feature 1..22: note = chemically synthesized
  source 1..22: mol_type = other DNA
cttgtttattgggctctttttt

SEQ ID NO: 141782 - DNA, 22 bp, synthetic construct
  misc_feature 1..22: note = chemically synthesized
  source 1..22: mol_type = other DNA
gtttattgggctcttttttggt

SEQ ID NO: 141783 - DNA, 22 bp, synthetic construct
  misc_feature 1..22: note = chemically synthesized
  source 1..22: mol_type = other DNA
tttattgggctcttttttggtt

SEQ ID NO: 141784 - DNA, 22 bp, synthetic construct
  misc_feature 1..22: note = chemically synthesized
  source 1..22: mol_type = other DNA
attgggctcttttttggttcca

SEQ ID NO: 141785 - DNA, 22 bp, synthetic construct
  misc_feature 1..22: note = chemically synthesized
  source 1..22: mol_type = other DNA
ttgggctcttttttggttccat

SEQ ID NO: 141786 - DNA, 22 bp, synthetic construct
  misc_feature 1..22: note = chemically synthesized
  source 1..22: mol_type = other DNA
ggctcttttttggttccataag

SEQ ID NO: 141787 - DNA, 22 bp, synthetic construct
  misc_feature 1..22: note = chemically synthesized
  source 1..22: mol_type = other DNA
ttttttggttccataagaattt

SEQ ID NO: 141788 - DNA, 22 bp, synthetic construct
  misc_feature 1..22: note = chemically synthesized
  source 1..22: mol_type = other DNA
ttttggttccataagaatttta

SEQ ID NO: 141789 - DNA, 22 bp, synthetic construct
  misc_feature 1..22: note = chemically synthesized
  source 1..22: mol_type = other DNA
tttggttccataagaattttag

SEQ ID NO: 141790 - DNA, 22 bp, synthetic construct
  misc_feature 1..22: note = chemically synthesized
  source 1..22: mol_type = other DNA
ttggttccataagaattttagg

SEQ ID NO: 141791 - DNA, 22 bp, synthetic construct
  misc_feature 1..22: note = chemically synthesized
  source 1..22: mol_type = other DNA
tggttccataagaattttagga

SEQ ID NO: 141792 - DNA, 22 bp, synthetic construct
  misc_feature 1..22: note = chemically synthesized
  source 1..22: mol_type = other DNA
ggttccataagaattttaggat

SEQ ID NO: 141793 - DNA, 22 bp, synthetic construct
  misc_feature 1..22: note = chemically synthesized
  source 1..22: mol_type = other DNA
gttccataagaattttaggatt

SEQ ID NO: 141794 - DNA, 22 bp, synthetic construct
  misc_feature 1..22: note = chemically synthesized
  source 1..22: mol_type = other DNA
cataagaattttaggattgttt

SEQ ID NO: 141795 - DNA, 22 bp, synthetic construct
  misc_feature 1..22: note = chemically synthesized
  source 1..22: mol_type = other DNA
taggattgttttttctagttct

SEQ ID NO: 141796 - DNA, 22 bp, synthetic construct
  misc_feature 1..22: note = chemically synthesized
  source 1..22: mol_type = other DNA
aggattgttttttctagttctg

SEQ ID NO: 141797 - DNA, 22 bp, synthetic construct
  misc_feature 1..22: note = chemically synthesized
  source 1..22: mol_type = other DNA
ggattgttttttctagttctgt

SEQ ID NO: 141798 - DNA, 22 bp, synthetic construct
  misc_feature 1..22: note = chemically synthesized
  source 1..22: mol_type = other DNA
ttttttctagttctgtgaagac

SEQ ID NO: 141799 - DNA, 22 bp, synthetic construct
  misc_feature 1..22: note = chemically synthesized
  source 1..22: mol_type = other DNA
tttctagttctgtgaagactaa

SEQ ID NO: 141800 - DNA, 22 bp, synthetic construct
  misc_feature 1..22: note = chemically synthesized
  source 1..22: mol_type = other DNA
ttctagttctgtgaagactaat

SEQ ID NO: 141801 - DNA, 22 bp, synthetic construct
  misc_feature 1..22: note = chemically synthesized
  source 1..22: mol_type = other DNA
tctagttctgtgaagactaatg

SEQ ID NO: 141802 - DNA, 22 bp, synthetic construct
  misc_feature 1..22: note = chemically synthesized
  source 1..22: mol_type = other DNA
ctagttctgtgaagactaatgg

SEQ ID NO: 141803 - DNA, 22 bp, synthetic construct
  misc_feature 1..22: note = chemically synthesized
  source 1..22: mol_type = other DNA
tagttctgtgaagactaatggt

SEQ ID NO: 141804 - DNA, 22 bp, synthetic construct
  misc_feature 1..22: note = chemically synthesized
  source 1..22: mol_type = other DNA
gttctgtgaagactaatggtgg

SEQ ID NO: 141805 - DNA, 22 bp, synthetic construct
  misc_feature 1..22: note = chemically synthesized
  source 1..22: mol_type = other DNA
tgtgaagactaatggtggtatt

SEQ ID NO: 141806 - DNA, 22 bp, synthetic construct
  misc_feature 1..22: note = chemically synthesized
  source 1..22: mol_type = other DNA
tgaagactaatggtggtatttt

SEQ ID NO: 141807 - DNA, 22 bp, synthetic construct
  misc_feature 1..22: note = chemically synthesized
  source 1..22: mol_type = other DNA
atggtggtattttgatgggaat

SEQ ID NO: 141808 - DNA, 22 bp, synthetic construct
  misc_feature 1..22: note = chemically synthesized
  source 1..22: mol_type = other DNA
tgatgggaattgcaatgaattt

SEQ ID NO: 141809 - DNA, 22 bp, synthetic construct
  misc_feature 1..22: note = chemically synthesized
  source 1..22: mol_type = other DNA
gatgggaattgcaatgaatttg

SEQ ID NO: 141810 - DNA, 22 bp, synthetic construct
  misc_feature 1..22: note = chemically synthesized
  source 1..22: mol_type = other DNA
atgggaattgcaatgaatttgt

SEQ ID NO: 141811 - DNA, 22 bp, synthetic construct
  misc_feature 1..22: note = chemically synthesized
  source 1..22: mol_type = other DNA
caatgaatttgtaggttgcttc

SEQ ID NO: 141812 - DNA, 22 bp, synthetic construct
  misc_feature 1..22: note = chemically synthesized
  source 1..22: mol_type = other DNA
gtaggttgcttctggcattatg

SEQ ID NO: 141813 - DNA, 22 bp, synthetic construct
  misc_feature 1..22: note = chemically synthesized
  source 1..22: mol_type = other DNA
taggttgcttctggcattatgg

SEQ ID NO: 141814 - DNA, 22 bp, synthetic construct
  misc_feature 1..22: note = chemically synthesized
  source 1..22: mol_type = other DNA
cttctggcattatggccatttt

SEQ ID NO: 141815 - DNA, 22 bp, synthetic construct
  misc_feature 1..22: note = chemically synthesized
  source 1..22: mol_type = other DNA
ctggcattatggccattttcac

SEQ ID NO: 141816 - DNA, 22 bp, synthetic construct
  misc_feature 1..22: note = chemically synthesized
  source 1..22: mol_type = other DNA
tggcattatggccattttcaca

SEQ ID NO: 141817 - DNA, 22 bp, synthetic construct
  misc_feature 1..22: note = chemically synthesized
  source 1..22: mol_type = other DNA
gcattatggccattttcacaat

SEQ ID NO: 141818 - DNA, 22 bp, synthetic construct
  misc_feature 1..22: note = chemically synthesized
  source 1..22: mol_type = other DNA
tggccattttcacaatattgat

SEQ ID NO: 141819 - DNA, 22 bp, synthetic construct
  misc_feature 1..22: note = chemically synthesized
  source 1..22: mol_type = other DNA
tcacaatattgattctacccat

SEQ ID NO: 141820 - DNA, 22 bp, synthetic construct
  misc_feature 1..22: note = chemically synthesized
  source 1..22: mol_type = other DNA
cacaatattgattctacccatc

SEQ ID NO: 141821 - DNA, 22 bp, synthetic construct
  misc_feature 1..22: note = chemically synthesized
  source 1..22: mol_type = other DNA
acaatattgattctacccatct

SEQ ID NO: 141822 - DNA, 22 bp, synthetic construct
  misc_feature 1..22: note = chemically synthesized
  source 1..22: mol_type = other DNA
attctacccatctatgagaatg

SEQ ID NO: 141823 - DNA, 22 bp, synthetic construct
  misc_feature 1..22: note = chemically synthesized
  source 1..22: mol_type = other DNA
tacccatctatgagaatggcat

SEQ ID NO: 141824 - DNA, 22 bp, synthetic construct
  misc_feature 1..22: note = chemically synthesized
  source 1..22: mol_type = other DNA
cccatctatgagaatggcatgt

SEQ ID NO: 141825 - DNA, 22 bp, synthetic construct
  misc_feature 1..22: note = chemically synthesized
  source 1..22: mol_type = other DNA
tgagaatggcatgtgtttccat

SEQ ID NO: 141826 - DNA, 22 bp, synthetic construct
  misc_feature 1..22: note = chemically synthesized
  source 1..22: mol_type = other DNA
ccatttgtttgtgtcttatatg

SEQ ID NO: 141827 - DNA, 22 bp, synthetic construct
  misc_feature 1..22: note = chemically synthesized
  source 1..22: mol_type = other DNA
catttgtttgtgtcttatatga

SEQ ID NO: 141828 - DNA, 22 bp, synthetic construct
  misc_feature 1..22: note = chemically synthesized
  source 1..22: mol_type = other DNA
gtttgtgtcttatatgattact

SEQ ID NO: 141829 - DNA, 22 bp, synthetic construct
  misc_feature 1..22: note = chemically synthesized
  source 1..22: mol_type = other DNA
tttgtgtcttatatgattactt

SEQ ID NO: 141830 - DNA, 22 bp, synthetic construct
  misc_feature 1..22: note = chemically synthesized
  source 1..22: mol_type = other DNA
gtgtcttatatgattactttca

SEQ ID NO: 141831 - DNA, 22 bp, synthetic construct
  misc_feature 1..22: note = chemically synthesized
  source 1..22: mol_type = other DNA
tgtcttatatgattactttcag

SEQ ID NO: 141832 - DNA, 22 bp, synthetic construct
  misc_feature 1..22: note = chemically synthesized
  source 1..22: mol_type = other DNA
atatgattactttcagccgtgt

SEQ ID NO: 141833 - DNA, 22 bp, synthetic construct
  misc_feature 1..22: note = chemically synthesized
  source 1..22: mol_type = other DNA
tatgattactttcagccgtgtt

SEQ ID NO: 141834 - DNA, 22 bp, synthetic construct
  misc_feature 1..22: note = chemically synthesized
  source 1..22: mol_type = other DNA
ctttcagccgtgttttgtagtt

SEQ ID NO: 141835 - DNA, 22 bp, synthetic construct
  misc_feature 1..22: note = chemically synthesized
  source 1..22: mol_type = other DNA
tcagccgtgttttgtagttttc

SEQ ID NO: 141836 - DNA, 22 bp, synthetic construct
  misc_feature 1..22: note = chemically synthesized
  source 1..22: mol_type = other DNA
cagccgtgttttgtagttttcc

SEQ ID NO: 141837 - DNA, 22 bp, synthetic construct
  misc_feature 1..22: note = chemically synthesized
  source 1..22: mol_type = other DNA
agccgtgttttgtagttttcct

SEQ ID NO: 141838 - DNA, 22 bp, synthetic construct
  misc_feature 1..22: note = chemically synthesized
  source 1..22: mol_type = other DNA
tgtagttttccttgtagatgtc

SEQ ID NO: 141839 - DNA, 22 bp, synthetic construct
  misc_feature 1..22: note = chemically synthesized
  source 1..22: mol_type = other DNA
gtagttttccttgtagatgtct

SEQ ID NO: 141840 - DNA, 22 bp, synthetic construct
  misc_feature 1..22: note = chemically synthesized
  source 1..22: mol_type = other DNA
tagttttccttgtagatgtctt

SEQ ID NO: 141841 - DNA, 22 bp, synthetic construct
  misc_feature 1..22: note = chemically synthesized
  source 1..22: mol_type = other DNA
tccttgtagatgtctttcacct

SEQ ID NO: 141842 - DNA, 22 bp, synthetic construct
  misc_feature 1..22: note = chemically synthesized
  source 1..22: mol_type = other DNA
ccttgtagatgtctttcacctc

SEQ ID NO: 141843 - DNA, 22 bp, synthetic construct
  misc_feature 1..22: note = chemically synthesized
  source 1..22: mol_type = other DNA
cttgtagatgtctttcacctcc

SEQ ID NO: 141844 - DNA, 22 bp, synthetic construct
  misc_feature 1..22: note = chemically synthesized
  source 1..22: mol_type = other DNA
gtagatgtctttcacctccttg

SEQ ID NO: 141845 - DNA, 22 bp, synthetic construct
  misc_feature 1..22: note = chemically synthesized
  source 1..22: mol_type = other DNA
tagatgtctttcacctccttgg

SEQ ID NO: 141846 - DNA, 22 bp, synthetic construct
  misc_feature 1..22: note = chemically synthesized
  source 1..22: mol_type = other DNA
tcacctccttggttaggtatat

SEQ ID NO: 141847 - DNA, 22 bp, synthetic construct
  misc_feature 1..22: note = chemically synthesized
  source 1..22: mol_type = other DNA
cacctccttggttaggtatata

SEQ ID NO: 141848 - DNA, 22 bp, synthetic construct
  misc_feature 1..22: note = chemically synthesized
  source 1..22: mol_type = other DNA
acctccttggttaggtatatat

SEQ ID NO: 141849 - DNA, 22 bp, synthetic construct
  misc_feature 1..22: note = chemically synthesized
  source 1..22: mol_type = other DNA
cttggttaggtatatattccta

SEQ ID NO: 141850 - DNA, 22 bp, synthetic construct
  misc_feature 1..22: note = chemically synthesized
  source 1..22: mol_type = other DNA
ggttaggtatatattcctaagt

SEQ ID NO: 141851 - DNA, 22 bp, synthetic construct
  misc_feature 1..22: note = chemically synthesized
  source 1..22: mol_type = other DNA
gttaggtatatattcctaagtt

SEQ ID NO: 141852 - DNA, 22 bp, synthetic construct
  misc_feature 1..22: note = chemically synthesized
  source 1..22: mol_type = other DNA
ggtatatattcctaagtttttg

SEQ ID NO: 141853 - DNA, 22 bp, synthetic construct
  misc_feature 1..22: note = chemically synthesized
  source 1..22: mol_type = other DNA
ctaagtttttgttttgttttgt

SEQ ID NO: 141854 - DNA, 22 bp, synthetic construct
  misc_feature 1..22: note = chemically synthesized
  source 1..22: mol_type = other DNA
agtttttgttttgttttgtttt

SEQ ID NO: 141855 - DNA, 22 bp, synthetic construct
  misc_feature 1..22: note = chemically synthesized
  source 1..22: mol_type = other DNA
ttgttttgttttgttttgtttt

SEQ ID NO: 141856 - DNA, 22 bp, synthetic construct
  misc_feature 1..22: note = chemically synthesized
  source 1..22: mol_type = other DNA
tgttttgttttgttttgttttt

SEQ ID NO: 141857 - DNA, 22 bp, synthetic construct
  misc_feature 1..22: note = chemically synthesized
  source 1..22: mol_type = other DNA
gttttgttttgttttgtttttt

SEQ ID NO: 141858 - DNA, 22 bp, synthetic construct
  misc_feature 1..22: note = chemically synthesized
  source 1..22: mol_type = other DNA
ttttgttttgttttgttttttg

SEQ ID NO: 141859 - DNA, 22 bp, synthetic construct
  misc_feature 1..22: note = chemically synthesized
  source 1..22: mol_type = other DNA
tgttttgttttgttttttgcag

SEQ ID NO: 141860 - DNA, 22 bp, synthetic construct
  misc_feature 1..22: note = chemically synthesized
  source 1..22: mol_type = other DNA
gttttgttttgttttttgcagc

SEQ ID NO: 141861 - DNA, 22 bp, synthetic construct
  misc_feature 1..22: note = chemically synthesized
  source 1..22: mol_type = other DNA
ttttgttttgttttttgcagct

SEQ ID NO: 141862 - DNA, 22 bp, synthetic construct
  misc_feature 1..22: note = chemically synthesized
  source 1..22: mol_type = other DNA
tgttttgttttttgcagctatt

SEQ ID NO: 141863 - DNA, 22 bp, synthetic construct
  misc_feature 1..22: note = chemically synthesized
  source 1..22: mol_type = other DNA
gttttgttttttgcagctattg

SEQ ID NO: 141864 - DNA, 22 bp, synthetic construct
  misc_feature 1..22: note = chemically synthesized
  source 1..22: mol_type = other DNA
ttttgttttttgcagctattgt

SEQ ID NO: 141865 - DNA, 22 bp, synthetic construct
  misc_feature 1..22: note = chemically synthesized
  source 1..22: mol_type = other DNA
tgttttttgcagctattgtaaa

SEQ ID NO: 141866 - DNA, 22 bp, synthetic construct
  misc_feature 1..22: note = chemically synthesized
  source 1..22: mol_type = other DNA
gttttttgcagctattgtaaaa

SEQ ID NO: 141867 - DNA, 22 bp, synthetic construct
  misc_feature 1..22: note = chemically synthesized
  source 1..22: mol_type = other DNA
ttttttgcagctattgtaaaag

SEQ ID NO: 141868 - DNA, 22 bp, synthetic construct
  misc_feature 1..22: note = chemically synthesized
  source 1..22: mol_type = other DNA
tttgcagctattgtaaaagggg

SEQ ID NO: 141869 - DNA, 22 bp, synthetic construct
  misc_feature 1..22: note = chemically synthesized
  source 1..22: mol_type = other DNA
ttgcagctattgtaaaaggggt

SEQ ID NO: 141870 - DNA, 22 bp, synthetic construct
  misc_feature 1..22: note = chemically synthesized
  source 1..22: mol_type = other DNA
tgcagctattgtaaaaggggtt

SEQ ID NO: 141871 - DNA, 22 bp, synthetic construct
  misc_feature 1..22: note = chemically synthesized
  source 1..22: mol_type = other DNA
gcagctattgtaaaaggggttg

SEQ ID NO: 141872 - DNA, 22 bp, synthetic construct
  misc_feature 1..22: note = chemically synthesized
  source 1..22: mol_type = other DNA
cagctattgtaaaaggggttga

SEQ ID NO: 141873 - DNA, 22 bp, synthetic construct
  misc_feature 1..22: note = chemically synthesized
  source 1..22: mol_type = other DNA
ttgtaaaaggggttgagttctt

SEQ ID NO: 141874 - DNA, 22 bp, synthetic construct
  misc_feature 1..22: note = chemically synthesized
  source 1..22: mol_type = other DNA
taaaaggggttgagttcttgat

SEQ ID NO: 141875 - DNA, 22 bp, synthetic construct
  misc_feature 1..22: note = chemically synthesized
  source 1..22: mol_type = other DNA
agttcttgattttattctcagc

SEQ ID NO: 141876 - DNA, 22 bp, synthetic construct
  misc_feature 1..22: note = chemically synthesized
  source 1..22: mol_type = other DNA
ttgattttattctcagcttggt

SEQ ID NO: 141877 - DNA, 22 bp, synthetic construct
  misc_feature 1..22: note = chemically synthesized
  source 1..22: mol_type = other DNA
gattttattctcagcttggtca

SEQ ID NO: 141878 - DNA, 22 bp, synthetic construct
  misc_feature 1..22: note = chemically synthesized
  source 1..22: mol_type = other DNA
attttattctcagcttggtcat

SEQ ID NO: 141879 - DNA, 22 bp, synthetic construct
  misc_feature 1..22: note = chemically synthesized
  source 1..22: mol_type = other DNA
tattctcagcttggtcattgct

SEQ ID NO: 141880 - DNA, 22 bp, synthetic construct
  misc_feature 1..22: note = chemically synthesized
  source 1..22: mol_type = other DNA
attctcagcttggtcattgctg

SEQ ID NO: 141881 - DNA, 22 bp, synthetic construct
  misc_feature 1..22: note = chemically synthesized
  source 1..22: mol_type = other DNA
ttctcagcttggtcattgctgg

SEQ ID NO: 141882 - DNA, 22 bp, synthetic construct
  misc_feature 1..22: note = chemically synthesized
  source 1..22: mol_type = other DNA
tcagcttggtcattgctggtat

SEQ ID NO: 141883 - DNA, 22 bp, synthetic construct
  misc_feature 1..22: note = chemically synthesized
  source 1..22: mol_type = other DNA
agcttggtcattgctggtatgt

SEQ ID NO: 141884 - DNA, 22 bp, synthetic construct
  misc_feature 1..22: note = chemically synthesized
  source 1..22: mol_type = other DNA
ggtcattgctggtatgtaagaa

SEQ ID NO: 141885 - DNA, 22 bp, synthetic construct
  misc_feature 1..22: note = chemically synthesized
  source 1..22: mol_type = other DNA
gtcattgctggtatgtaagaaa

SEQ ID NO: 141886 - DNA, 22 bp, synthetic construct
  misc_feature 1..22: note = chemically synthesized
  source 1..22: mol_type = other DNA
ctggtatgtaagaaagcaactc

SEQ ID NO: 141887 - DNA, 22 bp, synthetic construct
  misc_feature 1..22: note = chemically synthesized
  source 1..22: mol_type = other DNA
gtatgtaagaaagcaactcatt

SEQ ID NO: 141888 - DNA, 22 bp, synthetic construct
  misc_feature 1..22: note = chemically synthesized
  source 1..22: mol_type = other DNA
attggtgtacgttaattttgta

SEQ ID NO: 141889 - DNA, 22 bp, synthetic construct
  misc_feature 1..22: note = chemically synthesized
  source 1..22: mol_type = other DNA
gtgtacgttaattttgtatcca

SEQ ID NO: 141890 - DNA, 22 bp, synthetic construct
  misc_feature 1..22: note = chemically synthesized
  source 1..22: mol_type = other DNA
attttgtatccagaaactttgc

SEQ ID NO: 141891 - DNA, 22 bp, synthetic construct
  misc_feature 1..22: note = chemically synthesized
  source 1..22: mol_type = other DNA
tgtatccagaaactttgctgaa

SEQ ID NO: 141892 - DNA, 22 bp, synthetic construct
  misc_feature 1..22: note = chemically synthesized
  source 1..22: mol_type = other DNA
gtatccagaaactttgctgaat

SEQ ID NO: 141893 - DNA, 22 bp, synthetic construct
  misc_feature 1..22: note = chemically synthesized
  source 1..22: mol_type = other DNA
tatccagaaactttgctgaatt

SEQ ID NO: 141894 - DNA, 22 bp, synthetic construct
  misc_feature 1..22: note = chemically synthesized
  source 1..22: mol_type = other DNA
tgctgaattattttatcagttc

SEQ ID NO: 141895 - DNA, 22 bp, synthetic construct
  misc_feature 1..22: note = chemically synthesized
  source 1..22: mol_type = other DNA
gctgaattattttatcagttct

SEQ ID NO: 141896 - DNA, 22 bp, synthetic construct
  misc_feature 1..22: note = chemically synthesized
  source 1..22: mol_type = other DNA
ctgaattattttatcagttcta

SEQ ID NO: 141897 - DNA, 22 bp, synthetic construct
  misc_feature 1..22: note = chemically synthesized
  source 1..22: mol_type = other DNA
aattattttatcagttctaggg

SEQ ID NO: 141898 - DNA, 22 bp, synthetic construct
  misc_feature 1..22: note = chemically synthesized
  source 1..22: mol_type = other DNA
ttttatcagttctagggggttt

SEQ ID NO: 141899 - DNA, 22 bp, synthetic construct
  misc_feature 1..22: note = chemically synthesized
  source 1..22: mol_type = other DNA
tatcagttctagggggttttgg

SEQ ID NO: 141900 - DNA, 22 bp, synthetic construct
  misc_feature 1..22: note = chemically synthesized
  source 1..22: mol_type = other DNA
atcagttctagggggttttgga

SEQ ID NO: 141901 - DNA, 22 bp, synthetic construct
  misc_feature 1..22: note = chemically synthesized
  source 1..22: mol_type = other DNA
tcagttctagggggttttggag

SEQ ID NO: 141902 - DNA, 22 bp, synthetic construct
  misc_feature 1..22: note = chemically synthesized
  source 1..22: mol_type = other DNA
tagggggttttggaggagtctt

SEQ ID NO: 141903 - DNA, 22 bp, synthetic construct
  misc_feature 1..22: note = chemically synthesized
  source 1..22: mol_type = other DNA
gggggttttggaggagtcttta

SEQ ID NO: 141904 - DNA, 22 bp, synthetic construct
  misc_feature 1..22: note = chemically synthesized
  source 1..22: mol_type = other DNA
tggaggagtctttagagttttc

SEQ ID NO: 141905 - DNA, 22 bp, synthetic construct
  misc_feature 1..22: note = chemically synthesized
  source 1..22: mol_type = other DNA
ggaggagtctttagagttttct

SEQ ID NO: 141906 - DNA, 22 bp, synthetic construct
  misc_feature 1..22: note = chemically synthesized
  source 1..22: mol_type = other DNA
gaggagtctttagagttttcta

SEQ ID NO: 141907 - DNA, 22 bp, synthetic construct
  misc_feature 1..22: note = chemically synthesized
  source 1..22: mol_type = other DNA
tagagttttctacatacacaat

SEQ ID NO: 141908 - DNA, 22 bp, synthetic construct
  misc_feature 1..22: note = chemically synthesized
  source 1..22: mol_type = other DNA
agagttttctacatacacaatc

SEQ ID NO: 141909 - DNA, 22 bp, synthetic construct
  misc_feature 1..22: note = chemically synthesized
  source 1..22: mol_type = other DNA
gagttttctacatacacaatca

SEQ ID NO: 141910 - DNA, 22 bp, synthetic construct
  misc_feature 1..22: note = chemically synthesized
  source 1..22: mol_type = other DNA
tctacatacacaatcatatcat

SEQ ID NO: 141911 - DNA, 22 bp, synthetic construct
  misc_feature 1..22: note = chemically synthesized
  source 1..22: mol_type = other DNA
ctacatacacaatcatatcatc

SEQ ID NO: 141912 - DNA, 22 bp, synthetic construct
  misc_feature 1..22: note = chemically synthesized
  source 1..22: mol_type = other DNA
tacatacacaatcatatcatca

SEQ ID NO: 141913 - DNA, 22 bp, synthetic construct
  misc_feature 1..22: note = chemically synthesized
  source 1..22: mol_type = other DNA
catacacaatcatatcatcagc

SEQ ID NO: 141914 - DNA, 22 bp, synthetic construct
  misc_feature 1..22: note = chemically synthesized
  source 1..22: mol_type = other DNA
gactttctctttaacaatttgg

SEQ ID NO: 141915 - DNA, 22 bp, synthetic construct
  misc_feature 1..22: note = chemically synthesized
  source 1..22: mol_type = other DNA
actttctctttaacaatttgga

SEQ ID NO: 141916 - DNA, 22 bp, synthetic construct
  misc_feature 1..22: note = chemically synthesized
  source 1..22: mol_type = other DNA
tctctttaacaatttggatgtg

SEQ ID NO: 141917 - DNA, 22 bp, synthetic construct
  misc_feature 1..22: note = chemically synthesized
  source 1..22: mol_type = other DNA
ctctttaacaatttggatgtgc

SEQ ID NO: 141918 - DNA, 22 bp, synthetic construct
  misc_feature 1..22: note = chemically synthesized
  source 1..22: mol_type = other DNA
tctttaacaatttggatgtgct

SEQ ID NO: 141919 - DNA, 22 bp, synthetic construct
  misc_feature 1..22: note = chemically synthesized
  source 1..22: mol_type = other DNA
tttaacaatttggatgtgcttt

SEQ ID NO: 141920 - DNA, 22 bp, synthetic construct
  misc_feature 1..22: note = chemically synthesized
  source 1..22: mol_type = other DNA
taacaatttggatgtgctttac

SEQ ID NO: 141921 - DNA, 22 bp, synthetic construct
  misc_feature 1..22: note = chemically synthesized
  source 1..22: mol_type = other DNA
aacaatttggatgtgctttact

SEQ ID NO: 141922 - DNA, 22 bp, synthetic construct
  misc_feature 1..22: note = chemically synthesized
  source 1..22: mol_type = other DNA
acaatttggatgtgctttactt

SEQ ID NO: 141923 - DNA, 22 bp, synthetic construct
  misc_feature 1..22: note = chemically synthesized
  source 1..22: mol_type = other DNA
ggatgtgctttacttgtttctc

SEQ ID NO: 141924 - DNA, 22 bp, synthetic construct
  misc_feature 1..22: note = chemically synthesized
  source 1..22: mol_type = other DNA
gatgtgctttacttgtttctct

SEQ ID NO: 141925 - DNA, 22 bp, synthetic construct
  misc_feature 1..22: note = chemically synthesized
  source 1..22: mol_type = other DNA
tacttgtttctcttgtctgatt

SEQ ID NO: 141926 - DNA, 22 bp, synthetic construct
  misc_feature 1..22: note = chemically synthesized
  source 1..22: mol_type = other DNA
acttgtttctcttgtctgattg

SEQ ID NO: 141927 - DNA, 22 bp, synthetic construct
  misc_feature 1..22: note = chemically synthesized
  source 1..22: mol_type = other DNA
cttgtttctcttgtctgattgc

SEQ ID NO: 141928 - DNA, 22 bp, synthetic construct
  misc_feature 1..22: note = chemically synthesized
  source 1..22: mol_type = other DNA
gtttctcttgtctgattgctct

SEQ ID NO: 141929 - DNA, 22 bp, synthetic construct
  misc_feature 1..22: note = chemically synthesized
  source 1..22: mol_type = other DNA
tttctcttgtctgattgctctt

SEQ ID NO: 141930 - DNA, 22 bp, synthetic construct
  misc_feature 1..22: note = chemically synthesized
  source 1..22: mol_type = other DNA
ctcttgtctgattgctcttgct

SEQ ID NO: 141931 - DNA, 22 bp, synthetic construct
  misc_feature 1..22: note = chemically synthesized
  source 1..22: mol_type = other DNA
tcttgtctgattgctcttgcta

SEQ ID NO: 141932 - DNA, 22 bp, synthetic construct
  misc_feature 1..22: note = chemically synthesized
  source 1..22: mol_type = other DNA
ttgtctgattgctcttgctagg

SEQ ID NO: 141933 - DNA, 22 bp, synthetic construct
  misc_feature 1..22: note = chemically synthesized
  source 1..22: mol_type = other DNA
gtctgattgctcttgctaggac

SEQ ID NO: 141934 - DNA, 22 bp, synthetic construct
  misc_feature 1..22: note = chemically synthesized
  source 1..22: mol_type = other DNA
tctgattgctcttgctaggact

SEQ ID NO: 141935 - DNA, 22 bp, synthetic construct
  misc_feature 1..22: note = chemically synthesized
  source 1..22: mol_type = other DNA
attgctcttgctaggacttcca

SEQ ID NO: 141936 - DNA, 22 bp, synthetic construct
  misc_feature 1..22: note = chemically synthesized
  source 1..22: mol_type = other DNA
ctcttgctaggacttccagtaa

SEQ ID NO: 141937 - DNA, 22 bp, synthetic construct
  misc_feature 1..22: note = chemically synthesized
  source 1..22: mol_type = other DNA
ttgctaggacttccagtaatat

SEQ ID NO: 141938 - DNA, 22 bp, synthetic construct
  misc_feature 1..22: note = chemically synthesized
  source 1..22: mol_type = other DNA
gctaggacttccagtaatatgt

SEQ ID NO: 141939 - DNA, 22 bp, synthetic construct
  misc_feature 1..22: note = chemically synthesized
  source 1..22: mol_type = other DNA
ctaggacttccagtaatatgtt

SEQ ID NO: 141940 - DNA, 22 bp, synthetic construct
  misc_feature 1..22: note = chemically synthesized
  source 1..22: mol_type = other DNA
ggacttccagtaatatgttaaa

SEQ ID NO: 141941 - DNA, 22 bp, synthetic construct
  misc_feature 1..22: note = chemically synthesized
  source 1..22: mol_type = other DNA
ccagtaatatgttaaagagaag

SEQ ID NO: 141942 - DNA, 22 bp, synthetic construct
  misc_feature 1..22: note = chemically synthesized
  source 1..22: mol_type = other DNA
cagtaatatgttaaagagaagt

SEQ ID NO: 141943 - DNA, 22 bp, synthetic construct
  misc_feature 1..22: note = chemically synthesized
  source 1..22: mol_type = other DNA
aagagaagtggtgagagtgggt

SEQ ID NO: 141944 - DNA, 22 bp, synthetic construct
  misc_feature 1..22: note = chemically synthesized
  source 1..22: mol_type = other DNA
gtctcattccagttttcagaca

SEQ ID NO: 141945 - DNA, 22 bp, synthetic construct
  misc_feature 1..22: note = chemically synthesized
  source 1..22: mol_type = other DNA
tctcattccagttttcagacag

SEQ ID NO: 141946 - DNA, 22 bp, synthetic construct
  misc_feature 1..22: note = chemically synthesized
  source 1..22: mol_type = other DNA
attccagttttcagacagaatg

SEQ ID NO: 141947 - DNA, 22 bp, synthetic construct
  misc_feature 1..22: note = chemically synthesized
  source 1..22: mol_type = other DNA
cagttttcagacagaatgcttt

SEQ ID NO: 141948 - DNA, 22 bp, synthetic construct
  misc_feature 1..22: note = chemically synthesized
  source 1..22: mol_type = other DNA
tcagacagaatgcttttaactt

SEQ ID NO: 141949 - DNA, 22 bp, synthetic construct
  misc_feature 1..22: note = chemically synthesized
  source 1..22: mol_type = other DNA
cagacagaatgcttttaacttt

SEQ ID NO: 141950 - DNA, 22 bp, synthetic construct
  misc_feature 1..22: note = chemically synthesized
  source 1..22: mol_type = other DNA
agacagaatgcttttaactttt

SEQ ID NO: 141951 - DNA, 22 bp, synthetic construct
  misc_feature 1..22: note = chemically synthesized
  source 1..22: mol_type = other DNA
ttaactttttcccattcaatat

SEQ ID NO: 141952 - DNA, 22 bp, synthetic construct
  misc_feature 1..22: note = chemically synthesized
  source 1..22: mol_type = other DNA
taactttttcccattcaatata

SEQ ID NO: 141953 - DNA, 22 bp, synthetic construct
  misc_feature 1..22: note = chemically synthesized
  source 1..22: mol_type = other DNA
aactttttcccattcaatataa

SEQ ID NO: 141954 - DNA, 22 bp, synthetic construct
  misc_feature 1..22: note = chemically synthesized
  source 1..22: mol_type = other DNA
actttttcccattcaatataat

SEQ ID NO: 141955 - DNA, 22 bp, synthetic construct
  misc_feature 1..22: note = chemically synthesized
  source 1..22: mol_type = other DNA
tttcccattcaatataatgttg

SEQ ID NO: 141956 - DNA, 22 bp, synthetic construct
  misc_feature 1..22: note = chemically synthesized
  source 1..22: mol_type = other DNA
ttcccattcaatataatgttgg

SEQ ID NO: 141957 - DNA, 22 bp, synthetic construct
  misc_feature 1..22: note = chemically synthesized
  source 1..22: mol_type = other DNA
tcccattcaatataatgttggc

SEQ ID NO: 141958 - DNA, 22 bp, synthetic construct
  misc_feature 1..22: note = chemically synthesized
  source 1..22: mol_type = other DNA
cccattcaatataatgttggct

SEQ ID NO: 141959 - DNA, 22 bp, synthetic construct
  misc_feature 1..22: note = chemically synthesized
  source 1..22: mol_type = other DNA
ccattcaatataatgttggctg

SEQ ID NO: 141960 - DNA, 22 bp, synthetic construct
  misc_feature 1..22: note = chemically synthesized
  source 1..22: mol_type = other DNA
aatataatgttggctgtgtgtt

SEQ ID NO: 141961 - DNA, 22 bp, synthetic construct
  misc_feature 1..22: note = chemically synthesized
  source 1..22: mol_type = other DNA
gctgtgtgtttaccatagctgg

SEQ ID NO: 141962 - DNA, 22 bp, synthetic construct
  misc_feature 1..22: note = chemically synthesized
  source 1..22: mol_type = other DNA
tgtgtttaccatagctggcttt

SEQ ID NO: 141963 - DNA, 22 bp, synthetic construct
  misc_feature 1..22: note = chemically synthesized
  source 1..22: mol_type = other DNA
accatagctggcttttattaca

SEQ ID NO: 141964 - DNA, 22 bp, synthetic construct
  misc_feature 1..22: note = chemically synthesized
  source 1..22: mol_type = other DNA
ccatagctggcttttattacat

SEQ ID NO: 141965 - DNA, 22 bp, synthetic construct
  misc_feature 1..22: note = chemically synthesized
  source 1..22: mol_type = other DNA
gcttttattacattgaggtatg

SEQ ID NO: 141966 - DNA, 22 bp, synthetic construct
  misc_feature 1..22: note = chemically synthesized
  source 1..22: mol_type = other DNA
ttattacattgaggtatgtcct

SEQ ID NO: 141967 - DNA, 22 bp, synthetic construct
  misc_feature 1..22: note = chemically synthesized
  source 1..22: mol_type = other DNA
tattacattgaggtatgtcctt

SEQ ID NO: 141968 - DNA, 22 bp, synthetic construct
  misc_feature 1..22: note = chemically synthesized
  source 1..22: mol_type = other DNA
attacattgaggtatgtccttt

SEQ ID NO: 141969 - DNA, 22 bp, synthetic construct
  misc_feature 1..22: note = chemically synthesized
  source 1..22: mol_type = other DNA
ttacattgaggtatgtcctttg

SEQ ID NO: 141970 - DNA, 22 bp, synthetic construct
  misc_feature 1..22: note = chemically synthesized
  source 1..22: mol_type = other DNA
cattgaggtatgtcctttgtaa

SEQ ID NO: 141971 - DNA, 22 bp, synthetic construct
  misc_feature 1..22: note = chemically synthesized
  source 1..22: mol_type = other DNA
aggtatgtcctttgtaaaccga

SEQ ID NO: 141972 - DNA, 22 bp, synthetic construct
  misc_feature 1..22: note = chemically synthesized
  source 1..22: mol_type = other DNA
tgtaaaccgattttgctgagtt

SEQ ID NO: 141973 - DNA, 22 bp, synthetic construct
  misc_feature 1..22: note = chemically synthesized
  source 1..22: mol_type = other DNA
gtaaaccgattttgctgagttt

SEQ ID NO: 141974 - DNA, 22 bp, synthetic construct
  misc_feature 1..22: note = chemically synthesized
  source 1..22: mol_type = other DNA
taaaccgattttgctgagtttt

SEQ ID NO: 141975 - DNA, 22 bp, synthetic construct
  misc_feature 1..22: note = chemically synthesized
  source 1..22: mol_type = other DNA
tgctgagttttagtcataaagt

SEQ ID NO: 141976 - DNA, 22 bp, synthetic construct
  misc_feature 1..22: note = chemically synthesized
  source 1..22: mol_type = other DNA
gctgagttttagtcataaagtg

SEQ ID NO: 141977 - DNA, 22 bp, synthetic construct
  misc_feature 1..22: note = chemically synthesized
  source 1..22: mol_type = other DNA
ctgagttttagtcataaagtga

SEQ ID NO: 141978 - DNA, 22 bp, synthetic construct
  misc_feature 1..22: note = chemically synthesized
  source 1..22: mol_type = other DNA
agttttagtcataaagtgatgt

SEQ ID NO: 141979 - DNA, 22 bp, synthetic construct
  misc_feature 1..22: note = chemically synthesized
  source 1..22: mol_type = other DNA
tagtcataaagtgatgttgaat

SEQ ID NO: 141980 - DNA, 22 bp, synthetic construct
  misc_feature 1..22: note = chemically synthesized
  source 1..22: mol_type = other DNA
agtcataaagtgatgttgaatt

SEQ ID NO: 141981 - DNA, 22 bp, synthetic construct
  misc_feature 1..22: note = chemically synthesized
  source 1..22: mol_type = other DNA
gtcataaagtgatgttgaattt

SEQ ID NO: 141982 - DNA, 22 bp, synthetic construct
  misc_feature 1..22: note = chemically synthesized
  source 1..22: mol_type = other DNA
aattttgttgaatgcagtttct

SEQ ID NO: 141983 - DNA, 22 bp, synthetic construct
  misc_feature 1..22: note = chemically synthesized
  source 1..22: mol_type = other DNA
tgttgaatgcagtttctgtggc

SEQ ID NO: 141984 - DNA, 22 bp, synthetic construct
  misc_feature 1..22: note = chemically synthesized
  source 1..22: mol_type = other DNA
gttgaatgcagtttctgtggct

SEQ ID NO: 141985 - DNA, 22 bp, synthetic construct
  misc_feature 1..22: note = chemically synthesized
  source 1..22: mol_type = other DNA
ttgaatgcagtttctgtggcta

SEQ ID NO: 141986 - DNA, 22 bp, synthetic construct
  misc_feature 1..22: note = chemically synthesized
  source 1..22: mol_type = other DNA
aatgcagtttctgtggctattg

SEQ ID NO: 141987 - DNA, 22 bp, synthetic construct
  misc_feature 1..22: note = chemically synthesized
  source 1..22: mol_type = other DNA
ctgtggctattgagataatcac

SEQ ID NO: 141988 - DNA, 22 bp, synthetic construct
  misc_feature 1..22: note = chemically synthesized
  source 1..22: mol_type = other DNA
tgtggctattgagataatcaca

SEQ ID NO: 141989 - DNA, 22 bp, synthetic construct
  misc_feature 1..22: note = chemically synthesized
  source 1..22: mol_type = other DNA
tggctattgagataatcacatg

SEQ ID NO: 141990 - DNA, 22 bp, synthetic construct
  misc_feature 1..22: note = chemically synthesized
  source 1..22: mol_type = other DNA
ttgagataatcacatgattttt

SEQ ID NO: 141991 - DNA, 22 bp, synthetic construct
  misc_feature 1..22: note = chemically synthesized
  source 1..22: mol_type = other DNA
agataatcacatgatttttgtt

SEQ ID NO: 141992 - DNA, 22 bp, synthetic construct
  misc_feature 1..22: note = chemically synthesized
  source 1..22: mol_type = other DNA
ttgtttccaattctctttatgt

SEQ ID NO: 141993 - DNA, 22 bp, synthetic construct
  misc_feature 1..22: note = chemically synthesized
  source 1..22: mol_type = other DNA
tgtttccaattctctttatgtt

SEQ ID NO: 141994 - DNA, 22 bp, synthetic construct
  misc_feature 1..22: note = chemically synthesized
  source 1..22: mol_type = other DNA
gtttccaattctctttatgttg

SEQ ID NO: 141995 - DNA, 22 bp, synthetic construct
  misc_feature 1..22: note = chemically synthesized
  source 1..22: mol_type = other DNA
tttccaattctctttatgttgt

SEQ ID NO: 141996 - DNA, 22 bp, synthetic construct
  misc_feature 1..22: note = chemically synthesized
  source 1..22: mol_type = other DNA
ccaattctctttatgttgtgta

SEQ ID NO: 141997 - DNA, 22 bp, synthetic construct
  misc_feature 1..22: note = chemically synthesized
  source 1..22: mol_type = other DNA
caattctctttatgttgtgtat

SEQ ID NO: 141998 - DNA, 22 bp, synthetic construct
  misc_feature 1..22: note = chemically synthesized
  source 1..22: mol_type = other DNA
tctttatgttgtgtatcacact

SEQ ID NO: 141999 - DNA, 22 bp, synthetic construct
  misc_feature 1..22: note = chemically synthesized
  source 1..22: mol_type = other DNA
tttatgttgtgtatcacactta

SEQ ID NO: 142000 - DNA, 22 bp, synthetic construct
  misc_feature 1..22: note = chemically synthesized
  source 1..22: mol_type = other DNA
tatgttgtgtatcacacttatt

SEQ ID NO: 142001 - DNA, 22 bp, synthetic construct
  misc_feature 1..22: note = chemically synthesized
  source 1..22: mol_type = other DNA
atgttgtgtatcacacttattg

SEQ ID NO: 142002 - DNA, 22 bp, synthetic construct
  misc_feature 1..22: note = chemically synthesized
  source 1..22: mol_type = other DNA
tgttgtgtatcacacttattga

SEQ ID NO: 142003 - DNA, 22 bp, synthetic construct
  misc_feature 1..22: note = chemically synthesized
  source 1..22: mol_type = other DNA
tgtatcacacttattgacttgc

SEQ ID NO: 142004 - DNA, 22 bp, synthetic construct
  misc_feature 1..22: note = chemically synthesized
  source 1..22: mol_type = other DNA
attgacttgcgtatgttaaacc

SEQ ID NO: 142005 - DNA, 22 bp, synthetic construct
  misc_feature 1..22: note = chemically synthesized
  source 1..22: mol_type = other DNA
ttgacttgcgtatgttaaacca

SEQ ID NO: 142006 - DNA, 22 bp, synthetic construct
  misc_feature 1..22: note = chemically synthesized
  source 1..22: mol_type = other DNA
acttgcgtatgttaaaccatcc

SEQ ID NO: 142007 - DNA, 22 bp, synthetic construct
  misc_feature 1..22: note = chemically synthesized
  source 1..22: mol_type = other DNA
gcgtatgttaaaccatccgtgc

SEQ ID NO: 142008 - DNA, 22 bp, synthetic construct
  misc_feature 1..22: note = chemically synthesized
  source 1..22: mol_type = other DNA
cgtatgttaaaccatccgtgca

SEQ ID NO: 142009 - DNA, 22 bp, synthetic construct
  misc_feature 1..22: note = chemically synthesized
  source 1..22: mol_type = other DNA
aaccatccgtgcatccctcgca

SEQ ID NO: 142010 - DNA, 22 bp, synthetic construct
  misc_feature 1..22: note = chemically synthesized
  source 1..22: mol_type = other DNA
gcatgaaacccacttgatcatg

SEQ ID NO: 142011 - DNA, 22 bp, synthetic construct
  misc_feature 1..22: note = chemically synthesized
  source 1..22: mol_type = other DNA
gatcatgggttttgatatgctg

SEQ ID NO: 142012 - DNA, 22 bp, synthetic construct
  misc_feature 1..22: note = chemically synthesized
  source 1..22: mol_type = other DNA
atcatgggttttgatatgctgt

SEQ ID NO: 142013 - DNA, 22 bp, synthetic construct
  misc_feature 1..22: note = chemically synthesized
  source 1..22: mol_type = other DNA
tgatatgctgtcggatgctatt

SEQ ID NO: 142014 - DNA, 22 bp, synthetic construct
  misc_feature 1..22: note = chemically synthesized
  source 1..22: mol_type = other DNA
gatatgctgtcggatgctatta

SEQ ID NO: 142015 - DNA, 22 bp, synthetic construct
  misc_feature 1..22: note = chemically synthesized
  source 1..22: mol_type = other DNA
atatgctgtcggatgctattag

SEQ ID NO: 142016 - DNA, 22 bp, synthetic construct
  misc_feature 1..22: note = chemically synthesized
  source 1..22: mol_type = other DNA
tcggatgctattagctagtatt

SEQ ID NO: 142017 - DNA, 22 bp, synthetic construct
  misc_feature 1..22: note = chemically synthesized
  source 1..22: mol_type = other DNA
ttagctagtattttgtcaagga

SEQ ID NO: 142018 - DNA, 22 bp, synthetic construct
  misc_feature 1..22: note = chemically synthesized
  source 1..22: mol_type = other DNA
gctagtattttgtcaaggatgt

SEQ ID NO: 142019 - DNA, 22 bp, synthetic construct
  misc_feature 1..22: note = chemically synthesized
  source 1..22: mol_type = other DNA
gtattttgtcaaggatgttggc

SEQ ID NO: 142020 - DNA, 22 bp, synthetic construct
  misc_feature 1..22: note = chemically synthesized
  source 1..22: mol_type = other DNA
tgtcaaggatgttggcatctat

SEQ ID NO: 142021 - DNA, 22 bp, synthetic construct
  misc_feature 1..22: note = chemically synthesized
  source 1..22: mol_type = other DNA
gtcaaggatgttggcatctatg

SEQ ID NO: 142022 - DNA, 22 bp, synthetic construct
  misc_feature 1..22: note = chemically synthesized
  source 1..22: mol_type = other DNA
tcaaggatgttggcatctatgt

SEQ ID NO: 142023 - DNA, 22 bp, synthetic construct
  misc_feature 1..22: note = chemically synthesized
  source 1..22: mol_type = other DNA
gcatctatgttcatcagggata

SEQ ID NO: 142024 - DNA, 22 bp, synthetic construct
  misc_feature 1..22: note = chemically synthesized
  source 1..22: mol_type = other DNA
tgttcatcagggatattgatct

SEQ ID NO: 142025 - DNA, 22 bp, synthetic construct
  misc_feature 1..22: note = chemically synthesized
  source 1..22: mol_type = other DNA
atcagggatattgatctgtagt

SEQ ID NO: 142026 - DNA, 22 bp, synthetic construct
  misc_feature 1..22: note = chemically synthesized
  source 1..22: mol_type = other DNA
atctgtagtgtttttttttttt

SEQ ID NO: 142027 - DNA, 22 bp, synthetic construct
  misc_feature 1..22: note = chemically synthesized
  source 1..22: mol_type = other DNA
tagtgttttttttttttggtta

SEQ ID NO: 142028 - DNA, 22 bp, synthetic construct
  misc_feature 1..22: note = chemically synthesized
  source 1..22: mol_type = other DNA
tttttttttggttatgttcttt

SEQ ID NO: 142029 - DNA, 22 bp, synthetic construct
  misc_feature 1..22: note = chemically synthesized
  source 1..22: mol_type = other DNA
ttttttttggttatgttctttc

SEQ ID NO: 142030 - DNA, 22 bp, synthetic construct
  misc_feature 1..22: note = chemically synthesized
  source 1..22: mol_type = other DNA
tttttttggttatgttctttcc

SEQ ID NO: 142031 - DNA, 22 bp, synthetic construct
  misc_feature 1..22: note = chemically synthesized
  source 1..22: mol_type = other DNA
ttttttggttatgttctttccc

SEQ ID NO: 142032 - DNA, 22 bp, synthetic construct
  misc_feature 1..22: note = chemically synthesized
  source 1..22: mol_type = other DNA
tttttggttatgttctttccca

SEQ ID NO: 142033 - DNA, 22 bp, synthetic construct
  misc_feature 1..22: note = chemically synthesized
  source 1..22: mol_type = other DNA
ttttggttatgttctttcccag

SEQ ID NO: 142034 - DNA, 22 bp, synthetic construct
  misc_feature 1..22: note = chemically synthesized
  source 1..22: mol_type = other DNA
tttggttatgttctttcccagt

SEQ ID NO: 142035 - DNA, 22 bp, synthetic construct
  misc_feature 1..22: note = chemically synthesized
  source 1..22: mol_type = other DNA
ttggttatgttctttcccagtt

SEQ ID NO: 142036 - DNA, 22 bp, synthetic construct
  misc_feature 1..22: note = chemically synthesized
  source 1..22: mol_type = other DNA
tggttatgttctttcccagttt

SEQ ID NO: 142037 - DNA, 22 bp, synthetic construct
  misc_feature 1..22: note = chemically synthesized
  source 1..22: mol_type = other DNA
ggttatgttctttcccagtttt

SEQ ID NO: 142038 - DNA, 22 bp, synthetic construct
  misc_feature 1..22: note = chemically synthesized
  source 1..22: mol_type = other DNA
gttatgttctttcccagttttg

SEQ ID NO: 142039 - DNA, 22 bp, synthetic construct
  misc_feature 1..22: note = chemically synthesized
  source 1..22: mol_type = other DNA
tgttctttcccagttttggtat

SEQ ID NO: 142040 - DNA, 22 bp, synthetic construct
  misc_feature 1..22: note = chemically synthesized
  source 1..22: mol_type = other DNA
tttcccagttttggtattaagg

SEQ ID NO: 142041 - DNA, 22 bp, synthetic construct
  misc_feature 1..22: note = chemically synthesized
  source 1..22: mol_type = other DNA
tcccagttttggtattaaggtg

SEQ ID NO: 142042 - DNA, 22 bp, synthetic construct
  misc_feature 1..22: note = chemically synthesized
  source 1..22: mol_type = other DNA
cccagttttggtattaaggtga

SEQ ID NO: 142043 - DNA, 22 bp, synthetic construct
  misc_feature 1..22: note = chemically synthesized
  source 1..22: mol_type = other DNA
ccagttttggtattaaggtgat

SEQ ID NO: 142044 - DNA, 22 bp, synthetic construct
  misc_feature 1..22: note = chemically synthesized
  source 1..22: mol_type = other DNA
tggtattaaggtgatactggct

SEQ ID NO: 142045 - DNA, 22 bp, synthetic construct
  misc_feature 1..22: note = chemically synthesized
  source 1..22: mol_type = other DNA
ggtattaaggtgatactggctt

SEQ ID NO: 142046 - DNA, 22 bp, synthetic construct
  misc_feature 1..22: note = chemically synthesized
  source 1..22: mol_type = other DNA
gtattaaggtgatactggcttc

SEQ ID NO: 142047 - DNA, 22 bp, synthetic construct
  misc_feature 1..22: note = chemically synthesized
  source 1..22: mol_type = other DNA
aggtgatactggcttcatagaa

SEQ ID NO: 142048 - DNA, 22 bp, synthetic construct
  misc_feature 1..22: note = chemically synthesized
  source 1..22: mol_type = other DNA
gcttcatagaatgatttaggga

SEQ ID NO: 142049 - DNA, 22 bp, synthetic construct
  misc_feature 1..22: note = chemically synthesized
  source 1..22: mol_type = other DNA
catagaatgatttagggaggat

SEQ ID NO: 142050 - DNA, 22 bp, synthetic construct
  misc_feature 1..22: note = chemically synthesized
  source 1..22: mol_type = other DNA
atagaatgatttagggaggatt

SEQ ID NO: 142051 - DNA, 22 bp, synthetic construct
  misc_feature 1..22: note = chemically synthesized
  source 1..22: mol_type = other DNA
agggaggattctctctttctct

SEQ ID NO: 142052 - DNA, 22 bp, synthetic construct
  misc_feature 1..22: note = chemically synthesized
  source 1..22: mol_type = other DNA
gggaggattctctctttctcta

SEQ ID NO: 142053 - DNA, 22 bp, synthetic construct
  misc_feature 1..22: note = chemically synthesized
  source 1..22: mol_type = other DNA
tctctttctctatcttgtagaa

SEQ ID NO: 142054 - DNA, 22 bp, synthetic construct
  misc_feature 1..22: note = chemically synthesized
  source 1..22: mol_type = other DNA
tctttctctatcttgtagaata

SEQ ID NO: 142055 - DNA, 22 bp, synthetic construct
  misc_feature 1..22: note = chemically synthesized
  source 1..22: mol_type = other DNA
tttctctatcttgtagaatact

SEQ ID NO: 142056 - DNA, 22 bp, synthetic construct
  misc_feature 1..22: note = chemically synthesized
  source 1..22: mol_type = other DNA
tctctatcttgtagaatactgt

SEQ ID NO: 142057 - DNA, 22 bp, synthetic construct
  misc_feature 1..22: note = chemically synthesized
  source 1..22: mol_type = other DNA
ctctatcttgtagaatactgtc

SEQ ID NO: 142058 - DNA, 22 bp, synthetic construct
  misc_feature 1..22: note = chemically synthesized
  source 1..22: mol_type = other DNA
tctatcttgtagaatactgtca

SEQ ID NO: 142059 - DNA, 22 bp, synthetic construct
  misc_feature 1..22: note = chemically synthesized
  source 1..22: mol_type = other DNA
tatcttgtagaatactgtcaat

SEQ ID NO: 142060 - DNA, 22 bp, synthetic construct
  misc_feature 1..22: note = chemically synthesized
  source 1..22: mol_type = other DNA
tcttgtagaatactgtcaatag

SEQ ID NO: 142061 - DNA, 22 bp, synthetic construct
  misc_feature 1..22: note = chemically synthesized
  source 1..22: mol_type = other DNA
gtagaatactgtcaataggatt

SEQ ID NO: 142062 - DNA, 22 bp, synthetic construct
  misc_feature 1..22: note = chemically synthesized
  source 1..22: mol_type = other DNA
tagaatactgtcaataggattg

SEQ ID NO: 142063 - DNA, 22 bp, synthetic construct
  misc_feature 1..22: note = chemically synthesized
  source 1..22: mol_type = other DNA
tcaataggattggtatcaattc

SEQ ID NO: 142064 - DNA, 22 bp, synthetic construct
  misc_feature 1..22: note = chemically synthesized
  source 1..22: mol_type = other DNA
gtatcaattcttctttgaatgt

SEQ ID NO: 142065 - DNA, 22 bp, synthetic construct
  misc_feature 1..22: note = chemically synthesized
  source 1..22: mol_type = other DNA
ttctttgaatgtctggtagaat

SEQ ID NO: 142066 - DNA, 22 bp, synthetic construct
  misc_feature 1..22: note = chemically synthesized
  source 1..22: mol_type = other DNA
ctttgaatgtctggtagaattc

SEQ ID NO: 142067 - DNA, 22 bp, synthetic construct
  misc_feature 1..22: note = chemically synthesized
  source 1..22: mol_type = other DNA
tttgaatgtctggtagaattca

SEQ ID NO: 142068 - DNA, 22 bp, synthetic construct
  misc_feature 1..22: note = chemically synthesized
  source 1..22: mol_type = other DNA
tgaatgtctggtagaattcagc

SEQ ID NO: 142069 - DNA, 22 bp, synthetic construct
  misc_feature 1..22: note = chemically synthesized
  source 1..22: mol_type = other DNA
gaatgtctggtagaattcagct

SEQ ID NO: 142070 - DNA, 22 bp, synthetic construct
  misc_feature 1..22: note = chemically synthesized
  source 1..22: mol_type = other DNA
aatgtctggtagaattcagctg

SEQ ID NO: 142071 - DNA, 22 bp, synthetic construct
  misc_feature 1..22: note = chemically synthesized
  source 1..22: mol_type = other DNA
gtagaattcagctgtgaatcta

SEQ ID NO: 142072 - DNA, 22 bp, synthetic construct
  misc_feature 1..22: note = chemically synthesized
  source 1..22: mol_type = other DNA
agctgtgaatctatctggtcct

SEQ ID NO: 142073 - DNA, 22 bp, synthetic construct
  misc_feature 1..22: note = chemically synthesized
  source 1..22: mol_type = other DNA
tgaatctatctggtcctggact

SEQ ID NO: 142074 - DNA, 22 bp, synthetic construct
  misc_feature 1..22: note = chemically synthesized
  source 1..22: mol_type = other DNA
tctggtcctggacttttttgtt

SEQ ID NO: 142075 - DNA, 22 bp, synthetic construct
  misc_feature 1..22: note = chemically synthesized
  source 1..22: mol_type = other DNA
gtcctggacttttttgttgttg

SEQ ID NO: 142076 - DNA, 22 bp, synthetic construct
  misc_feature 1..22: note = chemically synthesized
  source 1..22: mol_type = other DNA
gacttttttgttgttggtaaat

SEQ ID NO: 142077 - DNA, 22 bp, synthetic construct
  misc_feature 1..22: note = chemically synthesized
  source 1..22: mol_type = other DNA
ttttgttgttggtaaattttta

SEQ ID NO: 142078 - DNA, 22 bp, synthetic construct
  misc_feature 1..22: note = chemically synthesized
  source 1..22: mol_type = other DNA
tttgttgttggtaaatttttat

SEQ ID NO: 142079 - DNA, 22 bp, synthetic construct
  misc_feature 1..22: note = chemically synthesized
  source 1..22: mol_type = other DNA
ttgttgttggtaaatttttatt

SEQ ID NO: 142080 - DNA, 22 bp, synthetic construct
  misc_feature 1..22: note = chemically synthesized
  source 1..22: mol_type = other DNA
tgttgttggtaaatttttatta

SEQ ID NO: 142081 - DNA, 22 bp, synthetic construct
  misc_feature 1..22: note = chemically synthesized
  source 1..22: mol_type = other DNA
gttgttggtaaatttttattat

SEQ ID NO: 142082 - DNA, 22 bp, synthetic construct
  misc_feature 1..22: note = chemically synthesized
  source 1..22: mol_type = other DNA
ttgttggtaaatttttattatc

SEQ ID NO: 142083 - DNA, 22 bp, synthetic construct
  misc_feature 1..22: note = chemically synthesized
  source 1..22: mol_type = other DNA
ttggtaaatttttattatcatt

SEQ ID NO: 142084 - DNA, 22 bp, synthetic construct
  misc_feature 1..22: note = chemically synthesized
  source 1..22: mol_type = other DNA
gtaaatttttattatcatttca

SEQ ID NO: 142085 - DNA, 22 bp, synthetic construct
  misc_feature 1..22: note = chemically synthesized
  source 1..22: mol_type = other DNA
ttattatcatttcagtcttgct

SEQ ID NO: 142086 - DNA, 22 bp, synthetic construct
  misc_feature 1..22: note = chemically synthesized
  source 1..22: mol_type = other DNA
tattatcatttcagtcttgctg

SEQ ID NO: 142087 - DNA, 22 bp, synthetic construct
  misc_feature 1..22: note = chemically synthesized
  source 1..22: mol_type = other DNA
attatcatttcagtcttgctgc

SEQ ID NO: 142088 - DNA, 22 bp, synthetic construct
  misc_feature 1..22: note = chemically synthesized
  source 1..22: mol_type = other DNA
ttatcatttcagtcttgctgct

SEQ ID NO: 142089 - DNA, 22 bp, synthetic construct
  misc_feature 1..22: note = chemically synthesized
  source 1..22: mol_type = other DNA
tcatttcagtcttgctgcttat

SEQ ID NO: 142090 - DNA, 22 bp, synthetic construct
  misc_feature 1..22: note = chemically synthesized
  source 1..22: mol_type = other DNA
cagtcttgctgcttattactgg

SEQ ID NO: 142091 - DNA, 22 bp, synthetic construct
  misc_feature 1..22: note = chemically synthesized
  source 1..22: mol_type = other DNA
agtcttgctgcttattactggt

SEQ ID NO: 142092 - DNA, 22 bp, synthetic construct
  misc_feature 1..22: note = chemically synthesized
  source 1..22: mol_type = other DNA
gctgcttattactggtctgttc

SEQ ID NO: 142093 - DNA, 22 bp, synthetic construct
  misc_feature 1..22: note = chemically synthesized
  source 1..22: mol_type = other DNA
ctgcttattactggtctgttca

SEQ ID NO: 142094 - DNA, 22 bp, synthetic construct
  misc_feature 1..22: note = chemically synthesized
  source 1..22: mol_type = other DNA
cttattactggtctgttcaggg

SEQ ID NO: 142095 - DNA, 22 bp, synthetic construct
  misc_feature 1..22: note = chemically synthesized
  source 1..22: mol_type = other DNA
attactggtctgttcagggtat

SEQ ID NO: 142096 - DNA, 22 bp, synthetic construct
  misc_feature 1..22: note = chemically synthesized
  source 1..22: mol_type = other DNA
ttactggtctgttcagggtatc

SEQ ID NO: 142097 - DNA, 22 bp, synthetic construct
  misc_feature 1..22: note = chemically synthesized
  source 1..22: mol_type = other DNA
ctggtctgttcagggtatctaa

SEQ ID NO: 142098 - DNA, 22 bp, synthetic construct
  misc_feature 1..22: note = chemically synthesized
  source 1..22: mol_type = other DNA
gtctgttcagggtatctaattc

SEQ ID NO: 142099 - DNA, 22 bp, synthetic construct
  misc_feature 1..22: note = chemically synthesized
  source 1..22: mol_type = other DNA
ttcagggtatctaattcttcct

SEQ ID NO: 142100 - DNA, 22 bp, synthetic construct
  misc_feature 1..22: note = chemically synthesized
  source 1..22: mol_type = other DNA
agggtatctaattcttcctgac

SEQ ID NO: 142101 - DNA, 22 bp, synthetic construct
  misc_feature 1..22: note = chemically synthesized
  source 1..22: mol_type = other DNA
attcttcctgacttaagctaga

SEQ ID NO: 142102 - DNA, 22 bp, synthetic construct
  misc_feature 1..22: note = chemically synthesized
  source 1..22: mol_type = other DNA
ttcctgacttaagctagagccc

SEQ ID NO: 142103 - DNA, 22 bp, synthetic construct
  misc_feature 1..22: note = chemically synthesized
  source 1..22: mol_type = other DNA
cctgacttaagctagagccctg

SEQ ID NO: 142104 - DNA, 22 bp, synthetic construct
  misc_feature 1..22: note = chemically synthesized
  source 1..22: mol_type = other DNA
ctgacttaagctagagccctgt

SEQ ID NO: 142105 - DNA, 22 bp, synthetic construct
  misc_feature 1..22: note = chemically synthesized
  source 1..22: mol_type = other DNA
acttaagctagagccctgtatc

SEQ ID NO: 142106 - DNA, 22 bp, synthetic construct
  misc_feature 1..22: note = chemically synthesized
  source 1..22: mol_type = other DNA
aagctagagccctgtatctttc

SEQ ID NO: 142107 - DNA, 22 bp, synthetic construct
  misc_feature 1..22: note = chemically synthesized
  source 1..22: mol_type = other DNA
agctagagccctgtatctttcc

SEQ ID NO: 142108 - DNA, 22 bp, synthetic construct
  misc_feature 1..22: note = chemically synthesized
  source 1..22: mol_type = other DNA
gagccctgtatctttccaggaa

SEQ ID NO: 142109 - DNA, 22 bp, synthetic construct
  misc_feature 1..22: note = chemically synthesized
  source 1..22: mol_type = other DNA
tatctttccaggaattcgaacg

SEQ ID NO: 142110 - DNA, 22 bp, synthetic construct
  misc_feature 1..22: note = chemically synthesized
  source 1..22: mol_type = other DNA
tccaggaattcgaacgtctcct

SEQ ID NO: 142111 - DNA, 22 bp, synthetic construct
  misc_feature 1..22: note = chemically synthesized
  source 1..22: mol_type = other DNA
ccaggaattcgaacgtctcctt

SEQ ID NO: 142112 - DNA, 22 bp, synthetic construct
  misc_feature 1..22: note = chemically synthesized
  source 1..22: mol_type = other DNA
caggaattcgaacgtctccttt

SEQ ID NO: 142113 - DNA, 22 bp, synthetic construct
  misc_feature 1..22: note = chemically synthesized
  source 1..22: mol_type = other DNA
gaacgtctcctttaggttttct

SEQ ID NO: 142114 - DNA, 22 bp, synthetic construct
  misc_feature 1..22: note = chemically synthesized
  source 1..22: mol_type = other DNA
ctttaggttttctagtttatgc

SEQ ID NO: 142115 - DNA, 22 bp, synthetic construct
  misc_feature 1..22: note = chemically synthesized
  source 1..22: mol_type = other DNA
taggttttctagtttatgcatg

SEQ ID NO: 142116 - DNA, 22 bp, synthetic construct
  misc_feature 1..22: note = chemically synthesized
  source 1..22: mol_type = other DNA
aggttttctagtttatgcatgt

SEQ ID NO: 142117 - DNA, 22 bp, synthetic construct
  misc_feature 1..22: note = chemically synthesized
  source 1..22: mol_type = other DNA
ggttttctagtttatgcatgta

SEQ ID NO: 142118 - DNA, 22 bp, synthetic construct
  misc_feature 1..22: note = chemically synthesized
  source 1..22: mol_type = other DNA
tctagtttatgcatgtaaaggt

SEQ ID NO: 142119 - DNA, 22 bp, synthetic construct
  misc_feature 1..22: note = chemically synthesized
  source 1..22: mol_type = other DNA
ctagtttatgcatgtaaaggtg

SEQ ID NO: 142120 - DNA, 22 bp, synthetic construct
  misc_feature 1..22: note = chemically synthesized
  source 1..22: mol_type = other DNA
tagtttatgcatgtaaaggtgt

SEQ ID NO: 142121 - DNA, 22 bp, synthetic construct
  misc_feature 1..22: note = chemically synthesized
  source 1..22: mol_type = other DNA
gtttatgcatgtaaaggtgttc

SEQ ID NO: 142122 - DNA, 22 bp, synthetic construct
  misc_feature 1..22: note = chemically synthesized
  source 1..22: mol_type = other DNA
atgcatgtaaaggtgttcatag

SEQ ID NO: 142123 - DNA, 22 bp, synthetic construct
  misc_feature 1..22: note = chemically synthesized
  source 1..22: mol_type = other DNA
tgcatgtaaaggtgttcatagt

SEQ ID NO: 142124 - DNA, 22 bp, synthetic construct
  misc_feature 1..22: note = chemically synthesized
  source 1..22: mol_type = other DNA
atagtagccttgaataatcttt

SEQ ID NO: 142125 - DNA, 22 bp, synthetic construct
  misc_feature 1..22: note = chemically synthesized
  source 1..22: mol_type = other DNA
gaataatcttttgtatttctgt

SEQ ID NO: 142126 - DNA, 22 bp, synthetic construct
  misc_feature 1..22: note = chemically synthesized
  source 1..22: mol_type = other DNA
aataatcttttgtatttctgtg

SEQ ID NO: 142127 - DNA, 22 bp, synthetic construct
  misc_feature 1..22: note = chemically synthesized
  source 1..22: mol_type = other DNA
ttgtatttctgtggtatcagta

SEQ ID NO: 142128 - DNA, 22 bp, synthetic construct
  misc_feature 1..22: note = chemically synthesized
  source 1..22: mol_type = other DNA
tgtatttctgtggtatcagtaa

SEQ ID NO: 142129 - DNA, 22 bp, synthetic construct
  misc_feature 1..22: note = chemically synthesized
  source 1..22: mol_type = other DNA
gtatttctgtggtatcagtaat

SEQ ID NO: 142130 - DNA, 22 bp, synthetic construct
  misc_feature 1..22: note = chemically synthesized
  source 1..22: mol_type = other DNA
tatttctgtggtatcagtaata

SEQ ID NO: 142131 - DNA, 22 bp, synthetic construct
  misc_feature 1..22: note = chemically synthesized
  source 1..22: mol_type = other DNA
ctgtggtatcagtaatagtatc

SEQ ID NO: 142132 - DNA, 22 bp, synthetic construct
  misc_feature 1..22: note = chemically synthesized
  source 1..22: mol_type = other DNA
tgtggtatcagtaatagtatct

SEQ ID NO: 142133 - DNA, 22 bp, synthetic construct
  misc_feature 1..22: note = chemically synthesized
  source 1..22: mol_type = other DNA
tggtatcagtaatagtatctcc

SEQ ID NO: 142134 - DNA, 22 bp, synthetic construct
  misc_feature 1..22: note = chemically synthesized
  source 1..22: mol_type = other DNA
ctgttttgtttctaattgagtt

SEQ ID NO: 142135 - DNA, 22 bp, synthetic construct
  misc_feature 1..22: note = chemically synthesized
  source 1..22: mol_type = other DNA
ttttgtttctaattgagtttat

SEQ ID NO: 142136 - DNA, 22 bp, synthetic construct
  misc_feature 1..22: note = chemically synthesized
  source 1..22: mol_type = other DNA
tgtttctaattgagtttatttg

SEQ ID NO: 142137 - DNA, 22 bp, synthetic construct
  misc_feature 1..22: note = chemically synthesized
  source 1..22: mol_type = other DNA
gtttctaattgagtttatttgc

SEQ ID NO: 142138 - DNA, 22 bp, synthetic construct
  misc_feature 1..22: note = chemically synthesized
  source 1..22: mol_type = other DNA
tttctaattgagtttatttgca

SEQ ID NO: 142139 - DNA, 22 bp, synthetic construct
  misc_feature 1..22: note = chemically synthesized
  source 1..22: mol_type = other DNA
ctaattgagtttatttgcactt

SEQ ID NO: 142140 - DNA, 22 bp, synthetic construct
  misc_feature 1..22: note = chemically synthesized
  source 1..22: mol_type = other DNA
taattgagtttatttgcacttc

SEQ ID NO: 142141 - DNA, 22 bp, synthetic construct
  misc_feature 1..22: note = chemically synthesized
  source 1..22: mol_type = other DNA
attgagtttatttgcacttctc

SEQ ID NO: 142142 - DNA, 22 bp, synthetic construct
  misc_feature 1..22: note = chemically synthesized
  source 1..22: mol_type = other DNA
agtttatttgcacttctctcct

SEQ ID NO: 142143 - DNA, 22 bp, synthetic construct
  misc_feature 1..22: note = chemically synthesized
  source 1..22: mol_type = other DNA
atttgcacttctctcctctttt

SEQ ID NO: 142144 - DNA, 22 bp, synthetic construct
  misc_feature 1..22: note = chemically synthesized
  source 1..22: mol_type = other DNA
tttgcacttctctcctcttttc

SEQ ID NO: 142145 - DNA, 22 bp, synthetic construct
  misc_feature 1..22: note = chemically synthesized
  source 1..22: mol_type = other DNA
gcacttctctcctcttttcttg

SEQ ID NO: 142146 - DNA, 22 bp, synthetic construct
  misc_feature 1..22: note = chemically synthesized
  source 1..22: mol_type = other DNA
cacttctctcctcttttcttgg

SEQ ID NO: 142147 - DNA, 22 bp, synthetic construct
  misc_feature 1..22: note = chemically synthesized
  source 1..22: mol_type = other DNA
ctctcctcttttcttggttaat

SEQ ID NO: 142148 - DNA, 22 bp, synthetic construct
  misc_feature 1..22: note = chemically synthesized
  source 1..22: mol_type = other DNA
tctcctcttttcttggttaatc

SEQ ID NO: 142149 - DNA, 22 bp, synthetic construct
  misc_feature 1..22: note = chemically synthesized
  source 1..22: mol_type = other DNA
tcctcttttcttggttaatctt

SEQ ID NO: 142150 - DNA, 22 bp, synthetic construct
  misc_feature 1..22: note = chemically synthesized
  source 1..22: mol_type = other DNA
ctcttttcttggttaatcttgc

SEQ ID NO: 142151 - DNA, 22 bp, synthetic construct
  misc_feature 1..22: note = chemically synthesized
  source 1..22: mol_type = other DNA
ttttcttggttaatcttgctaa

SEQ ID NO: 142152 - DNA, 22 bp, synthetic construct
  misc_feature 1..22: note = chemically synthesized
  source 1..22: mol_type = other DNA
ttcttggttaatcttgctaatg

SEQ ID NO: 142153 - DNA, 22 bp, synthetic construct
  misc_feature 1..22: note = chemically synthesized
  source 1..22: mol_type = other DNA
tcttggttaatcttgctaatgg

SEQ ID NO: 142154 - DNA, 22 bp, synthetic construct
  misc_feature 1..22: note = chemically synthesized
  source 1..22: mol_type = other DNA
cttggttaatcttgctaatggt

SEQ ID NO: 142155 - DNA, 22 bp, synthetic construct
  misc_feature 1..22: note = chemically synthesized
  source 1..22: mol_type = other DNA
ttggttaatcttgctaatggtc

SEQ ID NO: 142156 - DNA, 22 bp, synthetic construct
  misc_feature 1..22: note = chemically synthesized
  source 1..22: mol_type = other DNA
ggttaatcttgctaatggtcta

SEQ ID NO: 142157 - DNA, 22 bp, synthetic construct
  misc_feature 1..22: note = chemically synthesized
  source 1..22: mol_type = other DNA
gttaatcttgctaatggtctat

SEQ ID NO: 142158 - DNA, 22 bp, synthetic construct
  misc_feature 1..22: note = chemically synthesized
  source 1..22: mol_type = other DNA
atcttgctaatggtctatcagt

SEQ ID NO: 142159 - DNA, 22 bp, synthetic construct
  misc_feature 1..22: note = chemically synthesized
  source 1..22: mol_type = other DNA
gctaatggtctatcagttttat

SEQ ID NO: 142160 - DNA, 22 bp, synthetic construct
  misc_feature 1..22: note = chemically synthesized
  source 1..22: mol_type = other DNA
ctaatggtctatcagttttatt

SEQ ID NO: 142161 - DNA, 22 bp, synthetic construct
  misc_feature 1..22: note = chemically synthesized
  source 1..22: mol_type = other DNA
atggtctatcagttttatttat

SEQ ID NO: 142162 - DNA, 22 bp, synthetic construct
  misc_feature 1..22: note = chemically synthesized
  source 1..22: mol_type = other DNA
tcagttttatttatcttttcaa

SEQ ID NO: 142163 - DNA, 22 bp, synthetic construct
  misc_feature 1..22: note = chemically synthesized
  source 1..22: mol_type = other DNA
tatttatcttttcaaagaacca

SEQ ID NO: 142164 - DNA, 22 bp, synthetic construct
  misc_feature 1..22: note = chemically synthesized
  source 1..22: mol_type = other DNA
atttatcttttcaaagaaccag

SEQ ID NO: 142165 - DNA, 22 bp, synthetic construct
  misc_feature 1..22: note = chemically synthesized
  source 1..22: mol_type = other DNA
tttatcttttcaaagaaccagc

SEQ ID NO: 142166 - DNA, 22 bp, synthetic construct
  misc_feature 1..22: note = chemically synthesized
  source 1..22: mol_type = other DNA
atcttttcaaagaaccagcttt

SEQ ID NO: 142167 - DNA, 22 bp, synthetic construct
  misc_feature 1..22: note = chemically synthesized
  source 1..22: mol_type = other DNA
tcttttcaaagaaccagctttt

SEQ ID NO: 142168 - DNA, 22 bp, synthetic construct
  misc_feature 1..22: note = chemically synthesized
  source 1..22: mol_type = other DNA
ttcaaagaaccagctttttatt

SEQ ID NO: 142169 - DNA, 22 bp, synthetic construct
  misc_feature 1..22: note = chemically synthesized
  source 1..22: mol_type = other DNA
tcaaagaaccagctttttattt

SEQ ID NO: 142170 - DNA, 22 bp, synthetic construct
  misc_feature 1..22: note = chemically synthesized
  source 1..22: mol_type = other DNA
caaagaaccagctttttatttc

SEQ ID NO: 142171 - DNA, 22 bp, synthetic construct
  misc_feature 1..22: note = chemically synthesized
  source 1..22: mol_type = other DNA
aaagaaccagctttttatttca

SEQ ID NO: 142172 - DNA, 22 bp, synthetic construct
  misc_feature 1..22: note = chemically synthesized
  source 1..22: mol_type = other DNA
tttatttcatttagcttttgta

SEQ ID NO: 142173 - DNA, 22 bp, synthetic construct
  misc_feature 1..22: note = chemically synthesized
  source 1..22: mol_type = other DNA
ttatttcatttagcttttgtat

SEQ ID NO: 142174 - DNA, 22 bp, synthetic construct
  misc_feature 1..22: note = chemically synthesized
  source 1..22: mol_type = other DNA
tatttcatttagcttttgtatt

SEQ ID NO: 142175 - DNA, 22 bp, synthetic construct
  misc_feature 1..22: note = chemically synthesized
  source 1..22: mol_type = other DNA
atttcatttagcttttgtattt

SEQ ID NO: 142176 - DNA, 22 bp, synthetic construct
  misc_feature 1..22: note = chemically synthesized
  source 1..22: mol_type = other DNA
tttcatttagcttttgtatttt

SEQ ID NO: 142177 - DNA, 22 bp, synthetic construct
  misc_feature 1..22: note = chemically synthesized
  source 1..22: mol_type = other DNA
catttagcttttgtattttttt

SEQ ID NO: 142178 - DNA, 22 bp, synthetic construct
  misc_feature 1..22: note = chemically synthesized
  source 1..22: mol_type = other DNA
atttagcttttgtatttttttg

SEQ ID NO: 142179 - DNA, 22 bp, synthetic construct
  misc_feature 1..22: note = chemically synthesized
  source 1..22: mol_type = other DNA
agcttttgtatttttttgcagt

SEQ ID NO: 142180 - DNA, 22 bp, synthetic construct
  misc_feature 1..22: note = chemically synthesized
  source 1..22: mol_type = other DNA
gcttttgtatttttttgcagtt

SEQ ID NO: 142181 - DNA, 22 bp, synthetic construct
  misc_feature 1..22: note = chemically synthesized
  source 1..22: mol_type = other DNA
ttgtatttttttgcagttgttt

SEQ ID NO: 142182 - DNA, 22 bp, synthetic construct
  misc_feature 1..22: note = chemically synthesized
  source 1..22: mol_type = other DNA
tgtatttttttgcagttgtttt

SEQ ID NO: 142183 - DNA, 22 bp, synthetic construct
  misc_feature 1..22: note = chemically synthesized
  source 1..22: mol_type = other DNA
gtatttttttgcagttgtttta

SEQ ID NO: 142184 - DNA, 22 bp, synthetic construct
  misc_feature 1..22: note = chemically synthesized
  source 1..22: mol_type = other DNA
tatttttttgcagttgttttaa

SEQ ID NO: 142185 - DNA, 22 bp, synthetic construct
  misc_feature 1..22: note = chemically synthesized
  source 1..22: mol_type = other DNA
ttttgcagttgttttaatttca

SEQ ID NO: 142186 - DNA, 22 bp, synthetic construct
  misc_feature 1..22: note = chemically synthesized
  source 1..22: mol_type = other DNA
tttgcagttgttttaatttcat

SEQ ID NO: 142187 - DNA, 22 bp, synthetic construct
  misc_feature 1..22: note = chemically synthesized
  source 1..22: mol_type = other DNA
ttgcagttgttttaatttcatt

SEQ ID NO: 142188 - DNA, 22 bp, synthetic construct
  misc_feature 1..22: note = chemically synthesized
  source 1..22: mol_type = other DNA
tgcagttgttttaatttcattt

SEQ ID NO: 142189 - DNA, 22 bp, synthetic construct
  misc_feature 1..22: note = chemically synthesized
  source 1..22: mol_type = other DNA
gcagttgttttaatttcattta

SEQ ID NO: 142190 - DNA, 22 bp, synthetic construct
  misc_feature 1..22: note = chemically synthesized
  source 1..22: mol_type = other DNA
cagttgttttaatttcatttag

SEQ ID NO: 142191 - DNA, 22 bp, synthetic construct
  misc_feature 1..22: note = chemically synthesized
  source 1..22: mol_type = other DNA
ttttaatttcatttagttctcc

SEQ ID NO: 142192 - DNA, 22 bp, synthetic construct
  misc_feature 1..22: note = chemically synthesized
  source 1..22: mol_type = other DNA
taatttcatttagttctcctct

SEQ ID NO: 142193 - DNA, 22 bp, synthetic construct
  misc_feature 1..22: note = chemically synthesized
  source 1..22: mol_type = other DNA
aatttcatttagttctcctctt

SEQ ID NO: 142194 - DNA, 22 bp, synthetic construct
  misc_feature 1..22: note = chemically synthesized
  source 1..22: mol_type = other DNA
atttcatttagttctcctctta

SEQ ID NO: 142195 - DNA, 22 bp, synthetic construct
  misc_feature 1..22: note = chemically synthesized
  source 1..22: mol_type = other DNA
catttagttctcctcttatctt

SEQ ID NO: 142196 - DNA, 22 bp, synthetic construct
  misc_feature 1..22: note = chemically synthesized
  source 1..22: mol_type = other DNA
atttagttctcctcttatctta

SEQ ID NO: 142197 - DNA, 22 bp, synthetic construct
  misc_feature 1..22: note = chemically synthesized
  source 1..22: mol_type = other DNA
agttctcctcttatcttagtta

SEQ ID NO: 142198 - DNA, 22 bp, synthetic construct
  misc_feature 1..22: note = chemically synthesized
  source 1..22: mol_type = other DNA
gttctcctcttatcttagttat

SEQ ID NO: 142199 - DNA, 22 bp, synthetic construct
  misc_feature 1..22: note = chemically synthesized
  source 1..22: mol_type = other DNA
tcctcttatcttagttattccc

SEQ ID NO: 142200 - DNA, 22 bp, synthetic construct
  misc_feature 1..22: note = chemically synthesized
  source 1..22: mol_type = other DNA
ctcttatcttagttattccctt

SEQ ID NO: 142201 - DNA, 22 bp, synthetic construct
  misc_feature 1..22: note = chemically synthesized
  source 1..22: mol_type = other DNA
ttatcttagttattccctttct

SEQ ID NO: 142202 - DNA, 22 bp, synthetic construct
  misc_feature 1..22: note = chemically synthesized
  source 1..22: mol_type = other DNA
atcttagttattccctttcttt

SEQ ID NO: 142203 - DNA, 22 bp, synthetic construct
  misc_feature 1..22: note = chemically synthesized
  source 1..22: mol_type = other DNA
tcttagttattccctttctttt

SEQ ID NO: 142204 - DNA, 22 bp, synthetic construct
  misc_feature 1..22: note = chemically synthesized
  source 1..22: mol_type = other DNA
agttattccctttcttttgctg

SEQ ID NO: 142205 - DNA, 22 bp, synthetic construct
  misc_feature 1..22: note = chemically synthesized
  source 1..22: mol_type = other DNA
gttattccctttcttttgctgg

SEQ ID NO: 142206 - DNA, 22 bp, synthetic construct
  misc_feature 1..22: note = chemically synthesized
  source 1..22: mol_type = other DNA
ttccctttcttttgctgggttt

SEQ ID NO: 142207 - DNA, 22 bp, synthetic construct
  misc_feature 1..22: note = chemically synthesized
  source 1..22: mol_type = other DNA
cctttcttttgctgggttttgg

SEQ ID NO: 142208 - DNA, 22 bp, synthetic construct
  misc_feature 1..22: note = chemically synthesized
  source 1..22: mol_type = other DNA
tcttttgctgggttttggttct

SEQ ID NO: 142209 - DNA, 22 bp, synthetic construct
  misc_feature 1..22: note = chemically synthesized
  source 1..22: mol_type = other DNA
cttttgctgggttttggttctg

SEQ ID NO: 142210 - DNA, 22 bp, synthetic construct
  misc_feature 1..22: note = chemically synthesized
  source 1..22: mol_type = other DNA
ttttgctgggttttggttctgt

SEQ ID NO: 142211 - DNA, 22 bp, synthetic construct
  misc_feature 1..22: note = chemically synthesized
  source 1..22: mol_type = other DNA
ttgctgggttttggttctgttt

SEQ ID NO: 142212 - DNA, 22 bp, synthetic construct
  misc_feature 1..22: note = chemically synthesized
  source 1..22: mol_type = other DNA
tgctgggttttggttctgtttg

SEQ ID NO: 142213 - DNA, 22 bp, synthetic construct
  misc_feature 1..22: note = chemically synthesized
  source 1..22: mol_type = other DNA
gctgggttttggttctgtttgt

SEQ ID NO: 142214 - DNA, 22 bp, synthetic construct
  misc_feature 1..22: note = chemically synthesized
  source 1..22: mol_type = other DNA
ctgggttttggttctgtttgtt

SEQ ID NO: 142215 - DNA, 22 bp, synthetic construct
  misc_feature 1..22: note = chemically synthesized
  source 1..22: mol_type = other DNA
ggttttggttctgtttgttttt

SEQ ID NO: 142216 - DNA, 22 bp, synthetic construct
  misc_feature 1..22: note = chemically synthesized
  source 1..22: mol_type = other DNA
tggttctgtttgtttttgtttc

SEQ ID NO: 142217 - DNA, 22 bp, synthetic construct
  misc_feature 1..22: note = chemically synthesized
  source 1..22: mol_type = other DNA
ggttctgtttgtttttgtttct

SEQ ID NO: 142218 - DNA, 22 bp, synthetic construct
  misc_feature 1..22: note = chemically synthesized
  source 1..22: mol_type = other DNA
gttctgtttgtttttgtttctc

SEQ ID NO: 142219 - DNA, 22 bp, synthetic construct
  misc_feature 1..22: note = chemically synthesized
  source 1..22: mol_type = other DNA
tgtttgtttttgtttctctagt

SEQ ID NO: 142220 - DNA, 22 bp, synthetic construct
  misc_feature 1..22: note = chemically synthesized
  source 1..22: mol_type = other DNA
tttgtttttgtttctctagttt

SEQ ID NO: 142221 - DNA, 22 bp, synthetic construct
  misc_feature 1..22: note = chemically synthesized
  source 1..22: mol_type = other DNA
gtttttgtttctctagtttctt

SEQ ID NO: 142222 - DNA, 22 bp, synthetic construct
  misc_feature 1..22: note = chemically synthesized
  source 1..22: mol_type = other DNA
tttttgtttctctagtttcttg

SEQ ID NO: 142223 - DNA, 22 bp, synthetic construct
  misc_feature 1..22: note = chemically synthesized
  source 1..22: mol_type = other DNA
ttgtttctctagtttcttgtgg

SEQ ID NO: 142224 - DNA, 22 bp, synthetic construct
  misc_feature 1..22: note = chemically synthesized
  source 1..22: mol_type = other DNA
tgtttctctagtttcttgtggt

SEQ ID NO: 142225 - DNA, 22 bp, synthetic construct
  misc_feature 1..22: note = chemically synthesized
  source 1..22: mol_type = other DNA
gtttctctagtttcttgtggtg

SEQ ID NO: 142226 - DNA, 22 bp, synthetic construct
  misc_feature 1..22: note = chemically synthesized
  source 1..22: mol_type = other DNA
tttctctagtttcttgtggtgt

SEQ ID NO: 142227 - DNA, 22 bp, synthetic construct
  misc_feature 1..22: note = chemically synthesized
  source 1..22: mol_type = other DNA
ctctagtttcttgtggtgtgac

SEQ ID NO: 142228 - DNA, 22 bp, synthetic construct
  misc_feature 1..22: note = chemically synthesized
  source 1..22: mol_type = other DNA
tctagtttcttgtggtgtgacc

SEQ ID NO: 142229 - DNA, 22 bp, synthetic construct
  misc_feature 1..22: note = chemically synthesized
  source 1..22: mol_type = other DNA
tagtttcttgtggtgtgacctt

SEQ ID NO: 142230 - DNA, 22 bp, synthetic construct
  misc_feature 1..22: note = chemically synthesized
  source 1..22: mol_type = other DNA
gtttcttgtggtgtgaccttat

SEQ ID NO: 142231 - DNA, 22 bp, synthetic construct
  misc_feature 1..22: note = chemically synthesized
  source 1..22: mol_type = other DNA
cttgtggtgtgaccttatattg

SEQ ID NO: 142232 - DNA, 22 bp, synthetic construct
  misc_feature 1..22: note = chemically synthesized
  source 1..22: mol_type = other DNA
ttgtggtgtgaccttatattgt

SEQ ID NO: 142233 - DNA, 22 bp, synthetic construct
  misc_feature 1..22: note = chemically synthesized
  source 1..22: mol_type = other DNA
gtggtgtgaccttatattgtct

SEQ ID NO: 142234 - DNA, 22 bp, synthetic construct
  misc_feature 1..22: note = chemically synthesized
  source 1..22: mol_type = other DNA
tggtgtgaccttatattgtctg

SEQ ID NO: 142235 - DNA, 22 bp, synthetic construct
  misc_feature 1..22: note = chemically synthesized
  source 1..22: mol_type = other DNA
atattgtctgtctgtcctcttt

SEQ ID NO: 142236 - DNA, 22 bp, synthetic construct
  misc_feature 1..22: note = chemically synthesized
  source 1..22: mol_type = other DNA
tattgtctgtctgtcctctttc

SEQ ID NO: 142237 - DNA, 22 bp, synthetic construct
  misc_feature 1..22: note = chemically synthesized
  source 1..22: mol_type = other DNA
tctgtctgtcctctttcagact

SEQ ID NO: 142238 - DNA, 22 bp, synthetic construct
  misc_feature 1..22: note = chemically synthesized
  source 1..22: mol_type = other DNA
tctgtcctctttcagactcttt

SEQ ID NO: 142239 - DNA, 22 bp, synthetic construct
  misc_feature 1..22: note = chemically synthesized
  source 1..22: mol_type = other DNA
tcctctttcagactctttgaca

SEQ ID NO: 142240 - DNA, 22 bp, synthetic construct
  misc_feature 1..22: note = chemically synthesized
  source 1..22: mol_type = other DNA
tttcagactctttgacatcgac

SEQ ID NO: 142241 - DNA, 22 bp, synthetic construct
  misc_feature 1..22: note = chemically synthesized
  source 1..22: mol_type = other DNA
tcagactctttgacatcgacat

SEQ ID NO: 142242 - DNA, 22 bp, synthetic construct
  misc_feature 1..22: note = chemically synthesized
  source 1..22: mol_type = other DNA
cagactctttgacatcgacatt

SEQ ID NO: 142243 - DNA, 22 bp, synthetic construct
  misc_feature 1..22: note = chemically synthesized
  source 1..22: mol_type = other DNA
agactctttgacatcgacattt

SEQ ID NO: 142244 - DNA, 22 bp, synthetic construct
  misc_feature 1..22: note = chemically synthesized
  source 1..22: mol_type = other DNA
tttgacatcgacatttagggct

SEQ ID NO: 142245 - DNA, 22 bp, synthetic construct
  misc_feature 1..22: note = chemically synthesized
  source 1..22: mol_type = other DNA
tgacatcgacatttagggctgt

SEQ ID NO: 142246 - DNA, 22 bp, synthetic construct
  misc_feature 1..22: note = chemically synthesized
  source 1..22: mol_type = other DNA
gacatcgacatttagggctgtg

SEQ ID NO: 142247 - DNA, 22 bp, synthetic construct
  misc_feature 1..22: note = chemically synthesized
  source 1..22: mol_type = other DNA
acatcgacatttagggctgtga

SEQ ID NO: 142248 - DNA, 22 bp, synthetic construct
  misc_feature 1..22: note = chemically synthesized
  source 1..22: mol_type = other DNA
agggctgtgaactttcctttta

SEQ ID NO: 142249 - DNA, 22 bp, synthetic construct
  misc_feature 1..22: note = chemically synthesized
  source 1..22: mol_type = other DNA
gggctgtgaactttccttttag

SEQ ID NO: 142250 - DNA, 22 bp, synthetic construct
  misc_feature 1..22: note = chemically synthesized
  source 1..22: mol_type = other DNA
tgaactttccttttagcaccat

SEQ ID NO: 142251 - DNA, 22 bp, synthetic construct
  misc_feature 1..22: note = chemically synthesized
  source 1..22: mol_type = other DNA
tccttttagcaccatctttgct

SEQ ID NO: 142252 - DNA, 22 bp, synthetic construct
  misc_feature 1..22: note = chemically synthesized
  source 1..22: mol_type = other DNA
ccttttagcaccatctttgctg

SEQ ID NO: 142253 - DNA, 22 bp, synthetic construct
  misc_feature 1..22: note = chemically synthesized
  source 1..22: mol_type = other DNA
cttttagcaccatctttgctgt

SEQ ID NO: 142254 - DNA, 22 bp, synthetic construct
  misc_feature 1..22: note = chemically synthesized
  source 1..22: mol_type = other DNA
ttagcaccatctttgctgtatc

SEQ ID NO: 142255 - DNA, 22 bp, synthetic construct
  misc_feature 1..22: note = chemically synthesized
  source 1..22: mol_type = other DNA
tagcaccatctttgctgtatcc

SEQ ID NO: 142256 - DNA, 22 bp, synthetic construct
  misc_feature 1..22: note = chemically synthesized
  source 1..22: mol_type = other DNA
agcaccatctttgctgtatcct

SEQ ID NO: 142257 - DNA, 22 bp, synthetic construct
  misc_feature 1..22: note = chemically synthesized
  source 1..22: mol_type = other DNA
gcaccatctttgctgtatccta

SEQ ID NO: 142258 - DNA, 22 bp, synthetic construct
  misc_feature 1..22: note = chemically synthesized
  source 1..22: mol_type = other DNA
tgctgtatcctagaggttttga

SEQ ID NO: 142259 - DNA, 22 bp, synthetic construct
  misc_feature 1..22: note = chemically synthesized
  source 1..22: mol_type = other DNA
gctgtatcctagaggttttgat

SEQ ID NO: 142260 - DNA, 22 bp, synthetic construct
  misc_feature 1..22: note = chemically synthesized
  source 1..22: mol_type = other DNA
ctgtatcctagaggttttgata

SEQ ID NO: 142261 - DNA, 22 bp, synthetic construct
  misc_feature 1..22: note = chemically synthesized
  source 1..22: mol_type = other DNA
tatcctagaggttttgataggt

SEQ ID NO: 142262 - DNA, 22 bp, synthetic construct
  misc_feature 1..22: note = chemically synthesized
  source 1..22: mol_type = other DNA
gaggttttgataggttgtgtca

SEQ ID NO: 142263 - DNA, 22 bp, synthetic construct
  misc_feature 1..22: note = chemically synthesized
  source 1..22: mol_type = other DNA
tgataggttgtgtcactattgt

SEQ ID NO: 142264 - DNA, 22 bp, synthetic construct
  misc_feature 1..22: note = chemically synthesized
  source 1..22: mol_type = other DNA
gataggttgtgtcactattgtc

SEQ ID NO: 142265 - DNA, 22 bp, synthetic construct
  misc_feature 1..22: note = chemically synthesized
  source 1..22: mol_type = other DNA
ataggttgtgtcactattgtcg

SEQ ID NO: 142266 - DNA, 22 bp, synthetic construct
  misc_feature 1..22: note = chemically synthesized
  source 1..22: mol_type = other DNA
tgtcactattgtcggtcagttc

SEQ ID NO: 142267 - DNA, 22 bp, synthetic construct
  misc_feature 1..22: note = chemically synthesized
  source 1..22: mol_type = other DNA
ttgtcggtcagttcaagtaatt

SEQ ID NO: 142268 - DNA, 22 bp, synthetic construct
  misc_feature 1..22: note = chemically synthesized
  source 1..22: mol_type = other DNA
tcggtcagttcaagtaattttg

SEQ ID NO: 142269 - DNA, 22 bp, synthetic construct
  misc_feature 1..22: note = chemically synthesized
  source 1..22: mol_type = other DNA
aagtaattttgttgttcttatt

SEQ ID NO: 142270 - DNA, 22 bp, synthetic construct
  misc_feature 1..22: note = chemically synthesized
  source 1..22: mol_type = other DNA
tgttgttcttattatactttaa

SEQ ID NO: 142271 - DNA, 22 bp, synthetic construct
  misc_feature 1..22: note = chemically synthesized
  source 1..22: mol_type = other DNA
gttgttcttattatactttaag

SEQ ID NO: 142272 - DNA, 22 bp, synthetic construct
  misc_feature 1..22: note = chemically synthesized
  source 1..22: mol_type = other DNA
ttgttcttattatactttaagt

SEQ ID NO: 142273 - DNA, 22 bp, synthetic construct
  misc_feature 1..22: note = chemically synthesized
  source 1..22: mol_type = other DNA
ttcttattatactttaagttct

SEQ ID NO: 142274 - DNA, 22 bp, synthetic construct
  misc_feature 1..22: note = chemically synthesized
  source 1..22: mol_type = other DNA
ttattatactttaagttctggg

SEQ ID NO: 142275 - DNA, 22 bp, synthetic construct
  misc_feature 1..22: note = chemically synthesized
  source 1..22: mol_type = other DNA
attatactttaagttctgggat

SEQ ID NO: 142276 - DNA, 22 bp, synthetic construct
  misc_feature 1..22: note = chemically synthesized
  source 1..22: mol_type = other DNA
ttatactttaagttctgggata

SEQ ID NO: 142277 - DNA, 22 bp, synthetic construct
  misc_feature 1..22: note = chemically synthesized
  source 1..22: mol_type = other DNA
tactttaagttctgggatacat

SEQ ID NO: 142278 - DNA, 22 bp, synthetic construct
  misc_feature 1..22: note = chemically synthesized
  source 1..22: mol_type = other DNA
taagttctgggatacatgtgca

SEQ ID NO: 142279 - DNA, 22 bp, synthetic construct
  misc_feature 1..22: note = chemically synthesized
  source 1..22: mol_type = other DNA
aagttctgggatacatgtgcag

SEQ ID NO: 142280 - DNA, 22 bp, synthetic construct
  misc_feature 1..22: note = chemically synthesized
  source 1..22: mol_type = other DNA
agttctgggatacatgtgcaga

SEQ ID NO: 142281 - DNA, 22 bp, synthetic construct
  misc_feature 1..22: note = chemically synthesized
  source 1..22: mol_type = other DNA
tgggatacatgtgcagaatgtg

SEQ ID NO: 142282 - DNA, 22 bp, synthetic construct
  misc_feature 1..22: note = chemically synthesized
  source 1..22: mol_type = other DNA
ggatacatgtgcagaatgtgca

SEQ ID NO: 142283 - DNA, 22 bp, synthetic construct
  misc_feature 1..22: note = chemically synthesized
  source 1..22: mol_type = other DNA
gttacataggtatagatgtgcc

SEQ ID NO: 142284 - DNA, 22 bp, synthetic construct
  misc_feature 1..22: note = chemically synthesized
  source 1..22: mol_type = other DNA
ttacataggtatagatgtgcca

SEQ ID NO: 142285 - DNA, 22 bp, synthetic construct
  misc_feature 1..22: note = chemically synthesized
  source 1..22: mol_type = other DNA
cataggtatagatgtgccatgg

SEQ ID NO: 142286 - DNA, 22 bp, synthetic construct
  misc_feature 1..22: note = chemically synthesized
  source 1..22: mol_type = other DNA
gctgcacccatcaacctgtcat

SEQ ID NO: 142287 - DNA, 22 bp, synthetic construct
  misc_feature 1..22: note = chemically synthesized
  source 1..22: mol_type = other DNA
ctgcacccatcaacctgtcatc

SEQ ID NO: 142288 - DNA, 22 bp, synthetic construct
  misc_feature 1..22: note = chemically synthesized
  source 1..22: mol_type = other DNA
cacccatcaacctgtcatctac

SEQ ID NO: 142289 - DNA, 22 bp, synthetic construct
  misc_feature 1..22: note = chemically synthesized
  source 1..22: mol_type = other DNA
tcatctacattaggtatttctt

SEQ ID NO: 142290 - DNA, 22 bp, synthetic construct
  misc_feature 1..22: note = chemically synthesized
  source 1..22: mol_type = other DNA
cattaggtatttcttttaatgt

SEQ ID NO: 142291 - DNA, 22 bp, synthetic construct
  misc_feature 1..22: note = chemically synthesized
  source 1..22: mol_type = other DNA
ggtatttcttttaatgttatcc

SEQ ID NO: 142292 - DNA, 22 bp, synthetic construct
  misc_feature 1..22: note = chemically synthesized
  source 1..22: mol_type = other DNA
cttttaatgttatccctctcct

SEQ ID NO: 142293 - DNA, 22 bp, synthetic construct
  misc_feature 1..22: note = chemically synthesized
  source 1..22: mol_type = other DNA
ttttaatgttatccctctccta

SEQ ID NO: 142294 - DNA, 22 bp, synthetic construct
  misc_feature 1..22: note = chemically synthesized
  source 1..22: mol_type = other DNA
ttaatgttatccctctcctaac

SEQ ID NO: 142295 - DNA, 22 bp, synthetic construct
  misc_feature 1..22: note = chemically synthesized
  source 1..22: mol_type = other DNA
taatgttatccctctcctaacc

SEQ ID NO: 142296 - DNA, 22 bp, synthetic construct
  misc_feature 1..22: note = chemically synthesized
  source 1..22: mol_type = other DNA
aatgttatccctctcctaaccc

SEQ ID NO: 142297 - DNA, 22 bp, synthetic construct
  misc_feature 1..22: note = chemically synthesized
  source 1..22: mol_type = other DNA
atgttatccctctcctaacccc

SEQ ID NO: 142298 - DNA, 22 bp, synthetic construct
  misc_feature 1..22: note = chemically synthesized
  source 1..22: mol_type = other DNA
tccctctcctaaccccctcacc

SEQ ID NO: 142299 - DNA, 22 bp, synthetic construct
  misc_feature 1..22: note = chemically synthesized
  source 1..22: mol_type = other DNA
tcctaaccccctcaccccccga

SEQ ID NO: 142300 - DNA, 22 bp, synthetic construct
  misc_feature 1..22: note = chemically synthesized
  source 1..22: mol_type = other DNA
ctaaccccctcaccccccgaca

SEQ ID NO: 142301 - DNA, 22 bp, synthetic construct
  misc_feature 1..22: note = chemically synthesized
  source 1..22: mol_type = other DNA
accccctcaccccccgacaggc

SEQ ID NO: 142302 - DNA, 22 bp, synthetic construct
  misc_feature 1..22: note = chemically synthesized
  source 1..22: mol_type = other DNA
accccccgacaggccctggtgt

SEQ ID NO: 142303 - DNA, 22 bp, synthetic construct
  misc_feature 1..22: note = chemically synthesized
  source 1..22: mol_type = other DNA
gtgtgtgatgttcccctccctg

SEQ ID NO: 142304 - DNA, 22 bp, synthetic construct
  misc_feature 1..22: note = chemically synthesized
  source 1..22: mol_type = other DNA
ccctccctgtgtccatgtgttc

SEQ ID NO: 142305 - DNA, 22 bp, synthetic construct
  misc_feature 1..22: note = chemically synthesized
  source 1..22: mol_type = other DNA
cctgtgtccatgtgttctcatt

SEQ ID NO: 142306 - DNA, 22 bp, synthetic construct
  misc_feature 1..22: note = chemically synthesized
  source 1..22: mol_type = other DNA
tgtccatgtgttctcattgttc

SEQ ID NO: 142307 - DNA, 22 bp, synthetic construct
  misc_feature 1..22: note = chemically synthesized
  source 1..22: mol_type = other DNA
tcattgttcaactcccacttat

SEQ ID NO: 142308 - DNA, 22 bp, synthetic construct
  misc_feature 1..22: note = chemically synthesized
  source 1..22: mol_type = other DNA
attgttcaactcccacttatga

SEQ ID NO: 142309 - DNA, 22 bp, synthetic construct
  misc_feature 1..22: note = chemically synthesized
  source 1..22: mol_type = other DNA
ttcaactcccacttatgagtga

SEQ ID NO: 142310 - DNA, 22 bp, synthetic construct
  misc_feature 1..22: note = chemically synthesized
  source 1..22: mol_type = other DNA
aactcccacttatgagtgagaa

SEQ ID NO: 142311 - DNA, 22 bp, synthetic construct
  misc_feature 1..22: note = chemically synthesized
  source 1..22: mol_type = other DNA
ccacttatgagtgagaacgtgt

SEQ ID NO: 142312 - DNA, 22 bp, synthetic construct
  misc_feature 1..22: note = chemically synthesized
  source 1..22: mol_type = other DNA
atgagtgagaacgtgtggtgtt

SEQ ID NO: 142313 - DNA, 22 bp, synthetic construct
  misc_feature 1..22: note = chemically synthesized
  source 1..22: mol_type = other DNA
tgagtgagaacgtgtggtgttt

SEQ ID NO: 142314 - DNA, 22 bp, synthetic construct
  misc_feature 1..22: note = chemically synthesized
  source 1..22: mol_type = other DNA
ggtttctctgttcctgtgttag

SEQ ID NO: 142315 - DNA, 22 bp, synthetic construct
  misc_feature 1..22: note = chemically synthesized
  source 1..22: mol_type = other DNA
gtttctctgttcctgtgttagt

SEQ ID NO: 142316 - DNA, 22 bp, synthetic construct
  misc_feature 1..22: note = chemically synthesized
  source 1..22: mol_type = other DNA
ctctgttcctgtgttagtttgc

SEQ ID NO: 142317 - DNA, 22 bp, synthetic construct
  misc_feature 1..22: note = chemically synthesized
  source 1..22: mol_type = other DNA
tctgttcctgtgttagtttgct

SEQ ID NO: 142318 - DNA, 22 bp, synthetic construct
  misc_feature 1..22: note = chemically synthesized
  source 1..22: mol_type = other DNA
tgttcctgtgttagtttgctca

SEQ ID NO: 142319 - DNA, 22 bp, synthetic construct
  misc_feature 1..22: note = chemically synthesized
  source 1..22: mol_type = other DNA
ttcctgtgttagtttgctcaga

SEQ ID NO: 142320 - DNA, 22 bp, synthetic construct
  misc_feature 1..22: note = chemically synthesized
  source 1..22: mol_type = other DNA
ctgtgttagtttgctcagaatg

SEQ ID NO: 142321 - DNA, 22 bp, synthetic construct
  misc_feature 1..22: note = chemically synthesized
  source 1..22: mol_type = other DNA
tgttagtttgctcagaatgatg

SEQ ID NO: 142322 - DNA, 22 bp, synthetic construct
  misc_feature 1..22: note = chemically synthesized
  source 1..22: mol_type = other DNA
gtttgctcagaatgatggtttc

SEQ ID NO: 142323 - DNA, 22 bp, synthetic construct
  misc_feature 1..22: note = chemically synthesized
  source 1..22: mol_type = other DNA
gctcagaatgatggtttccacc

SEQ ID NO: 142324 - DNA, 22 bp, synthetic construct
  misc_feature 1..22: note = chemically synthesized
  source 1..22: mol_type = other DNA
ctcagaatgatggtttccacct

SEQ ID NO: 142325 - DNA, 22 bp, synthetic construct
  misc_feature 1..22: note = chemically synthesized
  source 1..22: mol_type = other DNA
agaatgatggtttccaccttca

SEQ ID NO: 142326 - DNA, 22 bp, synthetic construct
  misc_feature 1..22: note = chemically synthesized
  source 1..22: mol_type = other DNA
ccaccttcatccatgtccctgc

SEQ ID NO: 142327 - DNA, 22 bp, synthetic construct
  misc_feature 1..22: note = chemically synthesized
  source 1..22: mol_type = other DNA
caccttcatccatgtccctgca

SEQ ID NO: 142328 - DNA, 22 bp, synthetic construct
  misc_feature 1..22: note = chemically synthesized
  source 1..22: mol_type = other DNA
catccatgtccctgcaaagaca

SEQ ID NO: 142329 - DNA, 22 bp, synthetic construct
  misc_feature 1..22: note = chemically synthesized
  source 1..22: mol_type = other DNA
atccatgtccctgcaaagacat

SEQ ID NO: 142330 - DNA, 22 bp, synthetic construct
  misc_feature 1..22: note = chemically synthesized
  source 1..22: mol_type = other DNA
caaagacatgaactcatcattt

SEQ ID NO: 142331 - DNA, 22 bp, synthetic construct
  misc_feature 1..22: note = chemically synthesized
  source 1..22: mol_type = other DNA
atcatttttatggctgcatagt

SEQ ID NO: 142332 - DNA, 22 bp, synthetic construct
  misc_feature 1..22: note = chemically synthesized
  source 1..22: mol_type = other DNA
ttatggctgcatagtattccat

SEQ ID NO: 142333 - DNA, 22 bp, synthetic construct
  misc_feature 1..22: note = chemically synthesized
  source 1..22: mol_type = other DNA
tatggctgcatagtattccatg

SEQ ID NO: 142334 - DNA, 22 bp, synthetic construct
  misc_feature 1..22: note = chemically synthesized
  source 1..22: mol_type = other DNA
atggctgcatagtattccatgg

SEQ ID NO: 142335 - DNA, 22 bp, synthetic construct
  misc_feature 1..22: note = chemically synthesized
  source 1..22: mol_type = other DNA
tggctgcatagtattccatggt

SEQ ID NO: 142336 - DNA, 22 bp, synthetic construct
  misc_feature 1..22: note = chemically synthesized
  source 1..22: mol_type = other DNA
catagtattccatggtgtatat

SEQ ID NO: 142337 - DNA, 22 bp, synthetic construct
  misc_feature 1..22: note = chemically synthesized
  source 1..22: mol_type = other DNA
catggtgtatatgtgccacatt

SEQ ID NO: 142338 - DNA, 22 bp, synthetic construct
  misc_feature 1..22: note = chemically synthesized
  source 1..22: mol_type = other DNA
tctttatccattatatcgctga

SEQ ID NO: 142339 - DNA, 22 bp, synthetic construct
  misc_feature 1..22: note = chemically synthesized
  source 1..22: mol_type = other DNA
ctttatccattatatcgctgat

SEQ ID NO: 142340 - DNA, 22 bp, synthetic construct
  misc_feature 1..22: note = chemically synthesized
  source 1..22: mol_type = other DNA
tttatccattatatcgctgatg

SEQ ID NO: 142341 - DNA, 22 bp, synthetic construct
  misc_feature 1..22: note = chemically synthesized
  source 1..22: mol_type = other DNA
tatccattatatcgctgatggc

SEQ ID NO: 142342 - DNA, 22 bp, synthetic construct
  misc_feature 1..22: note = chemically synthesized
  source 1..22: mol_type = other DNA
atccattatatcgctgatggcc

SEQ ID NO: 142343 - DNA, 22 bp, synthetic construct
  misc_feature 1..22: note = chemically synthesized
  source 1..22: mol_type = other DNA
tccattatatcgctgatggcca

SEQ ID NO: 142344 - DNA, 22 bp, synthetic construct
  misc_feature 1..22: note = chemically synthesized
  source 1..22: mol_type = other DNA
tatcgctgatggccatttgggt

SEQ ID NO: 142345 - DNA, 22 bp, synthetic construct
  misc_feature 1..22: note = chemically synthesized
  source 1..22: mol_type = other DNA
atggccatttgggttggttcca

SEQ ID NO: 142346 - DNA, 22 bp, synthetic construct
  misc_feature 1..22: note = chemically synthesized
  source 1..22: mol_type = other DNA
gggttggttccaagtctttgct

SEQ ID NO: 142347 - DNA, 22 bp, synthetic construct
  misc_feature 1..22: note = chemically synthesized
  source 1..22: mol_type = other DNA
ggttggttccaagtctttgcta

SEQ ID NO: 142348 - DNA, 22 bp, synthetic construct
  misc_feature 1..22: note = chemically synthesized
  source 1..22: mol_type = other DNA
gttccaagtctttgctattgtg

SEQ ID NO: 142349 - DNA, 22 bp, synthetic construct
  misc_feature 1..22: note = chemically synthesized
  source 1..22: mol_type = other DNA
caagtctttgctattgtgaata

SEQ ID NO: 142350 - DNA, 22 bp, synthetic construct
  misc_feature 1..22: note = chemically synthesized
  source 1..22: mol_type = other DNA
tgctattgtgaatagtgccaca

SEQ ID NO: 142351 - DNA, 22 bp, synthetic construct
  misc_feature 1..22: note = chemically synthesized
  source 1..22: mol_type = other DNA
gctattgtgaatagtgccacaa

SEQ ID NO: 142352 - DNA, 22 bp, synthetic construct
  misc_feature 1..22: note = chemically synthesized
  source 1..22: mol_type = other DNA
ctattgtgaatagtgccacaat

SEQ ID NO: 142353 - DNA, 22 bp, synthetic construct
  misc_feature 1..22: note = chemically synthesized
  source 1..22: mol_type = other DNA
ttgtgaatagtgccacaataaa

SEQ ID NO: 142354 - DNA, 22 bp, synthetic construct
  misc_feature 1..22: note = chemically synthesized
  source 1..22: mol_type = other DNA
tgaatagtgccacaataaacat

SEQ ID NO: 142355 - DNA, 22 bp, synthetic construct
  misc_feature 1..22: note = chemically synthesized
  source 1..22: mol_type = other DNA
tatagtagaatgatttctaatt

SEQ ID NO: 142356 - DNA, 22 bp, synthetic construct
  misc_feature 1..22: note = chemically synthesized
  source 1..22: mol_type = other DNA
atagtagaatgatttctaattc

SEQ ID NO: 142357 - DNA, 22 bp, synthetic construct
  misc_feature 1..22: note = chemically synthesized
  source 1..22: mol_type = other DNA
tagtagaatgatttctaattct

SEQ ID NO: 142358 - DNA, 22 bp, synthetic construct
  misc_feature 1..22: note = chemically synthesized
  source 1..22: mol_type = other DNA
ctaattctttgggtatataccc

SEQ ID NO: 142359 - DNA, 22 bp, synthetic construct
  misc_feature 1..22: note = chemically synthesized
  source 1..22: mol_type = other DNA
taattctttgggtatataccca

SEQ ID NO: 142360 - DNA, 22 bp, synthetic construct
  misc_feature 1..22: note = chemically synthesized
  source 1..22: mol_type = other DNA
attctttgggtatatacccagt

SEQ ID NO: 142361 - DNA, 22 bp, synthetic construct
  misc_feature 1..22: note = chemically synthesized
  source 1..22: mol_type = other DNA
tttgggtatatacccagtaatg

SEQ ID NO: 142362 - DNA, 22 bp, synthetic construct
  misc_feature 1..22: note = chemically synthesized
  source 1..22: mol_type = other DNA
tgggtatatacccagtaatggg

SEQ ID NO: 142363 - DNA, 22 bp, synthetic construct
  misc_feature 1..22: note = chemically synthesized
  source 1..22: mol_type = other DNA
gggtatatacccagtaatggga

SEQ ID NO: 142364 - DNA, 22 bp, synthetic construct
  misc_feature 1..22: note = chemically synthesized
  source 1..22: mol_type = other DNA
ggtatatacccagtaatgggat

SEQ ID NO: 142365 - DNA, 22 bp, synthetic construct
  misc_feature 1..22: note = chemically synthesized
  source 1..22: mol_type = other DNA
ctgggtcaaacagtatttctgg

SEQ ID NO: 142366 - DNA, 22 bp, synthetic construct
  misc_feature 1..22: note = chemically synthesized
  source 1..22: mol_type = other DNA
ggtcaaacagtatttctggttc

SEQ ID NO: 142367 - DNA, 22 bp, synthetic construct
  misc_feature 1..22: note = chemically synthesized
  source 1..22: mol_type = other DNA
ctggttctagatccttgaggaa

SEQ ID NO: 142368 - DNA, 22 bp, synthetic construct
  misc_feature 1..22: note = chemically synthesized
  source 1..22: mol_type = other DNA
tggttctagatccttgaggaat

SEQ ID NO: 142369 - DNA, 22 bp, synthetic construct
  misc_feature 1..22: note = chemically synthesized
  source 1..22: mol_type = other DNA
gttctagatccttgaggaatcg

SEQ ID NO: 142370 - DNA, 22 bp, synthetic construct
  misc_feature 1..22: note = chemically synthesized
  source 1..22: mol_type = other DNA
tagatccttgaggaatcgccac

SEQ ID NO: 142371 - DNA, 22 bp, synthetic construct
  misc_feature 1..22: note = chemically synthesized
  source 1..22: mol_type = other DNA
gatccttgaggaatcgccacac

SEQ ID NO: 142372 - DNA, 22 bp, synthetic construct
  misc_feature 1..22: note = chemically synthesized
  source 1..22: mol_type = other DNA
gaggaatcgccacactgtcttc

SEQ ID NO: 142373 - DNA, 22 bp, synthetic construct
  misc_feature 1..22: note = chemically synthesized
  source 1..22: mol_type = other DNA
aggaatcgccacactgtcttcc

SEQ ID NO: 142374 - DNA, 22 bp, synthetic construct
  misc_feature 1..22: note = chemically synthesized
  source 1..22: mol_type = other DNA
tcttccacaatggttgaactaa

SEQ ID NO: 142375 - DNA, 22 bp, synthetic construct
  misc_feature 1..22: note = chemically synthesized
  source 1..22: mol_type = other DNA
ccacaatggttgaactaattta

SEQ ID NO: 142376 - DNA, 22 bp, synthetic construct
  misc_feature 1..22: note = chemically synthesized
  source 1..22: mol_type = other DNA
cacaatggttgaactaatttac

SEQ ID NO: 142377 - DNA, 22 bp, synthetic construct
  misc_feature 1..22: note = chemically synthesized
  source 1..22: mol_type = other DNA
aactaatttacacacccatcaa

SEQ ID NO: 142378 - DNA, 22 bp, synthetic construct
  misc_feature 1..22: note = chemically synthesized
  source 1..22: mol_type = other DNA
atttacacacccatcaacagtg

SEQ ID NO: 142379 - DNA, 22 bp, synthetic construct
  misc_feature 1..22: note = chemically synthesized
  source 1..22: mol_type = other DNA
acacacccatcaacagtgtaaa

SEQ ID NO: 142380 - DNA, 22 bp, synthetic construct
  misc_feature 1..22: note = chemically synthesized
  source 1..22: mol_type = other DNA
cacacccatcaacagtgtaaaa

SEQ ID NO: 142381 - DNA, 22 bp, synthetic construct
  misc_feature 1..22: note = chemically synthesized
  source 1..22: mol_type = other DNA
ttcctattcttccacatcctct

SEQ ID NO: 142382 - DNA, 22 bp, synthetic construct
  misc_feature 1..22: note = chemically synthesized
  source 1..22: mol_type = other DNA
tcctattcttccacatcctctc

SEQ ID NO: 142383 - DNA, 22 bp, synthetic construct
  misc_feature 1..22: note = chemically synthesized
  source 1..22: mol_type = other DNA
cctattcttccacatcctctcc

SEQ ID NO: 142384 - DNA, 22 bp, synthetic construct
  misc_feature 1..22: note = chemically synthesized
  source 1..22: mol_type = other DNA
ctattcttccacatcctctcca

SEQ ID NO: 142385 - DNA, 22 bp, synthetic construct
  misc_feature 1..22: note = chemically synthesized
  source 1..22: mol_type = other DNA
ttcttccacatcctctccagca

SEQ ID NO: 142386 - DNA, 22 bp, synthetic construct
  misc_feature 1..22: note = chemically synthesized
  source 1..22: mol_type = other DNA
ttccacatcctctccagcacct

SEQ ID NO: 142387 - DNA, 22 bp, synthetic construct
  misc_feature 1..22: note = chemically synthesized
  source 1..22: mol_type = other DNA
ccacatcctctccagcaccttt

SEQ ID NO: 142388 - DNA, 22 bp, synthetic construct
  misc_feature 1..22: note = chemically synthesized
  source 1..22: mol_type = other DNA
cacatcctctccagcacctttt

SEQ ID NO: 142389 - DNA, 22 bp, synthetic construct
  misc_feature 1..22: note = chemically synthesized
  source 1..22: mol_type = other DNA
tccagcaccttttgtttcctga

SEQ ID NO: 142390 - DNA, 22 bp, synthetic construct
  misc_feature 1..22: note = chemically synthesized
  source 1..22: mol_type = other DNA
cagcaccttttgtttcctgact

SEQ ID NO: 142391 - DNA, 22 bp, synthetic construct
  misc_feature 1..22: note = chemically synthesized
  source 1..22: mol_type = other DNA
ttgtttcctgactttttaataa

SEQ ID NO: 142392 - DNA, 22 bp, synthetic construct
  misc_feature 1..22: note = chemically synthesized
  source 1..22: mol_type = other DNA
tgtttcctgactttttaataat

SEQ ID NO: 142393 - DNA, 22 bp, synthetic construct
  misc_feature 1..22: note = chemically synthesized
  source 1..22: mol_type = other DNA
gtttcctgactttttaataatt

SEQ ID NO: 142394 - DNA, 22 bp, synthetic construct
  misc_feature 1..22: note = chemically synthesized
  source 1..22: mol_type = other DNA
tttcctgactttttaataattg

SEQ ID NO: 142395 - DNA, 22 bp, synthetic construct
  misc_feature 1..22: note = chemically synthesized
  source 1..22: mol_type = other DNA
cctgactttttaataattgcca

SEQ ID NO: 142396 - DNA, 22 bp, synthetic construct
  misc_feature 1..22: note = chemically synthesized
  source 1..22: mol_type = other DNA
ctgactttttaataattgccat

SEQ ID NO: 142397 - DNA, 22 bp, synthetic construct
  misc_feature 1..22: note = chemically synthesized
  source 1..22: mol_type = other DNA
actttttaataattgccattct

SEQ ID NO: 142398 - DNA, 22 bp, synthetic construct
  misc_feature 1..22: note = chemically synthesized
  source 1..22: mol_type = other DNA
tttaataattgccattctaact

SEQ ID NO: 142399 - DNA, 22 bp, synthetic construct
  misc_feature 1..22: note = chemically synthesized
  source 1..22: mol_type = other DNA
ttaataattgccattctaactg

SEQ ID NO: 142400 - DNA, 22 bp, synthetic construct
  misc_feature 1..22: note = chemically synthesized
  source 1..22: mol_type = other DNA
taataattgccattctaactgg

SEQ ID NO: 142401 - DNA, 22 bp, synthetic construct
  misc_feature 1..22: note = chemically synthesized
  source 1..22: mol_type = other DNA
aataattgccattctaactggc

SEQ ID NO: 142402 - DNA, 22 bp, synthetic construct
  misc_feature 1..22: note = chemically synthesized
  source 1..22: mol_type = other DNA
ataattgccattctaactggca

SEQ ID NO: 142403 - DNA, 22 bp, synthetic construct
  misc_feature 1..22: note = chemically synthesized
  source 1..22: mol_type = other DNA
ccattctaactggcatgagatg

SEQ ID NO: 142404 - DNA, 22 bp, synthetic construct
  misc_feature 1..22: note = chemically synthesized
  source 1..22: mol_type = other DNA
taactggcatgagatggtatct

SEQ ID NO: 142405 - DNA, 22 bp, synthetic construct
  misc_feature 1..22: note = chemically synthesized
  source 1..22: mol_type = other DNA
actggcatgagatggtatctca

SEQ ID NO: 142406 - DNA, 22 bp, synthetic construct
  misc_feature 1..22: note = chemically synthesized
  source 1..22: mol_type = other DNA
gcatgagatggtatctcattgt

SEQ ID NO: 142407 - DNA, 22 bp, synthetic construct
  misc_feature 1..22: note = chemically synthesized
  source 1..22: mol_type = other DNA
attgtggttttgatttgcattt

SEQ ID NO: 142408 - DNA, 22 bp, synthetic construct
  misc_feature 1..22: note = chemically synthesized
  source 1..22: mol_type = other DNA
tggttttgatttgcatttctct

SEQ ID NO: 142409 - DNA, 22 bp, synthetic construct
  misc_feature 1..22: note = chemically synthesized
  source 1..22: mol_type = other DNA
tgatttgcatttctctaatgac

SEQ ID NO: 142410 - DNA, 22 bp, synthetic construct
  misc_feature 1..22: note = chemically synthesized
  source 1..22: mol_type = other DNA
gatttgcatttctctaatgacc

SEQ ID NO: 142411 - DNA, 22 bp, synthetic construct
  misc_feature 1..22: note = chemically synthesized
  source 1..22: mol_type = other DNA
atttgcatttctctaatgacca

SEQ ID NO: 142412 - DNA, 22 bp, synthetic construct
  misc_feature 1..22: note = chemically synthesized
  source 1..22: mol_type = other DNA
gcatttctctaatgaccagtga

SEQ ID NO: 142413 - DNA, 22 bp, synthetic construct
  misc_feature 1..22: note = chemically synthesized
  source 1..22: mol_type = other DNA
catttctctaatgaccagtgat

SEQ ID NO: 142414 - DNA, 22 bp, synthetic construct
  misc_feature 1..22: note = chemically synthesized
  source 1..22: mol_type = other DNA
ctctaatgaccagtgatgatga

SEQ ID NO: 142415 - DNA, 22 bp, synthetic construct
  misc_feature 1..22: note = chemically synthesized
  source 1..22: mol_type = other DNA
tctaatgaccagtgatgatgag

SEQ ID NO: 142416 - DNA, 22 bp, synthetic construct
  misc_feature 1..22: note = chemically synthesized
  source 1..22: mol_type = other DNA
taatgaccagtgatgatgagct

SEQ ID NO: 142417 - DNA, 22 bp, synthetic construct
  misc_feature 1..22: note = chemically synthesized
  source 1..22: mol_type = other DNA
atgaccagtgatgatgagcttc

SEQ ID NO: 142418 - DNA, 22 bp, synthetic construct
  misc_feature 1..22: note = chemically synthesized
  source 1..22: mol_type = other DNA
cttttcatgtgtttcttggcca

SEQ ID NO: 142419 - DNA, 22 bp, synthetic construct
  misc_feature 1..22: note = chemically synthesized
  source 1..22: mol_type = other DNA
ttttcatgtgtttcttggccac

SEQ ID NO: 142420 - DNA, 22 bp, synthetic construct
  misc_feature 1..22: note = chemically synthesized
  source 1..22: mol_type = other DNA
ttcatgtgtttcttggccacat

SEQ ID NO: 142421 - DNA, 22 bp, synthetic construct
  misc_feature 1..22: note = chemically synthesized
  source 1..22: mol_type = other DNA
tcatgtgtttcttggccacata

SEQ ID NO: 142422 - DNA, 22 bp, synthetic construct
  misc_feature 1..22: note = chemically synthesized
  source 1..22: mol_type = other DNA
catgtgtttcttggccacataa

SEQ ID NO: 142423 - DNA, 22 bp, synthetic construct
  misc_feature 1..22: note = chemically synthesized
  source 1..22: mol_type = other DNA
atgtgtttcttggccacataaa

SEQ ID NO: 142424 - DNA, 22 bp, synthetic construct
  misc_feature 1..22: note = chemically synthesized
  source 1..22: mol_type = other DNA
cttggccacataaatgacttct

SEQ ID NO: 142425 - DNA, 22 bp, synthetic construct
  misc_feature 1..22: note = chemically synthesized
  source 1..22: mol_type = other DNA
ttggccacataaatgacttctt

SEQ ID NO: 142426 - DNA, 22 bp, synthetic construct
  misc_feature 1..22: note = chemically synthesized
  source 1..22: mol_type = other DNA
ggccacataaatgacttcttta

SEQ ID NO: 142427 - DNA, 22 bp, synthetic construct
  misc_feature 1..22: note = chemically synthesized
  source 1..22: mol_type = other DNA
gccacataaatgacttctttag

SEQ ID NO: 142428 - DNA, 22 bp, synthetic construct
  misc_feature 1..22: note = chemically synthesized
  source 1..22: mol_type = other DNA
ctttagagaagcatctgttcat

SEQ ID NO: 142429 - DNA, 22 bp, synthetic construct
  misc_feature 1..22: note = chemically synthesized
  source 1..22: mol_type = other DNA
tttagagaagcatctgttcata

SEQ ID NO: 142430 - DNA, 22 bp, synthetic construct
  misc_feature 1..22: note = chemically synthesized
  source 1..22: mol_type = other DNA
tagagaagcatctgttcatatc

SEQ ID NO: 142431 - DNA, 22 bp, synthetic construct
  misc_feature 1..22: note = chemically synthesized
  source 1..22: mol_type = other DNA
agagaagcatctgttcatatcc

SEQ ID NO: 142432 - DNA, 22 bp, synthetic construct
  misc_feature 1..22: note = chemically synthesized
  source 1..22: mol_type = other DNA
gagaagcatctgttcatatcct

SEQ ID NO: 142433 - DNA, 22 bp, synthetic construct
  misc_feature 1..22: note = chemically synthesized
  source 1..22: mol_type = other DNA
ttcatatcctttgtccactttt

SEQ ID NO: 142434 - DNA, 22 bp, synthetic construct
  misc_feature 1..22: note = chemically synthesized
  source 1..22: mol_type = other DNA
atatcctttgtccactttttga

SEQ ID NO: 142435 - DNA, 22 bp, synthetic construct
  misc_feature 1..22: note = chemically synthesized
  source 1..22: mol_type = other DNA
tgtccactttttgatggggtcg

SEQ ID NO: 142436 - DNA, 22 bp, synthetic construct
  misc_feature 1..22: note = chemically synthesized
  source 1..22: mol_type = other DNA
gtccactttttgatggggtcgt

SEQ ID NO: 142437 - DNA, 22 bp, synthetic construct
  misc_feature 1..22: note = chemically synthesized
  source 1..22: mol_type = other DNA
tccactttttgatggggtcgtt

SEQ ID NO: 142438 - DNA, 22 bp, synthetic construct
  misc_feature 1..22: note = chemically synthesized
  source 1..22: mol_type = other DNA
tttgatggggtcgttaggtttt

SEQ ID NO: 142439 - DNA, 22 bp, synthetic construct
  misc_feature 1..22: note = chemically synthesized
  source 1..22: mol_type = other DNA
ttgatggggtcgttaggttttt

SEQ ID NO: 142440 - DNA, 22 bp, synthetic construct
  misc_feature 1..22: note = chemically synthesized
  source 1..22: mol_type = other DNA
tgatggggtcgttaggtttttt

SEQ ID NO: 142441 - DNA, 22 bp, synthetic construct
  misc_feature 1..22: note = chemically synthesized
  source 1..22: mol_type = other DNA
gatggggtcgttaggttttttc

SEQ ID NO: 142442 - DNA, 22 bp, synthetic construct
  misc_feature 1..22: note = chemically synthesized
  source 1..22: mol_type = other DNA
atggggtcgttaggttttttct

SEQ ID NO: 142443 - DNA, 22 bp, synthetic construct
  misc_feature 1..22: note = chemically synthesized
  source 1..22: mol_type = other DNA
ggttttttcttgtaaatttgtt

SEQ ID NO: 142444 - DNA, 22 bp, synthetic construct
  misc_feature 1..22: note = chemically synthesized
  source 1..22: mol_type = other DNA
tttcttgtaaatttgttgaagt

SEQ ID NO: 142445 - DNA, 22 bp, synthetic construct
  misc_feature 1..22: note = chemically synthesized
  source 1..22: mol_type = other DNA
ttcttgtaaatttgttgaagtt

SEQ ID NO: 142446 - DNA, 22 bp, synthetic construct
  misc_feature 1..22: note = chemically synthesized
  source 1..22: mol_type = other DNA
tcttgtaaatttgttgaagttc

SEQ ID NO: 142447 - DNA, 22 bp, synthetic construct
  misc_feature 1..22: note = chemically synthesized
  source 1..22: mol_type = other DNA
cttgtaaatttgttgaagttct

SEQ ID NO: 142448 - DNA, 22 bp, synthetic construct
  misc_feature 1..22: note = chemically synthesized
  source 1..22: mol_type = other DNA
ttgtaaatttgttgaagttctt

SEQ ID NO: 142449 - DNA, 22 bp, synthetic construct
  misc_feature 1..22: note = chemically synthesized
  source 1..22: mol_type = other DNA
gtaaatttgttgaagttctttg

SEQ ID NO: 142450 - DNA, 22 bp, synthetic construct
  misc_feature 1..22: note = chemically synthesized
  source 1..22: mol_type = other DNA
taaatttgttgaagttctttgt

SEQ ID NO: 142451 - DNA, 22 bp, synthetic construct
  misc_feature 1..22: note = chemically synthesized
  source 1..22: mol_type = other DNA
gttgaagttctttgtagatttt

SEQ ID NO: 142452 - DNA, 22 bp, synthetic construct
  misc_feature 1..22: note = chemically synthesized
  source 1..22: mol_type = other DNA
ttgaagttctttgtagattttg

SEQ ID NO: 142453 - DNA, 22 bp, synthetic construct
  misc_feature 1..22: note = chemically synthesized
  source 1..22: mol_type = other DNA
aagttctttgtagattttggat

SEQ ID NO: 142454 - DNA, 22 bp, synthetic construct
  misc_feature 1..22: note = chemically synthesized
  source 1..22: mol_type = other DNA
tttgtagattttggatgttagc

SEQ ID NO: 142455 - DNA, 22 bp, synthetic construct
  misc_feature 1..22: note = chemically synthesized
  source 1..22: mol_type = other DNA
tgtagattttggatgttagccc

SEQ ID NO: 142456 - DNA, 22 bp, synthetic construct
  misc_feature 1..22: note = chemically synthesized
  source 1..22: mol_type = other DNA
gtagattttggatgttagccct

SEQ ID NO: 142457 - DNA, 22 bp, synthetic construct
  misc_feature 1..22: note = chemically synthesized
  source 1..22: mol_type = other DNA
tagattttggatgttagccctt

SEQ ID NO: 142458 - DNA, 22 bp, synthetic construct
  misc_feature 1..22: note = chemically synthesized
  source 1..22: mol_type = other DNA
tggatgttagccctttgtcaga

SEQ ID NO: 142459 - DNA, 22 bp, synthetic construct
  misc_feature 1..22: note = chemically synthesized
  source 1..22: mol_type = other DNA
ggatgttagccctttgtcagat

SEQ ID NO: 142460 - DNA, 22 bp, synthetic construct
  misc_feature 1..22: note = chemically synthesized
  source 1..22: mol_type = other DNA
gatgttagccctttgtcagatg

SEQ ID NO: 142461 - DNA, 22 bp, synthetic construct
  misc_feature 1..22: note = chemically synthesized
  source 1..22: mol_type = other DNA
gccctttgtcagatggatagat

SEQ ID NO: 142462 - DNA, 22 bp, synthetic construct
  misc_feature 1..22: note = chemically synthesized
  source 1..22: mol_type = other DNA
tgtcagatggatagattgcaaa

SEQ ID NO: 142463 - DNA, 22 bp, synthetic construct
  misc_feature 1..22: note = chemically synthesized
  source 1..22: mol_type = other DNA
gtcagatggatagattgcaaaa

SEQ ID NO: 142464 - DNA, 22 bp, synthetic construct
  misc_feature 1..22: note = chemically synthesized
  source 1..22: mol_type = other DNA
tcagatggatagattgcaaaaa

SEQ ID NO: 142465 - DNA, 22 bp, synthetic construct
  misc_feature 1..22: note = chemically synthesized
  source 1..22: mol_type = other DNA
caaaaattttctcccattctgt

SEQ ID NO: 142466 - DNA, 22 bp, synthetic construct
  misc_feature 1..22: note = chemically synthesized
  source 1..22: mol_type = other DNA
tctcccattctgtaggttgcct

SEQ ID NO: 142467 - DNA, 22 bp, synthetic construct
  misc_feature 1..22: note = chemically synthesized
  source 1..22: mol_type = other DNA
ctcccattctgtaggttgcctg

SEQ ID NO: 142468 - DNA, 22 bp, synthetic construct
  misc_feature 1..22: note = chemically synthesized
  source 1..22: mol_type = other DNA
tcccattctgtaggttgcctgt

SEQ ID NO: 142469 - DNA, 22 bp, synthetic construct
  misc_feature 1..22: note = chemically synthesized
  source 1..22: mol_type = other DNA
ccattctgtaggttgcctgttc

SEQ ID NO: 142470 - DNA, 22 bp, synthetic construct
  misc_feature 1..22: note = chemically synthesized
  source 1..22: mol_type = other DNA
tgtaggttgcctgttcactctg

SEQ ID NO: 142471 - DNA, 22 bp, synthetic construct
  misc_feature 1..22: note = chemically synthesized
  source 1..22: mol_type = other DNA
taggttgcctgttcactctgat

SEQ ID NO: 142472 - DNA, 22 bp, synthetic construct
  misc_feature 1..22: note = chemically synthesized
  source 1..22: mol_type = other DNA
cctgttcactctgatgatagtc

SEQ ID NO: 142473 - DNA, 22 bp, synthetic construct
  misc_feature 1..22: note = chemically synthesized
  source 1..22: mol_type = other DNA
ttcactctgatgatagtctttt

SEQ ID NO: 142474 - DNA, 22 bp, synthetic construct
  misc_feature 1..22: note = chemically synthesized
  source 1..22: mol_type = other DNA
actctgatgatagtcttttgct

SEQ ID NO: 142475 - DNA, 22 bp, synthetic construct
  misc_feature 1..22: note = chemically synthesized
  source 1..22: mol_type = other DNA
tgatgatagtcttttgctgtgc

SEQ ID NO: 142476 - DNA, 22 bp, synthetic construct
  misc_feature 1..22: note = chemically synthesized
  source 1..22: mol_type = other DNA
atgatagtcttttgctgtgcag

SEQ ID NO: 142477 - DNA, 22 bp, synthetic construct
  misc_feature 1..22: note = chemically synthesized
  source 1..22: mol_type = other DNA
ttgctgtgcagaagctctttag

SEQ ID NO: 142478 - DNA, 22 bp, synthetic construct
  misc_feature 1..22: note = chemically synthesized
  source 1..22: mol_type = other DNA
tgctgtgcagaagctctttagt

SEQ ID NO: 142479 - DNA, 22 bp, synthetic construct
  misc_feature 1..22: note = chemically synthesized
  source 1..22: mol_type = other DNA
gctgtgcagaagctctttagtt

SEQ ID NO: 142480 - DNA, 22 bp, synthetic construct
  misc_feature 1..22: note = chemically synthesized
  source 1..22: mol_type = other DNA
ctgtgcagaagctctttagttt

SEQ ID NO: 142481 - DNA, 22 bp, synthetic construct
  misc_feature 1..22: note = chemically synthesized
  source 1..22: mol_type = other DNA
tgcagaagctctttagtttaat

SEQ ID NO: 142482 - DNA, 22 bp, synthetic construct
  misc_feature 1..22: note = chemically synthesized
  source 1..22: mol_type = other DNA
tttagtttaattagatcccata

SEQ ID NO: 142483 - DNA, 22 bp, synthetic construct
  misc_feature 1..22: note = chemically synthesized
  source 1..22: mol_type = other DNA
tagtttaattagatcccatatg

SEQ ID NO: 142484 - DNA, 22 bp, synthetic construct
  misc_feature 1..22: note = chemically synthesized
  source 1..22: mol_type = other DNA
agtttaattagatcccatatgt

SEQ ID NO: 142485 - DNA, 22 bp, synthetic construct
  misc_feature 1..22: note = chemically synthesized
  source 1..22: mol_type = other DNA
gtttaattagatcccatatgtc

SEQ ID NO: 142486 - DNA, 22 bp, synthetic construct
  misc_feature 1..22: note = chemically synthesized
  source 1..22: mol_type = other DNA
aattagatcccatatgtcaatt

SEQ ID NO: 142487 - DNA, 22 bp, synthetic construct
  misc_feature 1..22: note = chemically synthesized
  source 1..22: mol_type = other DNA
attagatcccatatgtcaattt

SEQ ID NO: 142488 - DNA, 22 bp, synthetic construct
  misc_feature 1..22: note = chemically synthesized
  source 1..22: mol_type = other DNA
gatcccatatgtcaattttggc

SEQ ID NO: 142489 - DNA, 22 bp, synthetic construct
  misc_feature 1..22: note = chemically synthesized
  source 1..22: mol_type = other DNA
tggcctttgttgtcattgcttt

SEQ ID NO: 142490 - DNA, 22 bp, synthetic construct
  misc_feature 1..22: note = chemically synthesized
  source 1..22: mol_type = other DNA
ggcctttgttgtcattgctttt

SEQ ID NO: 142491 - DNA, 22 bp, synthetic construct
  misc_feature 1..22: note = chemically synthesized
  source 1..22: mol_type = other DNA
gcctttgttgtcattgcttttg

SEQ ID NO: 142492 - DNA, 22 bp, synthetic construct
  misc_feature 1..22: note = chemically synthesized
  source 1..22: mol_type = other DNA
tgttgtcattgcttttgatgtt

SEQ ID NO: 142493 - DNA, 22 bp, synthetic construct
  misc_feature 1..22: note = chemically synthesized
  source 1..22: mol_type = other DNA
gttgtcattgcttttgatgttt

SEQ ID NO: 142494 - DNA, 22 bp, synthetic construct
  misc_feature 1..22: note = chemically synthesized
  source 1..22: mol_type = other DNA
ttgtcattgcttttgatgtttt

SEQ ID NO: 142495 - DNA, 22 bp, synthetic construct
  misc_feature 1..22: note = chemically synthesized
  source 1..22: mol_type = other DNA
tcattgcttttgatgttttagt

SEQ ID NO: 142496 - DNA, 22 bp, synthetic construct
  misc_feature 1..22: note = chemically synthesized
  source 1..22: mol_type = other DNA
cttttgatgttttagtcgtgaa

SEQ ID NO: 142497 - DNA, 22 bp, synthetic construct
  misc_feature 1..22: note = chemically synthesized
  source 1..22: mol_type = other DNA
ttgatgttttagtcgtgaattt

SEQ ID NO: 142498 - DNA, 22 bp, synthetic construct
  misc_feature 1..22: note = chemically synthesized
  source 1..22: mol_type = other DNA
tgatgttttagtcgtgaatttt

SEQ ID NO: 142499 - DNA, 22 bp, synthetic construct
  misc_feature 1..22: note = chemically synthesized
  source 1..22: mol_type = other DNA
gatgttttagtcgtgaattttt

SEQ ID NO: 142500 - DNA, 22 bp, synthetic construct
  misc_feature 1..22: note = chemically synthesized
  source 1..22: mol_type = other DNA
atgttttagtcgtgaatttttg

SEQ ID NO: 142501 - DNA, 22 bp, synthetic construct
  misc_feature 1..22: note = chemically synthesized
  source 1..22: mol_type = other DNA
tagtcgtgaatttttgcccatg

SEQ ID NO: 142502 - DNA, 22 bp, synthetic construct
  misc_feature 1..22: note = chemically synthesized
  source 1..22: mol_type = other DNA
agtcgtgaatttttgcccatgc

SEQ ID NO: 142503 - DNA, 22 bp, synthetic construct
  misc_feature 1..22: note = chemically synthesized
  source 1..22: mol_type = other DNA
gtcgtgaatttttgcccatgcc

SEQ ID NO: 142504 - DNA, 22 bp, synthetic construct
  misc_feature 1..22: note = chemically synthesized
  source 1..22: mol_type = other DNA
ttgcccatgcctatgtcctgaa

SEQ ID NO: 142505 - DNA, 22 bp, synthetic construct
  misc_feature 1..22: note = chemically synthesized
  source 1..22: mol_type = other DNA
tgcccatgcctatgtcctgaat

SEQ ID NO: 142506 - DNA, 22 bp, synthetic construct
  misc_feature 1..22: note = chemically synthesized
  source 1..22: mol_type = other DNA
gcccatgcctatgtcctgaatg

SEQ ID NO: 142507 - DNA, 22 bp, synthetic construct
  misc_feature 1..22: note = chemically synthesized
  source 1..22: mol_type = other DNA
cccatgcctatgtcctgaatgg

SEQ ID NO: 142508 - DNA, 22 bp, synthetic construct
  misc_feature 1..22: note = chemically synthesized
  source 1..22: mol_type = other DNA
tgtcctgaatggtattgcctag

SEQ ID NO: 142509 - DNA, 22 bp, synthetic construct
  misc_feature 1..22: note = chemically synthesized
  source 1..22: mol_type = other DNA
aatggtattgcctaggttatct

SEQ ID NO: 142510 - DNA, 22 bp, synthetic construct
  misc_feature 1..22: note = chemically synthesized
  source 1..22: mol_type = other DNA
cctaggttatcttctaggattt

SEQ ID NO: 142511 - DNA, 22 bp, synthetic construct
  misc_feature 1..22: note = chemically synthesized
  source 1..22: mol_type = other DNA
ggttatcttctaggatttttat

SEQ ID NO: 142512 - DNA, 22 bp, synthetic construct
  misc_feature 1..22: note = chemically synthesized
  source 1..22: mol_type = other DNA
tcttctaggatttttatggttt

SEQ ID NO: 142513 - DNA, 22 bp, synthetic construct
  misc_feature 1..22: note = chemically synthesized
  source 1..22: mol_type = other DNA
ctaggatttttatggttttagg

SEQ ID NO: 142514 - DNA, 22 bp, synthetic construct
  misc_feature 1..22: note = chemically synthesized
  source 1..22: mol_type = other DNA
taggatttttatggttttaggt

SEQ ID NO: 142515 - DNA, 22 bp, synthetic construct
  misc_feature 1..22: note = chemically synthesized
  source 1..22: mol_type = other DNA
ggatttttatggttttaggttg

SEQ ID NO: 142516 - DNA, 22 bp, synthetic construct
  misc_feature 1..22: note = chemically synthesized
  source 1..22: mol_type = other DNA
ttatggttttaggttgcacatt

SEQ ID NO: 142517 - DNA, 22 bp, synthetic construct
  misc_feature 1..22: note = chemically synthesized
  source 1..22: mol_type = other DNA
tatggttttaggttgcacattt

SEQ ID NO: 142518 - DNA, 22 bp, synthetic construct
  misc_feature 1..22: note = chemically synthesized
  source 1..22: mol_type = other DNA
atggttttaggttgcacattta

SEQ ID NO: 142519 - DNA, 22 bp, synthetic construct
  misc_feature 1..22: note = chemically synthesized
  source 1..22: mol_type = other DNA
tggttttaggttgcacatttaa

SEQ ID NO: 142520 - DNA, 22 bp, synthetic construct
  misc_feature 1..22: note = chemically synthesized
  source 1..22: mol_type = other DNA
taggttgcacatttaagtcttt

SEQ ID NO: 142521 - DNA, 22 bp, synthetic construct
  misc_feature 1..22: note = chemically synthesized
  source 1..22: mol_type = other DNA
aggttgcacatttaagtcttta

SEQ ID NO: 142522 - DNA, 22 bp, synthetic construct
  misc_feature 1..22: note = chemically synthesized
  source 1..22: mol_type = other DNA
ggttgcacatttaagtctttaa

SEQ ID NO: 142523 - DNA, 22 bp, synthetic construct
  misc_feature 1..22: note = chemically synthesized
  source 1..22: mol_type = other DNA
cacatttaagtctttaatccac

SEQ ID NO: 142524 - DNA, 22 bp, synthetic construct
  misc_feature 1..22: note = chemically synthesized
  source 1..22: mol_type = other DNA
aagtctttaatccaccttgagt

SEQ ID NO: 142525 - DNA, 22 bp, synthetic construct
  misc_feature 1..22: note = chemically synthesized
  source 1..22: mol_type = other DNA
agtctttaatccaccttgagtt

SEQ ID NO: 142526 - DNA, 22 bp, synthetic construct
  misc_feature 1..22: note = chemically synthesized
  source 1..22: mol_type = other DNA
taatccaccttgagttaatttt

SEQ ID NO: 142527 - DNA, 22 bp, synthetic construct
  misc_feature 1..22: note = chemically synthesized
  source 1..22: mol_type = other DNA
aatccaccttgagttaattttt

SEQ ID NO: 142528 - DNA, 22 bp, synthetic construct
  misc_feature 1..22: note = chemically synthesized
  source 1..22: mol_type = other DNA
atccaccttgagttaatttttg

SEQ ID NO: 142529 - DNA, 22 bp, synthetic construct
  misc_feature 1..22: note = chemically synthesized
  source 1..22: mol_type = other DNA
gagttaatttttgtataaggtg

SEQ ID NO: 142530 - DNA, 22 bp, synthetic construct
  misc_feature 1..22: note = chemically synthesized
  source 1..22: mol_type = other DNA
agttaatttttgtataaggtgt

SEQ ID NO: 142531 - DNA, 22 bp, synthetic construct
  misc_feature 1..22: note = chemically synthesized
  source 1..22: mol_type = other DNA
atttttgtataaggtgtaagga

SEQ ID NO: 142532 - DNA, 22 bp, synthetic construct
  misc_feature 1..22: note = chemically synthesized
  source 1..22: mol_type = other DNA
ttgtataaggtgtaaggaaggg

SEQ ID NO: 142533 - DNA, 22 bp, synthetic construct
  misc_feature 1..22: note = chemically synthesized
  source 1..22: mol_type = other DNA
tgtataaggtgtaaggaagggg

SEQ ID NO: 142534 - DNA, 22 bp, synthetic construct
  misc_feature 1..22: note = chemically synthesized
  source 1..22: mol_type = other DNA
gtataaggtgtaaggaaggggt

SEQ ID NO: 142535 - DNA, 22 bp, synthetic construct
  misc_feature 1..22: note = chemically synthesized
  source 1..22: mol_type = other DNA
tataaggtgtaaggaaggggta

SEQ ID NO: 142536 - DNA, 22 bp, synthetic construct
  misc_feature 1..22: note = chemically synthesized
  source 1..22: mol_type = other DNA
cagttttatgcatattgctagc

SEQ ID NO: 142537 - DNA, 22 bp, synthetic construct
  misc_feature 1..22: note = chemically synthesized
  source 1..22: mol_type = other DNA
agttttatgcatattgctagcc

SEQ ID NO: 142538 - DNA, 22 bp, synthetic construct
  misc_feature 1..22: note = chemically synthesized
  source 1..22: mol_type = other DNA
tatgcatattgctagccagttt

SEQ ID NO: 142539 - DNA, 22 bp, synthetic construct
  misc_feature 1..22: note = chemically synthesized
  source 1..22: mol_type = other DNA
atgcatattgctagccagtttt

SEQ ID NO: 142540 - DNA, 22 bp, synthetic construct
  misc_feature 1..22: note = chemically synthesized
  source 1..22: mol_type = other DNA
tgcatattgctagccagttttt

SEQ ID NO: 142541 - DNA, 22 bp, synthetic construct
  misc_feature 1..22: note = chemically synthesized
  source 1..22: mol_type = other DNA
ctagccagtttttccagcacca

SEQ ID NO: 142542 - DNA, 22 bp, synthetic construct
  misc_feature 1..22: note = chemically synthesized
  source 1..22: mol_type = other DNA
gccagtttttccagcaccattt

SEQ ID NO: 142543 - DNA, 22 bp, synthetic construct
  misc_feature 1..22: note = chemically synthesized
  source 1..22: mol_type = other DNA
ttccagcaccatttattaaata

SEQ ID NO: 142544 - DNA, 22 bp, synthetic construct
  misc_feature 1..22: note = chemically synthesized
  source 1..22: mol_type = other DNA
tccagcaccatttattaaatag

SEQ ID NO: 142545 - DNA, 22 bp, synthetic construct
  misc_feature 1..22: note = chemically synthesized
  source 1..22: mol_type = other DNA
ccagcaccatttattaaatagg

SEQ ID NO: 142546 - DNA, 22 bp, synthetic construct
  misc_feature 1..22: note = chemically synthesized
  source 1..22: mol_type = other DNA
cagcaccatttattaaataggg

SEQ ID NO: 142547 - DNA, 22 bp, synthetic construct
  misc_feature 1..22: note = chemically synthesized
  source 1..22: mol_type = other DNA
attaaatagggaattctttctc

SEQ ID NO: 142548 - DNA, 22 bp, synthetic construct
  misc_feature 1..22: note = chemically synthesized
  source 1..22: mol_type = other DNA
ttaaatagggaattctttctcc

SEQ ID NO: 142549 - DNA, 22 bp, synthetic construct
  misc_feature 1..22: note = chemically synthesized
  source 1..22: mol_type = other DNA
aatagggaattctttctccatt

SEQ ID NO: 142550 - DNA, 22 bp, synthetic construct
  misc_feature 1..22: note = chemically synthesized
  source 1..22: mol_type = other DNA
tttctccattgcttttgtgatg

SEQ ID NO: 142551 - DNA, 22 bp, synthetic construct
  misc_feature 1..22: note = chemically synthesized
  source 1..22: mol_type = other DNA
tctccattgcttttgtgatgtt

SEQ ID NO: 142552 - DNA, 22 bp, synthetic construct
  misc_feature 1..22: note = chemically synthesized
  source 1..22: mol_type = other DNA
ctccattgcttttgtgatgttt

SEQ ID NO: 142553 - DNA, 22 bp, synthetic construct
  misc_feature 1..22: note = chemically synthesized
  source 1..22: mol_type = other DNA
tccattgcttttgtgatgtttg

SEQ ID NO: 142554 - DNA, 22 bp, synthetic construct
  misc_feature 1..22: note = chemically synthesized
  source 1..22: mol_type = other DNA
cattgcttttgtgatgtttgtc

SEQ ID NO: 142555 - DNA, 22 bp, synthetic construct
  misc_feature 1..22: note = chemically synthesized
  source 1..22: mol_type = other DNA
cttttgtgatgtttgtcaaaga

SEQ ID NO: 142556 - DNA, 22 bp, synthetic construct
  misc_feature 1..22: note = chemically synthesized
  source 1..22: mol_type = other DNA
ttgtgatgtttgtcaaagatca

SEQ ID NO: 142557 - DNA, 22 bp, synthetic construct
  misc_feature 1..22: note = chemically synthesized
  source 1..22: mol_type = other DNA
tgtgatgtttgtcaaagatcag

SEQ ID NO: 142558 - DNA, 22 bp, synthetic construct
  misc_feature 1..22: note = chemically synthesized
  source 1..22: mol_type = other DNA
gtgatgtttgtcaaagatcaga

SEQ ID NO: 142559 - DNA, 22 bp, synthetic construct
  misc_feature 1..22: note = chemically synthesized
  source 1..22: mol_type = other DNA
tgatgtttgtcaaagatcagat

SEQ ID NO: 142560 - DNA, 22 bp, synthetic construct
  misc_feature 1..22: note = chemically synthesized
  source 1..22: mol_type = other DNA
gtcaaagatcagatggtcgtag

SEQ ID NO: 142561 - DNA, 22 bp, synthetic construct
  misc_feature 1..22: note = chemically synthesized
  source 1..22: mol_type = other DNA
tcaaagatcagatggtcgtaga

SEQ ID NO: 142562 - DNA, 22 bp, synthetic construct
  misc_feature 1..22: note = chemically synthesized
  source 1..22: mol_type = other DNA
tttctgaggcttctgttctgtt

SEQ ID NO: 142563 - DNA, 22 bp, synthetic construct
  misc_feature 1..22: note = chemically synthesized
  source 1..22: mol_type = other DNA
ctgaggcttctgttctgttcca

SEQ ID NO: 142564 - DNA, 22 bp, synthetic construct
  misc_feature 1..22: note = chemically synthesized
  source 1..22: mol_type = other DNA
tgaggcttctgttctgttccac

SEQ ID NO: 142565 - DNA, 22 bp, synthetic construct
  misc_feature 1..22: note = chemically synthesized
  source 1..22: mol_type = other DNA
aggcttctgttctgttccactg

SEQ ID NO: 142566 - DNA, 22 bp, synthetic construct
  misc_feature 1..22: note = chemically synthesized
  source 1..22: mol_type = other DNA
ctgttctgttccactggtctat

SEQ ID NO: 142567 - DNA, 22 bp, synthetic construct
  misc_feature 1..22: note = chemically synthesized
  source 1..22: mol_type = other DNA
tgttctgttccactggtctata

SEQ ID NO: 142568 - DNA, 22 bp, synthetic construct
  misc_feature 1..22: note = chemically synthesized
  source 1..22: mol_type = other DNA
ttctgttccactggtctatata

SEQ ID NO: 142569 - DNA, 22 bp, synthetic construct
  misc_feature 1..22: note = chemically synthesized
  source 1..22: mol_type = other DNA
tgttccactggtctatatatct

SEQ ID NO: 142570 - DNA, 22 bp, synthetic construct
  misc_feature 1..22: note = chemically synthesized
  source 1..22: mol_type = other DNA
ttccactggtctatatatctgt

SEQ ID NO: 142571 - DNA, 22 bp, synthetic construct
  misc_feature 1..22: note = chemically synthesized
  source 1..22: mol_type = other DNA
cactggtctatatatctgtttt

SEQ ID NO: 142572 - DNA, 22 bp, synthetic construct
  misc_feature 1..22: note = chemically synthesized
  source 1..22: mol_type = other DNA
gtctatatatctgttttggtac

SEQ ID NO: 142573 - DNA, 22 bp, synthetic construct
  misc_feature 1..22: note = chemically synthesized
  source 1..22: mol_type = other DNA
tatatctgttttggtaccagta

SEQ ID NO: 142574 - DNA, 22 bp, synthetic construct
  misc_feature 1..22: note = chemically synthesized
  source 1..22: mol_type = other DNA
ttttggtaccagtaccatgctg

SEQ ID NO: 142575 - DNA, 22 bp, synthetic construct
  misc_feature 1..22: note = chemically synthesized
  source 1..22: mol_type = other DNA
tggtaccagtaccatgctgttt

SEQ ID NO: 142576 - DNA, 22 bp, synthetic construct
  misc_feature 1..22: note = chemically synthesized
  source 1..22: mol_type = other DNA
ggtaccagtaccatgctgtttt

SEQ ID NO: 142577 - DNA, 22 bp, synthetic construct
  misc_feature 1..22: note = chemically synthesized
  source 1..22: mol_type = other DNA
gtaccagtaccatgctgttttt

SEQ ID NO: 142578 - DNA, 22 bp, synthetic construct
  misc_feature 1..22: note = chemically synthesized
  source 1..22: mol_type = other DNA
tttttgttactgtagccttgta

SEQ ID NO: 142579 - DNA, 22 bp, synthetic construct
  misc_feature 1..22: note = chemically synthesized
  source 1..22: mol_type = other DNA
ttgttactgtagccttgtagta

SEQ ID NO: 142580 - DNA, 22 bp, synthetic construct
  misc_feature 1..22: note = chemically synthesized
  source 1..22: mol_type = other DNA
tgttactgtagccttgtagtat

SEQ ID NO: 142581 - DNA, 22 bp, synthetic construct
  misc_feature 1..22: note = chemically synthesized
  source 1..22: mol_type = other DNA
gttactgtagccttgtagtata

SEQ ID NO: 142582 - DNA, 22 bp, synthetic construct
  misc_feature 1..22: note = chemically synthesized
  source 1..22: mol_type = other DNA
ttactgtagccttgtagtatag

SEQ ID NO: 142583 - DNA, 22 bp, synthetic construct
  misc_feature 1..22: note = chemically synthesized
  source 1..22: mol_type = other DNA
ctgtagccttgtagtatagttt

SEQ ID NO: 142584 - DNA, 22 bp, synthetic construct
  misc_feature 1..22: note = chemically synthesized
  source 1..22: mol_type = other DNA
tagccttgtagtatagtttgaa

SEQ ID NO: 142585 - DNA, 22 bp, synthetic construct
  misc_feature 1..22: note = chemically synthesized
  source 1..22: mol_type = other DNA
gtagtatagtttgaagtcaggt

SEQ ID NO: 142586 - DNA, 22 bp, synthetic construct
  misc_feature 1..22: note = chemically synthesized
  source 1..22: mol_type = other DNA
tagtatagtttgaagtcaggta

SEQ ID NO: 142587 - DNA, 22 bp, synthetic construct
  misc_feature 1..22: note = chemically synthesized
  source 1..22: mol_type = other DNA
gaagtcaggtagcatcatgcct

SEQ ID NO: 142588 - DNA, 22 bp, synthetic construct
  misc_feature 1..22: note = chemically synthesized
  source 1..22: mol_type = other DNA
aagtcaggtagcatcatgcctc

SEQ ID NO: 142589 - DNA, 22 bp, synthetic construct
  misc_feature 1..22: note = chemically synthesized
  source 1..22: mol_type = other DNA
cagctttgttctttttgtttag

SEQ ID NO: 142590 - DNA, 22 bp, synthetic construct
  misc_feature 1..22: note = chemically synthesized
  source 1..22: mol_type = other DNA
tgttctttttgtttaggattgt

SEQ ID NO: 142591 - DNA, 22 bp, synthetic construct
  misc_feature 1..22: note = chemically synthesized
  source 1..22: mol_type = other DNA
gttctttttgtttaggattgtc

SEQ ID NO: 142592 - DNA, 22 bp, synthetic construct
  misc_feature 1..22: note = chemically synthesized
  source 1..22: mol_type = other DNA
ttctttttgtttaggattgtct

SEQ ID NO: 142593 - DNA, 22 bp, synthetic construct
  misc_feature 1..22: note = chemically synthesized
  source 1..22: mol_type = other DNA
tttttgtttaggattgtcttgg

SEQ ID NO: 142594 - DNA, 22 bp, synthetic construct
  misc_feature 1..22: note = chemically synthesized
  source 1..22: mol_type = other DNA
tttgtttaggattgtcttggct

SEQ ID NO: 142595 - DNA, 22 bp, synthetic construct
  misc_feature 1..22: note = chemically synthesized
  source 1..22: mol_type = other DNA
ttgtttaggattgtcttggcta

SEQ ID NO: 142596 - DNA, 22 bp, synthetic construct
  misc_feature 1..22: note = chemically synthesized
  source 1..22: mol_type = other DNA
tgtttaggattgtcttggctat

SEQ ID NO: 142597 - DNA, 22 bp, synthetic construct
  misc_feature 1..22: note = chemically synthesized
  source 1..22: mol_type = other DNA
gtttaggattgtcttggctata

SEQ ID NO: 142598 - DNA, 22 bp, synthetic construct
  misc_feature 1..22: note = chemically synthesized
  source 1..22: mol_type = other DNA
tttaggattgtcttggctatat

SEQ ID NO: 142599 - DNA, 22 bp, synthetic construct
  misc_feature 1..22: note = chemically synthesized
  source 1..22: mol_type = other DNA
aggattgtcttggctatatggg

SEQ ID NO: 142600 - DNA, 22 bp, synthetic construct
  misc_feature 1..22: note = chemically synthesized
  source 1..22: mol_type = other DNA
ggattgtcttggctatatgggc

SEQ ID NO: 142601 - DNA, 22 bp, synthetic construct
  misc_feature 1..22: note = chemically synthesized
  source 1..22: mol_type = other DNA
tcttggctatatgggctctttt

SEQ ID NO: 142602 - DNA, 22 bp, synthetic construct
  misc_feature 1..22: note = chemically synthesized
  source 1..22: mol_type = other DNA
ggctatatgggctcttttttga

SEQ ID NO: 142603 - DNA, 22 bp, synthetic construct
  misc_feature 1..22: note = chemically synthesized
  source 1..22: mol_type = other DNA
gctatatgggctcttttttgat

SEQ ID NO: 142604 - DNA, 22 bp, synthetic construct
  misc_feature 1..22: note = chemically synthesized
  source 1..22: mol_type = other DNA
tatgggctcttttttgattcca

SEQ ID NO: 142605 - DNA, 22 bp, synthetic construct
  misc_feature 1..22: note = chemically synthesized
  source 1..22: mol_type = other DNA
ttttttgattccatatgacatt

SEQ ID NO: 142606 - DNA, 22 bp, synthetic construct
  misc_feature 1..22: note = chemically synthesized
  source 1..22: mol_type = other DNA
ttttgattccatatgacattta

SEQ ID NO: 142607 - DNA, 22 bp, synthetic construct
  misc_feature 1..22: note = chemically synthesized
  source 1..22: mol_type = other DNA
tttgattccatatgacatttaa

SEQ ID NO: 142608 - DNA, 22 bp, synthetic construct
  misc_feature 1..22: note = chemically synthesized
  source 1..22: mol_type = other DNA
ttgattccatatgacatttaaa

SEQ ID NO: 142609 - DNA, 22 bp, synthetic construct
  misc_feature 1..22: note = chemically synthesized
  source 1..22: mol_type = other DNA
tgattccatatgacatttaaag

SEQ ID NO: 142610 - DNA, 22 bp, synthetic construct
  misc_feature 1..22: note = chemically synthesized
  source 1..22: mol_type = other DNA
gattccatatgacatttaaagt

SEQ ID NO: 142611 - DNA, 22 bp, synthetic construct
  misc_feature 1..22: note = chemically synthesized
  source 1..22: mol_type = other DNA
attccatatgacatttaaagta

SEQ ID NO: 142612 - DNA, 22 bp, synthetic construct
  misc_feature 1..22: note = chemically synthesized
  source 1..22: mol_type = other DNA
catatgacatttaaagtagttt

SEQ ID NO: 142613 - DNA, 22 bp, synthetic construct
  misc_feature 1..22: note = chemically synthesized
  source 1..22: mol_type = other DNA
aaagtagttttttctaattctt

SEQ ID NO: 142614 - DNA, 22 bp, synthetic construct
  misc_feature 1..22: note = chemically synthesized
  source 1..22: mol_type = other DNA
aagtagttttttctaattcttt

SEQ ID NO: 142615 - DNA, 22 bp, synthetic construct
  misc_feature 1..22: note = chemically synthesized
  source 1..22: mol_type = other DNA
tttctaattctttgaaaaaagt

SEQ ID NO: 142616 - DNA, 22 bp, synthetic construct
  misc_feature 1..22: note = chemically synthesized
  source 1..22: mol_type = other DNA
ttctaattctttgaaaaaagtc

SEQ ID NO: 142617 - DNA, 22 bp, synthetic construct
  misc_feature 1..22: note = chemically synthesized
  source 1..22: mol_type = other DNA
tctaattctttgaaaaaagtca

SEQ ID NO: 142618 - DNA, 22 bp, synthetic construct
  misc_feature 1..22: note = chemically synthesized
  source 1..22: mol_type = other DNA
ctaattctttgaaaaaagtcag

SEQ ID NO: 142619 - DNA, 22 bp, synthetic construct
  misc_feature 1..22: note = chemically synthesized
  source 1..22: mol_type = other DNA
taattctttgaaaaaagtcagt

SEQ ID NO: 142620 - DNA, 22 bp, synthetic construct
  misc_feature 1..22: note = chemically synthesized
  source 1..22: mol_type = other DNA
attctttgaaaaaagtcagtgg

SEQ ID NO: 142621 - DNA, 22 bp, synthetic construct
  misc_feature 1..22: note = chemically synthesized
  source 1..22: mol_type = other DNA
tttgaaaaaagtcagtggtagc

SEQ ID NO: 142622 - DNA, 22 bp, synthetic construct
  misc_feature 1..22: note = chemically synthesized
  source 1..22: mol_type = other DNA
tgaaaaaagtcagtggtagctt

SEQ ID NO: 142623 - DNA, 22 bp, synthetic construct
  misc_feature 1..22: note = chemically synthesized
  source 1..22: mol_type = other DNA
gaaaaaagtcagtggtagcttg

SEQ ID NO: 142624 - DNA, 22 bp, synthetic construct
  misc_feature 1..22: note = chemically synthesized
  source 1..22: mol_type = other DNA
aaaaaagtcagtggtagcttga

SEQ ID NO: 142625 - DNA, 22 bp, synthetic construct
  misc_feature 1..22: note = chemically synthesized
  source 1..22: mol_type = other DNA
gatggggatagcattgaatcta

SEQ ID NO: 142626 - DNA, 22 bp, synthetic construct
  misc_feature 1..22: note = chemically synthesized
  source 1..22: mol_type = other DNA
atggggatagcattgaatctat

SEQ ID NO: 142627 - DNA, 22 bp, synthetic construct
  misc_feature 1..22: note = chemically synthesized
  source 1..22: mol_type = other DNA
aatctataaattactttgggca

SEQ ID NO: 142628 - DNA, 22 bp, synthetic construct
  misc_feature 1..22: note = chemically synthesized
  source 1..22: mol_type = other DNA
taaattactttgggcagtatgg

SEQ ID NO: 142629 - DNA, 22 bp, synthetic construct
  misc_feature 1..22: note = chemically synthesized
  source 1..22: mol_type = other DNA
ctttgggcagtatggccatttt

SEQ ID NO: 142630 - DNA, 22 bp, synthetic construct
  misc_feature 1..22: note = chemically synthesized
  source 1..22: mol_type = other DNA
tgggcagtatggccattttaaa

SEQ ID NO: 142631 - DNA, 22 bp, synthetic construct
  misc_feature 1..22: note = chemically synthesized
  source 1..22: mol_type = other DNA
gggcagtatggccattttaaag

SEQ ID NO: 142632 - DNA, 22 bp, synthetic construct
  misc_feature 1..22: note = chemically synthesized
  source 1..22: mol_type = other DNA
ggcagtatggccattttaaaga

SEQ ID NO: 142633 - DNA, 22 bp, synthetic construct
  misc_feature 1..22: note = chemically synthesized
  source 1..22: mol_type = other DNA
taaagatattgattctttctat

SEQ ID NO: 142634 - DNA, 22 bp, synthetic construct
  misc_feature 1..22: note = chemically synthesized
  source 1..22: mol_type = other DNA
aaagatattgattctttctatc

SEQ ID NO: 142635 - DNA, 22 bp, synthetic construct
  misc_feature 1..22: note = chemically synthesized
  source 1..22: mol_type = other DNA
aagatattgattctttctatct

SEQ ID NO: 142636 - DNA, 22 bp, synthetic construct
  misc_feature 1..22: note = chemically synthesized
  source 1..22: mol_type = other DNA
attctttctatctatgagcatg

SEQ ID NO: 142637 - DNA, 22 bp, synthetic construct
  misc_feature 1..22: note = chemically synthesized
  source 1..22: mol_type = other DNA
tttctatctatgagcatggaat

SEQ ID NO: 142638 - DNA, 22 bp, synthetic construct
  misc_feature 1..22: note = chemically synthesized
  source 1..22: mol_type = other DNA
tctatctatgagcatggaatgt

SEQ ID NO: 142639 - DNA, 22 bp, synthetic construct
  misc_feature 1..22: note = chemically synthesized
  source 1..22: mol_type = other DNA
ctatctatgagcatggaatgtt

SEQ ID NO: 142640 - DNA, 22 bp, synthetic construct
  misc_feature 1..22: note = chemically synthesized
  source 1..22: mol_type = other DNA
tatctatgagcatggaatgttt

SEQ ID NO: 142641 - DNA, 22 bp, synthetic construct
  misc_feature 1..22: note = chemically synthesized
  source 1..22: mol_type = other DNA
tctatgagcatggaatgttttt

SEQ ID NO: 142642 - DNA, 22 bp, synthetic construct
  misc_feature 1..22: note = chemically synthesized
  source 1..22: mol_type = other DNA
tgagcatggaatgtttttccat

SEQ ID NO: 142643 - DNA, 22 bp, synthetic construct
  misc_feature 1..22: note = chemically synthesized
  source 1..22: mol_type = other DNA
ttccatttgtttgtgtcctctc

SEQ ID NO: 142644 - DNA, 22 bp, synthetic construct
  misc_feature 1..22: note = chemically synthesized
  source 1..22: mol_type = other DNA
tccatttgtttgtgtcctctct

SEQ ID NO: 142645 - DNA, 22 bp, synthetic construct
  misc_feature 1..22: note = chemically synthesized
  source 1..22: mol_type = other DNA
ccatttgtttgtgtcctctctt

SEQ ID NO: 142646 - DNA, 22 bp, synthetic construct
  misc_feature 1..22: note = chemically synthesized
  source 1..22: mol_type = other DNA
catttgtttgtgtcctctctta

SEQ ID NO: 142647 - DNA, 22 bp, synthetic construct
  misc_feature 1..22: note = chemically synthesized
  source 1..22: mol_type = other DNA
gtttgtgtcctctcttatttcc

SEQ ID NO: 142648 - DNA, 22 bp, synthetic construct
  misc_feature 1..22: note = chemically synthesized
  source 1..22: mol_type = other DNA
tttgtgtcctctcttatttcct

SEQ ID NO: 142649 - DNA, 22 bp, synthetic construct
  misc_feature 1..22: note = chemically synthesized
  source 1..22: mol_type = other DNA
gtgtcctctcttatttccttga

SEQ ID NO: 142650 - DNA, 22 bp, synthetic construct
  misc_feature 1..22: note = chemically synthesized
  source 1..22: mol_type = other DNA
tgtcctctcttatttccttgag

SEQ ID NO: 142651 - DNA, 22 bp, synthetic construct
  misc_feature 1..22: note = chemically synthesized
  source 1..22: mol_type = other DNA
tcttatttccttgagcagtgag

SEQ ID NO: 142652 - DNA, 22 bp, synthetic construct
  misc_feature 1..22: note = chemically synthesized
  source 1..22: mol_type = other DNA
ttatttccttgagcagtgagtg

SEQ ID NO: 142653 - DNA, 22 bp, synthetic construct
  misc_feature 1..22: note = chemically synthesized
  source 1..22: mol_type = other DNA
atttccttgagcagtgagtggt

SEQ ID NO: 142654 - DNA, 22 bp, synthetic construct
  misc_feature 1..22: note = chemically synthesized
  source 1..22: mol_type = other DNA
tttccttgagcagtgagtggtt

SEQ ID NO: 142655 - DNA, 22 bp, synthetic construct
  misc_feature 1..22: note = chemically synthesized
  source 1..22: mol_type = other DNA
ccttgagcagtgagtggtttgt

SEQ ID NO: 142656 - DNA, 22 bp, synthetic construct
  misc_feature 1..22: note = chemically synthesized
  source 1..22: mol_type = other DNA
cttgagcagtgagtggtttgta

SEQ ID NO: 142657 - DNA, 22 bp, synthetic construct
  misc_feature 1..22: note = chemically synthesized
  source 1..22: mol_type = other DNA
gagcagtgagtggtttgtagct

SEQ ID NO: 142658 - DNA, 22 bp, synthetic construct
  misc_feature 1..22: note = chemically synthesized
  source 1..22: mol_type = other DNA
agcagtgagtggtttgtagctc

SEQ ID NO: 142659 - DNA, 22 bp, synthetic construct
  misc_feature 1..22: note = chemically synthesized
  source 1..22: mol_type = other DNA
gtagctctccttgaagaggttc

SEQ ID NO: 142660 - DNA, 22 bp, synthetic construct
  misc_feature 1..22: note = chemically synthesized
  source 1..22: mol_type = other DNA
tagctctccttgaagaggttct

SEQ ID NO: 142661 - DNA, 22 bp, synthetic construct
  misc_feature 1..22: note = chemically synthesized
  source 1..22: mol_type = other DNA
tccttgaagaggttcttcacat

SEQ ID NO: 142662 - DNA, 22 bp, synthetic construct
  misc_feature 1..22: note = chemically synthesized
  source 1..22: mol_type = other DNA
cttgaagaggttcttcacatcc

SEQ ID NO: 142663 - DNA, 22 bp, synthetic construct
  misc_feature 1..22: note = chemically synthesized
  source 1..22: mol_type = other DNA
gaagaggttcttcacatccctt

SEQ ID NO: 142664 - DNA, 22 bp, synthetic construct
  misc_feature 1..22: note = chemically synthesized
  source 1..22: mol_type = other DNA
aagaggttcttcacatccctta

SEQ ID NO: 142665 - DNA, 22 bp, synthetic construct
  misc_feature 1..22: note = chemically synthesized
  source 1..22: mol_type = other DNA
ttcacatcccttagaagttgta

SEQ ID NO: 142666 - DNA, 22 bp, synthetic construct
  misc_feature 1..22: note = chemically synthesized
  source 1..22: mol_type = other DNA
cacatcccttagaagttgtatt

SEQ ID NO: 142667 - DNA, 22 bp, synthetic construct
  misc_feature 1..22: note = chemically synthesized
  source 1..22: mol_type = other DNA
acatcccttagaagttgtattt

SEQ ID NO: 142668 - DNA, 22 bp, synthetic construct
  misc_feature 1..22: note = chemically synthesized
  source 1..22: mol_type = other DNA
agaagttgtatttctaggtatt

SEQ ID NO: 142669 - DNA, 22 bp, synthetic construct
  misc_feature 1..22: note = chemically synthesized
  source 1..22: mol_type = other DNA
gaagttgtatttctaggtattt

SEQ ID NO: 142670 - DNA, 22 bp, synthetic construct
  misc_feature 1..22: note = chemically synthesized
  source 1..22: mol_type = other DNA
tatttctaggtattttatttta

SEQ ID NO: 142671 - DNA, 22 bp, synthetic construct
  misc_feature 1..22: note = chemically synthesized
  source 1..22: mol_type = other DNA
ctaggtattttattttattctc

SEQ ID NO: 142672 - DNA, 22 bp, synthetic construct
  misc_feature 1..22: note = chemically synthesized
  source 1..22: mol_type = other DNA
taggtattttattttattctct

SEQ ID NO: 142673 - DNA, 22 bp, synthetic construct
  misc_feature 1..22: note = chemically synthesized
  source 1..22: mol_type = other DNA
ggtattttattttattctcttt

SEQ ID NO: 142674 - DNA, 22 bp, synthetic construct
  misc_feature 1..22: note = chemically synthesized
  source 1..22: mol_type = other DNA
tattttattctctttgcagcaa

SEQ ID NO: 142675 - DNA, 22 bp, synthetic construct
  misc_feature 1..22: note = chemically synthesized
  source 1..22: mol_type = other DNA
attttattctctttgcagcaat

SEQ ID NO: 142676 - DNA, 22 bp, synthetic construct
  misc_feature 1..22: note = chemically synthesized
  source 1..22: mol_type = other DNA
ttttattctctttgcagcaatt

SEQ ID NO: 142677 - DNA, 22 bp, synthetic construct
  misc_feature 1..22: note = chemically synthesized
  source 1..22: mol_type = other DNA
tattctctttgcagcaattgtg

SEQ ID NO: 142678 - DNA, 22 bp, synthetic construct
  misc_feature 1..22: note = chemically synthesized
  source 1..22: mol_type = other DNA
attctctttgcagcaattgtga

SEQ ID NO: 142679 - DNA, 22 bp, synthetic construct
  misc_feature 1..22: note = chemically synthesized
  source 1..22: mol_type = other DNA
ttctctttgcagcaattgtgaa

SEQ ID NO: 142680 - DNA, 22 bp, synthetic construct
  misc_feature 1..22: note = chemically synthesized
  source 1..22: mol_type = other DNA
tctttgcagcaattgtgaatgg

SEQ ID NO: 142681 - DNA, 22 bp, synthetic construct
  misc_feature 1..22: note = chemically synthesized
  source 1..22: mol_type = other DNA
tttgcagcaattgtgaatggga

SEQ ID NO: 142682 - DNA, 22 bp, synthetic construct
  misc_feature 1..22: note = chemically synthesized
  source 1..22: mol_type = other DNA
tgcagcaattgtgaatgggagt

SEQ ID NO: 142683 - DNA, 22 bp, synthetic construct
  misc_feature 1..22: note = chemically synthesized
  source 1..22: mol_type = other DNA
gcagcaattgtgaatgggagtt

SEQ ID NO: 142684 - DNA, 22 bp, synthetic construct
  misc_feature 1..22: note = chemically synthesized
  source 1..22: mol_type = other DNA
cagcaattgtgaatgggagttc

SEQ ID NO: 142685 - DNA, 22 bp, synthetic construct
  misc_feature 1..22: note = chemically synthesized
  source 1..22: mol_type = other DNA
tgaatgggagttcacccatgat

SEQ ID NO: 142686 - DNA, 22 bp, synthetic construct
  misc_feature 1..22: note = chemically synthesized
  source 1..22: mol_type = other DNA
acccatgatttggctctctgct

SEQ ID NO: 142687 - DNA, 22 bp, synthetic construct
  misc_feature 1..22: note = chemically synthesized
  source 1..22: mol_type = other DNA
ggctctctgcttgtctattatt

SEQ ID NO: 142688 - DNA, 22 bp, synthetic construct
  misc_feature 1..22: note = chemically synthesized
  source 1..22: mol_type = other DNA
gctctctgcttgtctattattg

SEQ ID NO: 142689 - DNA, 22 bp, synthetic construct
  misc_feature 1..22: note = chemically synthesized
  source 1..22: mol_type = other DNA
tctgcttgtctattattggtgt

SEQ ID NO: 142690 - DNA, 22 bp, synthetic construct
  misc_feature 1..22: note = chemically synthesized
  source 1..22: mol_type = other DNA
tgcttgtctattattggtgtat

SEQ ID NO: 142691 - DNA, 22 bp, synthetic construct
  misc_feature 1..22: note = chemically synthesized
  source 1..22: mol_type = other DNA
cttgtctattattggtgtatag

SEQ ID NO: 142692 - DNA, 22 bp, synthetic construct
  misc_feature 1..22: note = chemically synthesized
  source 1..22: mol_type = other DNA
gtctattattggtgtataggaa

SEQ ID NO: 142693 - DNA, 22 bp, synthetic construct
  misc_feature 1..22: note = chemically synthesized
  source 1..22: mol_type = other DNA
tctattattggtgtataggaac

SEQ ID NO: 142694 - DNA, 22 bp, synthetic construct
  misc_feature 1..22: note = chemically synthesized
  source 1..22: mol_type = other DNA
ttattggtgtataggaacgctt

SEQ ID NO: 142695 - DNA, 22 bp, synthetic construct
  misc_feature 1..22: note = chemically synthesized
  source 1..22: mol_type = other DNA
ttggtgtataggaacgcttgtg

SEQ ID NO: 142696 - DNA, 22 bp, synthetic construct
  misc_feature 1..22: note = chemically synthesized
  source 1..22: mol_type = other DNA
gtgtataggaacgcttgtgatt

SEQ ID NO: 142697 - DNA, 22 bp, synthetic construct
  misc_feature 1..22: note = chemically synthesized
  source 1..22: mol_type = other DNA
gtgatttctgcacactgatttt

SEQ ID NO: 142698 - DNA, 22 bp, synthetic construct
  misc_feature 1..22: note = chemically synthesized
  source 1..22: mol_type = other DNA
tgatttctgcacactgattttg

SEQ ID NO: 142699 - DNA, 22 bp, synthetic construct
  misc_feature 1..22: note = chemically synthesized
  source 1..22: mol_type = other DNA
ctgcacactgattttgtatctt

SEQ ID NO: 142700 - DNA, 22 bp, synthetic construct
  misc_feature 1..22: note = chemically synthesized
  source 1..22: mol_type = other DNA
tgcacactgattttgtatcttg

SEQ ID NO: 142701 - DNA, 22 bp, synthetic construct
  misc_feature 1..22: note = chemically synthesized
  source 1..22: mol_type = other DNA
cacactgattttgtatcttgag

SEQ ID NO: 142702 - DNA, 22 bp, synthetic construct
  misc_feature 1..22: note = chemically synthesized
  source 1..22: mol_type = other DNA
attttgtatcttgagactttgc

SEQ ID NO: 142703 - DNA, 22 bp, synthetic construct
  misc_feature 1..22: note = chemically synthesized
  source 1..22: mol_type = other DNA
tgtatcttgagactttgctgaa

SEQ ID NO: 142704 - DNA, 22 bp, synthetic construct
  misc_feature 1..22: note = chemically synthesized
  source 1..22: mol_type = other DNA
gtatcttgagactttgctgaag

SEQ ID NO: 142705 - DNA, 22 bp, synthetic construct
  misc_feature 1..22: note = chemically synthesized
  source 1..22: mol_type = other DNA
tatcttgagactttgctgaagc

SEQ ID NO: 142706 - DNA, 22 bp, synthetic construct
  misc_feature 1..22: note = chemically synthesized
  source 1..22: mol_type = other DNA
gagactttgctgaagctgttta

SEQ ID NO: 142707 - DNA, 22 bp, synthetic construct
  misc_feature 1..22: note = chemically synthesized
  source 1..22: mol_type = other DNA
agactttgctgaagctgtttat

SEQ ID NO: 142708 - DNA, 22 bp, synthetic construct
  misc_feature 1..22: note = chemically synthesized
  source 1..22: mol_type = other DNA
tgctgaagctgtttatcagctt

SEQ ID NO: 142709 - DNA, 22 bp, synthetic construct
  misc_feature 1..22: note = chemically synthesized
  source 1..22: mol_type = other DNA
gctgaagctgtttatcagctta

SEQ ID NO: 142710 - DNA, 22 bp, synthetic construct
  misc_feature 1..22: note = chemically synthesized
  source 1..22: mol_type = other DNA
ctgaagctgtttatcagcttaa

SEQ ID NO: 142711 - DNA, 22 bp, synthetic construct
  misc_feature 1..22: note = chemically synthesized
  source 1..22: mol_type = other DNA
aagctgtttatcagcttaagat

SEQ ID NO: 142712 - DNA, 22 bp, synthetic construct
  misc_feature 1..22: note = chemically synthesized
  source 1..22: mol_type = other DNA
tttatcagcttaagattttggg

SEQ ID NO: 142713 - DNA, 22 bp, synthetic construct
  misc_feature 1..22: note = chemically synthesized
  source 1..22: mol_type = other DNA
atcagcttaagattttgggctg

SEQ ID NO: 142714 - DNA, 22 bp, synthetic construct
  misc_feature 1..22: note = chemically synthesized
  source 1..22: mol_type = other DNA
tcagcttaagattttgggctga

SEQ ID NO: 142715 - DNA, 22 bp, synthetic construct
  misc_feature 1..22: note = chemically synthesized
  source 1..22: mol_type = other DNA
aagattttgggctgagatgaca

SEQ ID NO: 142716 - DNA, 22 bp, synthetic construct
  misc_feature 1..22: note = chemically synthesized
  source 1..22: mol_type = other DNA
agattttgggctgagatgacag

SEQ ID NO: 142717 - DNA, 22 bp, synthetic construct
  misc_feature 1..22: note = chemically synthesized
  source 1..22: mol_type = other DNA
tgggctgagatgacagggtctt

SEQ ID NO: 142718 - DNA, 22 bp, synthetic construct
  misc_feature 1..22: note = chemically synthesized
  source 1..22: mol_type = other DNA
gggctgagatgacagggtcttc

SEQ ID NO: 142719 - DNA, 22 bp, synthetic construct
  misc_feature 1..22: note = chemically synthesized
  source 1..22: mol_type = other DNA
ggctgagatgacagggtcttct

SEQ ID NO: 142720 - DNA, 22 bp, synthetic construct
  misc_feature 1..22: note = chemically synthesized
  source 1..22: mol_type = other DNA
agatgacagggtcttctaaata

SEQ ID NO: 142721 - DNA, 22 bp, synthetic construct
  misc_feature 1..22: note = chemically synthesized
  source 1..22: mol_type = other DNA
ctaaatatacaatcatgtcatc

SEQ ID NO: 142722 - DNA, 22 bp, synthetic construct
  misc_feature 1..22: note = chemically synthesized
  source 1..22: mol_type = other DNA
taaatatacaatcatgtcatct

SEQ ID NO: 142723 - DNA, 22 bp, synthetic construct
  misc_feature 1..22: note = chemically synthesized
  source 1..22: mol_type = other DNA
aatatacaatcatgtcatctgc

SEQ ID NO: 142724 - DNA, 22 bp, synthetic construct
  misc_feature 1..22: note = chemically synthesized
  source 1..22: mol_type = other DNA
caaacagagacaatttgacttc

SEQ ID NO: 142725 - DNA, 22 bp, synthetic construct
  misc_feature 1..22: note = chemically synthesized
  source 1..22: mol_type = other DNA
gacttcctctcttcctatttga

SEQ ID NO: 142726 - DNA, 22 bp, synthetic construct
  misc_feature 1..22: note = chemically synthesized
  source 1..22: mol_type = other DNA
acttcctctcttcctatttgaa

SEQ ID NO: 142727 - DNA, 22 bp, synthetic construct
  misc_feature 1..22: note = chemically synthesized
  source 1..22: mol_type = other DNA
cctctcttcctatttgaatatg

SEQ ID NO: 142728 - DNA, 22 bp, synthetic construct
  misc_feature 1..22: note = chemically synthesized
  source 1..22: mol_type = other DNA
ctctcttcctatttgaatatgc

SEQ ID NO: 142729 - DNA, 22 bp, synthetic construct
  misc_feature 1..22: note = chemically synthesized
  source 1..22: mol_type = other DNA
tcttcctatttgaatatgcttt

SEQ ID NO: 142730 - DNA, 22 bp, synthetic construct
  misc_feature 1..22: note = chemically synthesized
  source 1..22: mol_type = other DNA
ttcctatttgaatatgctttat

SEQ ID NO: 142731 - DNA, 22 bp, synthetic construct
  misc_feature 1..22: note = chemically synthesized
  source 1..22: mol_type = other DNA
cctatttgaatatgctttattt

SEQ ID NO: 142732 - DNA, 22 bp, synthetic construct
  misc_feature 1..22: note = chemically synthesized
  source 1..22: mol_type = other DNA
ctatttgaatatgctttatttc

SEQ ID NO: 142733 - DNA, 22 bp, synthetic construct
  misc_feature 1..22: note = chemically synthesized
  source 1..22: mol_type = other DNA
tttgaatatgctttatttcttt

SEQ ID NO: 142734 - DNA, 22 bp, synthetic construct
  misc_feature 1..22: note = chemically synthesized
  source 1..22: mol_type = other DNA
gaatatgctttatttctttctc

SEQ ID NO: 142735 - DNA, 22 bp, synthetic construct
  misc_feature 1..22: note = chemically synthesized
  source 1..22: mol_type = other DNA
aatatgctttatttctttctct

SEQ ID NO: 142736 - DNA, 22 bp, synthetic construct
  misc_feature 1..22: note = chemically synthesized
  source 1..22: mol_type = other DNA
tatttctttctcttgcctgatt

SEQ ID NO: 142737 - DNA, 22 bp, synthetic construct
  misc_feature 1..22: note = chemically synthesized
  source 1..22: mol_type = other DNA
atttctttctcttgcctgattg

SEQ ID NO: 142738 - DNA, 22 bp, synthetic construct
  misc_feature 1..22: note = chemically synthesized
  source 1..22: mol_type = other DNA
tttctttctcttgcctgattgt

SEQ ID NO: 142739 - DNA, 22 bp, synthetic construct
  misc_feature 1..22: note = chemically synthesized
  source 1..22: mol_type = other DNA
ctttctcttgcctgattgtcct

SEQ ID NO: 142740 - DNA, 22 bp, synthetic construct
  misc_feature 1..22: note = chemically synthesized
  source 1..22: mol_type = other DNA
tttctcttgcctgattgtcctg

SEQ ID NO: 142741 - DNA, 22 bp, synthetic construct
  misc_feature 1..22: note = chemically synthesized
  source 1..22: mol_type = other DNA
tctcttgcctgattgtcctggc

SEQ ID NO: 142742 - DNA, 22 bp, synthetic construct
  misc_feature 1..22: note = chemically synthesized
  source 1..22: mol_type = other DNA
ctcttgcctgattgtcctggcg

SEQ ID NO: 142743 - DNA, 22 bp, synthetic construct
  misc_feature 1..22: note = chemically synthesized
  source 1..22: mol_type = other DNA
tcttgcctgattgtcctggcga

SEQ ID NO: 142744 - DNA, 22 bp, synthetic construct
  misc_feature 1..22: note = chemically synthesized
  source 1..22: mol_type = other DNA
ttgcctgattgtcctggcgaga

SEQ ID NO: 142745 - DNA, 22 bp, synthetic construct
  misc_feature 1..22: note = chemically synthesized
  source 1..22: mol_type = other DNA
gcctgattgtcctggcgagaac

SEQ ID NO: 142746 - DNA, 22 bp, synthetic construct
  misc_feature 1..22: note = chemically synthesized
  source 1..22: mol_type = other DNA
cctgattgtcctggcgagaact

SEQ ID NO: 142747 - DNA, 22 bp, synthetic construct
  misc_feature 1..22: note = chemically synthesized
  source 1..22: mol_type = other DNA
attgtcctggcgagaacttcca

SEQ ID NO: 142748 - DNA, 22 bp, synthetic construct
  misc_feature 1..22: note = chemically synthesized
  source 1..22: mol_type = other DNA
tcctggcgagaacttccaatac

SEQ ID NO: 142749 - DNA, 22 bp, synthetic construct
  misc_feature 1..22: note = chemically synthesized
  source 1..22: mol_type = other DNA
gcgagaacttccaatactatgt

SEQ ID NO: 142750 - DNA, 22 bp, synthetic construct
  misc_feature 1..22: note = chemically synthesized
  source 1..22: mol_type = other DNA
ccaatactatgttgagtaagag

SEQ ID NO: 142751 - DNA, 22 bp, synthetic construct
  misc_feature 1..22: note = chemically synthesized
  source 1..22: mol_type = other DNA
caatactatgttgagtaagagt

SEQ ID NO: 142752 - DNA, 22 bp, synthetic construct
  misc_feature 1..22: note = chemically synthesized
  source 1..22: mol_type = other DNA
tgttgagtaagagtggcgagag

SEQ ID NO: 142753 - DNA, 22 bp, synthetic construct
  misc_feature 1..22: note = chemically synthesized
  source 1..22: mol_type = other DNA
agtaagagtggcgagagggcat

SEQ ID NO: 142754 - DNA, 22 bp, synthetic construct
  misc_feature 1..22: note = chemically synthesized
  source 1..22: mol_type = other DNA
gtcttgtgccggttttcaaagc

SEQ ID NO: 142755 - DNA, 22 bp, synthetic construct
  misc_feature 1..22: note = chemically synthesized
  source 1..22: mol_type = other DNA
tcttgtgccggttttcaaagca

SEQ ID NO: 142756 - DNA, 22 bp, synthetic construct
  misc_feature 1..22: note = chemically synthesized
  source 1..22: mol_type = other DNA
gtgccggttttcaaagcaaatg

SEQ ID NO: 142757 - DNA, 22 bp, synthetic construct
  misc_feature 1..22: note = chemically synthesized
  source 1..22: mol_type = other DNA
tgccggttttcaaagcaaatga

SEQ ID NO: 142758 - DNA, 22 bp, synthetic construct
  misc_feature 1..22: note = chemically synthesized
  source 1..22: mol_type = other DNA
tcaaagcaaatgatttttaaat

SEQ ID NO: 142759 - DNA, 22 bp, synthetic construct
  misc_feature 1..22: note = chemically synthesized
  source 1..22: mol_type = other DNA
caaagcaaatgatttttaaatt

SEQ ID NO: 142760 - DNA, 22 bp, synthetic construct
  misc_feature 1..22: note = chemically synthesized
  source 1..22: mol_type = other DNA
aaagcaaatgatttttaaattt

SEQ ID NO: 142761 - DNA, 22 bp, synthetic construct
  misc_feature 1..22: note = chemically synthesized
  source 1..22: mol_type = other DNA
ttaaatttccatcttgatttca

SEQ ID NO: 142762 - DNA, 22 bp, synthetic construct
  misc_feature 1..22: note = chemically synthesized
  source 1..22: mol_type = other DNA
taaatttccatcttgatttcat

SEQ ID NO: 142763 - DNA, 22 bp, synthetic construct
  misc_feature 1..22: note = chemically synthesized
  source 1..22: mol_type = other DNA
aaatttccatcttgatttcatt

SEQ ID NO: 142764 - DNA, 22 bp, synthetic construct
  misc_feature 1..22: note = chemically synthesized
  source 1..22: mol_type = other DNA
aatttccatcttgatttcattg

SEQ ID NO: 142765 - DNA, 22 bp, synthetic construct
  misc_feature 1..22: note = chemically synthesized
  source 1..22: mol_type = other DNA
ccatcttgatttcattgttgac

SEQ ID NO: 142766 - DNA, 22 bp, synthetic construct
  misc_feature 1..22: note = chemically synthesized
  source 1..22: mol_type = other DNA
catcttgatttcattgttgacc

SEQ ID NO: 142767 - DNA, 22 bp, synthetic construct
  misc_feature 1..22: note = chemically synthesized
  source 1..22: mol_type = other DNA
gatttcattgttgacccaatga

SEQ ID NO: 142768 - DNA, 22 bp, synthetic construct
  misc_feature 1..22: note = chemically synthesized
  source 1..22: mol_type = other DNA
atttcattgttgacccaatgat

SEQ ID NO: 142769 - DNA, 22 bp, synthetic construct
  misc_feature 1..22: note = chemically synthesized
  source 1..22: mol_type = other DNA
cattgttgacccaatgatcatt

SEQ ID NO: 142770 - DNA, 22 bp, synthetic construct
  misc_feature 1..22: note = chemically synthesized
  source 1..22: mol_type = other DNA
attgttgacccaatgatcattc

SEQ ID NO: 142771 - DNA, 22 bp, synthetic construct
  misc_feature 1..22: note = chemically synthesized
  source 1..22: mol_type = other DNA
ttgacccaatgatcattcagga

SEQ ID NO: 142772 - DNA, 22 bp, synthetic construct
  misc_feature 1..22: note = chemically synthesized
  source 1..22: mol_type = other DNA
acccaatgatcattcaggagca

SEQ ID NO: 142773 - DNA, 22 bp, synthetic construct
  misc_feature 1..22: note = chemically synthesized
  source 1..22: mol_type = other DNA
aggagcaggttatttaatttcc

SEQ ID NO: 142774 - DNA, 22 bp, synthetic construct
  misc_feature 1..22: note = chemically synthesized
  source 1..22: mol_type = other DNA
tttaatttccctgtatttgcat

SEQ ID NO: 142775 - DNA, 22 bp, synthetic construct
  misc_feature 1..22: note = chemically synthesized
  source 1..22: mol_type = other DNA
aatttccctgtatttgcatggt

SEQ ID NO: 142776 - DNA, 22 bp, synthetic construct
  misc_feature 1..22: note = chemically synthesized
  source 1..22: mol_type = other DNA
atttccctgtatttgcatggtt

SEQ ID NO: 142777 - DNA, 22 bp, synthetic construct
  misc_feature 1..22: note = chemically synthesized
  source 1..22: mol_type = other DNA
ccctgtatttgcatggttttga

SEQ ID NO: 142778 - DNA, 22 bp, synthetic construct
  misc_feature 1..22: note = chemically synthesized
  source 1..22: mol_type = other DNA
cctgtatttgcatggttttgaa

SEQ ID NO: 142779 - DNA, 22 bp, synthetic construct
  misc_feature 1..22: note = chemically synthesized
  source 1..22: mol_type = other DNA
tatttgcatggttttgaaggtt

SEQ ID NO: 142780 - DNA, 22 bp, synthetic construct
  misc_feature 1..22: note = chemically synthesized
  source 1..22: mol_type = other DNA
gcatggttttgaaggttccttt

SEQ ID NO: 142781 - DNA, 22 bp, synthetic construct
  misc_feature 1..22: note = chemically synthesized
  source 1..22: mol_type = other DNA
catggttttgaaggttcctttt

SEQ ID NO: 142782 - DNA, 22 bp, synthetic construct
  misc_feature 1..22: note = chemically synthesized
  source 1..22: mol_type = other DNA
tgaaggttccttttgtagttga

SEQ ID NO: 142783 - DNA, 22 bp, synthetic construct
  misc_feature 1..22: note = chemically synthesized
  source 1..22: mol_type = other DNA
gaaggttccttttgtagttgat

SEQ ID NO: 142784 - DNA, 22 bp, synthetic construct
  misc_feature 1..22: note = chemically synthesized
  source 1..22: mol_type = other DNA
aaggttccttttgtagttgatt

SEQ ID NO: 142785 - DNA, 22 bp, synthetic construct
  misc_feature 1..22: note = chemically synthesized
  source 1..22: mol_type = other DNA
cttttgtagttgatttccaatt

SEQ ID NO: 142786 - DNA, 22 bp, synthetic construct
  misc_feature 1..22: note = chemically synthesized
  source 1..22: mol_type = other DNA
ttgtagttgatttccaatttta

SEQ ID NO: 142787 - DNA, 22 bp, synthetic construct
  misc_feature 1..22: note = chemically synthesized
  source 1..22: mol_type = other DNA
tgtagttgatttccaattttat

SEQ ID NO: 142788 - DNA, 22 bp, synthetic construct
  misc_feature 1..22: note = chemically synthesized
  source 1..22: mol_type = other DNA
gtagttgatttccaattttatt

SEQ ID NO: 142789 - DNA, 22 bp, synthetic construct
  misc_feature 1..22: note = chemically synthesized
  source 1..22: mol_type = other DNA
tagttgatttccaattttattc

SEQ ID NO: 142790 - DNA, 22 bp, synthetic construct
  misc_feature 1..22: note = chemically synthesized
  source 1..22: mol_type = other DNA
atttccaattttattctactgt

SEQ ID NO: 142791 - DNA, 22 bp, synthetic construct
  misc_feature 1..22: note = chemically synthesized
  source 1..22: mol_type = other DNA
ccaattttattctactgtggtc

SEQ ID NO: 142792 - DNA, 22 bp, synthetic construct
  misc_feature 1..22: note = chemically synthesized
  source 1..22: mol_type = other DNA
caattttattctactgtggtct

SEQ ID NO: 142793 - DNA, 22 bp, synthetic construct
  misc_feature 1..22: note = chemically synthesized
  source 1..22: mol_type = other DNA
tattctactgtggtctgagaga

SEQ ID NO: 142794 - DNA, 22 bp, synthetic construct
  misc_feature 1..22: note = chemically synthesized
  source 1..22: mol_type = other DNA
attctactgtggtctgagagag

SEQ ID NO: 142795 - DNA, 22 bp, synthetic construct
  misc_feature 1..22: note = chemically synthesized
  source 1..22: mol_type = other DNA
ttctactgtggtctgagagagt

SEQ ID NO: 142796 - DNA, 22 bp, synthetic construct
  misc_feature 1..22: note = chemically synthesized
  source 1..22: mol_type = other DNA
tactgtggtctgagagagtgct

SEQ ID NO: 142797 - DNA, 22 bp, synthetic construct
  misc_feature 1..22: note = chemically synthesized
  source 1..22: mol_type = other DNA
ctgtggtctgagagagtgcttg

SEQ ID NO: 142798 - DNA, 22 bp, synthetic construct
  misc_feature 1..22: note = chemically synthesized
  source 1..22: mol_type = other DNA
tggtctgagagagtgcttgata

SEQ ID NO: 142799 - DNA, 22 bp, synthetic construct
  misc_feature 1..22: note = chemically synthesized
  source 1..22: mol_type = other DNA
agagagtgcttgatataatttc

SEQ ID NO: 142800 - DNA, 22 bp, synthetic construct
  misc_feature 1..22: note = chemically synthesized
  source 1..22: mol_type = other DNA
gatataatttcaatttttaaaa

SEQ ID NO: 142801 - DNA, 22 bp, synthetic construct
  misc_feature 1..22: note = chemically synthesized
  source 1..22: mol_type = other DNA
atataatttcaatttttaaaaa

SEQ ID NO: 142802 - DNA, 22 bp, synthetic construct
  misc_feature 1..22: note = chemically synthesized
  source 1..22: mol_type = other DNA
caatttttaaaaatttattgag

SEQ ID NO: 142803 - DNA, 22 bp, synthetic construct
  misc_feature 1..22: note = chemically synthesized
  source 1..22: mol_type = other DNA
aatttttaaaaatttattgagg

SEQ ID NO: 142804 - DNA, 22 bp, synthetic construct
  misc_feature 1..22: note = chemically synthesized
  source 1..22: mol_type = other DNA
ttaaaaatttattgaggcttgt

SEQ ID NO: 142805 - DNA, 22 bp, synthetic construct
  misc_feature 1..22: note = chemically synthesized
  source 1..22: mol_type = other DNA
taaaaatttattgaggcttgtt

SEQ ID NO: 142806 - DNA, 22 bp, synthetic construct
  misc_feature 1..22: note = chemically synthesized
  source 1..22: mol_type = other DNA
aaaaatttattgaggcttgttt

SEQ ID NO: 142807 - DNA, 22 bp, synthetic construct
  misc_feature 1..22: note = chemically synthesized
  source 1..22: mol_type = other DNA
aaaatttattgaggcttgtttt

SEQ ID NO: 142808 - DNA, 22 bp, synthetic construct
  misc_feature 1..22: note = chemically synthesized
  source 1..22: mol_type = other DNA
attgaggcttgttttgtggcat

SEQ ID NO: 142809 - DNA, 22 bp, synthetic construct
  misc_feature 1..22: note = chemically synthesized
  source 1..22: mol_type = other DNA
ttgaggcttgttttgtggcata

SEQ ID NO: 142810 - DNA, 22 bp, synthetic construct
  misc_feature 1..22: note = chemically synthesized
  source 1..22: mol_type = other DNA
aggcttgttttgtggcatatca

SEQ ID NO: 142811 - DNA, 22 bp, synthetic construct
  misc_feature 1..22: note = chemically synthesized
  source 1..22: mol_type = other DNA
gttttgtggcatatcatatggc

SEQ ID NO: 142812 - DNA, 22 bp, synthetic construct
  misc_feature 1..22: note = chemically synthesized
  source 1..22: mol_type = other DNA
ttttgtggcatatcatatggcc

SEQ ID NO: 142813 - DNA, 22 bp, synthetic construct
  misc_feature 1..22: note = chemically synthesized
  source 1..22: mol_type = other DNA
tgtggcatatcatatggcctat

SEQ ID NO: 142814 - DNA, 22 bp, synthetic construct
  misc_feature 1..22: note = chemically synthesized
  source 1..22: mol_type = other DNA
gtggcatatcatatggcctatc

SEQ ID NO: 142815 - DNA, 22 bp, synthetic construct
  misc_feature 1..22: note = chemically synthesized
  source 1..22: mol_type = other DNA
tggcatatcatatggcctatct

SEQ ID NO: 142816 - DNA, 22 bp, synthetic construct
  misc_feature 1..22: note = chemically synthesized
  source 1..22: mol_type = other DNA
tcttggagaaagttccatgtgc

SEQ ID NO: 142817 - DNA, 22 bp, synthetic construct
  misc_feature 1..22: note = chemically synthesized
  source 1..22: mol_type = other DNA
ggagaaagttccatgtgctgat

SEQ ID NO: 142818 - DNA, 22 bp, synthetic construct
  misc_feature 1..22: note = chemically synthesized
  source 1..22: mol_type = other DNA
gagaaagttccatgtgctgatg

SEQ ID NO: 142819 - DNA, 22 bp, synthetic construct
  misc_feature 1..22: note = chemically synthesized
  source 1..22: mol_type = other DNA
catgtgctgatgaatagaatgt

SEQ ID NO: 142820 - DNA, 22 bp, synthetic construct
  misc_feature 1..22: note = chemically synthesized
  source 1..22: mol_type = other DNA
atgaatagaatgtgtattctgc

SEQ ID NO: 142821 - DNA, 22 bp, synthetic construct
  misc_feature 1..22: note = chemically synthesized
  source 1..22: mol_type = other DNA
tgcagttgttgggtagaatgtc

SEQ ID NO: 142822 - DNA, 22 bp, synthetic construct
  misc_feature 1..22: note = chemically synthesized
  source 1..22: mol_type = other DNA
cagttgttgggtagaatgtcct

SEQ ID NO: 142823 - DNA, 22 bp, synthetic construct
  misc_feature 1..22: note = chemically synthesized
  source 1..22: mol_type = other DNA
ttgggtagaatgtcctgtaaat

SEQ ID NO: 142824 - DNA, 22 bp, synthetic construct
  misc_feature 1..22: note = chemically synthesized
  source 1..22: mol_type = other DNA
ggtagaatgtcctgtaaatatc

SEQ ID NO: 142825 - DNA, 22 bp, synthetic construct
  misc_feature 1..22: note = chemically synthesized
  source 1..22: mol_type = other DNA
taaatatctgttaagtccattt

SEQ ID NO: 142826 - DNA, 22 bp, synthetic construct
  misc_feature 1..22: note = chemically synthesized
  source 1..22: mol_type = other DNA
ttaagtccatttgttctttaaa

SEQ ID NO: 142827 - DNA, 22 bp, synthetic construct
  misc_feature 1..22: note = chemically synthesized
  source 1..22: mol_type = other DNA
agtccatttgttctttaaatcc

SEQ ID NO: 142828 - DNA, 22 bp, synthetic construct
  misc_feature 1..22: note = chemically synthesized
  source 1..22: mol_type = other DNA
gttctttaaatccattgtttct

SEQ ID NO: 142829 - DNA, 22 bp, synthetic construct
  misc_feature 1..22: note = chemically synthesized
  source 1..22: mol_type = other DNA
ttctttaaatccattgtttctt

SEQ ID NO: 142830 - DNA, 22 bp, synthetic construct
  misc_feature 1..22: note = chemically synthesized
  source 1..22: mol_type = other DNA
tttaaatccattgtttctttgt

SEQ ID NO: 142831 - DNA, 22 bp, synthetic construct
  misc_feature 1..22: note = chemically synthesized
  source 1..22: mol_type = other DNA
taaatccattgtttctttgtag

SEQ ID NO: 142832 - DNA, 22 bp, synthetic construct
  misc_feature 1..22: note = chemically synthesized
  source 1..22: mol_type = other DNA
aaatccattgtttctttgtaga

SEQ ID NO: 142833 - DNA, 22 bp, synthetic construct
  misc_feature 1..22: note = chemically synthesized
  source 1..22: mol_type = other DNA
aatccattgtttctttgtagac

SEQ ID NO: 142834 - DNA, 22 bp, synthetic construct
  misc_feature 1..22: note = chemically synthesized
  source 1..22: mol_type = other DNA
tttctttgtagactgtcttgat

SEQ ID NO: 142835 - DNA, 22 bp, synthetic construct
  misc_feature 1..22: note = chemically synthesized
  source 1..22: mol_type = other DNA
ctttgtagactgtcttgatgac

SEQ ID NO: 142836 - DNA, 22 bp, synthetic construct
  misc_feature 1..22: note = chemically synthesized
  source 1..22: mol_type = other DNA
tttgtagactgtcttgatgacc

SEQ ID NO: 142837 - DNA, 22 bp, synthetic construct
  misc_feature 1..22: note = chemically synthesized
  source 1..22: mol_type = other DNA
tgtagactgtcttgatgacctg

SEQ ID NO: 142838 - DNA, 22 bp, synthetic construct
  misc_feature 1..22: note = chemically synthesized
  source 1..22: mol_type = other DNA
gtagactgtcttgatgacctgc

SEQ ID NO: 142839 - DNA, 22 bp, synthetic construct
  misc_feature 1..22: note = chemically synthesized
  source 1..22: mol_type = other DNA
tagactgtcttgatgacctgcc

SEQ ID NO: 142840 - DNA, 22 bp, synthetic construct
  misc_feature 1..22: note = chemically synthesized
  source 1..22: mol_type = other DNA
tcttgatgacctgcctagtgca

SEQ ID NO: 142841 - DNA, 22 bp, synthetic construct
  misc_feature 1..22: note = chemically synthesized
  source 1..22: mol_type = other DNA
gatgacctgcctagtgcagtca

SEQ ID NO: 142842 - DNA, 22 bp, synthetic construct
  misc_feature 1..22: note = chemically synthesized
  source 1..22: mol_type = other DNA
atgacctgcctagtgcagtcag

SEQ ID NO: 142843 - DNA, 22 bp, synthetic construct
  misc_feature 1..22: note = chemically synthesized
  source 1..22: mol_type = other DNA
cctagtgcagtcagtggagtat

SEQ ID NO: 142844 - DNA, 22 bp, synthetic construct
  misc_feature 1..22: note = chemically synthesized
  source 1..22: mol_type = other DNA
gtgcagtcagtggagtattgaa

SEQ ID NO: 142845 - DNA, 22 bp, synthetic construct
  misc_feature 1..22: note = chemically synthesized
  source 1..22: mol_type = other DNA
aagtcccccactattattatgt

SEQ ID NO: 142846 - DNA, 22 bp, synthetic construct
  misc_feature 1..22: note = chemically synthesized
  source 1..22: mol_type = other DNA
ttattatgttgctgtctagtct

SEQ ID NO: 142847 - DNA, 22 bp, synthetic construct
  misc_feature 1..22: note = chemically synthesized
  source 1..22: mol_type = other DNA
ttatgttgctgtctagtctagt

SEQ ID NO: 142848 - DNA, 22 bp, synthetic construct
  misc_feature 1..22: note = chemically synthesized
  source 1..22: mol_type = other DNA
tgttgctgtctagtctagtagt

SEQ ID NO: 142849 - DNA, 22 bp, synthetic construct
  misc_feature 1..22: note = chemically synthesized
  source 1..22: mol_type = other DNA
ctgtctagtctagtagtaattg

SEQ ID NO: 142850 - DNA, 22 bp, synthetic construct
  misc_feature 1..22: note = chemically synthesized
  source 1..22: mol_type = other DNA
tctagtctagtagtaattgttt

SEQ ID NO: 142851 - DNA, 22 bp, synthetic construct
  misc_feature 1..22: note = chemically synthesized
  source 1..22: mol_type = other DNA
gtctagtagtaattgttttata

SEQ ID NO: 142852 - DNA, 22 bp, synthetic construct
  misc_feature 1..22: note = chemically synthesized
  source 1..22: mol_type = other DNA
gtagtaattgttttataaattt

SEQ ID NO: 142853 - DNA, 22 bp, synthetic construct
  misc_feature 1..22: note = chemically synthesized
  source 1..22: mol_type = other DNA
ttttataaatttgggatctcca

SEQ ID NO: 142854 - DNA, 22 bp, synthetic construct
  misc_feature 1..22: note = chemically synthesized
  source 1..22: mol_type = other DNA
tataaatttgggatctccagta

SEQ ID NO: 142855 - DNA, 22 bp, synthetic construct
  misc_feature 1..22: note = chemically synthesized
  source 1..22: mol_type = other DNA
ataaatttgggatctccagtat

SEQ ID NO: 142856 - DNA, 22 bp, synthetic construct
  misc_feature 1..22: note = chemically synthesized
  source 1..22: mol_type = other DNA
taaatttgggatctccagtatt

SEQ ID NO: 142857 - DNA, 22 bp, synthetic construct
  misc_feature 1..22: note = chemically synthesized
  source 1..22: mol_type = other DNA
gggatctccagtattagatgca

SEQ ID NO: 142858 - DNA, 22 bp, synthetic construct
  misc_feature 1..22: note = chemically synthesized
  source 1..22: mol_type = other DNA
ggatctccagtattagatgcat

SEQ ID NO: 142859 - DNA, 22 bp, synthetic construct
  misc_feature 1..22: note = chemically synthesized
  source 1..22: mol_type = other DNA
cagtattagatgcatatatatt

SEQ ID NO: 142860 - DNA, 22 bp, synthetic construct
  misc_feature 1..22: note = chemically synthesized
  source 1..22: mol_type = other DNA
gatgcatatatattaagaattg

SEQ ID NO: 142861 - DNA, 22 bp, synthetic construct
  misc_feature 1..22: note = chemically synthesized
  source 1..22: mol_type = other DNA
agaattgtaatattctcccatt

SEQ ID NO: 142862 - DNA, 22 bp, synthetic construct
  misc_feature 1..22: note = chemically synthesized
  source 1..22: mol_type = other DNA
taatattctcccattggacaag

SEQ ID NO: 142863 - DNA, 22 bp, synthetic construct
  misc_feature 1..22: note = chemically synthesized
  source 1..22: mol_type = other DNA
tcccattggacaagggctttta

SEQ ID NO: 142864 - DNA, 22 bp, synthetic construct
  misc_feature 1..22: note = chemically synthesized
  source 1..22: mol_type = other DNA
ccattggacaagggcttttatc

SEQ ID NO: 142865 - DNA, 22 bp, synthetic construct
  misc_feature 1..22: note = chemically synthesized
  source 1..22: mol_type = other DNA
gacaagggcttttatcattata

SEQ ID NO: 142866 - DNA, 22 bp, synthetic construct
  misc_feature 1..22: note = chemically synthesized
  source 1..22: mol_type = other DNA
ttatcattatatgatgtccctc

SEQ ID NO: 142867 - DNA, 22 bp, synthetic construct
  misc_feature 1..22: note = chemically synthesized
  source 1..22: mol_type = other DNA
tatcattatatgatgtccctct

SEQ ID NO: 142868 - DNA, 22 bp, synthetic construct
  misc_feature 1..22: note = chemically synthesized
  source 1..22: mol_type = other DNA
atcattatatgatgtccctctt

SEQ ID NO: 142869 - DNA, 22 bp, synthetic construct
  misc_feature 1..22: note = chemically synthesized
  source 1..22: mol_type = other DNA
tcattatatgatgtccctcttt

SEQ ID NO: 142870 - DNA, 22 bp, synthetic construct
  misc_feature 1..22: note = chemically synthesized
  source 1..22: mol_type = other DNA
tatgatgtccctctttgtcttt

SEQ ID NO: 142871 - DNA, 22 bp, synthetic construct
  misc_feature 1..22: note = chemically synthesized
  source 1..22: mol_type = other DNA
tttgtcttttttaactgctgtt

SEQ ID NO: 142872 - DNA, 22 bp, synthetic construct
  misc_feature 1..22: note = chemically synthesized
  source 1..22: mol_type = other DNA
tgtcttttttaactgctgtttc

SEQ ID NO: 142873 - DNA, 22 bp, synthetic construct
  misc_feature 1..22: note = chemically synthesized
  source 1..22: mol_type = other DNA
gtcttttttaactgctgtttct

SEQ ID NO: 142874 - DNA, 22 bp, synthetic construct
  misc_feature 1..22: note = chemically synthesized
  source 1..22: mol_type = other DNA
tcttttttaactgctgtttctt

SEQ ID NO: 142875 - DNA, 22 bp, synthetic construct
  misc_feature 1..22: note = chemically synthesized
  source 1..22: mol_type = other DNA
ttttaactgctgtttctttaaa

SEQ ID NO: 142876 - DNA, 22 bp, synthetic construct
  misc_feature 1..22: note = chemically synthesized
  source 1..22: mol_type = other DNA
tttaactgctgtttctttaaag

SEQ ID NO: 142877 - DNA, 22 bp, synthetic construct
  misc_feature 1..22: note = chemically synthesized
  source 1..22: mol_type = other DNA
ttaactgctgtttctttaaagt

SEQ ID NO: 142878 - DNA, 22 bp, synthetic construct
  misc_feature 1..22: note = chemically synthesized
  source 1..22: mol_type = other DNA
taactgctgtttctttaaagtt

SEQ ID NO: 142879 - DNA, 22 bp, synthetic construct
  misc_feature 1..22: note = chemically synthesized
  source 1..22: mol_type = other DNA
aactgctgtttctttaaagttt

SEQ ID NO: 142880 - DNA, 22 bp, synthetic construct
  misc_feature 1..22: note = chemically synthesized
  source 1..22: mol_type = other DNA
actgctgtttctttaaagtttg

SEQ ID NO: 142881 - DNA, 22 bp, synthetic construct
  misc_feature 1..22: note = chemically synthesized
  source 1..22: mol_type = other DNA
ctgtttctttaaagtttgtttt

SEQ ID NO: 142882 - DNA, 22 bp, synthetic construct
  misc_feature 1..22: note = chemically synthesized
  source 1..22: mol_type = other DNA
tttctttaaagtttgttttgtc

SEQ ID NO: 142883 - DNA, 22 bp, synthetic construct
  misc_feature 1..22: note = chemically synthesized
  source 1..22: mol_type = other DNA
ctttaaagtttgttttgtctga

SEQ ID NO: 142884 - DNA, 22 bp, synthetic construct
  misc_feature 1..22: note = chemically synthesized
  source 1..22: mol_type = other DNA
tttaaagtttgttttgtctgac

SEQ ID NO: 142885 - DNA, 22 bp, synthetic construct
  misc_feature 1..22: note = chemically synthesized
  source 1..22: mol_type = other DNA
taaagtttgttttgtctgacat

SEQ ID NO: 142886 - DNA, 22 bp, synthetic construct
  misc_feature 1..22: note = chemically synthesized
  source 1..22: mol_type = other DNA
aaagtttgttttgtctgacata

SEQ ID NO: 142887 - DNA, 22 bp, synthetic construct
  misc_feature 1..22: note = chemically synthesized
  source 1..22: mol_type = other DNA
aagtttgttttgtctgacataa

SEQ ID NO: 142888 - DNA, 22 bp, synthetic construct
  misc_feature 1..22: note = chemically synthesized
  source 1..22: mol_type = other DNA
gttttgtctgacataagaatag

SEQ ID NO: 142889 - DNA, 22 bp, synthetic construct
  misc_feature 1..22: note = chemically synthesized
  source 1..22: mol_type = other DNA
ttttgtctgacataagaatagc

SEQ ID NO: 142890 - DNA, 22 bp, synthetic construct
  misc_feature 1..22: note = chemically synthesized
  source 1..22: mol_type = other DNA
tgtctgacataagaatagctgc

SEQ ID NO: 142891 - DNA, 22 bp, synthetic construct
  misc_feature 1..22: note = chemically synthesized
  source 1..22: mol_type = other DNA
gtctgacataagaatagctgct

SEQ ID NO: 142892 - DNA, 22 bp, synthetic construct
  misc_feature 1..22: note = chemically synthesized
  source 1..22: mol_type = other DNA
tctgacataagaatagctgctt

SEQ ID NO: 142893 - DNA, 22 bp, synthetic construct
  misc_feature 1..22: note = chemically synthesized
  source 1..22: mol_type = other DNA
acataagaatagctgctttggc

SEQ ID NO: 142894 - DNA, 22 bp, synthetic construct
  misc_feature 1..22: note = chemically synthesized
  source 1..22: mol_type = other DNA
ctttggctcgcttttggtgtcc

SEQ ID NO: 142895 - DNA, 22 bp, synthetic construct
  misc_feature 1..22: note = chemically synthesized
  source 1..22: mol_type = other DNA
tggctcgcttttggtgtccatt

SEQ ID NO: 142896 - DNA, 22 bp, synthetic construct
  misc_feature 1..22: note = chemically synthesized
  source 1..22: mol_type = other DNA
ggctcgcttttggtgtccattt

SEQ ID NO: 142897 - DNA, 22 bp, synthetic construct
  misc_feature 1..22: note = chemically synthesized
  source 1..22: mol_type = other DNA
gctcgcttttggtgtccatttg

SEQ ID NO: 142898 - DNA, 22 bp, synthetic construct
  misc_feature 1..22: note = chemically synthesized
  source 1..22: mol_type = other DNA
gcttttggtgtccatttgtgtg

SEQ ID NO: 142899 - DNA, 22 bp, synthetic construct
  misc_feature 1..22: note = chemically synthesized
  source 1..22: mol_type = other DNA
ttggtgtccatttgtgtggaat

SEQ ID NO: 142900 - DNA, 22 bp, synthetic construct
  misc_feature 1..22: note = chemically synthesized
  source 1..22: mol_type = other DNA
tggtgtccatttgtgtggaatg

SEQ ID NO: 142901 - DNA, 22 bp, synthetic construct
  misc_feature 1..22: note = chemically synthesized
  source 1..22: mol_type = other DNA
ggtgtccatttgtgtggaatgt

SEQ ID NO: 142902 - DNA, 22 bp, synthetic construct
  misc_feature 1..22: note = chemically synthesized
  source 1..22: mol_type = other DNA
gtgtccatttgtgtggaatgtc

SEQ ID NO: 142903 - DNA, 22 bp, synthetic construct
  misc_feature 1..22: note = chemically synthesized
  source 1..22: mol_type = other DNA
gtgtggaatgtcattttccacc

SEQ ID NO: 142904 - DNA, 22 bp, synthetic construct
  misc_feature 1..22: note = chemically synthesized
  source 1..22: mol_type = other DNA
tgtggaatgtcattttccaccc

SEQ ID NO: 142905 - DNA, 22 bp, synthetic construct
  misc_feature 1..22: note = chemically synthesized
  source 1..22: mol_type = other DNA
tccacccctttaccttaagttt

SEQ ID NO: 142906 - DNA, 22 bp, synthetic construct
  misc_feature 1..22: note = chemically synthesized
  source 1..22: mol_type = other DNA
ccacccctttaccttaagttta

SEQ ID NO: 142907 - DNA, 22 bp, synthetic construct
  misc_feature 1..22: note = chemically synthesized
  source 1..22: mol_type = other DNA
cacccctttaccttaagtttat

SEQ ID NO: 142908 - DNA, 22 bp, synthetic construct
  misc_feature 1..22: note = chemically synthesized
  source 1..22: mol_type = other DNA
taccttaagtttatgtgagtcc

SEQ ID NO: 142909 - DNA, 22 bp, synthetic construct
  misc_feature 1..22: note = chemically synthesized
  source 1..22: mol_type = other DNA
accttaagtttatgtgagtcct

SEQ ID NO: 142910 - DNA, 22 bp, synthetic construct
  misc_feature 1..22: note = chemically synthesized
  source 1..22: mol_type = other DNA
ccttaagtttatgtgagtcctt

SEQ ID NO: 142911 - DNA, 22 bp, synthetic construct
  misc_feature 1..22: note = chemically synthesized
  source 1..22: mol_type = other DNA
aagtttatgtgagtccttatgt

SEQ ID NO: 142912 - DNA, 22 bp, synthetic construct
  misc_feature 1..22: note = chemically synthesized
  source 1..22: mol_type = other DNA
agtttatgtgagtccttatgtg

SEQ ID NO: 142913 - DNA, 22 bp, synthetic construct
  misc_feature 1..22: note = chemically synthesized
  source 1..22: mol_type = other DNA
atgtgagtccttatgtgttagg

SEQ ID NO: 142914 - DNA, 22 bp, synthetic construct
  misc_feature 1..22: note = chemically synthesized
  source 1..22: mol_type = other DNA
tgtgagtccttatgtgttaggt

SEQ ID NO: 142915 - DNA, 22 bp, synthetic construct
  misc_feature 1..22: note = chemically synthesized
  source 1..22: mol_type = other DNA
atgtgttaggtgagtctcctga

SEQ ID NO: 142916 - DNA, 22 bp, synthetic construct
  misc_feature 1..22: note = chemically synthesized
  source 1..22: mol_type = other DNA
tgtgttaggtgagtctcctgaa

SEQ ID NO: 142917 - DNA, 22 bp, synthetic construct
  misc_feature 1..22: note = chemically synthesized
  source 1..22: mol_type = other DNA
ggtgagtctcctgaaggcggca

SEQ ID NO: 142918 - DNA, 22 bp, synthetic construct
  misc_feature 1..22: note = chemically synthesized
  source 1..22: mol_type = other DNA
ctgaaggcggcagataactggt

SEQ ID NO: 142919 - DNA, 22 bp, synthetic construct
  misc_feature 1..22: note = chemically synthesized
  source 1..22: mol_type = other DNA
aaggcggcagataactggttgg

SEQ ID NO: 142920 - DNA, 22 bp, synthetic construct
  misc_feature 1..22: note = chemically synthesized
  source 1..22: mol_type = other DNA
gttggtgaattcttattcattc

SEQ ID NO: 142921 - DNA, 22 bp, synthetic construct
  misc_feature 1..22: note = chemically synthesized
  source 1..22: mol_type = other DNA
gtgaattcttattcattctgca

SEQ ID NO: 142922 - DNA, 22 bp, synthetic construct
  misc_feature 1..22: note = chemically synthesized
  source 1..22: mol_type = other DNA
ttattcattctgcaattctgta

SEQ ID NO: 142923 - DNA, 22 bp, synthetic construct
  misc_feature 1..22: note = chemically synthesized
  source 1..22: mol_type = other DNA
attcattctgcaattctgtatc

SEQ ID NO: 142924 - DNA, 22 bp, synthetic construct
  misc_feature 1..22: note = chemically synthesized
  source 1..22: mol_type = other DNA
ttcattctgcaattctgtatct

SEQ ID NO: 142925 - DNA, 22 bp, synthetic construct
  misc_feature 1..22: note = chemically synthesized
  source 1..22: mol_type = other DNA
attctgcaattctgtatctttt

SEQ ID NO: 142926 - DNA, 22 bp, synthetic construct
  misc_feature 1..22: note = chemically synthesized
  source 1..22: mol_type = other DNA
tgcaattctgtatcttttaagt

SEQ ID NO: 142927 - DNA, 22 bp, synthetic construct
  misc_feature 1..22: note = chemically synthesized
  source 1..22: mol_type = other DNA
caattctgtatcttttaagtgg

SEQ ID NO: 142928 - DNA, 22 bp, synthetic construct
  misc_feature 1..22: note = chemically synthesized
  source 1..22: mol_type = other DNA
tgtatcttttaagtggagcatt

SEQ ID NO: 142929 - DNA, 22 bp, synthetic construct
  misc_feature 1..22: note = chemically synthesized
  source 1..22: mol_type = other DNA
tatcttttaagtggagcattta

SEQ ID NO: 142930 - DNA, 22 bp, synthetic construct
  misc_feature 1..22: note = chemically synthesized
  source 1..22: mol_type = other DNA
ttaagtggagcatttagtccat

SEQ ID NO: 142931 - DNA, 22 bp, synthetic construct
  misc_feature 1..22: note = chemically synthesized
  source 1..22: mol_type = other DNA
taagtggagcatttagtccatt

SEQ ID NO: 142932 - DNA, 22 bp, synthetic construct
  misc_feature 1..22: note = chemically synthesized
  source 1..22: mol_type = other DNA
aagtggagcatttagtccattt

SEQ ID NO: 142933 - DNA, 22 bp, synthetic construct
  misc_feature 1..22: note = chemically synthesized
  source 1..22: mol_type = other DNA
agtggagcatttagtccattta

SEQ ID NO: 142934 - DNA, 22 bp, synthetic construct
  misc_feature 1..22: note = chemically synthesized
  source 1..22: mol_type = other DNA
agtccatttacattcaacatca

SEQ ID NO: 142935 - DNA, 22 bp, synthetic construct
  misc_feature 1..22: note = chemically synthesized
  source 1..22: mol_type = other DNA
gtccatttacattcaacatcag

SEQ ID NO: 142936 - DNA, 22 bp, synthetic construct
  misc_feature 1..22: note = chemically synthesized
  source 1..22: mol_type = other DNA
acattcaacatcagtattgagg

SEQ ID NO: 142937 - DNA, 22 bp, synthetic construct
  misc_feature 1..22: note = chemically synthesized
  source 1..22: mol_type = other DNA
cattcaacatcagtattgaggt

SEQ ID NO: 142938 - DNA, 22 bp, synthetic construct
  misc_feature 1..22: note = chemically synthesized
  source 1..22: mol_type = other DNA
aacatcagtattgaggtgtgag

SEQ ID NO: 142939 - DNA, 22 bp, synthetic construct
  misc_feature 1..22: note = chemically synthesized
  source 1..22: mol_type = other DNA
aggtgtgaggtactattccatt

SEQ ID NO: 142940 - DNA, 22 bp, synthetic construct
  misc_feature 1..22: note = chemically synthesized
  source 1..22: mol_type = other DNA
ttccattcttcgtggtatttgt

SEQ ID NO: 142941 - DNA, 22 bp, synthetic construct
  misc_feature 1..22: note = chemically synthesized
  source 1..22: mol_type = other DNA
cattcttcgtggtatttgttgc

SEQ ID NO: 142942 - DNA, 22 bp, synthetic construct
  misc_feature 1..22: note = chemically synthesized
  source 1..22: mol_type = other DNA
ttcgtggtatttgttgcctgtg

SEQ ID NO: 142943 - DNA, 22 bp, synthetic construct
  misc_feature 1..22: note = chemically synthesized
  source 1..22: mol_type = other DNA
cgtggtatttgttgcctgtgta

SEQ ID NO: 142944 - DNA, 22 bp, synthetic construct
  misc_feature 1..22: note = chemically synthesized
  source 1..22: mol_type = other DNA
gtggtatttgttgcctgtgtat

SEQ ID NO: 142945 - DNA, 22 bp, synthetic construct
  misc_feature 1..22: note = chemically synthesized
  source 1..22: mol_type = other DNA
gttgcctgtgtatctttttatc

SEQ ID NO: 142946 - DNA, 22 bp, synthetic construct
  misc_feature 1..22: note = chemically synthesized
  source 1..22: mol_type = other DNA
ttgcctgtgtatctttttatct

SEQ ID NO: 142947 - DNA, 22 bp, synthetic construct
  misc_feature 1..22: note = chemically synthesized
  source 1..22: mol_type = other DNA
cctgtgtatctttttatctgta

SEQ ID NO: 142948 - DNA, 22 bp, synthetic construct
  misc_feature 1..22: note = chemically synthesized
  source 1..22: mol_type = other DNA
tgtatctttttatctgtatttt

SEQ ID NO: 142949 - DNA, 22 bp, synthetic construct
  misc_feature 1..22: note = chemically synthesized
  source 1..22: mol_type = other DNA
tttatctgtatttttgttgtat

SEQ ID NO: 142950 - DNA, 22 bp, synthetic construct
  misc_feature 1..22: note = chemically synthesized
  source 1..22: mol_type = other DNA
ttatctgtatttttgttgtata

SEQ ID NO: 142951 - DNA, 22 bp, synthetic construct
  misc_feature 1..22: note = chemically synthesized
  source 1..22: mol_type = other DNA
tatctgtatttttgttgtatat

SEQ ID NO: 142952 - DNA, 22 bp, synthetic construct
  misc_feature 1..22: note = chemically synthesized
  source 1..22: mol_type = other DNA
atctgtatttttgttgtatatg

SEQ ID NO: 142953 - DNA, 22 bp, synthetic construct
  misc_feature 1..22: note = chemically synthesized
  source 1..22: mol_type = other DNA
tctgtatttttgttgtatatgt

SEQ ID NO: 142954 - DNA, 22 bp, synthetic construct
  misc_feature 1..22: note = chemically synthesized
  source 1..22: mol_type = other DNA
tatttttgttgtatatgtccta

SEQ ID NO: 142955 - DNA, 22 bp, synthetic construct
  misc_feature 1..22: note = chemically synthesized
  source 1..22: mol_type = other DNA
ttgttgtatatgtcctatggga

SEQ ID NO: 142956 - DNA, 22 bp, synthetic construct
  misc_feature 1..22: note = chemically synthesized
  source 1..22: mol_type = other DNA
tgttgtatatgtcctatgggat

SEQ ID NO: 142957 - DNA, 22 bp, synthetic construct
  misc_feature 1..22: note = chemically synthesized
  source 1..22: mol_type = other DNA
gttgtatatgtcctatgggatt

SEQ ID NO: 142958 - DNA, 22 bp, synthetic construct
  misc_feature 1..22: note = chemically synthesized
  source 1..22: mol_type = other DNA
ttgtatatgtcctatgggattt

SEQ ID NO: 142959 - DNA, 22 bp, synthetic construct
  misc_feature 1..22: note = chemically synthesized
  source 1..22: mol_type = other DNA
tatatgtcctatgggatttatg

SEQ ID NO: 142960 - DNA, 22 bp, synthetic construct
  misc_feature 1..22: note = chemically synthesized
  source 1..22: mol_type = other DNA
tgggatttatgctttaaagagg

SEQ ID NO: 142961 - DNA, 22 bp, synthetic construct
  misc_feature 1..22: note = chemically synthesized
  source 1..22: mol_type = other DNA
atgctttaaagaggttctgttt

SEQ ID NO: 142962 - DNA, 22 bp, synthetic construct
  misc_feature 1..22: note = chemically synthesized
  source 1..22: mol_type = other DNA
tgctttaaagaggttctgtttt

SEQ ID NO: 142963 - DNA, 22 bp, synthetic construct
  misc_feature 1..22: note = chemically synthesized
  source 1..22: mol_type = other DNA
taaagaggttctgttttgatgt

SEQ ID NO: 142964 - DNA, 22 bp, synthetic construct
  misc_feature 1..22: note = chemically synthesized
  source 1..22: mol_type = other DNA
aaagaggttctgttttgatgtg

SEQ ID NO: 142965 - DNA, 22 bp, synthetic construct
  misc_feature 1..22: note = chemically synthesized
  source 1..22: mol_type = other DNA
aagaggttctgttttgatgtgc

SEQ ID NO: 142966 - DNA, 22 bp, synthetic construct
  misc_feature 1..22: note = chemically synthesized
  source 1..22: mol_type = other DNA
tgttttgatgtgcttccagggt

SEQ ID NO: 142967 - DNA, 22 bp, synthetic construct
  misc_feature 1..22: note = chemically synthesized
  source 1..22: mol_type = other DNA
ttttgatgtgcttccagggttt

SEQ ID NO: 142968 - DNA, 22 bp, synthetic construct
  misc_feature 1..22: note = chemically synthesized
  source 1..22: mol_type = other DNA
tgatgtgcttccagggtttatt

SEQ ID NO: 142969 - DNA, 22 bp, synthetic construct
  misc_feature 1..22: note = chemically synthesized
  source 1..22: mol_type = other DNA
gatgtgcttccagggtttattt

SEQ ID NO: 142970 - DNA, 22 bp, synthetic construct
  misc_feature 1..22: note = chemically synthesized
  source 1..22: mol_type = other DNA
atgtgcttccagggtttatttc

SEQ ID NO: 142971 - DNA, 22 bp, synthetic construct
  misc_feature 1..22: note = chemically synthesized
  source 1..22: mol_type = other DNA
ccagggtttatttcaagattta

SEQ ID NO: 142972 - DNA, 22 bp, synthetic construct
  misc_feature 1..22: note = chemically synthesized
  source 1..22: mol_type = other DNA
cagggtttatttcaagatttag

SEQ ID NO: 142973 - DNA, 22 bp, synthetic construct
  misc_feature 1..22: note = chemically synthesized
  source 1..22: mol_type = other DNA
atttcaagatttagagctcctt

SEQ ID NO: 142974 - DNA, 22 bp, synthetic construct
  misc_feature 1..22: note = chemically synthesized
  source 1..22: mol_type = other DNA
tttcaagatttagagctccttt

SEQ ID NO: 142975 - DNA, 22 bp, synthetic construct
  misc_feature 1..22: note = chemically synthesized
  source 1..22: mol_type = other DNA
caagatttagagctccttttat

SEQ ID NO: 142976 - DNA, 22 bp, synthetic construct
  misc_feature 1..22: note = chemically synthesized
  source 1..22: mol_type = other DNA
aagatttagagctccttttatc

SEQ ID NO: 142977 - DNA, 22 bp, synthetic construct
  misc_feature 1..22: note = chemically synthesized
  source 1..22: mol_type = other DNA
agagctccttttatcagttctt

SEQ ID NO: 142978 - DNA, 22 bp, synthetic construct
  misc_feature 1..22: note = chemically synthesized
  source 1..22: mol_type = other DNA
gagctccttttatcagttcttg

SEQ ID NO: 142979 - DNA, 22 bp, synthetic construct
  misc_feature 1..22: note = chemically synthesized
  source 1..22: mol_type = other DNA
cttttatcagttcttgtagtgt

SEQ ID NO: 142980 - DNA, 22 bp, synthetic construct
  misc_feature 1..22: note = chemically synthesized
  source 1..22: mol_type = other DNA
ttatcagttcttgtagtgttgg

SEQ ID NO: 142981 - DNA, 22 bp, synthetic construct
  misc_feature 1..22: note = chemically synthesized
  source 1..22: mol_type = other DNA
tatcagttcttgtagtgttggc

SEQ ID NO: 142982 - DNA, 22 bp, synthetic construct
  misc_feature 1..22: note = chemically synthesized
  source 1..22: mol_type = other DNA
atcagttcttgtagtgttggct

SEQ ID NO: 142983 - DNA, 22 bp, synthetic construct
  misc_feature 1..22: note = chemically synthesized
  source 1..22: mol_type = other DNA
tcagttcttgtagtgttggctt

SEQ ID NO: 142984 - DNA, 22 bp, synthetic construct
  misc_feature 1..22: note = chemically synthesized
  source 1..22: mol_type = other DNA
ttgtagtgttggcttggtagtg

SEQ ID NO: 142985 - DNA, 22 bp, synthetic construct
  misc_feature 1..22: note = chemically synthesized
  source 1..22: mol_type = other DNA
gtagtgttggcttggtagtgcc

SEQ ID NO: 142986 - DNA, 22 bp, synthetic construct
  misc_feature 1..22: note = chemically synthesized
  source 1..22: mol_type = other DNA
tagtgttggcttggtagtgccg

SEQ ID NO: 142987 - DNA, 22 bp, synthetic construct
  misc_feature 1..22: note = chemically synthesized
  source 1..22: mol_type = other DNA
gcttggtagtgccgaattctct

SEQ ID NO: 142988 - DNA, 22 bp, synthetic construct
  misc_feature 1..22: note = chemically synthesized
  source 1..22: mol_type = other DNA
ggtagtgccgaattctctcagc

SEQ ID NO: 142989 - DNA, 22 bp, synthetic construct
  misc_feature 1..22: note = chemically synthesized
  source 1..22: mol_type = other DNA
gtagtgccgaattctctcagca

SEQ ID NO: 142990 - DNA, 22 bp, synthetic construct
  misc_feature 1..22: note = chemically synthesized
  source 1..22: mol_type = other DNA
tctcagcatttgtttttctgaa

SEQ ID NO: 142991 - DNA, 22 bp, synthetic construct
  misc_feature 1..22: note = chemically synthesized
  source 1..22: mol_type = other DNA
tcagcatttgtttttctgaaaa

SEQ ID NO: 142992 - DNA, 22 bp, synthetic construct
  misc_feature 1..22: note = chemically synthesized
  source 1..22: mol_type = other DNA
agcatttgtttttctgaaaaac

SEQ ID NO: 142993 - DNA, 22 bp, synthetic construct
  misc_feature 1..22: note = chemically synthesized
  source 1..22: mol_type = other DNA
gtttttctgaaaaacactgtgt

SEQ ID NO: 142994 - DNA, 22 bp, synthetic construct
  misc_feature 1..22: note = chemically synthesized
  source 1..22: mol_type = other DNA
tttttctgaaaaacactgtgta

SEQ ID NO: 142995 - DNA, 22 bp, synthetic construct
  misc_feature 1..22: note = chemically synthesized
  source 1..22: mol_type = other DNA
ttctgaaaaacactgtgtattt

SEQ ID NO: 142996 - DNA, 22 bp, synthetic construct
  misc_feature 1..22: note = chemically synthesized
  source 1..22: mol_type = other DNA
tctgaaaaacactgtgtatttt

SEQ ID NO: 142997 - DNA, 22 bp, synthetic construct
  misc_feature 1..22: note = chemically synthesized
  source 1..22: mol_type = other DNA
ctgaaaaacactgtgtattttc

SEQ ID NO: 142998 - DNA, 22 bp, synthetic construct
  misc_feature 1..22: note = chemically synthesized
  source 1..22: mol_type = other DNA
tgaaaaacactgtgtattttct

SEQ ID NO: 142999 - DNA, 22 bp, synthetic construct
  misc_feature 1..22: note = chemically synthesized
  source 1..22: mol_type = other DNA
aaaaacactgtgtattttcttc

SEQ ID NO: 143000 - DNA, 22 bp, synthetic construct
  misc_feature 1..22: note = chemically synthesized
  source 1..22: mol_type = other DNA
tgtattttcttcatttgtgaag

SEQ ID NO: 143001 - DNA, 22 bp, synthetic construct
  misc_feature 1..22: note = chemically synthesized
  source 1..22: mol_type = other DNA
tcttcatttgtgaagcttagtt

SEQ ID NO: 143002 - DNA, 22 bp, synthetic construct
  misc_feature 1..22: note = chemically synthesized
  source 1..22: mol_type = other DNA
cttcatttgtgaagcttagttt

SEQ ID NO: 143003 - DNA, 22 bp, synthetic construct
  misc_feature 1..22: note = chemically synthesized
  source 1..22: mol_type = other DNA
ttcatttgtgaagcttagtttc

SEQ ID NO: 143004 - DNA, 22 bp, synthetic construct
  misc_feature 1..22: note = chemically synthesized
  source 1..22: mol_type = other DNA
catttgtgaagcttagtttcac

SEQ ID NO: 143005 - DNA, 22 bp, synthetic construct
  misc_feature 1..22: note = chemically synthesized
  source 1..22: mol_type = other DNA
atttgtgaagcttagtttcact

SEQ ID NO: 143006 - DNA, 22 bp, synthetic construct
  misc_feature 1..22: note = chemically synthesized
  source 1..22: mol_type = other DNA
gtgaagcttagtttcactggat

SEQ ID NO: 143007 - DNA, 22 bp, synthetic construct
  misc_feature 1..22: note = chemically synthesized
  source 1..22: mol_type = other DNA
tgaagcttagtttcactggata

SEQ ID NO: 143008 - DNA, 22 bp, synthetic construct
  misc_feature 1..22: note = chemically synthesized
  source 1..22: mol_type = other DNA
agtttcactggatataaaattc

SEQ ID NO: 143009 - DNA, 22 bp, synthetic construct
  misc_feature 1..22: note = chemically synthesized
  source 1..22: mol_type = other DNA
gtttcactggatataaaattct

SEQ ID NO: 143010 - DNA, 22 bp, synthetic construct
  misc_feature 1..22: note = chemically synthesized
  source 1..22: mol_type = other DNA
cactggatataaaattcttggc

SEQ ID NO: 143011 - DNA, 22 bp, synthetic construct
  misc_feature 1..22: note = chemically synthesized
  source 1..22: mol_type = other DNA
actggatataaaattcttggct

SEQ ID NO: 143012 - DNA, 22 bp, synthetic construct
  misc_feature 1..22: note = chemically synthesized
  source 1..22: mol_type = other DNA
gatataaaattcttggctgata

SEQ ID NO: 143013 - DNA, 22 bp, synthetic construct
  misc_feature 1..22: note = chemically synthesized
  source 1..22: mol_type = other DNA
ttggctgataattgttttgttt

SEQ ID NO: 143014 - DNA, 22 bp, synthetic construct
  misc_feature 1..22: note = chemically synthesized
  source 1..22: mol_type = other DNA
ggctgataattgttttgtttaa

SEQ ID NO: 143015 - DNA, 22 bp, synthetic construct
  misc_feature 1..22: note = chemically synthesized
  source 1..22: mol_type = other DNA
gctgataattgttttgtttaag

SEQ ID NO: 143016 - DNA, 22 bp, synthetic construct
  misc_feature 1..22: note = chemically synthesized
  source 1..22: mol_type = other DNA
ataattgttttgtttaagaagg

SEQ ID NO: 143017 - DNA, 22 bp, synthetic construct
  misc_feature 1..22: note = chemically synthesized
  source 1..22: mol_type = other DNA
ttttgtttaagaaggctgaaga

SEQ ID NO: 143018 - DNA, 22 bp, synthetic construct
  misc_feature 1..22: note = chemically synthesized
  source 1..22: mol_type = other DNA
tgtttaagaaggctgaagatag

SEQ ID NO: 143019 - DNA, 22 bp, synthetic construct
  misc_feature 1..22: note = chemically synthesized
  source 1..22: mol_type = other DNA
gtttaagaaggctgaagatagg

SEQ ID NO: 143020 - DNA, 22 bp, synthetic construct
  misc_feature 1..22: note = chemically synthesized
  source 1..22: mol_type = other DNA
tttaagaaggctgaagataggg

SEQ ID NO: 143021 - DNA, 22 bp, synthetic construct
  misc_feature 1..22: note = chemically synthesized
  source 1..22: mol_type = other DNA
aagaaggctgaagatagggcca

SEQ ID NO: 143022 - DNA, 22 bp, synthetic construct
  misc_feature 1..22: note = chemically synthesized
  source 1..22: mol_type = other DNA
agaaggctgaagatagggccat

SEQ ID NO: 143023 - DNA, 22 bp, synthetic construct
  misc_feature 1..22: note = chemically synthesized
  source 1..22: mol_type = other DNA
aagatagggccatattcacttc

SEQ ID NO: 143024 - DNA, 22 bp, synthetic construct
  misc_feature 1..22: note = chemically synthesized
  source 1..22: mol_type = other DNA
acttctagcttttacggtttct

SEQ ID NO: 143025 - DNA, 22 bp, synthetic construct
  misc_feature 1..22: note = chemically synthesized
  source 1..22: mol_type = other DNA
ctagcttttacggtttctgctg

SEQ ID NO: 143026 - DNA, 22 bp, synthetic construct
  misc_feature 1..22: note = chemically synthesized
  source 1..22: mol_type = other DNA
tagcttttacggtttctgctga

SEQ ID NO: 143027 - DNA, 22 bp, synthetic construct
  misc_feature 1..22: note = chemically synthesized
  source 1..22: mol_type = other DNA
gcttttacggtttctgctgaga

SEQ ID NO: 143028 - DNA, 22 bp, synthetic construct
  misc_feature 1..22: note = chemically synthesized
  source 1..22: mol_type = other DNA
ttacggtttctgctgagaaatc

SEQ ID NO: 143029 - DNA, 22 bp, synthetic construct
  misc_feature 1..22: note = chemically synthesized
  source 1..22: mol_type = other DNA
tacggtttctgctgagaaatct

SEQ ID NO: 143030 - DNA, 22 bp, synthetic construct
  misc_feature 1..22: note = chemically synthesized
  source 1..22: mol_type = other DNA
acggtttctgctgagaaatctg

SEQ ID NO: 143031 - DNA, 22 bp, synthetic construct
  misc_feature 1..22: note = chemically synthesized
  source 1..22: mol_type = other DNA
cggtttctgctgagaaatctgc

SEQ ID NO: 143032 - DNA, 22 bp, synthetic construct
  misc_feature 1..22: note = chemically synthesized
  source 1..22: mol_type = other DNA
ctgctgagaaatctgctgttaa

SEQ ID NO: 143033 - DNA, 22 bp, synthetic construct
  misc_feature 1..22: note = chemically synthesized
  source 1..22: mol_type = other DNA
tgctgagaaatctgctgttaat

SEQ ID NO: 143034 - DNA, 22 bp, synthetic construct
  misc_feature 1..22: note = chemically synthesized
  source 1..22: mol_type = other DNA
ctgagaaatctgctgttaatct

SEQ ID NO: 143035 - DNA, 22 bp, synthetic construct
  misc_feature 1..22: note = chemically synthesized
  source 1..22: mol_type = other DNA
agaaatctgctgttaatctgat

SEQ ID NO: 143036 - DNA, 22 bp, synthetic construct
  misc_feature 1..22: note = chemically synthesized
  source 1..22: mol_type = other DNA
ctgttaatctgataggttttct

SEQ ID NO: 143037 - DNA, 22 bp, synthetic construct
  misc_feature 1..22: note = chemically synthesized
  source 1..22: mol_type = other DNA
ttaatctgataggttttctttc

SEQ ID NO: 143038 - DNA, 22 bp, synthetic construct
  misc_feature 1..22: note = chemically synthesized
  source 1..22: mol_type = other DNA
atctgataggttttctttcata

SEQ ID NO: 143039 - DNA, 22 bp, synthetic construct
  misc_feature 1..22: note = chemically synthesized
  source 1..22: mol_type = other DNA
ataggttttctttcataggtta

SEQ ID NO: 143040 - DNA, 22 bp, synthetic construct
  misc_feature 1..22: note = chemically synthesized
  source 1..22: mol_type = other DNA
tctttcataggttacctggtag

SEQ ID NO: 143041 - DNA, 22 bp, synthetic construct
  misc_feature 1..22: note = chemically synthesized
  source 1..22: mol_type = other DNA
ctttcataggttacctggtagt

SEQ ID NO: 143042 - DNA, 22 bp, synthetic construct
  misc_feature 1..22: note = chemically synthesized
  source 1..22: mol_type = other DNA
tttcataggttacctggtagtt

SEQ ID NO: 143043 - DNA, 22 bp, synthetic construct
  misc_feature 1..22: note = chemically synthesized
  source 1..22: mol_type = other DNA
tcataggttacctggtagtttc

SEQ ID NO: 143044 - DNA, 22 bp, synthetic construct
  misc_feature 1..22: note = chemically synthesized
  source 1..22: mol_type = other DNA
cataggttacctggtagtttca

SEQ ID NO: 143045 - DNA, 22 bp, synthetic construct
  misc_feature 1..22: note = chemically synthesized
  source 1..22: mol_type = other DNA
ataggttacctggtagtttcac

SEQ ID NO: 143046 - DNA, 22 bp, synthetic construct
  misc_feature 1..22: note = chemically synthesized
  source 1..22: mol_type = other DNA
cctggtagtttcacctcacagc

SEQ ID NO: 143047 - DNA, 22 bp, synthetic construct
  misc_feature 1..22: note = chemically synthesized
  source 1..22: mol_type = other DNA
gtagtttcacctcacagctctt

SEQ ID NO: 143048 - DNA, 22 bp, synthetic construct
  misc_feature 1..22: note = chemically synthesized
  source 1..22: mol_type = other DNA
cacctcacagctcttaagattc

SEQ ID NO: 143049 - DNA, 22 bp, synthetic construct
  misc_feature 1..22: note = chemically synthesized
  source 1..22: mol_type = other DNA
acctcacagctcttaagattct

SEQ ID NO: 143050 - DNA, 22 bp, synthetic construct
  misc_feature 1..22: note = chemically synthesized
  source 1..22: mol_type = other DNA
acagctcttaagattctctttg

SEQ ID NO: 143051 - DNA, 22 bp, synthetic construct
  misc_feature 1..22: note = chemically synthesized
  source 1..22: mol_type = other DNA
ttaagattctctttgtctttag

SEQ ID NO: 143052 - DNA, 22 bp, synthetic construct
  misc_feature 1..22: note = chemically synthesized
  source 1..22: mol_type = other DNA
aagattctctttgtctttagat

SEQ ID NO: 143053 - DNA, 22 bp, synthetic construct
  misc_feature 1..22: note = chemically synthesized
  source 1..22: mol_type = other DNA
agattctctttgtctttagata

SEQ ID NO: 143054 - DNA, 22 bp, synthetic construct
  misc_feature 1..22: note = chemically synthesized
  source 1..22: mol_type = other DNA
tctttgtctttagataactttg

SEQ ID NO: 143055 - DNA, 22 bp, synthetic construct
  misc_feature 1..22: note = chemically synthesized
  source 1..22: mol_type = other DNA
tttgtctttagataactttgga

SEQ ID NO: 143056 - DNA, 22 bp, synthetic construct
  misc_feature 1..22: note = chemically synthesized
  source 1..22: mol_type = other DNA
tgtctttagataactttggata

SEQ ID NO: 143057 - DNA, 22 bp, synthetic construct
  misc_feature 1..22: note = chemically synthesized
  source 1..22: mol_type = other DNA
gtctttagataactttggatac

SEQ ID NO: 143058 - DNA, 22 bp, synthetic construct
  misc_feature 1..22: note = chemically synthesized
  source 1..22: mol_type = other DNA
tctttagataactttggatact

SEQ ID NO: 143059 - DNA, 22 bp, synthetic construct
  misc_feature 1..22: note = chemically synthesized
  source 1..22: mol_type = other DNA
tagataactttggatactctga

SEQ ID NO: 143060 - DNA, 22 bp, synthetic construct
  misc_feature 1..22: note = chemically synthesized
  source 1..22: mol_type = other DNA
agataactttggatactctgat

SEQ ID NO: 143061 - DNA, 22 bp, synthetic construct
  misc_feature 1..22: note = chemically synthesized
  source 1..22: mol_type = other DNA
gataactttggatactctgatg

SEQ ID NO: 143062 - DNA, 22 bp, synthetic construct
  misc_feature 1..22: note = chemically synthesized
  source 1..22: mol_type = other DNA
tggatactctgatgacaatgta

SEQ ID NO: 143063 - DNA, 22 bp, synthetic construct
  misc_feature 1..22: note = chemically synthesized
  source 1..22: mol_type = other DNA
ggatactctgatgacaatgtac

SEQ ID NO: 143064 - DNA, 22 bp, synthetic construct
  misc_feature 1..22: note = chemically synthesized
  source 1..22: mol_type = other DNA
gatactctgatgacaatgtacc

SEQ ID NO: 143065 - DNA, 22 bp, synthetic construct
  misc_feature 1..22: note = chemically synthesized
  source 1..22: mol_type = other DNA
tgatgacaatgtacctaggcaa

SEQ ID NO: 143066 - DNA, 22 bp, synthetic construct
  misc_feature 1..22: note = chemically synthesized
  source 1..22: mol_type = other DNA
atgacaatgtacctaggcaatg

SEQ ID NO: 143067 - DNA, 22 bp, synthetic construct
  misc_feature 1..22: note = chemically synthesized
  source 1..22: mol_type = other DNA
ggcaatgatatttttgcaatga

SEQ ID NO: 143068 - DNA, 22 bp, synthetic construct
  misc_feature 1..22: note = chemically synthesized
  source 1..22: mol_type = other DNA
ttgcaatgaatttcccaggtgt

SEQ ID NO: 143069 - DNA, 22 bp, synthetic construct
  misc_feature 1..22: note = chemically synthesized
  source 1..22: mol_type = other DNA
tgcaatgaatttcccaggtgtt

SEQ ID NO: 143070 - DNA, 22 bp, synthetic construct
  misc_feature 1..22: note = chemically synthesized
  source 1..22: mol_type = other DNA
gcaatgaatttcccaggtgttt

SEQ ID NO: 143071 - DNA, 22 bp, synthetic construct
  misc_feature 1..22: note = chemically synthesized
  source 1..22: mol_type = other DNA
caatgaatttcccaggtgttta

SEQ ID NO: 143072 - DNA, 22 bp, synthetic construct
  misc_feature 1..22: note = chemically synthesized
  source 1..22: mol_type = other DNA
cccaggtgtttattgagcttct

SEQ ID NO: 143073 - DNA, 22 bp, synthetic construct
  misc_feature 1..22: note = chemically synthesized
  source 1..22: mol_type = other DNA
ccaggtgtttattgagcttctt

SEQ ID NO: 143074 - DNA, 22 bp, synthetic construct
  misc_feature 1..22: note = chemically synthesized
  source 1..22: mol_type = other DNA
attgagcttcttgtatttggat

SEQ ID NO: 143075 - DNA, 22 bp, synthetic construct
  misc_feature 1..22: note = chemically synthesized
  source 1..22: mol_type = other DNA
ttgagcttcttgtatttggata

SEQ ID NO: 143076 - DNA, 22 bp, synthetic construct
  misc_feature 1..22: note = chemically synthesized
  source 1..22: mol_type = other DNA
agcttcttgtatttggatatct

SEQ ID NO: 143077 - DNA, 22 bp, synthetic construct
  misc_feature 1..22: note = chemically synthesized
  source 1..22: mol_type = other DNA
cttgtatttggatatctaggtc

SEQ ID NO: 143078 - DNA, 22 bp, synthetic construct
  misc_feature 1..22: note = chemically synthesized
  source 1..22: mol_type = other DNA
ttgtatttggatatctaggtct

SEQ ID NO: 143079 - DNA, 22 bp, synthetic construct
  misc_feature 1..22: note = chemically synthesized
  source 1..22: mol_type = other DNA
gtatttggatatctaggtctct

SEQ ID NO: 143080 - DNA, 22 bp, synthetic construct
  misc_feature 1..22: note = chemically synthesized
  source 1..22: mol_type = other DNA
tatttggatatctaggtctcta

SEQ ID NO: 143081 - DNA, 22 bp, synthetic construct
  misc_feature 1..22: note = chemically synthesized
  source 1..22: mol_type = other DNA
ggatatctaggtctctagcaag

SEQ ID NO: 143082 - DNA, 22 bp, synthetic construct
  misc_feature 1..22: note = chemically synthesized
  source 1..22: mol_type = other DNA
gatatctaggtctctagcaagg

SEQ ID NO: 143083 - DNA, 22 bp, synthetic construct
  misc_feature 1..22: note = chemically synthesized
  source 1..22: mol_type = other DNA
ggtctctagcaaggtgggggaa

SEQ ID NO: 143084 - DNA, 22 bp, synthetic construct
  misc_feature 1..22: note = chemically synthesized
  source 1..22: mol_type = other DNA
tagcaaggtgggggaagttttc

SEQ ID NO: 143085 - DNA, 22 bp, synthetic construct
  misc_feature 1..22: note = chemically synthesized
  source 1..22: mol_type = other DNA
gcaaggtgggggaagttttcct

SEQ ID NO: 143086 - DNA, 22 bp, synthetic construct
  misc_feature 1..22: note = chemically synthesized
  source 1..22: mol_type = other DNA
tccttgattatttccctggata

SEQ ID NO: 143087 - DNA, 22 bp, synthetic construct
  misc_feature 1..22: note = chemically synthesized
  source 1..22: mol_type = other DNA
ccttgattatttccctggataa

SEQ ID NO: 143088 - DNA, 22 bp, synthetic construct
  misc_feature 1..22: note = chemically synthesized
  source 1..22: mol_type = other DNA
cttgattatttccctggataag

SEQ ID NO: 143089 - DNA, 22 bp, synthetic construct
  misc_feature 1..22: note = chemically synthesized
  source 1..22: mol_type = other DNA
gattatttccctggataagttt

SEQ ID NO: 143090 - DNA, 22 bp, synthetic construct
  misc_feature 1..22: note = chemically synthesized
  source 1..22: mol_type = other DNA
attatttccctggataagtttt

SEQ ID NO: 143091 - DNA, 22 bp, synthetic construct
  misc_feature 1..22: note = chemically synthesized
  source 1..22: mol_type = other DNA
tttccctggataagttttccaa

SEQ ID NO: 143092 - DNA, 22 bp, synthetic construct
  misc_feature 1..22: note = chemically synthesized
  source 1..22: mol_type = other DNA
ccctggataagttttccaaact

SEQ ID NO: 143093 - DNA, 22 bp, synthetic construct
  misc_feature 1..22: note = chemically synthesized
  source 1..22: mol_type = other DNA
cctggataagttttccaaactt

SEQ ID NO: 143094 - DNA, 22 bp, synthetic construct
  misc_feature 1..22: note = chemically synthesized
  source 1..22: mol_type = other DNA
gataagttttccaaacttttag

SEQ ID NO: 143095 - DNA, 22 bp, synthetic construct
  misc_feature 1..22: note = chemically synthesized
  source 1..22: mol_type = other DNA
tccaaacttttagatttctctt

SEQ ID NO: 143096 - DNA, 22 bp, synthetic construct
  misc_feature 1..22: note = chemically synthesized
  source 1..22: mol_type = other DNA
ccaaacttttagatttctcttc

SEQ ID NO: 143097 - DNA, 22 bp, synthetic construct
  misc_feature 1..22: note = chemically synthesized
  source 1..22: mol_type = other DNA
caaacttttagatttctcttct

SEQ ID NO: 143098 - DNA, 22 bp, synthetic construct
  misc_feature 1..22: note = chemically synthesized
  source 1..22: mol_type = other DNA
ttagatttctcttctttctcag

SEQ ID NO: 143099 - DNA, 22 bp, synthetic construct
  misc_feature 1..22: note = chemically synthesized
  source 1..22: mol_type = other DNA
tagatttctcttctttctcagg

SEQ ID NO: 143100 - DNA, 22 bp, synthetic construct
  misc_feature 1..22: note = chemically synthesized
  source 1..22: mol_type = other DNA
agatttctcttctttctcagga

SEQ ID NO: 143101 - DNA, 22 bp, synthetic construct
  misc_feature 1..22: note = chemically synthesized
  source 1..22: mol_type = other DNA
gatttctcttctttctcaggaa

SEQ ID NO: 143102 - DNA, 22 bp, synthetic construct
  misc_feature 1..22: note = chemically synthesized
  source 1..22: mol_type = other DNA
ctcttctttctcaggaatgctg

SEQ ID NO: 143103 - DNA, 22 bp, synthetic construct
  misc_feature 1..22: note = chemically synthesized
  source 1..22: mol_type = other DNA
tcttctttctcaggaatgctga

SEQ ID NO: 143104 - DNA, 22 bp, synthetic construct
  misc_feature 1..22: note = chemically synthesized
  source 1..22: mol_type = other DNA
ttctttctcaggaatgctgatt

SEQ ID NO: 143105 - DNA, 22 bp, synthetic construct
  misc_feature 1..22: note = chemically synthesized
  source 1..22: mol_type = other DNA
ctttctcaggaatgctgattat

SEQ ID NO: 143106 - DNA, 22 bp, synthetic construct
  misc_feature 1..22: note = chemically synthesized
  source 1..22: mol_type = other DNA
tttctcaggaatgctgattatt

SEQ ID NO: 143107 - DNA, 22 bp, synthetic construct
  misc_feature 1..22: note = chemically synthesized
  source 1..22: mol_type = other DNA
tctcaggaatgctgattattct

SEQ ID NO: 143108 - DNA, 22 bp, synthetic construct
  misc_feature 1..22: note = chemically synthesized
  source 1..22: mol_type = other DNA
ctcaggaatgctgattattctt

SEQ ID NO: 143109 - DNA, 22 bp, synthetic construct
  misc_feature 1..22: note = chemically synthesized
  source 1..22: mol_type = other DNA
tcaggaatgctgattattctta

SEQ ID NO: 143110 - DNA, 22 bp, synthetic construct
  misc_feature 1..22: note = chemically synthesized
  source 1..22: mol_type = other DNA
aggaatgctgattattcttagg

SEQ ID NO: 143111 - DNA, 22 bp, synthetic construct
  misc_feature 1..22: note = chemically synthesized
  source 1..22: mol_type = other DNA
attattcttaggtttgattgtt

SEQ ID NO: 143112 - DNA, 22 bp, synthetic construct
  misc_feature 1..22: note = chemically synthesized
  source 1..22: mol_type = other DNA
ttcttaggtttgattgtttaac

SEQ ID NO: 143113 - DNA, 22 bp, synthetic construct
  misc_feature 1..22: note = chemically synthesized
  source 1..22: mol_type = other DNA
ttaggtttgattgtttaacata

SEQ ID NO: 143114 - DNA, 22 bp, synthetic construct
  misc_feature 1..22: note = chemically synthesized
  source 1..22: mol_type = other DNA
aggtttgattgtttaacataat

SEQ ID NO: 143115 - DNA, 22 bp, synthetic construct
  misc_feature 1..22: note = chemically synthesized
  source 1..22: mol_type = other DNA
ggtttgattgtttaacataatc

SEQ ID NO: 143116 - DNA, 22 bp, synthetic construct
  misc_feature 1..22: note = chemically synthesized
  source 1..22: mol_type = other DNA
gattgtttaacataatcccaga

SEQ ID NO: 143117 - DNA, 22 bp, synthetic construct
  misc_feature 1..22: note = chemically synthesized
  source 1..22: mol_type = other DNA
attgtttaacataatcccagat

SEQ ID NO: 143118 - DNA, 22 bp, synthetic construct
  misc_feature 1..22: note = chemically synthesized
  source 1..22: mol_type = other DNA
tttaacataatcccagatttct

SEQ ID NO: 143119 - DNA, 22 bp, synthetic construct
  misc_feature 1..22: note = chemically synthesized
  source 1..22: mol_type = other DNA
aacataatcccagatttcttgg

SEQ ID NO: 143120 - DNA, 22 bp, synthetic construct
  misc_feature 1..22: note = chemically synthesized
  source 1..22: mol_type = other DNA
acataatcccagatttcttgga

SEQ ID NO: 143121 - DNA, 22 bp, synthetic construct
  misc_feature 1..22: note = chemically synthesized
  source 1..22: mol_type = other DNA
cttggaggctttgttcatattt

SEQ ID NO: 143122 - DNA, 22 bp, synthetic construct
  misc_feature 1..22: note = chemically synthesized
  source 1..22: mol_type = other DNA
ttggaggctttgttcatatttt

SEQ ID NO: 143123 - DNA, 22 bp, synthetic construct
  misc_feature 1..22: note = chemically synthesized
  source 1..22: mol_type = other DNA
ggaggctttgttcatattttct

SEQ ID NO: 143124 - DNA, 22 bp, synthetic construct
  misc_feature 1..22: note = chemically synthesized
  source 1..22: mol_type = other DNA
gaggctttgttcatattttctt

SEQ ID NO: 143125 - DNA, 22 bp, synthetic construct
  misc_feature 1..22: note = chemically synthesized
  source 1..22: mol_type = other DNA
tgttcatattttcttattcttt

SEQ ID NO: 143126 - DNA, 22 bp, synthetic construct
  misc_feature 1..22: note = chemically synthesized
  source 1..22: mol_type = other DNA
gttcatattttcttattctttt

SEQ ID NO: 143127 - DNA, 22 bp, synthetic construct
  misc_feature 1..22: note = chemically synthesized
  source 1..22: mol_type = other DNA
ttcatattttcttattcttttt

SEQ ID NO: 143128 - DNA, 22 bp, synthetic construct
  misc_feature 1..22: note = chemically synthesized
  source 1..22: mol_type = other DNA
atattttcttattcttttttct

SEQ ID NO: 143129 - DNA, 22 bp, synthetic construct
  misc_feature 1..22: note = chemically synthesized
  source 1..22: mol_type = other DNA
tcttattcttttttctttgtct

SEQ ID NO: 143130 - DNA, 22 bp, synthetic construct
  misc_feature 1..22: note = chemically synthesized
  source 1..22: mol_type = other DNA
cttattcttttttctttgtctt

SEQ ID NO: 143131 - DNA, 22 bp, synthetic construct
  misc_feature 1..22: note = chemically synthesized
  source 1..22: mol_type = other DNA
ttattcttttttctttgtcttt

SEQ ID NO: 143132 - DNA, 22 bp, synthetic construct
  misc_feature 1..22: note = chemically synthesized
  source 1..22: mol_type = other DNA
attcttttttctttgtctttgt

SEQ ID NO: 143133 - DNA, 22 bp, synthetic construct
  misc_feature 1..22: note = chemically synthesized
  source 1..22: mol_type = other DNA
ttcttttttctttgtctttgtt

SEQ ID NO: 143134 - DNA, 22 bp, synthetic construct
  misc_feature 1..22: note = chemically synthesized
  source 1..22: mol_type = other DNA
ttttttctttgtctttgttgga

SEQ ID NO: 143135 - DNA, 22 bp, synthetic construct
  misc_feature 1..22: note = chemically synthesized
  source 1..22: mol_type = other DNA
ttttctttgtctttgttggatt

SEQ ID NO: 143136 - DNA, 22 bp, synthetic construct
  misc_feature 1..22: note = chemically synthesized
  source 1..22: mol_type = other DNA
tttctttgtctttgttggattg

SEQ ID NO: 143137 - DNA, 22 bp, synthetic construct
  misc_feature 1..22: note = chemically synthesized
  source 1..22: mol_type = other DNA
ttctttgtctttgttggattgg

SEQ ID NO: 143138 - DNA, 22 bp, synthetic construct
  misc_feature 1..22: note = chemically synthesized
  source 1..22: mol_type = other DNA
tctttgtctttgttggattggg

SEQ ID NO: 143139 - DNA, 22 bp, synthetic construct
  misc_feature 1..22: note = chemically synthesized
  source 1..22: mol_type = other DNA
ctttgtctttgttggattgggt

SEQ ID NO: 143140 - DNA, 22 bp, synthetic construct
  misc_feature 1..22: note = chemically synthesized
  source 1..22: mol_type = other DNA
tttgtctttgttggattgggtt

SEQ ID NO: 143141 - DNA, 22 bp, synthetic construct
  misc_feature 1..22: note = chemically synthesized
  source 1..22: mol_type = other DNA
tgtctttgttggattgggttaa

SEQ ID NO: 143142 - DNA, 22 bp, synthetic construct
  misc_feature 1..22: note = chemically synthesized
  source 1..22: mol_type = other DNA
gtctttgttggattgggttaat

SEQ ID NO: 143143 - DNA, 22 bp, synthetic construct
  misc_feature 1..22: note = chemically synthesized
  source 1..22: mol_type = other DNA
tctttgttggattgggttaatt

SEQ ID NO: 143144 - DNA, 22 bp, synthetic construct
  misc_feature 1..22: note = chemically synthesized
  source 1..22: mol_type = other DNA
tgttggattgggttaattcaaa

SEQ ID NO: 143145 - DNA, 22 bp, synthetic construct
  misc_feature 1..22: note = chemically synthesized
  source 1..22: mol_type = other DNA
gttggattgggttaattcaaaa

SEQ ID NO: 143146 - DNA, 22 bp, synthetic construct
  misc_feature 1..22: note = chemically synthesized
  source 1..22: mol_type = other DNA
ttggattgggttaattcaaaaa

SEQ ID NO: 143147 - DNA, 22 bp, synthetic construct
  misc_feature 1..22: note = chemically synthesized
  source 1..22: mol_type = other DNA
gattgggttaattcaaaaactt

SEQ ID NO: 143148 - DNA, 22 bp, synthetic construct
  misc_feature 1..22: note = chemically synthesized
  source 1..22: mol_type = other DNA
ggttaattcaaaaactttgtct

SEQ ID NO: 143149 - DNA, 22 bp, synthetic construct
  misc_feature 1..22: note = chemically synthesized
  source 1..22: mol_type = other DNA
attcaaaaactttgtcttcaag

SEQ ID NO: 143150 - DNA, 22 bp, synthetic construct
  misc_feature 1..22: note = chemically synthesized
  source 1..22: mol_type = other DNA
aaaaactttgtcttcaagctct

SEQ ID NO: 143151 - DNA, 22 bp, synthetic construct
  misc_feature 1..22: note = chemically synthesized
  source 1..22: mol_type = other DNA
tgtcttcaagctctgaatttct

SEQ ID NO: 143152 - DNA, 22 bp, synthetic construct
  misc_feature 1..22: note = chemically synthesized
  source 1..22: mol_type = other DNA
gtcttcaagctctgaatttctt

SEQ ID NO: 143153 - DNA, 22 bp, synthetic construct
  misc_feature 1..22: note = chemically synthesized
  source 1..22: mol_type = other DNA
tcttcaagctctgaatttcttc

SEQ ID NO: 143154 - DNA, 22 bp, synthetic construct
  misc_feature 1..22: note = chemically synthesized
  source 1..22: mol_type = other DNA
caagctctgaatttcttctgct

SEQ ID NO: 143155 - DNA, 22 bp, synthetic construct
  misc_feature 1..22: note = chemically synthesized
  source 1..22: mol_type = other DNA
aagctctgaatttcttctgctt

SEQ ID NO: 143156 - DNA, 22 bp, synthetic construct
  misc_feature 1..22: note = chemically synthesized
  source 1..22: mol_type = other DNA
tgaatttcttctgcttggattc

SEQ ID NO: 143157 - DNA, 22 bp, synthetic construct
  misc_feature 1..22: note = chemically synthesized
  source 1..22: mol_type = other DNA
aatttcttctgcttggattcta

SEQ ID NO: 143158 - DNA, 22 bp, synthetic construct
  misc_feature 1..22: note = chemically synthesized
  source 1..22: mol_type = other DNA
cttctgcttggattctattgct

SEQ ID NO: 143159 - DNA, 22 bp, synthetic construct
  misc_feature 1..22: note = chemically synthesized
  source 1..22: mol_type = other DNA
ttctgcttggattctattgctg

SEQ ID NO: 143160 - DNA, 22 bp, synthetic construct
  misc_feature 1..22: note = chemically synthesized
  source 1..22: mol_type = other DNA
ctgcttggattctattgctgag

SEQ ID NO: 143161 - DNA, 22 bp, synthetic construct
  misc_feature 1..22: note = chemically synthesized
  source 1..22: mol_type = other DNA
tgcttggattctattgctgaga

SEQ ID NO: 143162 - DNA, 22 bp, synthetic construct
  misc_feature 1..22: note = chemically synthesized
  source 1..22: mol_type = other DNA
cttggattctattgctgagact

SEQ ID NO: 143163 - DNA, 22 bp, synthetic construct
  misc_feature 1..22: note = chemically synthesized
  source 1..22: mol_type = other DNA
ggattctattgctgagactttc

SEQ ID NO: 143164 - DNA, 22 bp, synthetic construct
  misc_feature 1..22: note = chemically synthesized
  source 1..22: mol_type = other DNA
gattctattgctgagactttct

SEQ ID NO: 143165 - DNA, 22 bp, synthetic construct
  misc_feature 1..22: note = chemically synthesized
  source 1..22: mol_type = other DNA
tattgctgagactttctagagc

SEQ ID NO: 143166 - DNA, 22 bp, synthetic construct
  misc_feature 1..22: note = chemically synthesized
  source 1..22: mol_type = other DNA
ttgctgagactttctagagcat

SEQ ID NO: 143167 - DNA, 22 bp, synthetic construct
  misc_feature 1..22: note = chemically synthesized
  source 1..22: mol_type = other DNA
ctgagactttctagagcatttt

SEQ ID NO: 143168 - DNA, 22 bp, synthetic construct
  misc_feature 1..22: note = chemically synthesized
  source 1..22: mol_type = other DNA
agactttctagagcattttgca

SEQ ID NO: 143169 - DNA, 22 bp, synthetic construct
  misc_feature 1..22: note = chemically synthesized
  source 1..22: mol_type = other DNA
tctagagcattttgcatttcta

SEQ ID NO: 143170 - DNA, 22 bp, synthetic construct
  misc_feature 1..22: note = chemically synthesized
  source 1..22: mol_type = other DNA
ctagagcattttgcatttctat

SEQ ID NO: 143171 - DNA, 22 bp, synthetic construct
  misc_feature 1..22: note = chemically synthesized
  source 1..22: mol_type = other DNA
tagagcattttgcatttctata

SEQ ID NO: 143172 - DNA, 22 bp, synthetic construct
  misc_feature 1..22: note = chemically synthesized
  source 1..22: mol_type = other DNA
gagcattttgcatttctataag

SEQ ID NO: 143173 - DNA, 22 bp, synthetic construct
  misc_feature 1..22: note = chemically synthesized
  source 1..22: mol_type = other DNA
tgcatttctataagtgcatcca

SEQ ID NO: 143174 - DNA, 22 bp, synthetic construct
  misc_feature 1..22: note = chemically synthesized
  source 1..22: mol_type = other DNA
gcatttctataagtgcatccat

SEQ ID NO: 143175 - DNA, 22 bp, synthetic construct
  misc_feature 1..22: note = chemically synthesized
  source 1..22: mol_type = other DNA
catttctataagtgcatccatt

SEQ ID NO: 143176 - DNA, 22 bp, synthetic construct
  misc_feature 1..22: note = chemically synthesized
  source 1..22: mol_type = other DNA
ctataagtgcatccattcatcc

SEQ ID NO: 143177 - DNA, 22 bp, synthetic construct
  misc_feature 1..22: note = chemically synthesized
  source 1..22: mol_type = other DNA
tataagtgcatccattcatcca

SEQ ID NO: 143178 - DNA, 22 bp, synthetic construct
  misc_feature 1..22: note = chemically synthesized
  source 1..22: mol_type = other DNA
taagtgcatccattcatccatt

SEQ ID NO: 143179 - DNA, 22 bp, synthetic construct
  misc_feature 1..22: note = chemically synthesized
  source 1..22: mol_type = other DNA
atccattgtttcctgaagtttt

SEQ ID NO: 143180 - DNA, 22 bp, synthetic construct
  misc_feature 1..22: note = chemically synthesized
  source 1..22: mol_type = other DNA
tttcctgaagttttgaatgttt

SEQ ID NO: 143181 - DNA, 22 bp, synthetic construct
  misc_feature 1..22: note = chemically synthesized
  source 1..22: mol_type = other DNA
cctgaagttttgaatgtttttt

SEQ ID NO: 143182 - DNA, 22 bp, synthetic construct
  misc_feature 1..22: note = chemically synthesized
  source 1..22: mol_type = other DNA
ctgaagttttgaatgtttttta

SEQ ID NO: 143183 - DNA, 22 bp, synthetic construct
  misc_feature 1..22: note = chemically synthesized
  source 1..22: mol_type = other DNA
aagttttgaatgttttttattt

SEQ ID NO: 143184 - DNA, 22 bp, synthetic construct
  misc_feature 1..22: note = chemically synthesized
  source 1..22: mol_type = other DNA
tgaatgttttttatttatgcta

SEQ ID NO: 143185 - DNA, 22 bp, synthetic construct
  misc_feature 1..22: note = chemically synthesized
  source 1..22: mol_type = other DNA
gaatgttttttatttatgctat

SEQ ID NO: 143186 - DNA, 22 bp, synthetic construct
  misc_feature 1..22: note = chemically synthesized
  source 1..22: mol_type = other DNA
aatgttttttatttatgctatc

SEQ ID NO: 143187 - DNA, 22 bp, synthetic construct
  misc_feature 1..22: note = chemically synthesized
  source 1..22: mol_type = other DNA
tttatttatgctatctctttaa

SEQ ID NO: 143188 - DNA, 22 bp, synthetic construct
  misc_feature 1..22: note = chemically synthesized
  source 1..22: mol_type = other DNA
ttatttatgctatctctttaac

SEQ ID NO: 143189 - DNA, 22 bp, synthetic construct
  misc_feature 1..22: note = chemically synthesized
  source 1..22: mol_type = other DNA
tatttatgctatctctttaact

SEQ ID NO: 143190 - DNA, 22 bp, synthetic construct
  misc_feature 1..22: note = chemically synthesized
  source 1..22: mol_type = other DNA
atttatgctatctctttaactg

SEQ ID NO: 143191 - DNA, 22 bp, synthetic construct
  misc_feature 1..22: note = chemically synthesized
  source 1..22: mol_type = other DNA
tttatgctatctctttaactga

SEQ ID NO: 143192 - DNA, 22 bp, synthetic construct
  misc_feature 1..22: note = chemically synthesized
  source 1..22: mol_type = other DNA
atgctatctctttaactgaaga

SEQ ID NO: 143193 - DNA, 22 bp, synthetic construct
  misc_feature 1..22: note = chemically synthesized
  source 1..22: mol_type = other DNA
tgctatctctttaactgaagat

SEQ ID NO: 143194 - DNA, 22 bp, synthetic construct
  misc_feature 1..22: note = chemically synthesized
  source 1..22: mol_type = other DNA
tctctttaactgaagatttctc

SEQ ID NO: 143195 - DNA, 22 bp, synthetic construct
  misc_feature 1..22: note = chemically synthesized
  source 1..22: mol_type = other DNA
tttaactgaagatttctcccct

SEQ ID NO: 143196 - DNA, 22 bp, synthetic construct
  misc_feature 1..22: note = chemically synthesized
  source 1..22: mol_type = other DNA
taactgaagatttctcccctca

SEQ ID NO: 143197 - DNA, 22 bp, synthetic construct
  misc_feature 1..22: note = chemically synthesized
  source 1..22: mol_type = other DNA
aactgaagatttctcccctcat

SEQ ID NO: 143198 - DNA, 22 bp, synthetic construct
  misc_feature 1..22: note = chemically synthesized
  source 1..22: mol_type = other DNA
actgaagatttctcccctcatt

SEQ ID NO: 143199 - DNA, 22 bp, synthetic construct
  misc_feature 1..22: note = chemically synthesized
  source 1..22: mol_type = other DNA
aagatttctcccctcatttctt

SEQ ID NO: 143200 - DNA, 22 bp, synthetic construct
  misc_feature 1..22: note = chemically synthesized
  source 1..22: mol_type = other DNA
ctcccctcatttcttgtatcat

SEQ ID NO: 143201 - DNA, 22 bp, synthetic construct
  misc_feature 1..22: note = chemically synthesized
  source 1..22: mol_type = other DNA
tcccctcatttcttgtatcata

SEQ ID NO: 143202 - DNA, 22 bp, synthetic construct
  misc_feature 1..22: note = chemically synthesized
  source 1..22: mol_type = other DNA
ccctcatttcttgtatcatatt

SEQ ID NO: 143203 - DNA, 22 bp, synthetic construct
  misc_feature 1..22: note = chemically synthesized
  source 1..22: mol_type = other DNA
atttcttgtatcatatttttgg

SEQ ID NO: 143204 - DNA, 22 bp, synthetic construct
  misc_feature 1..22: note = chemically synthesized
  source 1..22: mol_type = other DNA
cttgtatcatatttttggtttt

SEQ ID NO: 143205 - DNA, 22 bp, synthetic construct
  misc_feature 1..22: note = chemically synthesized
  source 1..22: mol_type = other DNA
ttgtatcatatttttggttttt

SEQ ID NO: 143206 - DNA, 22 bp, synthetic construct
  misc_feature 1..22: note = chemically synthesized
  source 1..22: mol_type = other DNA
gtatcatatttttggttttttt

SEQ ID NO: 143207 - DNA, 22 bp, synthetic construct
  misc_feature 1..22: note = chemically synthesized
  source 1..22: mol_type = other DNA
tatcatatttttggttttttta

SEQ ID NO: 143208 - DNA, 22 bp, synthetic construct
  misc_feature 1..22: note = chemically synthesized
  source 1..22: mol_type = other DNA
ttggtttttttaaaattggact

SEQ ID NO: 143209 - DNA, 22 bp, synthetic construct
  misc_feature 1..22: note = chemically synthesized
  source 1..22: mol_type = other DNA
tggtttttttaaaattggactt

SEQ ID NO: 143210 - DNA, 22 bp, synthetic construct
  misc_feature 1..22: note = chemically synthesized
  source 1..22: mol_type = other DNA
ggtttttttaaaattggacttc

SEQ ID NO: 143211 - DNA, 22 bp, synthetic construct
  misc_feature 1..22: note = chemically synthesized
  source 1..22: mol_type = other DNA
gtttttttaaaattggacttca

SEQ ID NO: 143212 - DNA, 22 bp, synthetic construct
  misc_feature 1..22: note = chemically synthesized
  source 1..22: mol_type = other DNA
ttttaaaattggacttcacctt

SEQ ID NO: 143213 - DNA, 22 bp, synthetic construct
  misc_feature 1..22: note = chemically synthesized
  source 1..22: mol_type = other DNA
tttaaaattggacttcaccttc

SEQ ID NO: 143214 - DNA, 22 bp, synthetic construct
  misc_feature 1..22: note = chemically synthesized
  source 1..22: mol_type = other DNA
ttaaaattggacttcaccttcc

SEQ ID NO: 143215 - DNA, 22 bp, synthetic construct
  misc_feature 1..22: note = chemically synthesized
  source 1..22: mol_type = other DNA
taaaattggacttcaccttcct

SEQ ID NO: 143216 - DNA, 22 bp, synthetic construct
  misc_feature 1..22: note = chemically synthesized
  source 1..22: mol_type = other DNA
aaaattggacttcaccttcctc

SEQ ID NO: 143217 - DNA, 22 bp, synthetic construct
  misc_feature 1..22: note = chemically synthesized
  source 1..22: mol_type = other DNA
aaattggacttcaccttcctcg

SEQ ID NO: 143218 - DNA, 22 bp, synthetic construct
  misc_feature 1..22: note = chemically synthesized
  source 1..22: mol_type = other DNA
gacttcaccttcctcggatgcc

SEQ ID NO: 143219 - DNA, 22 bp, synthetic construct
  misc_feature 1..22: note = chemically synthesized
  source 1..22: mol_type = other DNA
caccttcctcggatgcctcctt

SEQ ID NO: 143220 - DNA, 22 bp, synthetic construct
  misc_feature 1..22: note = chemically synthesized
  source 1..22: mol_type = other DNA
accttcctcggatgcctccttg

SEQ ID NO: 143221 - DNA, 22 bp, synthetic construct
  misc_feature 1..22: note = chemically synthesized
  source 1..22: mol_type = other DNA
cctcggatgcctccttgattag

SEQ ID NO: 143222 - DNA, 22 bp, synthetic construct
  misc_feature 1..22: note = chemically synthesized
  source 1..22: mol_type = other DNA
ctcggatgcctccttgattagc

SEQ ID NO: 143223 - DNA, 22 bp, synthetic construct
  misc_feature 1..22: note = chemically synthesized
  source 1..22: mol_type = other DNA
ggatgcctccttgattagctta

SEQ ID NO: 143224 - DNA, 22 bp, synthetic construct
  misc_feature 1..22: note = chemically synthesized
  source 1..22: mol_type = other DNA
cttgattagcttaataactgac

SEQ ID NO: 143225 - DNA, 22 bp, synthetic construct
  misc_feature 1..22: note = chemically synthesized
  source 1..22: mol_type = other DNA
gattagcttaataactgacctt

SEQ ID NO: 143226 - DNA, 22 bp, synthetic construct
  misc_feature 1..22: note = chemically synthesized
  source 1..22: mol_type = other DNA
attagcttaataactgaccttc

SEQ ID NO: 143227 - DNA, 22 bp, synthetic construct
  misc_feature 1..22: note = chemically synthesized
  source 1..22: mol_type = other DNA
gcttaataactgaccttctgaa

SEQ ID NO: 143228 - DNA, 22 bp, synthetic construct
  misc_feature 1..22: note = chemically synthesized
  source 1..22: mol_type = other DNA
aataactgaccttctgaattat

SEQ ID NO: 143229 - DNA, 22 bp, synthetic construct
  misc_feature 1..22: note = chemically synthesized
  source 1..22: mol_type = other DNA
ataactgaccttctgaattatt

SEQ ID NO: 143230 - DNA, 22 bp, synthetic construct
  misc_feature 1..22: note = chemically synthesized
  source 1..22: mol_type = other DNA
accttctgaattatttttcagg

SEQ ID NO: 143231 - DNA, 22 bp, synthetic construct
  misc_feature 1..22: note = chemically synthesized
  source 1..22: mol_type = other DNA
ctgaattatttttcaggtaaat

SEQ ID NO: 143232 - DNA, 22 bp, synthetic construct
  misc_feature 1..22: note = chemically synthesized
  source 1..22: mol_type = other DNA
tgaattatttttcaggtaaatc

SEQ ID NO: 143233 - DNA, 22 bp, synthetic construct
  misc_feature 1..22: note = chemically synthesized
  source 1..22: mol_type = other DNA
aattatttttcaggtaaatcag

SEQ ID NO: 143234 - DNA, 22 bp, synthetic construct
  misc_feature 1..22: note = chemically synthesized
  source 1..22: mol_type = other DNA
tttttcaggtaaatcagggatt

SEQ ID NO: 143235 - DNA, 22 bp, synthetic construct
  misc_feature 1..22: note = chemically synthesized
  source 1..22: mol_type = other DNA
ttcaggtaaatcagggatttct

SEQ ID NO: 143236 - DNA, 22 bp, synthetic construct
  misc_feature 1..22: note = chemically synthesized
  source 1..22: mol_type = other DNA
tcaggtaaatcagggatttctt

SEQ ID NO: 143237 - DNA, 22 bp, synthetic construct
  misc_feature 1..22: note = chemically synthesized
  source 1..22: mol_type = other DNA
caggtaaatcagggatttcttc

SEQ ID NO: 143238 - DNA, 22 bp, synthetic construct
  misc_feature 1..22: note = chemically synthesized
  source 1..22: mol_type = other DNA
aggtaaatcagggatttcttct

SEQ ID NO: 143239 - DNA, 22 bp, synthetic construct
  misc_feature 1..22: note = chemically synthesized
  source 1..22: mol_type = other DNA
cttcttggtttggatgcattgc

SEQ ID NO: 143240 - DNA, 22 bp, synthetic construct
  misc_feature 1..22: note = chemically synthesized
  source 1..22: mol_type = other DNA
ttcttggtttggatgcattgct

SEQ ID NO: 143241 - DNA, 22 bp, synthetic construct
  misc_feature 1..22: note = chemically synthesized
  source 1..22: mol_type = other DNA
cttggtttggatgcattgctgg

SEQ ID NO: 143242 - DNA, 22 bp, synthetic construct
  misc_feature 1..22: note = chemically synthesized
  source 1..22: mol_type = other DNA
ttggtttggatgcattgctggt

SEQ ID NO: 143243 - DNA, 22 bp, synthetic construct
  misc_feature 1..22: note = chemically synthesized
  source 1..22: mol_type = other DNA
ggtttggatgcattgctggtga

SEQ ID NO: 143244 - DNA, 22 bp, synthetic construct
  misc_feature 1..22: note = chemically synthesized
  source 1..22: mol_type = other DNA
gtttggatgcattgctggtgag

SEQ ID NO: 143245 - DNA, 22 bp, synthetic construct
  misc_feature 1..22: note = chemically synthesized
  source 1..22: mol_type = other DNA
ggatgcattgctggtgagctag

SEQ ID NO: 143246 - DNA, 22 bp, synthetic construct
  misc_feature 1..22: note = chemically synthesized
  source 1..22: mol_type = other DNA
gatgcattgctggtgagctagt

SEQ ID NO: 143247 - DNA, 22 bp, synthetic construct
  misc_feature 1..22: note = chemically synthesized
  source 1..22: mol_type = other DNA
ctggtgagctagtatgattttt

SEQ ID NO: 143248 - DNA, 22 bp, synthetic construct
  misc_feature 1..22: note = chemically synthesized
  source 1..22: mol_type = other DNA
gtgagctagtatgattttttgg

SEQ ID NO: 143249 - DNA, 22 bp, synthetic construct
  misc_feature 1..22: note = chemically synthesized
  source 1..22: mol_type = other DNA
gtatgattttttggggggtgtt

SEQ ID NO: 143250 - DNA, 22 bp, synthetic construct
  misc_feature 1..22: note = chemically synthesized
  source 1..22: mol_type = other DNA
tttggggggtgttaaagaacct

SEQ ID NO: 143251 - DNA, 22 bp, synthetic construct
  misc_feature 1..22: note = chemically synthesized
  source 1..22: mol_type = other DNA
ttggggggtgttaaagaacctt

SEQ ID NO: 143252 - DNA, 22 bp, synthetic construct
  misc_feature 1..22: note = chemically synthesized
  source 1..22: mol_type = other DNA
tggggggtgttaaagaaccttg

SEQ ID NO: 143253 - DNA, 22 bp, synthetic construct
  misc_feature 1..22: note = chemically synthesized
  source 1..22: mol_type = other DNA
ggggggtgttaaagaaccttgt

SEQ ID NO: 143254 - DNA, 22 bp, synthetic construct
  misc_feature 1..22: note = chemically synthesized
  source 1..22: mol_type = other DNA
gggggtgttaaagaaccttgtt

SEQ ID NO: 143255 - DNA, 22 bp, synthetic construct
  misc_feature 1..22: note = chemically synthesized
  source 1..22: mol_type = other DNA
aagaaccttgtttttcatatta

SEQ ID NO: 143256 - DNA, 22 bp, synthetic construct
  misc_feature 1..22: note = chemically synthesized
  source 1..22: mol_type = other DNA
gtttttcatattaccagagtta

SEQ ID NO: 143257 - DNA, 22 bp, synthetic construct
  misc_feature 1..22: note = chemically synthesized
  source 1..22: mol_type = other DNA
tttttcatattaccagagttag

SEQ ID NO: 143258 - DNA, 22 bp, synthetic construct
  misc_feature 1..22: note = chemically synthesized
  source 1..22: mol_type = other DNA
ttcatattaccagagttagttt

SEQ ID NO: 143259 - DNA, 22 bp, synthetic construct
  misc_feature 1..22: note = chemically synthesized
  source 1..22: mol_type = other DNA
tcatattaccagagttagtttt

SEQ ID NO: 143260 - DNA, 22 bp, synthetic construct
  misc_feature 1..22: note = chemically synthesized
  source 1..22: mol_type = other DNA
catattaccagagttagttttc

SEQ ID NO: 143261 - DNA, 22 bp, synthetic construct
  misc_feature 1..22: note = chemically synthesized
  source 1..22: mol_type = other DNA
atattaccagagttagttttct

SEQ ID NO: 143262 - DNA, 22 bp, synthetic construct
  misc_feature 1..22: note = chemically synthesized
  source 1..22: mol_type = other DNA
ccagagttagttttctggttcc

SEQ ID NO: 143263 - DNA, 22 bp, synthetic construct
  misc_feature 1..22: note = chemically synthesized
  source 1..22: mol_type = other DNA
gttttctggttccttctcactt

SEQ ID NO: 143264 - DNA, 22 bp, synthetic construct
  misc_feature 1..22: note = chemically synthesized
  source 1..22: mol_type = other DNA
tctggttccttctcacttgggt

SEQ ID NO: 143265 - DNA, 22 bp, synthetic construct
  misc_feature 1..22: note = chemically synthesized
  source 1..22: mol_type = other DNA
ctggttccttctcacttgggta

SEQ ID NO: 143266 - DNA, 22 bp, synthetic construct
  misc_feature 1..22: note = chemically synthesized
  source 1..22: mol_type = other DNA
tggttccttctcacttgggtag

SEQ ID NO: 143267 - DNA, 22 bp, synthetic construct
  misc_feature 1..22: note = chemically synthesized
  source 1..22: mol_type = other DNA
gttccttctcacttgggtaggc

SEQ ID NO: 143268 - DNA, 22 bp, synthetic construct
  misc_feature 1..22: note = chemically synthesized
  source 1..22: mol_type = other DNA
cttctcacttgggtaggctctg

SEQ ID NO: 143269 - DNA, 22 bp, synthetic construct
  misc_feature 1..22: note = chemically synthesized
  source 1..22: mol_type = other DNA
ctcacttgggtaggctctgtca

SEQ ID NO: 143270 - DNA, 22 bp, synthetic construct
  misc_feature 1..22: note = chemically synthesized
  source 1..22: mol_type = other DNA
tcacttgggtaggctctgtcag

SEQ ID NO: 143271 - DNA, 22 bp, synthetic construct
  misc_feature 1..22: note = chemically synthesized
  source 1..22: mol_type = other DNA
acttgggtaggctctgtcagag

SEQ ID NO: 143272 - DNA, 22 bp, synthetic construct
  misc_feature 1..22: note = chemically synthesized
  source 1..22: mol_type = other DNA
gggtaggctctgtcagagggaa

SEQ ID NO: 143273 - DNA, 22 bp, synthetic construct
  misc_feature 1..22: note = chemically synthesized
  source 1..22: mol_type = other DNA
ggtaggctctgtcagagggaaa

SEQ ID NO: 143274 - DNA, 22 bp, synthetic construct
  misc_feature 1..22: note = chemically synthesized
  source 1..22: mol_type = other DNA
tgtcagagggaaagtctaggcc

SEQ ID NO: 143275 - DNA, 22 bp, synthetic construct
  misc_feature 1..22: note = chemically synthesized
  source 1..22: mol_type = other DNA
tcagagggaaagtctaggcctc

SEQ ID NO: 143276 - DNA, 22 bp, synthetic construct
  misc_feature 1..22: note = chemically synthesized
  source 1..22: mol_type = other DNA
ggcctcaaggctgagacttttg

SEQ ID NO: 143277 - DNA, 22 bp, synthetic construct
  misc_feature 1..22: note = chemically synthesized
  source 1..22: mol_type = other DNA
aaggctgagacttttgtcccat

SEQ ID NO: 143278 - DNA, 22 bp, synthetic construct
  misc_feature 1..22: note = chemically synthesized
  source 1..22: mol_type = other DNA
agacttttgtcccatgaggtgt

SEQ ID NO: 143279 - DNA, 22 bp, synthetic construct
  misc_feature 1..22: note = chemically synthesized
  source 1..22: mol_type = other DNA
ttgtcccatgaggtgttccctt

SEQ ID NO: 143280 - DNA, 22 bp, synthetic construct
  misc_feature 1..22: note = chemically synthesized
  source 1..22: mol_type = other DNA
tgtcccatgaggtgttcccttg

SEQ ID NO: 143281 - DNA, 22 bp, synthetic construct
  misc_feature 1..22: note = chemically synthesized
  source 1..22: mol_type = other DNA
gtcccatgaggtgttcccttga

SEQ ID NO: 143282 - DNA, 22 bp, synthetic construct
  misc_feature 1..22: note = chemically synthesized
  source 1..22: mol_type = other DNA
tcccatgaggtgttcccttgat

SEQ ID NO: 143283 - DNA, 22 bp, synthetic construct
  misc_feature 1..22: note = chemically synthesized
  source 1..22: mol_type = other DNA
ccttgatgtagcacagtccccc

SEQ ID NO: 143284 - DNA, 22 bp, synthetic construct
  misc_feature 1..22: note = chemically synthesized
  source 1..22: mol_type = other DNA
gatgtagcacagtccccctttt

SEQ ID NO: 143285 - DNA, 22 bp, synthetic construct
  misc_feature 1..22: note = chemically synthesized
  source 1..22: mol_type = other DNA
atgtagcacagtcccccttttc

SEQ ID NO: 143286 - DNA, 22 bp, synthetic construct
  misc_feature 1..22: note = chemically synthesized
  source 1..22: mol_type = other DNA
ttcctaggcgtggggcttcctg

SEQ ID NO: 143287 - DNA, 22 bp, synthetic construct
  misc_feature 1..22: note = chemically synthesized
  source 1..22: mol_type = other DNA
tcctaggcgtggggcttcctga

SEQ ID NO: 143288 - DNA, 22 bp, synthetic construct
  misc_feature 1..22: note = chemically synthesized
  source 1..22: mol_type = other DNA
cctaggcgtggggcttcctgag

SEQ ID NO: 143289 - DNA, 22 bp, synthetic construct
  misc_feature 1..22: note = chemically synthesized
  source 1..22: mol_type = other DNA
ctaggcgtggggcttcctgaga

SEQ ID NO: 143290 - DNA, 22 bp, synthetic construct
  misc_feature 1..22: note = chemically synthesized
  source 1..22: mol_type = other DNA
ggcgtggggcttcctgagagcc

SEQ ID NO: 143291 - DNA, 22 bp, synthetic construct
  misc_feature 1..22: note = chemically synthesized
  source 1..22: mol_type = other DNA
cctgagagccgaactgtagtga

SEQ ID NO: 143292 - DNA, 22 bp, synthetic construct
  misc_feature 1..22: note = chemically synthesized
  source 1..22: mol_type = other DNA
ctgagagccgaactgtagtgat

SEQ ID NO: 143293 - DNA, 22 bp, synthetic construct
  misc_feature 1..22: note = chemically synthesized
  source 1..22: mol_type = other DNA
agagccgaactgtagtgattgt

SEQ ID NO: 143294 - DNA, 22 bp, synthetic construct
  misc_feature 1..22: note = chemically synthesized
  source 1..22: mol_type = other DNA
tagtgattgttatctctcttct

SEQ ID NO: 143295 - DNA, 22 bp, synthetic construct
  misc_feature 1..22: note = chemically synthesized
  source 1..22: mol_type = other DNA
ttatctctcttctggatctagc

SEQ ID NO: 143296 - DNA, 22 bp, synthetic construct
  misc_feature 1..22: note = chemically synthesized
  source 1..22: mol_type = other DNA
tctctcttctggatctagccac

SEQ ID NO: 143297 - DNA, 22 bp, synthetic construct
  misc_feature 1..22: note = chemically synthesized
  source 1..22: mol_type = other DNA
tcttctggatctagccacccat

SEQ ID NO: 143298 - DNA, 22 bp, synthetic construct
  misc_feature 1..22: note = chemically synthesized
  source 1..22: mol_type = other DNA
ttctggatctagccacccatca

SEQ ID NO: 143299 - DNA, 22 bp, synthetic construct
  misc_feature 1..22: note = chemically synthesized
  source 1..22: mol_type = other DNA
ctggatctagccacccatcagg

SEQ ID NO: 143300 - DNA, 22 bp, synthetic construct
  misc_feature 1..22: note = chemically synthesized
  source 1..22: mol_type = other DNA
tggatctagccacccatcaggt

SEQ ID NO: 143301 - DNA, 22 bp, synthetic construct
  misc_feature 1..22: note = chemically synthesized
  source 1..22: mol_type = other DNA
gatctagccacccatcaggtct

SEQ ID NO: 143302 - DNA, 22 bp, synthetic construct
  misc_feature 1..22: note = chemically synthesized
  source 1..22: mol_type = other DNA
gccacccatcaggtctaccaga

SEQ ID NO: 143303 - DNA, 22 bp, synthetic construct
  misc_feature 1..22: note = chemically synthesized
  source 1..22: mol_type = other DNA
ccagactccaggctggtactgg

SEQ ID NO: 143304 - DNA, 22 bp, synthetic construct
  misc_feature 1..22: note = chemically synthesized
  source 1..22: mol_type = other DNA
caggctggtactggggtttgtc

SEQ ID NO: 143305 - DNA, 22 bp, synthetic construct
  misc_feature 1..22: note = chemically synthesized
  source 1..22: mol_type = other DNA
gtactggggtttgtctgcacag

SEQ ID NO: 143306 - DNA, 22 bp, synthetic construct
  misc_feature 1..22: note = chemically synthesized
  source 1..22: mol_type = other DNA
gggtttgtctgcacagagtctt

SEQ ID NO: 143307 - DNA, 22 bp, synthetic construct
  misc_feature 1..22: note = chemically synthesized
  source 1..22: mol_type = other DNA
gtctgcacagagtcttgtgacg

SEQ ID NO: 143308 - DNA, 22 bp, synthetic construct
  misc_feature 1..22: note = chemically synthesized
  source 1..22: mol_type = other DNA
tctgcacagagtcttgtgacgt

SEQ ID NO: 143309 - DNA, 22 bp, synthetic construct
  misc_feature 1..22: note = chemically synthesized
  source 1..22: mol_type = other DNA
cacagagtcttgtgacgtgaac

SEQ ID NO: 143310 - DNA, 22 bp, synthetic construct
  misc_feature 1..22: note = chemically synthesized
  source 1..22: mol_type = other DNA
gtgacgtgaaccatctgtgggt

SEQ ID NO: 143311 - DNA, 22 bp, synthetic construct
  misc_feature 1..22: note = chemically synthesized
  source 1..22: mol_type = other DNA
tgacgtgaaccatctgtgggtc

SEQ ID NO: 143312 - DNA, 22 bp, synthetic construct
  misc_feature 1..22: note = chemically synthesized
  source 1..22: mol_type = other DNA
tgggtctctcagccatagatac

SEQ ID NO: 143313 - DNA, 22 bp, synthetic construct
  misc_feature 1..22: note = chemically synthesized
  source 1..22: mol_type = other DNA
tcagccatagatacaaccacct

SEQ ID NO: 143314 - DNA, 22 bp, synthetic construct
  misc_feature 1..22: note = chemically synthesized
  source 1..22: mol_type = other DNA
agccatagatacaaccacctgc

SEQ ID NO: 143315 - DNA, 22 bp, synthetic construct
  misc_feature 1..22: note = chemically synthesized
  source 1..22: mol_type = other DNA
ctccaatggaggtggcagagga

SEQ ID NO: 143316 - DNA, 22 bp, synthetic construct
  misc_feature 1..22: note = chemically synthesized
  source 1..22: mol_type = other DNA
caatggaggtggcagaggatga

SEQ ID NO: 143317 - DNA, 22 bp, synthetic construct
  misc_feature 1..22: note = chemically synthesized
  source 1..22: mol_type = other DNA
tgtgagggtccttacttttggt

SEQ ID NO: 143318 - DNA, 22 bp, synthetic construct
  misc_feature 1..22: note = chemically synthesized
  source 1..22: mol_type = other DNA
tgagggtccttacttttggttg

SEQ ID NO: 143319 - DNA, 22 bp, synthetic construct
  misc_feature 1..22: note = chemically synthesized
  source 1..22: mol_type = other DNA
acttttggttgttcaatgcact

SEQ ID NO: 143320 - DNA, 22 bp, synthetic construct
  misc_feature 1..22: note = chemically synthesized
  source 1..22: mol_type = other DNA
cttttggttgttcaatgcacta

SEQ ID NO: 143321 - DNA, 22 bp, synthetic construct
  misc_feature 1..22: note = chemically synthesized
  source 1..22: mol_type = other DNA
ttggttgttcaatgcactattt

SEQ ID NO: 143322 - DNA, 22 bp, synthetic construct
  misc_feature 1..22: note = chemically synthesized
  source 1..22: mol_type = other DNA
tggttgttcaatgcactatttt

SEQ ID NO: 143323 - DNA, 22 bp, synthetic construct
  misc_feature 1..22: note = chemically synthesized
  source 1..22: mol_type = other DNA
ggttgttcaatgcactattttt

SEQ ID NO: 143324 - DNA, 22 bp, synthetic construct
  misc_feature 1..22: note = chemically synthesized
  source 1..22: mol_type = other DNA
gttgttcaatgcactatttttg

SEQ ID NO: 143325 - DNA, 22 bp, synthetic construct
  misc_feature 1..22: note = chemically synthesized
  source 1..22: mol_type = other DNA
ttcaatgcactatttttgtgct

SEQ ID NO: 143326 - DNA, 22 bp, synthetic construct
  misc_feature 1..22: note = chemically synthesized
  source 1..22: mol_type = other DNA
aatgcactatttttgtgctggt

SEQ ID NO: 143327 - DNA, 22 bp, synthetic construct
  misc_feature 1..22: note = chemically synthesized
  source 1..22: mol_type = other DNA
tttttgtgctggttggcctcct

SEQ ID NO: 143328 - DNA, 22 bp, synthetic construct
  misc_feature 1..22: note = chemically synthesized
  source 1..22: mol_type = other DNA
ttgtgctggttggcctcctgcc

SEQ ID NO: 143329 - DNA, 22 bp, synthetic construct
  misc_feature 1..22: note = chemically synthesized
  source 1..22: mol_type = other DNA
tgtgctggttggcctcctgcca

SEQ ID NO: 143330 - DNA, 22 bp, synthetic construct
  misc_feature 1..22: note = chemically synthesized
  source 1..22: mol_type = other DNA
gtgctggttggcctcctgccag

SEQ ID NO: 143331 - DNA, 22 bp, synthetic construct
  misc_feature 1..22: note = chemically synthesized
  source 1..22: mol_type = other DNA
tgctggttggcctcctgccagg

SEQ ID NO: 143332 - DNA, 22 bp, synthetic construct
  misc_feature 1..22: note = chemically synthesized
  source 1..22: mol_type = other DNA
gttggcctcctgccaggaggtg

SEQ ID NO: 143333 - DNA, 22 bp, synthetic construct
  misc_feature 1..22: note = chemically synthesized
  source 1..22: mol_type = other DNA
gcctcctgccaggaggtggcac

SEQ ID NO: 143334 - DNA, 22 bp, synthetic construct
  misc_feature 1..22: note = chemically synthesized
  source 1..22: mol_type = other DNA
ctgccaggaggtggcactttct

SEQ ID NO: 143335 - DNA, 22 bp, synthetic construct
  misc_feature 1..22: note = chemically synthesized
  source 1..22: mol_type = other DNA
ccaggaggtggcactttctaga

SEQ ID NO: 143336 - DNA, 22 bp, synthetic construct
  misc_feature 1..22: note = chemically synthesized
  source 1..22: mol_type = other DNA
tctagaaagcatcagcagaggc

SEQ ID NO: 143337 - DNA, 22 bp, synthetic construct
  misc_feature 1..22: note = chemically synthesized
  source 1..22: mol_type = other DNA
ctagaaagcatcagcagaggca

SEQ ID NO: 143338 - DNA, 22 bp, synthetic construct
  misc_feature 1..22: note = chemically synthesized
  source 1..22: mol_type = other DNA
tagaaagcatcagcagaggcag

SEQ ID NO: 143339 - DNA, 22 bp, synthetic construct
  misc_feature 1..22: note = chemically synthesized
  source 1..22: mol_type = other DNA
gaaagcatcagcagaggcagtc

SEQ ID NO: 143340 - DNA, 22 bp, synthetic construct
  misc_feature 1..22: note = chemically synthesized
  source 1..22: mol_type = other DNA
ggggggctggggcaccctagaa

SEQ ID NO: 143341 - DNA, 22 bp, synthetic construct
  misc_feature 1..22: note = chemically synthesized
  source 1..22: mol_type = other DNA
gggcaccctagaactcccaaga

SEQ ID NO: 143342 - DNA, 22 bp, synthetic construct
  misc_feature 1..22: note = chemically synthesized
  source 1..22: mol_type = other DNA
gaactcccaagaatatatgccc

SEQ ID NO: 143343 - DNA, 22 bp, synthetic construct
  misc_feature 1..22: note = chemically synthesized
  source 1..22: mol_type = other DNA
ccaagaatatatgccctttgtc

SEQ ID NO: 143344 - DNA, 22 bp, synthetic construct
  misc_feature 1..22: note = chemically synthesized
  source 1..22: mol_type = other DNA
tgtcttcagctaccagggtgag

SEQ ID NO: 143345 - DNA, 22 bp, synthetic construct
  misc_feature 1..22: note = chemically synthesized
  source 1..22: mol_type = other DNA
gtcttcagctaccagggtgagt

SEQ ID NO: 143346 - DNA, 22 bp, synthetic construct
  misc_feature 1..22: note = chemically synthesized
  source 1..22: mol_type = other DNA
tcttcagctaccagggtgagta

SEQ ID NO: 143347 - DNA, 22 bp, synthetic construct
  misc_feature 1..22: note = chemically synthesized
  source 1..22: mol_type = other DNA
cagctaccagggtgagtaagga

SEQ ID NO: 143348 - DNA, 22 bp, synthetic construct
  misc_feature 1..22: note = chemically synthesized
  source 1..22: mol_type = other DNA
agctaccagggtgagtaaggaa

SEQ ID NO: 143349 - DNA, 22 bp, synthetic construct
  misc_feature 1..22: note = chemically synthesized
  source 1..22: mol_type = other DNA
ccagggtgagtaaggaaggacc

SEQ ID NO: 143350 - DNA, 22 bp, synthetic construct
  misc_feature 1..22: note = chemically synthesized
  source 1..22: mol_type = other DNA
gtcgtgtctgagctcagagtct

SEQ ID NO: 143351 - DNA, 22 bp, synthetic construct
  misc_feature 1..22: note = chemically synthesized
  source 1..22: mol_type = other DNA
agctcagagtctccttgggcag

SEQ ID NO: 143352 - DNA, 22 bp, synthetic construct
  misc_feature 1..22: note = chemically synthesized
  source 1..22: mol_type = other DNA
agagtctccttgggcaggtctt

SEQ ID NO: 143353 - DNA, 22 bp, synthetic construct
  misc_feature 1..22: note = chemically synthesized
  source 1..22: mol_type = other DNA
cttgggcaggtctttctgtggc

SEQ ID NO: 143354 - DNA, 22 bp, synthetic construct
  misc_feature 1..22: note = chemically synthesized
  source 1..22: mol_type = other DNA
gggcaggtctttctgtggctac

SEQ ID NO: 143355 - DNA, 22 bp, synthetic construct
  misc_feature 1..22: note = chemically synthesized
  source 1..22: mol_type = other DNA
ggcaggtctttctgtggctact

SEQ ID NO: 143356 - DNA, 22 bp, synthetic construct
  misc_feature 1..22: note = chemically synthesized
  source 1..22: mol_type = other DNA
tctgtggctactgtgggaggat

SEQ ID NO: 143357 - DNA, 22 bp, synthetic construct
  misc_feature 1..22: note = chemically synthesized
  source 1..22: mol_type = other DNA
ctgtggctactgtgggaggatg

SEQ ID NO: 143358 - DNA, 22 bp, synthetic construct
  misc_feature 1..22: note = chemically synthesized
  source 1..22: mol_type = other DNA
tgtggctactgtgggaggatgg

SEQ ID NO: 143359 - DNA, 22 bp, synthetic construct
  misc_feature 1..22: note = chemically synthesized
  source 1..22: mol_type = other DNA
tggctactgtgggaggatgggg

SEQ ID NO: 143360 - DNA, 22 bp, synthetic construct
  misc_feature 1..22: note = chemically synthesized
  source 1..22: mol_type = other DNA
ctgtgggaggatgggggtgtag

SEQ ID NO: 143361 - DNA, 22 bp, synthetic construct
  misc_feature 1..22: note = chemically synthesized
  source 1..22: mol_type = other DNA
tgggaggatgggggtgtagttt

SEQ ID NO: 143362 - DNA, 22 bp, synthetic construct
  misc_feature 1..22: note = chemically synthesized
  source 1..22: mol_type = other DNA
ccaggtcaatggatttatgttc

SEQ ID NO: 143363 - DNA, 22 bp, synthetic construct
  misc_feature 1..22: note = chemically synthesized
  source 1..22: mol_type = other DNA
caggtcaatggatttatgttcc

SEQ ID NO: 143364 - DNA, 22 bp, synthetic construct
  misc_feature 1..22: note = chemically synthesized
  source 1..22: mol_type = other DNA
atgttcctaggacaattatggc

SEQ ID NO: 143365 - DNA, 22 bp, synthetic construct
  misc_feature 1..22: note = chemically synthesized
  source 1..22: mol_type = other DNA
tgttcctaggacaattatggct

SEQ ID NO: 143366 - DNA, 22 bp, synthetic construct
  misc_feature 1..22: note = chemically synthesized
  source 1..22: mol_type = other DNA
ctaggacaattatggctgcctc

SEQ ID NO: 143367 - DNA, 22 bp, synthetic construct
  misc_feature 1..22: note = chemically synthesized
  source 1..22: mol_type = other DNA
ggacaattatggctgcctctgc

SEQ ID NO: 143368 - DNA, 22 bp, synthetic construct
  misc_feature 1..22: note = chemically synthesized
  source 1..22: mol_type = other DNA
tggctgcctctgctgtgtcatg

SEQ ID NO: 143369 - DNA, 22 bp, synthetic construct
  misc_feature 1..22: note = chemically synthesized
  source 1..22: mol_type = other DNA
cctctgctgtgtcatgcaggtc

SEQ ID NO: 143370 - DNA, 22 bp, synthetic construct
  misc_feature 1..22: note = chemically synthesized
  source 1..22: mol_type = other DNA
tgctgtgtcatgcaggtcatca

SEQ ID NO: 143371 - DNA, 22 bp, synthetic construct
  misc_feature 1..22: note = chemically synthesized
  source 1..22: mol_type = other DNA
ctgtgtcatgcaggtcatcagg

SEQ ID NO: 143372 - DNA, 22 bp, synthetic construct
  misc_feature 1..22: note = chemically synthesized
  source 1..22: mol_type = other DNA
tgtcatgcaggtcatcaggaaa

SEQ ID NO: 143373 - DNA, 22 bp, synthetic construct
  misc_feature 1..22: note = chemically synthesized
  source 1..22: mol_type = other DNA
gcccagctcccatgcaactcaa

SEQ ID NO: 143374 - DNA, 22 bp, synthetic construct
  misc_feature 1..22: note = chemically synthesized
  source 1..22: mol_type = other DNA
cccagctcccatgcaactcaaa

SEQ ID NO: 143375 - DNA, 22 bp, synthetic construct
  misc_feature 1..22: note = chemically synthesized
  source 1..22: mol_type = other DNA
ccatgcaactcaaaaggttggt

SEQ ID NO: 143376 - DNA, 22 bp, synthetic construct
  misc_feature 1..22: note = chemically synthesized
  source 1..22: mol_type = other DNA
aaaaggttggtctcacttccag

SEQ ID NO: 143377 - DNA, 22 bp, synthetic construct
  misc_feature 1..22: note = chemically synthesized
  source 1..22: mol_type = other DNA
gtctcacttccagcgtgcaccc

SEQ ID NO: 143378 - DNA, 22 bp, synthetic construct
  misc_feature 1..22: note = chemically synthesized
  source 1..22: mol_type = other DNA
acttccagcgtgcaccctcccc

SEQ ID NO: 143379 - DNA, 22 bp, synthetic construct
  misc_feature 1..22: note = chemically synthesized
  source 1..22: mol_type = other DNA
ccagcgtgcaccctcccccgca

SEQ ID NO: 143380 - DNA, 22 bp, synthetic construct
  misc_feature 1..22: note = chemically synthesized
  source 1..22: mol_type = other DNA
cagcgtgcaccctcccccgcaa

SEQ ID NO: 143381 - DNA, 22 bp, synthetic construct
  misc_feature 1..22: note = chemically synthesized
  source 1..22: mol_type = other DNA
ccccgcaacagcaccgaatctg

SEQ ID NO: 143382 - DNA, 22 bp, synthetic construct
  misc_feature 1..22: note = chemically synthesized
  source 1..22: mol_type = other DNA
tttccatgcagtcagtgagcaa

SEQ ID NO: 143383 - DNA, 22 bp, synthetic construct
  misc_feature 1..22: note = chemically synthesized
  source 1..22: mol_type = other DNA
ccatgcagtcagtgagcaaggc

SEQ ID NO: 143384 - DNA, 22 bp, synthetic construct
  misc_feature 1..22: note = chemically synthesized
  source 1..22: mol_type = other DNA
catgcagtcagtgagcaaggct

SEQ ID NO: 143385 - DNA, 22 bp, synthetic construct
  misc_feature 1..22: note = chemically synthesized
  source 1..22: mol_type = other DNA
agaacttgccccaggctaccag

SEQ ID NO: 143386 - DNA, 22 bp, synthetic construct
  misc_feature 1..22: note = chemically synthesized
  source 1..22: mol_type = other DNA
gccccaggctaccagctgcgaa

SEQ ID NO: 143387 - DNA, 22 bp, synthetic construct
  misc_feature 1..22: note = chemically synthesized
  source 1..22: mol_type = other DNA
ccccaggctaccagctgcgaaa

SEQ ID NO: 143388 - DNA, 22 bp, synthetic construct
  misc_feature 1..22: note = chemically synthesized
  source 1..22: mol_type = other DNA
ccagctgcgaaaccaagtaggg

SEQ ID NO: 143389 - DNA, 22 bp, synthetic construct
  misc_feature 1..22: note = chemically synthesized
  source 1..22: mol_type = other DNA
cgaaaccaagtagggctgtcct

SEQ ID NO: 143390 - DNA, 22 bp, synthetic construct
  misc_feature 1..22: note = chemically synthesized
  source 1..22: mol_type = other DNA
tcctacttccctgccagtggag

SEQ ID NO: 143391 - DNA, 22 bp, synthetic construct
  misc_feature 1..22: note = chemically synthesized
  source 1..22: mol_type = other DNA
cttccctgccagtggagtctgc

SEQ ID NO: 143392 - DNA, 22 bp, synthetic construct
  misc_feature 1..22: note = chemically synthesized
  source 1..22: mol_type = other DNA
ccctgccagtggagtctgcaca

SEQ ID NO: 143393 - DNA, 22 bp, synthetic construct
  misc_feature 1..22: note = chemically synthesized
  source 1..22: mol_type = other DNA
cctgccagtggagtctgcacac

SEQ ID NO: 143394 - DNA, 22 bp, synthetic construct
  misc_feature 1..22: note = chemically synthesized
  source 1..22: mol_type = other DNA
ccagtggagtctgcacaccaaa

SEQ ID NO: 143395 - DNA, 22 bp, synthetic construct
  misc_feature 1..22: note = chemically synthesized
  source 1..22: mol_type = other DNA
cacaccaaattcatgtcccccc

SEQ ID NO: 143396 - DNA, 22 bp, synthetic construct
  misc_feature 1..22: note = chemically synthesized
  source 1..22: mol_type = other DNA
atgtccccccaccaaccccccc

SEQ ID NO: 143397 - DNA, 22 bp, synthetic construct
  misc_feature 1..22: note = chemically synthesized
  source 1..22: mol_type = other DNA
cccagcccctagatctggccag

SEQ ID NO: 143398 - DNA, 22 bp, synthetic construct
  misc_feature 1..22: note = chemically synthesized
  source 1..22: mol_type = other DNA
gatctggccaggtggagatttt

SEQ ID NO: 143399 - DNA, 22 bp, synthetic construct
  misc_feature 1..22: note = chemically synthesized
  source 1..22: mol_type = other DNA
gccaggtggagattttcttttt

SEQ ID NO: 143400 - DNA, 22 bp, synthetic construct
  misc_feature 1..22: note = chemically synthesized
  source 1..22: mol_type = other DNA
tctttttcctgtcatcttttcc

SEQ ID NO: 143401 - DNA, 22 bp, synthetic construct
  misc_feature 1..22: note = chemically synthesized
  source 1..22: mol_type = other DNA
ctttttcctgtcatcttttccc

SEQ ID NO: 143402 - DNA, 22 bp, synthetic construct
  misc_feature 1..22: note = chemically synthesized
  source 1..22: mol_type = other DNA
tttttcctgtcatcttttccca

SEQ ID NO: 143403 - DNA, 22 bp, synthetic construct
  misc_feature 1..22: note = chemically synthesized
  source 1..22: mol_type = other DNA
tttcctgtcatcttttcccagt

SEQ ID NO: 143404 - DNA, 22 bp, synthetic construct
  misc_feature 1..22: note = chemically synthesized
  source 1..22: mol_type = other DNA
ttcctgtcatcttttcccagtt

SEQ ID NO: 143405 - DNA, 22 bp, synthetic construct
  misc_feature 1..22: note = chemically synthesized
  source 1..22: mol_type = other DNA
tcctgtcatcttttcccagttc

SEQ ID NO: 143406 - DNA, 22 bp, synthetic construct
  misc_feature 1..22: note = chemically synthesized
  source 1..22: mol_type = other DNA
cctgtcatcttttcccagttcc

SEQ ID NO: 143407 - DNA, 22 bp, synthetic construct
  misc_feature 1..22: note = chemically synthesized
  source 1..22: mol_type = other DNA
ctgtcatcttttcccagttcct

SEQ ID NO: 143408 - DNA, 22 bp, synthetic construct
  misc_feature 1..22: note = chemically synthesized
  source 1..22: mol_type = other DNA
tcatcttttcccagttcctctg

SEQ ID NO: 143409 - DNA, 22 bp, synthetic construct
  misc_feature 1..22: note = chemically synthesized
  source 1..22: mol_type = other DNA
ttcccagttcctctggcagccc

SEQ ID NO: 143410 - DNA, 22 bp, synthetic construct
  misc_feature 1..22: note = chemically synthesized
  source 1..22: mol_type = other DNA
tcccagttcctctggcagccct

SEQ ID NO: 143411 - DNA, 22 bp, synthetic construct
  misc_feature 1..22: note = chemically synthesized
  source 1..22: mol_type = other DNA
cccagttcctctggcagccctc

SEQ ID NO: 143412 - DNA, 22 bp, synthetic construct
  misc_feature 1..22: note = chemically synthesized
  source 1..22: mol_type = other DNA
ccagttcctctggcagccctcc

SEQ ID NO: 143413 - DNA, 22 bp, synthetic construct
  misc_feature 1..22: note = chemically synthesized
  source 1..22: mol_type = other DNA
ctctggcagccctcccaaatga

SEQ ID NO: 143414 - DNA, 22 bp, synthetic construct
  misc_feature 1..22: note = chemically synthesized
  source 1..22: mol_type = other DNA
tggcagccctcccaaatgaccc

SEQ ID NO: 143415 - DNA, 22 bp, synthetic construct
  misc_feature 1..22: note = chemically synthesized
  source 1..22: mol_type = other DNA
gcagccctcccaaatgacccct

SEQ ID NO: 143416 - DNA, 22 bp, synthetic construct
  misc_feature 1..22: note = chemically synthesized
  source 1..22: mol_type = other DNA
ccaaatgacccctgtgaggcaa

SEQ ID NO: 143417 - DNA, 22 bp, synthetic construct
  misc_feature 1..22: note = chemically synthesized
  source 1..22: mol_type = other DNA
tgaggcaaggcagaaatggctt

SEQ ID NO: 143418 - DNA, 22 bp, synthetic construct
  misc_feature 1..22: note = chemically synthesized
  source 1..22: mol_type = other DNA
cctaggggacccagagagccca

SEQ ID NO: 143419 - DNA, 22 bp, synthetic construct
  misc_feature 1..22: note = chemically synthesized
  source 1..22: mol_type = other DNA
ctaggggacccagagagcccac

SEQ ID NO: 143420 - DNA, 22 bp, synthetic construct
  misc_feature 1..22: note = chemically synthesized
  source 1..22: mol_type = other DNA
ggggacccagagagcccacagg

SEQ ID NO: 143421 - DNA, 22 bp, synthetic construct
  misc_feature 1..22: note = chemically synthesized
  source 1..22: mol_type = other DNA
ttcccgctgcttcctctacccc

SEQ ID NO: 143422 - DNA, 22 bp, synthetic construct
  misc_feature 1..22: note = chemically synthesized
  source 1..22: mol_type = other DNA
tcccgctgcttcctctacccct

SEQ ID NO: 143423 - DNA, 22 bp, synthetic construct
  misc_feature 1..22: note = chemically synthesized
  source 1..22: mol_type = other DNA
cccgctgcttcctctacccctg

SEQ ID NO: 143424 - DNA, 22 bp, synthetic construct
  misc_feature 1..22: note = chemically synthesized
  source 1..22: mol_type = other DNA
ccgctgcttcctctacccctgt

SEQ ID NO: 143425 - DNA, 22 bp, synthetic construct
  misc_feature 1..22: note = chemically synthesized
  source 1..22: mol_type = other DNA
cttcctctacccctgtattttg

SEQ ID NO: 143426 - DNA, 22 bp, synthetic construct
  misc_feature 1..22: note = chemically synthesized
  source 1..22: mol_type = other DNA
cctctacccctgtattttgctt

SEQ ID NO: 143427 - DNA, 22 bp, synthetic construct
  misc_feature 1..22: note = chemically synthesized
  source 1..22: mol_type = other DNA
ctctacccctgtattttgcttg

SEQ ID NO: 143428 - DNA, 22 bp, synthetic construct
  misc_feature 1..22: note = chemically synthesized
  source 1..22: mol_type = other DNA
tacccctgtattttgcttggcc

SEQ ID NO: 143429 - DNA, 22 bp, synthetic construct
  misc_feature 1..22: note = chemically synthesized
  source 1..22: mol_type = other DNA
cccctgtattttgcttggccct

SEQ ID NO: 143430 - DNA, 22 bp, synthetic construct
  misc_feature 1..22: note = chemically synthesized
  source 1..22: mol_type = other DNA
tattttgcttggccctctaaat

SEQ ID NO: 143431 - DNA, 22 bp, synthetic construct
  misc_feature 1..22: note = chemically synthesized
  source 1..22: mol_type = other DNA
tgcttggccctctaaattgact

SEQ ID NO: 143432 - DNA, 22 bp, synthetic construct
  misc_feature 1..22: note = chemically synthesized
  source 1..22: mol_type = other DNA
gcttggccctctaaattgactc

SEQ ID NO: 143433 - DNA, 22 bp, synthetic construct
  misc_feature 1..22: note = chemically synthesized
  source 1..22: mol_type = other DNA
cttggccctctaaattgactca

SEQ ID NO: 143434 - DNA, 22 bp, synthetic construct
  misc_feature 1..22: note = chemically synthesized
  source 1..22: mol_type = other DNA
ggccctctaaattgactcagct

SEQ ID NO: 143435 - DNA, 22 bp, synthetic construct
  misc_feature 1..22: note = chemically synthesized
  source 1..22: mol_type = other DNA
gccctctaaattgactcagctc

SEQ ID NO: 143436 - DNA, 22 bp, synthetic construct
  misc_feature 1..22: note = chemically synthesized
  source 1..22: mol_type = other DNA
taaattgactcagctccaggta

SEQ ID NO: 143437 - DNA, 22 bp, synthetic construct
  misc_feature 1..22: note = chemically synthesized
  source 1..22: mol_type = other DNA
aattgactcagctccaggtaag

SEQ ID NO: 143438 - DNA, 22 bp, synthetic construct
  misc_feature 1..22: note = chemically synthesized
  source 1..22: mol_type = other DNA
actcagctccaggtaaggtcag

SEQ ID NO: 143439 - DNA, 22 bp, synthetic construct
  misc_feature 1..22: note = chemically synthesized
  source 1..22: mol_type = other DNA
agctccaggtaaggtcagaatc

SEQ ID NO: 143440 - DNA, 22 bp, synthetic construct
  misc_feature 1..22: note = chemically synthesized
  source 1..22: mol_type = other DNA
caggtaaggtcagaatcttctc

SEQ ID NO: 143441 - DNA, 22 bp, synthetic construct
  misc_feature 1..22: note = chemically synthesized
  source 1..22: mol_type = other DNA
ctcctgtggtctagatcttcag

SEQ ID NO: 143442 - DNA, 22 bp, synthetic construct
  misc_feature 1..22: note = chemically synthesized
  source 1..22: mol_type = other DNA
tcctgtggtctagatcttcagg

SEQ ID NO: 143443 - DNA, 22 bp, synthetic construct
  misc_feature 1..22: note = chemically synthesized
  source 1..22: mol_type = other DNA
ctgtggtctagatcttcaggtt

SEQ ID NO: 143444 - DNA, 22 bp, synthetic construct
  misc_feature 1..22: note = chemically synthesized
  source 1..22: mol_type = other DNA
tggtctagatcttcaggttccc

SEQ ID NO: 143445 - DNA, 22 bp, synthetic construct
  misc_feature 1..22: note = chemically synthesized
  source 1..22: mol_type = other DNA
gatcttcaggttccccagtgag

SEQ ID NO: 143446 - DNA, 22 bp, synthetic construct
  misc_feature 1..22: note = chemically synthesized
  source 1..22: mol_type = other DNA
caggttccccagtgaggatgtg

SEQ ID NO: 143447 - DNA, 22 bp, synthetic construct
  misc_feature 1..22: note = chemically synthesized
  source 1..22: mol_type = other DNA
aggttccccagtgaggatgtgt

SEQ ID NO: 143448 - DNA, 22 bp, synthetic construct
  misc_feature 1..22: note = chemically synthesized
  source 1..22: mol_type = other DNA
cccagtgaggatgtgtgtttgg

SEQ ID NO: 143449 - DNA, 22 bp, synthetic construct
  misc_feature 1..22: note = chemically synthesized
  source 1..22: mol_type = other DNA
gggggtagacggtccccctttt

SEQ ID NO: 143450 - DNA, 22 bp, synthetic construct
  misc_feature 1..22: note = chemically synthesized
  source 1..22: mol_type = other DNA
ggggtagacggtcccccttttc

SEQ ID NO: 143451 - DNA, 22 bp, synthetic construct
  misc_feature 1..22: note = chemically synthesized
  source 1..22: mol_type = other DNA
ttccacttccacagtttgggca

SEQ ID NO: 143452 - DNA, 22 bp, synthetic construct
  misc_feature 1..22: note = chemically synthesized
  source 1..22: mol_type = other DNA
tccacttccacagtttgggcac

SEQ ID NO: 143453 - DNA, 22 bp, synthetic construct
  misc_feature 1..22: note = chemically synthesized
  source 1..22: mol_type = other DNA
ccacttccacagtttgggcact

SEQ ID NO: 143454 - DNA, 22 bp, synthetic construct
  misc_feature 1..22: note = chemically synthesized
  source 1..22: mol_type = other DNA
cacttccacagtttgggcactc

SEQ ID NO: 143455 - DNA, 22 bp, synthetic construct
  misc_feature 1..22: note = chemically synthesized
  source 1..22: mol_type = other DNA
ccacagtttgggcactcacaat

SEQ ID NO: 143456 - DNA, 22 bp, synthetic construct
  misc_feature 1..22: note = chemically synthesized
  source 1..22: mol_type = other DNA
cacagtttgggcactcacaata

SEQ ID NO: 143457 - DNA, 22 bp, synthetic construct
  misc_feature 1..22: note = chemically synthesized
  source 1..22: mol_type = other DNA
gggcactcacaatatttggggt

SEQ ID NO: 143458 - DNA, 22 bp, synthetic construct
  misc_feature 1..22: note = chemically synthesized
  source 1..22: mol_type = other DNA
ggcactcacaatatttggggtg

SEQ ID NO: 143459 - DNA, 22 bp, synthetic construct
  misc_feature 1..22: note = chemically synthesized
  source 1..22: mol_type = other DNA
acaatatttggggtgtttcccg

SEQ ID NO: 143460 - DNA, 22 bp, synthetic construct
  misc_feature 1..22: note = chemically synthesized
  source 1..22: mol_type = other DNA
ggggtgtttcccgggtcctgca

SEQ ID NO: 143461 - DNA, 22 bp, synthetic construct
  misc_feature 1..22: note = chemically synthesized
  source 1..22: mol_type = other DNA
gggtgtttcccgggtcctgcag

SEQ ID NO: 143462 - DNA, 22 bp, synthetic construct
  misc_feature 1..22: note = chemically synthesized
  source 1..22: mol_type = other DNA
cccgggtcctgcaggagcaatc

SEQ ID NO: 143463 - DNA, 22 bp, synthetic construct
  misc_feature 1..22: note = chemically synthesized
  source 1..22: mol_type = other DNA
ccgggtcctgcaggagcaatct

SEQ ID NO: 143464 - DNA, 22 bp, synthetic construct
  misc_feature 1..22: note = chemically synthesized
  source 1..22: mol_type = other DNA
caggagcaatctgcttctttca

SEQ ID NO: 143465 - DNA, 22 bp, synthetic construct
  misc_feature 1..22: note = chemically synthesized
  source 1..22: mol_type = other DNA
cttctttcagagggtgtgtgcg

SEQ ID NO: 143466 - DNA, 22 bp, synthetic construct
  misc_feature 1..22: note = chemically synthesized
  source 1..22: mol_type = other DNA
ctttcagagggtgtgtgcgttc

SEQ ID NO: 143467 - DNA, 22 bp, synthetic construct
  misc_feature 1..22: note = chemically synthesized
  source 1..22: mol_type = other DNA
tttcagagggtgtgtgcgttct

SEQ ID NO: 143468 - DNA, 22 bp, synthetic construct
  misc_feature 1..22: note = chemically synthesized
  source 1..22: mol_type = other DNA
tcagagggtgtgtgcgttctct

SEQ ID NO: 143469 - DNA, 22 bp, synthetic construct
  misc_feature 1..22: note = chemically synthesized
  source 1..22: mol_type = other DNA
cagagggtgtgtgcgttctctc

SEQ ID NO: 143470 - DNA, 22 bp, synthetic construct
  misc_feature 1..22: note = chemically synthesized
  source 1..22: mol_type = other DNA
agagggtgtgtgcgttctctca

SEQ ID NO: 143471 - DNA, 22 bp, synthetic construct
  misc_feature 1..22: note = chemically synthesized
  source 1..22: mol_type = other DNA
tctcagctttcttgatttattt

SEQ ID NO: 143472 - DNA, 22 bp, synthetic construct
  misc_feature 1..22: note = chemically synthesized
  source 1..22: mol_type = other DNA
tcagctttcttgatttatttct

SEQ ID NO: 143473 - DNA, 22 bp, synthetic construct
  misc_feature 1..22: note = chemically synthesized
  source 1..22: mol_type = other DNA
agctttcttgatttatttctgc

SEQ ID NO: 143474 - DNA, 22 bp, synthetic construct
  misc_feature 1..22: note = chemically synthesized
  source 1..22: mol_type = other DNA
tcttgatttatttctgcaggtg

SEQ ID NO: 143475 - DNA, 22 bp, synthetic construct
  misc_feature 1..22: note = chemically synthesized
  source 1..22: mol_type = other DNA
cttgatttatttctgcaggtgg

SEQ ID NO: 143476 - DNA, 22 bp, synthetic construct
  misc_feature 1..22: note = chemically synthesized
  source 1..22: mol_type = other DNA
ttgatttatttctgcaggtggt

SEQ ID NO: 143477 - DNA, 22 bp, synthetic construct
  misc_feature 1..22: note = chemically synthesized
  source 1..22: mol_type = other DNA
gatttatttctgcaggtggttc

SEQ ID NO: 143478 - DNA, 22 bp, synthetic construct
  misc_feature 1..22: note = chemically synthesized
  source 1..22: mol_type = other DNA
atttatttctgcaggtggttct

SEQ ID NO: 143479 - DNA, 22 bp, synthetic construct
  misc_feature 1..22: note = chemically synthesized
  source 1..22: mol_type = other DNA
atttctgcaggtggttctgcaa

SEQ ID NO: 143480 - DNA, 22 bp, synthetic construct
  misc_feature 1..22: note = chemically synthesized
  source 1..22: mol_type = other DNA
tttctgcaggtggttctgcaaa

SEQ ID NO: 143481 - DNA, 22 bp, synthetic construct
  misc_feature 1..22: note = chemically synthesized
  source 1..22: mol_type = other DNA
ctgcaggtggttctgcaaaaaa

SEQ ID NO: 143482 - DNA, 22 bp, synthetic construct
  misc_feature 1..22: note = chemically synthesized
  source 1..22: mol_type = other DNA
tgcaggtggttctgcaaaaaaa

SEQ ID NO: 143483 - DNA, 22 bp, synthetic construct
  misc_feature 1..22: note = chemically synthesized
  source 1..22: mol_type = other DNA
caggtggttctgcaaaaaaaat

SEQ ID NO: 143484 - DNA, 22 bp, synthetic construct
  misc_feature 1..22: note = chemically synthesized
  source 1..22: mol_type = other DNA
tgcaaaaaaaattcctgatggg

SEQ ID NO: 143485 - DNA, 22 bp, synthetic construct
  misc_feature 1..22: note = chemically synthesized
  source 1..22: mol_type = other DNA
caaaaaaaattcctgatgggag

SEQ ID NO: 143486 - DNA, 22 bp, synthetic construct
  misc_feature 1..22: note = chemically synthesized
  source 1..22: mol_type = other DNA
ctgatgggagacttcacatgct

SEQ ID NO: 143487 - DNA, 22 bp, synthetic construct
  misc_feature 1..22: note = chemically synthesized
  source 1..22: mol_type = other DNA
atgggagacttcacatgctgct

SEQ ID NO: 143488 - DNA, 22 bp, synthetic construct
  misc_feature 1..22: note = chemically synthesized
  source 1..22: mol_type = other DNA
cacatgctgctctgtgcatccg

SEQ ID NO: 143489 - DNA, 22 bp, synthetic construct
  misc_feature 1..22: note = chemically synthesized
  source 1..22: mol_type = other DNA
acatgctgctctgtgcatccga

SEQ ID NO: 143490 - DNA, 22 bp, synthetic construct
  misc_feature 1..22: note = chemically synthesized
  source 1..22: mol_type = other DNA
ctctgtgcatccgagtgggagc

SEQ ID NO: 143491 - DNA, 22 bp, synthetic construct
  misc_feature 1..22: note = chemically synthesized
  source 1..22: mol_type = other DNA
tgtgcatccgagtgggagctgc

SEQ ID NO: 143492 - DNA, 22 bp, synthetic construct
  misc_feature 1..22: note = chemically synthesized
  source 1..22: mol_type = other DNA
tgcatccgagtgggagctgcaa

SEQ ID NO: 143493 - DNA, 22 bp, synthetic construct
  misc_feature 1..22: note = chemically synthesized
  source 1..22: mol_type = other DNA
caatgtacttctgctgcctccc

SEQ ID NO: 143494 - DNA, 22 bp, synthetic construct
  misc_feature 1..22: note = chemically synthesized
  source 1..22: mol_type = other DNA
ctgctgcctcccatctgccatc

SEQ ID NO: 143495 - DNA, 22 bp, synthetic construct
  misc_feature 1..22: note = chemically synthesized
  source 1..22: mol_type = other DNA
tgctgcctcccatctgccatca

SEQ ID NO: 143496 - DNA, 22 bp, synthetic construct
  misc_feature 1..22: note = chemically synthesized
  source 1..22: mol_type = other DNA
ctgcctcccatctgccatcacc

SEQ ID NO: 143497 - DNA, 22 bp, synthetic construct
  misc_feature 1..22: note = chemically synthesized
  source 1..22: mol_type = other DNA
cctcccatctgccatcaccctc

SEQ ID NO: 143498 - DNA, 22 bp, synthetic construct
  misc_feature 1..22: note = chemically synthesized
  source 1..22: mol_type = other DNA
ccatctgccatcaccctctaat

SEQ ID NO: 143499 - DNA, 22 bp, synthetic construct
  misc_feature 1..22: note = chemically synthesized
  source 1..22: mol_type = other DNA
ccatcaccctctaatttgtcgg

SEQ ID NO: 143500 - DNA, 22 bp, synthetic construct
  misc_feature 1..22: note = chemically synthesized
  source 1..22: mol_type = other DNA
taatttgtcggtaatatgcatt

SEQ ID NO: 143501 - DNA, 22 bp, synthetic construct
  misc_feature 1..22: note = chemically synthesized
  source 1..22: mol_type = other DNA
atttgtcggtaatatgcatttt

SEQ ID NO: 143502 - DNA, 22 bp, synthetic construct
  misc_feature 1..22: note = chemically synthesized
  source 1..22: mol_type = other DNA
gtcggtaatatgcatttttaat

SEQ ID NO: 143503 - DNA, 22 bp, synthetic construct
  misc_feature 1..22: note = chemically synthesized
  source 1..22: mol_type = other DNA
tcggtaatatgcatttttaatc

SEQ ID NO: 143504 - DNA, 22 bp, synthetic construct
  misc_feature 1..22: note = chemically synthesized
  source 1..22: mol_type = other DNA
ttaatcaatctttttttctctc

SEQ ID NO: 143505 - DNA, 22 bp, synthetic construct
  misc_feature 1..22: note = chemically synthesized
  source 1..22: mol_type = other DNA
taatcaatctttttttctctct

SEQ ID NO: 143506 - DNA, 22 bp, synthetic construct
  misc_feature 1..22: note = chemically synthesized
  source 1..22: mol_type = other DNA
aatcaatctttttttctctctc

SEQ ID NO: 143507 - DNA, 22 bp, synthetic construct
  misc_feature 1..22: note = chemically synthesized
  source 1..22: mol_type = other DNA
atcaatctttttttctctctct

SEQ ID NO: 143508 - DNA, 22 bp, synthetic construct
  misc_feature 1..22: note = chemically synthesized
  source 1..22: mol_type = other DNA
tttttctctctctctctttttc

SEQ ID NO: 143509 - DNA, 22 bp, synthetic construct
  misc_feature 1..22: note = chemically synthesized
  source 1..22: mol_type = other DNA
ttttctctctctctctttttct

SEQ ID NO: 143510 - DNA, 22 bp, synthetic construct
  misc_feature 1..22: note = chemically synthesized
  source 1..22: mol_type = other DNA
tttctctctctctctttttctt

SEQ ID NO: 143511 - DNA, 22 bp, synthetic construct
  misc_feature 1..22: note = chemically synthesized
  source 1..22: mol_type = other DNA
ttctctctctctctttttcttc

SEQ ID NO: 143512 - DNA, 22 bp, synthetic construct
  misc_feature 1..22: note = chemically synthesized
  source 1..22: mol_type = other DNA
tctctctctctctttttcttct

SEQ ID NO: 143513 - DNA, 22 bp, synthetic construct
  misc_feature 1..22: note = chemically synthesized
  source 1..22: mol_type = other DNA
ctctctctctctttttcttctc

SEQ ID NO: 143514 - DNA, 22 bp, synthetic construct
  misc_feature 1..22: note = chemically synthesized
  source 1..22: mol_type = other DNA
tctctctctctttttcttctcc

SEQ ID NO: 143515 - DNA, 22 bp, synthetic construct
  misc_feature 1..22: note = chemically synthesized
  source 1..22: mol_type = other DNA
tctctctctttttcttctcccc

SEQ ID NO: 143516 - DNA, 22 bp, synthetic construct
  misc_feature 1..22: note = chemically synthesized
  source 1..22: mol_type = other DNA
tctctctttttcttctccccca

SEQ ID NO: 143517 - DNA, 22 bp, synthetic construct
  misc_feature 1..22: note = chemically synthesized
  source 1..22: mol_type = other DNA
tctctttttcttctcccccaaa

SEQ ID NO: 143518 - DNA, 22 bp, synthetic construct
  misc_feature 1..22: note = chemically synthesized
  source 1..22: mol_type = other DNA
tctttttcttctcccccaaaac

SEQ ID NO: 143519 - DNA, 22 bp, synthetic construct
  misc_feature 1..22: note = chemically synthesized
  source 1..22: mol_type = other DNA
tttttcttctcccccaaaacta

SEQ ID NO: 143520 - DNA, 22 bp, synthetic construct
  misc_feature 1..22: note = chemically synthesized
  source 1..22: mol_type = other DNA
tttcttctcccccaaaactata

SEQ ID NO: 143521 - DNA, 22 bp, synthetic construct
  misc_feature 1..22: note = chemically synthesized
  source 1..22: mol_type = other DNA
ttcttctcccccaaaactatac

SEQ ID NO: 143522 - DNA, 22 bp, synthetic construct
  misc_feature 1..22: note = chemically synthesized
  source 1..22: mol_type = other DNA
tcttctcccccaaaactatact

SEQ ID NO: 143523 - DNA, 22 bp, synthetic construct
  misc_feature 1..22: note = chemically synthesized
  source 1..22: mol_type = other DNA
cttctcccccaaaactatactg

SEQ ID NO: 143524 - DNA, 22 bp, synthetic construct
  misc_feature 1..22: note = chemically synthesized
  source 1..22: mol_type = other DNA
ttctcccccaaaactatactgc

SEQ ID NO: 143525 - DNA, 22 bp, synthetic construct
  misc_feature 1..22: note = chemically synthesized
  source 1..22: mol_type = other DNA
ctcccccaaaactatactgccc

SEQ ID NO: 143526 - DNA, 22 bp, synthetic construct
  misc_feature 1..22: note = chemically synthesized
  source 1..22: mol_type = other DNA
tcccccaaaactatactgccct

SEQ ID NO: 143527 - DNA, 22 bp, synthetic construct
  misc_feature 1..22: note = chemically synthesized
  source 1..22: mol_type = other DNA
ccccaaaactatactgcccttt

SEQ ID NO: 143528 - DNA, 22 bp, synthetic construct
  misc_feature 1..22: note = chemically synthesized
  source 1..22: mol_type = other DNA
tactgccctttgatatcaagga

SEQ ID NO: 143529 - DNA, 22 bp, synthetic construct
  misc_feature 1..22: note = chemically synthesized
  source 1..22: mol_type = other DNA
ccctttgatatcaaggaatcaa

SEQ ID NO: 143530 - DNA, 22 bp, synthetic construct
  misc_feature 1..22: note = chemically synthesized
  source 1..22: mol_type = other DNA
tgatatcaaggaatcaaggacg

SEQ ID NO: 143531 - DNA, 22 bp, synthetic construct
  misc_feature 1..22: note = chemically synthesized
  source 1..22: mol_type = other DNA
gatatcaaggaatcaaggacgt

SEQ ID NO: 143532 - DNA, 22 bp, synthetic construct
  misc_feature 1..22: note = chemically synthesized
  source 1..22: mol_type = other DNA
atatcaaggaatcaaggacgtg

SEQ ID NO: 143533 - DNA, 22 bp, synthetic construct
  misc_feature 1..22: note = chemically synthesized
  source 1..22: mol_type = other DNA
aggggtgggcagtggatacact

SEQ ID NO: 143534 - DNA, 22 bp, synthetic construct
  misc_feature 1..22: note = chemically synthesized
  source 1..22: mol_type = other DNA
tttaccccttagggagctatat

SEQ ID NO: 143535 - DNA, 22 bp, synthetic construct
  misc_feature 1..22: note = chemically synthesized
  source 1..22: mol_type = other DNA
taccccttagggagctatatct

SEQ ID NO: 143536 - DNA, 22 bp, synthetic construct
  misc_feature 1..22: note = chemically synthesized
  source 1..22: mol_type = other DNA
accccttagggagctatatcta

SEQ ID NO: 143537 - DNA, 22 bp, synthetic construct
  misc_feature 1..22: note = chemically synthesized
  source 1..22: mol_type = other DNA
ccccttagggagctatatctag

SEQ ID NO: 143538 - DNA, 22 bp, synthetic construct
  misc_feature 1..22: note = chemically synthesized
  source 1..22: mol_type = other DNA
agggagctatatctagatttag

SEQ ID NO: 143539 - DNA, 22 bp, synthetic construct
  misc_feature 1..22: note = chemically synthesized
  source 1..22: mol_type = other DNA
gggagctatatctagatttaga

SEQ ID NO: 143540 - DNA, 22 bp, synthetic construct
  misc_feature 1..22: note = chemically synthesized
  source 1..22: mol_type = other DNA
tatctagatttagatattgcca

SEQ ID NO: 143541 - DNA, 22 bp, synthetic construct
  misc_feature 1..22: note = chemically synthesized
  source 1..22: mol_type = other DNA
gatttagatattgccaattcaa

SEQ ID NO: 143542 - DNA, 22 bp, synthetic construct
  misc_feature 1..22: note = chemically synthesized
  source 1..22: mol_type = other DNA
agatattgccaattcaagataa

SEQ ID NO: 143543 - DNA, 22 bp, synthetic construct
  misc_feature 1..22: note = chemically synthesized
  source 1..22: mol_type = other DNA
gatattgccaattcaagataac

SEQ ID NO: 143544 - DNA, 22 bp, synthetic construct
  misc_feature 1..22: note = chemically synthesized
  source 1..22: mol_type = other DNA
ccaattcaagataacttaattg

SEQ ID NO: 143545 - DNA, 22 bp, synthetic construct
  misc_feature 1..22: note = chemically synthesized
  source 1..22: mol_type = other DNA
aagataacttaattgaaagcaa

SEQ ID NO: 143546 - DNA, 22 bp, synthetic construct
  misc_feature 1..22: note = chemically synthesized
  source 1..22: mol_type = other DNA
aattgaaagcaaattcataatg

SEQ ID NO: 143547 - DNA, 22 bp, synthetic construct
  misc_feature 1..22: note = chemically synthesized
  source 1..22: mol_type = other DNA
attgaaagcaaattcataatga

SEQ ID NO: 143548 - DNA, 22 bp, synthetic construct
  misc_feature 1..22: note = chemically synthesized
  source 1..22: mol_type = other DNA
aaagcaaattcataatgaatac

SEQ ID NO: 143549 - DNA, 22 bp, synthetic construct
  misc_feature 1..22: note = chemically synthesized
  source 1..22: mol_type = other DNA
ataatgaatacacacacacaca

SEQ ID NO: 143550 - DNA, 22 bp, synthetic construct
  misc_feature 1..22: note = chemically synthesized
  source 1..22: mol_type = other DNA
catgacaagatttttaatagtt

SEQ ID NO: 143551 - DNA, 22 bp, synthetic construct
  misc_feature 1..22: note = chemically synthesized
  source 1..22: mol_type = other DNA
ttaatagttgaaagaataacta

SEQ ID NO: 143552 - DNA, 22 bp, synthetic construct
  misc_feature 1..22: note = chemically synthesized
  source 1..22: mol_type = other DNA
taatagttgaaagaataactaa

SEQ ID NO: 143553 - DNA, 22 bp, synthetic construct
  misc_feature 1..22: note = chemically synthesized
  source 1..22: mol_type = other DNA
aatagttgaaagaataactaat

SEQ ID NO: 143554 - DNA, 22 bp, synthetic construct
  misc_feature 1..22: note = chemically synthesized
  source 1..22: mol_type = other DNA
atagttgaaagaataactaata

SEQ ID NO: 143555 - DNA, 22 bp, synthetic construct
  misc_feature 1..22: note = chemically synthesized
  source 1..22: mol_type = other DNA
aaagaataactaataattgtcc

SEQ ID NO: 143556 - DNA, 22 bp, synthetic construct
  misc_feature 1..22: note = chemically synthesized
  source 1..22: mol_type = other DNA
ataattgtccacaggcaataag

SEQ ID NO: 143557 - DNA, 22 bp, synthetic construct
  misc_feature 1..22: note = chemically synthesized
  source 1..22: mol_type = other DNA
tccacaggcaataagggctttt

SEQ ID NO: 143558 - DNA, 22 bp, synthetic construct
  misc_feature 1..22: note = chemically synthesized
  source 1..22: mol_type = other DNA
tttaagcaaaacagttgtgata

SEQ ID NO: 143559 - DNA, 22 bp, synthetic construct
  misc_feature 1..22: note = chemically synthesized
  source 1..22: mol_type = other DNA
ttaagcaaaacagttgtgataa

SEQ ID NO: 143560 - DNA, 22 bp, synthetic construct
  misc_feature 1..22: note = chemically synthesized
  source 1..22: mol_type = other DNA
taagcaaaacagttgtgataaa

SEQ ID NO: 143561 - DNA, 22 bp, synthetic construct
  misc_feature 1..22: note = chemically synthesized
  source 1..22: mol_type = other DNA
aagcaaaacagttgtgataaac

SEQ ID NO: 143562 - DNA, 22 bp, synthetic construct
  misc_feature 1..22: note = chemically synthesized
  source 1..22: mol_type = other DNA
agcaaaacagttgtgataaaca

SEQ ID NO: 143563 - DNA, 22 bp, synthetic construct
  misc_feature 1..22: note = chemically synthesized
  source 1..22: mol_type = other DNA
tgataaacaggtcattcttaga

SEQ ID NO: 143564 - DNA, 22 bp, synthetic construct
  misc_feature 1..22: note = chemically synthesized
  source 1..22: mol_type = other DNA
ttagaatagtaatccagccaat

SEQ ID NO: 143565 - DNA, 22 bp, synthetic construct
  misc_feature 1..22: note = chemically synthesized
  source 1..22: mol_type = other DNA
agaatagtaatccagccaatag

SEQ ID NO: 143566 - DNA, 22 bp, synthetic construct
  misc_feature 1..22: note = chemically synthesized
  source 1..22: mol_type = other DNA
gaatagtaatccagccaatagt

SEQ ID NO: 143567 - DNA, 22 bp, synthetic construct
  misc_feature 1..22: note = chemically synthesized
  source 1..22: mol_type = other DNA
cttagagattatgtcattacca

SEQ ID NO: 143568 - DNA, 22 bp, synthetic construct
  misc_feature 1..22: note = chemically synthesized
  source 1..22: mol_type = other DNA
agagattatgtcattaccagag

SEQ ID NO: 143569 - DNA, 22 bp, synthetic construct
  misc_feature 1..22: note = chemically synthesized
  source 1..22: mol_type = other DNA
gagattatgtcattaccagagt

SEQ ID NO: 143570 - DNA, 22 bp, synthetic construct
  misc_feature 1..22: note = chemically synthesized
  source 1..22: mol_type = other DNA
tgtcattaccagagttaaaatt

SEQ ID NO: 143571 - DNA, 22 bp, synthetic construct
  misc_feature 1..22: note = chemically synthesized
  source 1..22: mol_type = other DNA
ccagagttaaaattctataatg

SEQ ID NO: 143572 - DNA, 22 bp, synthetic construct
  misc_feature 1..22: note = chemically synthesized
  source 1..22: mol_type = other DNA
aaattctataatggcttctcac

SEQ ID NO: 143573 - DNA, 22 bp, synthetic construct
  misc_feature 1..22: note = chemically synthesized
  source 1..22: mol_type = other DNA
tataatggcttctcactcccta

SEQ ID NO: 143574 - DNA, 22 bp, synthetic construct
  misc_feature 1..22: note = chemically synthesized
  source 1..22: mol_type = other DNA
taatggcttctcactccctacc

SEQ ID NO: 143575 - DNA, 22 bp, synthetic construct
  misc_feature 1..22: note = chemically synthesized
  source 1..22: mol_type = other DNA
ctcactccctaccactgaggac

SEQ ID NO: 143576 - DNA, 22 bp, synthetic construct
  misc_feature 1..22: note = chemically synthesized
  source 1..22: mol_type = other DNA
tcactccctaccactgaggaca

SEQ ID NO: 143577 - DNA, 22 bp, synthetic construct
  misc_feature 1..22: note = chemically synthesized
  source 1..22: mol_type = other DNA
actccctaccactgaggacaag

SEQ ID NO: 143578 - DNA, 22 bp, synthetic construct
  misc_feature 1..22: note = chemically synthesized
  source 1..22: mol_type = other DNA
cctaccactgaggacaagttta

SEQ ID NO: 143579 - DNA, 22 bp, synthetic construct
  misc_feature 1..22: note = chemically synthesized
  source 1..22: mol_type = other DNA
ccactgaggacaagtttatgtc

SEQ ID NO: 143580 - DNA, 22 bp, synthetic construct
  misc_feature 1..22: note = chemically synthesized
  source 1..22: mol_type = other DNA
aggacaagtttatgtccttagg

SEQ ID NO: 143581 - DNA, 22 bp, synthetic construct
  misc_feature 1..22: note = chemically synthesized
  source 1..22: mol_type = other DNA
atgtccttaggtttatgcttcc

SEQ ID NO: 143582 - DNA, 22 bp, synthetic construct
  misc_feature 1..22: note = chemically synthesized
  source 1..22: mol_type = other DNA
tgtccttaggtttatgcttccc

SEQ ID NO: 143583 - DNA, 22 bp, synthetic construct
  misc_feature 1..22: note = chemically synthesized
  source 1..22: mol_type = other DNA
aggtttatgcttccctgaaaca

SEQ ID NO: 143584 - DNA, 22 bp, synthetic construct
  misc_feature 1..22: note = chemically synthesized
  source 1..22: mol_type = other DNA
ggtttatgcttccctgaaacaa

SEQ ID NO: 143585 - DNA, 22 bp, synthetic construct
  misc_feature 1..22: note = chemically synthesized
  source 1..22: mol_type = other DNA
atgcttccctgaaacaatacca

SEQ ID NO: 143586 - DNA, 22 bp, synthetic construct
  misc_feature 1..22: note = chemically synthesized
  source 1..22: mol_type = other DNA
tgcttccctgaaacaataccac

SEQ ID NO: 143587 - DNA, 22 bp, synthetic construct
  misc_feature 1..22: note = chemically synthesized
  source 1..22: mol_type = other DNA
ccctgaaacaataccacctgct

SEQ ID NO: 143588 - DNA, 22 bp, synthetic construct
  misc_feature 1..22: note = chemically synthesized
  source 1..22: mol_type = other DNA
cctgaaacaataccacctgcta

SEQ ID NO: 143589 - DNA, 22 bp, synthetic construct
  misc_feature 1..22: note = chemically synthesized
  source 1..22: mol_type = other DNA
aaacaataccacctgctattct

SEQ ID NO: 143590 - DNA, 22 bp, synthetic construct
  misc_feature 1..22: note = chemically synthesized
  source 1..22: mol_type = other DNA
ctattctccactttacatatca

SEQ ID NO: 143591 - DNA, 22 bp, synthetic construct
  misc_feature 1..22: note = chemically synthesized
  source 1..22: mol_type = other DNA
ttctccactttacatatcaacg

SEQ ID NO: 143592 - DNA, 22 bp, synthetic construct
  misc_feature 1..22: note = chemically synthesized
  source 1..22: mol_type = other DNA
tccactttacatatcaacggca

SEQ ID NO: 143593 - DNA, 22 bp, synthetic construct
  misc_feature 1..22: note = chemically synthesized
  source 1..22: mol_type = other DNA
cactttacatatcaacggcact

SEQ ID NO: 143594 - DNA, 22 bp, synthetic construct
  misc_feature 1..22: note = chemically synthesized
  source 1..22: mol_type = other DNA
tacatatcaacggcactggttc

SEQ ID NO: 143595 - DNA, 22 bp, synthetic construct
  misc_feature 1..22: note = chemically synthesized
  source 1..22: mol_type = other DNA
acatatcaacggcactggttct

SEQ ID NO: 143596 - DNA, 22 bp, synthetic construct
  misc_feature 1..22: note = chemically synthesized
  source 1..22: mol_type = other DNA
catatcaacggcactggttctt

SEQ ID NO: 143597 - DNA, 22 bp, synthetic construct
  misc_feature 1..22: note = chemically synthesized
  source 1..22: mol_type = other DNA
gttctttatctaactctctggc

SEQ ID NO: 143598 - DNA, 22 bp, synthetic construct
  misc_feature 1..22: note = chemically synthesized
  source 1..22: mol_type = other DNA
tttatctaactctctggcacag

SEQ ID NO: 143599 - DNA, 22 bp, synthetic construct
  misc_feature 1..22: note = chemically synthesized
  source 1..22: mol_type = other DNA
tatctaactctctggcacagca

SEQ ID NO: 143600 - DNA, 22 bp, synthetic construct
  misc_feature 1..22: note = chemically synthesized
  source 1..22: mol_type = other DNA
atctaactctctggcacagcag

SEQ ID NO: 143601 - DNA, 22 bp, synthetic construct
  misc_feature 1..22: note = chemically synthesized
  source 1..22: mol_type = other DNA
tctaactctctggcacagcagg

SEQ ID NO: 143602 - DNA, 22 bp, synthetic construct
  misc_feature 1..22: note = chemically synthesized
  source 1..22: mol_type = other DNA
actctctggcacagcaggagtt

SEQ ID NO: 143603 - DNA, 22 bp, synthetic construct
  misc_feature 1..22: note = chemically synthesized
  source 1..22: mol_type = other DNA
tctggcacagcaggagtttgtt

SEQ ID NO: 143604 - DNA, 22 bp, synthetic construct
  misc_feature 1..22: note = chemically synthesized
  source 1..22: mol_type = other DNA
tggcacagcaggagtttgtttt

SEQ ID NO: 143605 - DNA, 22 bp, synthetic construct
  misc_feature 1..22: note = chemically synthesized
  source 1..22: mol_type = other DNA
gcacagcaggagtttgttttct

SEQ ID NO: 143606 - DNA, 22 bp, synthetic construct
  misc_feature 1..22: note = chemically synthesized
  source 1..22: mol_type = other DNA
gttttcttctgcttcagagctt

SEQ ID NO: 143607 - DNA, 22 bp, synthetic construct
  misc_feature 1..22: note = chemically synthesized
  source 1..22: mol_type = other DNA
ttttcttctgcttcagagcttt

SEQ ID NO: 143608 - DNA, 22 bp, synthetic construct
  misc_feature 1..22: note = chemically synthesized
  source 1..22: mol_type = other DNA
tcttctgcttcagagctttgaa

SEQ ID NO: 143609 - DNA, 22 bp, synthetic construct
  misc_feature 1..22: note = chemically synthesized
  source 1..22: mol_type = other DNA
cttctgcttcagagctttgaat

SEQ ID NO: 143610 - DNA, 22 bp, synthetic construct
  misc_feature 1..22: note = chemically synthesized
  source 1..22: mol_type = other DNA
ttctgcttcagagctttgaatt

SEQ ID NO: 143611 - DNA, 22 bp, synthetic construct
  misc_feature 1..22: note = chemically synthesized
  source 1..22: mol_type = other DNA
ctgcttcagagctttgaattta

SEQ ID NO: 143612 - DNA, 22 bp, synthetic construct
  misc_feature 1..22: note = chemically synthesized
  source 1..22: mol_type = other DNA
tgcttcagagctttgaatttac

SEQ ID NO: 143613 - DNA, 22 bp, synthetic construct
  misc_feature 1..22: note = chemically synthesized
  source 1..22: mol_type = other DNA
cttcagagctttgaatttacta

SEQ ID NO: 143614 - DNA, 22 bp, synthetic construct
  misc_feature 1..22: note = chemically synthesized
  source 1..22: mol_type = other DNA
cagagctttgaatttactattt

SEQ ID NO: 143615 - DNA, 22 bp, synthetic construct
  misc_feature 1..22: note = chemically synthesized
  source 1..22: mol_type = other DNA
agagctttgaatttactatttc

SEQ ID NO: 143616 - DNA, 22 bp, synthetic construct
  misc_feature 1..22: note = chemically synthesized
  source 1..22: mol_type = other DNA
tgaatttactatttcagcttct

SEQ ID NO: 143617 - DNA, 22 bp, synthetic construct
  misc_feature 1..22: note = chemically synthesized
  source 1..22: mol_type = other DNA
gaatttactatttcagcttcta

SEQ ID NO: 143618 - DNA, 22 bp, synthetic construct
  misc_feature 1..22: note = chemically synthesized
  source 1..22: mol_type = other DNA
aatttactatttcagcttctaa

SEQ ID NO: 143619 - DNA, 22 bp, synthetic construct
  misc_feature 1..22: note = chemically synthesized
  source 1..22: mol_type = other DNA
actatttcagcttctaaacttt

SEQ ID NO: 143620 - DNA, 22 bp, synthetic construct
  misc_feature 1..22: note = chemically synthesized
  source 1..22: mol_type = other DNA
ctatttcagcttctaaacttta

SEQ ID NO: 143621 - DNA, 22 bp, synthetic construct
  misc_feature 1..22: note = chemically synthesized
  source 1..22: mol_type = other DNA
tttcagcttctaaactttattt

SEQ ID NO: 143622 - DNA, 22 bp, synthetic construct
  misc_feature 1..22: note = chemically synthesized
  source 1..22: mol_type = other DNA
cagcttctaaactttatttggc

SEQ ID NO: 143623 - DNA, 22 bp, synthetic construct
  misc_feature 1..22: note = chemically synthesized
  source 1..22: mol_type = other DNA
agcttctaaactttatttggca

SEQ ID NO: 143624 - DNA, 22 bp, synthetic construct
  misc_feature 1..22: note = chemically synthesized
  source 1..22: mol_type = other DNA
ctaaactttatttggcaatgcc

SEQ ID NO: 143625 - DNA, 22 bp, synthetic construct
  misc_feature 1..22: note = chemically synthesized
  source 1..22: mol_type = other DNA
taaactttatttggcaatgcct

SEQ ID NO: 143626 - DNA, 22 bp, synthetic construct
  misc_feature 1..22: note = chemically synthesized
  source 1..22: mol_type = other DNA
aactttatttggcaatgccttc

SEQ ID NO: 143627 - DNA, 22 bp, synthetic construct
  misc_feature 1..22: note = chemically synthesized
  source 1..22: mol_type = other DNA
tatttggcaatgccttcccatg

SEQ ID NO: 143628 - DNA, 22 bp, synthetic construct
  misc_feature 1..22: note = chemically synthesized
  source 1..22: mol_type = other DNA
atttggcaatgccttcccatgg

SEQ ID NO: 143629 - DNA, 22 bp, synthetic construct
  misc_feature 1..22: note = chemically synthesized
  source 1..22: mol_type = other DNA
tttggcaatgccttcccatggc

SEQ ID NO: 143630 - DNA, 22 bp, synthetic construct
  misc_feature 1..22: note = chemically synthesized
  source 1..22: mol_type = other DNA
ggcaatgccttcccatggcaga

SEQ ID NO: 143631 - DNA, 22 bp, synthetic construct
  misc_feature 1..22: note = chemically synthesized
  source 1..22: mol_type = other DNA
gcaatgccttcccatggcagat

SEQ ID NO: 143632 - DNA, 22 bp, synthetic construct
  misc_feature 1..22: note = chemically synthesized
  source 1..22: mol_type = other DNA
cccatggcagattccttctgtc

SEQ ID NO: 143633 - DNA, 22 bp, synthetic construct
  misc_feature 1..22: note = chemically synthesized
  source 1..22: mol_type = other DNA
ccatggcagattccttctgtca

SEQ ID NO: 143634 - DNA, 22 bp, synthetic construct
  misc_feature 1..22: note = chemically synthesized
  source 1..22: mol_type = other DNA
cttctgtcattttgcctctgtt

SEQ ID NO: 143635 - DNA, 22 bp, synthetic construct
  misc_feature 1..22: note = chemically synthesized
  source 1..22: mol_type = other DNA
ctgtcattttgcctctgttcga

SEQ ID NO: 143636 - DNA, 22 bp, synthetic construct
  misc_feature 1..22: note = chemically synthesized
  source 1..22: mol_type = other DNA
tgtcattttgcctctgttcgaa

SEQ ID NO: 143637 - DNA, 22 bp, synthetic construct
  misc_feature 1..22: note = chemically synthesized
  source 1..22: mol_type = other DNA
tcattttgcctctgttcgaata

SEQ ID NO: 143638 - DNA, 22 bp, synthetic construct
  misc_feature 1..22: note = chemically synthesized
  source 1..22: mol_type = other DNA
tgcctctgttcgaatactttct

SEQ ID NO: 143639 - DNA, 22 bp, synthetic construct
  misc_feature 1..22: note = chemically synthesized
  source 1..22: mol_type = other DNA
gcctctgttcgaatactttctc

SEQ ID NO: 143640 - DNA, 22 bp, synthetic construct
  misc_feature 1..22: note = chemically synthesized
  source 1..22: mol_type = other DNA
cctctgttcgaatactttctcc

SEQ ID NO: 143641 - DNA, 22 bp, synthetic construct
  misc_feature 1..22: note = chemically synthesized
  source 1..22: mol_type = other DNA
tgttcgaatactttctccttaa

SEQ ID NO: 143642 - DNA, 22 bp, synthetic construct
  misc_feature 1..22: note = chemically synthesized
  source 1..22: mol_type = other DNA
ttcgaatactttctccttaatt

SEQ ID NO: 143643 - DNA, 22 bp, synthetic construct
  misc_feature 1..22: note = chemically synthesized
  source 1..22: mol_type = other DNA
gaatactttctccttaatttca

SEQ ID NO: 143644 - DNA, 22 bp, synthetic construct
  misc_feature 1..22: note = chemically synthesized
  source 1..22: mol_type = other DNA
tctccttaatttcattcttagt

SEQ ID NO: 143645 - DNA, 22 bp, synthetic construct
  misc_feature 1..22: note = chemically synthesized
  source 1..22: mol_type = other DNA
ctccttaatttcattcttagtt

SEQ ID NO: 143646 - DNA, 22 bp, synthetic construct
  misc_feature 1..22: note = chemically synthesized
  source 1..22: mol_type = other DNA
tccttaatttcattcttagtta

SEQ ID NO: 143647 - DNA, 22 bp, synthetic construct
  misc_feature 1..22: note = chemically synthesized
  source 1..22: mol_type = other DNA
cttaatttcattcttagttaat

SEQ ID NO: 143648 - DNA, 22 bp, synthetic construct
  misc_feature 1..22: note = chemically synthesized
  source 1..22: mol_type = other DNA
aatttcattcttagttaataat

SEQ ID NO: 143649 - DNA, 22 bp, synthetic construct
  misc_feature 1..22: note = chemically synthesized
  source 1..22: mol_type = other DNA
atttcattcttagttaataata

SEQ ID NO: 143650 - DNA, 22 bp, synthetic construct
  misc_feature 1..22: note = chemically synthesized
  source 1..22: mol_type = other DNA
cattcttagttaataatatctg

SEQ ID NO: 143651 - DNA, 22 bp, synthetic construct
  misc_feature 1..22: note = chemically synthesized
  source 1..22: mol_type = other DNA
attcttagttaataatatctga

SEQ ID NO: 143652 - DNA, 22 bp, synthetic construct
  misc_feature 1..22: note = chemically synthesized
  source 1..22: mol_type = other DNA
ttagttaataatatctgaaatt

SEQ ID NO: 143653 - DNA, 22 bp, synthetic construct
  misc_feature 1..22: note = chemically synthesized
  source 1..22: mol_type = other DNA
agttaataatatctgaaattat

SEQ ID NO: 143654 - DNA, 22 bp, synthetic construct
  misc_feature 1..22: note = chemically synthesized
  source 1..22: mol_type = other DNA
gttaataatatctgaaattatt

SEQ ID NO: 143655 - DNA, 22 bp, synthetic construct
  misc_feature 1..22: note = chemically synthesized
  source 1..22: mol_type = other DNA
ataatatctgaaattattttgt

SEQ ID NO: 143656 - DNA, 22 bp, synthetic construct
  misc_feature 1..22: note = chemically synthesized
  source 1..22: mol_type = other DNA
aaattattttgttgtttaactt

SEQ ID NO: 143657 - DNA, 22 bp, synthetic construct
  misc_feature 1..22: note = chemically synthesized
  source 1..22: mol_type = other DNA
ttttgttgtttaacttaattat

SEQ ID NO: 143658 - DNA, 22 bp, synthetic construct
  misc_feature 1..22: note = chemically synthesized
  source 1..22: mol_type = other DNA
tgttgtttaacttaattattaa

SEQ ID NO: 143659 - DNA, 22 bp, synthetic construct
  misc_feature 1..22: note = chemically synthesized
  source 1..22: mol_type = other DNA
gttgtttaacttaattattaat

SEQ ID NO: 143660 - DNA, 22 bp, synthetic construct
  misc_feature 1..22: note = chemically synthesized
  source 1..22: mol_type = other DNA
ttgtttaacttaattattaatt

SEQ ID NO: 143661 - DNA, 22 bp, synthetic construct
  misc_feature 1..22: note = chemically synthesized
  source 1..22: mol_type = other DNA
tttaacttaattattaatttta

SEQ ID NO: 143662 - DNA, 22 bp, synthetic construct
  misc_feature 1..22: note = chemically synthesized
  source 1..22: mol_type = other DNA
aacttaattattaattttatgt

SEQ ID NO: 143663 - DNA, 22 bp, synthetic construct
  misc_feature 1..22: note = chemically synthesized
  source 1..22: mol_type = other DNA
acttaattattaattttatgta

SEQ ID NO: 143664 - DNA, 22 bp, synthetic construct
  misc_feature 1..22: note = chemically synthesized
  source 1..22: mol_type = other DNA
aattattaattttatgtatgtt

SEQ ID NO: 143665 - DNA, 22 bp, synthetic construct
  misc_feature 1..22: note = chemically synthesized
  source 1..22: mol_type = other DNA
attattaattttatgtatgttc

SEQ ID NO: 143666 - DNA, 22 bp, synthetic construct
  misc_feature 1..22: note = chemically synthesized
  source 1..22: mol_type = other DNA
ttaattttatgtatgttctacc

SEQ ID NO: 143667 - DNA, 22 bp, synthetic construct
  misc_feature 1..22: note = chemically synthesized
  source 1..22: mol_type = other DNA
attttatgtatgttctacctag

SEQ ID NO: 143668 - DNA, 22 bp, synthetic construct
  misc_feature 1..22: note = chemically synthesized
  source 1..22: mol_type = other DNA
tatgtatgttctacctagatta

SEQ ID NO: 143669 - DNA, 22 bp, synthetic construct
  misc_feature 1..22: note = chemically synthesized
  source 1..22: mol_type = other DNA
atgtatgttctacctagattat

SEQ ID NO: 143670 - DNA, 22 bp, synthetic construct
  misc_feature 1..22: note = chemically synthesized
  source 1..22: mol_type = other DNA
tgtatgttctacctagattata

SEQ ID NO: 143671 - DNA, 22 bp, synthetic construct
  misc_feature 1..22: note = chemically synthesized
  source 1..22: mol_type = other DNA
tacctagattataatcttcaga

SEQ ID NO: 143672 - DNA, 22 bp, synthetic construct
  misc_feature 1..22: note = chemically synthesized
  source 1..22: mol_type = other DNA
cctagattataatcttcagagg

SEQ ID NO: 143673 - DNA, 22 bp, synthetic construct
  misc_feature 1..22: note = chemically synthesized
  source 1..22: mol_type = other DNA
gattataatcttcagaggaaag

SEQ ID NO: 143674 - DNA, 22 bp, synthetic construct
  misc_feature 1..22: note = chemically synthesized
  source 1..22: mol_type = other DNA
taatcttcagaggaaagtttta

SEQ ID NO: 143675 - DNA, 22 bp, synthetic construct
  misc_feature 1..22: note = chemically synthesized
  source 1..22: mol_type = other DNA
cagaggaaagttttattctctg

SEQ ID NO: 143676 - DNA, 22 bp, synthetic construct
  misc_feature 1..22: note = chemically synthesized
  source 1..22: mol_type = other DNA
agaggaaagttttattctctga

SEQ ID NO: 143677 - DNA, 22 bp, synthetic construct
  misc_feature 1..22: note = chemically synthesized
  source 1..22: mol_type = other DNA
tattctctgacttatttaactt

SEQ ID NO: 143678 - DNA, 22 bp, synthetic construct
  misc_feature 1..22: note = chemically synthesized
  source 1..22: mol_type = other DNA
attctctgacttatttaactta

SEQ ID NO: 143679 - DNA, 22 bp, synthetic construct
  misc_feature 1..22: note = chemically synthesized
  source 1..22: mol_type = other DNA
ttctctgacttatttaacttaa

SEQ ID NO: 143680 - DNA, 22 bp, synthetic construct
  misc_feature 1..22: note = chemically synthesized
  source 1..22: mol_type = other DNA
tctgacttatttaacttaaatg

SEQ ID NO: 143681 - DNA, 22 bp, synthetic construct
  misc_feature 1..22: note = chemically synthesized
  source 1..22: mol_type = other DNA
tgacttatttaacttaaatgcc

SEQ ID NO: 143682 - DNA, 22 bp, synthetic construct
  misc_feature 1..22: note = chemically synthesized
  source 1..22: mol_type = other DNA
acttatttaacttaaatgccca

SEQ ID NO: 143683 - DNA, 22 bp, synthetic construct
  misc_feature 1..22: note = chemically synthesized
  source 1..22: mol_type = other DNA
atttaacttaaatgcccactac

SEQ ID NO: 143684 - DNA, 22 bp, synthetic construct
  misc_feature 1..22: note = chemically synthesized
  source 1..22: mol_type = other DNA
tttaacttaaatgcccactact

SEQ ID NO: 143685 - DNA, 22 bp, synthetic construct
  misc_feature 1..22: note = chemically synthesized
  source 1..22: mol_type = other DNA
aacttaaatgcccactacttta

SEQ ID NO: 143686 - DNA, 22 bp, synthetic construct
  misc_feature 1..22: note = chemically synthesized
  source 1..22: mol_type = other DNA
acttaaatgcccactactttaa

SEQ ID NO: 143687 - DNA, 22 bp, synthetic construct
  misc_feature 1..22: note = chemically synthesized
  source 1..22: mol_type = other DNA
aaatgcccactactttaaaaat

SEQ ID NO: 143688 - DNA, 22 bp, synthetic construct
  misc_feature 1..22: note = chemically synthesized
  source 1..22: mol_type = other DNA
aatgcccactactttaaaaatt

SEQ ID NO: 143689 - DNA, 22 bp, synthetic construct
  misc_feature 1..22: note = chemically synthesized
  source 1..22: mol_type = other DNA
ctttaaaaattatgacatttat

SEQ ID NO: 143690 - DNA, 22 bp, synthetic construct
  misc_feature 1..22: note = chemically synthesized
  source 1..22: mol_type = other DNA
taaaaattatgacatttattta

SEQ ID NO: 143691 - DNA, 22 bp, synthetic construct
  misc_feature 1..22: note = chemically synthesized
  source 1..22: mol_type = other DNA
aaaaattatgacatttatttaa

SEQ ID NO: 143692 - DNA, 22 bp, synthetic construct
  misc_feature 1..22: note = chemically synthesized
  source 1..22: mol_type = other DNA
aaaattatgacatttatttaac

SEQ ID NO: 143693 - DNA, 22 bp, synthetic construct
  misc_feature 1..22: note = chemically synthesized
  source 1..22: mol_type = other DNA
tgacatttatttaacagatatt

SEQ ID NO: 143694 - DNA, 22 bp, synthetic construct
  misc_feature 1..22: note = chemically synthesized
  source 1..22: mol_type = other DNA
atttaacagatatttgctgaac

SEQ ID NO: 143695 - DNA, 22 bp, synthetic construct
  misc_feature 1..22: note = chemically synthesized
  source 1..22: mol_type = other DNA
tttaacagatatttgctgaaca

SEQ ID NO: 143696 - DNA, 22 bp, synthetic construct
  misc_feature 1..22: note = chemically synthesized
  source 1..22: mol_type = other DNA
aacagatatttgctgaacaaat

SEQ ID NO: 143697 - DNA, 22 bp, synthetic construct
  misc_feature 1..22: note = chemically synthesized
  source 1..22: mol_type = other DNA
acagatatttgctgaacaaatg

SEQ ID NO: 143698 - DNA, 22 bp, synthetic construct
  misc_feature 1..22: note = chemically synthesized
  source 1..22: mol_type = other DNA
gctgaacaaatgtttgaaaata

SEQ ID NO: 143699 - DNA, 22 bp, synthetic construct
  misc_feature 1..22: note = chemically synthesized
  source 1..22: mol_type = other DNA
ctgaacaaatgtttgaaaatac

SEQ ID NO: 143700 - DNA, 22 bp, synthetic construct
  misc_feature 1..22: note = chemically synthesized
  source 1..22: mol_type = other DNA
aacaaatgtttgaaaatacatg

SEQ ID NO: 143701 - DNA, 22 bp, synthetic construct
  misc_feature 1..22: note = chemically synthesized
  source 1..22: mol_type = other DNA
gaaaatacatgggaaagaatgc

SEQ ID NO: 143702 - DNA, 22 bp, synthetic construct
  misc_feature 1..22: note = chemically synthesized
  source 1..22: mol_type = other DNA
aaaatacatgggaaagaatgct

SEQ ID NO: 143703 - DNA, 22 bp, synthetic construct
  misc_feature 1..22: note = chemically synthesized
  source 1..22: mol_type = other DNA
gaaaacacttgaaattgcttgt

SEQ ID NO: 143704 - DNA, 22 bp, synthetic construct
  misc_feature 1..22: note = chemically synthesized
  source 1..22: mol_type = other DNA
aaaacacttgaaattgcttgtg

SEQ ID NO: 143705 - DNA, 22 bp, synthetic construct
  misc_feature 1..22: note = chemically synthesized
  source 1..22: mol_type = other DNA
gaaattgcttgtgtaaagaaac

SEQ ID NO: 143706 - DNA, 22 bp, synthetic construct
  misc_feature 1..22: note = chemically synthesized
  source 1..22: mol_type = other DNA
aaattgcttgtgtaaagaaaca

SEQ ID NO: 143707 - DNA, 22 bp, synthetic construct
  misc_feature 1..22: note = chemically synthesized
  source 1..22: mol_type = other DNA
cttgtgtaaagaaacagtttta

SEQ ID NO: 143708 - DNA, 22 bp, synthetic construct
  misc_feature 1..22: note = chemically synthesized
  source 1..22: mol_type = other DNA
gtgtaaagaaacagttttatca

SEQ ID NO: 143709 - DNA, 22 bp, synthetic construct
  misc_feature 1..22: note = chemically synthesized
  source 1..22: mol_type = other DNA
tgtaaagaaacagttttatcag

SEQ ID NO: 143710 - DNA, 22 bp, synthetic construct
  misc_feature 1..22: note = chemically synthesized
  source 1..22: mol_type = other DNA
tatcagttaggatttaatcaat

SEQ ID NO: 143711 - DNA, 22 bp, synthetic construct
  misc_feature 1..22: note = chemically synthesized
  source 1..22: mol_type = other DNA
atcagttaggatttaatcaatg

SEQ ID NO: 143712 - DNA, 22 bp, synthetic construct
  misc_feature 1..22: note = chemically synthesized
  source 1..22: mol_type = other DNA
tcagttaggatttaatcaatgt

SEQ ID NO: 143713 - DNA, 22 bp, synthetic construct
  misc_feature 1..22: note = chemically synthesized
  source 1..22: mol_type = other DNA
ggatttaatcaatgtcagaagc

SEQ ID NO: 143714 - DNA, 22 bp, synthetic construct
  misc_feature 1..22: note = chemically synthesized
  source 1..22: mol_type = other DNA
aatcaatgtcagaagcaatgat

SEQ ID NO: 143715 - DNA, 22 bp, synthetic construct
  misc_feature 1..22: note = chemically synthesized
  source 1..22: mol_type = other DNA
atcaatgtcagaagcaatgata

SEQ ID NO: 143716 - DNA, 22 bp, synthetic construct
  misc_feature 1..22: note = chemically synthesized
  source 1..22: mol_type = other DNA
tggataaggagaaatcaacaaa

SEQ ID NO: 143717 - DNA, 22 bp, synthetic construct
  misc_feature 1..22: note = chemically synthesized
  source 1..22: mol_type = other DNA
ttaaaagatattgcctcaaaag

SEQ ID NO: 143718 - DNA, 22 bp, synthetic construct
  misc_feature 1..22: note = chemically synthesized
  source 1..22: mol_type = other DNA
aaaagatattgcctcaaaagca

SEQ ID NO: 143719 - DNA, 22 bp, synthetic construct
  misc_feature 1..22: note = chemically synthesized
  source 1..22: mol_type = other DNA
aaagatattgcctcaaaagcat

SEQ ID NO: 143720 - DNA, 22 bp, synthetic construct
  misc_feature 1..22: note = chemically synthesized
  source 1..22: mol_type = other DNA
cctcaaaagcataagaggaaat

SEQ ID NO: 143721 - DNA, 22 bp, synthetic construct
  misc_feature 1..22: note = chemically synthesized
  source 1..22: mol_type = other DNA
aaaagcataagaggaaataagg

SEQ ID NO: 143722 - DNA, 22 bp, synthetic construct
  misc_feature 1..22: note = chemically synthesized
  source 1..22: mol_type = other DNA
atacatgacttttagaacactg

SEQ ID NO: 143723 - DNA, 22 bp, synthetic construct
  misc_feature 1..22: note = chemically synthesized
  source 1..22: mol_type = other DNA
tacatgacttttagaacactgc

SEQ ID NO: 143724 - DNA, 22 bp, synthetic construct
  misc_feature 1..22: note = chemically synthesized
  source 1..22: mol_type = other DNA
ttagaacactgccttggttttt

SEQ ID NO: 143725 - DNA, 22 bp, synthetic construct
  misc_feature 1..22: note = chemically synthesized
  source 1..22: mol_type = other DNA
tagaacactgccttggtttttg

SEQ ID NO: 143726 - DNA, 22 bp, synthetic construct
  misc_feature 1..22: note = chemically synthesized
  source 1..22: mol_type = other DNA
agaacactgccttggtttttgg

SEQ ID NO: 143727 - DNA, 22 bp, synthetic construct
  misc_feature 1..22: note = chemically synthesized
  source 1..22: mol_type = other DNA
gaacactgccttggtttttgga

SEQ ID NO: 143728 - DNA, 22 bp, synthetic construct
  misc_feature 1..22: note = chemically synthesized
  source 1..22: mol_type = other DNA
ccttggtttttggataaatggg

SEQ ID NO: 143729 - DNA, 22 bp, synthetic construct
  misc_feature 1..22: note = chemically synthesized
  source 1..22: mol_type = other DNA
ggtttttggataaatggggaag

SEQ ID NO: 143730 - DNA, 22 bp, synthetic construct
  misc_feature 1..22: note = chemically synthesized
  source 1..22: mol_type = other DNA
gtttttggataaatggggaagt

SEQ ID NO: 143731 - DNA, 22 bp, synthetic construct
  misc_feature 1..22: note = chemically synthesized
  source 1..22: mol_type = other DNA
ttggataaatggggaagttgtt

SEQ ID NO: 143732 - DNA, 22 bp, synthetic construct
  misc_feature 1..22: note = chemically synthesized
  source 1..22: mol_type = other DNA
tggataaatggggaagttgttt

SEQ ID NO: 143733 - DNA, 22 bp, synthetic construct
  misc_feature 1..22: note = chemically synthesized
  source 1..22: mol_type = other DNA
ggataaatggggaagttgtttg

SEQ ID NO: 143734 - DNA, 22 bp, synthetic construct
  misc_feature 1..22: note = chemically synthesized
  source 1..22: mol_type = other DNA
gataaatggggaagttgtttga

SEQ ID NO: 143735 - DNA, 22 bp, synthetic construct
  misc_feature 1..22: note = chemically synthesized
  source 1..22: mol_type = other DNA
tttgaaaacaggagggatccta

SEQ ID NO: 143736 - DNA, 22 bp, synthetic construct
  misc_feature 1..22: note = chemically synthesized
  source 1..22: mol_type = other DNA
gaaaacaggagggatcctagat

SEQ ID NO: 143737 - DNA, 22 bp, synthetic construct
  misc_feature 1..22: note = chemically synthesized
  source 1..22: mol_type = other DNA
aaaacaggagggatcctagata

SEQ ID NO: 143738 - DNA, 22 bp, synthetic construct
  misc_feature 1..22: note = chemically synthesized
  source 1..22: mol_type = other DNA
gatattccttagtctgaggagg

SEQ ID NO: 143739 - DNA, 22 bp, synthetic construct
  misc_feature 1..22: note = chemically synthesized
  source 1..22: mol_type = other DNA
cttagtctgaggaggagcaatt

SEQ ID NO: 143740 - DNA, 22 bp, synthetic construct
  misc_feature 1..22: note = chemically synthesized
  source 1..22: mol_type = other DNA
agtctgaggaggagcaattaag

SEQ ID NO: 143741 - DNA, 22 bp, synthetic construct
  misc_feature 1..22: note = chemically synthesized
  source 1..22: mol_type = other DNA
gtctgaggaggagcaattaaga

SEQ ID NO: 143742 - DNA, 22 bp, synthetic construct
  misc_feature 1..22: note = chemically synthesized
  source 1..22: mol_type = other DNA
aggaggagcaattaagattcac

SEQ ID NO: 143743 - DNA, 22 bp, synthetic construct
  misc_feature 1..22: note = chemically synthesized
  source 1..22: mol_type = other DNA
agattcacttgtttagaggctg

SEQ ID NO: 143744 - DNA, 22 bp, synthetic construct
  misc_feature 1..22: note = chemically synthesized
  source 1..22: mol_type = other DNA
acttgtttagaggctgggagtg

SEQ ID NO: 143745 - DNA, 22 bp, synthetic construct
  misc_feature 1..22: note = chemically synthesized
  source 1..22: mol_type = other DNA
gtttagaggctgggagtggtgg

SEQ ID NO: 143746 - DNA, 22 bp, synthetic construct
  misc_feature 1..22: note = chemically synthesized
  source 1..22: mol_type = other DNA
tttagaggctgggagtggtggc

SEQ ID NO: 143747 - DNA, 22 bp, synthetic construct
  misc_feature 1..22: note = chemically synthesized
  source 1..22: mol_type = other DNA
agaggctgggagtggtggctca

SEQ ID NO: 143748 - DNA, 22 bp, synthetic construct
  misc_feature 1..22: note = chemically synthesized
  source 1..22: mol_type = other DNA
gaggctgggagtggtggctcac

SEQ ID NO: 143749 - DNA, 22 bp, synthetic construct
  misc_feature 1..22: note = chemically synthesized
  source 1..22: mol_type = other DNA
ggagtggtggctcacgcctgta

SEQ ID NO: 143750 - DNA, 22 bp, synthetic construct
  misc_feature 1..22: note = chemically synthesized
  source 1..22: mol_type = other DNA
acgcctgtaatcccagaatttt

SEQ ID NO: 143751 - DNA, 22 bp, synthetic construct
  misc_feature 1..22: note = chemically synthesized
  source 1..22: mol_type = other DNA
taatcccagaattttgggaggc

SEQ ID NO: 143752 - DNA, 22 bp, synthetic construct
  misc_feature 1..22: note = chemically synthesized
  source 1..22: mol_type = other DNA
tgggaggccaaggcaggcagat

SEQ ID NO: 143753 - DNA, 22 bp, synthetic construct
  misc_feature 1..22: note = chemically synthesized
  source 1..22: mol_type = other DNA
gggaggccaaggcaggcagatc

SEQ ID NO: 143754 - DNA, 22 bp, synthetic construct
  misc_feature 1..22: note = chemically synthesized
  source 1..22: mol_type = other DNA
ggaggccaaggcaggcagatca

SEQ ID NO: 143755 - DNA, 22 bp, synthetic construct
  misc_feature 1..22: note = chemically synthesized
  source 1..22: mol_type = other DNA
aggtcaagagttcaagaccaac

SEQ ID NO: 143756 - DNA, 22 bp, synthetic construct
  misc_feature 1..22: note = chemically synthesized
  source 1..22: mol_type = other DNA
aagaccaacctggccaacatgg

SEQ ID NO: 143757 - DNA, 22 bp, synthetic construct
  misc_feature 1..22: note = chemically synthesized
  source 1..22: mol_type = other DNA
gccaacatggtgaaatcccatc

SEQ ID NO: 143758 - DNA, 22 bp, synthetic construct
  misc_feature 1..22: note = chemically synthesized
  source 1..22: mol_type = other DNA
tacaaaaatacaaaaattagac

SEQ ID NO: 143759 - DNA, 22 bp, synthetic construct
  misc_feature 1..22: note = chemically synthesized
  source 1..22: mol_type = other DNA
caaaaatacaaaaattagacag

SEQ ID NO: 143760 - DNA, 22 bp, synthetic construct
  misc_feature 1..22: note = chemically synthesized
  source 1..22: mol_type = other DNA
gacaggcatgatggcaagtgcc

SEQ ID NO: 143761 - DNA, 22 bp, synthetic construct
  misc_feature 1..22: note = chemically synthesized
  source 1..22: mol_type = other DNA
taatcccagctacttgggaggc

SEQ ID NO: 143762 - DNA, 22 bp, synthetic construct
  misc_feature 1..22: note = chemically synthesized
  source 1..22: mol_type = other DNA
cttgggaggctgaggaaggaga

SEQ ID NO: 143763 - DNA, 22 bp, synthetic construct
  misc_feature 1..22: note = chemically synthesized
  source 1..22: mol_type = other DNA
gggaggctgaggaaggagaatt

SEQ ID NO: 143764 - DNA, 22 bp, synthetic construct
  misc_feature 1..22: note = chemically synthesized
  source 1..22: mol_type = other DNA
ggaggctgaggaaggagaattg

SEQ ID NO: 143765 - DNA, 22 bp, synthetic construct
  misc_feature 1..22: note = chemically synthesized
  source 1..22: mol_type = other DNA
aggaaggagaattgcttgaacc

SEQ ID NO: 143766 - DNA, 22 bp, synthetic construct
  misc_feature 1..22: note = chemically synthesized
  source 1..22: mol_type = other DNA
cttgaacctggaaggcaggagt

SEQ ID NO: 143767 - DNA, 22 bp, synthetic construct
  misc_feature 1..22: note = chemically synthesized
  source 1..22: mol_type = other DNA
gaacctggaaggcaggagttgc

SEQ ID NO: 143768 - DNA, 22 bp, synthetic construct
  misc_feature 1..22: note = chemically synthesized
  source 1..22: mol_type = other DNA
aacctggaaggcaggagttgca

SEQ ID NO: 143769 - DNA, 22 bp, synthetic construct
  misc_feature 1..22: note = chemically synthesized
  source 1..22: mol_type = other DNA
gaaggcaggagttgcagtgagc

SEQ ID NO: 143770 - DNA, 22 bp, synthetic construct
  misc_feature 1..22: note = chemically synthesized
  source 1..22: mol_type = other DNA
cagtgagccgagatcataccac

SEQ ID NO: 143771 - DNA, 22 bp, synthetic construct
  misc_feature 1..22: note = chemically synthesized
  source 1..22: mol_type = other DNA
cactccagcctgggtgacagaa

SEQ ID NO: 143772 - DNA, 22 bp, synthetic construct
  misc_feature 1..22: note = chemically synthesized
  source 1..22: mol_type = other DNA
cagcctgggtgacagaacaaga

SEQ ID NO: 143773 - DNA, 22 bp, synthetic construct
  misc_feature 1..22: note = chemically synthesized
  source 1..22: mol_type = other DNA
ggtgacagaacaagactctgtc

SEQ ID NO: 143774 - DNA, 22 bp, synthetic construct
  misc_feature 1..22: note = chemically synthesized
  source 1..22: mol_type = other DNA
tgtctcaaaaaaaaaaaagaga

SEQ ID NO: 143775 - DNA, 22 bp, synthetic construct
  misc_feature 1..22: note = chemically synthesized
  source 1..22: mol_type = other DNA
tctcaaaaaaaaaaaagagaga

SEQ ID NO: 143776 - DNA, 22 bp, synthetic construct
  misc_feature 1..22: note = chemically synthesized
  source 1..22: mol_type = other DNA
aaaaaaaaaaaagagagattca

SEQ ID NO: 143777 - DNA, 22 bp, synthetic construct
  misc_feature 1..22: note = chemically synthesized
  source 1..22: mol_type = other DNA
aaaagattcacttgtttaggcc

SEQ ID NO: 143778 - DNA, 22 bp, synthetic construct
  misc_feature 1..22: note = chemically synthesized
  source 1..22: mol_type = other DNA
acttgtttaggccttagcgggc

SEQ ID NO: 143779 - DNA, 22 bp, synthetic construct
  misc_feature 1..22: note = chemically synthesized
  source 1..22: mol_type = other DNA
gtttaggccttagcgggcttag

SEQ ID NO: 143780 - DNA, 22 bp, synthetic construct
  misc_feature 1..22: note = chemically synthesized
  source 1..22: mol_type = other DNA
tttaggccttagcgggcttaga

SEQ ID NO: 143781 - DNA, 22 bp, synthetic construct
  misc_feature 1..22: note = chemically synthesized
  source 1..22: mol_type = other DNA
aggccttagcgggcttagacac

SEQ ID NO: 143782 - DNA, 22 bp, synthetic construct
  misc_feature 1..22: note = chemically synthesized
  source 1..22: mol_type = other DNA
ggccttagcgggcttagacacc

SEQ ID NO: 143783 - DNA, 22 bp, synthetic construct
  misc_feature 1..22: note = chemically synthesized
  source 1..22: mol_type = other DNA
agcgggcttagacaccagtctc

SEQ ID NO: 143784 - DNA, 22 bp, synthetic construct
  misc_feature 1..22: note = chemically synthesized
  source 1..22: mol_type = other DNA
gcgggcttagacaccagtctct

SEQ ID NO: 143785 - DNA, 22 bp, synthetic construct
  misc_feature 1..22: note = chemically synthesized
  source 1..22: mol_type = other DNA
agacaccagtctctgacacatt

SEQ ID NO: 143786 - DNA, 22 bp, synthetic construct
  misc_feature 1..22: note = chemically synthesized
  source 1..22: mol_type = other DNA
gacaccagtctctgacacattc

SEQ ID NO: 143787 - DNA, 22 bp, synthetic construct
  misc_feature 1..22: note = chemically synthesized
  source 1..22: mol_type = other DNA
tgacacattcttaaaggtcagg

SEQ ID NO: 143788 - DNA, 22 bp, synthetic construct
  misc_feature 1..22: note = chemically synthesized
  source 1..22: mol_type = other DNA
acacattcttaaaggtcaggct

SEQ ID NO: 143789 - DNA, 22 bp, synthetic construct
  misc_feature 1..22: note = chemically synthesized
  source 1..22: mol_type = other DNA
ttaaaggtcaggctctacaaat

SEQ ID NO: 143790 - DNA, 22 bp, synthetic construct
  misc_feature 1..22: note = chemically synthesized
  source 1..22: mol_type = other DNA
aaaggtcaggctctacaaatgg

SEQ ID NO: 143791 - DNA, 22 bp, synthetic construct
  misc_feature 1..22: note = chemically synthesized
  source 1..22: mol_type = other DNA
aaggtcaggctctacaaatgga

SEQ ID NO: 143792 - DNA, 22 bp, synthetic construct
  misc_feature 1..22: note = chemically synthesized
  source 1..22: mol_type = other DNA
tacaaatggaacccaaccagac

SEQ ID NO: 143793 - DNA, 22 bp, synthetic construct
  misc_feature 1..22: note = chemically synthesized
  source 1..22: mol_type = other DNA
caaatggaacccaaccagactc

SEQ ID NO: 143794 - DNA, 22 bp, synthetic construct
  misc_feature 1..22: note = chemically synthesized
  source 1..22: mol_type = other DNA
tcagatatggccaaagatctat

SEQ ID NO: 143795 - DNA, 22 bp, synthetic construct
  misc_feature 1..22: note = chemically synthesized
  source 1..22: mol_type = other DNA
agatatggccaaagatctatac

SEQ ID NO: 143796 - DNA, 22 bp, synthetic construct
  misc_feature 1..22: note = chemically synthesized
  source 1..22: mol_type = other DNA
tacacacccatctcacagatcc

SEQ ID NO: 143797 - DNA, 22 bp, synthetic construct
  misc_feature 1..22: note = chemically synthesized
  source 1..22: mol_type = other DNA
acagatcccctatcttaaagag

SEQ ID NO: 143798 - DNA, 22 bp, synthetic construct
  misc_feature 1..22: note = chemically synthesized
  source 1..22: mol_type = other DNA
tcttaaagagaccctaatttgg

SEQ ID NO: 143799 - DNA, 22 bp, synthetic construct
  misc_feature 1..22: note = chemically synthesized
  source 1..22: mol_type = other DNA
aaagagaccctaatttgggttc

SEQ ID NO: 143800 - DNA, 22 bp, synthetic construct
  misc_feature 1..22: note = chemically synthesized
  source 1..22: mol_type = other DNA
aagagaccctaatttgggttca

SEQ ID NO: 143801 - DNA, 22 bp, synthetic construct
  misc_feature 1..22: note = chemically synthesized
  source 1..22: mol_type = other DNA
atttgggttcacctcagtctct

SEQ ID NO: 143802 - DNA, 22 bp, synthetic construct
  misc_feature 1..22: note = chemically synthesized
  source 1..22: mol_type = other DNA
gggttcacctcagtctctataa

SEQ ID NO: 143803 - DNA, 22 bp, synthetic construct
  misc_feature 1..22: note = chemically synthesized
  source 1..22: mol_type = other DNA
ggttcacctcagtctctataat

SEQ ID NO: 143804 - DNA, 22 bp, synthetic construct
  misc_feature 1..22: note = chemically synthesized
  source 1..22: mol_type = other DNA
acctcagtctctataatctgta

SEQ ID NO: 143805 - DNA, 22 bp, synthetic construct
  misc_feature 1..22: note = chemically synthesized
  source 1..22: mol_type = other DNA
agtctctataatctgtaccagc

SEQ ID NO: 143806 - DNA, 22 bp, synthetic construct
  misc_feature 1..22: note = chemically synthesized
  source 1..22: mol_type = other DNA
tataatctgtaccagcatacca

SEQ ID NO: 143807 - DNA, 22 bp, synthetic construct
  misc_feature 1..22: note = chemically synthesized
  source 1..22: mol_type = other DNA
taatctgtaccagcataccaat

SEQ ID NO: 143808 - DNA, 22 bp, synthetic construct
  misc_feature 1..22: note = chemically synthesized
  source 1..22: mol_type = other DNA
taccagcataccaataaaaatc

SEQ ID NO: 143809 - DNA, 22 bp, synthetic construct
  misc_feature 1..22: note = chemically synthesized
  source 1..22: mol_type = other DNA
tctcacccatccttagattgag

SEQ ID NO: 143810 - DNA, 22 bp, synthetic construct
  misc_feature 1..22: note = chemically synthesized
  source 1..22: mol_type = other DNA
ctcacccatccttagattgaga

SEQ ID NO: 143811 - DNA, 22 bp, synthetic construct
  misc_feature 1..22: note = chemically synthesized
  source 1..22: mol_type = other DNA
tcacccatccttagattgagag

SEQ ID NO: 143812 - DNA, 22 bp, synthetic construct
  misc_feature 1..22: note = chemically synthesized
  source 1..22: mol_type = other DNA
acccatccttagattgagagaa

SEQ ID NO: 143813 - DNA, 22 bp, synthetic construct
  misc_feature 1..22: note = chemically synthesized
  source 1..22: mol_type = other DNA
agattgagagaagtcacttatt

SEQ ID NO: 143814 - DNA, 22 bp, synthetic construct
  misc_feature 1..22: note = chemically synthesized
  source 1..22: mol_type = other DNA
gattgagagaagtcacttatta

SEQ ID NO: 143815 - DNA, 22 bp, synthetic construct
  misc_feature 1..22: note = chemically synthesized
  source 1..22: mol_type = other DNA
agagaagtcacttattattatg

SEQ ID NO: 143816 - DNA, 22 bp, synthetic construct
  misc_feature 1..22: note = chemically synthesized
  source 1..22: mol_type = other DNA
attattatgtgagtaactggaa

SEQ ID NO: 143817 - DNA, 22 bp, synthetic construct
  misc_feature 1..22: note = chemically synthesized
  source 1..22: mol_type = other DNA
ttattatgtgagtaactggaag

SEQ ID NO: 143818 - DNA, 22 bp, synthetic construct
  misc_feature 1..22: note = chemically synthesized
  source 1..22: mol_type = other DNA
ttatgtgagtaactggaagata

SEQ ID NO: 143819 - DNA, 22 bp, synthetic construct
  misc_feature 1..22: note = chemically synthesized
  source 1..22: mol_type = other DNA
tgtgagtaactggaagatactg

SEQ ID NO: 143820 - DNA, 22 bp, synthetic construct
  misc_feature 1..22: note = chemically synthesized
  source 1..22: mol_type = other DNA
gaagatactgataagttgacaa

SEQ ID NO: 143821 - DNA, 22 bp, synthetic construct
  misc_feature 1..22: note = chemically synthesized
  source 1..22: mol_type = other DNA
ataagttgacaaatctttttct

SEQ ID NO: 143822 - DNA, 22 bp, synthetic construct
  misc_feature 1..22: note = chemically synthesized
  source 1..22: mol_type = other DNA
acaaatctttttctttcctttc

SEQ ID NO: 143823 - DNA, 22 bp, synthetic construct
  misc_feature 1..22: note = chemically synthesized
  source 1..22: mol_type = other DNA
tttctttcctttcttattcaac

SEQ ID NO: 143824 - DNA, 22 bp, synthetic construct
  misc_feature 1..22: note = chemically synthesized
  source 1..22: mol_type = other DNA
ttctttcctttcttattcaact

SEQ ID NO: 143825 - DNA, 22 bp, synthetic construct
  misc_feature 1..22: note = chemically synthesized
  source 1..22: mol_type = other DNA
tctttcctttcttattcaactt

SEQ ID NO: 143826 - DNA, 22 bp, synthetic construct
  misc_feature 1..22: note = chemically synthesized
  source 1..22: mol_type = other DNA
ctttcctttcttattcaacttt

SEQ ID NO: 143827 - DNA, 22 bp, synthetic construct
  misc_feature 1..22: note = chemically synthesized
  source 1..22: mol_type = other DNA
tttcctttcttattcaactttt

SEQ ID NO: 143828 - DNA, 22 bp, synthetic construct
  misc_feature 1..22: note = chemically synthesized
  source 1..22: mol_type = other DNA
tcctttcttattcaacttttat

SEQ ID NO: 143829 - DNA, 22 bp, synthetic construct
  misc_feature 1..22: note = chemically synthesized
  source 1..22: mol_type = other DNA
cctttcttattcaacttttatt

SEQ ID NO: 143830 - DNA, 22 bp, synthetic construct
  misc_feature 1..22: note = chemically synthesized
  source 1..22: mol_type = other DNA
ctttcttattcaacttttattt

SEQ ID NO: 143831 - DNA, 22 bp, synthetic construct
  misc_feature 1..22: note = chemically synthesized
  source 1..22: mol_type = other DNA
tcttattcaacttttattttaa

SEQ ID NO: 143832 - DNA, 22 bp, synthetic construct
  misc_feature 1..22: note = chemically synthesized
  source 1..22: mol_type = other DNA
cttattcaacttttattttaac

SEQ ID NO: 143833 - DNA, 22 bp, synthetic construct
  misc_feature 1..22: note = chemically synthesized
  source 1..22: mol_type = other DNA
ttattcaacttttattttaact

SEQ ID NO: 143834 - DNA, 22 bp, synthetic construct
  misc_feature 1..22: note = chemically synthesized
  source 1..22: mol_type = other DNA
attcaacttttattttaacttc

SEQ ID NO: 143835 - DNA, 22 bp, synthetic construct
  misc_feature 1..22: note = chemically synthesized
  source 1..22: mol_type = other DNA
ttcaacttttattttaacttcc

SEQ ID NO: 143836 - DNA, 22 bp, synthetic construct
  misc_feature 1..22: note = chemically synthesized
  source 1..22: mol_type = other DNA
aacttttattttaacttccaaa

SEQ ID NO: 143837 - DNA, 22 bp, synthetic construct
  misc_feature 1..22: note = chemically synthesized
  source 1..22: mol_type = other DNA
ttattttaacttccaaagaaca

SEQ ID NO: 143838 - DNA, 22 bp, synthetic construct
  misc_feature 1..22: note = chemically synthesized
  source 1..22: mol_type = other DNA
tattttaacttccaaagaacaa

SEQ ID NO: 143839 - DNA, 22 bp, synthetic construct
  misc_feature 1..22: note = chemically synthesized
  source 1..22: mol_type = other DNA
attttaacttccaaagaacaag

SEQ ID NO: 143840 - DNA, 22 bp, synthetic construct
  misc_feature 1..22: note = chemically synthesized
  source 1..22: mol_type = other DNA
ttttaacttccaaagaacaagt

SEQ ID NO: 143841 - DNA, 22 bp, synthetic construct
  misc_feature 1..22: note = chemically synthesized
  source 1..22: mol_type = other DNA
taacttccaaagaacaagtgca

SEQ ID NO: 143842 - DNA, 22 bp, synthetic construct
  misc_feature 1..22: note = chemically synthesized
  source 1..22: mol_type = other DNA
aacttccaaagaacaagtgcaa

SEQ ID NO: 143843 - DNA, 22 bp, synthetic construct
  misc_feature 1..22: note = chemically synthesized
  source 1..22: mol_type = other DNA
acttccaaagaacaagtgcaat

SEQ ID NO: 143844 - DNA, 22 bp, synthetic construct
  misc_feature 1..22: note = chemically synthesized
  source 1..22: mol_type = other DNA
ccaaagaacaagtgcaatatgt

SEQ ID NO: 143845 - DNA, 22 bp, synthetic construct
  misc_feature 1..22: note = chemically synthesized
  source 1..22: mol_type = other DNA
caaagaacaagtgcaatatgtg

SEQ ID NO: 143846 - DNA, 22 bp, synthetic construct
  misc_feature 1..22: note = chemically synthesized
  source 1..22: mol_type = other DNA
tgttgcgcaggtcaacatgtat

SEQ ID NO: 143847 - DNA, 22 bp, synthetic construct
  misc_feature 1..22: note = chemically synthesized
  source 1..22: mol_type = other DNA
gttgcgcaggtcaacatgtatc

SEQ ID NO: 143848 - DNA, 22 bp, synthetic construct
  misc_feature 1..22: note = chemically synthesized
  source 1..22: mol_type = other DNA
ttgcgcaggtcaacatgtatct

SEQ ID NO: 143849 - DNA, 22 bp, synthetic construct
  misc_feature 1..22: note = chemically synthesized
  source 1..22: mol_type = other DNA
cgcaggtcaacatgtatctttc

SEQ ID NO: 143850 - DNA, 22 bp, synthetic construct
  misc_feature 1..22: note = chemically synthesized
  source 1..22: mol_type = other DNA
tctggtcttttagccgcctaac

SEQ ID NO: 143851 - DNA, 22 bp, synthetic construct
  misc_feature 1..22: note = chemically synthesized
  source 1..22: mol_type = other DNA
ctggtcttttagccgcctaaca

SEQ ID NO: 143852 - DNA, 22 bp, synthetic construct
  misc_feature 1..22: note = chemically synthesized
  source 1..22: mol_type = other DNA
tggtcttttagccgcctaacac

SEQ ID NO: 143853 - DNA, 22 bp, synthetic construct
  misc_feature 1..22: note = chemically synthesized
  source 1..22: mol_type = other DNA
gtcttttagccgcctaacactt

SEQ ID NO: 143854 - DNA, 22 bp, synthetic construct
  misc_feature 1..22: note = chemically synthesized
  source 1..22: mol_type = other DNA
ttagccgcctaacactttgagc

SEQ ID NO: 143855 - DNA, 22 bp, synthetic construct
  misc_feature 1..22: note = chemically synthesized
  source 1..22: mol_type = other DNA
tagccgcctaacactttgagca

SEQ ID NO: 143856 - DNA, 22 bp, synthetic construct
  misc_feature 1..22: note = chemically synthesized
  source 1..22: mol_type = other DNA
agccgcctaacactttgagcag

SEQ ID NO: 143857 - DNA, 22 bp, synthetic construct
  misc_feature 1..22: note = chemically synthesized
  source 1..22: mol_type = other DNA
gccgcctaacactttgagcaga

SEQ ID NO: 143858 - DNA, 22 bp, synthetic construct
  misc_feature 1..22: note = chemically synthesized
  source 1..22: mol_type = other DNA
acactttgagcagatataagcc

SEQ ID NO: 143859 - DNA, 22 bp, synthetic construct
  misc_feature 1..22: note = chemically synthesized
  source 1..22: mol_type = other DNA
tgagcagatataagccttacac

SEQ ID NO: 143860 - DNA, 22 bp, synthetic construct
  misc_feature 1..22: note = chemically synthesized
  source 1..22: mol_type = other DNA
gagcagatataagccttacaca

SEQ ID NO: 143861 - DNA, 22 bp, synthetic construct
  misc_feature 1..22: note = chemically synthesized
  source 1..22: mol_type = other DNA
agcagatataagccttacacag

SEQ ID NO: 143862 - DNA, 22 bp, synthetic construct
  misc_feature 1..22: note = chemically synthesized
  source 1..22: mol_type = other DNA
acacaggattatgaagtctgaa

SEQ ID NO: 143863 - DNA, 22 bp, synthetic construct
  misc_feature 1..22: note = chemically synthesized
  source 1..22: mol_type = other DNA
cacaggattatgaagtctgaaa

SEQ ID NO: 143864 - DNA, 22 bp, synthetic construct
  misc_feature 1..22: note = chemically synthesized
  source 1..22: mol_type = other DNA
tgaagtctgaaaggattccacc

SEQ ID NO: 143865 - DNA, 22 bp, synthetic construct
  misc_feature 1..22: note = chemically synthesized
  source 1..22: mol_type = other DNA
aaaggattccaccaatattatt

SEQ ID NO: 143866 - DNA, 22 bp, synthetic construct
  misc_feature 1..22: note = chemically synthesized
  source 1..22: mol_type = other DNA
caccaatattattataattcct

SEQ ID NO: 143867 - DNA, 22 bp, synthetic construct
  misc_feature 1..22: note = chemically synthesized
  source 1..22: mol_type = other DNA
ttataattcctatcaacctgat

SEQ ID NO: 143868 - DNA, 22 bp, synthetic construct
  misc_feature 1..22: note = chemically synthesized
  source 1..22: mol_type = other DNA
taattcctatcaacctgatagg

SEQ ID NO: 143869 - DNA, 22 bp, synthetic construct
  misc_feature 1..22: note = chemically synthesized
  source 1..22: mol_type = other DNA
ctatcaacctgataggttaggg

SEQ ID NO: 143870 - DNA, 22 bp, synthetic construct
  misc_feature 1..22: note = chemically synthesized
  source 1..22: mol_type = other DNA
tcaacctgataggttaggggaa

SEQ ID NO: 143871 - DNA, 22 bp, synthetic construct
  misc_feature 1..22: note = chemically synthesized
  source 1..22: mol_type = other DNA
ataggttaggggaaggtagagc

SEQ ID NO: 143872 - DNA, 22 bp, synthetic construct
  misc_feature 1..22: note = chemically synthesized
  source 1..22: mol_type = other DNA
ggggaaggtagagctctcctcc

SEQ ID NO: 143873 - DNA, 22 bp, synthetic construct
  misc_feature 1..22: note = chemically synthesized
  source 1..22: mol_type = other DNA
tcctccaataagccagatttcc

SEQ ID NO: 143874 - DNA, 22 bp, synthetic construct
  misc_feature 1..22: note = chemically synthesized
  source 1..22: mol_type = other DNA
ctccaataagccagatttccag

SEQ ID NO: 143875 - DNA, 22 bp, synthetic construct
  misc_feature 1..22: note = chemically synthesized
  source 1..22: mol_type = other DNA
caataagccagatttccagagt

SEQ ID NO: 143876 - DNA, 22 bp, synthetic construct
  misc_feature 1..22: note = chemically synthesized
  source 1..22: mol_type = other DNA
ccagagtttctgacgtcataat

SEQ ID NO: 143877 - DNA, 22 bp, synthetic construct
  misc_feature 1..22: note = chemically synthesized
  source 1..22: mol_type = other DNA
cagagtttctgacgtcataatc

SEQ ID NO: 143878 - DNA, 22 bp, synthetic construct
  misc_feature 1..22: note = chemically synthesized
  source 1..22: mol_type = other DNA
ctgacgtcataatctaccaagg

SEQ ID NO: 143879 - DNA, 22 bp, synthetic construct
  misc_feature 1..22: note = chemically synthesized
  source 1..22: mol_type = other DNA
tgacgtcataatctaccaaggt

SEQ ID NO: 143880 - DNA, 22 bp, synthetic construct
  misc_feature 1..22: note = chemically synthesized
  source 1..22: mol_type = other DNA
acgtcataatctaccaaggtca

SEQ ID NO: 143881 - DNA, 22 bp, synthetic construct
  misc_feature 1..22: note = chemically synthesized
  source 1..22: mol_type = other DNA
ccaaggtcatggatcgagttca

SEQ ID NO: 143882 - DNA, 22 bp, synthetic construct
  misc_feature 1..22: note = chemically synthesized
  source 1..22: mol_type = other DNA
agagaaaaaacaaaagcaaaac

SEQ ID NO: 143883 - DNA, 22 bp, synthetic construct
  misc_feature 1..22: note = chemically synthesized
  source 1..22: mol_type = other DNA
ccaaaaaataaaaatcccaaag

SEQ ID NO: 143884 - DNA, 22 bp, synthetic construct
  misc_feature 1..22: note = chemically synthesized
  source 1..22: mol_type = other DNA
cctgccatgttaagtggccaat

SEQ ID NO: 143885 - DNA, 22 bp, synthetic construct
  misc_feature 1..22: note = chemically synthesized
  source 1..22: mol_type = other DNA
ctgccatgttaagtggccaata

SEQ ID NO: 143886 - DNA, 22 bp, synthetic construct
  misc_feature 1..22: note = chemically synthesized
  source 1..22: mol_type = other DNA
ccatgttaagtggccaatatgt

SEQ ID NO: 143887 - DNA, 22 bp, synthetic construct
  misc_feature 1..22: note = chemically synthesized
  source 1..22: mol_type = other DNA
agtggccaatatgtcagaaaca

SEQ ID NO: 143888 - DNA, 22 bp, synthetic construct
  misc_feature 1..22: note = chemically synthesized
  source 1..22: mol_type = other DNA
agttacagataaagatgtctaa

SEQ ID NO: 143889 - DNA, 22 bp, synthetic construct
  misc_feature 1..22: note = chemically synthesized
  source 1..22: mol_type = other DNA
cagataaagatgtctaaactac

SEQ ID NO: 143890 - DNA, 22 bp, synthetic construct
  misc_feature 1..22: note = chemically synthesized
  source 1..22: mol_type = other DNA
aactacagtgacatcccagctg

SEQ ID NO: 143891 - DNA, 22 bp, synthetic construct
  misc_feature 1..22: note = chemically synthesized
  source 1..22: mol_type = other DNA
cagtgacatcccagctgtcaca

SEQ ID NO: 143892 - DNA, 22 bp, synthetic construct
  misc_feature 1..22: note = chemically synthesized
  source 1..22: mol_type = other DNA
tcacagtgtgtggactattagt

SEQ ID NO: 143893 - DNA, 22 bp, synthetic construct
  misc_feature 1..22: note = chemically synthesized
  source 1..22: mol_type = other DNA
ttagtcaataaaacagtccctg

SEQ ID NO: 143894 - DNA, 22 bp, synthetic construct
  misc_feature 1..22: note = chemically synthesized
  source 1..22: mol_type = other DNA
gtcaataaaacagtccctgcct

SEQ ID NO: 143895 - DNA, 22 bp, synthetic construct
  misc_feature 1..22: note = chemically synthesized
  source 1..22: mol_type = other DNA
cctcttaagagttgttttccat

SEQ ID NO: 143896 - DNA, 22 bp, synthetic construct
  misc_feature 1..22: note = chemically synthesized
  source 1..22: mol_type = other DNA
ttaagagttgttttccatgcaa

SEQ ID NO: 143897 - DNA, 22 bp, synthetic construct
  misc_feature 1..22: note = chemically synthesized
  source 1..22: mol_type = other DNA
aagagttgttttccatgcaaat

SEQ ID NO: 143898 - DNA, 22 bp, synthetic construct
  misc_feature 1..22: note = chemically synthesized
  source 1..22: mol_type = other DNA
agagttgttttccatgcaaata

SEQ ID NO: 143899 - DNA, 22 bp, synthetic construct
  misc_feature 1..22: note = chemically synthesized
  source 1..22: mol_type = other DNA
ttttccatgcaaatacatgtct

SEQ ID NO: 143900 - DNA, 22 bp, synthetic construct
  misc_feature 1..22: note = chemically synthesized
  source 1..22: mol_type = other DNA
tccatgcaaatacatgtcttat

SEQ ID NO: 143901 - DNA, 22 bp, synthetic construct
  misc_feature 1..22: note = chemically synthesized
  source 1..22: mol_type = other DNA
ccatgcaaatacatgtcttatg

SEQ ID NO: 143902 - DNA, 22 bp, synthetic construct
  misc_feature 1..22: note = chemically synthesized
  source 1..22: mol_type = other DNA
catgcaaatacatgtcttatgt

SEQ ID NO: 143903 - DNA, 22 bp, synthetic construct
  misc_feature 1..22: note = chemically synthesized
  source 1..22: mol_type = other DNA
atgtcttagaataagattccct

SEQ ID NO: 143904 - DNA, 22 bp, synthetic construct
  misc_feature 1..22: note = chemically synthesized
  source 1..22: mol_type = other DNA
tgtcttagaataagattcccta

SEQ ID NO: 143905 - DNA, 22 bp, synthetic construct
  misc_feature 1..22: note = chemically synthesized
  source 1..22: mol_type = other DNA
agaataagattccctaagaagt

SEQ ID NO: 143906 - DNA, 22 bp, synthetic construct
  misc_feature 1..22: note = chemically synthesized
  source 1..22: mol_type = other DNA
gaataagattccctaagaagtg

SEQ ID NO: 143907 - DNA, 22 bp, synthetic construct
  misc_feature 1..22: note = chemically synthesized
  source 1..22: mol_type = other DNA
cctaagaagtgaacctagcatt

SEQ ID NO: 143908 - DNA, 22 bp, synthetic construct
  misc_feature 1..22: note = chemically synthesized
  source 1..22: mol_type = other DNA
agaagtgaacctagcatttata

SEQ ID NO: 143909 - DNA, 22 bp, synthetic construct
  misc_feature 1..22: note = chemically synthesized
  source 1..22: mol_type = other DNA
gcatttatacaagataattaat

SEQ ID NO: 143910 - DNA, 22 bp, synthetic construct
  misc_feature 1..22: note = chemically synthesized
  source 1..22: mol_type = other DNA
atacaagataattaattctaat

SEQ ID NO: 143911 - DNA, 22 bp, synthetic construct
  misc_feature 1..22: note = chemically synthesized
  source 1..22: mol_type = other DNA
tacaagataattaattctaatc

SEQ ID NO: 143912 - DNA, 22 bp, synthetic construct
  misc_feature 1..22: note = chemically synthesized
  source 1..22: mol_type = other DNA
attctaatccatagtatctggt

SEQ ID NO: 143913 - DNA, 22 bp, synthetic construct
  misc_feature 1..22: note = chemically synthesized
  source 1..22: mol_type = other DNA
taatccatagtatctggtaaag

SEQ ID NO: 143914 - DNA, 22 bp, synthetic construct
  misc_feature 1..22: note = chemically synthesized
  source 1..22: mol_type = other DNA
atccatagtatctggtaaagag

SEQ ID NO: 143915 - DNA, 22 bp, synthetic construct
  misc_feature 1..22: note = chemically synthesized
  source 1..22: mol_type = other DNA
gtaaagagcattctaccatcat

SEQ ID NO: 143916 - DNA, 22 bp, synthetic construct
  misc_feature 1..22: note = chemically synthesized
  source 1..22: mol_type = other DNA
taccatcatctttaccgagcat

SEQ ID NO: 143917 - DNA, 22 bp, synthetic construct
  misc_feature 1..22: note = chemically synthesized
  source 1..22: mol_type = other DNA
ccatcatctttaccgagcatag

SEQ ID NO: 143918 - DNA, 22 bp, synthetic construct
  misc_feature 1..22: note = chemically synthesized
  source 1..22: mol_type = other DNA
taccgagcatagaagagctaca

SEQ ID NO: 143919 - DNA, 22 bp, synthetic construct
  misc_feature 1..22: note = chemically synthesized
  source 1..22: mol_type = other DNA
accgagcatagaagagctacac

SEQ ID NO: 143920 - DNA, 22 bp, synthetic construct
  misc_feature 1..22: note = chemically synthesized
  source 1..22: mol_type = other DNA
ccgagcatagaagagctacacc

SEQ ID NO: 143921 - DNA, 22 bp, synthetic construct
  misc_feature 1..22: note = chemically synthesized
  source 1..22: mol_type = other DNA
caccaaaaccctgggtcatcag

SEQ ID NO: 143922 - DNA, 22 bp, synthetic construct
  misc_feature 1..22: note = chemically synthesized
  source 1..22: mol_type = other DNA
ggtcatcagccagcacatacac

SEQ ID NO: 143923 - DNA, 22 bp, synthetic construct
  misc_feature 1..22: note = chemically synthesized
  source 1..22: mol_type = other DNA
atccagtgataaatacacatca

SEQ ID NO: 143924 - DNA, 22 bp, synthetic construct
  misc_feature 1..22: note = chemically synthesized
  source 1..22: mol_type = other DNA
tccagtgataaatacacatcat

SEQ ID NO: 143925 - DNA, 22 bp, synthetic construct
  misc_feature 1..22: note = chemically synthesized
  source 1..22: mol_type = other DNA
catacatacctgaatataaaaa

SEQ ID NO: 143926 - DNA, 22 bp, synthetic construct
  misc_feature 1..22: note = chemically synthesized
  source 1..22: mol_type = other DNA
aatataaaaaaaatacttttgc

SEQ ID NO: 143927 - DNA, 22 bp, synthetic construct
  misc_feature 1..22: note = chemically synthesized
  source 1..22: mol_type = other DNA
ttgctgagatgaaacaggcgtg

SEQ ID NO: 143928 - DNA, 22 bp, synthetic construct
  misc_feature 1..22: note = chemically synthesized
  source 1..22: mol_type = other DNA
tgctgagatgaaacaggcgtga

SEQ ID NO: 143929 - DNA, 22 bp, synthetic construct
  misc_feature 1..22: note = chemically synthesized
  source 1..22: mol_type = other DNA
gctgagatgaaacaggcgtgat

SEQ ID NO: 143930 - DNA, 22 bp, synthetic construct
  misc_feature 1..22: note = chemically synthesized
  source 1..22: mol_type = other DNA
ctgagatgaaacaggcgtgatt

SEQ ID NO: 143931 - DNA, 22 bp, synthetic construct
  misc_feature 1..22: note = chemically synthesized
  source 1..22: mol_type = other DNA
agatgaaacaggcgtgatttat

SEQ ID NO: 143932 - DNA, 22 bp, synthetic construct
  misc_feature 1..22: note = chemically synthesized
  source 1..22: mol_type = other DNA
atttcaaataggtacggataag

SEQ ID NO: 143933 - DNA, 22 bp, synthetic construct
  misc_feature 1..22: note = chemically synthesized
  source 1..22: mol_type = other DNA
tttcaaataggtacggataagt

SEQ ID NO: 143934 - DNA, 22 bp, synthetic construct
  misc_feature 1..22: note = chemically synthesized
  source 1..22: mol_type = other DNA
caaataggtacggataagtaga

SEQ ID NO: 143935 - DNA, 22 bp, synthetic construct
  misc_feature 1..22: note = chemically synthesized
  source 1..22: mol_type = other DNA
aaataggtacggataagtagat

SEQ ID NO: 143936 - DNA, 22 bp, synthetic construct
  misc_feature 1..22: note = chemically synthesized
  source 1..22: mol_type = other DNA
aagtaaggattcagtcttatat

SEQ ID NO: 143937 - DNA, 22 bp, synthetic construct
  misc_feature 1..22: note = chemically synthesized
  source 1..22: mol_type = other DNA
agtcttatattatattacataa

SEQ ID NO: 143938 - DNA, 22 bp, synthetic construct
  misc_feature 1..22: note = chemically synthesized
  source 1..22: mol_type = other DNA
atattatattacataacattaa

SEQ ID NO: 143939 - DNA, 22 bp, synthetic construct
  misc_feature 1..22: note = chemically synthesized
  source 1..22: mol_type = other DNA
tattatattacataacattaat

SEQ ID NO: 143940 - DNA, 22 bp, synthetic construct
  misc_feature 1..22: note = chemically synthesized
  source 1..22: mol_type = other DNA
tattacataacattaatctatt

SEQ ID NO: 143941 - DNA, 22 bp, synthetic construct
  misc_feature 1..22: note = chemically synthesized
  source 1..22: mol_type = other DNA
cataacattaatctattcctgc

SEQ ID NO: 143942 - DNA, 22 bp, synthetic construct
  misc_feature 1..22: note = chemically synthesized
  source 1..22: mol_type = other DNA
atctattcctgcactgaaactg

SEQ ID NO: 143943 - DNA, 22 bp, synthetic construct
  misc_feature 1..22: note = chemically synthesized
  source 1..22: mol_type = other DNA
ttcctgcactgaaactgttgct

SEQ ID NO: 143944 - DNA, 22 bp, synthetic construct
  misc_feature 1..22: note = chemically synthesized
  source 1..22: mol_type = other DNA
ctgcactgaaactgttgcttta

SEQ ID NO: 143945 - DNA, 22 bp, synthetic construct
  misc_feature 1..22: note = chemically synthesized
  source 1..22: mol_type = other DNA
cactgaaactgttgctttatag

SEQ ID NO: 143946 - DNA, 22 bp, synthetic construct
  misc_feature 1..22: note = chemically synthesized
  source 1..22: mol_type = other DNA
aaactgttgctttataggattt

SEQ ID NO: 143947 - DNA, 22 bp, synthetic construct
  misc_feature 1..22: note = chemically synthesized
  source 1..22: mol_type = other DNA
ttgctttataggatttttcact

SEQ ID NO: 143948 - DNA, 22 bp, synthetic construct
  misc_feature 1..22: note = chemically synthesized
  source 1..22: mol_type = other DNA
ctttataggatttttcactaca

SEQ ID NO: 143949 - DNA, 22 bp, synthetic construct
  misc_feature 1..22: note = chemically synthesized
  source 1..22: mol_type = other DNA
tataggatttttcactacacta

SEQ ID NO: 143950 - DNA, 22 bp, synthetic construct
  misc_feature 1..22: note = chemically synthesized
  source 1..22: mol_type = other DNA
ataggatttttcactacactaa

SEQ ID NO: 143951 - DNA, 22 bp, synthetic construct
  misc_feature 1..22: note = chemically synthesized
  source 1..22: mol_type = other DNA
taggatttttcactacactaat

SEQ ID NO: 143952 - DNA, 22 bp, synthetic construct
  misc_feature 1..22: note = chemically synthesized
  source 1..22: mol_type = other DNA
ttcactacactaatgagaactt

SEQ ID NO: 143953 - DNA, 22 bp, synthetic construct
  misc_feature 1..22: note = chemically synthesized
  source 1..22: mol_type = other DNA
tcactacactaatgagaactta

SEQ ID NO: 143954 - DNA, 22 bp, synthetic construct
  misc_feature 1..22: note = chemically synthesized
  source 1..22: mol_type = other DNA
cactacactaatgagaacttaa

SEQ ID NO: 143955 - DNA, 22 bp, synthetic construct
  misc_feature 1..22: note = chemically synthesized
  source 1..22: mol_type = other DNA
actacactaatgagaacttaag

SEQ ID NO: 143956 - DNA, 22 bp, synthetic construct
  misc_feature 1..22: note = chemically synthesized
  source 1..22: mol_type = other DNA
cactaatgagaacttaagagat

SEQ ID NO: 143957 - DNA, 22 bp, synthetic construct
  misc_feature 1..22: note = chemically synthesized
  source 1..22: mol_type = other DNA
atgagaacttaagagataatgg

SEQ ID NO: 143958 - DNA, 22 bp, synthetic construct
  misc_feature 1..22: note = chemically synthesized
  source 1..22: mol_type = other DNA
aagagataatggcctaaaacca

SEQ ID NO: 143959 - DNA, 22 bp, synthetic construct
  misc_feature 1..22: note = chemically synthesized
  source 1..22: mol_type = other DNA
agagataatggcctaaaaccac

SEQ ID NO: 143960 - DNA, 22 bp, synthetic construct
  misc_feature 1..22: note = chemically synthesized
  source 1..22: mol_type = other DNA
aaaccacagagagtatattcaa

SEQ ID NO: 143961 - DNA, 22 bp, synthetic construct
  misc_feature 1..22: note = chemically synthesized
  source 1..22: mol_type = other DNA
aaagataagtatagcacttctt

SEQ ID NO: 143962 - DNA, 22 bp, synthetic construct
  misc_feature 1..22: note = chemically synthesized
  source 1..22: mol_type = other DNA
cttatttggaaaccaatgctta

SEQ ID NO: 143963 - DNA, 22 bp, synthetic construct
  misc_feature 1..22: note = chemically synthesized
  source 1..22: mol_type = other DNA
ttatttggaaaccaatgcttac

SEQ ID NO: 143964 - DNA, 22 bp, synthetic construct
  misc_feature 1..22: note = chemically synthesized
  source 1..22: mol_type = other DNA
atttggaaaccaatgcttacta

SEQ ID NO: 143965 - DNA, 22 bp, synthetic construct
  misc_feature 1..22: note = chemically synthesized
  source 1..22: mol_type = other DNA
tttggaaaccaatgcttactaa

SEQ ID NO: 143966 - DNA, 22 bp, synthetic construct
  misc_feature 1..22: note = chemically synthesized
  source 1..22: mol_type = other DNA
ggaaaccaatgcttactaaatg

SEQ ID NO: 143967 - DNA, 22 bp, synthetic construct
  misc_feature 1..22: note = chemically synthesized
  source 1..22: mol_type = other DNA
gaaaccaatgcttactaaatga

SEQ ID NO: 143968 - DNA, 22 bp, synthetic construct
  misc_feature 1..22: note = chemically synthesized
  source 1..22: mol_type = other DNA
actaaatgagactaagacgtgt

SEQ ID NO: 143969 - DNA, 22 bp, synthetic construct
  misc_feature 1..22: note = chemically synthesized
  source 1..22: mol_type = other DNA
ctaaatgagactaagacgtgtc

SEQ ID NO: 143970 - DNA, 22 bp, synthetic construct
  misc_feature 1..22: note = chemically synthesized
  source 1..22: mol_type = other DNA
aatgagactaagacgtgtccca

SEQ ID NO: 143971 - DNA, 22 bp, synthetic construct
  misc_feature 1..22: note = chemically synthesized
  source 1..22: mol_type = other DNA
agacgtgtcccatcaaaaatcc

SEQ ID NO: 143972 - DNA, 22 bp, synthetic construct
  misc_feature 1..22: note = chemically synthesized
  source 1..22: mol_type = other DNA
gacctatgcctaaaacacattt

SEQ ID NO: 143973 - DNA, 22 bp, synthetic construct
  misc_feature 1..22: note = chemically synthesized
  source 1..22: mol_type = other DNA
tgcctaaaacacatttcacaat

SEQ ID NO: 143974 - DNA, 22 bp, synthetic construct
  misc_feature 1..22: note = chemically synthesized
  source 1..22: mol_type = other DNA
aaacacatttcacaatccctga

SEQ ID NO: 143975 - DNA, 22 bp, synthetic construct
  misc_feature 1..22: note = chemically synthesized
  source 1..22: mol_type = other DNA
cacaatccctgaacttttcaaa

SEQ ID NO: 143976 - DNA, 22 bp, synthetic construct
  misc_feature 1..22: note = chemically synthesized
  source 1..22: mol_type = other DNA
acaatccctgaacttttcaaaa

SEQ ID NO: 143977 - DNA, 22 bp, synthetic construct
  misc_feature 1..22: note = chemically synthesized
  source 1..22: mol_type = other DNA
aacttttcaaaaattggtacat

SEQ ID NO: 143978 - DNA, 22 bp, synthetic construct
  misc_feature 1..22: note = chemically synthesized
  source 1..22: mol_type = other DNA
ttcaaaaattggtacatgcttt

SEQ ID NO: 143979 - DNA, 22 bp, synthetic construct
  misc_feature 1..22: note = chemically synthesized
  source 1..22: mol_type = other DNA
tcaaaaattggtacatgcttta

SEQ ID NO: 143980 - DNA, 22 bp, synthetic construct
  misc_feature 1..22: note = chemically synthesized
  source 1..22: mol_type = other DNA
caaaaattggtacatgctttaa

SEQ ID NO: 143981 - DNA, 22 bp, synthetic construct
  misc_feature 1..22: note = chemically synthesized
  source 1..22: mol_type = other DNA
aaaaattggtacatgctttaac

SEQ ID NO: 143982 - DNA, 22 bp, synthetic construct
  misc_feature 1..22: note = chemically synthesized
  source 1..22: mol_type = other DNA
gtacatgctttaactttaaact

SEQ ID NO: 143983 - DNA, 22 bp, synthetic construct
  misc_feature 1..22: note = chemically synthesized
  source 1..22: mol_type = other DNA
taactttaaactacaggcctca

SEQ ID NO: 143984 - DNA, 22 bp, synthetic construct
  misc_feature 1..22: note = chemically synthesized
  source 1..22: mol_type = other DNA
aactttaaactacaggcctcac

SEQ ID NO: 143985 - DNA, 22 bp, synthetic construct
  misc_feature 1..22: note = chemically synthesized
  source 1..22: mol_type = other DNA
actttaaactacaggcctcact

SEQ ID NO: 143986 - DNA, 22 bp, synthetic construct
  misc_feature 1..22: note = chemically synthesized
  source 1..22: mol_type = other DNA
taaactacaggcctcactggag

SEQ ID NO: 143987 - DNA, 22 bp, synthetic construct
  misc_feature 1..22: note = chemically synthesized
  source 1..22: mol_type = other DNA
aaactacaggcctcactggagc

SEQ ID NO: 143988 - DNA, 22 bp, synthetic construct
  misc_feature 1..22: note = chemically synthesized
  source 1..22: mol_type = other DNA
aactacaggcctcactggagct

SEQ ID NO: 143989 - DNA, 22 bp, synthetic construct
  misc_feature 1..22: note = chemically synthesized
  source 1..22: mol_type = other DNA
caggcctcactggagctacaga

SEQ ID NO: 143990 - DNA, 22 bp, synthetic construct
  misc_feature 1..22: note = chemically synthesized
  source 1..22: mol_type = other DNA
actggagctacagacaagaagg

SEQ ID NO: 143991 - DNA, 22 bp, synthetic construct
  misc_feature 1..22: note = chemically synthesized
  source 1..22: mol_type = other DNA
gagctacagacaagaaggtgaa

SEQ ID NO: 143992 - DNA, 22 bp, synthetic construct
  misc_feature 1..22: note = chemically synthesized
  source 1..22: mol_type = other DNA
cagacaagaaggtgaaaaacgg

SEQ ID NO: 143993 - DNA, 22 bp, synthetic construct
  misc_feature 1..22: note = chemically synthesized
  source 1..22: mol_type = other DNA
acaaaagaagtcctggtatctt

SEQ ID NO: 143994 - DNA, 22 bp, synthetic construct
  misc_feature 1..22: note = chemically synthesized
  source 1..22: mol_type = other DNA
gtatcttctatggtgggagaag

SEQ ID NO: 143995 - DNA, 22 bp, synthetic construct
  misc_feature 1..22: note = chemically synthesized
  source 1..22: mol_type = other DNA
ctatggtgggagaagaaaacta

SEQ ID NO: 143996 - DNA, 22 bp, synthetic construct
  misc_feature 1..22: note = chemically synthesized
  source 1..22: mol_type = other DNA
tatggtgggagaagaaaactag

SEQ ID NO: 143997 - DNA, 22 bp, synthetic construct
  misc_feature 1..22: note = chemically synthesized
  source 1..22: mol_type = other DNA
tggtgggagaagaaaactagct

SEQ ID NO: 143998 - DNA, 22 bp, synthetic construct
  misc_feature 1..22: note = chemically synthesized
  source 1..22: mol_type = other DNA
gctaaagggaagaataaattag

SEQ ID NO: 143999 - DNA, 22 bp, synthetic construct
  misc_feature 1..22: note = chemically synthesized
  source 1..22: mol_type = other DNA
aagggaagaataaattagagaa

SEQ ID NO: 144000 - DNA, 22 bp, synthetic construct
  misc_feature 1..22: note = chemically synthesized
  source 1..22: mol_type = other DNA
gagaaaaattggaatgactgaa

SEQ ID NO: 144001 - DNA, 22 bp, synthetic construct
  misc_feature 1..22: note = chemically synthesized
  source 1..22: mol_type = other DNA
gaatgactgaatcggaacaagg

SEQ ID NO: 144002 - DNA, 22 bp, synthetic construct
  misc_feature 1..22: note = chemically synthesized
  source 1..22: mol_type = other DNA
aatcggaacaaggcaaaggcta

SEQ ID NO: 144003 - DNA, 22 bp, synthetic construct
  misc_feature 1..22: note = chemically synthesized
  source 1..22: mol_type = other DNA
taaaaaaaattaagcagcagta

SEQ ID NO: 144004 - DNA, 22 bp, synthetic construct
  misc_feature 1..22: note = chemically synthesized
  source 1..22: mol_type = other DNA
agcagcagtatcctcttggggg

SEQ ID NO: 144005 - DNA, 22 bp, synthetic construct
  misc_feature 1..22: note = chemically synthesized
  source 1..22: mol_type = other DNA
ttgggggccccttccccacact

SEQ ID NO: 144006 - DNA, 22 bp, synthetic construct
  misc_feature 1..22: note = chemically synthesized
  source 1..22: mol_type = other DNA
gggggccccttccccacactat

SEQ ID NO: 144007 - DNA, 22 bp, synthetic construct
  misc_feature 1..22: note = chemically synthesized
  source 1..22: mol_type = other DNA
ggggccccttccccacactatc

SEQ ID NO: 144008 - DNA, 22 bp, synthetic construct
  misc_feature 1..22: note = chemically synthesized
  source 1..22: mol_type = other DNA
ccccacactatctcaatgcaaa

SEQ ID NO: 144009 - DNA, 22 bp, synthetic construct
  misc_feature 1..22: note = chemically synthesized
  source 1..22: mol_type = other DNA
cccacactatctcaatgcaaat

SEQ ID NO: 144010 - DNA, 22 bp, synthetic construct
  misc_feature 1..22: note = chemically synthesized
  source 1..22: mol_type = other DNA
tctcaatgcaaatatctgtctg

SEQ ID NO: 144011 - DNA, 22 bp, synthetic construct
  misc_feature 1..22: note = chemically synthesized
  source 1..22: mol_type = other DNA
aatgcaaatatctgtctgaaac

SEQ ID NO: 144012 - DNA, 22 bp, synthetic construct
  misc_feature 1..22: note = chemically synthesized
  source 1..22: mol_type = other DNA
tctgaaacggtccctggctaaa

SEQ ID NO: 144013 - DNA, 22 bp, synthetic construct
  misc_feature 1..22: note = chemically synthesized
  source 1..22: mol_type = other DNA
aaacggtccctggctaaactcc

SEQ ID NO: 144014 - DNA, 22 bp, synthetic construct
  misc_feature 1..22: note = chemically synthesized
  source 1..22: mol_type = other DNA
gctaaactccacccatgggttg

SEQ ID NO: 144015 - DNA, 22 bp, synthetic construct
  misc_feature 1..22: note = chemically synthesized
  source 1..22: mol_type = other DNA
aactccacccatgggttggcca

SEQ ID NO: 144016 - DNA, 22 bp, synthetic construct
  misc_feature 1..22: note = chemically synthesized
  source 1..22: mol_type = other DNA
cacccatgggttggccagcctt

SEQ ID NO: 144017 - DNA, 22 bp, synthetic construct
  misc_feature 1..22: note = chemically synthesized
  source 1..22: mol_type = other DNA
gccagccttgccttgaccaata

SEQ ID NO: 144018 - DNA, 22 bp, synthetic construct
  misc_feature 1..22: note = chemically synthesized
  source 1..22: mol_type = other DNA
gccttgaccaatagccttgaca

SEQ ID NO: 144019 - DNA, 22 bp, synthetic construct
  misc_feature 1..22: note = chemically synthesized
  source 1..22: mol_type = other DNA
ccttgaccaatagccttgacaa

SEQ ID NO: 144020 - DNA, 22 bp, synthetic construct
  misc_feature 1..22: note = chemically synthesized
  source 1..22: mol_type = other DNA
gaccaatagccttgacaaggca

SEQ ID NO: 144021 - DNA, 22 bp, synthetic construct
  misc_feature 1..22: note = chemically synthesized
  source 1..22: mol_type = other DNA
accaatagccttgacaaggcaa

SEQ ID NO: 144022 - DNA, 22 bp, synthetic construct
  misc_feature 1..22: note = chemically synthesized
  source 1..22: mol_type = other DNA
gacaaggcaaacttgaccaata

SEQ ID NO: 144023 - DNA, 22 bp, synthetic construct
  misc_feature 1..22: note = chemically synthesized
  source 1..22: mol_type = other DNA
acaaggcaaacttgaccaatag

SEQ ID NO: 144024 - DNA, 22 bp, synthetic construct
  misc_feature 1..22: note = chemically synthesized
  source 1..22: mol_type = other DNA
gaccaatagtcttagagtatcc

SEQ ID NO: 144025 - DNA, 22 bp, synthetic construct
  misc_feature 1..22: note = chemically synthesized
  source 1..22: mol_type = other DNA
accaatagtcttagagtatcca

SEQ ID NO: 144026 - DNA, 22 bp, synthetic construct
  misc_feature 1..22: note = chemically synthesized
  source 1..22: mol_type = other DNA
agagtatccagtgaggccaggg

SEQ ID NO: 144027 - DNA, 22 bp, synthetic construct
  misc_feature 1..22: note = chemically synthesized
  source 1..22: mol_type = other DNA
gagtatccagtgaggccagggg

SEQ ID NO: 144028 - DNA, 22 bp, synthetic construct
  misc_feature 1..22: note = chemically synthesized
  source 1..22: mol_type = other DNA
gctagggatgaagaataaaagg

SEQ ID NO: 144029 - DNA, 22 bp, synthetic construct
  misc_feature 1..22: note = chemically synthesized
  source 1..22: mol_type = other DNA
gggatgaagaataaaaggaagc

SEQ ID NO: 144030 - DNA, 22 bp, synthetic construct
  misc_feature 1..22: note = chemically synthesized
  source 1..22: mol_type = other DNA
cagcagttccacacactcgctt

SEQ ID NO: 144031 - DNA, 22 bp, synthetic construct
  misc_feature 1..22: note = chemically synthesized
  source 1..22: mol_type = other DNA
agcagttccacacactcgcttc

SEQ ID NO: 144032 - DNA, 22 bp, synthetic construct
  misc_feature 1..22: note = chemically synthesized
  source 1..22: mol_type = other DNA
cacacactcgcttctggaacgt

SEQ ID NO: 144033 - DNA, 22 bp, synthetic construct
  misc_feature 1..22: note = chemically synthesized
  source 1..22: mol_type = other DNA
gcttctggaacgtctgaggtta

SEQ ID NO: 144034 - DNA, 22 bp, synthetic construct
  misc_feature 1..22: note = chemically synthesized
  source 1..22: mol_type = other DNA
ctggaacgtctgaggttatcaa

SEQ ID NO: 144035 - DNA, 22 bp, synthetic construct
  misc_feature 1..22: note = chemically synthesized
  source 1..22: mol_type = other DNA
tggaacgtctgaggttatcaat

SEQ ID NO: 144036 - DNA, 22 bp, synthetic construct
  misc_feature 1..22: note = chemically synthesized
  source 1..22: mol_type = other DNA
gaacgtctgaggttatcaataa

SEQ ID NO: 144037 - DNA, 22 bp, synthetic construct
  misc_feature 1..22: note = chemically synthesized
  source 1..22: mol_type = other DNA
aggttatcaataagctcctagt

SEQ ID NO: 144038 - DNA, 22 bp, synthetic construct
  misc_feature 1..22: note = chemically synthesized
  source 1..22: mol_type = other DNA
tcaataagctcctagtccagac

SEQ ID NO: 144039 - DNA, 22 bp, synthetic construct
  misc_feature 1..22: note = chemically synthesized
  source 1..22: mol_type = other DNA
ctagtccagacgccatgggtca

SEQ ID NO: 144040 - DNA, 22 bp, synthetic construct
  misc_feature 1..22: note = chemically synthesized
  source 1..22: mol_type = other DNA
gtccagacgccatgggtcattt

SEQ ID NO: 144041 - DNA, 22 bp, synthetic construct
  misc_feature 1..22: note = chemically synthesized
  source 1..22: mol_type = other DNA
cacagaggaggacaaggctact

SEQ ID NO: 144042 - DNA, 22 bp, synthetic construct
  misc_feature 1..22: note = chemically synthesized
  source 1..22: mol_type = other DNA
acagaggaggacaaggctacta

SEQ ID NO: 144043 - DNA, 22 bp, synthetic construct
  misc_feature 1..22: note = chemically synthesized
  source 1..22: mol_type = other DNA
ctatcacaagcctgtggggcaa

SEQ ID NO: 144044 - DNA, 22 bp, synthetic construct
  misc_feature 1..22: note = chemically synthesized
  source 1..22: mol_type = other DNA
tcacaagcctgtggggcaaggt

SEQ ID NO: 144045 - DNA, 22 bp, synthetic construct
  misc_feature 1..22: note = chemically synthesized
  source 1..22: mol_type = other DNA
tggggcaaggtgaatgtggaag

SEQ ID NO: 144046 - DNA, 22 bp, synthetic construct
  misc_feature 1..22: note = chemically synthesized
  source 1..22: mol_type = other DNA
gaggagaaaccctgggaaggta

SEQ ID NO: 144047 - DNA, 22 bp, synthetic construct
  misc_feature 1..22: note = chemically synthesized
  source 1..22: mol_type = other DNA
ggaaggtaggctctggtgacca

SEQ ID NO: 144048 - DNA, 22 bp, synthetic construct
  misc_feature 1..22: note = chemically synthesized
  source 1..22: mol_type = other DNA
tggtgaccaggacaagggaggg

SEQ ID NO: 144049 - DNA, 22 bp, synthetic construct
  misc_feature 1..22: note = chemically synthesized
  source 1..22: mol_type = other DNA
gtgaccaggacaagggagggaa

SEQ ID NO: 144050 - DNA, 22 bp, synthetic construct
  misc_feature 1..22: note = chemically synthesized
  source 1..22: mol_type = other DNA
tgcctggcaaaagtccaggtcg

SEQ ID NO: 144051 - DNA, 22 bp, synthetic construct
  misc_feature 1..22: note = chemically synthesized
  source 1..22: mol_type = other DNA
gcaaaagtccaggtcgcttctc

SEQ ID NO: 144052 - DNA, 22 bp, synthetic construct
  misc_feature 1..22: note = chemically synthesized
  source 1..22: mol_type = other DNA
ctcaggatttgtggcaccttct

SEQ ID NO: 144053 - DNA, 22 bp, synthetic construct
  misc_feature 1..22: note = chemically synthesized
  source 1..22: mol_type = other DNA
tcaggatttgtggcaccttctg

SEQ ID NO: 144054 - DNA, 22 bp, synthetic construct
  misc_feature 1..22: note = chemically synthesized
  source 1..22: mol_type = other DNA
aggatttgtggcaccttctgac

SEQ ID NO: 144055 - DNA, 22 bp, synthetic construct
  misc_feature 1..22: note = chemically synthesized
  source 1..22: mol_type = other DNA
gtggcaccttctgactgtcaaa

SEQ ID NO: 144056 - DNA, 22 bp, synthetic construct
  misc_feature 1..22: note = chemically synthesized
  source 1..22: mol_type = other DNA
tggcaccttctgactgtcaaac

SEQ ID NO: 144057 - DNA, 22 bp, synthetic construct
  misc_feature 1..22: note = chemically synthesized
  source 1..22: mol_type = other DNA
ctgactgtcaaactgttcttgt

SEQ ID NO: 144058 - DNA, 22 bp, synthetic construct
  misc_feature 1..22: note = chemically synthesized
  source 1..22: mol_type = other DNA
tgactgtcaaactgttcttgtc

SEQ ID NO: 144059 - DNA, 22 bp, synthetic construct
  misc_feature 1..22: note = chemically synthesized
  source 1..22: mol_type = other DNA
actgtcaaactgttcttgtcaa

SEQ ID NO: 144060 - DNA, 22 bp, synthetic construct
  misc_feature 1..22: note = chemically synthesized
  source 1..22: mol_type = other DNA
tcaaactgttcttgtcaatctc

SEQ ID NO: 144061 - DNA, 22 bp, synthetic construct
  misc_feature 1..22: note = chemically synthesized
  source 1..22: mol_type = other DNA
ttcttgtcaatctcacaggctc

SEQ ID NO: 144062 - DNA, 22 bp, synthetic construct
  misc_feature 1..22: note = chemically synthesized
  source 1..22: mol_type = other DNA
ttgtcaatctcacaggctcctg

SEQ ID NO: 144063 - DNA, 22 bp, synthetic construct
  misc_feature 1..22: note = chemically synthesized
  source 1..22: mol_type = other DNA
gtcaatctcacaggctcctggt

SEQ ID NO: 144064 - DNA, 22 bp, synthetic construct
  misc_feature 1..22: note = chemically synthesized
  source 1..22: mol_type = other DNA
tcaatctcacaggctcctggtt

SEQ ID NO: 144065 - DNA, 22 bp, synthetic construct
  misc_feature 1..22: note = chemically synthesized
  source 1..22: mol_type = other DNA
acaggctcctggttgtctaccc

SEQ ID NO: 144066 - DNA, 22 bp, synthetic construct
  misc_feature 1..22: note = chemically synthesized
  source 1..22: mol_type = other DNA
ctggttgtctacccatggaccc

SEQ ID NO: 144067 - DNA, 22 bp, synthetic construct
  misc_feature 1..22: note = chemically synthesized
  source 1..22: mol_type = other DNA
gttgtctacccatggacccaga

SEQ ID NO: 144068 - DNA, 22 bp, synthetic construct
  misc_feature 1..22: note = chemically synthesized
  source 1..22: mol_type = other DNA
tctacccatggacccagaggtt

SEQ ID NO: 144069 - DNA, 22 bp, synthetic construct
  misc_feature 1..22: note = chemically synthesized
  source 1..22: mol_type = other DNA
cccatggacccagaggttcttt

SEQ ID NO: 144070 - DNA, 22 bp, synthetic construct
  misc_feature 1..22: note = chemically synthesized
  source 1..22: mol_type = other DNA
tttgacagctttggcaacctgt

SEQ ID NO: 144071 - DNA, 22 bp, synthetic construct
  misc_feature 1..22: note = chemically synthesized
  source 1..22: mol_type = other DNA
tgacagctttggcaacctgtcc

SEQ ID NO: 144072 - DNA, 22 bp, synthetic construct
  misc_feature 1..22: note = chemically synthesized
  source 1..22: mol_type = other DNA
gacagctttggcaacctgtcct

SEQ ID NO: 144073 - DNA, 22 bp, synthetic construct
  misc_feature 1..22: note = chemically synthesized
  source 1..22: mol_type = other DNA
acagctttggcaacctgtcctc

SEQ ID NO: 144074 - DNA, 22 bp, synthetic construct
  misc_feature 1..22: note = chemically synthesized
  source 1..22: mol_type = other DNA
tggcaacctgtcctctgcctct

SEQ ID NO: 144075 - DNA, 22 bp, synthetic construct
  misc_feature 1..22: note = chemically synthesized
  source 1..22: mol_type = other DNA
ggcaacctgtcctctgcctctg

SEQ ID NO: 144076 - DNA, 22 bp, synthetic construct
  misc_feature 1..22: note = chemically synthesized
  source 1..22: mol_type = other DNA
gcaacctgtcctctgcctctgc

SEQ ID NO: 144077 - DNA, 22 bp, synthetic construct
  misc_feature 1..22: note = chemically synthesized
  source 1..22: mol_type = other DNA
tcctctgcctctgccatcatgg

SEQ ID NO: 144078 - DNA, 22 bp, synthetic construct
  misc_feature 1..22: note = chemically synthesized
  source 1..22: mol_type = other DNA
tgcctctgccatcatgggcaac

SEQ ID NO: 144079 - DNA, 22 bp, synthetic construct
  misc_feature 1..22: note = chemically synthesized
  source 1..22: mol_type = other DNA
cctctgccatcatgggcaaccc

SEQ ID NO: 144080 - DNA, 22 bp, synthetic construct
  misc_feature 1..22: note = chemically synthesized
  source 1..22: mol_type = other DNA
tgccatcatgggcaaccccaaa

SEQ ID NO: 144081 - DNA, 22 bp, synthetic construct
  misc_feature 1..22: note = chemically synthesized
  source 1..22: mol_type = other DNA
ccatcatgggcaaccccaaagt

SEQ ID NO: 144082 - DNA, 22 bp, synthetic construct
  misc_feature 1..22: note = chemically synthesized
  source 1..22: mol_type = other DNA
acttccttgggagatgccataa

SEQ ID NO: 144083 - DNA, 22 bp, synthetic construct
  misc_feature 1..22: note = chemically synthesized
  source 1..22: mol_type = other DNA
ccttgggagatgccataaagca

SEQ ID NO: 144084 - DNA, 22 bp, synthetic construct
  misc_feature 1..22: note = chemically synthesized
  source 1..22: mol_type = other DNA
cttgggagatgccataaagcac

SEQ ID NO: 144085 - DNA, 22 bp, synthetic construct
  misc_feature 1..22: note = chemically synthesized
  source 1..22: mol_type = other DNA
gggagatgccataaagcacctg

SEQ ID NO: 144086 - DNA, 22 bp, synthetic construct
  misc_feature 1..22: note = chemically synthesized
  source 1..22: mol_type = other DNA
ggagatgccataaagcacctgg

SEQ ID NO: 144087 - DNA, 22 bp, synthetic construct
  misc_feature 1..22: note = chemically synthesized
  source 1..22: mol_type = other DNA
gatgatctcaagggcacctttg

SEQ ID NO: 144088 - DNA, 22 bp, synthetic construct
  misc_feature 1..22: note = chemically synthesized
  source 1..22: mol_type = other DNA
aagggcacctttgcccagctga

SEQ ID NO: 144089 - DNA, 22 bp, synthetic construct
  misc_feature 1..22: note = chemically synthesized
  source 1..22: mol_type = other DNA
tgcccagctgagtgaactgcac

SEQ ID NO: 144090 - DNA, 22 bp, synthetic construct
  misc_feature 1..22: note = chemically synthesized
  source 1..22: mol_type = other DNA
gcccagctgagtgaactgcact

SEQ ID NO: 144091 - DNA, 22 bp, synthetic construct
  misc_feature 1..22: note = chemically synthesized
  source 1..22: mol_type = other DNA
cccagctgagtgaactgcactg

SEQ ID NO: 144092 - DNA, 22 bp, synthetic construct
  misc_feature 1..22: note = chemically synthesized
  source 1..22: mol_type = other DNA
agtgaactgcactgtgacaagc

SEQ ID NO: 144093 - DNA, 22 bp, synthetic construct
  misc_feature 1..22: note = chemically synthesized
  source 1..22: mol_type = other DNA
cactgtgacaagctgcatgtgg

SEQ ID NO: 144094 - DNA, 22 bp, synthetic construct
  misc_feature 1..22: note = chemically synthesized
  source 1..22: mol_type = other DNA
tgacaagctgcatgtggatcct

SEQ ID NO: 144095 - DNA, 22 bp, synthetic construct
  misc_feature 1..22: note = chemically synthesized
  source 1..22: mol_type = other DNA
catgtggatcctgagaacttca

SEQ ID NO: 144096 - DNA, 22 bp, synthetic construct
  misc_feature 1..22: note = chemically synthesized
  source 1..22: mol_type = other DNA
agaacttcaaggtgagtccagg

SEQ ID NO: 144097 - DNA, 22 bp, synthetic construct
  misc_feature 1..22: note = chemically synthesized
  source 1..22: mol_type = other DNA
caaggtgagtccaggagatgtt

SEQ ID NO: 144098 - DNA, 22 bp, synthetic construct
  misc_feature 1..22: note = chemically synthesized
  source 1..22: mol_type = other DNA
aaggtgagtccaggagatgttt

SEQ ID NO: 144099 - DNA, 22 bp, synthetic construct
  misc_feature 1..22: note = chemically synthesized
  source 1..22: mol_type = other DNA
cagcactgttgcctttagtctc

SEQ ID NO: 144100 - DNA, 22 bp, synthetic construct
  misc_feature 1..22: note = chemically synthesized
  source 1..22: mol_type = other DNA
agcactgttgcctttagtctcg

SEQ ID NO: 144101 - DNA, 22 bp, synthetic construct
  misc_feature 1..22: note = chemically synthesized
  source 1..22: mol_type = other DNA
ttgcctttagtctcgaggcaac

SEQ ID NO: 144102 - DNA, 22 bp, synthetic construct
  misc_feature 1..22: note = chemically synthesized
  source 1..22: mol_type = other DNA
cctttagtctcgaggcaactta

SEQ ID NO: 144103 - DNA, 22 bp, synthetic construct
  misc_feature 1..22: note = chemically synthesized
  source 1..22: mol_type = other DNA
tagtctcgaggcaacttagaca

SEQ ID NO: 144104 - DNA, 22 bp, synthetic construct
  misc_feature 1..22: note = chemically synthesized
  source 1..22: mol_type = other DNA
agtctcgaggcaacttagacaa

SEQ ID NO: 144105 - DNA, 22 bp, synthetic construct
  misc_feature 1..22: note = chemically synthesized
  source 1..22: mol_type = other DNA
gtctcgaggcaacttagacaac

SEQ ID NO: 144106 - DNA, 22 bp, synthetic construct
  misc_feature 1..22: note = chemically synthesized
  source 1..22: mol_type = other DNA
gaggcaacttagacaactgagt

SEQ ID NO: 144107 - DNA, 22 bp, synthetic construct
  misc_feature 1..22: note = chemically synthesized
  source 1..22: mol_type = other DNA
agacaactgagtattgatctga

SEQ ID NO: 144108 - DNA, 22 bp, synthetic construct
  misc_feature 1..22: note = chemically synthesized
  source 1..22: mol_type = other DNA
gacaactgagtattgatctgag

SEQ ID NO: 144109 - DNA, 22 bp, synthetic construct
  misc_feature 1..22: note = chemically synthesized
  source 1..22: mol_type = other DNA
agtattgatctgagcacagcag

SEQ ID NO: 144110 - DNA, 22 bp, synthetic construct
  misc_feature 1..22: note = chemically synthesized
  source 1..22: mol_type = other DNA
atctgagcacagcagggtgtga

SEQ ID NO: 144111 - DNA, 22 bp, synthetic construct
  misc_feature 1..22: note = chemically synthesized
  source 1..22: mol_type = other DNA
agcacagcagggtgtgagctgt

SEQ ID NO: 144112 - DNA, 22 bp, synthetic construct
  misc_feature 1..22: note = chemically synthesized
  source 1..22: mol_type = other DNA
tttgaagatactggggttggga

SEQ ID NO: 144113 - DNA, 22 bp, synthetic construct
  misc_feature 1..22: note = chemically synthesized
  source 1..22: mol_type = other DNA
gaagatactggggttgggagtg

SEQ ID NO: 144114 - DNA, 22 bp, synthetic construct
  misc_feature 1..22: note = chemically synthesized
  source 1..22: mol_type = other DNA
aagatactggggttgggagtga

SEQ ID NO: 144115 - DNA, 22 bp, synthetic construct
  misc_feature 1..22: note = chemically synthesized
  source 1..22: mol_type = other DNA
gggttgggagtgaagaaactgc

SEQ ID NO: 144116 - DNA, 22 bp, synthetic construct
  misc_feature 1..22: note = chemically synthesized
  source 1..22: mol_type = other DNA
ggagtgaagaaactgcagagga

SEQ ID NO: 144117 - DNA, 22 bp, synthetic construct
  misc_feature 1..22: note = chemically synthesized
  source 1..22: mol_type = other DNA
cagaggactaactgggctgaga

SEQ ID NO: 144118 - DNA, 22 bp, synthetic construct
  misc_feature 1..22: note = chemically synthesized
  source 1..22: mol_type = other DNA
actgggctgagacccagtggca

SEQ ID NO: 144119 - DNA, 22 bp, synthetic construct
  misc_feature 1..22: note = chemically synthesized
  source 1..22: mol_type = other DNA
ggctgagacccagtggcaatgt

SEQ ID NO: 144120 - DNA, 22 bp, synthetic construct
  misc_feature 1..22: note = chemically synthesized
  source 1..22: mol_type = other DNA
agacccagtggcaatgttttag

SEQ ID NO: 144121 - DNA, 22 bp, synthetic construct
  misc_feature 1..22: note = chemically synthesized
  source 1..22: mol_type = other DNA
tagggcctaaggagtgcctctg

SEQ ID NO: 144122 - DNA, 22 bp, synthetic construct
  misc_feature 1..22: note = chemically synthesized
  source 1..22: mol_type = other DNA
agggcctaaggagtgcctctga

SEQ ID NO: 144123 - DNA, 22 bp, synthetic construct
  misc_feature 1..22: note = chemically synthesized
  source 1..22: mol_type = other DNA
gggcctaaggagtgcctctgaa

SEQ ID NO: 144124 - DNA, 22 bp, synthetic construct
  misc_feature 1..22: note = chemically synthesized
  source 1..22: mol_type = other DNA
aggagtgcctctgaaaatctag

SEQ ID NO: 144125 - DNA, 22 bp, synthetic construct
  misc_feature 1..22: note = chemically synthesized
  source 1..22: mol_type = other DNA
tgaaaatctagatggacaactt

SEQ ID NO: 144126 - DNA, 22 bp, synthetic construct
  misc_feature 1..22: note = chemically synthesized
  source 1..22: mol_type = other DNA
aaaatctagatggacaactttg

SEQ ID NO: 144127 - DNA, 22 bp, synthetic construct
  misc_feature 1..22: note = chemically synthesized
  source 1..22: mol_type = other DNA
gatggacaactttgactttgag

SEQ ID NO: 144128 - DNA, 22 bp, synthetic construct
  misc_feature 1..22: note = chemically synthesized
  source 1..22: mol_type = other DNA
tgactttgagaaaagagaggtg

SEQ ID NO: 144129 - DNA, 22 bp, synthetic construct
  misc_feature 1..22: note = chemically synthesized
  source 1..22: mol_type = other DNA
gactttgagaaaagagaggtgg

SEQ ID NO: 144130 - DNA, 22 bp, synthetic construct
  misc_feature 1..22: note = chemically synthesized
  source 1..22: mol_type = other DNA
actttgagaaaagagaggtgga

SEQ ID NO: 144131 - DNA, 22 bp, synthetic construct
  misc_feature 1..22: note = chemically synthesized
  source 1..22: mol_type = other DNA
tgagaaaagagaggtggaaatg

SEQ ID NO: 144132 - DNA, 22 bp, synthetic construct
  misc_feature 1..22: note = chemically synthesized
  source 1..22: mol_type = other DNA
gagaaaagagaggtggaaatga

SEQ ID NO: 144133 - DNA, 22 bp, synthetic construct
  misc_feature 1..22: note = chemically synthesized
  source 1..22: mol_type = other DNA
agaaaagagaggtggaaatgag

SEQ ID NO: 144134 - DNA, 22 bp, synthetic construct
  misc_feature 1..22: note = chemically synthesized
  source 1..22: mol_type = other DNA
ttctttattagatttcggtaga

SEQ ID NO: 144135 - DNA, 22 bp, synthetic construct
  misc_feature 1..22: note = chemically synthesized
  source 1..22: mol_type = other DNA
tctttattagatttcggtagaa

SEQ ID NO: 144136 - DNA, 22 bp, synthetic construct
  misc_feature 1..22: note = chemically synthesized
  source 1..22: mol_type = other DNA
ctttattagatttcggtagaaa

SEQ ID NO: 144137 - DNA, 22 bp, synthetic construct
  misc_feature 1..22: note = chemically synthesized
  source 1..22: mol_type = other DNA
tttattagatttcggtagaaag

SEQ ID NO: 144138 - DNA, 22 bp, synthetic construct
  misc_feature 1..22: note = chemically synthesized
  source 1..22: mol_type = other DNA
tattagatttcggtagaaagaa

SEQ ID NO: 144139 - DNA, 22 bp, synthetic construct
  misc_feature 1..22: note = chemically synthesized
  source 1..22: mol_type = other DNA
attagatttcggtagaaagaac

SEQ ID NO: 144140 - DNA, 22 bp, synthetic construct
  misc_feature 1..22: note = chemically synthesized
  source 1..22: mol_type = other DNA
ttagatttcggtagaaagaact

SEQ ID NO: 144141 - DNA, 22 bp, synthetic construct
  misc_feature 1..22: note = chemically synthesized
  source 1..22: mol_type = other DNA
gatttcggtagaaagaactttc

SEQ ID NO: 144142 - DNA, 22 bp, synthetic construct
  misc_feature 1..22: note = chemically synthesized
  source 1..22: mol_type = other DNA
cggtagaaagaactttcacctt

SEQ ID NO: 144143 - DNA, 22 bp, synthetic construct
  misc_feature 1..22: note = chemically synthesized
  source 1..22: mol_type = other DNA
ggtagaaagaactttcaccttt

SEQ ID NO: 144144 - DNA, 22 bp, synthetic construct
  misc_feature 1..22: note = chemically synthesized
  source 1..22: mol_type = other DNA
tcacctttcccctatttttgtt

SEQ ID NO: 144145 - DNA, 22 bp, synthetic construct
  misc_feature 1..22: note = chemically synthesized
  source 1..22: mol_type = other DNA
cacctttcccctatttttgtta

SEQ ID NO: 144146 - DNA, 22 bp, synthetic construct
  misc_feature 1..22: note = chemically synthesized
  source 1..22: mol_type = other DNA
acctttcccctatttttgttat

SEQ ID NO: 144147 - DNA, 22 bp, synthetic construct
  misc_feature 1..22: note = chemically synthesized
  source 1..22: mol_type = other DNA
tcccctatttttgttattcgtt

SEQ ID NO: 144148 - DNA, 22 bp, synthetic construct
  misc_feature 1..22: note = chemically synthesized
  source 1..22: mol_type = other DNA
cccctatttttgttattcgttt

SEQ ID NO: 144149 - DNA, 22 bp, synthetic construct
  misc_feature 1..22: note = chemically synthesized
  source 1..22: mol_type = other DNA
ccctatttttgttattcgtttt

SEQ ID NO: 144150 - DNA, 22 bp, synthetic construct
  misc_feature 1..22: note = chemically synthesized
  source 1..22: mol_type = other DNA
tttttgttattcgttttaaaac

SEQ ID NO: 144151 - DNA, 22 bp, synthetic construct
  misc_feature 1..22: note = chemically synthesized
  source 1..22: mol_type = other DNA
ttgttattcgttttaaaacatc

SEQ ID NO: 144152 - DNA, 22 bp, synthetic construct
  misc_feature 1..22: note = chemically synthesized
  source 1..22: mol_type = other DNA
tgttattcgttttaaaacatct

SEQ ID NO: 144153 - DNA, 22 bp, synthetic construct
  misc_feature 1..22: note = chemically synthesized
  source 1..22: mol_type = other DNA
gttattcgttttaaaacatcta

SEQ ID NO: 144154 - DNA, 22 bp, synthetic construct
  misc_feature 1..22: note = chemically synthesized
  source 1..22: mol_type = other DNA
ttattcgttttaaaacatctat

SEQ ID NO: 144155 - DNA, 22 bp, synthetic construct
  misc_feature 1..22: note = chemically synthesized
  source 1..22: mol_type = other DNA
ttcgttttaaaacatctatctg

SEQ ID NO: 144156 - DNA, 22 bp, synthetic construct
  misc_feature 1..22: note = chemically synthesized
  source 1..22: mol_type = other DNA
gttttaaaacatctatctggag

SEQ ID NO: 144157 - DNA, 22 bp, synthetic construct
  misc_feature 1..22: note = chemically synthesized
  source 1..22: mol_type = other DNA
taaaacatctatctggaggcag

SEQ ID NO: 144158 - DNA, 22 bp, synthetic construct
  misc_feature 1..22: note = chemically synthesized
  source 1..22: mol_type = other DNA
aaaacatctatctggaggcagg

SEQ ID NO: 144159 - DNA, 22 bp, synthetic construct
  misc_feature 1..22: note = chemically synthesized
  source 1..22: mol_type = other DNA
aaacatctatctggaggcagga

SEQ ID NO: 144160 - DNA, 22 bp, synthetic construct
  misc_feature 1..22: note = chemically synthesized
  source 1..22: mol_type = other DNA
tctggaggcaggacaagtatgg

SEQ ID NO: 144161 - DNA, 22 bp, synthetic construct
  misc_feature 1..22: note = chemically synthesized
  source 1..22: mol_type = other DNA
gaggcaggacaagtatggtcat

SEQ ID NO: 144162 - DNA, 22 bp, synthetic construct
  misc_feature 1..22: note = chemically synthesized
  source 1..22: mol_type = other DNA
aaaagatgcaggcagaaggcat

SEQ ID NO: 144163 - DNA, 22 bp, synthetic construct
  misc_feature 1..22: note = chemically synthesized
  source 1..22: mol_type = other DNA
gctcagtcaaagtggggaactt

SEQ ID NO: 144164 - DNA, 22 bp, synthetic construct
  misc_feature 1..22: note = chemically synthesized
  source 1..22: mol_type = other DNA
agtcaaagtggggaactttggt

SEQ ID NO: 144165 - DNA, 22 bp, synthetic construct
  misc_feature 1..22: note = chemically synthesized
  source 1..22: mol_type = other DNA
tggtggccaaacatacattgct

SEQ ID NO: 144166 - DNA, 22 bp, synthetic construct
  misc_feature 1..22: note = chemically synthesized
  source 1..22: mol_type = other DNA
ggtggccaaacatacattgcta

SEQ ID NO: 144167 - DNA, 22 bp, synthetic construct
  misc_feature 1..22: note = chemically synthesized
  source 1..22: mol_type = other DNA
gtggccaaacatacattgctaa

SEQ ID NO: 144168 - DNA, 22 bp, synthetic construct
  misc_feature 1..22: note = chemically synthesized
  source 1..22: mol_type = other DNA
ctaaggctattcctatatcagc

SEQ ID NO: 144169 - DNA, 22 bp, synthetic construct
  misc_feature 1..22: note = chemically synthesized
  source 1..22: mol_type = other DNA
aggctattcctatatcagctgg

SEQ ID NO: 144170 - DNA, 22 bp, synthetic construct
  misc_feature 1..22: note = chemically synthesized
  source 1..22: mol_type = other DNA
ttcctatatcagctggacacat

SEQ ID NO: 144171 - DNA, 22 bp, synthetic construct
  misc_feature 1..22: note = chemically synthesized
  source 1..22: mol_type = other DNA
ctatatcagctggacacatata

SEQ ID NO: 144172 - DNA, 22 bp, synthetic construct
  misc_feature 1..22: note = chemically synthesized
  source 1..22: mol_type = other DNA
tatcagctggacacatataaaa

SEQ ID NO: 144173 - DNA, 22 bp, synthetic construct
  misc_feature 1..22: note = chemically synthesized
  source 1..22: mol_type = other DNA
gacacatataaaatgctgctaa

SEQ ID NO: 144174 - DNA, 22 bp, synthetic construct
  misc_feature 1..22: note = chemically synthesized
  source 1..22: mol_type = other DNA
ctaatgcttcattacaaactta

SEQ ID NO: 144175 - DNA, 22 bp, synthetic construct
  misc_feature 1..22: note = chemically synthesized
  source 1..22: mol_type = other DNA
atgcttcattacaaacttatat

SEQ ID NO: 144176 - DNA, 22 bp, synthetic construct
  misc_feature 1..22: note = chemically synthesized
  source 1..22: mol_type = other DNA
cattacaaacttatatccttta

SEQ ID NO: 144177 - DNA, 22 bp, synthetic construct
  misc_feature 1..22: note = chemically synthesized
  source 1..22: mol_type = other DNA
attacaaacttatatcctttaa

SEQ ID NO: 144178 - DNA, 22 bp, synthetic construct
  misc_feature 1..22: note = chemically synthesized
  source 1..22: mol_type = other DNA
caaacttatatcctttaattcc

SEQ ID NO: 144179 - DNA, 22 bp, synthetic construct
  misc_feature 1..22: note = chemically synthesized
  source 1..22: mol_type = other DNA
atatcctttaattccagatggg

SEQ ID NO: 144180 - DNA, 22 bp, synthetic construct
  misc_feature 1..22: note = chemically synthesized
  source 1..22: mol_type = other DNA
tatcctttaattccagatgggg

SEQ ID NO: 144181 - DNA, 22 bp, synthetic construct
  misc_feature 1..22: note = chemically synthesized
  source 1..22: mol_type = other DNA
taattccagatgggggcaaagt

SEQ ID NO: 144182 - DNA, 22 bp, synthetic construct
  misc_feature 1..22: note = chemically synthesized
  source 1..22: mol_type = other DNA
aattccagatgggggcaaagta

SEQ ID NO: 144183 - DNA, 22 bp, synthetic construct
  misc_feature 1..22: note = chemically synthesized
  source 1..22: mol_type = other DNA
attccagatgggggcaaagtat

SEQ ID NO: 144184 - DNA, 22 bp, synthetic construct
  misc_feature 1..22: note = chemically synthesized
  source 1..22: mol_type = other DNA
cagatgggggcaaagtatgtcc

SEQ ID NO: 144185 - DNA, 22 bp, synthetic construct
  misc_feature 1..22: note = chemically synthesized
  source 1..22: mol_type = other DNA
aaacatttgggctggagtagat

SEQ ID NO: 144186 - DNA, 22 bp, synthetic construct
  misc_feature 1..22: note = chemically synthesized
  source 1..22: mol_type = other DNA
gggctggagtagattttgaaag

SEQ ID NO: 144187 - DNA, 22 bp, synthetic construct
  misc_feature 1..22: note = chemically synthesized
  source 1..22: mol_type = other DNA
ggctggagtagattttgaaagt

SEQ ID NO: 144188 - DNA, 22 bp, synthetic construct
  misc_feature 1..22: note = chemically synthesized
  source 1..22: mol_type = other DNA
gagtagattttgaaagtcagct

SEQ ID NO: 144189 - DNA, 22 bp, synthetic construct
  misc_feature 1..22: note = chemically synthesized
  source 1..22: mol_type = other DNA
tgaaagtcagctctgtgtgtgt

SEQ ID NO: 144190 - DNA, 22 bp, synthetic construct
  misc_feature 1..22: note = chemically synthesized
  source 1..22: mol_type = other DNA
gaaagtcagctctgtgtgtgtg

SEQ ID NO: 144191 - DNA, 22 bp, synthetic construct
  misc_feature 1..22: note = chemically synthesized
  source 1..22: mol_type = other DNA
aaagtcagctctgtgtgtgtgt

SEQ ID NO: 144192 - DNA, 22 bp, synthetic construct
  misc_feature 1..22: note = chemically synthesized
  source 1..22: mol_type = other DNA
tgtgtgtgtgtgtgtgtgtgtg

SEQ ID NO: 144193 - DNA, 22 bp, synthetic construct
  misc_feature 1..22: note = chemically synthesized
  source 1..22: mol_type = other DNA
tgtgtgtgtgtgtgtgtgtgcg

SEQ ID NO: 144194 - DNA, 22 bp, synthetic construct
  misc_feature 1..22: note = chemically synthesized
  source 1..22: mol_type = other DNA
gtgtgtgtgtgagagcgtgtgt

SEQ ID NO: 144195 - DNA, 22 bp, synthetic construct
  misc_feature 1..22: note = chemically synthesized
  source 1..22: mol_type = other DNA
tgtgtgtgtgagagcgtgtgtt

SEQ ID NO: 144196 - DNA, 22 bp, synthetic construct
  misc_feature 1..22: note = chemically synthesized
  source 1..22: mol_type = other DNA
cttttaacgttttcagcctaca

SEQ ID NO: 144197 - DNA, 22 bp, synthetic construct
  misc_feature 1..22: note = chemically synthesized
  source 1..22: mol_type = other DNA
ttttaacgttttcagcctacag

SEQ ID NO: 144198 - DNA, 22 bp, synthetic construct
  misc_feature 1..22: note = chemically synthesized
  source 1..22: mol_type = other DNA
ttaacgttttcagcctacagca

SEQ ID NO: 144199 - DNA, 22 bp, synthetic construct
  misc_feature 1..22: note = chemically synthesized
  source 1..22: mol_type = other DNA
taacgttttcagcctacagcat

SEQ ID NO: 144200 - DNA, 22 bp, synthetic construct
  misc_feature 1..22: note = chemically synthesized
  source 1..22: mol_type = other DNA
aacgttttcagcctacagcata

SEQ ID NO: 144201 - DNA, 22 bp, synthetic construct
  misc_feature 1..22: note = chemically synthesized
  source 1..22: mol_type = other DNA
acgttttcagcctacagcatac

SEQ ID NO: 144202 - DNA, 22 bp, synthetic construct
  misc_feature 1..22: note = chemically synthesized
  source 1..22: mol_type = other DNA
tcagcctacagcatacagggtt

SEQ ID NO: 144203 - DNA, 22 bp, synthetic construct
  misc_feature 1..22: note = chemically synthesized
  source 1..22: mol_type = other DNA
cagcctacagcatacagggttc

SEQ ID NO: 144204 - DNA, 22 bp, synthetic construct
  misc_feature 1..22: note = chemically synthesized
  source 1..22: mol_type = other DNA
agcctacagcatacagggttca

SEQ ID NO: 144205 - DNA, 22 bp, synthetic construct
  misc_feature 1..22: note = chemically synthesized
  source 1..22: mol_type = other DNA
cagcatacagggttcatggtgg

SEQ ID NO: 144206 - DNA, 22 bp, synthetic construct
  misc_feature 1..22: note = chemically synthesized
  source 1..22: mol_type = other DNA
atggtggcaagaagataacaag

SEQ ID NO: 144207 - DNA, 22 bp, synthetic construct
  misc_feature 1..22: note = chemically synthesized
  source 1..22: mol_type = other DNA
aaattatggccagtgactagtg

SEQ ID NO: 144208 - DNA, 22 bp, synthetic construct
  misc_feature 1..22: note = chemically synthesized
  source 1..22: mol_type = other DNA
aattatggccagtgactagtgc

SEQ ID NO: 144209 - DNA, 22 bp, synthetic construct
  misc_feature 1..22: note = chemically synthesized
  source 1..22: mol_type = other DNA
tggccagtgactagtgctgcaa

SEQ ID NO: 144210 - DNA, 22 bp, synthetic construct
  misc_feature 1..22: note = chemically synthesized
  source 1..22: mol_type = other DNA
gtgctgcaagaagaacaactac

SEQ ID NO: 144211 - DNA, 22 bp, synthetic construct
  misc_feature 1..22: note = chemically synthesized
  source 1..22: mol_type = other DNA
caagaagaacaactacctgcat

SEQ ID NO: 144212 - DNA, 22 bp, synthetic construct
  misc_feature 1..22: note = chemically synthesized
  source 1..22: mol_type = other DNA
cctgcatttaatgggaaagcaa

SEQ ID NO: 144213 - DNA, 22 bp, synthetic construct
  misc_feature 1..22: note = chemically synthesized
  source 1..22: mol_type = other DNA
catttaatgggaaagcaaaatc

SEQ ID NO: 144214 - DNA, 22 bp, synthetic construct
  misc_feature 1..22: note = chemically synthesized
  source 1..22: mol_type = other DNA
aatgggaaagcaaaatctcagg

SEQ ID NO: 144215 - DNA, 22 bp, synthetic construct
  misc_feature 1..22: note = chemically synthesized
  source 1..22: mol_type = other DNA
atgggaaagcaaaatctcaggc

SEQ ID NO: 144216 - DNA, 22 bp, synthetic construct
  misc_feature 1..22: note = chemically synthesized
  source 1..22: mol_type = other DNA
aggctttgagggaagttaacat

SEQ ID NO: 144217 - DNA, 22 bp, synthetic construct
  misc_feature 1..22: note = chemically synthesized
  source 1..22: mol_type = other DNA
tgagggaagttaacataggctt

SEQ ID NO: 144218 - DNA, 22 bp, synthetic construct
  misc_feature 1..22: note = chemically synthesized
  source 1..22: mol_type = other DNA
gagggaagttaacataggcttg

SEQ ID NO: 144219 - DNA, 22 bp, synthetic construct
  misc_feature 1..22: note = chemically synthesized
  source 1..22: mol_type = other DNA
agggaagttaacataggcttga

SEQ ID NO: 144220 - DNA, 22 bp, synthetic construct
  misc_feature 1..22: note = chemically synthesized
  source 1..22: mol_type = other DNA
acataggcttgattctgggtgg

SEQ ID NO: 144221 - DNA, 22 bp, synthetic construct
  misc_feature 1..22: note = chemically synthesized
  source 1..22: mol_type = other DNA
gattctgggtggaagcttggtg

SEQ ID NO: 144222 - DNA, 22 bp, synthetic construct
  misc_feature 1..22: note = chemically synthesized
  source 1..22: mol_type = other DNA
attctgggtggaagcttggtgt

SEQ ID NO: 144223 - DNA, 22 bp, synthetic construct
  misc_feature 1..22: note = chemically synthesized
  source 1..22: mol_type = other DNA
tgggtggaagcttggtgtgtag

SEQ ID NO: 144224 - DNA, 22 bp, synthetic construct
  misc_feature 1..22: note = chemically synthesized
  source 1..22: mol_type = other DNA
ggtggaagcttggtgtgtagtt

SEQ ID NO: 144225 - DNA, 22 bp, synthetic construct
  misc_feature 1..22: note = chemically synthesized
  source 1..22: mol_type = other DNA
ggtgtgtagttatctggaggcc

SEQ ID NO: 144226 - DNA, 22 bp, synthetic construct
  misc_feature 1..22: note = chemically synthesized
  source 1..22: mol_type = other DNA
gtgtgtagttatctggaggcca

SEQ ID NO: 144227 - DNA, 22 bp, synthetic construct
  misc_feature 1..22: note = chemically synthesized
  source 1..22: mol_type = other DNA
tctggaggccaggctggagctc

SEQ ID NO: 144228 - DNA, 22 bp, synthetic construct
  misc_feature 1..22: note = chemically synthesized
  source 1..22: mol_type = other DNA
gaggccaggctggagctctcag

SEQ ID NO: 144229 - DNA, 22 bp, synthetic construct
  misc_feature 1..22: note = chemically synthesized
  source 1..22: mol_type = other DNA
gagctctcagctcactatgggt

SEQ ID NO: 144230 - DNA, 22 bp, synthetic construct
  misc_feature 1..22: note = chemically synthesized
  source 1..22: mol_type = other DNA
tcagctcactatgggttcatct

SEQ ID NO: 144231 - DNA, 22 bp, synthetic construct
  misc_feature 1..22: note = chemically synthesized
  source 1..22: mol_type = other DNA
agctcactatgggttcatcttt

SEQ ID NO: 144232 - DNA, 22 bp, synthetic construct
  misc_feature 1..22: note = chemically synthesized
  source 1..22: mol_type = other DNA
actatgggttcatctttattgt

SEQ ID NO: 144233 - DNA, 22 bp, synthetic construct
  misc_feature 1..22: note = chemically synthesized
  source 1..22: mol_type = other DNA
tgggttcatctttattgtctcc

SEQ ID NO: 144234 - DNA, 22 bp, synthetic construct
  misc_feature 1..22: note = chemically synthesized
  source 1..22: mol_type = other DNA
atctttattgtctcctttcatc

SEQ ID NO: 144235 - DNA, 22 bp, synthetic construct
  misc_feature 1..22: note = chemically synthesized
  source 1..22: mol_type = other DNA
tattgtctcctttcatctcaac

SEQ ID NO: 144236 - DNA, 22 bp, synthetic construct
  misc_feature 1..22: note = chemically synthesized
  source 1..22: mol_type = other DNA
attgtctcctttcatctcaaca

SEQ ID NO: 144237 - DNA, 22 bp, synthetic construct
  misc_feature 1..22: note = chemically synthesized
  source 1..22: mol_type = other DNA
ttgtctcctttcatctcaacag

SEQ ID NO: 144238 - DNA, 22 bp, synthetic construct
  misc_feature 1..22: note = chemically synthesized
  source 1..22: mol_type = other DNA
tctcctttcatctcaacagctc

SEQ ID NO: 144239 - DNA, 22 bp, synthetic construct
  misc_feature 1..22: note = chemically synthesized
  source 1..22: mol_type = other DNA
ctttcatctcaacagctcctgg

SEQ ID NO: 144240 - DNA, 22 bp, synthetic construct
  misc_feature 1..22: note = chemically synthesized
  source 1..22: mol_type = other DNA
tcatctcaacagctcctgggaa

SEQ ID NO: 144241 - DNA, 22 bp, synthetic construct
  misc_feature 1..22: note = chemically synthesized
  source 1..22: mol_type = other DNA
catctcaacagctcctgggaaa

SEQ ID NO: 144242 - DNA, 22 bp, synthetic construct
  misc_feature 1..22: note = chemically synthesized
  source 1..22: mol_type = other DNA
atctcaacagctcctgggaaat

SEQ ID NO: 144243 - DNA, 22 bp, synthetic construct
  misc_feature 1..22: note = chemically synthesized
  source 1..22: mol_type = other DNA
aacagctcctgggaaatgtgct

SEQ ID NO: 144244 - DNA, 22 bp, synthetic construct
  misc_feature 1..22: note = chemically synthesized
  source 1..22: mol_type = other DNA
ctgggaaatgtgctggtgaccg

SEQ ID NO: 144245 - DNA, 22 bp, synthetic construct
  misc_feature 1..22: note = chemically synthesized
  source 1..22: mol_type = other DNA
ggaaatgtgctggtgaccgttt

SEQ ID NO: 144246 - DNA, 22 bp, synthetic construct
  misc_feature 1..22: note = chemically synthesized
  source 1..22: mol_type = other DNA
gtgaccgttttggcaatccatt

SEQ ID NO: 144247 - DNA, 22 bp, synthetic construct
  misc_feature 1..22: note = chemically synthesized
  source 1..22: mol_type = other DNA
tggcaatccatttcggcaaaga

SEQ ID NO: 144248 - DNA, 22 bp, synthetic construct
  misc_feature 1..22: note = chemically synthesized
  source 1..22: mol_type = other DNA
ggcaatccatttcggcaaagaa

SEQ ID NO: 144249 - DNA, 22 bp, synthetic construct
  misc_feature 1..22: note = chemically synthesized
  source 1..22: mol_type = other DNA
gcaatccatttcggcaaagaat

SEQ ID NO: 144250 - DNA, 22 bp, synthetic construct
  misc_feature 1..22: note = chemically synthesized
  source 1..22: mol_type = other DNA
cggcaaagaattcacccctgag

SEQ ID NO: 144251 - DNA, 22 bp, synthetic construct
  misc_feature 1..22: note = chemically synthesized
  source 1..22: mol_type = other DNA
ggcaaagaattcacccctgagg

SEQ ID NO: 144252 - DNA, 22 bp, synthetic construct
  misc_feature 1..22: note = chemically synthesized
  source 1..22: mol_type = other DNA
acccctgaggtgcaggcttcct

SEQ ID NO: 144253 - DNA, 22 bp, synthetic construct
  misc_feature 1..22: note = chemically synthesized
  source 1..22: mol_type = other DNA
aggtgcaggcttcctggcagaa

SEQ ID NO: 144254 - DNA, 22 bp, synthetic construct
  misc_feature 1..22: note = chemically synthesized
  source 1..22: mol_type = other DNA
cctggcagaagatggtgactgg

SEQ ID NO: 144255 - DNA, 22 bp, synthetic construct
  misc_feature 1..22: note = chemically synthesized
  source 1..22: mol_type = other DNA
ctggcagaagatggtgactgga

SEQ ID NO: 144256 - DNA, 22 bp, synthetic construct
  misc_feature 1..22: note = chemically synthesized
  source 1..22: mol_type = other DNA
gcagaagatggtgactggagtg

SEQ ID NO: 144257 - DNA, 22 bp, synthetic construct
  misc_feature 1..22: note = chemically synthesized
  source 1..22: mol_type = other DNA
gagtggccagtgccctgtcctc

SEQ ID NO: 144258 - DNA, 22 bp, synthetic construct
  misc_feature 1..22: note = chemically synthesized
  source 1..22: mol_type = other DNA
tcctccagataccactgagctc

SEQ ID NO: 144259 - DNA, 22 bp, synthetic construct
  misc_feature 1..22: note = chemically synthesized
  source 1..22: mol_type = other DNA
cagataccactgagctcactgc

SEQ ID NO: 144260 - DNA, 22 bp, synthetic construct
  misc_feature 1..22: note = chemically synthesized
  source 1..22: mol_type = other DNA
agctcactgcccatgatgcaga

SEQ ID NO: 144261 - DNA, 22 bp, synthetic construct
  misc_feature 1..22: note = chemically synthesized
  source 1..22: mol_type = other DNA
actgcccatgatgcagagcttt

SEQ ID NO: 144262 - DNA, 22 bp, synthetic construct
  misc_feature 1..22: note = chemically synthesized
  source 1..22: mol_type = other DNA
cccatgatgcagagctttcaag

SEQ ID NO: 144263 - DNA, 22 bp, synthetic construct
  misc_feature 1..22: note = chemically synthesized
  source 1..22: mol_type = other DNA
tcaaggataggctttattctgc

SEQ ID NO: 144264 - DNA, 22 bp, synthetic construct
  misc_feature 1..22: note = chemically synthesized
  source 1..22: mol_type = other DNA
caaggataggctttattctgca

SEQ ID NO: 144265 - DNA, 22 bp, synthetic construct
  misc_feature 1..22: note = chemically synthesized
  source 1..22: mol_type = other DNA
aaggataggctttattctgcaa

SEQ ID NO: 144266 - DNA, 22 bp, synthetic construct
  misc_feature 1..22: note = chemically synthesized
  source 1..22: mol_type = other DNA
tattctgcaagcaatcaaataa

SEQ ID NO: 144267 - DNA, 22 bp, synthetic construct
  misc_feature 1..22: note = chemically synthesized
  source 1..22: mol_type = other DNA
attctgcaagcaatcaaataat

SEQ ID NO: 144268 - DNA, 22 bp, synthetic construct
  misc_feature 1..22: note = chemically synthesized
  source 1..22: mol_type = other DNA
ttctgcaagcaatcaaataata

SEQ ID NO: 144269 - DNA, 22 bp, synthetic construct
  misc_feature 1..22: note = chemically synthesized
  source 1..22: mol_type = other DNA
tgcaagcaatcaaataataaat

SEQ ID NO: 144270 - DNA, 22 bp, synthetic construct
  misc_feature 1..22: note = chemically synthesized
  source 1..22: mol_type = other DNA
caagcaatcaaataataaatct

SEQ ID NO: 144271 - DNA, 22 bp, synthetic construct
  misc_feature 1..22: note = chemically synthesized
  source 1..22: mol_type = other DNA
ttctgctaagagatcacacatg

SEQ ID NO: 144272 - DNA, 22 bp, synthetic construct
  misc_feature 1..22: note = chemically synthesized
  source 1..22: mol_type = other DNA
tgctaagagatcacacatggtt

SEQ ID NO: 144273 - DNA, 22 bp, synthetic construct
  misc_feature 1..22: note = chemically synthesized
  source 1..22: mol_type = other DNA
ctaagagatcacacatggttgt

SEQ ID NO: 144274 - DNA, 22 bp, synthetic construct
  misc_feature 1..22: note = chemically synthesized
  source 1..22: mol_type = other DNA
agagatcacacatggttgtctt

SEQ ID NO: 144275 - DNA, 22 bp, synthetic construct
  misc_feature 1..22: note = chemically synthesized
  source 1..22: mol_type = other DNA
tcttcagttctttttttatgtc

SEQ ID NO: 144276 - DNA, 22 bp, synthetic construct
  misc_feature 1..22: note = chemically synthesized
  source 1..22: mol_type = other DNA
cagttctttttttatgtctttt

SEQ ID NO: 144277 - DNA, 22 bp, synthetic construct
  misc_feature 1..22: note = chemically synthesized
  source 1..22: mol_type = other DNA
agttctttttttatgtcttttt

SEQ ID NO: 144278 - DNA, 22 bp, synthetic construct
  misc_feature 1..22: note = chemically synthesized
  source 1..22: mol_type = other DNA
tttttttatgtctttttaaata

SEQ ID NO: 144279 - DNA, 22 bp, synthetic construct
  misc_feature 1..22: note = chemically synthesized
  source 1..22: mol_type = other DNA
tttttatgtctttttaaatata

SEQ ID NO: 144280 - DNA, 22 bp, synthetic construct
  misc_feature 1..22: note = chemically synthesized
  source 1..22: mol_type = other DNA
ttttatgtctttttaaatatat

SEQ ID NO: 144281 - DNA, 22 bp, synthetic construct
  misc_feature 1..22: note = chemically synthesized
  source 1..22: mol_type = other DNA
tttatgtctttttaaatatatg

SEQ ID NO: 144282 - DNA, 22 bp, synthetic construct
  misc_feature 1..22: note = chemically synthesized
  source 1..22: mol_type = other DNA
ttatgtctttttaaatatatga

SEQ ID NO: 144283 - DNA, 22 bp, synthetic construct
  misc_feature 1..22: note = chemically synthesized
  source 1..22: mol_type = other DNA
tatgtctttttaaatatatgag

SEQ ID NO: 144284 - DNA, 22 bp, synthetic construct
  misc_feature 1..22: note = chemically synthesized
  source 1..22: mol_type = other DNA
atgtctttttaaatatatgagc

SEQ ID NO: 144285 - DNA, 22 bp, synthetic construct
  misc_feature 1..22: note = chemically synthesized
  source 1..22: mol_type = other DNA
tgtctttttaaatatatgagcc

SEQ ID NO: 144286 - DNA, 22 bp, synthetic construct
  misc_feature 1..22: note = chemically synthesized
  source 1..22: mol_type = other DNA
tttaaatatatgagccacaaag

SEQ ID NO: 144287 - DNA, 22 bp, synthetic construct
  misc_feature 1..22: note = chemically synthesized
  source 1..22: mol_type = other DNA
ttaaatatatgagccacaaagg

SEQ ID NO: 144288 - DNA, 22 bp, synthetic construct
  misc_feature 1..22: note = chemically synthesized
  source 1..22: mol_type = other DNA
taaatatatgagccacaaaggg

SEQ ID NO: 144289 - DNA, 22 bp, synthetic construct
  misc_feature 1..22: note = chemically synthesized
  source 1..22: mol_type = other DNA
aaatatatgagccacaaagggt

SEQ ID NO: 144290 - DNA, 22 bp, synthetic construct
  misc_feature 1..22: note = chemically synthesized
  source 1..22: mol_type = other DNA
aatatatgagccacaaagggtt

SEQ ID NO: 144291 - DNA, 22 bp, synthetic construct
  misc_feature 1..22: note = chemically synthesized
  source 1..22: mol_type = other DNA
tatgttgagggatgtgtttatg

SEQ ID NO: 144292 - DNA, 22 bp, synthetic construct
  misc_feature 1..22: note = chemically synthesized
  source 1..22: mol_type = other DNA
atgttgagggatgtgtttatgt

SEQ ID NO: 144293 - DNA, 22 bp, synthetic construct
  misc_feature 1..22: note = chemically synthesized
  source 1..22: mol_type = other DNA
tgttgagggatgtgtttatgtg

SEQ ID NO: 144294 - DNA, 22 bp, synthetic construct
  misc_feature 1..22: note = chemically synthesized
  source 1..22: mol_type = other DNA
agggatgtgtttatgtgtattt

SEQ ID NO: 144295 - DNA, 22 bp, synthetic construct
  misc_feature 1..22: note = chemically synthesized
  source 1..22: mol_type = other DNA
atgtgtatttatacatggctat

SEQ ID NO: 144296 - DNA, 22 bp, synthetic construct
  misc_feature 1..22: note = chemically synthesized
  source 1..22: mol_type = other DNA
tgtgtatttatacatggctatg

SEQ ID NO: 144297 - DNA, 22 bp, synthetic construct
  misc_feature 1..22: note = chemically synthesized
  source 1..22: mol_type = other DNA
atacatggctatgtgtgtttgt

SEQ ID NO: 144298 - DNA, 22 bp, synthetic construct
  misc_feature 1..22: note = chemically synthesized
  source 1..22: mol_type = other DNA
tacatggctatgtgtgtttgtg

SEQ ID NO: 144299 - DNA, 22 bp, synthetic construct
  misc_feature 1..22: note = chemically synthesized
  source 1..22: mol_type = other DNA
tgtgtgtttgtgtcatgtgcac

SEQ ID NO: 144300 - DNA, 22 bp, synthetic construct
  misc_feature 1..22: note = chemically synthesized
  source 1..22: mol_type = other DNA
gtgtcatgtgcacactccacac

SEQ ID NO: 144301 - DNA, 22 bp, synthetic construct
  misc_feature 1..22: note = chemically synthesized
  source 1..22: mol_type = other DNA
tgtcatgtgcacactccacact

SEQ ID NO: 144302 - DNA, 22 bp, synthetic construct
  misc_feature 1..22: note = chemically synthesized
  source 1..22: mol_type = other DNA
cacacttttttgtttacgttag

SEQ ID NO: 144303 - DNA, 22 bp, synthetic construct
  misc_feature 1..22: note = chemically synthesized
  source 1..22: mol_type = other DNA
ttttgtttacgttagatgtggg

SEQ ID NO: 144304 - DNA, 22 bp, synthetic construct
  misc_feature 1..22: note = chemically synthesized
  source 1..22: mol_type = other DNA
tttgtttacgttagatgtgggt

SEQ ID NO: 144305 - DNA, 22 bp, synthetic construct
  misc_feature 1..22: note = chemically synthesized
  source 1..22: mol_type = other DNA
ttgtttacgttagatgtgggtt

SEQ ID NO: 144306 - DNA, 22 bp, synthetic construct
  misc_feature 1..22: note = chemically synthesized
  source 1..22: mol_type = other DNA
tgtttacgttagatgtgggttt

SEQ ID NO: 144307 - DNA, 22 bp, synthetic construct
  misc_feature 1..22: note = chemically synthesized
  source 1..22: mol_type = other DNA
gtttacgttagatgtgggtttt

SEQ ID NO: 144308 - DNA, 22 bp, synthetic construct
  misc_feature 1..22: note = chemically synthesized
  source 1..22: mol_type = other DNA
tttacgttagatgtgggttttg

SEQ ID NO: 144309 - DNA, 22 bp, synthetic construct
  misc_feature 1..22: note = chemically synthesized
  source 1..22: mol_type = other DNA
acgttagatgtgggttttgatg

SEQ ID NO: 144310 - DNA, 22 bp, synthetic construct
  misc_feature 1..22: note = chemically synthesized
  source 1..22: mol_type = other DNA
cgttagatgtgggttttgatga

SEQ ID NO: 144311 - DNA, 22 bp, synthetic construct
  misc_feature 1..22: note = chemically synthesized
  source 1..22: mol_type = other DNA
gatgtgggttttgatgagcaaa

SEQ ID NO: 144312 - DNA, 22 bp, synthetic construct
  misc_feature 1..22: note = chemically synthesized
  source 1..22: mol_type = other DNA
tgatgagcaaataaaagaacta

SEQ ID NO: 144313 - DNA, 22 bp, synthetic construct
  misc_feature 1..22: note = chemically synthesized
  source 1..22: mol_type = other DNA
gatgagcaaataaaagaactag

SEQ ID NO: 144314 - DNA, 22 bp, synthetic construct
  misc_feature 1..22: note = chemically synthesized
  source 1..22: mol_type = other DNA
atgagcaaataaaagaactagg

SEQ ID NO: 144315 - DNA, 22 bp, synthetic construct
  misc_feature 1..22: note = chemically synthesized
  source 1..22: mol_type = other DNA
ggcaataaagaaacttgtacat

SEQ ID NO: 144316 - DNA, 22 bp, synthetic construct
  misc_feature 1..22: note = chemically synthesized
  source 1..22: mol_type = other DNA
gtacatgggagttctgcaagtg

SEQ ID NO: 144317 - DNA, 22 bp, synthetic construct
  misc_feature 1..22: note = chemically synthesized
  source 1..22: mol_type = other DNA
tacatgggagttctgcaagtgg

SEQ ID NO: 144318 - DNA, 22 bp, synthetic construct
  misc_feature 1..22: note = chemically synthesized
  source 1..22: mol_type = other DNA
tgcaagtgggagtaaaaggtgc

SEQ ID NO: 144319 - DNA, 22 bp, synthetic construct
  misc_feature 1..22: note = chemically synthesized
  source 1..22: mol_type = other DNA
caagtgggagtaaaaggtgcag

SEQ ID NO: 144320 - DNA, 22 bp, synthetic construct
  misc_feature 1..22: note = chemically synthesized
  source 1..22: mol_type = other DNA
gttggaagaaagacctctatag

SEQ ID NO: 144321 - DNA, 22 bp, synthetic construct
  misc_feature 1..22: note = chemically synthesized
  source 1..22: mol_type = other DNA
gaagaaagacctctataggaca

SEQ ID NO: 144322 - DNA, 22 bp, synthetic construct
  misc_feature 1..22: note = chemically synthesized
  source 1..22: mol_type = other DNA
tataggacaggactcctcagaa

SEQ ID NO: 144323 - DNA, 22 bp, synthetic construct
  misc_feature 1..22: note = chemically synthesized
  source 1..22: mol_type = other DNA
taggacaggactcctcagaaac

SEQ ID NO: 144324 - DNA, 22 bp, synthetic construct
  misc_feature 1..22: note = chemically synthesized
  source 1..22: mol_type = other DNA
ctcagaaacagatgttttggaa

SEQ ID NO: 144325 - DNA, 22 bp, synthetic construct
  misc_feature 1..22: note = chemically synthesized
  source 1..22: mol_type = other DNA
agaaacagatgttttggaagag

SEQ ID NO: 144326 - DNA, 22 bp, synthetic construct
  misc_feature 1..22: note = chemically synthesized
  source 1..22: mol_type = other DNA
tggaagagatggggaaaggttc

SEQ ID NO: 144327 - DNA, 22 bp, synthetic construct
  misc_feature 1..22: note = chemically synthesized
  source 1..22: mol_type = other DNA
ggaagagatggggaaaggttca

SEQ ID NO: 144328 - DNA, 22 bp, synthetic construct
  misc_feature 1..22: note = chemically synthesized
  source 1..22: mol_type = other DNA
gaagagatggggaaaggttcag

SEQ ID NO: 144329 - DNA, 22 bp, synthetic construct
  misc_feature 1..22: note = chemically synthesized
  source 1..22: mol_type = other DNA
agtgaagggggctgaaccccct

SEQ ID NO: 144330 - DNA, 22 bp, synthetic construct
  misc_feature 1..22: note = chemically synthesized
  source 1..22: mol_type = other DNA
aacccccttccctggattgcag

SEQ ID NO: 144331 - DNA, 22 bp, synthetic construct
  misc_feature 1..22: note = chemically synthesized
  source 1..22: mol_type = other DNA
ccctggattgcagcacagcagc

SEQ ID NO: 144332 - DNA, 22 bp, synthetic construct
  misc_feature 1..22: note = chemically synthesized
  source 1..22: mol_type = other DNA
cctggattgcagcacagcagcg

SEQ ID NO: 144333 - DNA, 22 bp, synthetic construct
  misc_feature 1..22: note = chemically synthesized
  source 1..22: mol_type = other DNA
gattgcagcacagcagcgagga

SEQ ID NO: 144334 - DNA, 22 bp, synthetic construct
  misc_feature 1..22: note = chemically synthesized
  source 1..22: mol_type = other DNA
cagcacagcagcgaggaagggg

SEQ ID NO: 144335 - DNA, 22 bp, synthetic construct
  misc_feature 1..22: note = chemically synthesized
  source 1..22: mol_type = other DNA
aacgaagaaaaagtgttccaag

SEQ ID NO: 144336 - DNA, 22 bp, synthetic construct
  misc_feature 1..22: note = chemically synthesized
  source 1..22: mol_type = other DNA
caagctttaggaagtcaaggtt

SEQ ID NO: 144337 - DNA, 22 bp, synthetic construct
  misc_feature 1..22: note = chemically synthesized
  source 1..22: mol_type = other DNA
taggaagtcaaggtttaggcag

SEQ ID NO: 144338 - DNA, 22 bp, synthetic construct
  misc_feature 1..22: note = chemically synthesized
  source 1..22: mol_type = other DNA
aggaagtcaaggtttaggcagg

SEQ ID NO: 144339 - DNA, 22 bp, synthetic construct
  misc_feature 1..22: note = chemically synthesized
  source 1..22: mol_type = other DNA
ggaagtcaaggtttaggcaggg

SEQ ID NO: 144340 - DNA, 22 bp, synthetic construct
  misc_feature 1..22: note = chemically synthesized
  source 1..22: mol_type = other DNA
aggcagggatagccattctatt

SEQ ID NO: 144341 - DNA, 22 bp, synthetic construct
  misc_feature 1..22: note = chemically synthesized
  source 1..22: mol_type = other DNA
ggcagggatagccattctattt

SEQ ID NO: 144342 - DNA, 22 bp, synthetic construct
  misc_feature 1..22: note = chemically synthesized
  source 1..22: mol_type = other DNA
tattttattaggggcaatacta

SEQ ID NO: 144343 - DNA, 22 bp, synthetic construct
  misc_feature 1..22: note = chemically synthesized
  source 1..22: mol_type = other DNA
ttttattaggggcaatactatt

SEQ ID NO: 144344 - DNA, 22 bp, synthetic construct
  misc_feature 1..22: note = chemically synthesized
  source 1..22: mol_type = other DNA
tattaggggcaatactatttcc

SEQ ID NO: 144345 - DNA, 22 bp, synthetic construct
  misc_feature 1..22: note = chemically synthesized
  source 1..22: mol_type = other DNA
attaggggcaatactatttcca

SEQ ID NO: 144346 - DNA, 22 bp, synthetic construct
  misc_feature 1..22: note = chemically synthesized
  source 1..22: mol_type = other DNA
ttaggggcaatactatttccaa

SEQ ID NO: 144347 - DNA, 22 bp, synthetic construct
  misc_feature 1..22: note = chemically synthesized
  source 1..22: mol_type = other DNA
ggggcaatactatttccaacgg

SEQ ID NO: 144348 - DNA, 22 bp, synthetic construct
  misc_feature 1..22: note = chemically synthesized
  source 1..22: mol_type = other DNA
tttccaacggcatctggctttt

SEQ ID NO: 144349 - DNA, 22 bp, synthetic construct
  misc_feature 1..22: note = chemically synthesized
  source 1..22: mol_type = other DNA
ccaacggcatctggcttttctc

SEQ ID NO: 144350 - DNA, 22 bp, synthetic construct
  misc_feature 1..22: note = chemically synthesized
  source 1..22: mol_type = other DNA
caacggcatctggcttttctca

SEQ ID NO: 144351 - DNA, 22 bp, synthetic construct
  misc_feature 1..22: note = chemically synthesized
  source 1..22: mol_type = other DNA
gcttttctcagcccttgtgagg

SEQ ID NO: 144352 - DNA, 22 bp, synthetic construct
  misc_feature 1..22: note = chemically synthesized
  source 1..22: mol_type = other DNA
ttctcagcccttgtgaggctct

SEQ ID NO: 144353 - DNA, 22 bp, synthetic construct
  misc_feature 1..22: note = chemically synthesized
  source 1..22: mol_type = other DNA
tctcagcccttgtgaggctcta

SEQ ID NO: 144354 - DNA, 22 bp, synthetic construct
  misc_feature 1..22: note = chemically synthesized
  source 1..22: mol_type = other DNA
ctcagcccttgtgaggctctac

SEQ ID NO: 144355 - DNA, 22 bp, synthetic construct
  misc_feature 1..22: note = chemically synthesized
  source 1..22: mol_type = other DNA
tcagcccttgtgaggctctaca

SEQ ID NO: 144356 - DNA, 22 bp, synthetic construct
  misc_feature 1..22: note = chemically synthesized
  source 1..22: mol_type = other DNA
agcccttgtgaggctctacagg

SEQ ID NO: 144357 - DNA, 22 bp, synthetic construct
  misc_feature 1..22: note = chemically synthesized
  source 1..22: mol_type = other DNA
gtgaggctctacagggaggttg

SEQ ID NO: 144358 - DNA, 22 bp, synthetic construct
  misc_feature 1..22: note = chemically synthesized
  source 1..22: mol_type = other DNA
tgaggctctacagggaggttga

SEQ ID NO: 144359 - DNA, 22 bp, synthetic construct
  misc_feature 1..22: note = chemically synthesized
  source 1..22: mol_type = other DNA
tacagggaggttgaggtgttag

SEQ ID NO: 144360 - DNA, 22 bp, synthetic construct
  misc_feature 1..22: note = chemically synthesized
  source 1..22: mol_type = other DNA
cagggaggttgaggtgttagag

SEQ ID NO: 144361 - DNA, 22 bp, synthetic construct
  misc_feature 1..22: note = chemically synthesized
  source 1..22: mol_type = other DNA
aggtgttagagatcagagcagg

SEQ ID NO: 144362 - DNA, 22 bp, synthetic construct
  misc_feature 1..22: note = chemically synthesized
  source 1..22: mol_type = other DNA
gagatcagagcaggaaacaggt

SEQ ID NO: 144363 - DNA, 22 bp, synthetic construct
  misc_feature 1..22: note = chemically synthesized
  source 1..22: mol_type = other DNA
ttctttccacggtaactacaat

SEQ ID NO: 144364 - DNA, 22 bp, synthetic construct
  misc_feature 1..22: note = chemically synthesized
  source 1..22: mol_type = other DNA
tctttccacggtaactacaatg

SEQ ID NO: 144365 - DNA, 22 bp, synthetic construct
  misc_feature 1..22: note = chemically synthesized
  source 1..22: mol_type = other DNA
ctttccacggtaactacaatga

SEQ ID NO: 144366 - DNA, 22 bp, synthetic construct
  misc_feature 1..22: note = chemically synthesized
  source 1..22: mol_type = other DNA
tttccacggtaactacaatgaa

SEQ ID NO: 144367 - DNA, 22 bp, synthetic construct
  misc_feature 1..22: note = chemically synthesized
  source 1..22: mol_type = other DNA
tccacggtaactacaatgaagt

SEQ ID NO: 144368 - DNA, 22 bp, synthetic construct
  misc_feature 1..22: note = chemically synthesized
  source 1..22: mol_type = other DNA
ccacggtaactacaatgaagtg

SEQ ID NO: 144369 - DNA, 22 bp, synthetic construct
  misc_feature 1..22: note = chemically synthesized
  source 1..22: mol_type = other DNA
cacggtaactacaatgaagtga

SEQ ID NO: 144370 - DNA, 22 bp, synthetic construct
  misc_feature 1..22: note = chemically synthesized
  source 1..22: mol_type = other DNA
caatgaagtgatccttacttta

SEQ ID NO: 144371 - DNA, 22 bp, synthetic construct
  misc_feature 1..22: note = chemically synthesized
  source 1..22: mol_type = other DNA
actttactaaggaacttttcat

SEQ ID NO: 144372 - DNA, 22 bp, synthetic construct
  misc_feature 1..22: note = chemically synthesized
  source 1..22: mol_type = other DNA
ctttactaaggaacttttcatt

SEQ ID NO: 144373 - DNA, 22 bp, synthetic construct
  misc_feature 1..22: note = chemically synthesized
  source 1..22: mol_type = other DNA
tactaaggaacttttcatttta

SEQ ID NO: 144374 - DNA, 22 bp, synthetic construct
  misc_feature 1..22: note = chemically synthesized
  source 1..22: mol_type = other DNA
actaaggaacttttcattttaa

SEQ ID NO: 144375 - DNA, 22 bp, synthetic construct
  misc_feature 1..22: note = chemically synthesized
  source 1..22: mol_type = other DNA
ctaaggaacttttcattttaag

SEQ ID NO: 144376 - DNA, 22 bp, synthetic construct
  misc_feature 1..22: note = chemically synthesized
  source 1..22: mol_type = other DNA
aggaacttttcattttaagtgt

SEQ ID NO: 144377 - DNA, 22 bp, synthetic construct
  misc_feature 1..22: note = chemically synthesized
  source 1..22: mol_type = other DNA
ttcattttaagtgttgacgcat

SEQ ID NO: 144378 - DNA, 22 bp, synthetic construct
  misc_feature 1..22: note = chemically synthesized
  source 1..22: mol_type = other DNA
tcattttaagtgttgacgcatg

SEQ ID NO: 144379 - DNA, 22 bp, synthetic construct
  misc_feature 1..22: note = chemically synthesized
  source 1..22: mol_type = other DNA
cattttaagtgttgacgcatgc

SEQ ID NO: 144380 - DNA, 22 bp, synthetic construct
  misc_feature 1..22: note = chemically synthesized
  source 1..22: mol_type = other DNA
attttaagtgttgacgcatgcc

SEQ ID NO: 144381 - DNA, 22 bp, synthetic construct
  misc_feature 1..22: note = chemically synthesized
  source 1..22: mol_type = other DNA
taagtgttgacgcatgcctaaa

SEQ ID NO: 144382 - DNA, 22 bp, synthetic construct
  misc_feature 1..22: note = chemically synthesized
  source 1..22: mol_type = other DNA
aagtgttgacgcatgcctaaag

SEQ ID NO: 144383 - DNA, 22 bp, synthetic construct
  misc_feature 1..22: note = chemically synthesized
  source 1..22: mol_type = other DNA
agtgttgacgcatgcctaaaga

SEQ ID NO: 144384 - DNA, 22 bp, synthetic construct
  misc_feature 1..22: note = chemically synthesized
  source 1..22: mol_type = other DNA
acgcatgcctaaagaggtgaaa

SEQ ID NO: 144385 - DNA, 22 bp, synthetic construct
  misc_feature 1..22: note = chemically synthesized
  source 1..22: mol_type = other DNA
aagaggtgaaattaatcccata

SEQ ID NO: 144386 - DNA, 22 bp, synthetic construct
  misc_feature 1..22: note = chemically synthesized
  source 1..22: mol_type = other DNA
atcccatacccttaagtctaca

SEQ ID NO: 144387 - DNA, 22 bp, synthetic construct
  misc_feature 1..22: note = chemically synthesized
  source 1..22: mol_type = other DNA
aagtctacagactggtcacagc

SEQ ID NO: 144388 - DNA, 22 bp, synthetic construct
  misc_feature 1..22: note = chemically synthesized
  source 1..22: mol_type = other DNA
agtctacagactggtcacagca

SEQ ID NO: 144389 - DNA, 22 bp, synthetic construct
  misc_feature 1..22: note = chemically synthesized
  source 1..22: mol_type = other DNA
cagactggtcacagcatttcaa

SEQ ID NO: 144390 - DNA, 22 bp, synthetic construct
  misc_feature 1..22: note = chemically synthesized
  source 1..22: mol_type = other DNA
gtcacagcatttcaaggaggag

SEQ ID NO: 144391 - DNA, 22 bp, synthetic construct
  misc_feature 1..22: note = chemically synthesized
  source 1..22: mol_type = other DNA
caaggaggagacctcattgtaa

SEQ ID NO: 144392 - DNA, 22 bp, synthetic construct
  misc_feature 1..22: note = chemically synthesized
  source 1..22: mol_type = other DNA
aaggaggagacctcattgtaag

SEQ ID NO: 144393 - DNA, 22 bp, synthetic construct
  misc_feature 1..22: note = chemically synthesized
  source 1..22: mol_type = other DNA
attgtaagcttctagggaggtg

SEQ ID NO: 144394 - DNA, 22 bp, synthetic construct
  misc_feature 1..22: note = chemically synthesized
  source 1..22: mol_type = other DNA
taagcttctagggaggtgggga

SEQ ID NO: 144395 - DNA, 22 bp, synthetic construct
  misc_feature 1..22: note = chemically synthesized
  source 1..22: mol_type = other DNA
ctagggaggtggggacttaggt

SEQ ID NO: 144396 - DNA, 22 bp, synthetic construct
  misc_feature 1..22: note = chemically synthesized
  source 1..22: mol_type = other DNA
tagggaggtggggacttaggtg

SEQ ID NO: 144397 - DNA, 22 bp, synthetic construct
  misc_feature 1..22: note = chemically synthesized
  source 1..22: mol_type = other DNA
gggaggtggggacttaggtgaa

SEQ ID NO: 144398 - DNA, 22 bp, synthetic construct
  misc_feature 1..22: note = chemically synthesized
  source 1..22: mol_type = other DNA
aggtgaaggaaatgagccagca

SEQ ID NO: 144399 - DNA, 22 bp, synthetic construct
  misc_feature 1..22: note = chemically synthesized
  source 1..22: mol_type = other DNA
ggtgaaggaaatgagccagcag

SEQ ID NO: 144400 - DNA, 22 bp, synthetic construct
  misc_feature 1..22: note = chemically synthesized
  source 1..22: mol_type = other DNA
acaagtcagcatcagcgtgtca

SEQ ID NO: 144401 - DNA, 22 bp, synthetic construct
  misc_feature 1..22: note = chemically synthesized
  source 1..22: mol_type = other DNA
agcagcagaacagcacggtcag

SEQ ID NO: 144402 - DNA, 22 bp, synthetic construct
  misc_feature 1..22: note = chemically synthesized
  source 1..22: mol_type = other DNA
gtataacattaattgagaaggc

SEQ ID NO: 144403 - DNA, 22 bp, synthetic construct
  misc_feature 1..22: note = chemically synthesized
  source 1..22: mol_type = other DNA
tataacattaattgagaaggca

SEQ ID NO: 144404 - DNA, 22 bp, synthetic construct
  misc_feature 1..22: note = chemically synthesized
  source 1..22: mol_type = other DNA
attgagaaggcagattcactgg

SEQ ID NO: 144405 - DNA, 22 bp, synthetic construct
  misc_feature 1..22: note = chemically synthesized
  source 1..22: mol_type = other DNA
agaaggcagattcactggagtt

SEQ ID NO: 144406 - DNA, 22 bp, synthetic construct
  misc_feature 1..22: note = chemically synthesized
  source 1..22: mol_type = other DNA
actggagttcttatataattga

SEQ ID NO: 144407 - DNA, 22 bp, synthetic construct
  misc_feature 1..22: note = chemically synthesized
  source 1..22: mol_type = other DNA
gagttcttatataattgaaagt

SEQ ID NO: 144408 - DNA, 22 bp, synthetic construct
  misc_feature 1..22: note = chemically synthesized
  source 1..22: mol_type = other DNA
ttatataattgaaagttaatgc

SEQ ID NO: 144409 - DNA, 22 bp, synthetic construct
  misc_feature 1..22: note = chemically synthesized
  source 1..22: mol_type = other DNA
atataattgaaagttaatgcac

SEQ ID NO: 144410 - DNA, 22 bp, synthetic construct
  misc_feature 1..22: note = chemically synthesized
  source 1..22: mol_type = other DNA
tataattgaaagttaatgcacg

SEQ ID NO: 144411 - DNA, 22 bp, synthetic construct
  misc_feature 1..22: note = chemically synthesized
  source 1..22: mol_type = other DNA
aaagttaatgcacgttaataag

SEQ ID NO: 144412 - DNA, 22 bp, synthetic construct
  misc_feature 1..22: note = chemically synthesized
  source 1..22: mol_type = other DNA
atgcacgttaataagcaagagt

SEQ ID NO: 144413 - DNA, 22 bp, synthetic construct
  misc_feature 1..22: note = chemically synthesized
  source 1..22: mol_type = other DNA
ataagcaagagtttagtttaat

SEQ ID NO: 144414 - DNA, 22 bp, synthetic construct
  misc_feature 1..22: note = chemically synthesized
  source 1..22: mol_type = other DNA
agtttaatgtgatggtgttatg

SEQ ID NO: 144415 - DNA, 22 bp, synthetic construct
  misc_feature 1..22: note = chemically synthesized
  source 1..22: mol_type = other DNA
gtttaatgtgatggtgttatga

SEQ ID NO: 144416 - DNA, 22 bp, synthetic construct
  misc_feature 1..22: note = chemically synthesized
  source 1..22: mol_type = other DNA
aatgtgatggtgttatgaactt

SEQ ID NO: 144417 - DNA, 22 bp, synthetic construct
  misc_feature 1..22: note = chemically synthesized
  source 1..22: mol_type = other DNA
atgtgatggtgttatgaactta

SEQ ID NO: 144418 - DNA, 22 bp, synthetic construct
  misc_feature 1..22: note = chemically synthesized
  source 1..22: mol_type = other DNA
tgaacttaacgcttgtgtctcc

SEQ ID NO: 144419 - DNA, 22 bp, synthetic construct
  misc_feature 1..22: note = chemically synthesized
  source 1..22: mol_type = other DNA
aacgcttgtgtctccagaaaat

SEQ ID NO: 144420 - DNA, 22 bp, synthetic construct
  misc_feature 1..22: note = chemically synthesized
  source 1..22: mol_type = other DNA
acgcttgtgtctccagaaaatt

SEQ ID NO: 144421 - DNA, 22 bp, synthetic construct
  misc_feature 1..22: note = chemically synthesized
  source 1..22: mol_type = other DNA
gtgtctccagaaaattcacatg

SEQ ID NO: 144422 - DNA, 22 bp, synthetic construct
  misc_feature 1..22: note = chemically synthesized
  source 1..22: mol_type = other DNA
tgtctccagaaaattcacatgc

SEQ ID NO: 144423 - DNA, 22 bp, synthetic construct
  misc_feature 1..22: note = chemically synthesized
  source 1..22: mol_type = other DNA
cagaaaattcacatgctgaatc

SEQ ID NO: 144424 - DNA, 22 bp, synthetic construct
  misc_feature 1..22: note = chemically synthesized
  source 1..22: mol_type = other DNA
acatgctgaatccccaactccc

SEQ ID NO: 144425 - DNA, 22 bp, synthetic construct
  misc_feature 1..22: note = chemically synthesized
  source 1..22: mol_type = other DNA
aatccccaactcccaattggct

SEQ ID NO: 144426 - DNA, 22 bp, synthetic construct
  misc_feature 1..22: note = chemically synthesized
  source 1..22: mol_type = other DNA
ccaattggctccatttgtgggg

SEQ ID NO: 144427 - DNA, 22 bp, synthetic construct
  misc_feature 1..22: note = chemically synthesized
  source 1..22: mol_type = other DNA
gctccatttgtgggggaggctt

SEQ ID NO: 144428 - DNA, 22 bp, synthetic construct
  misc_feature 1..22: note = chemically synthesized
  source 1..22: mol_type = other DNA
catttgtgggggaggctttgga

SEQ ID NO: 144429 - DNA, 22 bp, synthetic construct
  misc_feature 1..22: note = chemically synthesized
  source 1..22: mol_type = other DNA
gtgggggaggctttggaaaagt

SEQ ID NO: 144430 - DNA, 22 bp, synthetic construct
  misc_feature 1..22: note = chemically synthesized
  source 1..22: mol_type = other DNA
tgggggaggctttggaaaagta

SEQ ID NO: 144431 - DNA, 22 bp, synthetic construct
  misc_feature 1..22: note = chemically synthesized
  source 1..22: mol_type = other DNA
tggaaaagtaatcaggtttaga

SEQ ID NO: 144432 - DNA, 22 bp, synthetic construct
  misc_feature 1..22: note = chemically synthesized
  source 1..22: mol_type = other DNA
ggaaaagtaatcaggtttagag

SEQ ID NO: 144433 - DNA, 22 bp, synthetic construct
  misc_feature 1..22: note = chemically synthesized
  source 1..22: mol_type = other DNA
gaaaagtaatcaggtttagagg

SEQ ID NO: 144434 - DNA, 22 bp, synthetic construct
  misc_feature 1..22: note = chemically synthesized
  source 1..22: mol_type = other DNA
agaggagctcatgagagcagat

SEQ ID NO: 144435 - DNA, 22 bp, synthetic construct
  misc_feature 1..22: note = chemically synthesized
  source 1..22: mol_type = other DNA
gaggagctcatgagagcagatc

SEQ ID NO: 144436 - DNA, 22 bp, synthetic construct
  misc_feature 1..22: note = chemically synthesized
  source 1..22: mol_type = other DNA
atgagagcagatccccatcata

SEQ ID NO: 144437 - DNA, 22 bp, synthetic construct
  misc_feature 1..22: note = chemically synthesized
  source 1..22: mol_type = other DNA
ttttcctcatcagaagcagaga

SEQ ID NO: 144438 - DNA, 22 bp, synthetic construct
  misc_feature 1..22: note = chemically synthesized
  source 1..22: mol_type = other DNA
tcctcatcagaagcagagagat

SEQ ID NO: 144439 - DNA, 22 bp, synthetic construct
  misc_feature 1..22: note = chemically synthesized
  source 1..22: mol_type = other DNA
cctcatcagaagcagagagatt

SEQ ID NO: 144440 - DNA, 22 bp, synthetic construct
  misc_feature 1..22: note = chemically synthesized
  source 1..22: mol_type = other DNA
ctcatcagaagcagagagatta

SEQ ID NO: 144441 - DNA, 22 bp, synthetic construct
  misc_feature 1..22: note = chemically synthesized
  source 1..22: mol_type = other DNA
atcagaagcagagagattagcc

SEQ ID NO: 144442 - DNA, 22 bp, synthetic construct
  misc_feature 1..22: note = chemically synthesized
  source 1..22: mol_type = other DNA
gccatttctcttccttctggtg

SEQ ID NO: 144443 - DNA, 22 bp, synthetic construct
  misc_feature 1..22: note = chemically synthesized
  source 1..22: mol_type = other DNA
ctcttccttctggtgaggacac

SEQ ID NO: 144444 - DNA, 22 bp, synthetic construct
  misc_feature 1..22: note = chemically synthesized
  source 1..22: mol_type = other DNA
tcttccttctggtgaggacaca

SEQ ID NO: 144445 - DNA, 22 bp, synthetic construct
  misc_feature 1..22: note = chemically synthesized
  source 1..22: mol_type = other DNA
ttccttctggtgaggacacagt

SEQ ID NO: 144446 - DNA, 22 bp, synthetic construct
  misc_feature 1..22: note = chemically synthesized
  source 1..22: mol_type = other DNA
ccttctggtgaggacacagtgg

SEQ ID NO: 144447 - DNA, 22 bp, synthetic construct
  misc_feature 1..22: note = chemically synthesized
  source 1..22: mol_type = other DNA
cttctggtgaggacacagtggg

SEQ ID NO: 144448 - DNA, 22 bp, synthetic construct
  misc_feature 1..22: note = chemically synthesized
  source 1..22: mol_type = other DNA
ctggtgaggacacagtgggaag

SEQ ID NO: 144449 - DNA, 22 bp, synthetic construct
  misc_feature 1..22: note = chemically synthesized
  source 1..22: mol_type = other DNA
tggtgaggacacagtgggaagt

SEQ ID NO: 144450 - DNA, 22 bp, synthetic construct
  misc_feature 1..22: note = chemically synthesized
  source 1..22: mol_type = other DNA
gtgaggacacagtgggaagtca

SEQ ID NO: 144451 - DNA, 22 bp, synthetic construct
  misc_feature 1..22: note = chemically synthesized
  source 1..22: mol_type = other DNA
caacccaggaagagagccctga

SEQ ID NO: 144452 - DNA, 22 bp, synthetic construct
  misc_feature 1..22: note = chemically synthesized
  source 1..22: mol_type = other DNA
accaggaaccagcagaaaagtg

SEQ ID NO: 144453 - DNA, 22 bp, synthetic construct
  misc_feature 1..22: note = chemically synthesized
  source 1..22: mol_type = other DNA
ttgttgaagtcacccagtctat

SEQ ID NO: 144454 - DNA, 22 bp, synthetic construct
  misc_feature 1..22: note = chemically synthesized
  source 1..22: mol_type = other DNA
ttgaagtcacccagtctatgct

SEQ ID NO: 144455 - DNA, 22 bp, synthetic construct
  misc_feature 1..22: note = chemically synthesized
  source 1..22: mol_type = other DNA
aagtcacccagtctatgctatt

SEQ ID NO: 144456 - DNA, 22 bp, synthetic construct
  misc_feature 1..22: note = chemically synthesized
  source 1..22: mol_type = other DNA
tgctattttgttatagcacctt

SEQ ID NO: 144457 - DNA, 22 bp, synthetic construct
  misc_feature 1..22: note = chemically synthesized
  source 1..22: mol_type = other DNA
ttttgttatagcaccttgcact

SEQ ID NO: 144458 - DNA, 22 bp, synthetic construct
  misc_feature 1..22: note = chemically synthesized
  source 1..22: mol_type = other DNA
tgttatagcaccttgcactaag

SEQ ID NO: 144459 - DNA, 22 bp, synthetic construct
  misc_feature 1..22: note = chemically synthesized
  source 1..22: mol_type = other DNA
gttatagcaccttgcactaagt

SEQ ID NO: 144460 - DNA, 22 bp, synthetic construct
  misc_feature 1..22: note = chemically synthesized
  source 1..22: mol_type = other DNA
ttatagcaccttgcactaagta

SEQ ID NO: 144461 - DNA, 22 bp, synthetic construct
  misc_feature 1..22: note = chemically synthesized
  source 1..22: mol_type = other DNA
tagcaccttgcactaagtaagg

SEQ ID NO: 144462 - DNA, 22 bp, synthetic construct
  misc_feature 1..22: note = chemically synthesized
  source 1..22: mol_type = other DNA
gcactaagtaaggcagatgaag

SEQ ID NO: 144463 - DNA, 22 bp, synthetic construct
  misc_feature 1..22: note = chemically synthesized
  source 1..22: mol_type = other DNA
cactaagtaaggcagatgaaga

SEQ ID NO: 144464 - DNA, 22 bp, synthetic construct
  misc_feature 1..22: note = chemically synthesized
  source 1..22: mol_type = other DNA
agtaaggcagatgaagaaagag

SEQ ID NO: 144465 - DNA, 22 bp, synthetic construct
  misc_feature 1..22: note = chemically synthesized
  source 1..22: mol_type = other DNA
cggtgttcagtggattagaaac

SEQ ID NO: 144466 - DNA, 22 bp, synthetic construct
  misc_feature 1..22: note = chemically synthesized
  source 1..22: mol_type = other DNA
ggtgttcagtggattagaaacc

SEQ ID NO: 144467 - DNA, 22 bp, synthetic construct
  misc_feature 1..22: note = chemically synthesized
  source 1..22: mol_type = other DNA
agtggattagaaaccatgttta

SEQ ID NO: 144468 - DNA, 22 bp, synthetic construct
  misc_feature 1..22: note = chemically synthesized
  source 1..22: mol_type = other DNA
gaaaccatgtttatctcaggtt

SEQ ID NO: 144469 - DNA, 22 bp, synthetic construct
  misc_feature 1..22: note = chemically synthesized
  source 1..22: mol_type = other DNA
atctcaggtttacaaatctcca

SEQ ID NO: 144470 - DNA, 22 bp, synthetic construct
  misc_feature 1..22: note = chemically synthesized
  source 1..22: mol_type = other DNA
tctcaggtttacaaatctccac

SEQ ID NO: 144471 - DNA, 22 bp, synthetic construct
  misc_feature 1..22: note = chemically synthesized
  source 1..22: mol_type = other DNA
aggtttacaaatctccacttgt

SEQ ID NO: 144472 - DNA, 22 bp, synthetic construct
  misc_feature 1..22: note = chemically synthesized
  source 1..22: mol_type = other DNA
acaaatctccacttgtcctctg

SEQ ID NO: 144473 - DNA, 22 bp, synthetic construct
  misc_feature 1..22: note = chemically synthesized
  source 1..22: mol_type = other DNA
caaatctccacttgtcctctgt

SEQ ID NO: 144474 - DNA, 22 bp, synthetic construct
  misc_feature 1..22: note = chemically synthesized
  source 1..22: mol_type = other DNA
cacttgtcctctgtgtttcaga

SEQ ID NO: 144475 - DNA, 22 bp, synthetic construct
  misc_feature 1..22: note = chemically synthesized
  source 1..22: mol_type = other DNA
gtcctctgtgtttcagaataaa

SEQ ID NO: 144476 - DNA, 22 bp, synthetic construct
  misc_feature 1..22: note = chemically synthesized
  source 1..22: mol_type = other DNA
tcctctgtgtttcagaataaaa

SEQ ID NO: 144477 - DNA, 22 bp, synthetic construct
  misc_feature 1..22: note = chemically synthesized
  source 1..22: mol_type = other DNA
tgtgtttcagaataaaatacca

SEQ ID NO: 144478 - DNA, 22 bp, synthetic construct
  misc_feature 1..22: note = chemically synthesized
  source 1..22: mol_type = other DNA
tgtttcagaataaaataccaac

SEQ ID NO: 144479 - DNA, 22 bp, synthetic construct
  misc_feature 1..22: note = chemically synthesized
  source 1..22: mol_type = other DNA
cagaataaaataccaactctac

SEQ ID NO: 144480 - DNA, 22 bp, synthetic construct
  misc_feature 1..22: note = chemically synthesized
  source 1..22: mol_type = other DNA
agaataaaataccaactctact

SEQ ID NO: 144481 - DNA, 22 bp, synthetic construct
  misc_feature 1..22: note = chemically synthesized
  source 1..22: mol_type = other DNA
tactactctcatctgtaagatg

SEQ ID NO: 144482 - DNA, 22 bp, synthetic construct
  misc_feature 1..22: note = chemically synthesized
  source 1..22: mol_type = other DNA
ctactctcatctgtaagatgca

SEQ ID NO: 144483 - DNA, 22 bp, synthetic construct
  misc_feature 1..22: note = chemically synthesized
  source 1..22: mol_type = other DNA
ctctcatctgtaagatgcaaat

SEQ ID NO: 144484 - DNA, 22 bp, synthetic construct
  misc_feature 1..22: note = chemically synthesized
  source 1..22: mol_type = other DNA
tcatctgtaagatgcaaatagt

SEQ ID NO: 144485 - DNA, 22 bp, synthetic construct
  misc_feature 1..22: note = chemically synthesized
  source 1..22: mol_type = other DNA
atctgtaagatgcaaatagtaa

SEQ ID NO: 144486 - DNA, 22 bp, synthetic construct
  misc_feature 1..22: note = chemically synthesized
  source 1..22: mol_type = other DNA
taagatgcaaatagtaagcctg

SEQ ID NO: 144487 - DNA, 22 bp, synthetic construct
  misc_feature 1..22: note = chemically synthesized
  source 1..22: mol_type = other DNA
agcccttctgtctaactttgaa

SEQ ID NO: 144488 - DNA, 22 bp, synthetic construct
  misc_feature 1..22: note = chemically synthesized
  source 1..22: mol_type = other DNA
ctgtctaactttgaattctatt

SEQ ID NO: 144489 - DNA, 22 bp, synthetic construct
  misc_feature 1..22: note = chemically synthesized
  source 1..22: mol_type = other DNA
tgtctaactttgaattctattt

SEQ ID NO: 144490 - DNA, 22 bp, synthetic construct
  misc_feature 1..22: note = chemically synthesized
  source 1..22: mol_type = other DNA
tctaactttgaattctattttt

SEQ ID NO: 144491 - DNA, 22 bp, synthetic construct
  misc_feature 1..22: note = chemically synthesized
  source 1..22: mol_type = other DNA
actttgaattctattttttctt

SEQ ID NO: 144492 - DNA, 22 bp, synthetic construct
  misc_feature 1..22: note = chemically synthesized
  source 1..22: mol_type = other DNA
tgaattctattttttcttcaac

SEQ ID NO: 144493 - DNA, 22 bp, synthetic construct
  misc_feature 1..22: note = chemically synthesized
  source 1..22: mol_type = other DNA
gaattctattttttcttcaacg

SEQ ID NO: 144494 - DNA, 22 bp, synthetic construct
  misc_feature 1..22: note = chemically synthesized
  source 1..22: mol_type = other DNA
aattctattttttcttcaacgt

SEQ ID NO: 144495 - DNA, 22 bp, synthetic construct
  misc_feature 1..22: note = chemically synthesized
  source 1..22: mol_type = other DNA
tattttttcttcaacgtacttt

SEQ ID NO: 144496 - DNA, 22 bp, synthetic construct
  misc_feature 1..22: note = chemically synthesized
  source 1..22: mol_type = other DNA
ttttttcttcaacgtactttag

SEQ ID NO: 144497 - DNA, 22 bp, synthetic construct
  misc_feature 1..22: note = chemically synthesized
  source 1..22: mol_type = other DNA
tttcttcaacgtactttaggct

SEQ ID NO: 144498 - DNA, 22 bp, synthetic construct
  misc_feature 1..22: note = chemically synthesized
  source 1..22: mol_type = other DNA
ttcttcaacgtactttaggctt

SEQ ID NO: 144499 - DNA, 22 bp, synthetic construct
  misc_feature 1..22: note = chemically synthesized
  source 1..22: mol_type = other DNA
tcttcaacgtactttaggcttg

SEQ ID NO: 144500 - DNA, 22 bp, synthetic construct
  misc_feature 1..22: note = chemically synthesized
  source 1..22: mol_type = other DNA
cttcaacgtactttaggcttgt

SEQ ID NO: 144501 - DNA, 22 bp, synthetic construct
  misc_feature 1..22: note = chemically synthesized
  source 1..22: mol_type = other DNA
ttcaacgtactttaggcttgta

SEQ ID NO: 144502 - DNA, 22 bp, synthetic construct
  misc_feature 1..22: note = chemically synthesized
  source 1..22: mol_type = other DNA
caacgtactttaggcttgtaat

SEQ ID NO: 144503 - DNA, 22 bp, synthetic construct
  misc_feature 1..22: note = chemically synthesized
  source 1..22: mol_type = other DNA
aacgtactttaggcttgtaatg

SEQ ID NO: 144504 - DNA, 22 bp, synthetic construct
  misc_feature 1..22: note = chemically synthesized
  source 1..22: mol_type = other DNA
taggcttgtaatgtgtttatat

SEQ ID NO: 144505 - DNA, 22 bp, synthetic construct
  misc_feature 1..22: note = chemically synthesized
  source 1..22: mol_type = other DNA
aggcttgtaatgtgtttatata

SEQ ID NO: 144506 - DNA, 22 bp, synthetic construct
  misc_feature 1..22: note = chemically synthesized
  source 1..22: mol_type = other DNA
ggcttgtaatgtgtttatatac

SEQ ID NO: 144507 - DNA, 22 bp, synthetic construct
  misc_feature 1..22: note = chemically synthesized
  source 1..22: mol_type = other DNA
gtaatgtgtttatatacagtga

SEQ ID NO: 144508 - DNA, 22 bp, synthetic construct
  misc_feature 1..22: note = chemically synthesized
  source 1..22: mol_type = other DNA
taatgtgtttatatacagtgaa

SEQ ID NO: 144509 - DNA, 22 bp, synthetic construct
  misc_feature 1..22: note = chemically synthesized
  source 1..22: mol_type = other DNA
atatacagtgaaatgtcaagtt

SEQ ID NO: 144510 - DNA, 22 bp, synthetic construct
  misc_feature 1..22: note = chemically synthesized
  source 1..22: mol_type = other DNA
tatacagtgaaatgtcaagttc

SEQ ID NO: 144511 - DNA, 22 bp, synthetic construct
  misc_feature 1..22: note = chemically synthesized
  source 1..22: mol_type = other DNA
tttctttatatttctttctttc

SEQ ID NO: 144512 - DNA, 22 bp, synthetic construct
  misc_feature 1..22: note = chemically synthesized
  source 1..22: mol_type = other DNA
tctttatatttctttctttctt

SEQ ID NO: 144513 - DNA, 22 bp, synthetic construct
  misc_feature 1..22: note = chemically synthesized
  source 1..22: mol_type = other DNA
ctttatatttctttctttcttt

SEQ ID NO: 144514 - DNA, 22 bp, synthetic construct
  misc_feature 1..22: note = chemically synthesized
  source 1..22: mol_type = other DNA
tttatatttctttctttctttt

SEQ ID NO: 144515 - DNA, 22 bp, synthetic construct
  misc_feature 1..22: note = chemically synthesized
  source 1..22: mol_type = other DNA
tatatttctttctttctttttt

SEQ ID NO: 144516 - DNA, 22 bp, synthetic construct
  misc_feature 1..22: note = chemically synthesized
  source 1..22: mol_type = other DNA
atatttctttctttcttttttt

SEQ ID NO: 144517 - DNA, 22 bp, synthetic construct
  misc_feature 1..22: note = chemically synthesized
  source 1..22: mol_type = other DNA
tatttctttctttctttttttt

SEQ ID NO: 144518 - DNA, 22 bp, synthetic construct
  misc_feature 1..22: note = chemically synthesized
  source 1..22: mol_type = other DNA
ctttctttcttttttttcctca

SEQ ID NO: 144519 - DNA, 22 bp, synthetic construct
  misc_feature 1..22: note = chemically synthesized
  source 1..22: mol_type = other DNA
tttctttcttttttttcctcag

SEQ ID NO: 144520 - DNA, 22 bp, synthetic construct
  misc_feature 1..22: note = chemically synthesized
  source 1..22: mol_type = other DNA
tctttcttttttttcctcagcc

SEQ ID NO: 144521 - DNA, 22 bp, synthetic construct
  misc_feature 1..22: note = chemically synthesized
  source 1..22: mol_type = other DNA
ctttcttttttttcctcagcct

SEQ ID NO: 144522 - DNA, 22 bp, synthetic construct
  misc_feature 1..22: note = chemically synthesized
  source 1..22: mol_type = other DNA
tttcttttttttcctcagcctc

SEQ ID NO: 144523 - DNA, 22 bp, synthetic construct
  misc_feature 1..22: note = chemically synthesized
  source 1..22: mol_type = other DNA
tcttttttttcctcagcctcag

SEQ ID NO: 144524 - DNA, 22 bp, synthetic construct
  misc_feature 1..22: note = chemically synthesized
  source 1..22: mol_type = other DNA
cttttttttcctcagcctcaga

SEQ ID NO: 144525 - DNA, 22 bp, synthetic construct
  misc_feature 1..22: note = chemically synthesized
  source 1..22: mol_type = other DNA
ttttttttcctcagcctcagag

SEQ ID NO: 144526 - DNA, 22 bp, synthetic construct
  misc_feature 1..22: note = chemically synthesized
  source 1..22: mol_type = other DNA
ttttttcctcagcctcagagtt

SEQ ID NO: 144527 - DNA, 22 bp, synthetic construct
  misc_feature 1..22: note = chemically synthesized
  source 1..22: mol_type = other DNA
tttttcctcagcctcagagttt

SEQ ID NO: 144528 - DNA, 22 bp, synthetic construct
  misc_feature 1..22: note = chemically synthesized
  source 1..22: mol_type = other DNA
ttttcctcagcctcagagtttt

SEQ ID NO: 144529 - DNA, 22 bp, synthetic construct
  misc_feature 1..22: note = chemically synthesized
  source 1..22: mol_type = other DNA
tttcctcagcctcagagttttc

SEQ ID NO: 144530 - DNA, 22 bp, synthetic construct
  misc_feature 1..22: note = chemically synthesized
  source 1..22: mol_type = other DNA
ttcctcagcctcagagttttcc

SEQ ID NO: 144531 - DNA, 22 bp, synthetic construct
  misc_feature 1..22: note = chemically synthesized
  source 1..22: mol_type = other DNA
tcctcagcctcagagttttcca

SEQ ID NO: 144532 - DNA, 22 bp, synthetic construct
  misc_feature 1..22: note = chemically synthesized
  source 1..22: mol_type = other DNA
cctcagcctcagagttttccac

SEQ ID NO: 144533 - DNA, 22 bp, synthetic construct
  misc_feature 1..22: note = chemically synthesized
  source 1..22: mol_type = other DNA
ctcagcctcagagttttccaca

SEQ ID NO: 144534 - DNA, 22 bp, synthetic construct
  misc_feature 1..22: note = chemically synthesized
  source 1..22: mol_type = other DNA
agcctcagagttttccacatgc

SEQ ID NO: 144535 - DNA, 22 bp, synthetic construct
  misc_feature 1..22: note = chemically synthesized
  source 1..22: mol_type = other DNA
agagttttccacatgcccttcc

SEQ ID NO: 144536 - DNA, 22 bp, synthetic construct
  misc_feature 1..22: note = chemically synthesized
  source 1..22: mol_type = other DNA
tccacatgcccttcctactttc

SEQ ID NO: 144537 - DNA, 22 bp, synthetic construct
  misc_feature 1..22: note = chemically synthesized
  source 1..22: mol_type = other DNA
ccacatgcccttcctactttca

SEQ ID NO: 144538 - DNA, 22 bp, synthetic construct
  misc_feature 1..22: note = chemically synthesized
  source 1..22: mol_type = other DNA
cacatgcccttcctactttcag

SEQ ID NO: 144539 - DNA, 22 bp, synthetic construct
  misc_feature 1..22: note = chemically synthesized
  source 1..22: mol_type = other DNA
cctactttcaggaacttctttc

SEQ ID NO: 144540 - DNA, 22 bp, synthetic construct
  misc_feature 1..22: note = chemically synthesized
  source 1..22: mol_type = other DNA
ctactttcaggaacttctttct

SEQ ID NO: 144541 - DNA, 22 bp, synthetic construct
  misc_feature 1..22: note = chemically synthesized
  source 1..22: mol_type = other DNA
ctttcaggaacttctttctcca

SEQ ID NO: 144542 - DNA, 22 bp, synthetic construct
  misc_feature 1..22: note = chemically synthesized
  source 1..22: mol_type = other DNA
tcaggaacttctttctccaaac

SEQ ID NO: 144543 - DNA, 22 bp, synthetic construct
  misc_feature 1..22: note = chemically synthesized
  source 1..22: mol_type = other DNA
caggaacttctttctccaaacg

SEQ ID NO: 144544 - DNA, 22 bp, synthetic construct
  misc_feature 1..22: note = chemically synthesized
  source 1..22: mol_type = other DNA
aggaacttctttctccaaacgt

SEQ ID NO: 144545 - DNA, 22 bp, synthetic construct
  misc_feature 1..22: note = chemically synthesized
  source 1..22: mol_type = other DNA
ctttctccaaacgtcttctgcc

SEQ ID NO: 144546 - DNA, 22 bp, synthetic construct
  misc_feature 1..22: note = chemically synthesized
  source 1..22: mol_type = other DNA
tttctccaaacgtcttctgcct

SEQ ID NO: 144547 - DNA, 22 bp, synthetic construct
  misc_feature 1..22: note = chemically synthesized
  source 1..22: mol_type = other DNA
tctccaaacgtcttctgcctgg

SEQ ID NO: 144548 - DNA, 22 bp, synthetic construct
  misc_feature 1..22: note = chemically synthesized
  source 1..22: mol_type = other DNA
ctccaaacgtcttctgcctggc

SEQ ID NO: 144549 - DNA, 22 bp, synthetic construct
  misc_feature 1..22: note = chemically synthesized
  source 1..22: mol_type = other DNA
tccaaacgtcttctgcctggct

SEQ ID NO: 144550 - DNA, 22 bp, synthetic construct
  misc_feature 1..22: note = chemically synthesized
  source 1..22: mol_type = other DNA
caaacgtcttctgcctggctcc

SEQ ID NO: 144551 - DNA, 22 bp, synthetic construct
  misc_feature 1..22: note = chemically synthesized
  source 1..22: mol_type = other DNA
ctgcctggctccatcaaatcat

SEQ ID NO: 144552 - DNA, 22 bp, synthetic construct
  misc_feature 1..22: note = chemically synthesized
  source 1..22: mol_type = other DNA
tgcctggctccatcaaatcata

SEQ ID NO: 144553 - DNA, 22 bp, synthetic construct
  misc_feature 1..22: note = chemically synthesized
  source 1..22: mol_type = other DNA
cctggctccatcaaatcataaa

SEQ ID NO: 144554 - DNA, 22 bp, synthetic construct
  misc_feature 1..22: note = chemically synthesized
  source 1..22: mol_type = other DNA
gctccatcaaatcataaaggac

SEQ ID NO: 144555 - DNA, 22 bp, synthetic construct
  misc_feature 1..22: note = chemically synthesized
  source 1..22: mol_type = other DNA
catcaaatcataaaggacccac

SEQ ID NO: 144556 - DNA, 22 bp, synthetic construct
  misc_feature 1..22: note = chemically synthesized
  source 1..22: mol_type = other DNA
caaatgccatcactcactacca

SEQ ID NO: 144557 - DNA, 22 bp, synthetic construct
  misc_feature 1..22: note = chemically synthesized
  source 1..22: mol_type = other DNA
aaatgccatcactcactaccat

SEQ ID NO: 144558 - DNA, 22 bp, synthetic construct
  misc_feature 1..22: note = chemically synthesized
  source 1..22: mol_type = other DNA
actaccatttcacaattcgcac

SEQ ID NO: 144559 - DNA, 22 bp, synthetic construct
  misc_feature 1..22: note = chemically synthesized
  source 1..22: mol_type = other DNA
ccatttcacaattcgcactttc

SEQ ID NO: 144560 - DNA, 22 bp, synthetic construct
  misc_feature 1..22: note = chemically synthesized
  source 1..22: mol_type = other DNA
cacaattcgcactttctttctt

SEQ ID NO: 144561 - DNA, 22 bp, synthetic construct
  misc_feature 1..22: note = chemically synthesized
  source 1..22: mol_type = other DNA
acaattcgcactttctttcttt

SEQ ID NO: 144562 - DNA, 22 bp, synthetic construct
  misc_feature 1..22: note = chemically synthesized
  source 1..22: mol_type = other DNA
gcactttctttctttgtccttt

SEQ ID NO: 144563 - DNA, 22 bp, synthetic construct
  misc_feature 1..22: note = chemically synthesized
  source 1..22: mol_type = other DNA
tctttctttgtccttttttttt

SEQ ID NO: 144564 - DNA, 22 bp, synthetic construct
  misc_feature 1..22: note = chemically synthesized
  source 1..22: mol_type = other DNA
ctttctttgtcctttttttttt

SEQ ID NO: 144565 - DNA, 22 bp, synthetic construct
  misc_feature 1..22: note = chemically synthesized
  source 1..22: mol_type = other DNA
tttctttgtccttttttttttt

SEQ ID NO: 144566 - DNA, 22 bp, synthetic construct
  misc_feature 1..22: note = chemically synthesized
  source 1..22: mol_type = other DNA
tctttgtcctttttttttttag

SEQ ID NO: 144567 - DNA, 22 bp, synthetic construct
  misc_feature 1..22: note = chemically synthesized
  source 1..22: mol_type = other DNA
ctttgtcctttttttttttagt

SEQ ID NO: 144568 - DNA, 22 bp, synthetic construct
  misc_feature 1..22: note = chemically synthesized
  source 1..22: mol_type = other DNA
tttgtcctttttttttttagta

SEQ ID NO: 144569 - DNA, 22 bp, synthetic construct
  misc_feature 1..22: note = chemically synthesized
  source 1..22: mol_type = other DNA
tgtcctttttttttttagtaaa

SEQ ID NO: 144570 - DNA, 22 bp, synthetic construct
  misc_feature 1..22: note = chemically synthesized
  source 1..22: mol_type = other DNA
gtcctttttttttttagtaaaa

SEQ ID NO: 144571 - DNA, 22 bp, synthetic construct
  misc_feature 1..22: note = chemically synthesized
  source 1..22: mol_type = other DNA
tcctttttttttttagtaaaac

SEQ ID NO: 144572 - DNA, 22 bp, synthetic construct
  misc_feature 1..22: note = chemically synthesized
  source 1..22: mol_type = other DNA
tttttttttagtaaaacaagtt

SEQ ID NO: 144573 - DNA, 22 bp, synthetic construct
  misc_feature 1..22: note = chemically synthesized
  source 1..22: mol_type = other DNA
ttttttttagtaaaacaagttt

SEQ ID NO: 144574 - DNA, 22 bp, synthetic construct
  misc_feature 1..22: note = chemically synthesized
  source 1..22: mol_type = other DNA
tttttttagtaaaacaagttta

SEQ ID NO: 144575 - DNA, 22 bp, synthetic construct
  misc_feature 1..22: note = chemically synthesized
  source 1..22: mol_type = other DNA
ttttttagtaaaacaagtttat

SEQ ID NO: 144576 - DNA, 22 bp, synthetic construct
  misc_feature 1..22: note = chemically synthesized
  source 1..22: mol_type = other DNA
tttttagtaaaacaagtttata

SEQ ID NO: 144577 - DNA, 22 bp, synthetic construct
  misc_feature 1..22: note = chemically synthesized
  source 1..22: mol_type = other DNA
ttttagtaaaacaagtttataa

SEQ ID NO: 144578 - DNA, 22 bp, synthetic construct
  misc_feature 1..22: note = chemically synthesized
  source 1..22: mol_type = other DNA
tttagtaaaacaagtttataaa

SEQ ID NO: 144579 - DNA, 22 bp, synthetic construct
  misc_feature 1..22: note = chemically synthesized
  source 1..22: mol_type = other DNA
ttagtaaaacaagtttataaaa

SEQ ID NO: 144580 - DNA, 22 bp, synthetic construct
  misc_feature 1..22: note = chemically synthesized
  source 1..22: mol_type = other DNA
tagtaaaacaagtttataaaaa

SEQ ID NO: 144581 - DNA, 22 bp, synthetic construct
  misc_feature 1..22: note = chemically synthesized
  source 1..22: mol_type = other DNA
agtaaaacaagtttataaaaaa

SEQ ID NO: 144582 - DNA, 22 bp, synthetic construct
  misc_feature 1..22: note = chemically synthesized
  source 1..22: mol_type = other DNA
gtaaaacaagtttataaaaaat

SEQ ID NO: 144583 - DNA, 22 bp, synthetic construct
  misc_feature 1..22: note = chemically synthesized
  source 1..22: mol_type = other DNA
ataaaaaattgaaggaataaat

SEQ ID NO: 144584 - DNA, 22 bp, synthetic construct
  misc_feature 1..22: note = chemically synthesized
  source 1..22: mol_type = other DNA
taaaaaattgaaggaataaatg

SEQ ID NO: 144585 - DNA, 22 bp, synthetic construct
  misc_feature 1..22: note = chemically synthesized
  source 1..22: mol_type = other DNA
aaggaataaatgaatggctact

SEQ ID NO: 144586 - DNA, 22 bp, synthetic construct
  misc_feature 1..22: note = chemically synthesized
  source 1..22: mol_type = other DNA
cttcataggcagagtagacgca

SEQ ID NO: 144587 - DNA, 22 bp, synthetic construct
  misc_feature 1..22: note = chemically synthesized
  source 1..22: mol_type = other DNA
cataggcagagtagacgcaagg

SEQ ID NO: 144588 - DNA, 22 bp, synthetic construct
  misc_feature 1..22: note = chemically synthesized
  source 1..22: mol_type = other DNA
ataggcagagtagacgcaaggg

SEQ ID NO: 144589 - DNA, 22 bp, synthetic construct
  misc_feature 1..22: note = chemically synthesized
  source 1..22: mol_type = other DNA
ctggttgccgatttttattgtt

SEQ ID NO: 144590 - DNA, 22 bp, synthetic construct
  misc_feature 1..22: note = chemically synthesized
  source 1..22: mol_type = other DNA
gttgccgatttttattgttatt

SEQ ID NO: 144591 - DNA, 22 bp, synthetic construct
  misc_feature 1..22: note = chemically synthesized
  source 1..22: mol_type = other DNA
ccgatttttattgttatttttc

SEQ ID NO: 144592 - DNA, 22 bp, synthetic construct
  misc_feature 1..22: note = chemically synthesized
  source 1..22: mol_type = other DNA
ttattgttatttttcaatagta

SEQ ID NO: 144593 - DNA, 22 bp, synthetic construct
  misc_feature 1..22: note = chemically synthesized
  source 1..22: mol_type = other DNA
tattgttatttttcaatagtat

SEQ ID NO: 144594 - DNA, 22 bp, synthetic construct
  misc_feature 1..22: note = chemically synthesized
  source 1..22: mol_type = other DNA
attgttatttttcaatagtatg

SEQ ID NO: 144595 - DNA, 22 bp, synthetic construct
  misc_feature 1..22: note = chemically synthesized
  source 1..22: mol_type = other DNA
ttgttatttttcaatagtatgc

SEQ ID NO: 144596 - DNA, 22 bp, synthetic construct
  misc_feature 1..22: note = chemically synthesized
  source 1..22: mol_type = other DNA
ttatttttcaatagtatgctaa

SEQ ID NO: 144597 - DNA, 22 bp, synthetic construct
  misc_feature 1..22: note = chemically synthesized
  source 1..22: mol_type = other DNA
tttttcaatagtatgctaaaca

SEQ ID NO: 144598 - DNA, 22 bp, synthetic construct
  misc_feature 1..22: note = chemically synthesized
  source 1..22: mol_type = other DNA
ttcaatagtatgctaaacaagg

SEQ ID NO: 144599 - DNA, 22 bp, synthetic construct
  misc_feature 1..22: note = chemically synthesized
  source 1..22: mol_type = other DNA
tcaatagtatgctaaacaaggg

SEQ ID NO: 144600 - DNA, 22 bp, synthetic construct
  misc_feature 1..22: note = chemically synthesized
  source 1..22: mol_type = other DNA
caatagtatgctaaacaagggg

SEQ ID NO: 144601 - DNA, 22 bp, synthetic construct
  misc_feature 1..22: note = chemically synthesized
  source 1..22: mol_type = other DNA
aatagtatgctaaacaaggggt

SEQ ID NO: 144602 - DNA, 22 bp, synthetic construct
  misc_feature 1..22: note = chemically synthesized
  source 1..22: mol_type = other DNA
aacaaggggtagattatttatg

SEQ ID NO: 144603 - DNA, 22 bp, synthetic construct
  misc_feature 1..22: note = chemically synthesized
  source 1..22: mol_type = other DNA
tttatgctgcccatttttagac

SEQ ID NO: 144604 - DNA, 22 bp, synthetic construct
  misc_feature 1..22: note = chemically synthesized
  source 1..22: mol_type = other DNA
atgctgcccatttttagaccat

SEQ ID NO: 144605 - DNA, 22 bp, synthetic construct
  misc_feature 1..22: note = chemically synthesized
  source 1..22: mol_type = other DNA
tgctgcccatttttagaccata

SEQ ID NO: 144606 - DNA, 22 bp, synthetic construct
  misc_feature 1..22: note = chemically synthesized
  source 1..22: mol_type = other DNA
cccatttttagaccataaaaga

SEQ ID NO: 144607 - DNA, 22 bp, synthetic construct
  misc_feature 1..22: note = chemically synthesized
  source 1..22: mol_type = other DNA
ttagaccataaaagataacttc

SEQ ID NO: 144608 - DNA, 22 bp, synthetic construct
  misc_feature 1..22: note = chemically synthesized
  source 1..22: mol_type = other DNA
tagaccataaaagataacttcc

SEQ ID NO: 144609 - DNA, 22 bp, synthetic construct
  misc_feature 1..22: note = chemically synthesized
  source 1..22: mol_type = other DNA
agaccataaaagataacttcct

SEQ ID NO: 144610 - DNA, 22 bp, synthetic construct
  misc_feature 1..22: note = chemically synthesized
  source 1..22: mol_type = other DNA
gaccataaaagataacttcctg

SEQ ID NO: 144611 - DNA, 22 bp, synthetic construct
  misc_feature 1..22: note = chemically synthesized
  source 1..22: mol_type = other DNA
cctgatgttgccatggcatttt

SEQ ID NO: 144612 - DNA, 22 bp, synthetic construct
  misc_feature 1..22: note = chemically synthesized
  source 1..22: mol_type = other DNA
ctgatgttgccatggcattttt

SEQ ID NO: 144613 - DNA, 22 bp, synthetic construct
  misc_feature 1..22: note = chemically synthesized
  source 1..22: mol_type = other DNA
atgttgccatggcatttttttc

SEQ ID NO: 144614 - DNA, 22 bp, synthetic construct
  misc_feature 1..22: note = chemically synthesized
  source 1..22: mol_type = other DNA
ccatggcatttttttcctttta

SEQ ID NO: 144615 - DNA, 22 bp, synthetic construct
  misc_feature 1..22: note = chemically synthesized
  source 1..22: mol_type = other DNA
ttttccttttaattttatttca

SEQ ID NO: 144616 - DNA, 22 bp, synthetic construct
  misc_feature 1..22: note = chemically synthesized
  source 1..22: mol_type = other DNA
tttccttttaattttatttcat

SEQ ID NO: 144617 - DNA, 22 bp, synthetic construct
  misc_feature 1..22: note = chemically synthesized
  source 1..22: mol_type = other DNA
ttccttttaattttatttcatt

SEQ ID NO: 144618 - DNA, 22 bp, synthetic construct
  misc_feature 1..22: note = chemically synthesized
  source 1..22: mol_type = other DNA
tccttttaattttatttcattt

SEQ ID NO: 144619 - DNA, 22 bp, synthetic construct
  misc_feature 1..22: note = chemically synthesized
  source 1..22: mol_type = other DNA
ccttttaattttatttcatttc

SEQ ID NO: 144620 - DNA, 22 bp, synthetic construct
  misc_feature 1..22: note = chemically synthesized
  source 1..22: mol_type = other DNA
cttttaattttatttcatttca

SEQ ID NO: 144621 - DNA, 22 bp, synthetic construct
  misc_feature 1..22: note = chemically synthesized
  source 1..22: mol_type = other DNA
ttaattttatttcatttcattt

SEQ ID NO: 144622 - DNA, 22 bp, synthetic construct
  misc_feature 1..22: note = chemically synthesized
  source 1..22: mol_type = other DNA
taattttatttcatttcatttt

SEQ ID NO: 144623 - DNA, 22 bp, synthetic construct
  misc_feature 1..22: note = chemically synthesized
  source 1..22: mol_type = other DNA
aattttatttcatttcatttta

SEQ ID NO: 144624 - DNA, 22 bp, synthetic construct
  misc_feature 1..22: note = chemically synthesized
  source 1..22: mol_type = other DNA
attttatttcatttcattttaa

SEQ ID NO: 144625 - DNA, 22 bp, synthetic construct
  misc_feature 1..22: note = chemically synthesized
  source 1..22: mol_type = other DNA
tatttcatttcattttaatttc

SEQ ID NO: 144626 - DNA, 22 bp, synthetic construct
  misc_feature 1..22: note = chemically synthesized
  source 1..22: mol_type = other DNA
atttcatttcattttaatttcg

SEQ ID NO: 144627 - DNA, 22 bp, synthetic construct
  misc_feature 1..22: note = chemically synthesized
  source 1..22: mol_type = other DNA
tttcatttcattttaatttcga

SEQ ID NO: 144628 - DNA, 22 bp, synthetic construct
  misc_feature 1..22: note = chemically synthesized
  source 1..22: mol_type = other DNA
catttcattttaatttcgaagg

SEQ ID NO: 144629 - DNA, 22 bp, synthetic construct
  misc_feature 1..22: note = chemically synthesized
  source 1..22: mol_type = other DNA
atttcattttaatttcgaaggt

SEQ ID NO: 144630 - DNA, 22 bp, synthetic construct
  misc_feature 1..22: note = chemically synthesized
  source 1..22: mol_type = other DNA
cattttaatttcgaaggtacat

SEQ ID NO: 144631 - DNA, 22 bp, synthetic construct
  misc_feature 1..22: note = chemically synthesized
  source 1..22: mol_type = other DNA
attttaatttcgaaggtacatg

SEQ ID NO: 144632 - DNA, 22 bp, synthetic construct
  misc_feature 1..22: note = chemically synthesized
  source 1..22: mol_type = other DNA
taatttcgaaggtacatgtgca

SEQ ID NO: 144633 - DNA, 22 bp, synthetic construct
  misc_feature 1..22: note = chemically synthesized
  source 1..22: mol_type = other DNA
aatttcgaaggtacatgtgcag

SEQ ID NO: 144634 - DNA, 22 bp, synthetic construct
  misc_feature 1..22: note = chemically synthesized
  source 1..22: mol_type = other DNA
atttcgaaggtacatgtgcagg

SEQ ID NO: 144635 - DNA, 22 bp, synthetic construct
  misc_feature 1..22: note = chemically synthesized
  source 1..22: mol_type = other DNA
cgaaggtacatgtgcaggatgt

SEQ ID NO: 144636 - DNA, 22 bp, synthetic construct
  misc_feature 1..22: note = chemically synthesized
  source 1..22: mol_type = other DNA
gaaggtacatgtgcaggatgtg

SEQ ID NO: 144637 - DNA, 22 bp, synthetic construct
  misc_feature 1..22: note = chemically synthesized
  source 1..22: mol_type = other DNA
gttacatgggtaaatgtgtgtc

SEQ ID NO: 144638 - DNA, 22 bp, synthetic construct
  misc_feature 1..22: note = chemically synthesized
  source 1..22: mol_type = other DNA
ttacatgggtaaatgtgtgtct

SEQ ID NO: 144639 - DNA, 22 bp, synthetic construct
  misc_feature 1..22: note = chemically synthesized
  source 1..22: mol_type = other DNA
catgggtaaatgtgtgtctttc

SEQ ID NO: 144640 - DNA, 22 bp, synthetic construct
  misc_feature 1..22: note = chemically synthesized
  source 1..22: mol_type = other DNA
tctggccttttagccatctgta

SEQ ID NO: 144641 - DNA, 22 bp, synthetic construct
  misc_feature 1..22: note = chemically synthesized
  source 1..22: mol_type = other DNA
ctggccttttagccatctgtat

SEQ ID NO: 144642 - DNA, 22 bp, synthetic construct
  misc_feature 1..22: note = chemically synthesized
  source 1..22: mol_type = other DNA
tggccttttagccatctgtatc

SEQ ID NO: 144643 - DNA, 22 bp, synthetic construct
  misc_feature 1..22: note = chemically synthesized
  source 1..22: mol_type = other DNA
gccttttagccatctgtatcaa

SEQ ID NO: 144644 - DNA, 22 bp, synthetic construct
  misc_feature 1..22: note = chemically synthesized
  source 1..22: mol_type = other DNA
ttagccatctgtatcaatgagc

SEQ ID NO: 144645 - DNA, 22 bp, synthetic construct
  misc_feature 1..22: note = chemically synthesized
  source 1..22: mol_type = other DNA
tagccatctgtatcaatgagca

SEQ ID NO: 144646 - DNA, 22 bp, synthetic construct
  misc_feature 1..22: note = chemically synthesized
  source 1..22: mol_type = other DNA
agccatctgtatcaatgagcag

SEQ ID NO: 144647 - DNA, 22 bp, synthetic construct
  misc_feature 1..22: note = chemically synthesized
  source 1..22: mol_type = other DNA
gccatctgtatcaatgagcaga

SEQ ID NO: 144648 - DNA, 22 bp, synthetic construct
  misc_feature 1..22: note = chemically synthesized
  source 1..22: mol_type = other DNA
tatcaatgagcagatataagct

SEQ ID NO: 144649 - DNA, 22 bp, synthetic construct
  misc_feature 1..22: note = chemically synthesized
  source 1..22: mol_type = other DNA
tacacaggatcatgaaggatga

SEQ ID NO: 144650 - DNA, 22 bp, synthetic construct
  misc_feature 1..22: note = chemically synthesized
  source 1..22: mol_type = other DNA
acacaggatcatgaaggatgaa

SEQ ID NO: 144651 - DNA, 22 bp, synthetic construct
  misc_feature 1..22: note = chemically synthesized
  source 1..22: mol_type = other DNA
cacaggatcatgaaggatgaaa

SEQ ID NO: 144652 - DNA, 22 bp, synthetic construct
  misc_feature 1..22: note = chemically synthesized
  source 1..22: mol_type = other DNA
caccaatattataataatttca

SEQ ID NO: 144653 - DNA, 22 bp, synthetic construct
  misc_feature 1..22: note = chemically synthesized
  source 1..22: mol_type = other DNA
accaatattataataatttcaa

SEQ ID NO: 144654 - DNA, 22 bp, synthetic construct
  misc_feature 1..22: note = chemically synthesized
  source 1..22: mol_type = other DNA
taataatttcaatcaacctgat

SEQ ID NO: 144655 - DNA, 22 bp, synthetic construct
  misc_feature 1..22: note = chemically synthesized
  source 1..22: mol_type = other DNA
caatcaacctgatagcttaggg

SEQ ID NO: 144656 - DNA, 22 bp, synthetic construct
  misc_feature 1..22: note = chemically synthesized
  source 1..22: mol_type = other DNA
aatcaacctgatagcttagggg

SEQ ID NO: 144657 - DNA, 22 bp, synthetic construct
  misc_feature 1..22: note = chemically synthesized
  source 1..22: mol_type = other DNA
atagcttaggggataaactaat

SEQ ID NO: 144658 - DNA, 22 bp, synthetic construct
  misc_feature 1..22: note = chemically synthesized
  source 1..22: mol_type = other DNA
aggggataaactaatttgaaga

SEQ ID NO: 144659 - DNA, 22 bp, synthetic construct
  misc_feature 1..22: note = chemically synthesized
  source 1..22: mol_type = other DNA
ggggataaactaatttgaagat

SEQ ID NO: 144660 - DNA, 22 bp, synthetic construct
  misc_feature 1..22: note = chemically synthesized
  source 1..22: mol_type = other DNA
atttgaagatacagcttgcctc

SEQ ID NO: 144661 - DNA, 22 bp, synthetic construct
  misc_feature 1..22: note = chemically synthesized
  source 1..22: mol_type = other DNA
gaagatacagcttgcctccgat

SEQ ID NO: 144662 - DNA, 22 bp, synthetic construct
  misc_feature 1..22: note = chemically synthesized
  source 1..22: mol_type = other DNA
aagatacagcttgcctccgata

SEQ ID NO: 144663 - DNA, 22 bp, synthetic construct
  misc_feature 1..22: note = chemically synthesized
  source 1..22: mol_type = other DNA
gcctccgataagccagaattcc

SEQ ID NO: 144664 - DNA, 22 bp, synthetic construct
  misc_feature 1..22: note = chemically synthesized
  source 1..22: mol_type = other DNA
cctccgataagccagaattcca

SEQ ID NO: 144665 - DNA, 22 bp, synthetic construct
  misc_feature 1..22: note = chemically synthesized
  source 1..22: mol_type = other DNA
cgataagccagaattccagagc

SEQ ID NO: 144666 - DNA, 22 bp, synthetic construct
  misc_feature 1..22: note = chemically synthesized
  source 1..22: mol_type = other DNA
cagagcttctggcattataatc

SEQ ID NO: 144667 - DNA, 22 bp, synthetic construct
  misc_feature 1..22: note = chemically synthesized
  source 1..22: mol_type = other DNA
ctggcattataatctagcaagg

SEQ ID NO: 144668 - DNA, 22 bp, synthetic construct
  misc_feature 1..22: note = chemically synthesized
  source 1..22: mol_type = other DNA
tggcattataatctagcaaggt

SEQ ID NO: 144669 - DNA, 22 bp, synthetic construct
  misc_feature 1..22: note = chemically synthesized
  source 1..22: mol_type = other DNA
gcattataatctagcaaggtta

SEQ ID NO: 144670 - DNA, 22 bp, synthetic construct
  misc_feature 1..22: note = chemically synthesized
  source 1..22: mol_type = other DNA
taatctagcaaggttagagatc

SEQ ID NO: 144671 - DNA, 22 bp, synthetic construct
  misc_feature 1..22: note = chemically synthesized
  source 1..22: mol_type = other DNA
gcaaggttagagatcatggatc

SEQ ID NO: 144672 - DNA, 22 bp, synthetic construct
  misc_feature 1..22: note = chemically synthesized
  source 1..22: mol_type = other DNA
gagatcatggatcactttcaga

SEQ ID NO: 144673 - DNA, 22 bp, synthetic construct
  misc_feature 1..22: note = chemically synthesized
  source 1..22: mol_type = other DNA
tcagagaaaaacaaaaacaaac

SEQ ID NO: 144674 - DNA, 22 bp, synthetic construct
  misc_feature 1..22: note = chemically synthesized
  source 1..22: mol_type = other DNA
cagagaaaaacaaaaacaaact

SEQ ID NO: 144675 - DNA, 22 bp, synthetic construct
  misc_feature 1..22: note = chemically synthesized
  source 1..22: mol_type = other DNA
agagaaaaacaaaaacaaacta

SEQ ID NO: 144676 - DNA, 22 bp, synthetic construct
  misc_feature 1..22: note = chemically synthesized
  source 1..22: mol_type = other DNA
accaaaagcaaaacagaaccaa

SEQ ID NO: 144677 - DNA, 22 bp, synthetic construct
  misc_feature 1..22: note = chemically synthesized
  source 1..22: mol_type = other DNA
cctaccctgttaatggtccaat

SEQ ID NO: 144678 - DNA, 22 bp, synthetic construct
  misc_feature 1..22: note = chemically synthesized
  source 1..22: mol_type = other DNA
ctaccctgttaatggtccaata

SEQ ID NO: 144679 - DNA, 22 bp, synthetic construct
  misc_feature 1..22: note = chemically synthesized
  source 1..22: mol_type = other DNA
ccctgttaatggtccaatatgt

SEQ ID NO: 144680 - DNA, 22 bp, synthetic construct
  misc_feature 1..22: note = chemically synthesized
  source 1..22: mol_type = other DNA
ttaatggtccaatatgtcagaa

SEQ ID NO: 144681 - DNA, 22 bp, synthetic construct
  misc_feature 1..22: note = chemically synthesized
  source 1..22: mol_type = other DNA
atggtccaatatgtcagaaaca

SEQ ID NO: 144682 - DNA, 22 bp, synthetic construct
  misc_feature 1..22: note = chemically synthesized
  source 1..22: mol_type = other DNA
tgttagaaataaagctgtctaa

SEQ ID NO: 144683 - DNA, 22 bp, synthetic construct
  misc_feature 1..22: note = chemically synthesized
  source 1..22: mol_type = other DNA
gaaataaagctgtctaaagtac

SEQ ID NO: 144684 - DNA, 22 bp, synthetic construct
  misc_feature 1..22: note = chemically synthesized
  source 1..22: mol_type = other DNA
tctaaagtacactaatattcga

SEQ ID NO: 144685 - DNA, 22 bp, synthetic construct
  misc_feature 1..22: note = chemically synthesized
  source 1..22: mol_type = other DNA
aagtacactaatattcgagtta

SEQ ID NO: 144686 - DNA, 22 bp, synthetic construct
  misc_feature 1..22: note = chemically synthesized
  source 1..22: mol_type = other DNA
atattcgagttataatagtgtg

SEQ ID NO: 144687 - DNA, 22 bp, synthetic construct
  misc_feature 1..22: note = chemically synthesized
  source 1..22: mol_type = other DNA
gagttataatagtgtgtggact

SEQ ID NO: 144688 - DNA, 22 bp, synthetic construct
  misc_feature 1..22: note = chemically synthesized
  source 1..22: mol_type = other DNA
taatagtgtgtggactattagt

SEQ ID NO: 144689 - DNA, 22 bp, synthetic construct
  misc_feature 1..22: note = chemically synthesized
  source 1..22: mol_type = other DNA
ttagtcaataaaaacaaccctt

SEQ ID NO: 144690 - DNA, 22 bp, synthetic construct
  misc_feature 1..22: note = chemically synthesized
  source 1..22: mol_type = other DNA
gtcaataaaaacaacccttgcc

SEQ ID NO: 144691 - DNA, 22 bp, synthetic construct
  misc_feature 1..22: note = chemically synthesized
  source 1..22: mol_type = other DNA
gcctctttagagttgttttcca

SEQ ID NO: 144692 - DNA, 22 bp, synthetic construct
  misc_feature 1..22: note = chemically synthesized
  source 1..22: mol_type = other DNA
cctctttagagttgttttccat

SEQ ID NO: 144693 - DNA, 22 bp, synthetic construct
  misc_feature 1..22: note = chemically synthesized
  source 1..22: mol_type = other DNA
tttagagttgttttccatgtac

SEQ ID NO: 144694 - DNA, 22 bp, synthetic construct
  misc_feature 1..22: note = chemically synthesized
  source 1..22: mol_type = other DNA
tagagttgttttccatgtacac

SEQ ID NO: 144695 - DNA, 22 bp, synthetic construct
  misc_feature 1..22: note = chemically synthesized
  source 1..22: mol_type = other DNA
agagttgttttccatgtacacg

SEQ ID NO: 144696 - DNA, 22 bp, synthetic construct
  misc_feature 1..22: note = chemically synthesized
  source 1..22: mol_type = other DNA
gagttgttttccatgtacacgc

SEQ ID NO: 144697 - DNA, 22 bp, synthetic construct
  misc_feature 1..22: note = chemically synthesized
  source 1..22: mol_type = other DNA
ttttccatgtacacgcacatct

SEQ ID NO: 144698 - DNA, 22 bp, synthetic construct
  misc_feature 1..22: note = chemically synthesized
  source 1..22: mol_type = other DNA
tccatgtacacgcacatcttat

SEQ ID NO: 144699 - DNA, 22 bp, synthetic construct
  misc_feature 1..22: note = chemically synthesized
  source 1..22: mol_type = other DNA
ccatgtacacgcacatcttatg

SEQ ID NO: 144700 - DNA, 22 bp, synthetic construct
  misc_feature 1..22: note = chemically synthesized
  source 1..22: mol_type = other DNA
catgtacacgcacatcttatgt

SEQ ID NO: 144701 - DNA, 22 bp, synthetic construct
  misc_feature 1..22: note = chemically synthesized
  source 1..22: mol_type = other DNA
atgtcttagagtaagattccct

SEQ ID NO: 144702 - DNA, 22 bp, synthetic construct
  misc_feature 1..22: note = chemically synthesized
  source 1..22: mol_type = other DNA
tgtcttagagtaagattccctg

SEQ ID NO: 144703 - DNA, 22 bp, synthetic construct
  misc_feature 1..22: note = chemically synthesized
  source 1..22: mol_type = other DNA
agagtaagattccctgagaagt

SEQ ID NO: 144704 - DNA, 22 bp, synthetic construct
  misc_feature 1..22: note = chemically synthesized
  source 1..22: mol_type = other DNA
gagtaagattccctgagaagtg

SEQ ID NO: 144705 - DNA, 22 bp, synthetic construct
  misc_feature 1..22: note = chemically synthesized
  source 1..22: mol_type = other DNA
cctgagaagtgaacctagcatt

SEQ ID NO: 144706 - DNA, 22 bp, synthetic construct
  misc_feature 1..22: note = chemically synthesized
  source 1..22: mol_type = other DNA
agaagtgaacctagcatttata

SEQ ID NO: 144707 - DNA, 22 bp, synthetic construct
  misc_feature 1..22: note = chemically synthesized
  source 1..22: mol_type = other DNA
gcatttatacaagataattaat

SEQ ID NO: 144708 - DNA, 22 bp, synthetic construct
  misc_feature 1..22: note = chemically synthesized
  source 1..22: mol_type = other DNA
atacaagataattaattctaat

SEQ ID NO: 144709 - DNA, 22 bp, synthetic construct
  misc_feature 1..22: note = chemically synthesized
  source 1..22: mol_type = other DNA
tacaagataattaattctaatc

SEQ ID NO: 144710 - DNA, 22 bp, synthetic construct
  misc_feature 1..22: note = chemically synthesized
  source 1..22: mol_type = other DNA
attctaatccacagtacctgcc

SEQ ID NO: 144711 - DNA, 22 bp, synthetic construct
  misc_feature 1..22: note = chemically synthesized
  source 1..22: mol_type = other DNA
taatccacagtacctgccaaag

SEQ ID NO: 144712 - DNA, 22 bp, synthetic construct
  misc_feature 1..22: note = chemically synthesized
  source 1..22: mol_type = other DNA
atccacagtacctgccaaagaa

SEQ ID NO: 144713 - DNA, 22 bp, synthetic construct
  misc_feature 1..22: note = chemically synthesized
  source 1..22: mol_type = other DNA
ccaaagaacattctaccatcat

SEQ ID NO: 144714 - DNA, 22 bp, synthetic construct
  misc_feature 1..22: note = chemically synthesized
  source 1..22: mol_type = other DNA
taccatcatctttactgagcat

SEQ ID NO: 144715 - DNA, 22 bp, synthetic construct
  misc_feature 1..22: note = chemically synthesized
  source 1..22: mol_type = other DNA
ccatcatctttactgagcatag

SEQ ID NO: 144716 - DNA, 22 bp, synthetic construct
  misc_feature 1..22: note = chemically synthesized
  source 1..22: mol_type = other DNA
tactgagcatagaagagctacg

SEQ ID NO: 144717 - DNA, 22 bp, synthetic construct
  misc_feature 1..22: note = chemically synthesized
  source 1..22: mol_type = other DNA
actgagcatagaagagctacgc

SEQ ID NO: 144718 - DNA, 22 bp, synthetic construct
  misc_feature 1..22: note = chemically synthesized
  source 1..22: mol_type = other DNA
ctgagcatagaagagctacgcc

SEQ ID NO: 144719 - DNA, 22 bp, synthetic construct
  misc_feature 1..22: note = chemically synthesized
  source 1..22: mol_type = other DNA
agcatagaagagctacgccaaa

SEQ ID NO: 144720 - DNA, 22 bp, synthetic construct
  misc_feature 1..22: note = chemically synthesized
  source 1..22: mol_type = other DNA
cgccaaaaccctgggtcatcag

SEQ ID NO: 144721 - DNA, 22 bp, synthetic construct
  misc_feature 1..22: note = chemically synthesized
  source 1..22: mol_type = other DNA
ggtcatcagccagcacacacac

SEQ ID NO: 144722 - DNA, 22 bp, synthetic construct
  misc_feature 1..22: note = chemically synthesized
  source 1..22: mol_type = other DNA
atccagtggtaaatacacatca

SEQ ID NO: 144723 - DNA, 22 bp, synthetic construct
  misc_feature 1..22: note = chemically synthesized
  source 1..22: mol_type = other DNA
tccagtggtaaatacacatcat

SEQ ID NO: 144724 - DNA, 22 bp, synthetic construct
  misc_feature 1..22: note = chemically synthesized
  source 1..22: mol_type = other DNA
gtgtatacatacatacctgaat

SEQ ID NO: 144725 - DNA, 22 bp, synthetic construct
  misc_feature 1..22: note = chemically synthesized
  source 1..22: mol_type = other DNA
aatatggaatcaaatatttttc

SEQ ID NO: 144726 - DNA, 22 bp, synthetic construct
  misc_feature 1..22: note = chemically synthesized
  source 1..22: mol_type = other DNA
ttctaagatgaaacagtcatga

SEQ ID NO: 144727 - DNA, 22 bp, synthetic construct
  misc_feature 1..22: note = chemically synthesized
  source 1..22: mol_type = other DNA
tctaagatgaaacagtcatgat

SEQ ID NO: 144728 - DNA, 22 bp, synthetic construct
  misc_feature 1..22: note = chemically synthesized
  source 1..22: mol_type = other DNA
ctaagatgaaacagtcatgatt

SEQ ID NO: 144729 - DNA, 22 bp, synthetic construct
  misc_feature 1..22: note = chemically synthesized
  source 1..22: mol_type = other DNA
taagatgaaacagtcatgattt

SEQ ID NO: 144730 - DNA, 22 bp, synthetic construct
  misc_feature 1..22: note = chemically synthesized
  source 1..22: mol_type = other DNA
agatgaaacagtcatgatttat

SEQ ID NO: 144731 - DNA, 22 bp, synthetic construct
  misc_feature 1..22: note = chemically synthesized
  source 1..22: mol_type = other DNA
atttcaaataggtacggataag

SEQ ID NO: 144732 - DNA, 22 bp, synthetic construct
  misc_feature 1..22: note = chemically synthesized
  source 1..22: mol_type = other DNA
tttcaaataggtacggataagt

SEQ ID NO: 144733 - DNA, 22 bp, synthetic construct
  misc_feature 1..22: note = chemically synthesized
  source 1..22: mol_type = other DNA
caaataggtacggataagtaga

SEQ ID NO: 144734 - DNA, 22 bp, synthetic construct
  misc_feature 1..22: note = chemically synthesized
  source 1..22: mol_type = other DNA
aaataggtacggataagtagat

SEQ ID NO: 144735 - DNA, 22 bp, synthetic construct
  misc_feature 1..22: note = chemically synthesized
  source 1..22: mol_type = other DNA
aggtaagcattaggtcttatat

SEQ ID NO: 144736 - DNA, 22 bp, synthetic construct
  misc_feature 1..22: note = chemically synthesized
  source 1..22: mol_type = other DNA
ggtcttatattatgtaacacta

SEQ ID NO: 144737 - DNA, 22 bp, synthetic construct
  misc_feature 1..22: note = chemically synthesized
  source 1..22: mol_type = other DNA
atattatgtaacactaatctat

SEQ ID NO: 144738 - DNA, 22 bp, synthetic construct
  misc_feature 1..22: note = chemically synthesized
  source 1..22: mol_type = other DNA
tattatgtaacactaatctatt

SEQ ID NO: 144739 - DNA, 22 bp, synthetic construct
  misc_feature 1..22: note = chemically synthesized
  source 1..22: mol_type = other DNA
tgtaacactaatctattactgc

SEQ ID NO: 144740 - DNA, 22 bp, synthetic construct
  misc_feature 1..22: note = chemically synthesized
  source 1..22: mol_type = other DNA
atctattactgcgctgaaactg

SEQ ID NO: 144741 - DNA, 22 bp, synthetic construct
  misc_feature 1..22: note = chemically synthesized
  source 1..22: mol_type = other DNA
ttactgcgctgaaactgtggct

SEQ ID NO: 144742 - DNA, 22 bp, synthetic construct
  misc_feature 1..22: note = chemically synthesized
  source 1..22: mol_type = other DNA
ctgcgctgaaactgtggcttta

SEQ ID NO: 144743 - DNA, 22 bp, synthetic construct
  misc_feature 1..22: note = chemically synthesized
  source 1..22: mol_type = other DNA
cgctgaaactgtggctttatag

SEQ ID NO: 144744 - DNA, 22 bp, synthetic construct
  misc_feature 1..22: note = chemically synthesized
  source 1..22: mol_type = other DNA
aaactgtggctttatagaaatt

SEQ ID NO: 144745 - DNA, 22 bp, synthetic construct
  misc_feature 1..22: note = chemically synthesized
  source 1..22: mol_type = other DNA
tggctttatagaaattgttttc

SEQ ID NO: 144746 - DNA, 22 bp, synthetic construct
  misc_feature 1..22: note = chemically synthesized
  source 1..22: mol_type = other DNA
tatagaaattgttttcactgca

SEQ ID NO: 144747 - DNA, 22 bp, synthetic construct
  misc_feature 1..22: note = chemically synthesized
  source 1..22: mol_type = other DNA
atagaaattgttttcactgcac

SEQ ID NO: 144748 - DNA, 22 bp, synthetic construct
  misc_feature 1..22: note = chemically synthesized
  source 1..22: mol_type = other DNA
tagaaattgttttcactgcact

SEQ ID NO: 144749 - DNA, 22 bp, synthetic construct
  misc_feature 1..22: note = chemically synthesized
  source 1..22: mol_type = other DNA
ttttcactgcactattgagaaa

SEQ ID NO: 144750 - DNA, 22 bp, synthetic construct
  misc_feature 1..22: note = chemically synthesized
  source 1..22: mol_type = other DNA
tcactgcactattgagaaatta

SEQ ID NO: 144751 - DNA, 22 bp, synthetic construct
  misc_feature 1..22: note = chemically synthesized
  source 1..22: mol_type = other DNA
cactgcactattgagaaattaa

SEQ ID NO: 144752 - DNA, 22 bp, synthetic construct
  misc_feature 1..22: note = chemically synthesized
  source 1..22: mol_type = other DNA
actgcactattgagaaattaag

SEQ ID NO: 144753 - DNA, 22 bp, synthetic construct
  misc_feature 1..22: note = chemically synthesized
  source 1..22: mol_type = other DNA
cactattgagaaattaagagat

SEQ ID NO: 144754 - DNA, 22 bp, synthetic construct
  misc_feature 1..22: note = chemically synthesized
  source 1..22: mol_type = other DNA
ttgagaaattaagagataatgg

SEQ ID NO: 144755 - DNA, 22 bp, synthetic construct
  misc_feature 1..22: note = chemically synthesized
  source 1..22: mol_type = other DNA
agaaattaagagataatggcaa

SEQ ID NO: 144756 - DNA, 22 bp, synthetic construct
  misc_feature 1..22: note = chemically synthesized
  source 1..22: mol_type = other DNA
agagataatggcaaaagtcaca

SEQ ID NO: 144757 - DNA, 22 bp, synthetic construct
  misc_feature 1..22: note = chemically synthesized
  source 1..22: mol_type = other DNA
aaaaagaagtatagcacttttt

SEQ ID NO: 144758 - DNA, 22 bp, synthetic construct
  misc_feature 1..22: note = chemically synthesized
  source 1..22: mol_type = other DNA
tttccttagaaaccactgctaa

SEQ ID NO: 144759 - DNA, 22 bp, synthetic construct
  misc_feature 1..22: note = chemically synthesized
  source 1..22: mol_type = other DNA
ttccttagaaaccactgctaac

SEQ ID NO: 144760 - DNA, 22 bp, synthetic construct
  misc_feature 1..22: note = chemically synthesized
  source 1..22: mol_type = other DNA
tccttagaaaccactgctaact

SEQ ID NO: 144761 - DNA, 22 bp, synthetic construct
  misc_feature 1..22: note = chemically synthesized
  source 1..22: mol_type = other DNA
ccttagaaaccactgctaactg

SEQ ID NO: 144762 - DNA, 22 bp, synthetic construct
  misc_feature 1..22: note = chemically synthesized
  source 1..22: mol_type = other DNA
cttagaaaccactgctaactga

SEQ ID NO: 144763 - DNA, 22 bp, synthetic construct
  misc_feature 1..22: note = chemically synthesized
  source 1..22: mol_type = other DNA
agaaaccactgctaactgaaag

SEQ ID NO: 144764 - DNA, 22 bp, synthetic construct
  misc_feature 1..22: note = chemically synthesized
  source 1..22: mol_type = other DNA
gaaaccactgctaactgaaaga

SEQ ID NO: 144765 - DNA, 22 bp, synthetic construct
  misc_feature 1..22: note = chemically synthesized
  source 1..22: mol_type = other DNA
ctaactgaaagagactaagatt

SEQ ID NO: 144766 - DNA, 22 bp, synthetic construct
  misc_feature 1..22: note = chemically synthesized
  source 1..22: mol_type = other DNA
actgaaagagactaagatttgt

SEQ ID NO: 144767 - DNA, 22 bp, synthetic construct
  misc_feature 1..22: note = chemically synthesized
  source 1..22: mol_type = other DNA
aaagagactaagatttgtcccg

SEQ ID NO: 144768 - DNA, 22 bp, synthetic construct
  misc_feature 1..22: note = chemically synthesized
  source 1..22: mol_type = other DNA
agatttgtcccgtcaaaaatcc

SEQ ID NO: 144769 - DNA, 22 bp, synthetic construct
  misc_feature 1..22: note = chemically synthesized
  source 1..22: mol_type = other DNA
gtcccgtcaaaaatcctggacc

SEQ ID NO: 144770 - DNA, 22 bp, synthetic construct
  misc_feature 1..22: note = chemically synthesized
  source 1..22: mol_type = other DNA
tcccgtcaaaaatcctggacct

SEQ ID NO: 144771 - DNA, 22 bp, synthetic construct
  misc_feature 1..22: note = chemically synthesized
  source 1..22: mol_type = other DNA
gacctatgcctaaaacacattt

SEQ ID NO: 144772 - DNA, 22 bp, synthetic construct
  misc_feature 1..22: note = chemically synthesized
  source 1..22: mol_type = other DNA
tgcctaaaacacatttcacaat

SEQ ID NO: 144773 - DNA, 22 bp, synthetic construct
  misc_feature 1..22: note = chemically synthesized
  source 1..22: mol_type = other DNA
aaacacatttcacaatccctga

SEQ ID NO: 144774 - DNA, 22 bp, synthetic construct
  misc_feature 1..22: note = chemically synthesized
  source 1..22: mol_type = other DNA
cacaatccctgaacttttcaaa

SEQ ID NO: 144775 - DNA, 22 bp, synthetic construct
  misc_feature 1..22: note = chemically synthesized
  source 1..22: mol_type = other DNA
acaatccctgaacttttcaaaa

SEQ ID NO: 144776 - DNA, 22 bp, synthetic construct
  misc_feature 1..22: note = chemically synthesized
  source 1..22: mol_type = other DNA
aacttttcaaaaattggtacat

SEQ ID NO: 144777 - DNA, 22 bp, synthetic construct
  misc_feature 1..22: note = chemically synthesized
  source 1..22: mol_type = other DNA
ttcaaaaattggtacatgcttt

SEQ ID NO: 144778 - DNA, 22 bp, synthetic construct
  misc_feature 1..22: note = chemically synthesized
  source 1..22: mol_type = other DNA
tcaaaaattggtacatgcttta

SEQ ID NO: 144779 - DNA, 22 bp, synthetic construct
  misc_feature 1..22: note = chemically synthesized
  source 1..22: mol_type = other DNA
caaaaattggtacatgctttag

SEQ ID NO: 144780 - DNA, 22 bp, synthetic construct
  misc_feature 1..22: note = chemically synthesized
  source 1..22: mol_type = other DNA
aaaaattggtacatgctttagc

SEQ ID NO: 144781 - DNA, 22 bp, synthetic construct
  misc_feature 1..22: note = chemically synthesized
  source 1..22: mol_type = other DNA
gtacatgctttagctttaaact

SEQ ID NO: 144782 - DNA, 22 bp, synthetic construct
  misc_feature 1..22: note = chemically synthesized
  source 1..22: mol_type = other DNA
tagctttaaactacaggcctca

SEQ ID NO: 144783 - DNA, 22 bp, synthetic construct
  misc_feature 1..22: note = chemically synthesized
  source 1..22: mol_type = other DNA
agctttaaactacaggcctcac

SEQ ID NO: 144784 - DNA, 22 bp, synthetic construct
  misc_feature 1..22: note = chemically synthesized
  source 1..22: mol_type = other DNA
gctttaaactacaggcctcact

SEQ ID NO: 144785 - DNA, 22 bp, synthetic construct
  misc_feature 1..22: note = chemically synthesized
  source 1..22: mol_type = other DNA
taaactacaggcctcactggag

SEQ ID NO: 144786 - DNA, 22 bp, synthetic construct
  misc_feature 1..22: note = chemically synthesized
  source 1..22: mol_type = other DNA
aaactacaggcctcactggagc

SEQ ID NO: 144787 - DNA, 22 bp, synthetic construct
  misc_feature 1..22: note = chemically synthesized
  source 1..22: mol_type = other DNA
aactacaggcctcactggagct

SEQ ID NO: 144788 - DNA, 22 bp, synthetic construct
  misc_feature 1..22: note = chemically synthesized
  source 1..22: mol_type = other DNA
caggcctcactggagctagaga

SEQ ID NO: 144789 - DNA, 22 bp, synthetic construct
  misc_feature 1..22: note = chemically synthesized
  source 1..22: mol_type = other DNA
actggagctagagacaagaagg

SEQ ID NO: 144790 - DNA, 22 bp, synthetic construct
  misc_feature 1..22: note = chemically synthesized
  source 1..22: mol_type = other DNA
gagctagagacaagaaggtaaa

SEQ ID NO: 144791 - DNA, 22 bp, synthetic construct
  misc_feature 1..22: note = chemically synthesized
  source 1..22: mol_type = other DNA
gagacaagaaggtaaaaaacgg

SEQ ID NO: 144792 - DNA, 22 bp, synthetic construct
  misc_feature 1..22: note = chemically synthesized
  source 1..22: mol_type = other DNA
acaaaagaagtcctggtatcct

SEQ ID NO: 144793 - DNA, 22 bp, synthetic construct
  misc_feature 1..22: note = chemically synthesized
  source 1..22: mol_type = other DNA
gtatcctctatgatgggagaag

SEQ ID NO: 144794 - DNA, 22 bp, synthetic construct
  misc_feature 1..22: note = chemically synthesized
  source 1..22: mol_type = other DNA
tatgatgggagaaggaaactag

SEQ ID NO: 144795 - DNA, 22 bp, synthetic construct
  misc_feature 1..22: note = chemically synthesized
  source 1..22: mol_type = other DNA
tgatgggagaaggaaactagct

SEQ ID NO: 144796 - DNA, 22 bp, synthetic construct
  misc_feature 1..22: note = chemically synthesized
  source 1..22: mol_type = other DNA
gctaaagggaagaataaattag

SEQ ID NO: 144797 - DNA, 22 bp, synthetic construct
  misc_feature 1..22: note = chemically synthesized
  source 1..22: mol_type = other DNA
aagggaagaataaattagagaa

SEQ ID NO: 144798 - DNA, 22 bp, synthetic construct
  misc_feature 1..22: note = chemically synthesized
  source 1..22: mol_type = other DNA
gagaaaaactggaatgactgaa

SEQ ID NO: 144799 - DNA, 22 bp, synthetic construct
  misc_feature 1..22: note = chemically synthesized
  source 1..22: mol_type = other DNA
gaatgactgaatcggaacaagg

SEQ ID NO: 144800 - DNA, 22 bp, synthetic construct
  misc_feature 1..22: note = chemically synthesized
  source 1..22: mol_type = other DNA
aatcggaacaaggcaaaggcta

SEQ ID NO: 144801 - DNA, 22 bp, synthetic construct
  misc_feature 1..22: note = chemically synthesized
  source 1..22: mol_type = other DNA
taaaaaaaattagcagtatcct

SEQ ID NO: 144802 - DNA, 22 bp, synthetic construct
  misc_feature 1..22: note = chemically synthesized
  source 1..22: mol_type = other DNA
gcagtatcctcttgggggcccc

SEQ ID NO: 144803 - DNA, 22 bp, synthetic construct
  misc_feature 1..22: note = chemically synthesized
  source 1..22: mol_type = other DNA
ttgggggccccttccccacact

SEQ ID NO: 144804 - DNA, 22 bp, synthetic construct
  misc_feature 1..22: note = chemically synthesized
  source 1..22: mol_type = other DNA
gggggccccttccccacactat

SEQ ID NO: 144805 - DNA, 22 bp, synthetic construct
  misc_feature 1..22: note = chemically synthesized
  source 1..22: mol_type = other DNA
ggggccccttccccacactatc

SEQ ID NO: 144806 - DNA, 22 bp, synthetic construct
  misc_feature 1..22: note = chemically synthesized
  source 1..22: mol_type = other DNA
ccccacactatctcaatgcaaa

SEQ ID NO: 144807 - DNA, 22 bp, synthetic construct
  misc_feature 1..22: note = chemically synthesized
  source 1..22: mol_type = other DNA
cccacactatctcaatgcaaat

SEQ ID NO: 144808 - DNA, 22 bp, synthetic construct
  misc_feature 1..22: note = chemically synthesized
  source 1..22: mol_type = other DNA
tctcaatgcaaatatctgtctg

SEQ ID NO: 144809 - DNA, 22 bp, synthetic construct
  misc_feature 1..22: note = chemically synthesized
  source 1..22: mol_type = other DNA
aatgcaaatatctgtctgaaac

SEQ ID NO: 144810 - DNA, 22 bp, synthetic construct
  misc_feature 1..22: note = chemically synthesized
  source 1..22: mol_type = other DNA
tctgaaacggtccctggctaaa

SEQ ID NO: 144811 - DNA, 22 bp, synthetic construct
  misc_feature 1..22: note = chemically synthesized
  source 1..22: mol_type = other DNA
aaacggtccctggctaaactcc

SEQ ID NO: 144812 - DNA, 22 bp, synthetic construct
  misc_feature 1..22: note = chemically synthesized
  source 1..22: mol_type = other DNA
gctaaactccacccatgggttg

SEQ ID NO: 144813 - DNA, 22 bp, synthetic construct
  misc_feature 1..22: note = chemically synthesized
  source 1..22: mol_type = other DNA
aactccacccatgggttggcca

SEQ ID NO: 144814 - DNA, 22 bp, synthetic construct
  misc_feature 1..22: note = chemically synthesized
  source 1..22: mol_type = other DNA
cacccatgggttggccagcctt

SEQ ID NO: 144815 - DNA, 22 bp, synthetic construct
  misc_feature 1..22: note = chemically synthesized
  source 1..22: mol_type = other DNA
gccagccttgccttgaccaata

SEQ ID NO: 144816 - DNA, 22 bp, synthetic construct
  misc_feature 1..22: note = chemically synthesized
  source 1..22: mol_type = other DNA
gccttgaccaatagccttgaca

SEQ ID NO: 144817 - DNA, 22 bp, synthetic construct
  misc_feature 1..22: note = chemically synthesized
  source 1..22: mol_type = other DNA
ccttgaccaatagccttgacaa

SEQ ID NO: 144818 - DNA, 22 bp, synthetic construct
  misc_feature 1..22: note = chemically synthesized
  source 1..22: mol_type = other DNA
gaccaatagccttgacaaggca

SEQ ID NO: 144819 - DNA, 22 bp, synthetic construct
  misc_feature 1..22: note = chemically synthesized
  source 1..22: mol_type = other DNA
accaatagccttgacaaggcaa

SEQ ID NO: 144820 - DNA, 22 bp, synthetic construct
  misc_feature 1..22: note = chemically synthesized
  source 1..22: mol_type = other DNA
gacaaggcaaacttgaccaata

SEQ ID NO: 144821 - DNA, 22 bp, synthetic construct
  misc_feature 1..22: note = chemically synthesized
  source 1..22: mol_type = other DNA
acaaggcaaacttgaccaatag

SEQ ID NO: 144822 - DNA, 22 bp, synthetic construct
  misc_feature 1..22: note = chemically synthesized
  source 1..22: mol_type = other DNA
gaccaatagtcttagagtatcc

SEQ ID NO: 144823 - DNA, 22 bp, synthetic construct
  misc_feature 1..22: note = chemically synthesized
  source 1..22: mol_type = other DNA
accaatagtcttagagtatcca

SEQ ID NO: 144824 - DNA, 22 bp, synthetic construct
  misc_feature 1..22: note = chemically synthesized
  source 1..22: mol_type = other DNA
agagtatccagtgaggccaggg

SEQ ID NO: 144825 - DNA, 22 bp, synthetic construct
  misc_feature 1..22: note = chemically synthesized
  source 1..22: mol_type = other DNA
gagtatccagtgaggccagggg

SEQ ID NO: 144826 - DNA, 22 bp, synthetic construct
  misc_feature 1..22: note = chemically synthesized
  source 1..22: mol_type = other DNA
gctagggatgaagaataaaagg

SEQ ID NO: 144827 - DNA, 22 bp, synthetic construct
  misc_feature 1..22: note = chemically synthesized
  source 1..22: mol_type = other DNA
gggatgaagaataaaaggaagc

SEQ ID NO: 144828 - DNA, 22 bp, synthetic construct
  misc_feature 1..22: note = chemically synthesized
  source 1..22: mol_type = other DNA
cagcagttccacacactcgctt

SEQ ID NO: 144829 - DNA, 22 bp, synthetic construct
  misc_feature 1..22: note = chemically synthesized
  source 1..22: mol_type = other DNA
agcagttccacacactcgcttc

SEQ ID NO: 144830 - DNA, 22 bp, synthetic construct
  misc_feature 1..22: note = chemically synthesized
  source 1..22: mol_type = other DNA
cacacactcgcttctggaacgt

SEQ ID NO: 144831 - DNA, 22 bp, synthetic construct
  misc_feature 1..22: note = chemically synthesized
  source 1..22: mol_type = other DNA
gcttctggaacgtctgaggtta

SEQ ID NO: 144832 - DNA, 22 bp, synthetic construct
  misc_feature 1..22: note = chemically synthesized
  source 1..22: mol_type = other DNA
ctggaacgtctgaggttatcaa

SEQ ID NO: 144833 - DNA, 22 bp, synthetic construct
  misc_feature 1..22: note = chemically synthesized
  source 1..22: mol_type = other DNA
tggaacgtctgaggttatcaat

SEQ ID NO: 144834 - DNA, 22 bp, synthetic construct
  misc_feature 1..22: note = chemically synthesized
  source 1..22: mol_type = other DNA
gaacgtctgaggttatcaataa

SEQ ID NO: 144835 - DNA, 22 bp, synthetic construct
  misc_feature 1..22: note = chemically synthesized
  source 1..22: mol_type = other DNA
aggttatcaataagctcctagt

SEQ ID NO: 144836 - DNA, 22 bp, synthetic construct
  misc_feature 1..22: note = chemically synthesized
  source 1..22: mol_type = other DNA
tcaataagctcctagtccagac

SEQ ID NO: 144837 - DNA, 22 bp, synthetic construct
  misc_feature 1..22: note = chemically synthesized
  source 1..22: mol_type = other DNA
ctagtccagacgccatgggtca

SEQ ID NO: 144838 - DNA, 22 bp, synthetic construct
  misc_feature 1..22: note = chemically synthesized
  source 1..22: mol_type = other DNA
gtccagacgccatgggtcattt

SEQ ID NO: 144839 - DNA, 22 bp, synthetic construct
  misc_feature 1..22: note = chemically synthesized
  source 1..22: mol_type = other DNA
cacagaggaggacaaggctact

SEQ ID NO: 144840 - DNA, 22 bp, synthetic construct
  misc_feature 1..22: note = chemically synthesized
  source 1..22: mol_type = other DNA
acagaggaggacaaggctacta

SEQ ID NO: 144841 - DNA, 22 bp, synthetic construct
  misc_feature 1..22: note = chemically synthesized
  source 1..22: mol_type = other DNA
ctatcacaagcctgtggggcaa

SEQ ID NO: 144842 - DNA, 22 bp, synthetic construct
  misc_feature 1..22: note = chemically synthesized
  source 1..22: mol_type = other DNA
tcacaagcctgtggggcaaggt

SEQ ID NO: 144843 - DNA, 22 bp, synthetic construct
  misc_feature 1..22: note = chemically synthesized
  source 1..22: mol_type = other DNA
tggggcaaggtgaatgtggaag

SEQ ID NO: 144844 - DNA, 22 bp, synthetic construct
  misc_feature 1..22: note = chemically synthesized
  source 1..22: mol_type = other DNA
gaggagaaaccctgggaaggta

SEQ ID NO: 144845 - DNA, 22 bp, synthetic construct
  misc_feature 1..22: note = chemically synthesized
  source 1..22: mol_type = other DNA
ggaaggtaggctctggtgacca

SEQ ID NO: 144846 - DNA, 22 bp, synthetic construct
  misc_feature 1..22: note = chemically synthesized
  source 1..22: mol_type = other DNA
tggtgaccaggacaagggaggg

SEQ ID NO: 144847 - DNA, 22 bp, synthetic construct
  misc_feature 1..22: note = chemically synthesized
  source 1..22: mol_type = other DNA
gtgaccaggacaagggagggaa

SEQ ID NO: 144848 - DNA, 22 bp, synthetic construct
  misc_feature 1..22: note = chemically synthesized
  source 1..22: mol_type = other DNA
tgcctggcaaaagtccaggtcg

SEQ ID NO: 144849 - DNA, 22 bp, synthetic construct
  misc_feature 1..22: note = chemically synthesized
  source 1..22: mol_type = other DNA
gcaaaagtccaggtcgcttctc

SEQ ID NO: 144850 - DNA, 22 bp, synthetic construct
  misc_feature 1..22: note = chemically synthesized
  source 1..22: mol_type = other DNA
ctcaggatttgtggcaccttct

SEQ ID NO: 144851 - DNA, 22 bp, synthetic construct
  misc_feature 1..22: note = chemically synthesized
  source 1..22: mol_type = other DNA
tcaggatttgtggcaccttctg

SEQ ID NO: 144852 - DNA, 22 bp, synthetic construct
  misc_feature 1..22: note = chemically synthesized
  source 1..22: mol_type = other DNA
aggatttgtggcaccttctgac

SEQ ID NO: 144853 - DNA, 22 bp, synthetic construct
  misc_feature 1..22: note = chemically synthesized
  source 1..22: mol_type = other DNA
gtggcaccttctgactgtcaaa

SEQ ID NO: 144854 - DNA, 22 bp, synthetic construct
  misc_feature 1..22: note = chemically synthesized
  source 1..22: mol_type = other DNA
tggcaccttctgactgtcaaac

SEQ ID NO: 144855 - DNA, 22 bp, synthetic construct
  misc_feature 1..22: note = chemically synthesized
  source 1..22: mol_type = other DNA
ctgactgtcaaactgttcttgt

SEQ ID NO: 144856 - DNA, 22 bp, synthetic construct
  misc_feature 1..22: note = chemically synthesized
  source 1..22: mol_type = other DNA
tgactgtcaaactgttcttgtc

SEQ ID NO: 144857 - DNA, 22 bp, synthetic construct
  misc_feature 1..22: note = chemically synthesized
  source 1..22: mol_type = other DNA
actgtcaaactgttcttgtcaa

SEQ ID NO: 144858 - DNA, 22 bp, synthetic construct
  misc_feature 1..22: note = chemically synthesized
  source 1..22: mol_type = other DNA
tcaaactgttcttgtcaatctc

SEQ ID NO: 144859 - DNA, 22 bp, synthetic construct
  misc_feature 1..22: note = chemically synthesized
  source 1..22: mol_type = other DNA
ttcttgtcaatctcacaggctc

SEQ ID NO: 144860 - DNA, 22 bp, synthetic construct
  misc_feature 1..22: note = chemically synthesized
  source 1..22: mol_type = other DNA
ttgtcaatctcacaggctcctg

SEQ ID NO: 144861 - DNA, 22 bp, synthetic construct
  misc_feature 1..22: note = chemically synthesized
  source 1..22: mol_type = other DNA
gtcaatctcacaggctcctggt

SEQ ID NO: 144862 - DNA, 22 bp, synthetic construct
  misc_feature 1..22: note = chemically synthesized
  source 1..22: mol_type = other DNA
tcaatctcacaggctcctggtt

SEQ ID NO: 144863 - DNA, 22 bp, synthetic construct
  misc_feature 1..22: note = chemically synthesized
  source 1..22: mol_type = other DNA
acaggctcctggttgtctaccc

SEQ ID NO: 144864 - DNA, 22 bp, synthetic construct
  misc_feature 1..22: note = chemically synthesized
  source 1..22: mol_type = other DNA
ctggttgtctacccatggaccc

SEQ ID NO: 144865 - DNA, 22 bp, synthetic construct
  misc_feature 1..22: note = chemically synthesized
  source 1..22: mol_type = other DNA
gttgtctacccatggacccaga

SEQ ID NO: 144866 - DNA, 22 bp, synthetic construct
  misc_feature 1..22: note = chemically synthesized
  source 1..22: mol_type = other DNA
tctacccatggacccagaggtt

SEQ ID NO: 144867 - DNA, 22 bp, synthetic construct
  misc_feature 1..22: note = chemically synthesized
  source 1..22: mol_type = other DNA
cccatggacccagaggttcttt

SEQ ID NO: 144868 - DNA, 22 bp, synthetic construct
  misc_feature 1..22: note = chemically synthesized
  source 1..22: mol_type = other DNA
tttgacagctttggcaacctgt

SEQ ID NO: 144869 - DNA, 22 bp, synthetic construct
  misc_feature 1..22: note = chemically synthesized
  source 1..22: mol_type = other DNA
tgacagctttggcaacctgtcc

SEQ ID NO: 144870 - DNA, 22 bp, synthetic construct
  misc_feature 1..22: note = chemically synthesized
  source 1..22: mol_type = other DNA
gacagctttggcaacctgtcct

SEQ ID NO: 144871 - DNA, 22 bp, synthetic construct
  misc_feature 1..22: note = chemically synthesized
  source 1..22: mol_type = other DNA
acagctttggcaacctgtcctc

SEQ ID NO: 144872 - DNA, 22 bp, synthetic construct
  misc_feature 1..22: note = chemically synthesized
  source 1..22: mol_type = other DNA
tggcaacctgtcctctgcctct

SEQ ID NO: 144873 - DNA, 22 bp, synthetic construct
  misc_feature 1..22: note = chemically synthesized
  source 1..22: mol_type = other DNA
ggcaacctgtcctctgcctctg

SEQ ID NO: 144874 - DNA, 22 bp, synthetic construct
  misc_feature 1..22: note = chemically synthesized
  source 1..22: mol_type = other DNA
gcaacctgtcctctgcctctgc

SEQ ID NO: 144875 - DNA, 22 bp, synthetic construct
  misc_feature 1..22: note = chemically synthesized
  source 1..22: mol_type = other DNA
tcctctgcctctgccatcatgg

SEQ ID NO: 144876 - DNA, 22 bp, synthetic construct
  misc_feature 1..22: note = chemically synthesized
  source 1..22: mol_type = other DNA
tgcctctgccatcatgggcaac

SEQ ID NO: 144877 - DNA, 22 bp, synthetic construct
  misc_feature 1..22: note = chemically synthesized
  source 1..22: mol_type = other DNA
cctctgccatcatgggcaaccc

SEQ ID NO: 144878 - DNA, 22 bp, synthetic construct
  misc_feature 1..22: note = chemically synthesized
  source 1..22: mol_type = other DNA
tgccatcatgggcaaccccaaa

SEQ ID NO: 144879 - DNA, 22 bp, synthetic construct
  misc_feature 1..22: note = chemically synthesized
  source 1..22: mol_type = other DNA
ccatcatgggcaaccccaaagt

SEQ ID NO: 144880 - DNA, 22 bp, synthetic construct
  misc_feature 1..22: note = chemically synthesized
  source 1..22: mol_type = other DNA
acttccttgggagatgccacaa

SEQ ID NO: 144881 - DNA, 22 bp, synthetic construct
  misc_feature 1..22: note = chemically synthesized
  source 1..22: mol_type = other DNA
ccttgggagatgccacaaagca

SEQ ID NO: 144882 - DNA, 22 bp, synthetic construct
  misc_feature 1..22: note = chemically synthesized
  source 1..22: mol_type = other DNA
cttgggagatgccacaaagcac

SEQ ID NO: 144883 - DNA, 22 bp, synthetic construct
  misc_feature 1..22: note = chemically synthesized
  source 1..22: mol_type = other DNA
gggagatgccacaaagcacctg

SEQ ID NO: 144884 - DNA, 22 bp, synthetic construct
  misc_feature 1..22: note = chemically synthesized
  source 1..22: mol_type = other DNA
ggagatgccacaaagcacctgg

SEQ ID NO: 144885 - DNA, 22 bp, synthetic construct
  misc_feature 1..22: note = chemically synthesized
  source 1..22: mol_type = other DNA
gatgatctcaagggcacctttg

SEQ ID NO: 144886 - DNA, 22 bp, synthetic construct
  misc_feature 1..22: note = chemically synthesized
  source 1..22: mol_type = other DNA
aagggcacctttgcccagctga

SEQ ID NO: 144887 - DNA, 22 bp, synthetic construct
  misc_feature 1..22: note = chemically synthesized
  source 1..22: mol_type = other DNA
tgcccagctgagtgaactgcac

SEQ ID NO: 144888 - DNA, 22 bp, synthetic construct
  misc_feature 1..22: note = chemically synthesized
  source 1..22: mol_type = other DNA
gcccagctgagtgaactgcact

SEQ ID NO: 144889 - DNA, 22 bp, synthetic construct
  misc_feature 1..22: note = chemically synthesized
  source 1..22: mol_type = other DNA
cccagctgagtgaactgcactg

SEQ ID NO: 144890 - DNA, 22 bp, synthetic construct
  misc_feature 1..22: note = chemically synthesized
  source 1..22: mol_type = other DNA
agtgaactgcactgtgacaagc

SEQ ID NO: 144891 - DNA, 22 bp, synthetic construct
  misc_feature 1..22: note = chemically synthesized
  source 1..22: mol_type = other DNA
cactgtgacaagctgcatgtgg

SEQ ID NO: 144892 - DNA, 22 bp, synthetic construct
  misc_feature 1..22: note = chemically synthesized
  source 1..22: mol_type = other DNA
tgacaagctgcatgtggatcct

SEQ ID NO: 144893 - DNA, 22 bp, synthetic construct
  misc_feature 1..22: note = chemically synthesized
  source 1..22: mol_type = other DNA
catgtggatcctgagaacttca

SEQ ID NO: 144894 - DNA, 22 bp, synthetic construct
  misc_feature 1..22: note = chemically synthesized
  source 1..22: mol_type = other DNA
agaacttcaaggtgagtccagg

SEQ ID NO: 144895 - DNA, 22 bp, synthetic construct
  misc_feature 1..22: note = chemically synthesized
  source 1..22: mol_type = other DNA
caaggtgagtccaggagatgtt

SEQ ID NO: 144896 - DNA, 22 bp, synthetic construct
  misc_feature 1..22: note = chemically synthesized
  source 1..22: mol_type = other DNA
aaggtgagtccaggagatgttt

SEQ ID NO: 144897 - DNA, 22 bp, synthetic construct
  misc_feature 1..22: note = chemically synthesized
  source 1..22: mol_type = other DNA
cagccctgttgcctttagtctc

SEQ ID NO: 144898 - DNA, 22 bp, synthetic construct
  misc_feature 1..22: note = chemically synthesized
  source 1..22: mol_type = other DNA
agccctgttgcctttagtctcg

SEQ ID NO: 144899 - DNA, 22 bp, synthetic construct
  misc_feature 1..22: note = chemically synthesized
  source 1..22: mol_type = other DNA
ttgcctttagtctcgaggcaac

SEQ ID NO: 144900 - DNA, 22 bp, synthetic construct
  misc_feature 1..22: note = chemically synthesized
  source 1..22: mol_type = other DNA
cctttagtctcgaggcaactta

SEQ ID NO: 144901 - DNA, 22 bp, synthetic construct
  misc_feature 1..22: note = chemically synthesized
  source 1..22: mol_type = other DNA
tagtctcgaggcaacttagaca

SEQ ID NO: 144902 - DNA, 22 bp, synthetic construct
  misc_feature 1..22: note = chemically synthesized
  source 1..22: mol_type = other DNA
agtctcgaggcaacttagacaa

SEQ ID NO: 144903 - DNA, 22 bp, synthetic construct
  misc_feature 1..22: note = chemically synthesized
  source 1..22: mol_type = other DNA
gtctcgaggcaacttagacaac

SEQ ID NO: 144904 - DNA, 22 bp, synthetic construct
  misc_feature 1..22: note = chemically synthesized
  source 1..22: mol_type = other DNA
gaggcaacttagacaacggagt

SEQ ID NO: 144905 - DNA, 22 bp, synthetic construct
  misc_feature 1..22: note = chemically synthesized
  source 1..22: mol_type = other DNA
agacaacggagtattgatctga

SEQ ID NO: 144906 - DNA, 22 bp, synthetic construct
  misc_feature 1..22: note = chemically synthesized
  source 1..22: mol_type = other DNA
gacaacggagtattgatctgag

SEQ ID NO: 144907 - DNA, 22 bp, synthetic construct
  misc_feature 1..22: note = chemically synthesized
  source 1..22: mol_type = other DNA
atctgagcacagcagggtgtga

SEQ ID NO: 144908 - DNA, 22 bp, synthetic construct
  misc_feature 1..22: note = chemically synthesized
  source 1..22: mol_type = other DNA
agcacagcagggtgtgagctgt

SEQ ID NO: 144909 - DNA, 22 bp, synthetic construct
  misc_feature 1..22: note = chemically synthesized
  source 1..22: mol_type = other DNA
tttgaagatactggggttgggg

SEQ ID NO: 144910 - DNA, 22 bp, synthetic construct
  misc_feature 1..22: note = chemically synthesized
  source 1..22: mol_type = other DNA
gaagatactggggttgggggtg

SEQ ID NO: 144911 - DNA, 22 bp, synthetic construct
  misc_feature 1..22: note = chemically synthesized
  source 1..22: mol_type = other DNA
aagatactggggttgggggtga

SEQ ID NO: 144912 - DNA, 22 bp, synthetic construct
  misc_feature 1..22: note = chemically synthesized
  source 1..22: mol_type = other DNA
gggttgggggtgaagaaactgc

SEQ ID NO: 144913 - DNA, 22 bp, synthetic construct
  misc_feature 1..22: note = chemically synthesized
  source 1..22: mol_type = other DNA
ggggtgaagaaactgcagagga

SEQ ID NO: 144914 - DNA, 22 bp, synthetic construct
  misc_feature 1..22: note = chemically synthesized
  source 1..22: mol_type = other DNA
cagaggactaactgggctgaga

SEQ ID NO: 144915 - DNA, 22 bp, synthetic construct
  misc_feature 1..22: note = chemically synthesized
  source 1..22: mol_type = other DNA
actgggctgagacccagtggta

SEQ ID NO: 144916 - DNA, 22 bp, synthetic construct
  misc_feature 1..22: note = chemically synthesized
  source 1..22: mol_type = other DNA
ggctgagacccagtggtaatgt

SEQ ID NO: 144917 - DNA, 22 bp, synthetic construct
  misc_feature 1..22: note = chemically synthesized
  source 1..22: mol_type = other DNA
agacccagtggtaatgttttag

SEQ ID NO: 144918 - DNA, 22 bp, synthetic construct
  misc_feature 1..22: note = chemically synthesized
  source 1..22: mol_type = other DNA
tagggcctaaggagtgcctcta

SEQ ID NO: 144919 - DNA, 22 bp, synthetic construct
  misc_feature 1..22: note = chemically synthesized
  source 1..22: mol_type = other DNA
agggcctaaggagtgcctctaa

SEQ ID NO: 144920 - DNA, 22 bp, synthetic construct
  misc_feature 1..22: note = chemically synthesized
  source 1..22: mol_type = other DNA
gggcctaaggagtgcctctaaa

SEQ ID NO: 144921 - DNA, 22 bp, synthetic construct
  misc_feature 1..22: note = chemically synthesized
  source 1..22: mol_type = other DNA
aggagtgcctctaaaaatctag

SEQ ID NO: 144922 - DNA, 22 bp, synthetic construct
  misc_feature 1..22: note = chemically synthesized
  source 1..22: mol_type = other DNA
taaaaatctagatggacaattt

SEQ ID NO: 144923 - DNA, 22 bp, synthetic construct
  misc_feature 1..22: note = chemically synthesized
  source 1..22: mol_type = other DNA
aaaatctagatggacaattttg

SEQ ID NO: 144924 - DNA, 22 bp, synthetic construct
  misc_feature 1..22: note = chemically synthesized
  source 1..22: mol_type = other DNA
gatggacaattttgactttgag

SEQ ID NO: 144925 - DNA, 22 bp, synthetic construct
  misc_feature 1..22: note = chemically synthesized
  source 1..22: mol_type = other DNA
tgactttgagaaaagagaggtg

SEQ ID NO: 144926 - DNA, 22 bp, synthetic construct
  misc_feature 1..22: note = chemically synthesized
  source 1..22: mol_type = other DNA
gactttgagaaaagagaggtgg

SEQ ID NO: 144927 - DNA, 22 bp, synthetic construct
  misc_feature 1..22: note = chemically synthesized
  source 1..22: mol_type = other DNA
actttgagaaaagagaggtgga

SEQ ID NO: 144928 - DNA, 22 bp, synthetic construct
  misc_feature 1..22: note = chemically synthesized
  source 1..22: mol_type = other DNA
tgagaaaagagaggtggaaatg

SEQ ID NO: 144929 - DNA, 22 bp, synthetic construct
  misc_feature 1..22: note = chemically synthesized
  source 1..22: mol_type = other DNA
gagaaaagagaggtggaaatga

SEQ ID NO: 144930 - DNA, 22 bp, synthetic construct
  misc_feature 1..22: note = chemically synthesized
  source 1..22: mol_type = other DNA
agaaaagagaggtggaaatgag

SEQ ID NO: 144931 - DNA, 22 bp, synthetic construct
  misc_feature 1..22: note = chemically synthesized
  source 1..22: mol_type = other DNA
ttctttattagattccagtaga

SEQ ID NO: 144932 - DNA, 22 bp, synthetic construct
  misc_feature 1..22: note = chemically synthesized
  source 1..22: mol_type = other DNA
tctttattagattccagtagaa

SEQ ID NO: 144933 - DNA, 22 bp, synthetic construct
  misc_feature 1..22: note = chemically synthesized
  source 1..22: mol_type = other DNA
ctttattagattccagtagaaa

SEQ ID NO: 144934 - DNA, 22 bp, synthetic construct
  misc_feature 1..22: note = chemically synthesized
  source 1..22: mol_type = other DNA
tttattagattccagtagaaag

SEQ ID NO: 144935 - DNA, 22 bp, synthetic construct
  misc_feature 1..22: note = chemically synthesized
  source 1..22: mol_type = other DNA
tattagattccagtagaaagaa

SEQ ID NO: 144936 - DNA, 22 bp, synthetic construct
  misc_feature 1..22: note = chemically synthesized
  source 1..22: mol_type = other DNA
attagattccagtagaaagaac

SEQ ID NO: 144937 - DNA, 22 bp, synthetic construct
  misc_feature 1..22: note = chemically synthesized
  source 1..22: mol_type = other DNA
ttagattccagtagaaagaact

SEQ ID NO: 144938 - DNA, 22 bp, synthetic construct
  misc_feature 1..22: note = chemically synthesized
  source 1..22: mol_type = other DNA
gattccagtagaaagaactttc

SEQ ID NO: 144939 - DNA, 22 bp, synthetic construct
  misc_feature 1..22: note = chemically synthesized
  source 1..22: mol_type = other DNA
cagtagaaagaactttcatctt

SEQ ID NO: 144940 - DNA, 22 bp, synthetic construct
  misc_feature 1..22: note = chemically synthesized
  source 1..22: mol_type = other DNA
tcatctttccctcatttttgtt

SEQ ID NO: 144941 - DNA, 22 bp, synthetic construct
  misc_feature 1..22: note = chemically synthesized
  source 1..22: mol_type = other DNA
catctttccctcatttttgttg

SEQ ID NO: 144942 - DNA, 22 bp, synthetic construct
  misc_feature 1..22: note = chemically synthesized
  source 1..22: mol_type = other DNA
atctttccctcatttttgttgt

SEQ ID NO: 144943 - DNA, 22 bp, synthetic construct
  misc_feature 1..22: note = chemically synthesized
  source 1..22: mol_type = other DNA
tccctcatttttgttgttttaa

SEQ ID NO: 144944 - DNA, 22 bp, synthetic construct
  misc_feature 1..22: note = chemically synthesized
  source 1..22: mol_type = other DNA
ccctcatttttgttgttttaaa

SEQ ID NO: 144945 - DNA, 22 bp, synthetic construct
  misc_feature 1..22: note = chemically synthesized
  source 1..22: mol_type = other DNA
cctcatttttgttgttttaaaa

SEQ ID NO: 144946 - DNA, 22 bp, synthetic construct
  misc_feature 1..22: note = chemically synthesized
  source 1..22: mol_type = other DNA
atttttgttgttttaaaacatc

SEQ ID NO: 144947 - DNA, 22 bp, synthetic construct
  misc_feature 1..22: note = chemically synthesized
  source 1..22: mol_type = other DNA
ttgttgttttaaaacatctatc

SEQ ID NO: 144948 - DNA, 22 bp, synthetic construct
  misc_feature 1..22: note = chemically synthesized
  source 1..22: mol_type = other DNA
tgttgttttaaaacatctatct

SEQ ID NO: 144949 - DNA, 22 bp, synthetic construct
  misc_feature 1..22: note = chemically synthesized
  source 1..22: mol_type = other DNA
gttgttttaaaacatctatctg

SEQ ID NO: 144950 - DNA, 22 bp, synthetic construct
  misc_feature 1..22: note = chemically synthesized
  source 1..22: mol_type = other DNA
ttgttttaaaacatctatctgg

SEQ ID NO: 144951 - DNA, 22 bp, synthetic construct
  misc_feature 1..22: note = chemically synthesized
  source 1..22: mol_type = other DNA
ttttaaaacatctatctggagg

SEQ ID NO: 144952 - DNA, 22 bp, synthetic construct
  misc_feature 1..22: note = chemically synthesized
  source 1..22: mol_type = other DNA
taaaacatctatctggaggcag

SEQ ID NO: 144953 - DNA, 22 bp, synthetic construct
  misc_feature 1..22: note = chemically synthesized
  source 1..22: mol_type = other DNA
aaaacatctatctggaggcagg

SEQ ID NO: 144954 - DNA, 22 bp, synthetic construct
  misc_feature 1..22: note = chemically synthesized
  source 1..22: mol_type = other DNA
aaacatctatctggaggcagga

SEQ ID NO: 144955 - DNA, 22 bp, synthetic construct
  misc_feature 1..22: note = chemically synthesized
  source 1..22: mol_type = other DNA
tctggaggcaggacaagtatgg

SEQ ID NO: 144956 - DNA, 22 bp, synthetic construct
  misc_feature 1..22: note = chemically synthesized
  source 1..22: mol_type = other DNA
gaggcaggacaagtatggtcgt

SEQ ID NO: 144957 - DNA, 22 bp, synthetic construct
  misc_feature 1..22: note = chemically synthesized
  source 1..22: mol_type = other DNA
aaaagatgcaggcagaaggcat

SEQ ID NO: 144958 - DNA, 22 bp, synthetic construct
  misc_feature 1..22: note = chemically synthesized
  source 1..22: mol_type = other DNA
gctcagtcaaagtggggaactt

SEQ ID NO: 144959 - DNA, 22 bp, synthetic construct
  misc_feature 1..22: note = chemically synthesized
  source 1..22: mol_type = other DNA
agtcaaagtggggaactttggt

SEQ ID NO: 144960 - DNA, 22 bp, synthetic construct
  misc_feature 1..22: note = chemically synthesized
  source 1..22: mol_type = other DNA
tggtggccaaacatacattgct

SEQ ID NO: 144961 - DNA, 22 bp, synthetic construct
  misc_feature 1..22: note = chemically synthesized
  source 1..22: mol_type = other DNA
ggtggccaaacatacattgcta

SEQ ID NO: 144962 - DNA, 22 bp, synthetic construct
  misc_feature 1..22: note = chemically synthesized
  source 1..22: mol_type = other DNA
gtggccaaacatacattgctaa

SEQ ID NO: 144963 - DNA, 22 bp, synthetic construct
  misc_feature 1..22: note = chemically synthesized
  source 1..22: mol_type = other DNA
ctaaggctattcctatatcagc

SEQ ID NO: 144964 - DNA, 22 bp, synthetic construct
  misc_feature 1..22: note = chemically synthesized
  source 1..22: mol_type = other DNA
aggctattcctatatcagctgg

SEQ ID NO: 144965 - DNA, 22 bp, synthetic construct
  misc_feature 1..22: note = chemically synthesized
  source 1..22: mol_type = other DNA
ttcctatatcagctggacacat

SEQ ID NO: 144966 - DNA, 22 bp, synthetic construct
  misc_feature 1..22: note = chemically synthesized
  source 1..22: mol_type = other DNA
ctatatcagctggacacatata

SEQ ID NO: 144967 - DNA, 22 bp, synthetic construct
  misc_feature 1..22: note = chemically synthesized
  source 1..22: mol_type = other DNA
tatcagctggacacatataaaa

SEQ ID NO: 144968 - DNA, 22 bp, synthetic construct
  misc_feature 1..22: note = chemically synthesized
  source 1..22: mol_type = other DNA
gacacatataaaatgctgctaa

SEQ ID NO: 144969 - DNA, 22 bp, synthetic construct
  misc_feature 1..22: note = chemically synthesized
  source 1..22: mol_type = other DNA
ctaatgcttcattacaaactta

SEQ ID NO: 144970 - DNA, 22 bp, synthetic construct
  misc_feature 1..22: note = chemically synthesized
  source 1..22: mol_type = other DNA
atgcttcattacaaacttatat

SEQ ID NO: 144971 - DNA, 22 bp, synthetic construct
  misc_feature 1..22: note = chemically synthesized
  source 1..22: mol_type = other DNA
cattacaaacttatatccttta

SEQ ID NO: 144972 - DNA, 22 bp, synthetic construct
  misc_feature 1..22: note = chemically synthesized
  source 1..22: mol_type = other DNA
attacaaacttatatcctttaa

SEQ ID NO: 144973 - DNA, 22 bp, synthetic construct
  misc_feature 1..22: note = chemically synthesized
  source 1..22: mol_type = other DNA
caaacttatatcctttaattcc

SEQ ID NO: 144974 - DNA, 22 bp, synthetic construct
  misc_feature 1..22: note = chemically synthesized
  source 1..22: mol_type = other DNA
atatcctttaattccagatggg

SEQ ID NO: 144975 - DNA, 22 bp, synthetic construct
  misc_feature 1..22: note = chemically synthesized
  source 1..22: mol_type = other DNA
tatcctttaattccagatgggg

SEQ ID NO: 144976 - DNA, 22 bp, synthetic construct
  misc_feature 1..22: note = chemically synthesized
  source 1..22: mol_type = other DNA
taattccagatgggggcaaagt

SEQ ID NO: 144977 - DNA, 22 bp, synthetic construct
  misc_feature 1..22: note = chemically synthesized
  source 1..22: mol_type = other DNA
aattccagatgggggcaaagta

SEQ ID NO: 144978 - DNA, 22 bp, synthetic construct
  misc_feature 1..22: note = chemically synthesized
  source 1..22: mol_type = other DNA
attccagatgggggcaaagtat

SEQ ID NO: 144979 - DNA, 22 bp, synthetic construct
  misc_feature 1..22: note = chemically synthesized
  source 1..22: mol_type = other DNA
cagatgggggcaaagtatgtcc

SEQ ID NO: 144980 - DNA, 22 bp, synthetic construct
  misc_feature 1..22: note = chemically synthesized
  source 1..22: mol_type = other DNA
aaacatttgggctggagtagat

SEQ ID NO: 144981 - DNA, 22 bp, synthetic construct
  misc_feature 1..22: note = chemically synthesized
  source 1..22: mol_type = other DNA
gggctggagtagattttgaaag

SEQ ID NO: 144982 - DNA, 22 bp, synthetic construct
  misc_feature 1..22: note = chemically synthesized
  source 1..22: mol_type = other DNA
ggctggagtagattttgaaagt

SEQ ID NO: 144983 - DNA, 22 bp, synthetic construct
  misc_feature 1..22: note = chemically synthesized
  source 1..22: mol_type = other DNA
gagtagattttgaaagtcagct

SEQ ID NO: 144984 - DNA, 22 bp, synthetic construct
  misc_feature 1..22: note = chemically synthesized
  source 1..22: mol_type = other DNA
tgaaagtcagctctgtgtgtgt

SEQ ID NO: 144985 - DNA, 22 bp, synthetic construct
  misc_feature 1..22: note = chemically synthesized
  source 1..22: mol_type = other DNA
gaaagtcagctctgtgtgtgtg

SEQ ID NO: 144986 - DNA, 22 bp, synthetic construct
  misc_feature 1..22: note = chemically synthesized
  source 1..22: mol_type = other DNA
aaagtcagctctgtgtgtgtgt

SEQ ID NO: 144987 - DNA, 22 bp, synthetic construct
  misc_feature 1..22: note = chemically synthesized
  source 1..22: mol_type = other DNA
tgtgtgtgtgtgtgtgtgtgcg

SEQ ID NO: 144988 - DNA, 22 bp, synthetic construct
  misc_feature 1..22: note = chemically synthesized
  source 1..22: mol_type = other DNA
tgtgtgtgtgtgtgtgtgcgcg

SEQ ID NO: 144989 - DNA, 22 bp, synthetic construct
  misc_feature 1..22: note = chemically synthesized
  source 1..22: mol_type = other DNA
cttttaacgtcttcagcctaca

SEQ ID NO: 144990 - DNA, 22 bp, synthetic construct
  misc_feature 1..22: note = chemically synthesized
  source 1..22: mol_type = other DNA
ttttaacgtcttcagcctacaa

SEQ ID NO: 144991 - DNA, 22 bp, synthetic construct
  misc_feature 1..22: note = chemically synthesized
  source 1..22: mol_type = other DNA
ttaacgtcttcagcctacaaca

SEQ ID NO: 144992 - DNA, 22 bp, synthetic construct
  misc_feature 1..22: note = chemically synthesized
  source 1..22: mol_type = other DNA
taacgtcttcagcctacaacat

SEQ ID NO: 144993 - DNA, 22 bp, synthetic construct
  misc_feature 1..22: note = chemically synthesized
  source 1..22: mol_type = other DNA
aacgtcttcagcctacaacata

SEQ ID NO: 144994 - DNA, 22 bp, synthetic construct
  misc_feature 1..22: note = chemically synthesized
  source 1..22: mol_type = other DNA
acgtcttcagcctacaacatac

SEQ ID NO: 144995 - DNA, 22 bp, synthetic construct
  misc_feature 1..22: note = chemically synthesized
  source 1..22: mol_type = other DNA
cagcctacaacatacagggttc

SEQ ID NO: 144996 - DNA, 22 bp, synthetic construct
  misc_feature 1..22: note = chemically synthesized
  source 1..22: mol_type = other DNA
agcctacaacatacagggttca

SEQ ID NO: 144997 - DNA, 22 bp, synthetic construct
  misc_feature 1..22: note = chemically synthesized
  source 1..22: mol_type = other DNA
caacatacagggttcatggtgg

SEQ ID NO: 144998 - DNA, 22 bp, synthetic construct
  misc_feature 1..22: note = chemically synthesized
  source 1..22: mol_type = other DNA
atggtggcaagaagatagcaag

SEQ ID NO: 144999 - DNA, 22 bp, synthetic construct
  misc_feature 1..22: note = chemically synthesized
  source 1..22: mol_type = other DNA
aaattatggccagtgactagtg

SEQ ID NO: 145000 - DNA, 22 bp, synthetic construct
  misc_feature 1..22: note = chemically synthesized
  source 1..22: mol_type = other DNA
aattatggccagtgactagtgc

SEQ ID NO: 145001 - DNA, 22 bp, synthetic construct
  misc_feature 1..22: note = chemically synthesized
  source 1..22: mol_type = other DNA
tggccagtgactagtgcttgaa

SEQ ID NO: 145002 - DNA, 22 bp, synthetic construct
  misc_feature 1..22: note = chemically synthesized
  source 1..22: mol_type = other DNA
gtgcttgaaggggaacaactac

SEQ ID NO: 145003 - DNA, 22 bp, synthetic construct
  misc_feature 1..22: note = chemically synthesized
  source 1..22: mol_type = other DNA
gaaggggaacaactacctgcat

SEQ ID NO: 145004 - DNA, 22 bp, synthetic construct
  misc_feature 1..22: note = chemically synthesized
  source 1..22: mol_type = other DNA
aaggggaacaactacctgcatt

SEQ ID NO: 145005 - DNA, 22 bp, synthetic construct
  misc_feature 1..22: note = chemically synthesized
  source 1..22: mol_type = other DNA
cctgcatttaatgggaaggcaa

SEQ ID NO: 145006 - DNA, 22 bp, synthetic construct
  misc_feature 1..22: note = chemically synthesized
  source 1..22: mol_type = other DNA
catttaatgggaaggcaaaatc

SEQ ID NO: 145007 - DNA, 22 bp, synthetic construct
  misc_feature 1..22: note = chemically synthesized
  source 1..22: mol_type = other DNA
aatgggaaggcaaaatctcagg

SEQ ID NO: 145008 - DNA, 22 bp, synthetic construct
  misc_feature 1..22: note = chemically synthesized
  source 1..22: mol_type = other DNA
atgggaaggcaaaatctcaggc

SEQ ID NO: 145009 - DNA, 22 bp, synthetic construct
  misc_feature 1..22: note = chemically synthesized
  source 1..22: mol_type = other DNA
aggctttgagggaagttaacat

SEQ ID NO: 145010 - DNA, 22 bp, synthetic construct
  misc_feature 1..22: note = chemically synthesized
  source 1..22: mol_type = other DNA
tgagggaagttaacataggctt

SEQ ID NO: 145011 - DNA, 22 bp, synthetic construct
  misc_feature 1..22: note = chemically synthesized
  source 1..22: mol_type = other DNA
gagggaagttaacataggcttg

SEQ ID NO: 145012 - DNA, 22 bp, synthetic construct
  misc_feature 1..22: note = chemically synthesized
  source 1..22: mol_type = other DNA
agggaagttaacataggcttga

SEQ ID NO: 145013 - DNA, 22 bp, synthetic construct
  misc_feature 1..22: note = chemically synthesized
  source 1..22: mol_type = other DNA
acataggcttgattctgggtgg

SEQ ID NO: 145014 - DNA, 22 bp, synthetic construct
  misc_feature 1..22: note = chemically synthesized
  source 1..22: mol_type = other DNA
gattctgggtggaagcttggtg

SEQ ID NO: 145015 - DNA, 22 bp, synthetic construct
  misc_feature 1..22: note = chemically synthesized
  source 1..22: mol_type = other DNA
attctgggtggaagcttggtgt

SEQ ID NO: 145016 - DNA, 22 bp, synthetic construct
  misc_feature 1..22: note = chemically synthesized
  source 1..22: mol_type = other DNA
tgggtggaagcttggtgtgtag

SEQ ID NO: 145017 - DNA, 22 bp, synthetic construct
  misc_feature 1..22: note = chemically synthesized
  source 1..22: mol_type = other DNA
ggtggaagcttggtgtgtagtt

SEQ ID NO: 145018 - DNA, 22 bp, synthetic construct
  misc_feature 1..22: note = chemically synthesized
  source 1..22: mol_type = other DNA
ggtgtgtagttatctggaggcc

SEQ ID NO: 145019 - DNA, 22 bp, synthetic construct
  misc_feature 1..22: note = chemically synthesized
  source 1..22: mol_type = other DNA
gtgtgtagttatctggaggcca

SEQ ID NO: 145020 - DNA, 22 bp, synthetic construct
  misc_feature 1..22: note = chemically synthesized
  source 1..22: mol_type = other DNA
tctggaggccaggctggagctc

SEQ ID NO: 145021 - DNA, 22 bp, synthetic construct
  misc_feature 1..22: note = chemically synthesized
  source 1..22: mol_type = other DNA
gaggccaggctggagctctcag

SEQ ID NO: 145022 - DNA, 22 bp, synthetic construct
  misc_feature 1..22: note = chemically synthesized
  source 1..22: mol_type = other DNA
gagctctcagctcactatgggt

SEQ ID NO: 145023 - DNA, 22 bp, synthetic construct
  misc_feature 1..22: note = chemically synthesized
  source 1..22: mol_type = other DNA
tcagctcactatgggttcatct

SEQ ID NO: 145024 - DNA, 22 bp, synthetic construct
  misc_feature 1..22: note = chemically synthesized
  source 1..22: mol_type = other DNA
agctcactatgggttcatcttt

SEQ ID NO: 145025 - DNA, 22 bp, synthetic construct
  misc_feature 1..22: note = chemically synthesized
  source 1..22: mol_type = other DNA
actatgggttcatctttattgt

SEQ ID NO: 145026 - DNA, 22 bp, synthetic construct
  misc_feature 1..22: note = chemically synthesized
  source 1..22: mol_type = other DNA
tgggttcatctttattgtctcc

SEQ ID NO: 145027 - DNA, 22 bp, synthetic construct
  misc_feature 1..22: note = chemically synthesized
  source 1..22: mol_type = other DNA
atctttattgtctcctttcatc

SEQ ID NO: 145028 - DNA, 22 bp, synthetic construct
  misc_feature 1..22: note = chemically synthesized
  source 1..22: mol_type = other DNA
tattgtctcctttcatctcaac

SEQ ID NO: 145029 - DNA, 22 bp, synthetic construct
  misc_feature 1..22: note = chemically synthesized
  source 1..22: mol_type = other DNA
attgtctcctttcatctcaaca

SEQ ID NO: 145030 - DNA, 22 bp, synthetic construct
  misc_feature 1..22: note = chemically synthesized
  source 1..22: mol_type = other DNA
ttgtctcctttcatctcaacag

SEQ ID NO: 145031 - DNA, 22 bp, synthetic construct
  misc_feature 1..22: note = chemically synthesized
  source 1..22: mol_type = other DNA
tctcctttcatctcaacagctc

SEQ ID NO: 145032 - DNA, 22 bp, synthetic construct
  misc_feature 1..22: note = chemically synthesized
  source 1..22: mol_type = other DNA
ctttcatctcaacagctcctgg

SEQ ID NO: 145033 - DNA, 22 bp, synthetic construct
  misc_feature 1..22: note = chemically synthesized
  source 1..22: mol_type = other DNA
tcatctcaacagctcctgggaa

SEQ ID NO: 145034 - DNA, 22 bp, synthetic construct
  misc_feature 1..22: note = chemically synthesized
  source 1..22: mol_type = other DNA
catctcaacagctcctgggaaa

SEQ ID NO: 145035 - DNA, 22 bp, synthetic construct
  misc_feature 1..22: note = chemically synthesized
  source 1..22: mol_type = other DNA
atctcaacagctcctgggaaat

SEQ ID NO: 145036 - DNA, 22 bp, synthetic construct
  misc_feature 1..22: note = chemically synthesized
  source 1..22: mol_type = other DNA
aacagctcctgggaaatgtgct

SEQ ID NO: 145037 - DNA, 22 bp, synthetic construct
  misc_feature 1..22: note = chemically synthesized
  source 1..22: mol_type = other DNA
ctgggaaatgtgctggtgaccg

SEQ ID NO: 145038 - DNA, 22 bp, synthetic construct
  misc_feature 1..22: note = chemically synthesized
  source 1..22: mol_type = other DNA
ggaaatgtgctggtgaccgttt

SEQ ID NO: 145039 - DNA, 22 bp, synthetic construct
  misc_feature 1..22: note = chemically synthesized
  source 1..22: mol_type = other DNA
gtgaccgttttggcaatccatt

SEQ ID NO: 145040 - DNA, 22 bp, synthetic construct
  misc_feature 1..22: note = chemically synthesized
  source 1..22: mol_type = other DNA
tggcaatccatttcggcaaaga

SEQ ID NO: 145041 - DNA, 22 bp, synthetic construct
  misc_feature 1..22: note = chemically synthesized
  source 1..22: mol_type = other DNA
ggcaatccatttcggcaaagaa

SEQ ID NO: 145042 - DNA, 22 bp, synthetic construct
  misc_feature 1..22: note = chemically synthesized
  source 1..22: mol_type = other DNA
gcaatccatttcggcaaagaat

SEQ ID NO: 145043 - DNA, 22 bp, synthetic construct
  misc_feature 1..22: note = chemically synthesized
  source 1..22: mol_type = other DNA
cggcaaagaattcacccctgag

SEQ ID NO: 145044 - DNA, 22 bp, synthetic construct
  misc_feature 1..22: note = chemically synthesized
  source 1..22: mol_type = other DNA
ggcaaagaattcacccctgagg

SEQ ID NO: 145045 - DNA, 22 bp, synthetic construct
  misc_feature 1..22: note = chemically synthesized
  source 1..22: mol_type = other DNA
acccctgaggtgcaggcttcct

SEQ ID NO: 145046 - DNA, 22 bp, synthetic construct
  misc_feature 1..22: note = chemically synthesized
  source 1..22: mol_type = other DNA
aggtgcaggcttcctggcagaa

SEQ ID NO: 145047 - DNA, 22 bp, synthetic construct
  misc_feature 1..22: note = chemically synthesized
  source 1..22: mol_type = other DNA
cctggcagaagatggtgactgc

SEQ ID NO: 145048 - DNA, 22 bp, synthetic construct
  misc_feature 1..22: note = chemically synthesized
  source 1..22: mol_type = other DNA
ctggcagaagatggtgactgca

SEQ ID NO: 145049 - DNA, 22 bp, synthetic construct
  misc_feature 1..22: note = chemically synthesized
  source 1..22: mol_type = other DNA
gcagaagatggtgactgcagtg

SEQ ID NO: 145050 - DNA, 22 bp, synthetic construct
  misc_feature 1..22: note = chemically synthesized
  source 1..22: mol_type = other DNA
cagtggccagtgccctgtcctc

SEQ ID NO: 145051 - DNA, 22 bp, synthetic construct
  misc_feature 1..22: note = chemically synthesized
  source 1..22: mol_type = other DNA
tcctccagataccactgagctc

SEQ ID NO: 145052 - DNA, 22 bp, synthetic construct
  misc_feature 1..22: note = chemically synthesized
  source 1..22: mol_type = other DNA
cagataccactgagctcactgc

SEQ ID NO: 145053 - DNA, 22 bp, synthetic construct
  misc_feature 1..22: note = chemically synthesized
  source 1..22: mol_type = other DNA
agctcactgcccatgattcaga

SEQ ID NO: 145054 - DNA, 22 bp, synthetic construct
  misc_feature 1..22: note = chemically synthesized
  source 1..22: mol_type = other DNA
actgcccatgattcagagcttt

SEQ ID NO: 145055 - DNA, 22 bp, synthetic construct
  misc_feature 1..22: note = chemically synthesized
  source 1..22: mol_type = other DNA
cccatgattcagagctttcaag

SEQ ID NO: 145056 - DNA, 22 bp, synthetic construct
  misc_feature 1..22: note = chemically synthesized
  source 1..22: mol_type = other DNA
agagctttcaaggataggcttt

SEQ ID NO: 145057 - DNA, 22 bp, synthetic construct
  misc_feature 1..22: note = chemically synthesized
  source 1..22: mol_type = other DNA
tcaaggataggctttattctgc

SEQ ID NO: 145058 - DNA, 22 bp, synthetic construct
  misc_feature 1..22: note = chemically synthesized
  source 1..22: mol_type = other DNA
caaggataggctttattctgca

SEQ ID NO: 145059 - DNA, 22 bp, synthetic construct
  misc_feature 1..22: note = chemically synthesized
  source 1..22: mol_type = other DNA
aaggataggctttattctgcaa

SEQ ID NO: 145060 - DNA, 22 bp, synthetic construct
  misc_feature 1..22: note = chemically synthesized
  source 1..22: mol_type = other DNA
tattctgcaagcaatacaaata

SEQ ID NO: 145061 - DNA, 22 bp, synthetic construct
  misc_feature 1..22: note = chemically synthesized
  source 1..22: mol_type = other DNA
attctgcaagcaatacaaataa

SEQ ID NO: 145062 - DNA, 22 bp, synthetic construct
  misc_feature 1..22: note = chemically synthesized
  source 1..22: mol_type = other DNA
ttctgcaagcaatacaaataat

SEQ ID NO: 145063 - DNA, 22 bp, synthetic construct
  misc_feature 1..22: note = chemically synthesized
  source 1..22: mol_type = other DNA
tgcaagcaatacaaataataaa

SEQ ID NO: 145064 - DNA, 22 bp, synthetic construct
  misc_feature 1..22: note = chemically synthesized
  source 1..22: mol_type = other DNA
caagcaatacaaataataaatc

SEQ ID NO: 145065 - DNA, 22 bp, synthetic construct
  misc_feature 1..22: note = chemically synthesized
  source 1..22: mol_type = other DNA
ttctgctgagagatcacacatg

SEQ ID NO: 145066 - DNA, 22 bp, synthetic construct
  misc_feature 1..22: note = chemically synthesized
  source 1..22: mol_type = other DNA
tgctgagagatcacacatgatt

SEQ ID NO: 145067 - DNA, 22 bp, synthetic construct
  misc_feature 1..22: note = chemically synthesized
  source 1..22: mol_type = other DNA
ctgagagatcacacatgatttt

SEQ ID NO: 145068 - DNA, 22 bp, synthetic construct
  misc_feature 1..22: note = chemically synthesized
  source 1..22: mol_type = other DNA
agagatcacacatgattttctt

SEQ ID NO: 145069 - DNA, 22 bp, synthetic construct
  misc_feature 1..22: note = chemically synthesized
  source 1..22: mol_type = other DNA
tcttcagctcttttttttacat

SEQ ID NO: 145070 - DNA, 22 bp, synthetic construct
  misc_feature 1..22: note = chemically synthesized
  source 1..22: mol_type = other DNA
cttcagctcttttttttacatc

SEQ ID NO: 145071 - DNA, 22 bp, synthetic construct
  misc_feature 1..22: note = chemically synthesized
  source 1..22: mol_type = other DNA
ttcagctcttttttttacatct

SEQ ID NO: 145072 - DNA, 22 bp, synthetic construct
  misc_feature 1..22: note = chemically synthesized
  source 1..22: mol_type = other DNA
cagctcttttttttacatcttt

SEQ ID NO: 145073 - DNA, 22 bp, synthetic construct
  misc_feature 1..22: note = chemically synthesized
  source 1..22: mol_type = other DNA
agctcttttttttacatctttt

SEQ ID NO: 145074 - DNA, 22 bp, synthetic construct
  misc_feature 1..22: note = chemically synthesized
  source 1..22: mol_type = other DNA
ttttttttacatctttttaaat

SEQ ID NO: 145075 - DNA, 22 bp, synthetic construct
  misc_feature 1..22: note = chemically synthesized
  source 1..22: mol_type = other DNA
ttttttacatctttttaaatat

SEQ ID NO: 145076 - DNA, 22 bp, synthetic construct
  misc_feature 1..22: note = chemically synthesized
  source 1..22: mol_type = other DNA
tttttacatctttttaaatata

SEQ ID NO: 145077 - DNA, 22 bp, synthetic construct
  misc_feature 1..22: note = chemically synthesized
  source 1..22: mol_type = other DNA
ttttacatctttttaaatatat

SEQ ID NO: 145078 - DNA, 22 bp, synthetic construct
  misc_feature 1..22: note = chemically synthesized
  source 1..22: mol_type = other DNA
tttacatctttttaaatatatg

SEQ ID NO: 145079 - DNA, 22 bp, synthetic construct
  misc_feature 1..22: note = chemically synthesized
  source 1..22: mol_type = other DNA
ttacatctttttaaatatatga

SEQ ID NO: 145080 - DNA, 22 bp, synthetic construct
  misc_feature 1..22: note = chemically synthesized
  source 1..22: mol_type = other DNA
tacatctttttaaatatatgag

SEQ ID NO: 145081 - DNA, 22 bp, synthetic construct
  misc_feature 1..22: note = chemically synthesized
  source 1..22: mol_type = other DNA
acatctttttaaatatatgagc

SEQ ID NO: 145082 - DNA, 22 bp, synthetic construct
  misc_feature 1..22: note = chemically synthesized
  source 1..22: mol_type = other DNA
catctttttaaatatatgagcc

SEQ ID NO: 145083 - DNA, 22 bp, synthetic construct
  misc_feature 1..22: note = chemically synthesized
  source 1..22: mol_type = other DNA
tttaaatatatgagccacaaag

SEQ ID NO: 145084 - DNA, 22 bp, synthetic construct
  misc_feature 1..22: note = chemically synthesized
  source 1..22: mol_type = other DNA
ttaaatatatgagccacaaagg

SEQ ID NO: 145085 - DNA, 22 bp, synthetic construct
  misc_feature 1..22: note = chemically synthesized
  source 1..22: mol_type = other DNA
taaatatatgagccacaaaggg

SEQ ID NO: 145086 - DNA, 22 bp, synthetic construct
  misc_feature 1..22: note = chemically synthesized
  source 1..22: mol_type = other DNA
aaatatatgagccacaaagggt

SEQ ID NO: 145087 - DNA, 22 bp, synthetic construct
  misc_feature 1..22: note = chemically synthesized
  source 1..22: mol_type = other DNA
aatatatgagccacaaagggtt

SEQ ID NO: 145088 - DNA, 22 bp, synthetic construct
  misc_feature 1..22: note = chemically synthesized
  source 1..22: mol_type = other DNA
atattgagggaagtgtgtatgt

SEQ ID NO: 145089 - DNA, 22 bp, synthetic construct
  misc_feature 1..22: note = chemically synthesized
  source 1..22: mol_type = other DNA
tattgagggaagtgtgtatgtg

SEQ ID NO: 145090 - DNA, 22 bp, synthetic construct
  misc_feature 1..22: note = chemically synthesized
  source 1..22: mol_type = other DNA
agggaagtgtgtatgtgtattt

SEQ ID NO: 145091 - DNA, 22 bp, synthetic construct
  misc_feature 1..22: note = chemically synthesized
  source 1..22: mol_type = other DNA
ctgcatgcctgtttgtgtttgt

SEQ ID NO: 145092 - DNA, 22 bp, synthetic construct
  misc_feature 1..22: note = chemically synthesized
  source 1..22: mol_type = other DNA
tgcatgcctgtttgtgtttgtg

SEQ ID NO: 145093 - DNA, 22 bp, synthetic construct
  misc_feature 1..22: note = chemically synthesized
  source 1..22: mol_type = other DNA
catgcctgtttgtgtttgtggt

SEQ ID NO: 145094 - DNA, 22 bp, synthetic construct
  misc_feature 1..22: note = chemically synthesized
  source 1..22: mol_type = other DNA
tttgtgtttgtggtgtgtgcat

SEQ ID NO: 145095 - DNA, 22 bp, synthetic construct
  misc_feature 1..22: note = chemically synthesized
  source 1..22: mol_type = other DNA
gtgtttgtggtgtgtgcatgct

SEQ ID NO: 145096 - DNA, 22 bp, synthetic construct
  misc_feature 1..22: note = chemically synthesized
  source 1..22: mol_type = other DNA
tgtttgtggtgtgtgcatgctc

SEQ ID NO: 145097 - DNA, 22 bp, synthetic construct
  misc_feature 1..22: note = chemically synthesized
  source 1..22: mol_type = other DNA
gtggtgtgtgcatgctcctcat

SEQ ID NO: 145098 - DNA, 22 bp, synthetic construct
  misc_feature 1..22: note = chemically synthesized
  source 1..22: mol_type = other DNA
tggtgtgtgcatgctcctcatt

SEQ ID NO: 145099 - DNA, 22 bp, synthetic construct
  misc_feature 1..22: note = chemically synthesized
  source 1..22: mol_type = other DNA
ctcatttatttttatatgagat

SEQ ID NO: 145100 - DNA, 22 bp, synthetic construct
  misc_feature 1..22: note = chemically synthesized
  source 1..22: mol_type = other DNA
atttatttttatatgagatgtg

SEQ ID NO: 145101 - DNA, 22 bp, synthetic construct
  misc_feature 1..22: note = chemically synthesized
  source 1..22: mol_type = other DNA
atttttatatgagatgtgcatt

SEQ ID NO: 145102 - DNA, 22 bp, synthetic construct
  misc_feature 1..22: note = chemically synthesized
  source 1..22: mol_type = other DNA
tttttatatgagatgtgcattt

SEQ ID NO: 145103 - DNA, 22 bp, synthetic construct
  misc_feature 1..22: note = chemically synthesized
  source 1..22: mol_type = other DNA
ttatatgagatgtgcattttga

SEQ ID NO: 145104 - DNA, 22 bp, synthetic construct
  misc_feature 1..22: note = chemically synthesized
  source 1..22: mol_type = other DNA
tatatgagatgtgcattttgat

SEQ ID NO: 145105 - DNA, 22 bp, synthetic construct
  misc_feature 1..22: note = chemically synthesized
  source 1..22: mol_type = other DNA
atatgagatgtgcattttgatg

SEQ ID NO: 145106 - DNA, 22 bp, synthetic construct
  misc_feature 1..22: note = chemically synthesized
  source 1..22: mol_type = other DNA
tatgagatgtgcattttgatga

SEQ ID NO: 145107 - DNA, 22 bp, synthetic construct
  misc_feature 1..22: note = chemically synthesized
  source 1..22: mol_type = other DNA
tgatgagcaaataaaagcagta

SEQ ID NO: 145108 - DNA, 22 bp, synthetic construct
  misc_feature 1..22: note = chemically synthesized
  source 1..22: mol_type = other DNA
gatgagcaaataaaagcagtaa

SEQ ID NO: 145109 - DNA, 22 bp, synthetic construct
  misc_feature 1..22: note = chemically synthesized
  source 1..22: mol_type = other DNA
atgagcaaataaaagcagtaaa

SEQ ID NO: 145110 - DNA, 22 bp, synthetic construct
  misc_feature 1..22: note = chemically synthesized
  source 1..22: mol_type = other DNA
gtacacgggagttctgcaagtg

SEQ ID NO: 145111 - DNA, 22 bp, synthetic construct
  misc_feature 1..22: note = chemically synthesized
  source 1..22: mol_type = other DNA
tacacgggagttctgcaagtgg

SEQ ID NO: 145112 - DNA, 22 bp, synthetic construct
  misc_feature 1..22: note = chemically synthesized
  source 1..22: mol_type = other DNA
tgcaagtgggagtaaatggtgt

SEQ ID NO: 145113 - DNA, 22 bp, synthetic construct
  misc_feature 1..22: note = chemically synthesized
  source 1..22: mol_type = other DNA
caagtgggagtaaatggtgtag

SEQ ID NO: 145114 - DNA, 22 bp, synthetic construct
  misc_feature 1..22: note = chemically synthesized
  source 1..22: mol_type = other DNA
tataggacaggacttctcagaa

SEQ ID NO: 145115 - DNA, 22 bp, synthetic construct
  misc_feature 1..22: note = chemically synthesized
  source 1..22: mol_type = other DNA
taggacaggacttctcagaaac

SEQ ID NO: 145116 - DNA, 22 bp, synthetic construct
  misc_feature 1..22: note = chemically synthesized
  source 1..22: mol_type = other DNA
ctcagaaacagatgttttggaa

SEQ ID NO: 145117 - DNA, 22 bp, synthetic construct
  misc_feature 1..22: note = chemically synthesized
  source 1..22: mol_type = other DNA
tcagaaacagatgttttggaag

SEQ ID NO: 145118 - DNA, 22 bp, synthetic construct
  misc_feature 1..22: note = chemically synthesized
  source 1..22: mol_type = other DNA
agaaacagatgttttggaagag

SEQ ID NO: 145119 - DNA, 22 bp, synthetic construct
  misc_feature 1..22: note = chemically synthesized
  source 1..22: mol_type = other DNA
tggaagagatgggaaaaggttc

SEQ ID NO: 145120 - DNA, 22 bp, synthetic construct
  misc_feature 1..22: note = chemically synthesized
  source 1..22: mol_type = other DNA
ggaagagatgggaaaaggttca

SEQ ID NO: 145121 - DNA, 22 bp, synthetic construct
  misc_feature 1..22: note = chemically synthesized
  source 1..22: mol_type = other DNA
gaagagatgggaaaaggttcag

SEQ ID NO: 145122 - DNA, 22 bp, synthetic construct
  misc_feature 1..22: note = chemically synthesized
  source 1..22: mol_type = other DNA
agtgaagacctgggggctggat

SEQ ID NO: 145123 - DNA, 22 bp, synthetic construct
  misc_feature 1..22: note = chemically synthesized
  source 1..22: mol_type = other DNA
ggggctggattgattgcagctg

SEQ ID NO: 145124 - DNA, 22 bp, synthetic construct
  misc_feature 1..22: note = chemically synthesized
  source 1..22: mol_type = other DNA
gattgattgcagctgagtagca

SEQ ID NO: 145125 - DNA, 22 bp, synthetic construct
  misc_feature 1..22: note = chemically synthesized
  source 1..22: mol_type = other DNA
attgcagctgagtagcaaggat

SEQ ID NO: 145126 - DNA, 22 bp, synthetic construct
  misc_feature 1..22: note = chemically synthesized
  source 1..22: mol_type = other DNA
cagctgagtagcaaggatggtt

SEQ ID NO: 145127 - DNA, 22 bp, synthetic construct
  misc_feature 1..22: note = chemically synthesized
  source 1..22: mol_type = other DNA
agtagcaaggatggttcttaag

SEQ ID NO: 145128 - DNA, 22 bp, synthetic construct
  misc_feature 1..22: note = chemically synthesized
  source 1..22: mol_type = other DNA
ttaaggaagggaaagtgttcca

SEQ ID NO: 145129 - DNA, 22 bp, synthetic construct
  misc_feature 1..22: note = chemically synthesized
  source 1..22: mol_type = other DNA
aaggaagggaaagtgttccaag

SEQ ID NO: 145130 - DNA, 22 bp, synthetic construct
  misc_feature 1..22: note = chemically synthesized
  source 1..22: mol_type = other DNA
aggaagggaaagtgttccaagc

SEQ ID NO: 145131 - DNA, 22 bp, synthetic construct
  misc_feature 1..22: note = chemically synthesized
  source 1..22: mol_type = other DNA
caagctttaggaattcaaggtt

SEQ ID NO: 145132 - DNA, 22 bp, synthetic construct
  misc_feature 1..22: note = chemically synthesized
  source 1..22: mol_type = other DNA
taggaattcaaggtttagtcag

SEQ ID NO: 145133 - DNA, 22 bp, synthetic construct
  misc_feature 1..22: note = chemically synthesized
  source 1..22: mol_type = other DNA
aggaattcaaggtttagtcagg

SEQ ID NO: 145134 - DNA, 22 bp, synthetic construct
  misc_feature 1..22: note = chemically synthesized
  source 1..22: mol_type = other DNA
ggaattcaaggtttagtcaggt

SEQ ID NO: 145135 - DNA, 22 bp, synthetic construct
  misc_feature 1..22: note = chemically synthesized
  source 1..22: mol_type = other DNA
aaggtttagtcaggtgtagcaa

SEQ ID NO: 145136 - DNA, 22 bp, synthetic construct
  misc_feature 1..22: note = chemically synthesized
  source 1..22: mol_type = other DNA
agtcaggtgtagcaattctatt

SEQ ID NO: 145137 - DNA, 22 bp, synthetic construct
  misc_feature 1..22: note = chemically synthesized
  source 1..22: mol_type = other DNA
gtcaggtgtagcaattctattt

SEQ ID NO: 145138 - DNA, 22 bp, synthetic construct
  misc_feature 1..22: note = chemically synthesized
  source 1..22: mol_type = other DNA
tattttattaggaggaatacta

SEQ ID NO: 145139 - DNA, 22 bp, synthetic construct
  misc_feature 1..22: note = chemically synthesized
  source 1..22: mol_type = other DNA
ttttattaggaggaatactatt

SEQ ID NO: 145140 - DNA, 22 bp, synthetic construct
  misc_feature 1..22: note = chemically synthesized
  source 1..22: mol_type = other DNA
tattaggaggaatactatttct

SEQ ID NO: 145141 - DNA, 22 bp, synthetic construct
  misc_feature 1..22: note = chemically synthesized
  source 1..22: mol_type = other DNA
attaggaggaatactatttcta

SEQ ID NO: 145142 - DNA, 22 bp, synthetic construct
  misc_feature 1..22: note = chemically synthesized
  source 1..22: mol_type = other DNA
ttaggaggaatactatttctaa

SEQ ID NO: 145143 - DNA, 22 bp, synthetic construct
  misc_feature 1..22: note = chemically synthesized
  source 1..22: mol_type = other DNA
ggaggaatactatttctaatgg

SEQ ID NO: 145144 - DNA, 22 bp, synthetic construct
  misc_feature 1..22: note = chemically synthesized
  source 1..22: mol_type = other DNA
tttctaatggcacttagctttt

SEQ ID NO: 145145 - DNA, 22 bp, synthetic construct
  misc_feature 1..22: note = chemically synthesized
  source 1..22: mol_type = other DNA
ctaatggcacttagcttttcac

SEQ ID NO: 145146 - DNA, 22 bp, synthetic construct
  misc_feature 1..22: note = chemically synthesized
  source 1..22: mol_type = other DNA
taatggcacttagcttttcaca

SEQ ID NO: 145147 - DNA, 22 bp, synthetic construct
  misc_feature 1..22: note = chemically synthesized
  source 1..22: mol_type = other DNA
atggcacttagcttttcacagc

SEQ ID NO: 145148 - DNA, 22 bp, synthetic construct
  misc_feature 1..22: note = chemically synthesized
  source 1..22: mol_type = other DNA
agcttttcacagcccttgtgga

SEQ ID NO: 145149 - DNA, 22 bp, synthetic construct
  misc_feature 1..22: note = chemically synthesized
  source 1..22: mol_type = other DNA
gcttttcacagcccttgtggat

SEQ ID NO: 145150 - DNA, 22 bp, synthetic construct
  misc_feature 1..22: note = chemically synthesized
  source 1..22: mol_type = other DNA
ttcacagcccttgtggatgcct

SEQ ID NO: 145151 - DNA, 22 bp, synthetic construct
  misc_feature 1..22: note = chemically synthesized
  source 1..22: mol_type = other DNA
tcacagcccttgtggatgccta

SEQ ID NO: 145152 - DNA, 22 bp, synthetic construct
  misc_feature 1..22: note = chemically synthesized
  source 1..22: mol_type = other DNA
cacagcccttgtggatgcctaa

SEQ ID NO: 145153 - DNA, 22 bp, synthetic construct
  misc_feature 1..22: note = chemically synthesized
  source 1..22: mol_type = other DNA
acagcccttgtggatgcctaag

SEQ ID NO: 145154 - DNA, 22 bp, synthetic construct
  misc_feature 1..22: note = chemically synthesized
  source 1..22: mol_type = other DNA
gtggatgcctaagaaagtgaaa

SEQ ID NO: 145155 - DNA, 22 bp, synthetic construct
  misc_feature 1..22: note = chemically synthesized
  source 1..22: mol_type = other DNA
tggatgcctaagaaagtgaaat

SEQ ID NO: 145156 - DNA, 22 bp, synthetic construct
  misc_feature 1..22: note = chemically synthesized
  source 1..22: mol_type = other DNA
agaaagtgaaattaatcccatg

SEQ ID NO: 145157 - DNA, 22 bp, synthetic construct
  misc_feature 1..22: note = chemically synthesized
  source 1..22: mol_type = other DNA
atcccatgccctcaagtgtgca

SEQ ID NO: 145158 - DNA, 22 bp, synthetic construct
  misc_feature 1..22: note = chemically synthesized
  source 1..22: mol_type = other DNA
aagtgtgcagattggtcacagc

SEQ ID NO: 145159 - DNA, 22 bp, synthetic construct
  misc_feature 1..22: note = chemically synthesized
  source 1..22: mol_type = other DNA
gtcacagcatttcaagggagag

SEQ ID NO: 145160 - DNA, 22 bp, synthetic construct
  misc_feature 1..22: note = chemically synthesized
  source 1..22: mol_type = other DNA
caagggagagacctcattgtaa

SEQ ID NO: 145161 - DNA, 22 bp, synthetic construct
  misc_feature 1..22: note = chemically synthesized
  source 1..22: mol_type = other DNA
aagggagagacctcattgtaag

SEQ ID NO: 145162 - DNA, 22 bp, synthetic construct
  misc_feature 1..22: note = chemically synthesized
  source 1..22: mol_type = other DNA
attgtaagactctgggggaggt

SEQ ID NO: 145163 - DNA, 22 bp, synthetic construct
  misc_feature 1..22: note = chemically synthesized
  source 1..22: mol_type = other DNA
taagactctgggggaggtgggg

SEQ ID NO: 145164 - DNA, 22 bp, synthetic construct
  misc_feature 1..22: note = chemically synthesized
  source 1..22: mol_type = other DNA
tgggggaggtggggacttaggt

SEQ ID NO: 145165 - DNA, 22 bp, synthetic construct
  misc_feature 1..22: note = chemically synthesized
  source 1..22: mol_type = other DNA
ggggaggtggggacttaggtgt

SEQ ID NO: 145166 - DNA, 22 bp, synthetic construct
  misc_feature 1..22: note = chemically synthesized
  source 1..22: mol_type = other DNA
aggtgtaagaaatgaatcagca

SEQ ID NO: 145167 - DNA, 22 bp, synthetic construct
  misc_feature 1..22: note = chemically synthesized
  source 1..22: mol_type = other DNA
ggtgtaagaaatgaatcagcag

SEQ ID NO: 145168 - DNA, 22 bp, synthetic construct
  misc_feature 1..22: note = chemically synthesized
  source 1..22: mol_type = other DNA
acaagtcagcatgagcatgtta

SEQ ID NO: 145169 - DNA, 22 bp, synthetic construct
  misc_feature 1..22: note = chemically synthesized
  source 1..22: mol_type = other DNA
tgtctgagaaacagaccagcac

SEQ ID NO: 145170 - DNA, 22 bp, synthetic construct
  misc_feature 1..22: note = chemically synthesized
  source 1..22: mol_type = other DNA
agaaacagaccagcactgtgag

SEQ ID NO: 145171 - DNA, 22 bp, synthetic construct
  misc_feature 1..22: note = chemically synthesized
  source 1..22: mol_type = other DNA
tgagatcaaaatgtagtgggaa

SEQ ID NO: 145172 - DNA, 22 bp, synthetic construct
  misc_feature 1..22: note = chemically synthesized
  source 1..22: mol_type = other DNA
gtacaacattaattggaaggct

SEQ ID NO: 145173 - DNA, 22 bp, synthetic construct
  misc_feature 1..22: note = chemically synthesized
  source 1..22: mol_type = other DNA
tacaacattaattggaaggctt

SEQ ID NO: 145174 - DNA, 22 bp, synthetic construct
  misc_feature 1..22: note = chemically synthesized
  source 1..22: mol_type = other DNA
attggaaggcttacttaatgga

SEQ ID NO: 145175 - DNA, 22 bp, synthetic construct
  misc_feature 1..22: note = chemically synthesized
  source 1..22: mol_type = other DNA
gaaggcttacttaatggaattt

SEQ ID NO: 145176 - DNA, 22 bp, synthetic construct
  misc_feature 1..22: note = chemically synthesized
  source 1..22: mol_type = other DNA
acttaatggaatttttgtatag

SEQ ID NO: 145177 - DNA, 22 bp, synthetic construct
  misc_feature 1..22: note = chemically synthesized
  source 1..22: mol_type = other DNA
cttaatggaatttttgtatagt

SEQ ID NO: 145178 - DNA, 22 bp, synthetic construct
  misc_feature 1..22: note = chemically synthesized
  source 1..22: mol_type = other DNA
aatggaatttttgtatagttgg

SEQ ID NO: 145179 - DNA, 22 bp, synthetic construct
  misc_feature 1..22: note = chemically synthesized
  source 1..22: mol_type = other DNA
atggaatttttgtatagttgga

SEQ ID NO: 145180 - DNA, 22 bp, synthetic construct
  misc_feature 1..22: note = chemically synthesized
  source 1..22: mol_type = other DNA
ttgtatagttggatgttagtgc

SEQ ID NO: 145181 - DNA, 22 bp, synthetic construct
  misc_feature 1..22: note = chemically synthesized
  source 1..22: mol_type = other DNA
tgtatagttggatgttagtgca

SEQ ID NO: 145182 - DNA, 22 bp, synthetic construct
  misc_feature 1..22: note = chemically synthesized
  source 1..22: mol_type = other DNA
gtatagttggatgttagtgcat

SEQ ID NO: 145183 - DNA, 22 bp, synthetic construct
  misc_feature 1..22: note = chemically synthesized
  source 1..22: mol_type = other DNA
tatagttggatgttagtgcatc

SEQ ID NO: 145184 - DNA, 22 bp, synthetic construct
  misc_feature 1..22: note = chemically synthesized
  source 1..22: mol_type = other DNA
gatgttagtgcatctctataag

SEQ ID NO: 145185 - DNA, 22 bp, synthetic construct
  misc_feature 1..22: note = chemically synthesized
  source 1..22: mol_type = other DNA
gtgcatctctataagtaagagt

SEQ ID NO: 145186 - DNA, 22 bp, synthetic construct
  misc_feature 1..22: note = chemically synthesized
  source 1..22: mol_type = other DNA
tataagtaagagtttaatatga

SEQ ID NO: 145187 - DNA, 22 bp, synthetic construct
  misc_feature 1..22: note = chemically synthesized
  source 1..22: mol_type = other DNA
taagtaagagtttaatatgatg

SEQ ID NO: 145188 - DNA, 22 bp, synthetic construct
  misc_feature 1..22: note = chemically synthesized
  source 1..22: mol_type = other DNA
aatatgatggtgttacggacct

SEQ ID NO: 145189 - DNA, 22 bp, synthetic construct
  misc_feature 1..22: note = chemically synthesized
  source 1..22: mol_type = other DNA
atatgatggtgttacggaccta

SEQ ID NO: 145190 - DNA, 22 bp, synthetic construct
  misc_feature 1..22: note = chemically synthesized
  source 1..22: mol_type = other DNA
cggacctaatgtttgtgtctcc

SEQ ID NO: 145191 - DNA, 22 bp, synthetic construct
  misc_feature 1..22: note = chemically synthesized
  source 1..22: mol_type = other DNA
atgtttgtgtctcctcaaaatt

SEQ ID NO: 145192 - DNA, 22 bp, synthetic construct
  misc_feature 1..22: note = chemically synthesized
  source 1..22: mol_type = other DNA
gtgtctcctcaaaattcacatg

SEQ ID NO: 145193 - DNA, 22 bp, synthetic construct
  misc_feature 1..22: note = chemically synthesized
  source 1..22: mol_type = other DNA
tgtctcctcaaaattcacatgc

SEQ ID NO: 145194 - DNA, 22 bp, synthetic construct
  misc_feature 1..22: note = chemically synthesized
  source 1..22: mol_type = other DNA
ctcaaaattcacatgctgaatc

SEQ ID NO: 145195 - DNA, 22 bp, synthetic construct
  misc_feature 1..22: note = chemically synthesized
  source 1..22: mol_type = other DNA
aaaattcacatgctgaatcccc

SEQ ID NO: 145196 - DNA, 22 bp, synthetic construct
  misc_feature 1..22: note = chemically synthesized
  source 1..22: mol_type = other DNA
acatgctgaatccccaactccc

SEQ ID NO: 145197 - DNA, 22 bp, synthetic construct
  misc_feature 1..22: note = chemically synthesized
  source 1..22: mol_type = other DNA
aatccccaactcccaactgacc

SEQ ID NO: 145198 - DNA, 22 bp, synthetic construct
  misc_feature 1..22: note = chemically synthesized
  source 1..22: mol_type = other DNA
ccaactgaccttatctgtgggg

SEQ ID NO: 145199 - DNA, 22 bp, synthetic construct
  misc_feature 1..22: note = chemically synthesized
  source 1..22: mol_type = other DNA
accttatctgtgggggaggctt

SEQ ID NO: 145200 - DNA, 22 bp, synthetic construct
  misc_feature 1..22: note = chemically synthesized
  source 1..22: mol_type = other DNA
atctgtgggggaggcttttgaa

SEQ ID NO: 145201 - DNA, 22 bp, synthetic construct
  misc_feature 1..22: note = chemically synthesized
  source 1..22: mol_type = other DNA
tctgtgggggaggcttttgaaa

SEQ ID NO: 145202 - DNA, 22 bp, synthetic construct
  misc_feature 1..22: note = chemically synthesized
  source 1..22: mol_type = other DNA
tgggggaggcttttgaaaagta

SEQ ID NO: 145203 - DNA, 22 bp, synthetic construct
  misc_feature 1..22: note = chemically synthesized
  source 1..22: mol_type = other DNA
ttgaaaagtaattaggtttaga

SEQ ID NO: 145204 - DNA, 22 bp, synthetic construct
  misc_feature 1..22: note = chemically synthesized
  source 1..22: mol_type = other DNA
tgaaaagtaattaggtttagat

SEQ ID NO: 145205 - DNA, 22 bp, synthetic construct
  misc_feature 1..22: note = chemically synthesized
  source 1..22: mol_type = other DNA
gaaaagtaattaggtttagatg

SEQ ID NO: 145206 - DNA, 22 bp, synthetic construct
  misc_feature 1..22: note = chemically synthesized
  source 1..22: mol_type = other DNA
aaaagtaattaggtttagatga

SEQ ID NO: 145207 - DNA, 22 bp, synthetic construct
  misc_feature 1..22: note = chemically synthesized
  source 1..22: mol_type = other DNA
ggtttagatgagctcataagag

SEQ ID NO: 145208 - DNA, 22 bp, synthetic construct
  misc_feature 1..22: note = chemically synthesized
  source 1..22: mol_type = other DNA
agatgagctcataagagcagat

SEQ ID NO: 145209 - DNA, 22 bp, synthetic construct
  misc_feature 1..22: note = chemically synthesized
  source 1..22: mol_type = other DNA
gatgagctcataagagcagatc

SEQ ID NO: 145210 - DNA, 22 bp, synthetic construct
  misc_feature 1..22: note = chemically synthesized
  source 1..22: mol_type = other DNA
ataagagcagatccccatcata

SEQ ID NO: 145211 - DNA, 22 bp, synthetic construct
  misc_feature 1..22: note = chemically synthesized
  source 1..22: mol_type = other DNA
ttttccttatcagaagcagaga

SEQ ID NO: 145212 - DNA, 22 bp, synthetic construct
  misc_feature 1..22: note = chemically synthesized
  source 1..22: mol_type = other DNA
tccttatcagaagcagagagac

SEQ ID NO: 145213 - DNA, 22 bp, synthetic construct
  misc_feature 1..22: note = chemically synthesized
  source 1..22: mol_type = other DNA
ccttatcagaagcagagagaca

SEQ ID NO: 145214 - DNA, 22 bp, synthetic construct
  misc_feature 1..22: note = chemically synthesized
  source 1..22: mol_type = other DNA
cttatcagaagcagagagacaa

SEQ ID NO: 145215 - DNA, 22 bp, synthetic construct
  misc_feature 1..22: note = chemically synthesized
  source 1..22: mol_type = other DNA
atcagaagcagagagacaagcc

SEQ ID NO: 145216 - DNA, 22 bp, synthetic construct
  misc_feature 1..22: note = chemically synthesized
  source 1..22: mol_type = other DNA
tcagaagcagagagacaagcca

SEQ ID NO: 145217 - DNA, 22 bp, synthetic construct
  misc_feature 1..22: note = chemically synthesized
  source 1..22: mol_type = other DNA
ctctttcctcccggtgaggaca

SEQ ID NO: 145218 - DNA, 22 bp, synthetic construct
  misc_feature 1..22: note = chemically synthesized
  source 1..22: mol_type = other DNA
tctttcctcccggtgaggacac

SEQ ID NO: 145219 - DNA, 22 bp, synthetic construct
  misc_feature 1..22: note = chemically synthesized
  source 1..22: mol_type = other DNA
tttcctcccggtgaggacacag

SEQ ID NO: 145220 - DNA, 22 bp, synthetic construct
  misc_feature 1..22: note = chemically synthesized
  source 1..22: mol_type = other DNA
tcctcccggtgaggacacagtg

SEQ ID NO: 145221 - DNA, 22 bp, synthetic construct
  misc_feature 1..22: note = chemically synthesized
  source 1..22: mol_type = other DNA
cctcccggtgaggacacagtga

SEQ ID NO: 145222 - DNA, 22 bp, synthetic construct
  misc_feature 1..22: note = chemically synthesized
  source 1..22: mol_type = other DNA
ctcccggtgaggacacagtgag

SEQ ID NO: 145223 - DNA, 22 bp, synthetic construct
  misc_feature 1..22: note = chemically synthesized
  source 1..22: mol_type = other DNA
ccggtgaggacacagtgagaag

SEQ ID NO: 145224 - DNA, 22 bp, synthetic construct
  misc_feature 1..22: note = chemically synthesized
  source 1..22: mol_type = other DNA
caatccaggaagagaaccctga

SEQ ID NO: 145225 - DNA, 22 bp, synthetic construct
  misc_feature 1..22: note = chemically synthesized
  source 1..22: mol_type = other DNA
accacgagtcagccttcagaaa

SEQ ID NO: 145226 - DNA, 22 bp, synthetic construct
  misc_feature 1..22: note = chemically synthesized
  source 1..22: mol_type = other DNA
cagaaatgtgagaaaaaactct

SEQ ID NO: 145227 - DNA, 22 bp, synthetic construct
  misc_feature 1..22: note = chemically synthesized
  source 1..22: mol_type = other DNA
agaaatgtgagaaaaaactctg

SEQ ID NO: 145228 - DNA, 22 bp, synthetic construct
  misc_feature 1..22: note = chemically synthesized
  source 1..22: mol_type = other DNA
tgttgttgaagccacccagtct

SEQ ID NO: 145229 - DNA, 22 bp, synthetic construct
  misc_feature 1..22: note = chemically synthesized
  source 1..22: mol_type = other DNA
ttgttgaagccacccagtcttt

SEQ ID NO: 145230 - DNA, 22 bp, synthetic construct
  misc_feature 1..22: note = chemically synthesized
  source 1..22: mol_type = other DNA
ttgaagccacccagtcttttgt

SEQ ID NO: 145231 - DNA, 22 bp, synthetic construct
  misc_feature 1..22: note = chemically synthesized
  source 1..22: mol_type = other DNA
aagccacccagtcttttgtatt

SEQ ID NO: 145232 - DNA, 22 bp, synthetic construct
  misc_feature 1..22: note = chemically synthesized
  source 1..22: mol_type = other DNA
ttgtattttgttatagcacctt

SEQ ID NO: 145233 - DNA, 22 bp, synthetic construct
  misc_feature 1..22: note = chemically synthesized
  source 1..22: mol_type = other DNA
tgtattttgttatagcaccttg

SEQ ID NO: 145234 - DNA, 22 bp, synthetic construct
  misc_feature 1..22: note = chemically synthesized
  source 1..22: mol_type = other DNA
gtattttgttatagcaccttgc

SEQ ID NO: 145235 - DNA, 22 bp, synthetic construct
  misc_feature 1..22: note = chemically synthesized
  source 1..22: mol_type = other DNA
tattttgttatagcaccttgca

SEQ ID NO: 145236 - DNA, 22 bp, synthetic construct
  misc_feature 1..22: note = chemically synthesized
  source 1..22: mol_type = other DNA
tgttatagcaccttgcactgag

SEQ ID NO: 145237 - DNA, 22 bp, synthetic construct
  misc_feature 1..22: note = chemically synthesized
  source 1..22: mol_type = other DNA
gttatagcaccttgcactgagt

SEQ ID NO: 145238 - DNA, 22 bp, synthetic construct
  misc_feature 1..22: note = chemically synthesized
  source 1..22: mol_type = other DNA
ttatagcaccttgcactgagta

SEQ ID NO: 145239 - DNA, 22 bp, synthetic construct
  misc_feature 1..22: note = chemically synthesized
  source 1..22: mol_type = other DNA
tagcaccttgcactgagtaagg

SEQ ID NO: 145240 - DNA, 22 bp, synthetic construct
  misc_feature 1..22: note = chemically synthesized
  source 1..22: mol_type = other DNA
gcactgagtaaggcagatgaag

SEQ ID NO: 145241 - DNA, 22 bp, synthetic construct
  misc_feature 1..22: note = chemically synthesized
  source 1..22: mol_type = other DNA
cactgagtaaggcagatgaaga

SEQ ID NO: 145242 - DNA, 22 bp, synthetic construct
  misc_feature 1..22: note = chemically synthesized
  source 1..22: mol_type = other DNA
agtaaggcagatgaagaaggag

SEQ ID NO: 145243 - DNA, 22 bp, synthetic construct
  misc_feature 1..22: note = chemically synthesized
  source 1..22: mol_type = other DNA
gggttttgagtggactacagac

SEQ ID NO: 145244 - DNA, 22 bp, synthetic construct
  misc_feature 1..22: note = chemically synthesized
  source 1..22: mol_type = other DNA
ggttttgagtggactacagacc

SEQ ID NO: 145245 - DNA, 22 bp, synthetic construct
  misc_feature 1..22: note = chemically synthesized
  source 1..22: mol_type = other DNA
tgagtggactacagaccatgtt

SEQ ID NO: 145246 - DNA, 22 bp, synthetic construct
  misc_feature 1..22: note = chemically synthesized
  source 1..22: mol_type = other DNA
gagtggactacagaccatgttt

SEQ ID NO: 145247 - DNA, 22 bp, synthetic construct
  misc_feature 1..22: note = chemically synthesized
  source 1..22: mol_type = other DNA
agtggactacagaccatgttta

SEQ ID NO: 145248 - DNA, 22 bp, synthetic construct
  misc_feature 1..22: note = chemically synthesized
  source 1..22: mol_type = other DNA
cagaccatgtttatctcaggtt

SEQ ID NO: 145249 - DNA, 22 bp, synthetic construct
  misc_feature 1..22: note = chemically synthesized
  source 1..22: mol_type = other DNA
atctcaggtttgcaaagctccc

SEQ ID NO: 145250 - DNA, 22 bp, synthetic construct
  misc_feature 1..22: note = chemically synthesized
  source 1..22: mol_type = other DNA
tctcaggtttgcaaagctcccc

SEQ ID NO: 145251 - DNA, 22 bp, synthetic construct
  misc_feature 1..22: note = chemically synthesized
  source 1..22: mol_type = other DNA
aggtttgcaaagctcccctcgt

SEQ ID NO: 145252 - DNA, 22 bp, synthetic construct
  misc_feature 1..22: note = chemically synthesized
  source 1..22: mol_type = other DNA
gcaaagctcccctcgtccccta

SEQ ID NO: 145253 - DNA, 22 bp, synthetic construct
  misc_feature 1..22: note = chemically synthesized
  source 1..22: mol_type = other DNA
caaagctcccctcgtcccctat

SEQ ID NO: 145254 - DNA, 22 bp, synthetic construct
  misc_feature 1..22: note = chemically synthesized
  source 1..22: mol_type = other DNA
ccctcgtcccctatgtttcagt

SEQ ID NO: 145255 - DNA, 22 bp, synthetic construct
  misc_feature 1..22: note = chemically synthesized
  source 1..22: mol_type = other DNA
gtcccctatgtttcagtataaa

SEQ ID NO: 145256 - DNA, 22 bp, synthetic construct
  misc_feature 1..22: note = chemically synthesized
  source 1..22: mol_type = other DNA
tgtttcagtataaaatacctac

SEQ ID NO: 145257 - DNA, 22 bp, synthetic construct
  misc_feature 1..22: note = chemically synthesized
  source 1..22: mol_type = other DNA
cagtataaaatacctactctac

SEQ ID NO: 145258 - DNA, 22 bp, synthetic construct
  misc_feature 1..22: note = chemically synthesized
  source 1..22: mol_type = other DNA
agtataaaatacctactctact

SEQ ID NO: 145259 - DNA, 22 bp, synthetic construct
  misc_feature 1..22: note = chemically synthesized
  source 1..22: mol_type = other DNA
ctctactactctcatctataag

SEQ ID NO: 145260 - DNA, 22 bp, synthetic construct
  misc_feature 1..22: note = chemically synthesized
  source 1..22: mol_type = other DNA
tactactctcatctataagacc

SEQ ID NO: 145261 - DNA, 22 bp, synthetic construct
  misc_feature 1..22: note = chemically synthesized
  source 1..22: mol_type = other DNA
ctactctcatctataagaccca

SEQ ID NO: 145262 - DNA, 22 bp, synthetic construct
  misc_feature 1..22: note = chemically synthesized
  source 1..22: mol_type = other DNA
ctctcatctataagacccaaat

SEQ ID NO: 145263 - DNA, 22 bp, synthetic construct
  misc_feature 1..22: note = chemically synthesized
  source 1..22: mol_type = other DNA
tcatctataagacccaaataat

SEQ ID NO: 145264 - DNA, 22 bp, synthetic construct
  misc_feature 1..22: note = chemically synthesized
  source 1..22: mol_type = other DNA
atctataagacccaaataataa

SEQ ID NO: 145265 - DNA, 22 bp, synthetic construct
  misc_feature 1..22: note = chemically synthesized
  source 1..22: mol_type = other DNA
taagacccaaataataagcctg

SEQ ID NO: 145266 - DNA, 22 bp, synthetic construct
  misc_feature 1..22: note = chemically synthesized
  source 1..22: mol_type = other DNA
cgcccttctctctaactttgat

SEQ ID NO: 145267 - DNA, 22 bp, synthetic construct
  misc_feature 1..22: note = chemically synthesized
  source 1..22: mol_type = other DNA
ctctctaactttgatttctcct

SEQ ID NO: 145268 - DNA, 22 bp, synthetic construct
  misc_feature 1..22: note = chemically synthesized
  source 1..22: mol_type = other DNA
tctctaactttgatttctccta

SEQ ID NO: 145269 - DNA, 22 bp, synthetic construct
  misc_feature 1..22: note = chemically synthesized
  source 1..22: mol_type = other DNA
tctaactttgatttctcctatt

SEQ ID NO: 145270 - DNA, 22 bp, synthetic construct
  misc_feature 1..22: note = chemically synthesized
  source 1..22: mol_type = other DNA
taactttgatttctcctatttt

SEQ ID NO: 145271 - DNA, 22 bp, synthetic construct
  misc_feature 1..22: note = chemically synthesized
  source 1..22: mol_type = other DNA
actttgatttctcctattttta

SEQ ID NO: 145272 - DNA, 22 bp, synthetic construct
  misc_feature 1..22: note = chemically synthesized
  source 1..22: mol_type = other DNA
tgatttctcctatttttacttc

SEQ ID NO: 145273 - DNA, 22 bp, synthetic construct
  misc_feature 1..22: note = chemically synthesized
  source 1..22: mol_type = other DNA
gatttctcctatttttacttca

SEQ ID NO: 145274 - DNA, 22 bp, synthetic construct
  misc_feature 1..22: note = chemically synthesized
  source 1..22: mol_type = other DNA
atttctcctatttttacttcaa

SEQ ID NO: 145275 - DNA, 22 bp, synthetic construct
  misc_feature 1..22: note = chemically synthesized
  source 1..22: mol_type = other DNA
ctcctatttttacttcaacatg

SEQ ID NO: 145276 - DNA, 22 bp, synthetic construct
  misc_feature 1..22: note = chemically synthesized
  source 1..22: mol_type = other DNA
tcctatttttacttcaacatgc

SEQ ID NO: 145277 - DNA, 22 bp, synthetic construct
  misc_feature 1..22: note = chemically synthesized
  source 1..22: mol_type = other DNA
ctatttttacttcaacatgctt

SEQ ID NO: 145278 - DNA, 22 bp, synthetic construct
  misc_feature 1..22: note = chemically synthesized
  source 1..22: mol_type = other DNA
tttttacttcaacatgctttac

SEQ ID NO: 145279 - DNA, 22 bp, synthetic construct
  misc_feature 1..22: note = chemically synthesized
  source 1..22: mol_type = other DNA
ttacttcaacatgctttactct

SEQ ID NO: 145280 - DNA, 22 bp, synthetic construct
  misc_feature 1..22: note = chemically synthesized
  source 1..22: mol_type = other DNA
tacttcaacatgctttactcta

SEQ ID NO: 145281 - DNA, 22 bp, synthetic construct
  misc_feature 1..22: note = chemically synthesized
  source 1..22: mol_type = other DNA
acttcaacatgctttactctag

SEQ ID NO: 145282 - DNA, 22 bp, synthetic construct
  misc_feature 1..22: note = chemically synthesized
  source 1..22: mol_type = other DNA
cttcaacatgctttactctagc

SEQ ID NO: 145283 - DNA, 22 bp, synthetic construct
  misc_feature 1..22: note = chemically synthesized
  source 1..22: mol_type = other DNA
caacatgctttactctagcctt

SEQ ID NO: 145284 - DNA, 22 bp, synthetic construct
  misc_feature 1..22: note = chemically synthesized
  source 1..22: mol_type = other DNA
aacatgctttactctagccttg

SEQ ID NO: 145285 - DNA, 22 bp, synthetic construct
  misc_feature 1..22: note = chemically synthesized
  source 1..22: mol_type = other DNA
tactctagccttgtaatgtctt

SEQ ID NO: 145286 - DNA, 22 bp, synthetic construct
  misc_feature 1..22: note = chemically synthesized
  source 1..22: mol_type = other DNA
actctagccttgtaatgtcttt

SEQ ID NO: 145287 - DNA, 22 bp, synthetic construct
  misc_feature 1..22: note = chemically synthesized
  source 1..22: mol_type = other DNA
ctctagccttgtaatgtcttta

SEQ ID NO: 145288 - DNA, 22 bp, synthetic construct
  misc_feature 1..22: note = chemically synthesized
  source 1..22: mol_type = other DNA
tagccttgtaatgtctttacat

SEQ ID NO: 145289 - DNA, 22 bp, synthetic construct
  misc_feature 1..22: note = chemically synthesized
  source 1..22: mol_type = other DNA
gccttgtaatgtctttacatac

SEQ ID NO: 145290 - DNA, 22 bp, synthetic construct
  misc_feature 1..22: note = chemically synthesized
  source 1..22: mol_type = other DNA
gtaatgtctttacatacagtga

SEQ ID NO: 145291 - DNA, 22 bp, synthetic construct
  misc_feature 1..22: note = chemically synthesized
  source 1..22: mol_type = other DNA
taatgtctttacatacagtgaa

SEQ ID NO: 145292 - DNA, 22 bp, synthetic construct
  misc_feature 1..22: note = chemically synthesized
  source 1..22: mol_type = other DNA
tacatacagtgaaatgtaaagt

SEQ ID NO: 145293 - DNA, 22 bp, synthetic construct
  misc_feature 1..22: note = chemically synthesized
  source 1..22: mol_type = other DNA
acatacagtgaaatgtaaagtt

SEQ ID NO: 145294 - DNA, 22 bp, synthetic construct
  misc_feature 1..22: note = chemically synthesized
  source 1..22: mol_type = other DNA
catacagtgaaatgtaaagttc

SEQ ID NO: 145295 - DNA, 22 bp, synthetic construct
  misc_feature 1..22: note = chemically synthesized
  source 1..22: mol_type = other DNA
tttattctttttttctttcttt

SEQ ID NO: 145296 - DNA, 22 bp, synthetic construct
  misc_feature 1..22: note = chemically synthesized
  source 1..22: mol_type = other DNA
tattctttttttctttctttct

SEQ ID NO: 145297 - DNA, 22 bp, synthetic construct
  misc_feature 1..22: note = chemically synthesized
  source 1..22: mol_type = other DNA
attctttttttctttctttctt

SEQ ID NO: 145298 - DNA, 22 bp, synthetic construct
  misc_feature 1..22: note = chemically synthesized
  source 1..22: mol_type = other DNA
ttctttttttctttctttcttt

SEQ ID NO: 145299 - DNA, 22 bp, synthetic construct
  misc_feature 1..22: note = chemically synthesized
  source 1..22: mol_type = other DNA
tttttttctttctttctttttt

SEQ ID NO: 145300 - DNA, 22 bp, synthetic construct
  misc_feature 1..22: note = chemically synthesized
  source 1..22: mol_type = other DNA
tttttctttctttcttttttct

SEQ ID NO: 145301 - DNA, 22 bp, synthetic construct
  misc_feature 1..22: note = chemically synthesized
  source 1..22: mol_type = other DNA
ttttctttctttcttttttctc

SEQ ID NO: 145302 - DNA, 22 bp, synthetic construct
  misc_feature 1..22: note = chemically synthesized
  source 1..22: mol_type = other DNA
tttctttctttcttttttctcc

SEQ ID NO: 145303 - DNA, 22 bp, synthetic construct
  misc_feature 1..22: note = chemically synthesized
  source 1..22: mol_type = other DNA
ttctttctttcttttttctcct

SEQ ID NO: 145304 - DNA, 22 bp, synthetic construct
  misc_feature 1..22: note = chemically synthesized
  source 1..22: mol_type = other DNA
tctttctttcttttttctcctc

SEQ ID NO: 145305 - DNA, 22 bp, synthetic construct
  misc_feature 1..22: note = chemically synthesized
  source 1..22: mol_type = other DNA
ctttctttcttttttctcctca

SEQ ID NO: 145306 - DNA, 22 bp, synthetic construct
  misc_feature 1..22: note = chemically synthesized
  source 1..22: mol_type = other DNA
tttctttcttttttctcctcag

SEQ ID NO: 145307 - DNA, 22 bp, synthetic construct
  misc_feature 1..22: note = chemically synthesized
  source 1..22: mol_type = other DNA
tctttcttttttctcctcagcc

SEQ ID NO: 145308 - DNA, 22 bp, synthetic construct
  misc_feature 1..22: note = chemically synthesized
  source 1..22: mol_type = other DNA
ctttcttttttctcctcagcct

SEQ ID NO: 145309 - DNA, 22 bp, synthetic construct
  misc_feature 1..22: note = chemically synthesized
  source 1..22: mol_type = other DNA
tttcttttttctcctcagcctc

SEQ ID NO: 145310 - DNA, 22 bp, synthetic construct
  misc_feature 1..22: note = chemically synthesized
  source 1..22: mol_type = other DNA
tcttttttctcctcagcctcag

SEQ ID NO: 145311 - DNA, 22 bp, synthetic construct
  misc_feature 1..22: note = chemically synthesized
  source 1..22: mol_type = other DNA
cttttttctcctcagcctcaga

SEQ ID NO: 145312 - DNA, 22 bp, synthetic construct
  misc_feature 1..22: note = chemically synthesized
  source 1..22: mol_type = other DNA
ttttttctcctcagcctcagaa

SEQ ID NO: 145313 - DNA, 22 bp, synthetic construct
  misc_feature 1..22: note = chemically synthesized
  source 1..22: mol_type = other DNA
ttttctcctcagcctcagaatt

SEQ ID NO: 145314 - DNA, 22 bp, synthetic construct
  misc_feature 1..22: note = chemically synthesized
  source 1..22: mol_type = other DNA
tttctcctcagcctcagaattt

SEQ ID NO: 145315 - DNA, 22 bp, synthetic construct
  misc_feature 1..22: note = chemically synthesized
  source 1..22: mol_type = other DNA
ttctcctcagcctcagaatttg

SEQ ID NO: 145316 - DNA, 22 bp, synthetic construct
  misc_feature 1..22: note = chemically synthesized
  source 1..22: mol_type = other DNA
tctcctcagcctcagaatttgg

SEQ ID NO: 145317 - DNA, 22 bp, synthetic construct
  misc_feature 1..22: note = chemically synthesized
  source 1..22: mol_type = other DNA
ctcctcagcctcagaatttggc

SEQ ID NO: 145318 - DNA, 22 bp, synthetic construct
  misc_feature 1..22: note = chemically synthesized
  source 1..22: mol_type = other DNA
tcctcagcctcagaatttggca

SEQ ID NO: 145319 - DNA, 22 bp, synthetic construct
  misc_feature 1..22: note = chemically synthesized
  source 1..22: mol_type = other DNA
ctcagcctcagaatttggcaca

SEQ ID NO: 145320 - DNA, 22 bp, synthetic construct
  misc_feature 1..22: note = chemically synthesized
  source 1..22: mol_type = other DNA
agcctcagaatttggcacatgc

SEQ ID NO: 145321 - DNA, 22 bp, synthetic construct
  misc_feature 1..22: note = chemically synthesized
  source 1..22: mol_type = other DNA
agaatttggcacatgcccttcc

SEQ ID NO: 145322 - DNA, 22 bp, synthetic construct
  misc_feature 1..22: note = chemically synthesized
  source 1..22: mol_type = other DNA
ggcacatgcccttccttctttc

SEQ ID NO: 145323 - DNA, 22 bp, synthetic construct
  misc_feature 1..22: note = chemically synthesized
  source 1..22: mol_type = other DNA
gcacatgcccttccttctttca

SEQ ID NO: 145324 - DNA, 22 bp, synthetic construct
  misc_feature 1..22: note = chemically synthesized
  source 1..22: mol_type = other DNA
ccttctttcaggaacttctcca

SEQ ID NO: 145325 - DNA, 22 bp, synthetic construct
  misc_feature 1..22: note = chemically synthesized
  source 1..22: mol_type = other DNA
cttctttcaggaacttctccaa

SEQ ID NO: 145326 - DNA, 22 bp, synthetic construct
  misc_feature 1..22: note = chemically synthesized
  source 1..22: mol_type = other DNA
ctttcaggaacttctccaacat

SEQ ID NO: 145327 - DNA, 22 bp, synthetic construct
  misc_feature 1..22: note = chemically synthesized
  source 1..22: mol_type = other DNA
tttcaggaacttctccaacatc

SEQ ID NO: 145328 - DNA, 22 bp, synthetic construct
  misc_feature 1..22: note = chemically synthesized
  source 1..22: mol_type = other DNA
tcaggaacttctccaacatctc

SEQ ID NO: 145329 - DNA, 22 bp, synthetic construct
  misc_feature 1..22: note = chemically synthesized
  source 1..22: mol_type = other DNA
caggaacttctccaacatctct

SEQ ID NO: 145330 - DNA, 22 bp, synthetic construct
  misc_feature 1..22: note = chemically synthesized
  source 1..22: mol_type = other DNA
aggaacttctccaacatctctg

SEQ ID NO: 145331 - DNA, 22 bp, synthetic construct
  misc_feature 1..22: note = chemically synthesized
  source 1..22: mol_type = other DNA
ctccaacatctctgcctggctc

SEQ ID NO: 145332 - DNA, 22 bp, synthetic construct
  misc_feature 1..22: note = chemically synthesized
  source 1..22: mol_type = other DNA
tccaacatctctgcctggctcc

SEQ ID NO: 145333 - DNA, 22 bp, synthetic construct
  misc_feature 1..22: note = chemically synthesized
  source 1..22: mol_type = other DNA
caacatctctgcctggctccat

SEQ ID NO: 145334 - DNA, 22 bp, synthetic construct
  misc_feature 1..22: note = chemically synthesized
  source 1..22: mol_type = other DNA
tgcctggctccatcatatcata

SEQ ID NO: 145335 - DNA, 22 bp, synthetic construct
  misc_feature 1..22: note = chemically synthesized
  source 1..22: mol_type = other DNA
cctggctccatcatatcataaa

SEQ ID NO: 145336 - DNA, 22 bp, synthetic construct
  misc_feature 1..22: note = chemically synthesized
  source 1..22: mol_type = other DNA
gctccatcatatcataaaggtc

SEQ ID NO: 145337 - DNA, 22 bp, synthetic construct
  misc_feature 1..22: note = chemically synthesized
  source 1..22: mol_type = other DNA
catcatatcataaaggtcccac

SEQ ID NO: 145338 - DNA, 22 bp, synthetic construct
  misc_feature 1..22: note = chemically synthesized
  source 1..22: mol_type = other DNA
caaatgcagtcactaccgtttc

SEQ ID NO: 145339 - DNA, 22 bp, synthetic construct
  misc_feature 1..22: note = chemically synthesized
  source 1..22: mol_type = other DNA
aaatgcagtcactaccgtttca

SEQ ID NO: 145340 - DNA, 22 bp, synthetic construct
  misc_feature 1..22: note = chemically synthesized
  source 1..22: mol_type = other DNA
ccgtttcagaatatgcactttc

SEQ ID NO: 145341 - DNA, 22 bp, synthetic construct
  misc_feature 1..22: note = chemically synthesized
  source 1..22: mol_type = other DNA
cagaatatgcactttctttctt

SEQ ID NO: 145342 - DNA, 22 bp, synthetic construct
  misc_feature 1..22: note = chemically synthesized
  source 1..22: mol_type = other DNA
agaatatgcactttctttcttt

SEQ ID NO: 145343 - DNA, 22 bp, synthetic construct
  misc_feature 1..22: note = chemically synthesized
  source 1..22: mol_type = other DNA
tctttcttttttgttttttgtt

SEQ ID NO: 145344 - DNA, 22 bp, synthetic construct
  misc_feature 1..22: note = chemically synthesized
  source 1..22: mol_type = other DNA
ctttcttttttgttttttgttt

SEQ ID NO: 145345 - DNA, 22 bp, synthetic construct
  misc_feature 1..22: note = chemically synthesized
  source 1..22: mol_type = other DNA
tttcttttttgttttttgtttt

SEQ ID NO: 145346 - DNA, 22 bp, synthetic construct
  misc_feature 1..22: note = chemically synthesized
  source 1..22: mol_type = other DNA
tcttttttgttttttgtttttt

SEQ ID NO: 145347 - DNA, 22 bp, synthetic construct
  misc_feature 1..22: note = chemically synthesized
  source 1..22: mol_type = other DNA
cttttttgttttttgttttttt

SEQ ID NO: 145348 - DNA, 22 bp, synthetic construct
  misc_feature 1..22: note = chemically synthesized
  source 1..22: mol_type = other DNA
ttttttgttttttgtttttttt

SEQ ID NO: 145349 - DNA, 22 bp, synthetic construct
  misc_feature 1..22: note = chemically synthesized
  source 1..22: mol_type = other DNA
ttttgttttttgttttttttaa

SEQ ID NO: 145350 - DNA, 22 bp, synthetic construct
  misc_feature 1..22: note = chemically synthesized
  source 1..22: mol_type = other DNA
tttgttttttgttttttttaag

SEQ ID NO: 145351 - DNA, 22 bp, synthetic construct
  misc_feature 1..22: note = chemically synthesized
  source 1..22: mol_type = other DNA
ttgttttttgttttttttaagt

SEQ ID NO: 145352 - DNA, 22 bp, synthetic construct
  misc_feature 1..22: note = chemically synthesized
  source 1..22: mol_type = other DNA
tgttttttgttttttttaagtc

SEQ ID NO: 145353 - DNA, 22 bp, synthetic construct
  misc_feature 1..22: note = chemically synthesized
  source 1..22: mol_type = other DNA
gttttttgttttttttaagtca

SEQ ID NO: 145354 - DNA, 22 bp, synthetic construct
  misc_feature 1..22: note = chemically synthesized
  source 1..22: mol_type = other DNA
ttttttgttttttttaagtcaa

SEQ ID NO: 145355 - DNA, 22 bp, synthetic construct
  misc_feature 1..22: note = chemically synthesized
  source 1..22: mol_type = other DNA
tttgttttttttaagtcaaagc

SEQ ID NO: 145356 - DNA, 22 bp, synthetic construct
  misc_feature 1..22: note = chemically synthesized
  source 1..22: mol_type = other DNA
ttgttttttttaagtcaaagca

SEQ ID NO: 145357 - DNA, 22 bp, synthetic construct
  misc_feature 1..22: note = chemically synthesized
  source 1..22: mol_type = other DNA
tgttttttttaagtcaaagcaa

SEQ ID NO: 145358 - DNA, 22 bp, synthetic construct
  misc_feature 1..22: note = chemically synthesized
  source 1..22: mol_type = other DNA
gttttttttaagtcaaagcaaa

SEQ ID NO: 145359 - DNA, 22 bp, synthetic construct
  misc_feature 1..22: note = chemically synthesized
  source 1..22: mol_type = other DNA
ttttttttaagtcaaagcaaat

SEQ ID NO: 145360 - DNA, 22 bp, synthetic construct
  misc_feature 1..22: note = chemically synthesized
  source 1..22: mol_type = other DNA
tttttaagtcaaagcaaatttc

SEQ ID NO: 145361 - DNA, 22 bp, synthetic construct
  misc_feature 1..22: note = chemically synthesized
  source 1..22: mol_type = other DNA
ttttaagtcaaagcaaatttct

SEQ ID NO: 145362 - DNA, 22 bp, synthetic construct
  misc_feature 1..22: note = chemically synthesized
  source 1..22: mol_type = other DNA
tttaagtcaaagcaaatttctt

SEQ ID NO: 145363 - DNA, 22 bp, synthetic construct
  misc_feature 1..22: note = chemically synthesized
  source 1..22: mol_type = other DNA
ttaagtcaaagcaaatttcttg

SEQ ID NO: 145364 - DNA, 22 bp, synthetic construct
  misc_feature 1..22: note = chemically synthesized
  source 1..22: mol_type = other DNA
taagtcaaagcaaatttcttga

SEQ ID NO: 145365 - DNA, 22 bp, synthetic construct
  misc_feature 1..22: note = chemically synthesized
  source 1..22: mol_type = other DNA
aagtcaaagcaaatttcttgag

SEQ ID NO: 145366 - DNA, 22 bp, synthetic construct
  misc_feature 1..22: note = chemically synthesized
  source 1..22: mol_type = other DNA
agtcaaagcaaatttcttgaga

SEQ ID NO: 145367 - DNA, 22 bp, synthetic construct
  misc_feature 1..22: note = chemically synthesized
  source 1..22: mol_type = other DNA
cttgagagagtaaagaaataaa

SEQ ID NO: 145368 - DNA, 22 bp, synthetic construct
  misc_feature 1..22: note = chemically synthesized
  source 1..22: mol_type = other DNA
ttgagagagtaaagaaataaac

SEQ ID NO: 145369 - DNA, 22 bp, synthetic construct
  misc_feature 1..22: note = chemically synthesized
  source 1..22: mol_type = other DNA
gagagagtaaagaaataaacga

SEQ ID NO: 145370 - DNA, 22 bp, synthetic construct
  misc_feature 1..22: note = chemically synthesized
  source 1..22: mol_type = other DNA
agagagtaaagaaataaacgaa

SEQ ID NO: 145371 - DNA, 22 bp, synthetic construct
  misc_feature 1..22: note = chemically synthesized
  source 1..22: mol_type = other DNA
ctgcataggcagagcagccccg

SEQ ID NO: 145372 - DNA, 22 bp, synthetic construct
  misc_feature 1..22: note = chemically synthesized
  source 1..22: mol_type = other DNA
cataggcagagcagccccgagg

SEQ ID NO: 145373 - DNA, 22 bp, synthetic construct
  misc_feature 1..22: note = chemically synthesized
  source 1..22: mol_type = other DNA
gttgttccttttatggttattt

SEQ ID NO: 145374 - DNA, 22 bp, synthetic construct
  misc_feature 1..22: note = chemically synthesized
  source 1..22: mol_type = other DNA
ttccttttatggttatttcttg

SEQ ID NO: 145375 - DNA, 22 bp, synthetic construct
  misc_feature 1..22: note = chemically synthesized
  source 1..22: mol_type = other DNA
cttttatggttatttcttgatg

SEQ ID NO: 145376 - DNA, 22 bp, synthetic construct
  misc_feature 1..22: note = chemically synthesized
  source 1..22: mol_type = other DNA
ttatggttatttcttgatgata

SEQ ID NO: 145377 - DNA, 22 bp, synthetic construct
  misc_feature 1..22: note = chemically synthesized
  source 1..22: mol_type = other DNA
tatggttatttcttgatgatat

SEQ ID NO: 145378 - DNA, 22 bp, synthetic construct
  misc_feature 1..22: note = chemically synthesized
  source 1..22: mol_type = other DNA
atggttatttcttgatgatatg

SEQ ID NO: 145379 - DNA, 22 bp, synthetic construct
  misc_feature 1..22: note = chemically synthesized
  source 1..22: mol_type = other DNA
tggttatttcttgatgatatgt

SEQ ID NO: 145380 - DNA, 22 bp, synthetic construct
  misc_feature 1..22: note = chemically synthesized
  source 1..22: mol_type = other DNA
tttcttgatgatatgttaaaca

SEQ ID NO: 145381 - DNA, 22 bp, synthetic construct
  misc_feature 1..22: note = chemically synthesized
  source 1..22: mol_type = other DNA
cttgatgatatgttaaacaagt

SEQ ID NO: 145382 - DNA, 22 bp, synthetic construct
  misc_feature 1..22: note = chemically synthesized
  source 1..22: mol_type = other DNA
ttgatgatatgttaaacaagtt

SEQ ID NO: 145383 - DNA, 22 bp, synthetic construct
  misc_feature 1..22: note = chemically synthesized
  source 1..22: mol_type = other DNA
gatgatatgttaaacaagtttt

SEQ ID NO: 145384 - DNA, 22 bp, synthetic construct
  misc_feature 1..22: note = chemically synthesized
  source 1..22: mol_type = other DNA
atgatatgttaaacaagttttg

SEQ ID NO: 145385 - DNA, 22 bp, synthetic construct
  misc_feature 1..22: note = chemically synthesized
  source 1..22: mol_type = other DNA
aacaagttttggattatttatg

SEQ ID NO: 145386 - DNA, 22 bp, synthetic construct
  misc_feature 1..22: note = chemically synthesized
  source 1..22: mol_type = other DNA
tggattatttatgccttctctt

SEQ ID NO: 145387 - DNA, 22 bp, synthetic construct
  misc_feature 1..22: note = chemically synthesized
  source 1..22: mol_type = other DNA
ggattatttatgccttctcttt

SEQ ID NO: 145388 - DNA, 22 bp, synthetic construct
  misc_feature 1..22: note = chemically synthesized
  source 1..22: mol_type = other DNA
gattatttatgccttctctttt

SEQ ID NO: 145389 - DNA, 22 bp, synthetic construct
  misc_feature 1..22: note = chemically synthesized
  source 1..22: mol_type = other DNA
tttatgccttctctttttaggc

SEQ ID NO: 145390 - DNA, 22 bp, synthetic construct
  misc_feature 1..22: note = chemically synthesized
  source 1..22: mol_type = other DNA
atgccttctctttttaggccat

SEQ ID NO: 145391 - DNA, 22 bp, synthetic construct
  misc_feature 1..22: note = chemically synthesized
  source 1..22: mol_type = other DNA
tgccttctctttttaggccata

SEQ ID NO: 145392 - DNA, 22 bp, synthetic construct
  misc_feature 1..22: note = chemically synthesized
  source 1..22: mol_type = other DNA
ctctttttaggccatatagggt

SEQ ID NO: 145393 - DNA, 22 bp, synthetic construct
  misc_feature 1..22: note = chemically synthesized
  source 1..22: mol_type = other DNA
tctttttaggccatatagggta

SEQ ID NO: 145394 - DNA, 22 bp, synthetic construct
  misc_feature 1..22: note = chemically synthesized
  source 1..22: mol_type = other DNA
tttttaggccatatagggtaac

SEQ ID NO: 145395 - DNA, 22 bp, synthetic construct
  misc_feature 1..22: note = chemically synthesized
  source 1..22: mol_type = other DNA
tttaggccatatagggtaactt

SEQ ID NO: 145396 - DNA, 22 bp, synthetic construct
  misc_feature 1..22: note = chemically synthesized
  source 1..22: mol_type = other DNA
ttaggccatatagggtaacttt

SEQ ID NO: 145397 - DNA, 22 bp, synthetic construct
  misc_feature 1..22: note = chemically synthesized
  source 1..22: mol_type = other DNA
taggccatatagggtaactttc

SEQ ID NO: 145398 - DNA, 22 bp, synthetic construct
  misc_feature 1..22: note = chemically synthesized
  source 1..22: mol_type = other DNA
aggccatatagggtaactttct

SEQ ID NO: 145399 - DNA, 22 bp, synthetic construct
  misc_feature 1..22: note = chemically synthesized
  source 1..22: mol_type = other DNA
ggccatatagggtaactttctg

SEQ ID NO: 145400 - DNA, 22 bp, synthetic construct
  misc_feature 1..22: note = chemically synthesized
  source 1..22: mol_type = other DNA
tctgacattgccatggcatttt

SEQ ID NO: 145401 - DNA, 22 bp, synthetic construct
  misc_feature 1..22: note = chemically synthesized
  source 1..22: mol_type = other DNA
ctgacattgccatggcattttt

SEQ ID NO: 145402 - DNA, 22 bp, synthetic construct
  misc_feature 1..22: note = chemically synthesized
  source 1..22: mol_type = other DNA
tgacattgccatggcatttttc

SEQ ID NO: 145403 - DNA, 22 bp, synthetic construct
  misc_feature 1..22: note = chemically synthesized
  source 1..22: mol_type = other DNA
acattgccatggcatttttctt

SEQ ID NO: 145404 - DNA, 22 bp, synthetic construct
  misc_feature 1..22: note = chemically synthesized
  source 1..22: mol_type = other DNA
ccatggcatttttcttttaatt

SEQ ID NO: 145405 - DNA, 22 bp, synthetic construct
  misc_feature 1..22: note = chemically synthesized
  source 1..22: mol_type = other DNA
ttcttttaatttaatttactgt

SEQ ID NO: 145406 - DNA, 22 bp, synthetic construct
  misc_feature 1..22: note = chemically synthesized
  source 1..22: mol_type = other DNA
tcttttaatttaatttactgtt

SEQ ID NO: 145407 - DNA, 22 bp, synthetic construct
  misc_feature 1..22: note = chemically synthesized
  source 1..22: mol_type = other DNA
cttttaatttaatttactgtta

SEQ ID NO: 145408 - DNA, 22 bp, synthetic construct
  misc_feature 1..22: note = chemically synthesized
  source 1..22: mol_type = other DNA
ttttaatttaatttactgttac

SEQ ID NO: 145409 - DNA, 22 bp, synthetic construct
  misc_feature 1..22: note = chemically synthesized
  source 1..22: mol_type = other DNA
ttaatttaatttactgttacct

SEQ ID NO: 145410 - DNA, 22 bp, synthetic construct
  misc_feature 1..22: note = chemically synthesized
  source 1..22: mol_type = other DNA
taatttaatttactgttacctt

SEQ ID NO: 145411 - DNA, 22 bp, synthetic construct
  misc_feature 1..22: note = chemically synthesized
  source 1..22: mol_type = other DNA
aatttaatttactgttacctta

SEQ ID NO: 145412 - DNA, 22 bp, synthetic construct
  misc_feature 1..22: note = chemically synthesized
  source 1..22: mol_type = other DNA
atttaatttactgttaccttaa

SEQ ID NO: 145413 - DNA, 22 bp, synthetic construct
  misc_feature 1..22: note = chemically synthesized
  source 1..22: mol_type = other DNA
aatttactgttaccttaaattc

SEQ ID NO: 145414 - DNA, 22 bp, synthetic construct
  misc_feature 1..22: note = chemically synthesized
  source 1..22: mol_type = other DNA
atttactgttaccttaaattca

SEQ ID NO: 145415 - DNA, 22 bp, synthetic construct
  misc_feature 1..22: note = chemically synthesized
  source 1..22: mol_type = other DNA
actgttaccttaaattcagggg

SEQ ID NO: 145416 - DNA, 22 bp, synthetic construct
  misc_feature 1..22: note = chemically synthesized
  source 1..22: mol_type = other DNA
ctgttaccttaaattcaggggt

SEQ ID NO: 145417 - DNA, 22 bp, synthetic construct
  misc_feature 1..22: note = chemically synthesized
  source 1..22: mol_type = other DNA
ttaccttaaattcaggggtaca

SEQ ID NO: 145418 - DNA, 22 bp, synthetic construct
  misc_feature 1..22: note = chemically synthesized
  source 1..22: mol_type = other DNA
ccttaaattcaggggtacacgt

SEQ ID NO: 145419 - DNA, 22 bp, synthetic construct
  misc_feature 1..22: note = chemically synthesized
  source 1..22: mol_type = other DNA
aaattcaggggtacacgtacag

SEQ ID NO: 145420 - DNA, 22 bp, synthetic construct
  misc_feature 1..22: note = chemically synthesized
  source 1..22: mol_type = other DNA
aattcaggggtacacgtacagg

SEQ ID NO: 145421 - DNA, 22 bp, synthetic construct
  misc_feature 1..22: note = chemically synthesized
  source 1..22: mol_type = other DNA
aggggtacacgtacaggatatg

SEQ ID NO: 145422 - DNA, 22 bp, synthetic construct
  misc_feature 1..22: note = chemically synthesized
  source 1..22: mol_type = other DNA
gttttataggtaaaagtgtgcc

SEQ ID NO: 145423 - DNA, 22 bp, synthetic construct
  misc_feature 1..22: note = chemically synthesized
  source 1..22: mol_type = other DNA
ttttataggtaaaagtgtgcca

SEQ ID NO: 145424 - DNA, 22 bp, synthetic construct
  misc_feature 1..22: note = chemically synthesized
  source 1..22: mol_type = other DNA
tataggtaaaagtgtgccatgg

SEQ ID NO: 145425 - DNA, 22 bp, synthetic construct
  misc_feature 1..22: note = chemically synthesized
  source 1..22: mol_type = other DNA
ataggtaaaagtgtgccatggt

SEQ ID NO: 145426 - DNA, 22 bp, synthetic construct
  misc_feature 1..22: note = chemically synthesized
  source 1..22: mol_type = other DNA
taggtaaaagtgtgccatggtt

SEQ ID NO: 145427 - DNA, 22 bp, synthetic construct
  misc_feature 1..22: note = chemically synthesized
  source 1..22: mol_type = other DNA
taatgggttttttttttcttgt

SEQ ID NO: 145428 - DNA, 22 bp, synthetic construct
  misc_feature 1..22: note = chemically synthesized
  source 1..22: mol_type = other DNA
aatgggttttttttttcttgta

SEQ ID NO: 145429 - DNA, 22 bp, synthetic construct
  misc_feature 1..22: note = chemically synthesized
  source 1..22: mol_type = other DNA
atgggttttttttttcttgtaa

SEQ ID NO: 145430 - DNA, 22 bp, synthetic construct
  misc_feature 1..22: note = chemically synthesized
  source 1..22: mol_type = other DNA
tttttttcttgtaaagttgttt

SEQ ID NO: 145431 - DNA, 22 bp, synthetic construct
  misc_feature 1..22: note = chemically synthesized
  source 1..22: mol_type = other DNA
ttttttcttgtaaagttgttta

SEQ ID NO: 145432 - DNA, 22 bp, synthetic construct
  misc_feature 1..22: note = chemically synthesized
  source 1..22: mol_type = other DNA
tttttcttgtaaagttgtttaa

SEQ ID NO: 145433 - DNA, 22 bp, synthetic construct
  misc_feature 1..22: note = chemically synthesized
  source 1..22: mol_type = other DNA
ttttcttgtaaagttgtttaag

SEQ ID NO: 145434 - DNA, 22 bp, synthetic construct
  misc_feature 1..22: note = chemically synthesized
  source 1..22: mol_type = other DNA
tttcttgtaaagttgtttaagt

SEQ ID NO: 145435 - DNA, 22 bp, synthetic construct
  misc_feature 1..22: note = chemically synthesized
  source 1..22: mol_type = other DNA
ttcttgtaaagttgtttaagtt

SEQ ID NO: 145436 - DNA, 22 bp, synthetic construct
  misc_feature 1..22: note = chemically synthesized
  source 1..22: mol_type = other DNA
tcttgtaaagttgtttaagttt

SEQ ID NO: 145437 - DNA, 22 bp, synthetic construct
  misc_feature 1..22: note = chemically synthesized
  source 1..22: mol_type = other DNA
cttgtaaagttgtttaagtttc

SEQ ID NO: 145438 - DNA, 22 bp, synthetic construct
  misc_feature 1..22: note = chemically synthesized
  source 1..22: mol_type = other DNA
ttgtaaagttgtttaagtttct

SEQ ID NO: 145439 - DNA, 22 bp, synthetic construct
  misc_feature 1..22: note = chemically synthesized
  source 1..22: mol_type = other DNA
gtaaagttgtttaagtttcttg

SEQ ID NO: 145440 - DNA, 22 bp, synthetic construct
  misc_feature 1..22: note = chemically synthesized
  source 1..22: mol_type = other DNA
taaagttgtttaagtttcttgt

SEQ ID NO: 145441 - DNA, 22 bp, synthetic construct
  misc_feature 1..22: note = chemically synthesized
  source 1..22: mol_type = other DNA
tttaagtttcttgtttactctg

SEQ ID NO: 145442 - DNA, 22 bp, synthetic construct
  misc_feature 1..22: note = chemically synthesized
  source 1..22: mol_type = other DNA
aagtttcttgtttactctggat

SEQ ID NO: 145443 - DNA, 22 bp, synthetic construct
  misc_feature 1..22: note = chemically synthesized
  source 1..22: mol_type = other DNA
agtttcttgtttactctggata

SEQ ID NO: 145444 - DNA, 22 bp, synthetic construct
  misc_feature 1..22: note = chemically synthesized
  source 1..22: mol_type = other DNA
cttgtttactctggatattagg

SEQ ID NO: 145445 - DNA, 22 bp, synthetic construct
  misc_feature 1..22: note = chemically synthesized
  source 1..22: mol_type = other DNA
ttgtttactctggatattaggc

SEQ ID NO: 145446 - DNA, 22 bp, synthetic construct
  misc_feature 1..22: note = chemically synthesized
  source 1..22: mol_type = other DNA
gtttactctggatattaggcct

SEQ ID NO: 145447 - DNA, 22 bp, synthetic construct
  misc_feature 1..22: note = chemically synthesized
  source 1..22: mol_type = other DNA
tttactctggatattaggcctt

SEQ ID NO: 145448 - DNA, 22 bp, synthetic construct
  misc_feature 1..22: note = chemically synthesized
  source 1..22: mol_type = other DNA
actctggatattaggcctttgt

SEQ ID NO: 145449 - DNA, 22 bp, synthetic construct
  misc_feature 1..22: note = chemically synthesized
  source 1..22: mol_type = other DNA
ctctggatattaggcctttgtc

SEQ ID NO: 145450 - DNA, 22 bp, synthetic construct
  misc_feature 1..22: note = chemically synthesized
  source 1..22: mol_type = other DNA
tggatattaggcctttgtcaga

SEQ ID NO: 145451 - DNA, 22 bp, synthetic construct
  misc_feature 1..22: note = chemically synthesized
  source 1..22: mol_type = other DNA
gatattaggcctttgtcagaag

SEQ ID NO: 145452 - DNA, 22 bp, synthetic construct
  misc_feature 1..22: note = chemically synthesized
  source 1..22: mol_type = other DNA
ggcctttgtcagaagaatagat

SEQ ID NO: 145453 - DNA, 22 bp, synthetic construct
  misc_feature 1..22: note = chemically synthesized
  source 1..22: mol_type = other DNA
tgtcagaagaatagattggaaa

SEQ ID NO: 145454 - DNA, 22 bp, synthetic construct
  misc_feature 1..22: note = chemically synthesized
  source 1..22: mol_type = other DNA
gtcagaagaatagattggaaaa

SEQ ID NO: 145455 - DNA, 22 bp, synthetic construct
  misc_feature 1..22: note = chemically synthesized
  source 1..22: mol_type = other DNA
tcagaagaatagattggaaaat

SEQ ID NO: 145456 - DNA, 22 bp, synthetic construct
  misc_feature 1..22: note = chemically synthesized
  source 1..22: mol_type = other DNA
gaaaatctttttcccattctgt

SEQ ID NO: 145457 - DNA, 22 bp, synthetic construct
  misc_feature 1..22: note = chemically synthesized
  source 1..22: mol_type = other DNA
tttcccattctgtagattgtct

SEQ ID NO: 145458 - DNA, 22 bp, synthetic construct
  misc_feature 1..22: note = chemically synthesized
  source 1..22: mol_type = other DNA
ttcccattctgtagattgtctt

SEQ ID NO: 145459 - DNA, 22 bp, synthetic construct
  misc_feature 1..22: note = chemically synthesized
  source 1..22: mol_type = other DNA
tcccattctgtagattgtcttt

SEQ ID NO: 145460 - DNA, 22 bp, synthetic construct
  misc_feature 1..22: note = chemically synthesized
  source 1..22: mol_type = other DNA
cccattctgtagattgtctttc

SEQ ID NO: 145461 - DNA, 22 bp, synthetic construct
  misc_feature 1..22: note = chemically synthesized
  source 1..22: mol_type = other DNA
ccattctgtagattgtctttcg

SEQ ID NO: 145462 - DNA, 22 bp, synthetic construct
  misc_feature 1..22: note = chemically synthesized
  source 1..22: mol_type = other DNA
tgtagattgtctttcgctctga

SEQ ID NO: 145463 - DNA, 22 bp, synthetic construct
  misc_feature 1..22: note = chemically synthesized
  source 1..22: mol_type = other DNA
tagattgtctttcgctctgatg

SEQ ID NO: 145464 - DNA, 22 bp, synthetic construct
  misc_feature 1..22: note = chemically synthesized
  source 1..22: mol_type = other DNA
tctttcgctctgatggtagttt

SEQ ID NO: 145465 - DNA, 22 bp, synthetic construct
  misc_feature 1..22: note = chemically synthesized
  source 1..22: mol_type = other DNA
tcgctctgatggtagtttcttt

SEQ ID NO: 145466 - DNA, 22 bp, synthetic construct
  misc_feature 1..22: note = chemically synthesized
  source 1..22: mol_type = other DNA
cgctctgatggtagtttctttt

SEQ ID NO: 145467 - DNA, 22 bp, synthetic construct
  misc_feature 1..22: note = chemically synthesized
  source 1..22: mol_type = other DNA
gctctgatggtagtttcttttg

SEQ ID NO: 145468 - DNA, 22 bp, synthetic construct
  misc_feature 1..22: note = chemically synthesized
  source 1..22: mol_type = other DNA
tgatggtagtttcttttgctga

SEQ ID NO: 145469 - DNA, 22 bp, synthetic construct
  misc_feature 1..22: note = chemically synthesized
  source 1..22: mol_type = other DNA
atggtagtttcttttgctgagc

SEQ ID NO: 145470 - DNA, 22 bp, synthetic construct
  misc_feature 1..22: note = chemically synthesized
  source 1..22: mol_type = other DNA
cttttgctgagcaggagctctt

SEQ ID NO: 145471 - DNA, 22 bp, synthetic construct
  misc_feature 1..22: note = chemically synthesized
  source 1..22: mol_type = other DNA
ttttgctgagcaggagctcttt

SEQ ID NO: 145472 - DNA, 22 bp, synthetic construct
  misc_feature 1..22: note = chemically synthesized
  source 1..22: mol_type = other DNA
ttgctgagcaggagctctttag

SEQ ID NO: 145473 - DNA, 22 bp, synthetic construct
  misc_feature 1..22: note = chemically synthesized
  source 1..22: mol_type = other DNA
tgctgagcaggagctctttagt

SEQ ID NO: 145474 - DNA, 22 bp, synthetic construct
  misc_feature 1..22: note = chemically synthesized
  source 1..22: mol_type = other DNA
gctgagcaggagctctttagtt

SEQ ID NO: 145475 - DNA, 22 bp, synthetic construct
  misc_feature 1..22: note = chemically synthesized
  source 1..22: mol_type = other DNA
ctgagcaggagctctttagttt

SEQ ID NO: 145476 - DNA, 22 bp, synthetic construct
  misc_feature 1..22: note = chemically synthesized
  source 1..22: mol_type = other DNA
agcaggagctctttagtttaat

SEQ ID NO: 145477 - DNA, 22 bp, synthetic construct
  misc_feature 1..22: note = chemically synthesized
  source 1..22: mol_type = other DNA
tttagtttaattagattccatt

SEQ ID NO: 145478 - DNA, 22 bp, synthetic construct
  misc_feature 1..22: note = chemically synthesized
  source 1..22: mol_type = other DNA
tagtttaattagattccattgg

SEQ ID NO: 145479 - DNA, 22 bp, synthetic construct
  misc_feature 1..22: note = chemically synthesized
  source 1..22: mol_type = other DNA
agtttaattagattccattggt

SEQ ID NO: 145480 - DNA, 22 bp, synthetic construct
  misc_feature 1..22: note = chemically synthesized
  source 1..22: mol_type = other DNA
gtttaattagattccattggtc

SEQ ID NO: 145481 - DNA, 22 bp, synthetic construct
  misc_feature 1..22: note = chemically synthesized
  source 1..22: mol_type = other DNA
aattagattccattggtcaatt

SEQ ID NO: 145482 - DNA, 22 bp, synthetic construct
  misc_feature 1..22: note = chemically synthesized
  source 1..22: mol_type = other DNA
attagattccattggtcaattt

SEQ ID NO: 145483 - DNA, 22 bp, synthetic construct
  misc_feature 1..22: note = chemically synthesized
  source 1..22: mol_type = other DNA
gattccattggtcaatttttgc

SEQ ID NO: 145484 - DNA, 22 bp, synthetic construct
  misc_feature 1..22: note = chemically synthesized
  source 1..22: mol_type = other DNA
cattggtcaatttttgcttttg

SEQ ID NO: 145485 - DNA, 22 bp, synthetic construct
  misc_feature 1..22: note = chemically synthesized
  source 1..22: mol_type = other DNA
gtcaatttttgcttttgctgca

SEQ ID NO: 145486 - DNA, 22 bp, synthetic construct
  misc_feature 1..22: note = chemically synthesized
  source 1..22: mol_type = other DNA
ttgcttttgctgcaattgcttt

SEQ ID NO: 145487 - DNA, 22 bp, synthetic construct
  misc_feature 1..22: note = chemically synthesized
  source 1..22: mol_type = other DNA
tgcttttgctgcaattgctttt

SEQ ID NO: 145488 - DNA, 22 bp, synthetic construct
  misc_feature 1..22: note = chemically synthesized
  source 1..22: mol_type = other DNA
gcttttgctgcaattgcttttc

SEQ ID NO: 145489 - DNA, 22 bp, synthetic construct
  misc_feature 1..22: note = chemically synthesized
  source 1..22: mol_type = other DNA
cttttgctgcaattgcttttca

SEQ ID NO: 145490 - DNA, 22 bp, synthetic construct
  misc_feature 1..22: note = chemically synthesized
  source 1..22: mol_type = other DNA
ttgctgcaattgcttttcacgc

SEQ ID NO: 145491 - DNA, 22 bp, synthetic construct
  misc_feature 1..22: note = chemically synthesized
  source 1..22: mol_type = other DNA
tgctgcaattgcttttcacgct

SEQ ID NO: 145492 - DNA, 22 bp, synthetic construct
  misc_feature 1..22: note = chemically synthesized
  source 1..22: mol_type = other DNA
gctgcaattgcttttcacgctt

SEQ ID NO: 145493 - DNA, 22 bp, synthetic construct
  misc_feature 1..22: note = chemically synthesized
  source 1..22: mol_type = other DNA
ctgcaattgcttttcacgcttt

SEQ ID NO: 145494 - DNA, 22 bp, synthetic construct
  misc_feature 1..22: note = chemically synthesized
  source 1..22: mol_type = other DNA
caattgcttttcacgctttcat

SEQ ID NO: 145495 - DNA, 22 bp, synthetic construct
  misc_feature 1..22: note = chemically synthesized
  source 1..22: mol_type = other DNA
cttttcacgctttcatcatgaa

SEQ ID NO: 145496 - DNA, 22 bp, synthetic construct
  misc_feature 1..22: note = chemically synthesized
  source 1..22: mol_type = other DNA
ttcacgctttcatcatgaaatc

SEQ ID NO: 145497 - DNA, 22 bp, synthetic construct
  misc_feature 1..22: note = chemically synthesized
  source 1..22: mol_type = other DNA
tcacgctttcatcatgaaatct

SEQ ID NO: 145498 - DNA, 22 bp, synthetic construct
  misc_feature 1..22: note = chemically synthesized
  source 1..22: mol_type = other DNA
cacgctttcatcatgaaatctg

SEQ ID NO: 145499 - DNA, 22 bp, synthetic construct
  misc_feature 1..22: note = chemically synthesized
  source 1..22: mol_type = other DNA
acgctttcatcatgaaatctgt

SEQ ID NO: 145500 - DNA, 22 bp, synthetic construct
  misc_feature 1..22: note = chemically synthesized
  source 1..22: mol_type = other DNA
tcatcatgaaatctgtgcccgt

SEQ ID NO: 145501 - DNA, 22 bp, synthetic construct
  misc_feature 1..22: note = chemically synthesized
  source 1..22: mol_type = other DNA
catcatgaaatctgtgcccgtg

SEQ ID NO: 145502 - DNA, 22 bp, synthetic construct
  misc_feature 1..22: note = chemically synthesized
  source 1..22: mol_type = other DNA
atcatgaaatctgtgcccgtgt

SEQ ID NO: 145503 - DNA, 22 bp, synthetic construct
  misc_feature 1..22: note = chemically synthesized
  source 1..22: mol_type = other DNA
tgcccgtgtttatatcatgaat

SEQ ID NO: 145504 - DNA, 22 bp, synthetic construct
  misc_feature 1..22: note = chemically synthesized
  source 1..22: mol_type = other DNA
atatcatgaatagtattgcctt

SEQ ID NO: 145505 - DNA, 22 bp, synthetic construct
  misc_feature 1..22: note = chemically synthesized
  source 1..22: mol_type = other DNA
tatcatgaatagtattgccttg

SEQ ID NO: 145506 - DNA, 22 bp, synthetic construct
  misc_feature 1..22: note = chemically synthesized
  source 1..22: mol_type = other DNA
ccttgatttttttctaggcttt

SEQ ID NO: 145507 - DNA, 22 bp, synthetic construct
  misc_feature 1..22: note = chemically synthesized
  source 1..22: mol_type = other DNA
gatttttttctaggctttttat

SEQ ID NO: 145508 - DNA, 22 bp, synthetic construct
  misc_feature 1..22: note = chemically synthesized
  source 1..22: mol_type = other DNA
atttttttctaggctttttata

SEQ ID NO: 145509 - DNA, 22 bp, synthetic construct
  misc_feature 1..22: note = chemically synthesized
  source 1..22: mol_type = other DNA
ttttctaggctttttatagttt

SEQ ID NO: 145510 - DNA, 22 bp, synthetic construct
  misc_feature 1..22: note = chemically synthesized
  source 1..22: mol_type = other DNA
tttctaggctttttatagtttg

SEQ ID NO: 145511 - DNA, 22 bp, synthetic construct
  misc_feature 1..22: note = chemically synthesized
  source 1..22: mol_type = other DNA
ttctaggctttttatagtttgg

SEQ ID NO: 145512 - DNA, 22 bp, synthetic construct
  misc_feature 1..22: note = chemically synthesized
  source 1..22: mol_type = other DNA
tctaggctttttatagtttggg

SEQ ID NO: 145513 - DNA, 22 bp, synthetic construct
  misc_feature 1..22: note = chemically synthesized
  source 1..22: mol_type = other DNA
ctaggctttttatagtttgggg

SEQ ID NO: 145514 - DNA, 22 bp, synthetic construct
  misc_feature 1..22: note = chemically synthesized
  source 1..22: mol_type = other DNA
taggctttttatagtttggggt

SEQ ID NO: 145515 - DNA, 22 bp, synthetic construct
  misc_feature 1..22: note = chemically synthesized
  source 1..22: mol_type = other DNA
ggctttttatagtttggggttt

SEQ ID NO: 145516 - DNA, 22 bp, synthetic construct
  misc_feature 1..22: note = chemically synthesized
  source 1..22: mol_type = other DNA
tttatagtttggggtttttcat

SEQ ID NO: 145517 - DNA, 22 bp, synthetic construct
  misc_feature 1..22: note = chemically synthesized
  source 1..22: mol_type = other DNA
ttatagtttggggtttttcatt

SEQ ID NO: 145518 - DNA, 22 bp, synthetic construct
  misc_feature 1..22: note = chemically synthesized
  source 1..22: mol_type = other DNA
tatagtttggggtttttcattt

SEQ ID NO: 145519 - DNA, 22 bp, synthetic construct
  misc_feature 1..22: note = chemically synthesized
  source 1..22: mol_type = other DNA
atagtttggggtttttcattta

SEQ ID NO: 145520 - DNA, 22 bp, synthetic construct
  misc_feature 1..22: note = chemically synthesized
  source 1..22: mol_type = other DNA
tagtttggggtttttcatttaa

SEQ ID NO: 145521 - DNA, 22 bp, synthetic construct
  misc_feature 1..22: note = chemically synthesized
  source 1..22: mol_type = other DNA
ggggtttttcatttaagtctct

SEQ ID NO: 145522 - DNA, 22 bp, synthetic construct
  misc_feature 1..22: note = chemically synthesized
  source 1..22: mol_type = other DNA
gggtttttcatttaagtctcta

SEQ ID NO: 145523 - DNA, 22 bp, synthetic construct
  misc_feature 1..22: note = chemically synthesized
  source 1..22: mol_type = other DNA
ttcatttaagtctctaatccat

SEQ ID NO: 145524 - DNA, 22 bp, synthetic construct
  misc_feature 1..22: note = chemically synthesized
  source 1..22: mol_type = other DNA
tcatttaagtctctaatccatc

SEQ ID NO: 145525 - DNA, 22 bp, synthetic construct
  misc_feature 1..22: note = chemically synthesized
  source 1..22: mol_type = other DNA
catttaagtctctaatccatct

SEQ ID NO: 145526 - DNA, 22 bp, synthetic construct
  misc_feature 1..22: note = chemically synthesized
  source 1..22: mol_type = other DNA
atttaagtctctaatccatctg

SEQ ID NO: 145527 - DNA, 22 bp, synthetic construct
  misc_feature 1..22: note = chemically synthesized
  source 1..22: mol_type = other DNA
aagtctctaatccatctggagt

SEQ ID NO: 145528 - DNA, 22 bp, synthetic construct
  misc_feature 1..22: note = chemically synthesized
  source 1..22: mol_type = other DNA
agtctctaatccatctggagtt

SEQ ID NO: 145529 - DNA, 22 bp, synthetic construct
  misc_feature 1..22: note = chemically synthesized
  source 1..22: mol_type = other DNA
taatccatctggagttaatttt

SEQ ID NO: 145530 - DNA, 22 bp, synthetic construct
  misc_feature 1..22: note = chemically synthesized
  source 1..22: mol_type = other DNA
atccatctggagttaattttgg

SEQ ID NO: 145531 - DNA, 22 bp, synthetic construct
  misc_feature 1..22: note = chemically synthesized
  source 1..22: mol_type = other DNA
gagttaattttggataaggtat

SEQ ID NO: 145532 - DNA, 22 bp, synthetic construct
  misc_feature 1..22: note = chemically synthesized
  source 1..22: mol_type = other DNA
attttggataaggtataaggaa

SEQ ID NO: 145533 - DNA, 22 bp, synthetic construct
  misc_feature 1..22: note = chemically synthesized
  source 1..22: mol_type = other DNA
tggataaggtataaggaaggag

SEQ ID NO: 145534 - DNA, 22 bp, synthetic construct
  misc_feature 1..22: note = chemically synthesized
  source 1..22: mol_type = other DNA
ggataaggtataaggaaggagt

SEQ ID NO: 145535 - DNA, 22 bp, synthetic construct
  misc_feature 1..22: note = chemically synthesized
  source 1..22: mol_type = other DNA
gataaggtataaggaaggagtc

SEQ ID NO: 145536 - DNA, 22 bp, synthetic construct
  misc_feature 1..22: note = chemically synthesized
  source 1..22: mol_type = other DNA
catttttcagcatatggctagc

SEQ ID NO: 145537 - DNA, 22 bp, synthetic construct
  misc_feature 1..22: note = chemically synthesized
  source 1..22: mol_type = other DNA
atttttcagcatatggctagcc

SEQ ID NO: 145538 - DNA, 22 bp, synthetic construct
  misc_feature 1..22: note = chemically synthesized
  source 1..22: mol_type = other DNA
ttcagcatatggctagccagtt

SEQ ID NO: 145539 - DNA, 22 bp, synthetic construct
  misc_feature 1..22: note = chemically synthesized
  source 1..22: mol_type = other DNA
tcagcatatggctagccagttc

SEQ ID NO: 145540 - DNA, 22 bp, synthetic construct
  misc_feature 1..22: note = chemically synthesized
  source 1..22: mol_type = other DNA
cagcatatggctagccagttct

SEQ ID NO: 145541 - DNA, 22 bp, synthetic construct
  misc_feature 1..22: note = chemically synthesized
  source 1..22: mol_type = other DNA
agcatatggctagccagttctc

SEQ ID NO: 145542 - DNA, 22 bp, synthetic construct
  misc_feature 1..22: note = chemically synthesized
  source 1..22: mol_type = other DNA
gccagttctcccccatcattta

SEQ ID NO: 145543 - DNA, 22 bp, synthetic construct
  misc_feature 1..22: note = chemically synthesized
  source 1..22: mol_type = other DNA
tcccccatcatttattaaattg

SEQ ID NO: 145544 - DNA, 22 bp, synthetic construct
  misc_feature 1..22: note = chemically synthesized
  source 1..22: mol_type = other DNA
ccccatcatttattaaattgaa

SEQ ID NO: 145545 - DNA, 22 bp, synthetic construct
  misc_feature 1..22: note = chemically synthesized
  source 1..22: mol_type = other DNA
attaaattgaaaatcctttccc

SEQ ID NO: 145546 - DNA, 22 bp, synthetic construct
  misc_feature 1..22: note = chemically synthesized
  source 1..22: mol_type = other DNA
ttaaattgaaaatcctttcccc

SEQ ID NO: 145547 - DNA, 22 bp, synthetic construct
  misc_feature 1..22: note = chemically synthesized
  source 1..22: mol_type = other DNA
aattgaaaatcctttccccatt

SEQ ID NO: 145548 - DNA, 22 bp, synthetic construct
  misc_feature 1..22: note = chemically synthesized
  source 1..22: mol_type = other DNA
aaaatcctttccccattgcttg

SEQ ID NO: 145549 - DNA, 22 bp, synthetic construct
  misc_feature 1..22: note = chemically synthesized
  source 1..22: mol_type = other DNA
tccccattgcttgcttttgtca

SEQ ID NO: 145550 - DNA, 22 bp, synthetic construct
  misc_feature 1..22: note = chemically synthesized
  source 1..22: mol_type = other DNA
ccccattgcttgcttttgtcag

SEQ ID NO: 145551 - DNA, 22 bp, synthetic construct
  misc_feature 1..22: note = chemically synthesized
  source 1..22: mol_type = other DNA
cccattgcttgcttttgtcagg

SEQ ID NO: 145552 - DNA, 22 bp, synthetic construct
  misc_feature 1..22: note = chemically synthesized
  source 1..22: mol_type = other DNA
cttgcttttgtcaggtttctaa

SEQ ID NO: 145553 - DNA, 22 bp, synthetic construct
  misc_feature 1..22: note = chemically synthesized
  source 1..22: mol_type = other DNA
gcttttgtcaggtttctaaaag

SEQ ID NO: 145554 - DNA, 22 bp, synthetic construct
  misc_feature 1..22: note = chemically synthesized
  source 1..22: mol_type = other DNA
cttttgtcaggtttctaaaaga

SEQ ID NO: 145555 - DNA, 22 bp, synthetic construct
  misc_feature 1..22: note = chemically synthesized
  source 1..22: mol_type = other DNA
ttgtcaggtttctaaaagacca

SEQ ID NO: 145556 - DNA, 22 bp, synthetic construct
  misc_feature 1..22: note = chemically synthesized
  source 1..22: mol_type = other DNA
tgtcaggtttctaaaagaccag

SEQ ID NO: 145557 - DNA, 22 bp, synthetic construct
  misc_feature 1..22: note = chemically synthesized
  source 1..22: mol_type = other DNA
gtcaggtttctaaaagaccaga

SEQ ID NO: 145558 - DNA, 22 bp, synthetic construct
  misc_feature 1..22: note = chemically synthesized
  source 1..22: mol_type = other DNA
tcaggtttctaaaagaccagat

SEQ ID NO: 145559 - DNA, 22 bp, synthetic construct
  misc_feature 1..22: note = chemically synthesized
  source 1..22: mol_type = other DNA
ctaaaagaccagatggttgtag

SEQ ID NO: 145560 - DNA, 22 bp, synthetic construct
  misc_feature 1..22: note = chemically synthesized
  source 1..22: mol_type = other DNA
taaaagaccagatggttgtagg

SEQ ID NO: 145561 - DNA, 22 bp, synthetic construct
  misc_feature 1..22: note = chemically synthesized
  source 1..22: mol_type = other DNA
aaagaccagatggttgtaggta

SEQ ID NO: 145562 - DNA, 22 bp, synthetic construct
  misc_feature 1..22: note = chemically synthesized
  source 1..22: mol_type = other DNA
taggtacaatatgcagtttctt

SEQ ID NO: 145563 - DNA, 22 bp, synthetic construct
  misc_feature 1..22: note = chemically synthesized
  source 1..22: mol_type = other DNA
cttcaagtcatataataccatc

SEQ ID NO: 145564 - DNA, 22 bp, synthetic construct
  misc_feature 1..22: note = chemically synthesized
  source 1..22: mol_type = other DNA
ttcaagtcatataataccatct

SEQ ID NO: 145565 - DNA, 22 bp, synthetic construct
  misc_feature 1..22: note = chemically synthesized
  source 1..22: mol_type = other DNA
caagtcatataataccatctga

SEQ ID NO: 145566 - DNA, 22 bp, synthetic construct
  misc_feature 1..22: note = chemically synthesized
  source 1..22: mol_type = other DNA
aagtcatataataccatctgaa

SEQ ID NO: 145567 - DNA, 22 bp, synthetic construct
  misc_feature 1..22: note = chemically synthesized
  source 1..22: mol_type = other DNA
aaatctcttattaattcatttc

SEQ ID NO: 145568 - DNA, 22 bp, synthetic construct
  misc_feature 1..22: note = chemically synthesized
  source 1..22: mol_type = other DNA
ttattaattcatttcttttagt

SEQ ID NO: 145569 - DNA, 22 bp, synthetic construct
  misc_feature 1..22: note = chemically synthesized
  source 1..22: mol_type = other DNA
attaattcatttcttttagtat

SEQ ID NO: 145570 - DNA, 22 bp, synthetic construct
  misc_feature 1..22: note = chemically synthesized
  source 1..22: mol_type = other DNA
ttaattcatttcttttagtatg

SEQ ID NO: 145571 - DNA, 22 bp, synthetic construct
  misc_feature 1..22: note = chemically synthesized
  source 1..22: mol_type = other DNA
attcatttcttttagtatgtat

SEQ ID NO: 145572 - DNA, 22 bp, synthetic construct
  misc_feature 1..22: note = chemically synthesized
  source 1..22: mol_type = other DNA
atttcttttagtatgtatgctg

SEQ ID NO: 145573 - DNA, 22 bp, synthetic construct
  misc_feature 1..22: note = chemically synthesized
  source 1..22: mol_type = other DNA
cttttagtatgtatgctggtct

SEQ ID NO: 145574 - DNA, 22 bp, synthetic construct
  misc_feature 1..22: note = chemically synthesized
  source 1..22: mol_type = other DNA
ttttagtatgtatgctggtctc

SEQ ID NO: 145575 - DNA, 22 bp, synthetic construct
  misc_feature 1..22: note = chemically synthesized
  source 1..22: mol_type = other DNA
ttagtatgtatgctggtctcct

SEQ ID NO: 145576 - DNA, 22 bp, synthetic construct
  misc_feature 1..22: note = chemically synthesized
  source 1..22: mol_type = other DNA
tagtatgtatgctggtctcctc

SEQ ID NO: 145577 - DNA, 22 bp, synthetic construct
  misc_feature 1..22: note = chemically synthesized
  source 1..22: mol_type = other DNA
agtatgtatgctggtctcctct

SEQ ID NO: 145578 - DNA, 22 bp, synthetic construct
  misc_feature 1..22: note = chemically synthesized
  source 1..22: mol_type = other DNA
gtatgtatgctggtctcctctg

SEQ ID NO: 145579 - DNA, 22 bp, synthetic construct
  misc_feature 1..22: note = chemically synthesized
  source 1..22: mol_type = other DNA
gtctcctctgctcactatagtg

SEQ ID NO: 145580 - DNA, 22 bp, synthetic construct
  misc_feature 1..22: note = chemically synthesized
  source 1..22: mol_type = other DNA
ctctgctcactatagtgagggc

SEQ ID NO: 145581 - DNA, 22 bp, synthetic construct
  misc_feature 1..22: note = chemically synthesized
  source 1..22: mol_type = other DNA
tgctcactatagtgagggcacc

SEQ ID NO: 145582 - DNA, 22 bp, synthetic construct
  misc_feature 1..22: note = chemically synthesized
  source 1..22: mol_type = other DNA
ctcactatagtgagggcaccat

SEQ ID NO: 145583 - DNA, 22 bp, synthetic construct
  misc_feature 1..22: note = chemically synthesized
  source 1..22: mol_type = other DNA
actatagtgagggcaccattag

SEQ ID NO: 145584 - DNA, 22 bp, synthetic construct
  misc_feature 1..22: note = chemically synthesized
  source 1..22: mol_type = other DNA
tagtgagggcaccattagccag

SEQ ID NO: 145585 - DNA, 22 bp, synthetic construct
  misc_feature 1..22: note = chemically synthesized
  source 1..22: mol_type = other DNA
gccagagaatctgtctgtctag

SEQ ID NO: 145586 - DNA, 22 bp, synthetic construct
  misc_feature 1..22: note = chemically synthesized
  source 1..22: mol_type = other DNA
tctgtctagttcatgtaagatt

SEQ ID NO: 145587 - DNA, 22 bp, synthetic construct
  misc_feature 1..22: note = chemically synthesized
  source 1..22: mol_type = other DNA
tctagttcatgtaagattctca

SEQ ID NO: 145588 - DNA, 22 bp, synthetic construct
  misc_feature 1..22: note = chemically synthesized
  source 1..22: mol_type = other DNA
gttcatgtaagattctcagaat

SEQ ID NO: 145589 - DNA, 22 bp, synthetic construct
  misc_feature 1..22: note = chemically synthesized
  source 1..22: mol_type = other DNA
atgtaagattctcagaattaag

SEQ ID NO: 145590 - DNA, 22 bp, synthetic construct
  misc_feature 1..22: note = chemically synthesized
  source 1..22: mol_type = other DNA
tcagaattaagaaaaatggatg

SEQ ID NO: 145591 - DNA, 22 bp, synthetic construct
  misc_feature 1..22: note = chemically synthesized
  source 1..22: mol_type = other DNA
agaattaagaaaaatggatggc

SEQ ID NO: 145592 - DNA, 22 bp, synthetic construct
  misc_feature 1..22: note = chemically synthesized
  source 1..22: mol_type = other DNA
agaaaaatggatggcatatgaa

SEQ ID NO: 145593 - DNA, 22 bp, synthetic construct
  misc_feature 1..22: note = chemically synthesized
  source 1..22: mol_type = other DNA
catggatgacatatggaatcta

SEQ ID NO: 145594 - DNA, 22 bp, synthetic construct
  misc_feature 1..22: note = chemically synthesized
  source 1..22: mol_type = other DNA
atggatgacatatggaatctaa

SEQ ID NO: 145595 - DNA, 22 bp, synthetic construct
  misc_feature 1..22: note = chemically synthesized
  source 1..22: mol_type = other DNA
atatgtatttgttgaattaatg

SEQ ID NO: 145596 - DNA, 22 bp, synthetic construct
  misc_feature 1..22: note = chemically synthesized
  source 1..22: mol_type = other DNA
gttgaattaatgcataagatgc

SEQ ID NO: 145597 - DNA, 22 bp, synthetic construct
  misc_feature 1..22: note = chemically synthesized
  source 1..22: mol_type = other DNA
ttgaattaatgcataagatgca

SEQ ID NO: 145598 - DNA, 22 bp, synthetic construct
  misc_feature 1..22: note = chemically synthesized
  source 1..22: mol_type = other DNA
aattaatgcataagatgcaaca

SEQ ID NO: 145599 - DNA, 22 bp, synthetic construct
  misc_feature 1..22: note = chemically synthesized
  source 1..22: mol_type = other DNA
atgcataagatgcaacagagag

SEQ ID NO: 145600 - DNA, 22 bp, synthetic construct
  misc_feature 1..22: note = chemically synthesized
  source 1..22: mol_type = other DNA
acaactgcaatgataacctggt

SEQ ID NO: 145601 - DNA, 22 bp, synthetic construct
  misc_feature 1..22: note = chemically synthesized
  source 1..22: mol_type = other DNA
caatgataacctggtattgatg

SEQ ID NO: 145602 - DNA, 22 bp, synthetic construct
  misc_feature 1..22: note = chemically synthesized
  source 1..22: mol_type = other DNA
gtattgatgatataagagtcta

SEQ ID NO: 145603 - DNA, 22 bp, synthetic construct
  misc_feature 1..22: note = chemically synthesized
  source 1..22: mol_type = other DNA
atgatataagagtctatagatc

SEQ ID NO: 145604 - DNA, 22 bp, synthetic construct
  misc_feature 1..22: note = chemically synthesized
  source 1..22: mol_type = other DNA
tagatcacagtagaagcaataa

SEQ ID NO: 145605 - DNA, 22 bp, synthetic construct
  misc_feature 1..22: note = chemically synthesized
  source 1..22: mol_type = other DNA
gaaatggggaacagccacaaac

SEQ ID NO: 145606 - DNA, 22 bp, synthetic construct
  misc_feature 1..22: note = chemically synthesized
  source 1..22: mol_type = other DNA
ccaggaaagtgactgcaggtca

SEQ ID NO: 145607 - DNA, 22 bp, synthetic construct
  misc_feature 1..22: note = chemically synthesized
  source 1..22: mol_type = other DNA
caggaaagtgactgcaggtcac

SEQ ID NO: 145608 - DNA, 22 bp, synthetic construct
  misc_feature 1..22: note = chemically synthesized
  source 1..22: mol_type = other DNA
caggtcacttttcctggagcgg

SEQ ID NO: 145609 - DNA, 22 bp, synthetic construct
  misc_feature 1..22: note = chemically synthesized
  source 1..22: mol_type = other DNA
ttcctggagcgggtgagagaaa

SEQ ID NO: 145610 - DNA, 22 bp, synthetic construct
  misc_feature 1..22: note = chemically synthesized
  source 1..22: mol_type = other DNA
tcctggagcgggtgagagaaaa

SEQ ID NO: 145611 - DNA, 22 bp, synthetic construct
  misc_feature 1..22: note = chemically synthesized
  source 1..22: mol_type = other DNA
cctggagcgggtgagagaaaag

SEQ ID NO: 145612 - DNA, 22 bp, synthetic construct
  misc_feature 1..22: note = chemically synthesized
  source 1..22: mol_type = other DNA
ctggagcgggtgagagaaaagt

SEQ ID NO: 145613 - DNA, 22 bp, synthetic construct
  misc_feature 1..22: note = chemically synthesized
  source 1..22: mol_type = other DNA
gagcgggtgagagaaaagtgga

SEQ ID NO: 145614 - DNA, 22 bp, synthetic construct
  misc_feature 1..22: note = chemically synthesized
  source 1..22: mol_type = other DNA
gcagtaactgctgaattcctgg

SEQ ID NO: 145615 - DNA, 22 bp, synthetic construct
  misc_feature 1..22: note = chemically synthesized
  source 1..22: mol_type = other DNA
ctgaattcctggttggctgatg

SEQ ID NO: 145616 - DNA, 22 bp, synthetic construct
  misc_feature 1..22: note = chemically synthesized
  source 1..22: mol_type = other DNA
aattcctggttggctgatggaa

SEQ ID NO: 145617 - DNA, 22 bp, synthetic construct
  misc_feature 1..22: note = chemically synthesized
  source 1..22: mol_type = other DNA
ctggttggctgatggaaagatg

SEQ ID NO: 145618 - DNA, 22 bp, synthetic construct
  misc_feature 1..22: note = chemically synthesized
  source 1..22: mol_type = other DNA
gttggctgatggaaagatgggg

SEQ ID NO: 145619 - DNA, 22 bp, synthetic construct
  misc_feature 1..22: note = chemically synthesized
  source 1..22: mol_type = other DNA
gctgatggaaagatggggcagc

SEQ ID NO: 145620 - DNA, 22 bp, synthetic construct
  misc_feature 1..22: note = chemically synthesized
  source 1..22: mol_type = other DNA
atggaaagatggggcagctgtt

SEQ ID NO: 145621 - DNA, 22 bp, synthetic construct
  misc_feature 1..22: note = chemically synthesized
  source 1..22: mol_type = other DNA
ttcactggtacgcagggtttta

SEQ ID NO: 145622 - DNA, 22 bp, synthetic construct
  misc_feature 1..22: note = chemically synthesized
  source 1..22: mol_type = other DNA
actggtacgcagggttttagat

SEQ ID NO: 145623 - DNA, 22 bp, synthetic construct
  misc_feature 1..22: note = chemically synthesized
  source 1..22: mol_type = other DNA
gtacgcagggttttagatgtat

SEQ ID NO: 145624 - DNA, 22 bp, synthetic construct
  misc_feature 1..22: note = chemically synthesized
  source 1..22: mol_type = other DNA
tagatgtatgtacctaaggata

SEQ ID NO: 145625 - DNA, 22 bp, synthetic construct
  misc_feature 1..22: note = chemically synthesized
  source 1..22: mol_type = other DNA
agatgtatgtacctaaggatat

SEQ ID NO: 145626 - DNA, 22 bp, synthetic construct
  misc_feature 1..22: note = chemically synthesized
  source 1..22: mol_type = other DNA
gatgtatgtacctaaggatatg

SEQ ID NO: 145627 - DNA, 22 bp, synthetic construct
  misc_feature 1..22: note = chemically synthesized
  source 1..22: mol_type = other DNA
aggatatgaggtatggcaatga

SEQ ID NO: 145628 - DNA, 22 bp, synthetic construct
  misc_feature 1..22: note = chemically synthesized
  source 1..22: mol_type = other DNA
ttttgggaatgagttttagggc

SEQ ID NO: 145629 - DNA, 22 bp, synthetic construct
  misc_feature 1..22: note = chemically synthesized
  source 1..22: mol_type = other DNA
ttgggaatgagttttagggcca

SEQ ID NO: 145630 - DNA, 22 bp, synthetic construct
  misc_feature 1..22: note = chemically synthesized
  source 1..22: mol_type = other DNA
tgggaatgagttttagggccat

SEQ ID NO: 145631 - DNA, 22 bp, synthetic construct
  misc_feature 1..22: note = chemically synthesized
  source 1..22: mol_type = other DNA
gggaatgagttttagggccatt

SEQ ID NO: 145632 - DNA, 22 bp, synthetic construct
  misc_feature 1..22: note = chemically synthesized
  source 1..22: mol_type = other DNA
ggaatgagttttagggccatta

SEQ ID NO: 145633 - DNA, 22 bp, synthetic construct
  misc_feature 1..22: note = chemically synthesized
  source 1..22: mol_type = other DNA
tagggccattaaaggacatgac

SEQ ID NO: 145634 - DNA, 22 bp, synthetic construct
  misc_feature 1..22: note = chemically synthesized
  source 1..22: mol_type = other DNA
agggccattaaaggacatgacc

SEQ ID NO: 145635 - DNA, 22 bp, synthetic construct
  misc_feature 1..22: note = chemically synthesized
  source 1..22: mol_type = other DNA
gggccattaaaggacatgacct

SEQ ID NO: 145636 - DNA, 22 bp, synthetic construct
  misc_feature 1..22: note = chemically synthesized
  source 1..22: mol_type = other DNA
aaggacatgacctgaagtttcc

SEQ ID NO: 145637 - DNA, 22 bp, synthetic construct
  misc_feature 1..22: note = chemically synthesized
  source 1..22: mol_type = other DNA
aagtttcctctgaggccagtcc

SEQ ID NO: 145638 - DNA, 22 bp, synthetic construct
  misc_feature 1..22: note = chemically synthesized
  source 1..22: mol_type = other DNA
cctctgaggccagtccccacaa

SEQ ID NO: 145639 - DNA, 22 bp, synthetic construct
  misc_feature 1..22: note = chemically synthesized
  source 1..22: mol_type = other DNA
ctctgaggccagtccccacaac

SEQ ID NO: 145640 - DNA, 22 bp, synthetic construct
  misc_feature 1..22: note = chemically synthesized
  source 1..22: mol_type = other DNA
tgaggccagtccccacaactca

SEQ ID NO: 145641 - DNA, 22 bp, synthetic construct
  misc_feature 1..22: note = chemically synthesized
  source 1..22: mol_type = other DNA
aggccagtccccacaactcaat

SEQ ID NO: 145642 - DNA, 22 bp, synthetic construct
  misc_feature 1..22: note = chemically synthesized
  source 1..22: mol_type = other DNA
aatataaatgtgtttcctgcat

SEQ ID NO: 145643 - DNA, 22 bp, synthetic construct
  misc_feature 1..22: note = chemically synthesized
  source 1..22: mol_type = other DNA
cctgcatatagtcaaagttgcc

SEQ ID NO: 145644 - DNA, 22 bp, synthetic construct
  misc_feature 1..22: note = chemically synthesized
  source 1..22: mol_type = other DNA
ctgcatatagtcaaagttgcca

SEQ ID NO: 145645 - DNA, 22 bp, synthetic construct
  misc_feature 1..22: note = chemically synthesized
  source 1..22: mol_type = other DNA
catatagtcaaagttgccactt

SEQ ID NO: 145646 - DNA, 22 bp, synthetic construct
  misc_feature 1..22: note = chemically synthesized
  source 1..22: mol_type = other DNA
ccacttctttttcttcatatca

SEQ ID NO: 145647 - DNA, 22 bp, synthetic construct
  misc_feature 1..22: note = chemically synthesized
  source 1..22: mol_type = other DNA
ctttttcttcatatcatcgatc

SEQ ID NO: 145648 - DNA, 22 bp, synthetic construct
  misc_feature 1..22: note = chemically synthesized
  source 1..22: mol_type = other DNA
tttttcttcatatcatcgatct

SEQ ID NO: 145649 - DNA, 22 bp, synthetic construct
  misc_feature 1..22: note = chemically synthesized
  source 1..22: mol_type = other DNA
tttcttcatatcatcgatctct

SEQ ID NO: 145650 - DNA, 22 bp, synthetic construct
  misc_feature 1..22: note = chemically synthesized
  source 1..22: mol_type = other DNA
ttcttcatatcatcgatctctg

SEQ ID NO: 145651 - DNA, 22 bp, synthetic construct
  misc_feature 1..22: note = chemically synthesized
  source 1..22: mol_type = other DNA
tcttcatatcatcgatctctgc

SEQ ID NO: 145652 - DNA, 22 bp, synthetic construct
  misc_feature 1..22: note = chemically synthesized
  source 1..22: mol_type = other DNA
cttcatatcatcgatctctgct

SEQ ID NO: 145653 - DNA, 22 bp, synthetic construct
  misc_feature 1..22: note = chemically synthesized
  source 1..22: mol_type = other DNA
ttcatatcatcgatctctgctc

SEQ ID NO: 145654 - DNA, 22 bp, synthetic construct
  misc_feature 1..22: note = chemically synthesized
  source 1..22: mol_type = other DNA
catatcatcgatctctgctctt

SEQ ID NO: 145655 - DNA, 22 bp, synthetic construct
  misc_feature 1..22: note = chemically synthesized
  source 1..22: mol_type = other DNA
atatcatcgatctctgctctta

SEQ ID NO: 145656 - DNA, 22 bp, synthetic construct
  misc_feature 1..22: note = chemically synthesized
  source 1..22: mol_type = other DNA
tgctcttaaagataatcttggt

SEQ ID NO: 145657 - DNA, 22 bp, synthetic construct
  misc_feature 1..22: note = chemically synthesized
  source 1..22: mol_type = other DNA
ctcttaaagataatcttggttt

SEQ ID NO: 145658 - DNA, 22 bp, synthetic construct
  misc_feature 1..22: note = chemically synthesized
  source 1..22: mol_type = other DNA
ttaaagataatcttggttttgc

SEQ ID NO: 145659 - DNA, 22 bp, synthetic construct
  misc_feature 1..22: note = chemically synthesized
  source 1..22: mol_type = other DNA
aaagataatcttggttttgcct

SEQ ID NO: 145660 - DNA, 22 bp, synthetic construct
  misc_feature 1..22: note = chemically synthesized
  source 1..22: mol_type = other DNA
aagataatcttggttttgcctc

SEQ ID NO: 145661 - DNA, 22 bp, synthetic construct
  misc_feature 1..22: note = chemically synthesized
  source 1..22: mol_type = other DNA
ggttttgcctcaaactgtttgt

SEQ ID NO: 145662 - DNA, 22 bp, synthetic construct
  misc_feature 1..22: note = chemically synthesized
  source 1..22: mol_type = other DNA
gttttgcctcaaactgtttgtc

SEQ ID NO: 145663 - DNA, 22 bp, synthetic construct
  misc_feature 1..22: note = chemically synthesized
  source 1..22: mol_type = other DNA
tgcctcaaactgtttgtcacta

SEQ ID NO: 145664 - DNA, 22 bp, synthetic construct
  misc_feature 1..22: note = chemically synthesized
  source 1..22: mol_type = other DNA
gcctcaaactgtttgtcactac

SEQ ID NO: 145665 - DNA, 22 bp, synthetic construct
  misc_feature 1..22: note = chemically synthesized
  source 1..22: mol_type = other DNA
cctcaaactgtttgtcactaca

SEQ ID NO: 145666 - DNA, 22 bp, synthetic construct
  misc_feature 1..22: note = chemically synthesized
  source 1..22: mol_type = other DNA
aaactgtttgtcactacaaact

SEQ ID NO: 145667 - DNA, 22 bp, synthetic construct
  misc_feature 1..22: note = chemically synthesized
  source 1..22: mol_type = other DNA
tttgtcactacaaactttcccc

SEQ ID NO: 145668 - DNA, 22 bp, synthetic construct
  misc_feature 1..22: note = chemically synthesized
  source 1..22: mol_type = other DNA
gtcactacaaactttccccatg

SEQ ID NO: 145669 - DNA, 22 bp, synthetic construct
  misc_feature 1..22: note = chemically synthesized
  source 1..22: mol_type = other DNA
tcactacaaactttccccatgt

SEQ ID NO: 145670 - DNA, 22 bp, synthetic construct
  misc_feature 1..22: note = chemically synthesized
  source 1..22: mol_type = other DNA
caaactttccccatgttcctaa

SEQ ID NO: 145671 - DNA, 22 bp, synthetic construct
  misc_feature 1..22: note = chemically synthesized
  source 1..22: mol_type = other DNA
tccccatgttcctaagtaaaac

SEQ ID NO: 145672 - DNA, 22 bp, synthetic construct
  misc_feature 1..22: note = chemically synthesized
  source 1..22: mol_type = other DNA
ccccatgttcctaagtaaaaca

SEQ ID NO: 145673 - DNA, 22 bp, synthetic construct
  misc_feature 1..22: note = chemically synthesized
  source 1..22: mol_type = other DNA
cccatgttcctaagtaaaacag

SEQ ID NO: 145674 - DNA, 22 bp, synthetic construct
  misc_feature 1..22: note = chemically synthesized
  source 1..22: mol_type = other DNA
ctaagtaaaacaggtaactgcc

SEQ ID NO: 145675 - DNA, 22 bp, synthetic construct
  misc_feature 1..22: note = chemically synthesized
  source 1..22: mol_type = other DNA
agtaaaacaggtaactgcctct

SEQ ID NO: 145676 - DNA, 22 bp, synthetic construct
  misc_feature 1..22: note = chemically synthesized
  source 1..22: mol_type = other DNA
cctctcaactatatcaagtaga

SEQ ID NO: 145677 - DNA, 22 bp, synthetic construct
  misc_feature 1..22: note = chemically synthesized
  source 1..22: mol_type = other DNA
tcaactatatcaagtagactaa

SEQ ID NO: 145678 - DNA, 22 bp, synthetic construct
  misc_feature 1..22: note = chemically synthesized
  source 1..22: mol_type = other DNA
aactatatcaagtagactaaaa

SEQ ID NO: 145679 - DNA, 22 bp, synthetic construct
  misc_feature 1..22: note = chemically synthesized
  source 1..22: mol_type = other DNA
tatcaagtagactaaaatattg

SEQ ID NO: 145680 - DNA, 22 bp, synthetic construct
  misc_feature 1..22: note = chemically synthesized
  source 1..22: mol_type = other DNA
aaatattgtgtctctaatatca

SEQ ID NO: 145681 - DNA, 22 bp, synthetic construct
  misc_feature 1..22: note = chemically synthesized
  source 1..22: mol_type = other DNA
tgtctctaatatcagaaattca

SEQ ID NO: 145682 - DNA, 22 bp, synthetic construct
  misc_feature 1..22: note = chemically synthesized
  source 1..22: mol_type = other DNA
taatatcagaaattcagcttta

SEQ ID NO: 145683 - DNA, 22 bp, synthetic construct
  misc_feature 1..22: note = chemically synthesized
  source 1..22: mol_type = other DNA
atatcagaaattcagctttaat

SEQ ID NO: 145684 - DNA, 22 bp, synthetic construct
  misc_feature 1..22: note = chemically synthesized
  source 1..22: mol_type = other DNA
agctttaatatattgggtttaa

SEQ ID NO: 145685 - DNA, 22 bp, synthetic construct
  misc_feature 1..22: note = chemically synthesized
  source 1..22: mol_type = other DNA
taatatattgggtttaactctt

SEQ ID NO: 145686 - DNA, 22 bp, synthetic construct
  misc_feature 1..22: note = chemically synthesized
  source 1..22: mol_type = other DNA
aatatattgggtttaactcttt

SEQ ID NO: 145687 - DNA, 22 bp, synthetic construct
  misc_feature 1..22: note = chemically synthesized
  source 1..22: mol_type = other DNA
atatattgggtttaactctttg

SEQ ID NO: 145688 - DNA, 22 bp, synthetic construct
  misc_feature 1..22: note = chemically synthesized
  source 1..22: mol_type = other DNA
ggtttaactctttgaaatttag

SEQ ID NO: 145689 - DNA, 22 bp, synthetic construct
  misc_feature 1..22: note = chemically synthesized
  source 1..22: mol_type = other DNA
aactctttgaaatttagagtct

SEQ ID NO: 145690 - DNA, 22 bp, synthetic construct
  misc_feature 1..22: note = chemically synthesized
  source 1..22: mol_type = other DNA
actctttgaaatttagagtctc

SEQ ID NO: 145691 - DNA, 22 bp, synthetic construct
  misc_feature 1..22: note = chemically synthesized
  source 1..22: mol_type = other DNA
tttgaaatttagagtctccttg

SEQ ID NO: 145692 - DNA, 22 bp, synthetic construct
  misc_feature 1..22: note = chemically synthesized
  source 1..22: mol_type = other DNA
tgaaatttagagtctccttgaa

SEQ ID NO: 145693 - DNA, 22 bp, synthetic construct
  misc_feature 1..22: note = chemically synthesized
  source 1..22: mol_type = other DNA
gaaatttagagtctccttgaaa

SEQ ID NO: 145694 - DNA, 22 bp, synthetic construct
  misc_feature 1..22: note = chemically synthesized
  source 1..22: mol_type = other DNA
aaatttagagtctccttgaaat

SEQ ID NO: 145695 - DNA, 22 bp, synthetic construct
  misc_feature 1..22: note = chemically synthesized
  source 1..22: mol_type = other DNA
agagtctccttgaaatacacat

SEQ ID NO: 145696 - DNA, 22 bp, synthetic construct
  misc_feature 1..22: note = chemically synthesized
  source 1..22: mol_type = other DNA
gagtctccttgaaatacacatg

SEQ ID NO: 145697 - DNA, 22 bp, synthetic construct
  misc_feature 1..22: note = chemically synthesized
  source 1..22: mol_type = other DNA
cttgaaatacacatgggggtga

SEQ ID NO: 145698 - DNA, 22 bp, synthetic construct
  misc_feature 1..22: note = chemically synthesized
  source 1..22: mol_type = other DNA
gaaatacacatgggggtgattt

SEQ ID NO: 145699 - DNA, 22 bp, synthetic construct
  misc_feature 1..22: note = chemically synthesized
  source 1..22: mol_type = other DNA
aaatacacatgggggtgatttc

SEQ ID NO: 145700 - DNA, 22 bp, synthetic construct
  misc_feature 1..22: note = chemically synthesized
  source 1..22: mol_type = other DNA
cctaaactttatttcttgtaag

SEQ ID NO: 145701 - DNA, 22 bp, synthetic construct
  misc_feature 1..22: note = chemically synthesized
  source 1..22: mol_type = other DNA
ctaaactttatttcttgtaagg

SEQ ID NO: 145702 - DNA, 22 bp, synthetic construct
  misc_feature 1..22: note = chemically synthesized
  source 1..22: mol_type = other DNA
aactttatttcttgtaaggatt

SEQ ID NO: 145703 - DNA, 22 bp, synthetic construct
  misc_feature 1..22: note = chemically synthesized
  source 1..22: mol_type = other DNA
tatttcttgtaaggatttatct

SEQ ID NO: 145704 - DNA, 22 bp, synthetic construct
  misc_feature 1..22: note = chemically synthesized
  source 1..22: mol_type = other DNA
atttcttgtaaggatttatctc

SEQ ID NO: 145705 - DNA, 22 bp, synthetic construct
  misc_feature 1..22: note = chemically synthesized
  source 1..22: mol_type = other DNA
tttcttgtaaggatttatctca

SEQ ID NO: 145706 - DNA, 22 bp, synthetic construct
  misc_feature 1..22: note = chemically synthesized
  source 1..22: mol_type = other DNA
cttgtaaggatttatctcaggg

SEQ ID NO: 145707 - DNA, 22 bp, synthetic construct
  misc_feature 1..22: note = chemically synthesized
  source 1..22: mol_type = other DNA
ttgtaaggatttatctcagggg

SEQ ID NO: 145708 - DNA, 22 bp, synthetic construct
  misc_feature 1..22: note = chemically synthesized
  source 1..22: mol_type = other DNA
gtaaggatttatctcaggggta

SEQ ID NO: 145709 - DNA, 22 bp, synthetic construct
  misc_feature 1..22: note = chemically synthesized
  source 1..22: mol_type = other DNA
taaggatttatctcaggggtaa

SEQ ID NO: 145710 - DNA, 22 bp, synthetic construct
  misc_feature 1..22: note = chemically synthesized
  source 1..22: mol_type = other DNA
atctcaggggtaacacacaaac

SEQ ID NO: 145711 - DNA, 22 bp, synthetic construct
  misc_feature 1..22: note = chemically synthesized
  source 1..22: mol_type = other DNA
tctcaggggtaacacacaaacc

SEQ ID NO: 145712 - DNA, 22 bp, synthetic construct
  misc_feature 1..22: note = chemically synthesized
  source 1..22: mol_type = other DNA
aggggtaacacacaaaccagca

SEQ ID NO: 145713 - DNA, 22 bp, synthetic construct
  misc_feature 1..22: note = chemically synthesized
  source 1..22: mol_type = other DNA
aacctctaagtatgaggacagt

SEQ ID NO: 145714 - DNA, 22 bp, synthetic construct
  misc_feature 1..22: note = chemically synthesized
  source 1..22: mol_type = other DNA
taagtatgaggacagtaagcct

SEQ ID NO: 145715 - DNA, 22 bp, synthetic construct
  misc_feature 1..22: note = chemically synthesized
  source 1..22: mol_type = other DNA
agtatgaggacagtaagcctta

SEQ ID NO: 145716 - DNA, 22 bp, synthetic construct
  misc_feature 1..22: note = chemically synthesized
  source 1..22: mol_type = other DNA
aagaatataaaataaactgttc

SEQ ID NO: 145717 - DNA, 22 bp, synthetic construct
  misc_feature 1..22: note = chemically synthesized
  source 1..22: mol_type = other DNA
agaatataaaataaactgttct

SEQ ID NO: 145718 - DNA, 22 bp, synthetic construct
  misc_feature 1..22: note = chemically synthesized
  source 1..22: mol_type = other DNA
ttcttctctctgccggtggaag

SEQ ID NO: 145719 - DNA, 22 bp, synthetic construct
  misc_feature 1..22: note = chemically synthesized
  source 1..22: mol_type = other DNA
ttctctctgccggtggaagtgt

SEQ ID NO: 145720 - DNA, 22 bp, synthetic construct
  misc_feature 1..22: note = chemically synthesized
  source 1..22: mol_type = other DNA
ctctctgccggtggaagtgtgc

SEQ ID NO: 145721 - DNA, 22 bp, synthetic construct
  misc_feature 1..22: note = chemically synthesized
  source 1..22: mol_type = other DNA
tctctgccggtggaagtgtgcc

SEQ ID NO: 145722 - DNA, 22 bp, synthetic construct
  misc_feature 1..22: note = chemically synthesized
  source 1..22: mol_type = other DNA
tctgccggtggaagtgtgccct

SEQ ID NO: 145723 - DNA, 22 bp, synthetic construct
  misc_feature 1..22: note = chemically synthesized
  source 1..22: mol_type = other DNA
tgccggtggaagtgtgccctgt

SEQ ID NO: 145724 - DNA, 22 bp, synthetic construct
  misc_feature 1..22: note = chemically synthesized
  source 1..22: mol_type = other DNA
ccggtggaagtgtgccctgtct

SEQ ID NO: 145725 - DNA, 22 bp, synthetic construct
  misc_feature 1..22: note = chemically synthesized
  source 1..22: mol_type = other DNA
tctattcctgaaattgcttgtt

SEQ ID NO: 145726 - DNA, 22 bp, synthetic construct
  misc_feature 1..22: note = chemically synthesized
  source 1..22: mol_type = other DNA
ttcctgaaattgcttgtttgag

SEQ ID NO: 145727 - DNA, 22 bp, synthetic construct
  misc_feature 1..22: note = chemically synthesized
  source 1..22: mol_type = other DNA
ctgaaattgcttgtttgagacg

SEQ ID NO: 145728 - DNA, 22 bp, synthetic construct
  misc_feature 1..22: note = chemically synthesized
  source 1..22: mol_type = other DNA
aaattgcttgtttgagacgcat

SEQ ID NO: 145729 - DNA, 22 bp, synthetic construct
  misc_feature 1..22: note = chemically synthesized
  source 1..22: mol_type = other DNA
cttgtttgagacgcatgagacg

SEQ ID NO: 145730 - DNA, 22 bp, synthetic construct
  misc_feature 1..22: note = chemically synthesized
  source 1..22: mol_type = other DNA
gtttgagacgcatgagacgtgc

SEQ ID NO: 145731 - DNA, 22 bp, synthetic construct
  misc_feature 1..22: note = chemically synthesized
  source 1..22: mol_type = other DNA
tttgagacgcatgagacgtgca

SEQ ID NO: 145732 - DNA, 22 bp, synthetic construct
  misc_feature 1..22: note = chemically synthesized
  source 1..22: mol_type = other DNA
gagacgcatgagacgtgcagca

SEQ ID NO: 145733 - DNA, 22 bp, synthetic construct
  misc_feature 1..22: note = chemically synthesized
  source 1..22: mol_type = other DNA
agacgcatgagacgtgcagcac

SEQ ID NO: 145734 - DNA, 22 bp, synthetic construct
  misc_feature 1..22: note = chemically synthesized
  source 1..22: mol_type = other DNA
tggaatattgtcagtgaagaat

SEQ ID NO: 145735 - DNA, 22 bp, synthetic construct
  misc_feature 1..22: note = chemically synthesized
  source 1..22: mol_type = other DNA
tcagtgaagaatgtctttgcct

SEQ ID NO: 145736 - DNA, 22 bp, synthetic construct
  misc_feature 1..22: note = chemically synthesized
  source 1..22: mol_type = other DNA
tgcctgattagatataaagaca

SEQ ID NO: 145737 - DNA, 22 bp, synthetic construct
  misc_feature 1..22: note = chemically synthesized
  source 1..22: mol_type = other DNA
gcctgattagatataaagacaa

SEQ ID NO: 145738 - DNA, 22 bp, synthetic construct
  misc_feature 1..22: note = chemically synthesized
  source 1..22: mol_type = other DNA
cctgattagatataaagacaag

SEQ ID NO: 145739 - DNA, 22 bp, synthetic construct
  misc_feature 1..22: note = chemically synthesized
  source 1..22: mol_type = other DNA
attagatataaagacaagttaa

SEQ ID NO: 145740 - DNA, 22 bp, synthetic construct
  misc_feature 1..22: note = chemically synthesized
  source 1..22: mol_type = other DNA
gatataaagacaagttaaacac

SEQ ID NO: 145741 - DNA, 22 bp, synthetic construct
  misc_feature 1..22: note = chemically synthesized
  source 1..22: mol_type = other DNA
aacacagcattagactatagat

SEQ ID NO: 145742 - DNA, 22 bp, synthetic construct
  misc_feature 1..22: note = chemically synthesized
  source 1..22: mol_type = other DNA
gactatagatcaagcctgtgcc

SEQ ID NO: 145743 - DNA, 22 bp, synthetic construct
  misc_feature 1..22: note = chemically synthesized
  source 1..22: mol_type = other DNA
tagatcaagcctgtgccagaca

SEQ ID NO: 145744 - DNA, 22 bp, synthetic construct
  misc_feature 1..22: note = chemically synthesized
  source 1..22: mol_type = other DNA
tgccagacacaaatgacctaat

SEQ ID NO: 145745 - DNA, 22 bp, synthetic construct
  misc_feature 1..22: note = chemically synthesized
  source 1..22: mol_type = other DNA
atgcccagcacgggccacggaa

SEQ ID NO: 145746 - DNA, 22 bp, synthetic construct
  misc_feature 1..22: note = chemically synthesized
  source 1..22: mol_type = other DNA
ctatcctcttgcttgaacagag

SEQ ID NO: 145747 - DNA, 22 bp, synthetic construct
  misc_feature 1..22: note = chemically synthesized
  source 1..22: mol_type = other DNA
tcctcttgcttgaacagagcag

SEQ ID NO: 145748 - DNA, 22 bp, synthetic construct
  misc_feature 1..22: note = chemically synthesized
  source 1..22: mol_type = other DNA
ttgcttgaacagagcagcacac

SEQ ID NO: 145749 - DNA, 22 bp, synthetic construct
  misc_feature 1..22: note = chemically synthesized
  source 1..22: mol_type = other DNA
gcttgaacagagcagcacactt

SEQ ID NO: 145750 - DNA, 22 bp, synthetic construct
  misc_feature 1..22: note = chemically synthesized
  source 1..22: mol_type = other DNA
cttgaacagagcagcacacttc

SEQ ID NO: 145751 - DNA, 22 bp, synthetic construct
  misc_feature 1..22: note = chemically synthesized
  source 1..22: mol_type = other DNA
gaacagagcagcacacttctcc

SEQ ID NO: 145752 - DNA, 22 bp, synthetic construct
  misc_feature 1..22: note = chemically synthesized
  source 1..22: mol_type = other DNA
aacagagcagcacacttctccc

SEQ ID NO: 145753 - DNA, 22 bp, synthetic construct
  misc_feature 1..22: note = chemically synthesized
  source 1..22: mol_type = other DNA
ctcccccaacactattagatgt

SEQ ID NO: 145754 - DNA, 22 bp, synthetic construct
  misc_feature 1..22: note = chemically synthesized
  source 1..22: mol_type = other DNA
tcccccaacactattagatgtt

SEQ ID NO: 145755 - DNA, 22 bp, synthetic construct
  misc_feature 1..22: note = chemically synthesized
  source 1..22: mol_type = other DNA
ccccaacactattagatgttct

SEQ ID NO: 145756 - DNA, 22 bp, synthetic construct
  misc_feature 1..22: note = chemically synthesized
  source 1..22: mol_type = other DNA
ttagatgttctggcataatttt

SEQ ID NO: 145757 - DNA, 22 bp, synthetic construct
  misc_feature 1..22: note = chemically synthesized
  source 1..22: mol_type = other DNA
gatgttctggcataattttgta

SEQ ID NO: 145758 - DNA, 22 bp, synthetic construct
  misc_feature 1..22: note = chemically synthesized
  source 1..22: mol_type = other DNA
tggcataattttgtagatatgt

SEQ ID NO: 145759 - DNA, 22 bp, synthetic construct
  misc_feature 1..22: note = chemically synthesized
  source 1..22: mol_type = other DNA
gcataattttgtagatatgtag

SEQ ID NO: 145760 - DNA, 22 bp, synthetic construct
  misc_feature 1..22: note = chemically synthesized
  source 1..22: mol_type = other DNA
tgtagatatgtaggatttgaca

SEQ ID NO: 145761 - DNA, 22 bp, synthetic construct
  misc_feature 1..22: note = chemically synthesized
  source 1..22: mol_type = other DNA
gtagatatgtaggatttgacat

SEQ ID NO: 145762 - DNA, 22 bp, synthetic construct
  misc_feature 1..22: note = chemically synthesized
  source 1..22: mol_type = other DNA
tagatatgtaggatttgacatg

SEQ ID NO: 145763 - DNA, 22 bp, synthetic construct
  misc_feature 1..22: note = chemically synthesized
  source 1..22: mol_type = other DNA
gacatggactattgttcaatga

SEQ ID NO: 145764 - DNA, 22 bp, synthetic construct
  misc_feature 1..22: note = chemically synthesized
  source 1..22: mol_type = other DNA
acatggactattgttcaatgat

SEQ ID NO: 145765 - DNA, 22 bp, synthetic construct
  misc_feature 1..22: note = chemically synthesized
  source 1..22: mol_type = other DNA
ttgttcaatgattcagaggaaa

SEQ ID NO: 145766 - DNA, 22 bp, synthetic construct
  misc_feature 1..22: note = chemically synthesized
  source 1..22: mol_type = other DNA
ttcaatgattcagaggaaatct

SEQ ID NO: 145767 - DNA, 22 bp, synthetic construct
  misc_feature 1..22: note = chemically synthesized
  source 1..22: mol_type = other DNA
aatgattcagaggaaatctcct

SEQ ID NO: 145768 - DNA, 22 bp, synthetic construct
  misc_feature 1..22: note = chemically synthesized
  source 1..22: mol_type = other DNA
agaggaaatctcctttgttcag

SEQ ID NO: 145769 - DNA, 22 bp, synthetic construct
  misc_feature 1..22: note = chemically synthesized
  source 1..22: mol_type = other DNA
ctttgttcagataagtacactg

SEQ ID NO: 145770 - DNA, 22 bp, synthetic construct
  misc_feature 1..22: note = chemically synthesized
  source 1..22: mol_type = other DNA
tgttcagataagtacactgact

SEQ ID NO: 145771 - DNA, 22 bp, synthetic construct
  misc_feature 1..22: note = chemically synthesized
  source 1..22: mol_type = other DNA
gttcagataagtacactgacta

SEQ ID NO: 145772 - DNA, 22 bp, synthetic construct
  misc_feature 1..22: note = chemically synthesized
  source 1..22: mol_type = other DNA
ttcagataagtacactgactac

SEQ ID NO: 145773 - DNA, 22 bp, synthetic construct
  misc_feature 1..22: note = chemically synthesized
  source 1..22: mol_type = other DNA
agataagtacactgactactaa

SEQ ID NO: 145774 - DNA, 22 bp, synthetic construct
  misc_feature 1..22: note = chemically synthesized
  source 1..22: mol_type = other DNA
actactaaatggattaaaaaac

SEQ ID NO: 145775 - DNA, 22 bp, synthetic construct
  misc_feature 1..22: note = chemically synthesized
  source 1..22: mol_type = other DNA
ctaaatggattaaaaaacacag

SEQ ID NO: 145776 - DNA, 22 bp, synthetic construct
  misc_feature 1..22: note = chemically synthesized
  source 1..22: mol_type = other DNA
aatggattaaaaaacacagtaa

SEQ ID NO: 145777 - DNA, 22 bp, synthetic construct
  misc_feature 1..22: note = chemically synthesized
  source 1..22: mol_type = other DNA
aaaaacacagtaataaaaccca

SEQ ID NO: 145778 - DNA, 22 bp, synthetic construct
  misc_feature 1..22: note = chemically synthesized
  source 1..22: mol_type = other DNA
tccccttacttccctagtttgt

SEQ ID NO: 145779 - DNA, 22 bp, synthetic construct
  misc_feature 1..22: note = chemically synthesized
  source 1..22: mol_type = other DNA
ccccttacttccctagtttgtt

SEQ ID NO: 145780 - DNA, 22 bp, synthetic construct
  misc_feature 1..22: note = chemically synthesized
  source 1..22: mol_type = other DNA
cccttacttccctagtttgttt

SEQ ID NO: 145781 - DNA, 22 bp, synthetic construct
  misc_feature 1..22: note = chemically synthesized
  source 1..22: mol_type = other DNA
acttccctagtttgtttcttat

SEQ ID NO: 145782 - DNA, 22 bp, synthetic construct
  misc_feature 1..22: note = chemically synthesized
  source 1..22: mol_type = other DNA
cttccctagtttgtttcttatt

SEQ ID NO: 145783 - DNA, 22 bp, synthetic construct
  misc_feature 1..22: note = chemically synthesized
  source 1..22: mol_type = other DNA
ccctagtttgtttcttattctg

SEQ ID NO: 145784 - DNA, 22 bp, synthetic construct
  misc_feature 1..22: note = chemically synthesized
  source 1..22: mol_type = other DNA
cctagtttgtttcttattctgc

SEQ ID NO: 145785 - DNA, 22 bp, synthetic construct
  misc_feature 1..22: note = chemically synthesized
  source 1..22: mol_type = other DNA
gtttgtttcttattctgctttc

SEQ ID NO: 145786 - DNA, 22 bp, synthetic construct
  misc_feature 1..22: note = chemically synthesized
  source 1..22: mol_type = other DNA
gtttcttattctgctttcttcc

SEQ ID NO: 145787 - DNA, 22 bp, synthetic construct
  misc_feature 1..22: note = chemically synthesized
  source 1..22: mol_type = other DNA
tttcttattctgctttcttcca

SEQ ID NO: 145788 - DNA, 22 bp, synthetic construct
  misc_feature 1..22: note = chemically synthesized
  source 1..22: mol_type = other DNA
cttattctgctttcttccaagt

SEQ ID NO: 145789 - DNA, 22 bp, synthetic construct
  misc_feature 1..22: note = chemically synthesized
  source 1..22: mol_type = other DNA
ttattctgctttcttccaagtt

SEQ ID NO: 145790 - DNA, 22 bp, synthetic construct
  misc_feature 1..22: note = chemically synthesized
  source 1..22: mol_type = other DNA
attctgctttcttccaagttga

SEQ ID NO: 145791 - DNA, 22 bp, synthetic construct
  misc_feature 1..22: note = chemically synthesized
  source 1..22: mol_type = other DNA
ttctgctttcttccaagttgat

SEQ ID NO: 145792 - DNA, 22 bp, synthetic construct
  misc_feature 1..22: note = chemically synthesized
  source 1..22: mol_type = other DNA
tgctttcttccaagttgatgct

SEQ ID NO: 145793 - DNA, 22 bp, synthetic construct
  misc_feature 1..22: note = chemically synthesized
  source 1..22: mol_type = other DNA
ctttcttccaagttgatgctgg

SEQ ID NO: 145794 - DNA, 22 bp, synthetic construct
  misc_feature 1..22: note = chemically synthesized
  source 1..22: mol_type = other DNA
tcttccaagttgatgctggata

SEQ ID NO: 145795 - DNA, 22 bp, synthetic construct
  misc_feature 1..22: note = chemically synthesized
  source 1..22: mol_type = other DNA
cttccaagttgatgctggatag

SEQ ID NO: 145796 - DNA, 22 bp, synthetic construct
  misc_feature 1..22: note = chemically synthesized
  source 1..22: mol_type = other DNA
ttccaagttgatgctggataga

SEQ ID NO: 145797 - DNA, 22 bp, synthetic construct
  misc_feature 1..22: note = chemically synthesized
  source 1..22: mol_type = other DNA
ccaagttgatgctggatagagg

SEQ ID NO: 145798 - DNA, 22 bp, synthetic construct
  misc_feature 1..22: note = chemically synthesized
  source 1..22: mol_type = other DNA
caagttgatgctggatagaggt

SEQ ID NO: 145799 - DNA, 22 bp, synthetic construct
  misc_feature 1..22: note = chemically synthesized
  source 1..22: mol_type = other DNA
atgctggatagaggtgtttatt

SEQ ID NO: 145800 - DNA, 22 bp, synthetic construct
  misc_feature 1..22: note = chemically synthesized
  source 1..22: mol_type = other DNA
gatagaggtgtttatttctatt

SEQ ID NO: 145801 - DNA, 22 bp, synthetic construct
  misc_feature 1..22: note = chemically synthesized
  source 1..22: mol_type = other DNA
atttctattctaaaaagtgatg

SEQ ID NO: 145802 - DNA, 22 bp, synthetic construct
  misc_feature 1..22: note = chemically synthesized
  source 1..22: mol_type = other DNA
tttctattctaaaaagtgatga

SEQ ID NO: 145803 - DNA, 22 bp, synthetic construct
  misc_feature 1..22: note = chemically synthesized
  source 1..22: mol_type = other DNA
ctattctaaaaagtgatgaaat

SEQ ID NO: 145804 - DNA, 22 bp, synthetic construct
  misc_feature 1..22: note = chemically synthesized
  source 1..22: mol_type = other DNA
tattctaaaaagtgatgaaatt

SEQ ID NO: 145805 - DNA, 22 bp, synthetic construct
  misc_feature 1..22: note = chemically synthesized
  source 1..22: mol_type = other DNA
ttctaaaaagtgatgaaattgg

SEQ ID NO: 145806 - DNA, 22 bp, synthetic construct
  misc_feature 1..22: note = chemically synthesized
  source 1..22: mol_type = other DNA
taaaaagtgatgaaattggccg

SEQ ID NO: 145807 - DNA, 22 bp, synthetic construct
  misc_feature 1..22: note = chemically synthesized
  source 1..22: mol_type = other DNA
aaaagtgatgaaattggccggg

SEQ ID NO: 145808 - DNA, 22 bp, synthetic construct
  misc_feature 1..22: note = chemically synthesized
  source 1..22: mol_type = other DNA
gccgggcgcggtggctcacacc

SEQ ID NO: 145809 - DNA, 22 bp, synthetic construct
  misc_feature 1..22: note = chemically synthesized
  source 1..22: mol_type = other DNA
acacctgtaatcccagcacttt

SEQ ID NO: 145810 - DNA, 22 bp, synthetic construct
  misc_feature 1..22: note = chemically synthesized
  source 1..22: mol_type = other DNA
taatcccagcactttgggaggc

SEQ ID NO: 145811 - DNA, 22 bp, synthetic construct
  misc_feature 1..22: note = chemically synthesized
  source 1..22: mol_type = other DNA
tgggaggctgaggtgggcggat

SEQ ID NO: 145812 - DNA, 22 bp, synthetic construct
  misc_feature 1..22: note = chemically synthesized
  source 1..22: mol_type = other DNA
gggaggctgaggtgggcggatc

SEQ ID NO: 145813 - DNA, 22 bp, synthetic construct
  misc_feature 1..22: note = chemically synthesized
  source 1..22: mol_type = other DNA
ggaggctgaggtgggcggatca

SEQ ID NO: 145814 - DNA, 22 bp, synthetic construct
  misc_feature 1..22: note = chemically synthesized
  source 1..22: mol_type = other DNA
aggtgggcggatcacgaggtca

SEQ ID NO: 145815 - DNA, 22 bp, synthetic construct
  misc_feature 1..22: note = chemically synthesized
  source 1..22: mol_type = other DNA
gctaacatggtgaaaccccatc

SEQ ID NO: 145816 - DNA, 22 bp, synthetic construct
  misc_feature 1..22: note = chemically synthesized
  source 1..22: mol_type = other DNA
acatggtgaaaccccatctcta

SEQ ID NO: 145817 - DNA, 22 bp, synthetic construct
  misc_feature 1..22: note = chemically synthesized
  source 1..22: mol_type = other DNA
tactaaaaatacaaaaaattag

SEQ ID NO: 145818 - DNA, 22 bp, synthetic construct
  misc_feature 1..22: note = chemically synthesized
  source 1..22: mol_type = other DNA
ctaaaaatacaaaaaattagcc

SEQ ID NO: 145819 - DNA, 22 bp, synthetic construct
  misc_feature 1..22: note = chemically synthesized
  source 1..22: mol_type = other DNA
aaaatacaaaaaattagccaga

SEQ ID NO: 145820 - DNA, 22 bp, synthetic construct
  misc_feature 1..22: note = chemically synthesized
  source 1..22: mol_type = other DNA
gccagagacagtggcgggtgcc

SEQ ID NO: 145821 - DNA, 22 bp, synthetic construct
  misc_feature 1..22: note = chemically synthesized
  source 1..22: mol_type = other DNA
tagtcccagctactcgggaggc

SEQ ID NO: 145822 - DNA, 22 bp, synthetic construct
  misc_feature 1..22: note = chemically synthesized
  source 1..22: mol_type = other DNA
ctcgggaggctgaggcaggaga

SEQ ID NO: 145823 - DNA, 22 bp, synthetic construct
  misc_feature 1..22: note = chemically synthesized
  source 1..22: mol_type = other DNA
gggaggctgaggcaggagaatg

SEQ ID NO: 145824 - DNA, 22 bp, synthetic construct
  misc_feature 1..22: note = chemically synthesized
  source 1..22: mol_type = other DNA
aggcaggagaatggcgtgaacc

SEQ ID NO: 145825 - DNA, 22 bp, synthetic construct
  misc_feature 1..22: note = chemically synthesized
  source 1..22: mol_type = other DNA
ggaggcagagcttgcggtgagc

SEQ ID NO: 145826 - DNA, 22 bp, synthetic construct
  misc_feature 1..22: note = chemically synthesized
  source 1..22: mol_type = other DNA
gcggtgagcagagatcgcgcca

SEQ ID NO: 145827 - DNA, 22 bp, synthetic construct
  misc_feature 1..22: note = chemically synthesized
  source 1..22: mol_type = other DNA
cggtgagcagagatcgcgccac

SEQ ID NO: 145828 - DNA, 22 bp, synthetic construct
  misc_feature 1..22: note = chemically synthesized
  source 1..22: mol_type = other DNA
cacactccagcctgggtgacaa

SEQ ID NO: 145829 - DNA, 22 bp, synthetic construct
  misc_feature 1..22: note = chemically synthesized
  source 1..22: mol_type = other DNA
cagcctgggtgacaaagcgaga

SEQ ID NO: 145830 - DNA, 22 bp, synthetic construct
  misc_feature 1..22: note = chemically synthesized
  source 1..22: mol_type = other DNA
ggtgacaaagcgagactccatc

SEQ ID NO: 145831 - DNA, 22 bp, synthetic construct
  misc_feature 1..22: note = chemically synthesized
  source 1..22: mol_type = other DNA
catctcaaaaaaaaaaaaaaaa

SEQ ID NO: 145832 - DNA, 22 bp, synthetic construct
  misc_feature 1..22: note = chemically synthesized
  source 1..22: mol_type = other DNA
aaaaaaaaaaaaaaaaaaaaga

SEQ ID NO: 145833 - DNA, 22 bp, synthetic construct
  misc_feature 1..22: note = chemically synthesized
  source 1..22: mol_type = other DNA
atgaaattgtgtattcaatgta

SEQ ID NO: 145834 - DNA, 22 bp, synthetic construct
  misc_feature 1..22: note = chemically synthesized
  source 1..22: mol_type = other DNA
tgtattcaatgtagtctcaaga

SEQ ID NO: 145835 - DNA, 22 bp, synthetic construct
  misc_feature 1..22: note = chemically synthesized
  source 1..22: mol_type = other DNA
aatgtagtctcaagagaattga

SEQ ID NO: 145836 - DNA, 22 bp, synthetic construct
  misc_feature 1..22: note = chemically synthesized
  source 1..22: mol_type = other DNA
aagagaattgaaaaccaagaaa

SEQ ID NO: 145837 - DNA, 22 bp, synthetic construct
  misc_feature 1..22: note = chemically synthesized
  source 1..22: mol_type = other DNA
aaaaccaagaaaggctgtggct

SEQ ID NO: 145838 - DNA, 22 bp, synthetic construct
  misc_feature 1..22: note = chemically synthesized
  source 1..22: mol_type = other DNA
tggcttcttccacataaagcct

SEQ ID NO: 145839 - DNA, 22 bp, synthetic construct
  misc_feature 1..22: note = chemically synthesized
  source 1..22: mol_type = other DNA
cttccacataaagcctggatga

SEQ ID NO: 145840 - DNA, 22 bp, synthetic construct
  misc_feature 1..22: note = chemically synthesized
  source 1..22: mol_type = other DNA
ttccacataaagcctggatgaa

SEQ ID NO: 145841 - DNA, 22 bp, synthetic construct
  misc_feature 1..22: note = chemically synthesized
  source 1..22: mol_type = other DNA
ccacataaagcctggatgaata

SEQ ID NO: 145842 - DNA, 22 bp, synthetic construct
  misc_feature 1..22: note = chemically synthesized
  source 1..22: mol_type = other DNA
cacataaagcctggatgaataa

SEQ ID NO: 145843 - DNA, 22 bp, synthetic construct
  misc_feature 1..22: note = chemically synthesized
  source 1..22: mol_type = other DNA
gatgaataacaggataacacgt

SEQ ID NO: 145844 - DNA, 22 bp, synthetic construct
  misc_feature 1..22: note = chemically synthesized
  source 1..22: mol_type = other DNA
ttacattgtcacaactcctgat

SEQ ID NO: 145845 - DNA, 22 bp, synthetic construct
  misc_feature 1..22: note = chemically synthesized
  source 1..22: mol_type = other DNA
cattgtcacaactcctgatcca

SEQ ID NO: 145846 - DNA, 22 bp, synthetic construct
  misc_feature 1..22: note = chemically synthesized
  source 1..22: mol_type = other DNA
tcacaactcctgatccaggaat

SEQ ID NO: 145847 - DNA, 22 bp, synthetic construct
  misc_feature 1..22: note = chemically synthesized
  source 1..22: mol_type = other DNA
ctgatccaggaattgatggcta

SEQ ID NO: 145848 - DNA, 22 bp, synthetic construct
  misc_feature 1..22: note = chemically synthesized
  source 1..22: mol_type = other DNA
atccaggaattgatggctaaga

SEQ ID NO: 145849 - DNA, 22 bp, synthetic construct
  misc_feature 1..22: note = chemically synthesized
  source 1..22: mol_type = other DNA
atggctaagatattcgtaattc

SEQ ID NO: 145850 - DNA, 22 bp, synthetic construct
  misc_feature 1..22: note = chemically synthesized
  source 1..22: mol_type = other DNA
agatattcgtaattcttatcct

SEQ ID NO: 145851 - DNA, 22 bp, synthetic construct
  misc_feature 1..22: note = chemically synthesized
  source 1..22: mol_type = other DNA
gtaattcttatccttttcagtt

SEQ ID NO: 145852 - DNA, 22 bp, synthetic construct
  misc_feature 1..22: note = chemically synthesized
  source 1..22: mol_type = other DNA
ttatccttttcagttgtaactt

SEQ ID NO: 145853 - DNA, 22 bp, synthetic construct
  misc_feature 1..22: note = chemically synthesized
  source 1..22: mol_type = other DNA
atccttttcagttgtaacttat

SEQ ID NO: 145854 - DNA, 22 bp, synthetic construct
  misc_feature 1..22: note = chemically synthesized
  source 1..22: mol_type = other DNA
tccttttcagttgtaacttatt

SEQ ID NO: 145855 - DNA, 22 bp, synthetic construct
  misc_feature 1..22: note = chemically synthesized
  source 1..22: mol_type = other DNA
ttcagttgtaacttattcctat

SEQ ID NO: 145856 - DNA, 22 bp, synthetic construct
  misc_feature 1..22: note = chemically synthesized
  source 1..22: mol_type = other DNA
tcagttgtaacttattcctatt

SEQ ID NO: 145857 - DNA, 22 bp, synthetic construct
  misc_feature 1..22: note = chemically synthesized
  source 1..22: mol_type = other DNA
cagttgtaacttattcctattt

SEQ ID NO: 145858 - DNA, 22 bp, synthetic construct
  misc_feature 1..22: note = chemically synthesized
  source 1..22: mol_type = other DNA
agttgtaacttattcctatttg

SEQ ID NO: 145859 - DNA, 22 bp, synthetic construct
  misc_feature 1..22: note = chemically synthesized
  source 1..22: mol_type = other DNA
taacttattcctatttgtcagc

SEQ ID NO: 145860 - DNA, 22 bp, synthetic construct
  misc_feature 1..22: note = chemically synthesized
  source 1..22: mol_type = other DNA
attcctatttgtcagcattcag

SEQ ID NO: 145861 - DNA, 22 bp, synthetic construct
  misc_feature 1..22: note = chemically synthesized
  source 1..22: mol_type = other DNA
ttcctatttgtcagcattcagg

SEQ ID NO: 145862 - DNA, 22 bp, synthetic construct
  misc_feature 1..22: note = chemically synthesized
  source 1..22: mol_type = other DNA
ctatttgtcagcattcaggtta

SEQ ID NO: 145863 - DNA, 22 bp, synthetic construct
  misc_feature 1..22: note = chemically synthesized
  source 1..22: mol_type = other DNA
tttgtcagcattcaggttatta

SEQ ID NO: 145864 - DNA, 22 bp, synthetic construct
  misc_feature 1..22: note = chemically synthesized
  source 1..22: mol_type = other DNA
gtcagcattcaggttattagcg

SEQ ID NO: 145865 - DNA, 22 bp, synthetic construct
  misc_feature 1..22: note = chemically synthesized
  source 1..22: mol_type = other DNA
tcagcattcaggttattagcgg

SEQ ID NO: 145866 - DNA, 22 bp, synthetic construct
  misc_feature 1..22: note = chemically synthesized
  source 1..22: mol_type = other DNA
aggttattagcggctgctggcg

SEQ ID NO: 145867 - DNA, 22 bp, synthetic construct
  misc_feature 1..22: note = chemically synthesized
  source 1..22: mol_type = other DNA
ttagcggctgctggcgaagtcc

SEQ ID NO: 145868 - DNA, 22 bp, synthetic construct
  misc_feature 1..22: note = chemically synthesized
  source 1..22: mol_type = other DNA
gcggctgctggcgaagtccttg

SEQ ID NO: 145869 - DNA, 22 bp, synthetic construct
  misc_feature 1..22: note = chemically synthesized
  source 1..22: mol_type = other DNA
ctggcgaagtccttgagaaata

SEQ ID NO: 145870 - DNA, 22 bp, synthetic construct
  misc_feature 1..22: note = chemically synthesized
  source 1..22: mol_type = other DNA
gcgaagtccttgagaaataaac

SEQ ID NO: 145871 - DNA, 22 bp, synthetic construct
  misc_feature 1..22: note = chemically synthesized
  source 1..22: mol_type = other DNA
gagaaataaactgcacactgga

SEQ ID NO: 145872 - DNA, 22 bp, synthetic construct
  misc_feature 1..22: note = chemically synthesized
  source 1..22: mol_type = other DNA
agaaataaactgcacactggat

SEQ ID NO: 145873 - DNA, 22 bp, synthetic construct
  misc_feature 1..22: note = chemically synthesized
  source 1..22: mol_type = other DNA
cacactggatggtgggggtagt

SEQ ID NO: 145874 - DNA, 22 bp, synthetic construct
  misc_feature 1..22: note = chemically synthesized
  source 1..22: mol_type = other DNA
gatggtgggggtagtgtaggaa

SEQ ID NO: 145875 - DNA, 22 bp, synthetic construct
  misc_feature 1..22: note = chemically synthesized
  source 1..22: mol_type = other DNA
caaattaagcctgaacagcaaa

SEQ ID NO: 145876 - DNA, 22 bp, synthetic construct
  misc_feature 1..22: note = chemically synthesized
  source 1..22: mol_type = other DNA
aaattaagcctgaacagcaaag

SEQ ID NO: 145877 - DNA, 22 bp, synthetic construct
  misc_feature 1..22: note = chemically synthesized
  source 1..22: mol_type = other DNA
agcctgaacagcaaagttcccc

SEQ ID NO: 145878 - DNA, 22 bp, synthetic construct
  misc_feature 1..22: note = chemically synthesized
  source 1..22: mol_type = other DNA
aacagcaaagttcccctgagaa

SEQ ID NO: 145879 - DNA, 22 bp, synthetic construct
  misc_feature 1..22: note = chemically synthesized
  source 1..22: mol_type = other DNA
ccctgagaaggccacctggatt

SEQ ID NO: 145880 - DNA, 22 bp, synthetic construct
  misc_feature 1..22: note = chemically synthesized
  source 1..22: mol_type = other DNA
agaaggccacctggattctatc

SEQ ID NO: 145881 - DNA, 22 bp, synthetic construct
  misc_feature 1..22: note = chemically synthesized
  source 1..22: mol_type = other DNA
gattctatcagaaactcgaatg

SEQ ID NO: 145882 - DNA, 22 bp, synthetic construct
  misc_feature 1..22: note = chemically synthesized
  source 1..22: mol_type = other DNA
tatcagaaactcgaatgtccat

SEQ ID NO: 145883 - DNA, 22 bp, synthetic construct
  misc_feature 1..22: note = chemically synthesized
  source 1..22: mol_type = other DNA
tcagaaactcgaatgtccatct

SEQ ID NO: 145884 - DNA, 22 bp, synthetic construct
  misc_feature 1..22: note = chemically synthesized
  source 1..22: mol_type = other DNA
gaatgtccatcttgcaaaactt

SEQ ID NO: 145885 - DNA, 22 bp, synthetic construct
  misc_feature 1..22: note = chemically synthesized
  source 1..22: mol_type = other DNA
gcaaaacttccttgcccaaacc

SEQ ID NO: 145886 - DNA, 22 bp, synthetic construct
  misc_feature 1..22: note = chemically synthesized
  source 1..22: mol_type = other DNA
caaaacttccttgcccaaaccc

SEQ ID NO: 145887 - DNA, 22 bp, synthetic construct
  misc_feature 1..22: note = chemically synthesized
  source 1..22: mol_type = other DNA
ccttgcccaaaccccacccctg

SEQ ID NO: 145888 - DNA, 22 bp, synthetic construct
  misc_feature 1..22: note = chemically synthesized
  source 1..22: mol_type = other DNA
cttgcccaaaccccacccctgg

SEQ ID NO: 145889 - DNA, 22 bp, synthetic construct
  misc_feature 1..22: note = chemically synthesized
  source 1..22: mol_type = other DNA
gcccaaaccccacccctggagt

SEQ ID NO: 145890 - DNA, 22 bp, synthetic construct
  misc_feature 1..22: note = chemically synthesized
  source 1..22: mol_type = other DNA
cccaaaccccacccctggagtc

SEQ ID NO: 145891 - DNA, 22 bp, synthetic construct
  misc_feature 1..22: note = chemically synthesized
  source 1..22: mol_type = other DNA
gagtcacaacccacccttgacc

SEQ ID NO: 145892 - DNA, 22 bp, synthetic construct
  misc_feature 1..22: note = chemically synthesized
  source 1..22: mol_type = other DNA
gaccaatagattcattttactg

SEQ ID NO: 145893 - DNA, 22 bp, synthetic construct
  misc_feature 1..22: note = chemically synthesized
  source 1..22: mol_type = other DNA
accaatagattcattttactga

SEQ ID NO: 145894 - DNA, 22 bp, synthetic construct
  misc_feature 1..22: note = chemically synthesized
  source 1..22: mol_type = other DNA
attttactgagggaggcaaagg

SEQ ID NO: 145895 - DNA, 22 bp, synthetic construct
  misc_feature 1..22: note = chemically synthesized
  source 1..22: mol_type = other DNA
tactgagggaggcaaagggctg

SEQ ID NO: 145896 - DNA, 22 bp, synthetic construct
  misc_feature 1..22: note = chemically synthesized
  source 1..22: mol_type = other DNA
actgagggaggcaaagggctgg

SEQ ID NO: 145897 - DNA, 22 bp, synthetic construct
  misc_feature 1..22: note = chemically synthesized
  source 1..22: mol_type = other DNA
ctgagggaggcaaagggctggt

SEQ ID NO: 145898 - DNA, 22 bp, synthetic construct
  misc_feature 1..22: note = chemically synthesized
  source 1..22: mol_type = other DNA
agggaggcaaagggctggtcaa

SEQ ID NO: 145899 - DNA, 22 bp, synthetic construct
  misc_feature 1..22: note = chemically synthesized
  source 1..22: mol_type = other DNA
gtcaatagattcatttcactgg

SEQ ID NO: 145900 - DNA, 22 bp, synthetic construct
  misc_feature 1..22: note = chemically synthesized
  source 1..22: mol_type = other DNA
atttcactgggagaggcaaagg

SEQ ID NO: 145901 - DNA, 22 bp, synthetic construct
  misc_feature 1..22: note = chemically synthesized
  source 1..22: mol_type = other DNA
cactgggagaggcaaagggctg

SEQ ID NO: 145902 - DNA, 22 bp, synthetic construct
  misc_feature 1..22: note = chemically synthesized
  source 1..22: mol_type = other DNA
actgggagaggcaaagggctgg

SEQ ID NO: 145903 - DNA, 22 bp, synthetic construct
  misc_feature 1..22: note = chemically synthesized
  source 1..22: mol_type = other DNA
ggagaggcaaagggctgggggc

SEQ ID NO: 145904 - DNA, 22 bp, synthetic construct
  misc_feature 1..22: note = chemically synthesized
  source 1..22: mol_type = other DNA
ggggccagagaggagaagtaaa

SEQ ID NO: 145905 - DNA, 22 bp, synthetic construct
  misc_feature 1..22: note = chemically synthesized
  source 1..22: mol_type = other DNA
ctggctcatctgtgatcaccag

SEQ ID NO: 145906 - DNA, 22 bp, synthetic construct
  misc_feature 1..22: note = chemically synthesized
  source 1..22: mol_type = other DNA
tggctcatctgtgatcaccagg

SEQ ID NO: 145907 - DNA, 22 bp, synthetic construct
  misc_feature 1..22: note = chemically synthesized
  source 1..22: mol_type = other DNA
gctcatctgtgatcaccaggaa

SEQ ID NO: 145908 - DNA, 22 bp, synthetic construct
  misc_feature 1..22: note = chemically synthesized
  source 1..22: mol_type = other DNA
atctgtgatcaccaggaaactc

SEQ ID NO: 145909 - DNA, 22 bp, synthetic construct
  misc_feature 1..22: note = chemically synthesized
  source 1..22: mol_type = other DNA
tgatcaccaggaaactcccaga

SEQ ID NO: 145910 - DNA, 22 bp, synthetic construct
  misc_feature 1..22: note = chemically synthesized
  source 1..22: mol_type = other DNA
ccagatctgacactgtagtgca

SEQ ID NO: 145911 - DNA, 22 bp, synthetic construct
  misc_feature 1..22: note = chemically synthesized
  source 1..22: mol_type = other DNA
acactgtagtgcatttcactgc

SEQ ID NO: 145912 - DNA, 22 bp, synthetic construct
  misc_feature 1..22: note = chemically synthesized
  source 1..22: mol_type = other DNA
tagtgcatttcactgctgacaa

SEQ ID NO: 145913 - DNA, 22 bp, synthetic construct
  misc_feature 1..22: note = chemically synthesized
  source 1..22: mol_type = other DNA
cactgctgacaagaaggctgct

SEQ ID NO: 145914 - DNA, 22 bp, synthetic construct
  misc_feature 1..22: note = chemically synthesized
  source 1..22: mol_type = other DNA
actgctgacaagaaggctgctg

SEQ ID NO: 145915 - DNA, 22 bp, synthetic construct
  misc_feature 1..22: note = chemically synthesized
  source 1..22: mol_type = other DNA
ctgacaagaaggctgctgccac

SEQ ID NO: 145916 - DNA, 22 bp, synthetic construct
  misc_feature 1..22: note = chemically synthesized
  source 1..22: mol_type = other DNA
acaagaaggctgctgccaccag

SEQ ID NO: 145917 - DNA, 22 bp, synthetic construct
  misc_feature 1..22: note = chemically synthesized
  source 1..22: mol_type = other DNA
ctgccaccagcctgtgaagcaa

SEQ ID NO: 145918 - DNA, 22 bp, synthetic construct
  misc_feature 1..22: note = chemically synthesized
  source 1..22: mol_type = other DNA
ccaccagcctgtgaagcaaggt

SEQ ID NO: 145919 - DNA, 22 bp, synthetic construct
  misc_feature 1..22: note = chemically synthesized
  source 1..22: mol_type = other DNA
tgaagcaaggttaaggtgagaa

SEQ ID NO: 145920 - DNA, 22 bp, synthetic construct
  misc_feature 1..22: note = chemically synthesized
  source 1..22: mol_type = other DNA
aggtgagaaggctggaggtgag

SEQ ID NO: 145921 - DNA, 22 bp, synthetic construct
  misc_feature 1..22: note = chemically synthesized
  source 1..22: mol_type = other DNA
gaggtgagattctgggcaggta

SEQ ID NO: 145922 - DNA, 22 bp, synthetic construct
  misc_feature 1..22: note = chemically synthesized
  source 1..22: mol_type = other DNA
tgggcaggtaggtactggaagc

SEQ ID NO: 145923 - DNA, 22 bp, synthetic construct
  misc_feature 1..22: note = chemically synthesized
  source 1..22: mol_type = other DNA
ggcaggtaggtactggaagccg

SEQ ID NO: 145924 - DNA, 22 bp, synthetic construct
  misc_feature 1..22: note = chemically synthesized
  source 1..22: mol_type = other DNA
gaagccgggacaaggtgcagaa

SEQ ID NO: 145925 - DNA, 22 bp, synthetic construct
  misc_feature 1..22: note = chemically synthesized
  source 1..22: mol_type = other DNA
ctgaaagagggattagcccgtt

SEQ ID NO: 145926 - DNA, 22 bp, synthetic construct
  misc_feature 1..22: note = chemically synthesized
  source 1..22: mol_type = other DNA
tgaaagagggattagcccgttg

SEQ ID NO: 145927 - DNA, 22 bp, synthetic construct
  misc_feature 1..22: note = chemically synthesized
  source 1..22: mol_type = other DNA
aaagagggattagcccgttgtc

SEQ ID NO: 145928 - DNA, 22 bp, synthetic construct
  misc_feature 1..22: note = chemically synthesized
  source 1..22: mol_type = other DNA
gcccgttgtcttacatagtctg

SEQ ID NO: 145929 - DNA, 22 bp, synthetic construct
  misc_feature 1..22: note = chemically synthesized
  source 1..22: mol_type = other DNA
tcttacatagtctgactttgca

SEQ ID NO: 145930 - DNA, 22 bp, synthetic construct
  misc_feature 1..22: note = chemically synthesized
  source 1..22: mol_type = other DNA
acatagtctgactttgcacctg

SEQ ID NO: 145931 - DNA, 22 bp, synthetic construct
  misc_feature 1..22: note = chemically synthesized
  source 1..22: mol_type = other DNA
catagtctgactttgcacctgc

SEQ ID NO: 145932 - DNA, 22 bp, synthetic construct
  misc_feature 1..22: note = chemically synthesized
  source 1..22: mol_type = other DNA
actttgcacctgctctgtgatt

SEQ ID NO: 145933 - DNA, 22 bp, synthetic construct
  misc_feature 1..22: note = chemically synthesized
  source 1..22: mol_type = other DNA
tgcacctgctctgtgattatga

SEQ ID NO: 145934 - DNA, 22 bp, synthetic construct
  misc_feature 1..22: note = chemically synthesized
  source 1..22: mol_type = other DNA
gcacctgctctgtgattatgac

SEQ ID NO: 145935 - DNA, 22 bp, synthetic construct
  misc_feature 1..22: note = chemically synthesized
  source 1..22: mol_type = other DNA
cacctgctctgtgattatgact

SEQ ID NO: 145936 - DNA, 22 bp, synthetic construct
  misc_feature 1..22: note = chemically synthesized
  source 1..22: mol_type = other DNA
ctctgtgattatgactatccca

SEQ ID NO: 145937 - DNA, 22 bp, synthetic construct
  misc_feature 1..22: note = chemically synthesized
  source 1..22: mol_type = other DNA
tgtgattatgactatcccacag

SEQ ID NO: 145938 - DNA, 22 bp, synthetic construct
  misc_feature 1..22: note = chemically synthesized
  source 1..22: mol_type = other DNA
tgattatgactatcccacagtc

SEQ ID NO: 145939 - DNA, 22 bp, synthetic construct
  misc_feature 1..22: note = chemically synthesized
  source 1..22: mol_type = other DNA
tgactatcccacagtctcctgg

SEQ ID NO: 145940 - DNA, 22 bp, synthetic construct
  misc_feature 1..22: note = chemically synthesized
  source 1..22: mol_type = other DNA
tcccacagtctcctggttgtct

SEQ ID NO: 145941 - DNA, 22 bp, synthetic construct
  misc_feature 1..22: note = chemically synthesized
  source 1..22: mol_type = other DNA
ctggttgtctacccatggacct

SEQ ID NO: 145942 - DNA, 22 bp, synthetic construct
  misc_feature 1..22: note = chemically synthesized
  source 1..22: mol_type = other DNA
gttgtctacccatggacctaga

SEQ ID NO: 145943 - DNA, 22 bp, synthetic construct
  misc_feature 1..22: note = chemically synthesized
  source 1..22: mol_type = other DNA
tctacccatggacctagaggta

SEQ ID NO: 145944 - DNA, 22 bp, synthetic construct
  misc_feature 1..22: note = chemically synthesized
  source 1..22: mol_type = other DNA
cccatggacctagaggtacttt

SEQ ID NO: 145945 - DNA, 22 bp, synthetic construct
  misc_feature 1..22: note = chemically synthesized
  source 1..22: mol_type = other DNA
gaggtactttgaaagttttgga

SEQ ID NO: 145946 - DNA, 22 bp, synthetic construct
  misc_feature 1..22: note = chemically synthesized
  source 1..22: mol_type = other DNA
tgaaagttttggatatctgggc

SEQ ID NO: 145947 - DNA, 22 bp, synthetic construct
  misc_feature 1..22: note = chemically synthesized
  source 1..22: mol_type = other DNA
gaaagttttggatatctgggct

SEQ ID NO: 145948 - DNA, 22 bp, synthetic construct
  misc_feature 1..22: note = chemically synthesized
  source 1..22: mol_type = other DNA
aaagttttggatatctgggctc

SEQ ID NO: 145949 - DNA, 22 bp, synthetic construct
  misc_feature 1..22: note = chemically synthesized
  source 1..22: mol_type = other DNA
tggatatctgggctctgactgt

SEQ ID NO: 145950 - DNA, 22 bp, synthetic construct
  misc_feature 1..22: note = chemically synthesized
  source 1..22: mol_type = other DNA
ggatatctgggctctgactgtg

SEQ ID NO: 145951 - DNA, 22 bp, synthetic construct
  misc_feature 1..22: note = chemically synthesized
  source 1..22: mol_type = other DNA
gatatctgggctctgactgtgc

SEQ ID NO: 145952 - DNA, 22 bp, synthetic construct
  misc_feature 1..22: note = chemically synthesized
  source 1..22: mol_type = other DNA
ggctctgactgtgcaataatgg

SEQ ID NO: 145953 - DNA, 22 bp, synthetic construct
  misc_feature 1..22: note = chemically synthesized
  source 1..22: mol_type = other DNA
tgactgtgcaataatgggcaac

SEQ ID NO: 145954 - DNA, 22 bp, synthetic construct
  misc_feature 1..22: note = chemically synthesized
  source 1..22: mol_type = other DNA
actgtgcaataatgggcaaccc

SEQ ID NO: 145955 - DNA, 22 bp, synthetic construct
  misc_feature 1..22: note = chemically synthesized
  source 1..22: mol_type = other DNA
tgcaataatgggcaaccccaaa

SEQ ID NO: 145956 - DNA, 22 bp, synthetic construct
  misc_feature 1..22: note = chemically synthesized
  source 1..22: mol_type = other DNA
atctccttcggaaaagctgtta

SEQ ID NO: 145957 - DNA, 22 bp, synthetic construct
  misc_feature 1..22: note = chemically synthesized
  source 1..22: mol_type = other DNA
cttcggaaaagctgttatgctc

SEQ ID NO: 145958 - DNA, 22 bp, synthetic construct
  misc_feature 1..22: note = chemically synthesized
  source 1..22: mol_type = other DNA
cggaaaagctgttatgctcacg

SEQ ID NO: 145959 - DNA, 22 bp, synthetic construct
  misc_feature 1..22: note = chemically synthesized
  source 1..22: mol_type = other DNA
ggaaaagctgttatgctcacgg

SEQ ID NO: 145960 - DNA, 22 bp, synthetic construct
  misc_feature 1..22: note = chemically synthesized
  source 1..22: mol_type = other DNA
ttatgctcacggatgacctcaa

SEQ ID NO: 145961 - DNA, 22 bp, synthetic construct
  misc_feature 1..22: note = chemically synthesized
  source 1..22: mol_type = other DNA
tgctcacggatgacctcaaagg

SEQ ID NO: 145962 - DNA, 22 bp, synthetic construct
  misc_feature 1..22: note = chemically synthesized
  source 1..22: mol_type = other DNA
acggatgacctcaaaggcacct

SEQ ID NO: 145963 - DNA, 22 bp, synthetic construct
  misc_feature 1..22: note = chemically synthesized
  source 1..22: mol_type = other DNA
aaaggcacctttgctacactga

SEQ ID NO: 145964 - DNA, 22 bp, synthetic construct
  misc_feature 1..22: note = chemically synthesized
  source 1..22: mol_type = other DNA
tgctacactgagtgacctgcac

SEQ ID NO: 145965 - DNA, 22 bp, synthetic construct
  misc_feature 1..22: note = chemically synthesized
  source 1..22: mol_type = other DNA
gctacactgagtgacctgcact

SEQ ID NO: 145966 - DNA, 22 bp, synthetic construct
  misc_feature 1..22: note = chemically synthesized
  source 1..22: mol_type = other DNA
ctacactgagtgacctgcactg

SEQ ID NO: 145967 - DNA, 22 bp, synthetic construct
  misc_feature 1..22: note = chemically synthesized
  source 1..22: mol_type = other DNA
cactgagtgacctgcactgtaa

SEQ ID NO: 145968 - DNA, 22 bp, synthetic construct
  misc_feature 1..22: note = chemically synthesized
  source 1..22: mol_type = other DNA
agtgacctgcactgtaacaagc

SEQ ID NO: 145969 - DNA, 22 bp, synthetic construct
  misc_feature 1..22: note = chemically synthesized
  source 1..22: mol_type = other DNA
cactgtaacaagctgcacgtgg

SEQ ID NO: 145970 - DNA, 22 bp, synthetic construct
  misc_feature 1..22: note = chemically synthesized
  source 1..22: mol_type = other DNA
taacaagctgcacgtggaccct

SEQ ID NO: 145971 - DNA, 22 bp, synthetic construct
  misc_feature 1..22: note = chemically synthesized
  source 1..22: mol_type = other DNA
cacgtggaccctgagaacttcc

SEQ ID NO: 145972 - DNA, 22 bp, synthetic construct
  misc_feature 1..22: note = chemically synthesized
  source 1..22: mol_type = other DNA
agaacttcctggtgagtagtaa

SEQ ID NO: 145973 - DNA, 22 bp, synthetic construct
  misc_feature 1..22: note = chemically synthesized
  source 1..22: mol_type = other DNA
cctggtgagtagtaagtacact

SEQ ID NO: 145974 - DNA, 22 bp, synthetic construct
  misc_feature 1..22: note = chemically synthesized
  source 1..22: mol_type = other DNA
ctggtgagtagtaagtacactc

SEQ ID NO: 145975 - DNA, 22 bp, synthetic construct
  misc_feature 1..22: note = chemically synthesized
  source 1..22: mol_type = other DNA
gtgagtagtaagtacactcacg

SEQ ID NO: 145976 - DNA, 22 bp, synthetic construct
  misc_feature 1..22: note = chemically synthesized
  source 1..22: mol_type = other DNA
acgctttcttctttacccttag

SEQ ID NO: 145977 - DNA, 22 bp, synthetic construct
  misc_feature 1..22: note = chemically synthesized
  source 1..22: mol_type = other DNA
tcttctttacccttagatattt

SEQ ID NO: 145978 - DNA, 22 bp, synthetic construct
  misc_feature 1..22: note = chemically synthesized
  source 1..22: mol_type = other DNA
cttctttacccttagatatttg

SEQ ID NO: 145979 - DNA, 22 bp, synthetic construct
  misc_feature 1..22: note = chemically synthesized
  source 1..22: mol_type = other DNA
ttctttacccttagatatttgc

SEQ ID NO: 145980 - DNA, 22 bp, synthetic construct
  misc_feature 1..22: note = chemically synthesized
  source 1..22: mol_type = other DNA
ctttacccttagatatttgcac

SEQ ID NO: 145981 - DNA, 22 bp, synthetic construct
  misc_feature 1..22: note = chemically synthesized
  source 1..22: mol_type = other DNA
tttacccttagatatttgcact

SEQ ID NO: 145982 - DNA, 22 bp, synthetic construct
  misc_feature 1..22: note = chemically synthesized
  source 1..22: mol_type = other DNA
tacccttagatatttgcactat

SEQ ID NO: 145983 - DNA, 22 bp, synthetic construct
  misc_feature 1..22: note = chemically synthesized
  source 1..22: mol_type = other DNA
acccttagatatttgcactatg

SEQ ID NO: 145984 - DNA, 22 bp, synthetic construct
  misc_feature 1..22: note = chemically synthesized
  source 1..22: mol_type = other DNA
cccttagatatttgcactatgg

SEQ ID NO: 145985 - DNA, 22 bp, synthetic construct
  misc_feature 1..22: note = chemically synthesized
  source 1..22: mol_type = other DNA
agatatttgcactatgggtact

SEQ ID NO: 145986 - DNA, 22 bp, synthetic construct
  misc_feature 1..22: note = chemically synthesized
  source 1..22: mol_type = other DNA
gatatttgcactatgggtactt

SEQ ID NO: 145987 - DNA, 22 bp, synthetic construct
  misc_feature 1..22: note = chemically synthesized
  source 1..22: mol_type = other DNA
gcactatgggtacttttgaaag

SEQ ID NO: 145988 - DNA, 22 bp, synthetic construct
  misc_feature 1..22: note = chemically synthesized
  source 1..22: mol_type = other DNA
cactatgggtacttttgaaagc

SEQ ID NO: 145989 - DNA, 22 bp, synthetic construct
  misc_feature 1..22: note = chemically synthesized
  source 1..22: mol_type = other DNA
tgggtacttttgaaagcagagg

SEQ ID NO: 145990 - DNA, 22 bp, synthetic construct
  misc_feature 1..22: note = chemically synthesized
  source 1..22: mol_type = other DNA
ttgaaagcagaggtggctttct

SEQ ID NO: 145991 - DNA, 22 bp, synthetic construct
  misc_feature 1..22: note = chemically synthesized
  source 1..22: mol_type = other DNA
tgaaagcagaggtggctttctc

SEQ ID NO: 145992 - DNA, 22 bp, synthetic construct
  misc_feature 1..22: note = chemically synthesized
  source 1..22: mol_type = other DNA
gaaagcagaggtggctttctct

SEQ ID NO: 145993 - DNA, 22 bp, synthetic construct
  misc_feature 1..22: note = chemically synthesized
  source 1..22: mol_type = other DNA
aaagcagaggtggctttctctt

SEQ ID NO: 145994 - DNA, 22 bp, synthetic construct
  misc_feature 1..22: note = chemically synthesized
  source 1..22: mol_type = other DNA
tctcttgtgttatgagtcagct

SEQ ID NO: 145995 - DNA, 22 bp, synthetic construct
  misc_feature 1..22: note = chemically synthesized
  source 1..22: mol_type = other DNA
ctcttgtgttatgagtcagcta

SEQ ID NO: 145996 - DNA, 22 bp, synthetic construct
  misc_feature 1..22: note = chemically synthesized
  source 1..22: mol_type = other DNA
tcttgtgttatgagtcagctat

SEQ ID NO: 145997 - DNA, 22 bp, synthetic construct
  misc_feature 1..22: note = chemically synthesized
  source 1..22: mol_type = other DNA
ttgtgttatgagtcagctatgg

SEQ ID NO: 145998 - DNA, 22 bp, synthetic construct
  misc_feature 1..22: note = chemically synthesized
  source 1..22: mol_type = other DNA
gtgttatgagtcagctatggga

SEQ ID NO: 145999 - DNA, 22 bp, synthetic construct
  misc_feature 1..22: note = chemically synthesized
  source 1..22: mol_type = other DNA
tgttatgagtcagctatgggat

SEQ ID NO: 146000 - DNA, 22 bp, synthetic construct
  misc_feature 1..22: note = chemically synthesized
  source 1..22: mol_type = other DNA
tgagtcagctatgggatatgat

SEQ ID NO: 146001 - DNA, 22 bp, synthetic construct
  misc_feature 1..22: note = chemically synthesized
  source 1..22: mol_type = other DNA
tgggatatgatatttcagcagt

SEQ ID NO: 146002 - DNA, 22 bp, synthetic construct
  misc_feature 1..22: note = chemically synthesized
  source 1..22: mol_type = other DNA
cagcagtgggattttgagagtt

SEQ ID NO: 146003 - DNA, 22 bp, synthetic construct
  misc_feature 1..22: note = chemically synthesized
  source 1..22: mol_type = other DNA
agcagtgggattttgagagtta

SEQ ID NO: 146004 - DNA, 22 bp, synthetic construct
  misc_feature 1..22: note = chemically synthesized
  source 1..22: mol_type = other DNA
tgagagttatgttgctgtaaat

SEQ ID NO: 146005 - DNA, 22 bp, synthetic construct
  misc_feature 1..22: note = chemically synthesized
  source 1..22: mol_type = other DNA
gagagttatgttgctgtaaata

SEQ ID NO: 146006 - DNA, 22 bp, synthetic construct
  misc_feature 1..22: note = chemically synthesized
  source 1..22: mol_type = other DNA
agagttatgttgctgtaaataa

SEQ ID NO: 146007 - DNA, 22 bp, synthetic construct
  misc_feature 1..22: note = chemically synthesized
  source 1..22: mol_type = other DNA
tgttgctgtaaataacataact

SEQ ID NO: 146008 - DNA, 22 bp, synthetic construct
  misc_feature 1..22: note = chemically synthesized
  source 1..22: mol_type = other DNA
ctgtaaataacataactaaaat

SEQ ID NO: 146009 - DNA, 22 bp, synthetic construct
  misc_feature 1..22: note = chemically synthesized
  source 1..22: mol_type = other DNA
taaataacataactaaaatttg

SEQ ID NO: 146010 - DNA, 22 bp, synthetic construct
  misc_feature 1..22: note = chemically synthesized
  source 1..22: mol_type = other DNA
aaatttggtagagcaaggacta

SEQ ID NO: 146011 - DNA, 22 bp, synthetic construct
  misc_feature 1..22: note = chemically synthesized
  source 1..22: mol_type = other DNA
ggtagagcaaggactatgaata

SEQ ID NO: 146012 - DNA, 22 bp, synthetic construct
  misc_feature 1..22: note = chemically synthesized
  source 1..22: mol_type = other DNA
gtagagcaaggactatgaataa

SEQ ID NO: 146013 - DNA, 22 bp, synthetic construct
  misc_feature 1..22: note = chemically synthesized
  source 1..22: mol_type = other DNA
tgaataatggaaggccacttac

SEQ ID NO: 146014 - DNA, 22 bp, synthetic construct
  misc_feature 1..22: note = chemically synthesized
  source 1..22: mol_type = other DNA
accatttgatagctctgaaaaa

SEQ ID NO: 146015 - DNA, 22 bp, synthetic construct
  misc_feature 1..22: note = chemically synthesized
  source 1..22: mol_type = other DNA
ccatttgatagctctgaaaaac

SEQ ID NO: 146016 - DNA, 22 bp, synthetic construct
  misc_feature 1..22: note = chemically synthesized
  source 1..22: mol_type = other DNA
gatagctctgaaaaacacatct

SEQ ID NO: 146017 - DNA, 22 bp, synthetic construct
  misc_feature 1..22: note = chemically synthesized
  source 1..22: mol_type = other DNA
atagctctgaaaaacacatctt

SEQ ID NO: 146018 - DNA, 22 bp, synthetic construct
  misc_feature 1..22: note = chemically synthesized
  source 1..22: mol_type = other DNA
tgaaaaacacatcttataaaaa

SEQ ID NO: 146019 - DNA, 22 bp, synthetic construct
  misc_feature 1..22: note = chemically synthesized
  source 1..22: mol_type = other DNA
aaaaacacatcttataaaaaat

SEQ ID NO: 146020 - DNA, 22 bp, synthetic construct
  misc_feature 1..22: note = chemically synthesized
  source 1..22: mol_type = other DNA
ataaaaaattctggccaaaatc

SEQ ID NO: 146021 - DNA, 22 bp, synthetic construct
  misc_feature 1..22: note = chemically synthesized
  source 1..22: mol_type = other DNA
taaaaaattctggccaaaatca

SEQ ID NO: 146022 - DNA, 22 bp, synthetic construct
  misc_feature 1..22: note = chemically synthesized
  source 1..22: mol_type = other DNA
tggccaaaatcaaactgagtgt

SEQ ID NO: 146023 - DNA, 22 bp, synthetic construct
  misc_feature 1..22: note = chemically synthesized
  source 1..22: mol_type = other DNA
gccaaaatcaaactgagtgttt

SEQ ID NO: 146024 - DNA, 22 bp, synthetic construct
  misc_feature 1..22: note = chemically synthesized
  source 1..22: mol_type = other DNA
agtgtttttggatgagggaaca

SEQ ID NO: 146025 - DNA, 22 bp, synthetic construct
  misc_feature 1..22: note = chemically synthesized
  source 1..22: mol_type = other DNA
ttggatgagggaacagaagttg

SEQ ID NO: 146026 - DNA, 22 bp, synthetic construct
  misc_feature 1..22: note = chemically synthesized
  source 1..22: mol_type = other DNA
tggatgagggaacagaagttga

SEQ ID NO: 146027 - DNA, 22 bp, synthetic construct
  misc_feature 1..22: note = chemically synthesized
  source 1..22: mol_type = other DNA
ggatgagggaacagaagttgag

SEQ ID NO: 146028 - DNA, 22 bp, synthetic construct
  misc_feature 1..22: note = chemically synthesized
  source 1..22: mol_type = other DNA
gatgagggaacagaagttgaga

SEQ ID NO: 146029 - DNA, 22 bp, synthetic construct
  misc_feature 1..22: note = chemically synthesized
  source 1..22: mol_type = other DNA
agatagagaaaataacatcttt

SEQ ID NO: 146030 - DNA, 22 bp, synthetic construct
  misc_feature 1..22: note = chemically synthesized
  source 1..22: mol_type = other DNA
tcctttggtcagcgaaattttc

SEQ ID NO: 146031 - DNA, 22 bp, synthetic construct
  misc_feature 1..22: note = chemically synthesized
  source 1..22: mol_type = other DNA
cctttggtcagcgaaattttct

SEQ ID NO: 146032 - DNA, 22 bp, synthetic construct
  misc_feature 1..22: note = chemically synthesized
  source 1..22: mol_type = other DNA
ctttggtcagcgaaattttcta

SEQ ID NO: 146033 - DNA, 22 bp, synthetic construct
  misc_feature 1..22: note = chemically synthesized
  source 1..22: mol_type = other DNA
tggtcagcgaaattttctataa

SEQ ID NO: 146034 - DNA, 22 bp, synthetic construct
  misc_feature 1..22: note = chemically synthesized
  source 1..22: mol_type = other DNA
ggtcagcgaaattttctataaa

SEQ ID NO: 146035 - DNA, 22 bp, synthetic construct
  misc_feature 1..22: note = chemically synthesized
  source 1..22: mol_type = other DNA
gtcagcgaaattttctataaaa

SEQ ID NO: 146036 - DNA, 22 bp, synthetic construct
  misc_feature 1..22: note = chemically synthesized
  source 1..22: mol_type = other DNA
tctataaaaattaatagtcact

SEQ ID NO: 146037 - DNA, 22 bp, synthetic construct
  misc_feature 1..22: note = chemically synthesized
  source 1..22: mol_type = other DNA
ctataaaaattaatagtcactt

SEQ ID NO: 146038 - DNA, 22 bp, synthetic construct
  misc_feature 1..22: note = chemically synthesized
  source 1..22: mol_type = other DNA
tataaaaattaatagtcacttt

SEQ ID NO: 146039 - DNA, 22 bp, synthetic construct
  misc_feature 1..22: note = chemically synthesized
  source 1..22: mol_type = other DNA
taaaaattaatagtcacttttc

SEQ ID NO: 146040 - DNA, 22 bp, synthetic construct
  misc_feature 1..22: note = chemically synthesized
  source 1..22: mol_type = other DNA
atagtcacttttctgcatagtc

SEQ ID NO: 146041 - DNA, 22 bp, synthetic construct
  misc_feature 1..22: note = chemically synthesized
  source 1..22: mol_type = other DNA
ttctgcatagtcctggaggtta

SEQ ID NO: 146042 - DNA, 22 bp, synthetic construct
  misc_feature 1..22: note = chemically synthesized
  source 1..22: mol_type = other DNA
tctgcatagtcctggaggttag

SEQ ID NO: 146043 - DNA, 22 bp, synthetic construct
  misc_feature 1..22: note = chemically synthesized
  source 1..22: mol_type = other DNA
ctgcatagtcctggaggttaga

SEQ ID NO: 146044 - DNA, 22 bp, synthetic construct
  misc_feature 1..22: note = chemically synthesized
  source 1..22: mol_type = other DNA
tgcatagtcctggaggttagaa

SEQ ID NO: 146045 - DNA, 22 bp, synthetic construct
  misc_feature 1..22: note = chemically synthesized
  source 1..22: mol_type = other DNA
catagtcctggaggttagaaaa

SEQ ID NO: 146046 - DNA, 22 bp, synthetic construct
  misc_feature 1..22: note = chemically synthesized
  source 1..22: mol_type = other DNA
gaggttagaaaaagatcaactg

SEQ ID NO: 146047 - DNA, 22 bp, synthetic construct
  misc_feature 1..22: note = chemically synthesized
  source 1..22: mol_type = other DNA
gaaaaagatcaactgaacaaag

SEQ ID NO: 146048 - DNA, 22 bp, synthetic construct
  misc_feature 1..22: note = chemically synthesized
  source 1..22: mol_type = other DNA
aacaaagtagtgggaagctgtt

SEQ ID NO: 146049 - DNA, 22 bp, synthetic construct
  misc_feature 1..22: note = chemically synthesized
  source 1..22: mol_type = other DNA
ttaaaaagaggattgtttccct

SEQ ID NO: 146050 - DNA, 22 bp, synthetic construct
  misc_feature 1..22: note = chemically synthesized
  source 1..22: mol_type = other DNA
aaaagaggattgtttccctccg

SEQ ID NO: 146051 - DNA, 22 bp, synthetic construct
  misc_feature 1..22: note = chemically synthesized
  source 1..22: mol_type = other DNA
tttccctccgaatgatgatggt

SEQ ID NO: 146052 - DNA, 22 bp, synthetic construct
  misc_feature 1..22: note = chemically synthesized
  source 1..22: mol_type = other DNA
ccctccgaatgatgatggtata

SEQ ID NO: 146053 - DNA, 22 bp, synthetic construct
  misc_feature 1..22: note = chemically synthesized
  source 1..22: mol_type = other DNA
cctccgaatgatgatggtatac

SEQ ID NO: 146054 - DNA, 22 bp, synthetic construct
  misc_feature 1..22: note = chemically synthesized
  source 1..22: mol_type = other DNA
cgaatgatgatggtatactttt

SEQ ID NO: 146055 - DNA, 22 bp, synthetic construct
  misc_feature 1..22: note = chemically synthesized
  source 1..22: mol_type = other DNA
ttgtacgcatggtacaggattc

SEQ ID NO: 146056 - DNA, 22 bp, synthetic construct
  misc_feature 1..22: note = chemically synthesized
  source 1..22: mol_type = other DNA
tgtacgcatggtacaggattct

SEQ ID NO: 146057 - DNA, 22 bp, synthetic construct
  misc_feature 1..22: note = chemically synthesized
  source 1..22: mol_type = other DNA
gtacgcatggtacaggattctt

SEQ ID NO: 146058 - DNA, 22 bp, synthetic construct
  misc_feature 1..22: note = chemically synthesized
  source 1..22: mol_type = other DNA
tacgcatggtacaggattcttt

SEQ ID NO: 146059 - DNA, 22 bp, synthetic construct
  misc_feature 1..22: note = chemically synthesized
  source 1..22: mol_type = other DNA
tttgttatgagtgtttgggaaa

SEQ ID NO: 146060 - DNA, 22 bp, synthetic construct
  misc_feature 1..22: note = chemically synthesized
  source 1..22: mol_type = other DNA
tgttatgagtgtttgggaaaat

SEQ ID NO: 146061 - DNA, 22 bp, synthetic construct
  misc_feature 1..22: note = chemically synthesized
  source 1..22: mol_type = other DNA
gttatgagtgtttgggaaaatt

SEQ ID NO: 146062 - DNA, 22 bp, synthetic construct
  misc_feature 1..22: note = chemically synthesized
  source 1..22: mol_type = other DNA
ttatgagtgtttgggaaaattg

SEQ ID NO: 146063 - DNA, 22 bp, synthetic construct
  misc_feature 1..22: note = chemically synthesized
  source 1..22: mol_type = other DNA
tgagtgtttgggaaaattgtat

SEQ ID NO: 146064 - DNA, 22 bp, synthetic construct
  misc_feature 1..22: note = chemically synthesized
  source 1..22: mol_type = other DNA
gggaaaattgtatgtatgtatg

SEQ ID NO: 146065 - DNA, 22 bp, synthetic construct
  misc_feature 1..22: note = chemically synthesized
  source 1..22: mol_type = other DNA
ggaaaattgtatgtatgtatgt

SEQ ID NO: 146066 - DNA, 22 bp, synthetic construct
  misc_feature 1..22: note = chemically synthesized
  source 1..22: mol_type = other DNA
tatgtatgtatgtatgtatgta

SEQ ID NO: 146067 - DNA, 22 bp, synthetic construct
  misc_feature 1..22: note = chemically synthesized
  source 1..22: mol_type = other DNA
gggacttatcctatccattact

SEQ ID NO: 146068 - DNA, 22 bp, synthetic construct
  misc_feature 1..22: note = chemically synthesized
  source 1..22: mol_type = other DNA
atcctatccattactgttcctt

SEQ ID NO: 146069 - DNA, 22 bp, synthetic construct
  misc_feature 1..22: note = chemically synthesized
  source 1..22: mol_type = other DNA
tcctatccattactgttccttg

SEQ ID NO: 146070 - DNA, 22 bp, synthetic construct
  misc_feature 1..22: note = chemically synthesized
  source 1..22: mol_type = other DNA
tccattactgttccttgaagta

SEQ ID NO: 146071 - DNA, 22 bp, synthetic construct
  misc_feature 1..22: note = chemically synthesized
  source 1..22: mol_type = other DNA
ctgttccttgaagtactattat

SEQ ID NO: 146072 - DNA, 22 bp, synthetic construct
  misc_feature 1..22: note = chemically synthesized
  source 1..22: mol_type = other DNA
ttccttgaagtactattatcct

SEQ ID NO: 146073 - DNA, 22 bp, synthetic construct
  misc_feature 1..22: note = chemically synthesized
  source 1..22: mol_type = other DNA
cttgaagtactattatcctact

SEQ ID NO: 146074 - DNA, 22 bp, synthetic construct
  misc_feature 1..22: note = chemically synthesized
  source 1..22: mol_type = other DNA
gaagtactattatcctactttt

SEQ ID NO: 146075 - DNA, 22 bp, synthetic construct
  misc_feature 1..22: note = chemically synthesized
  source 1..22: mol_type = other DNA
aagtactattatcctacttttt

SEQ ID NO: 146076 - DNA, 22 bp, synthetic construct
  misc_feature 1..22: note = chemically synthesized
  source 1..22: mol_type = other DNA
ttatcctactttttaaaaggac

SEQ ID NO: 146077 - DNA, 22 bp, synthetic construct
  misc_feature 1..22: note = chemically synthesized
  source 1..22: mol_type = other DNA
tcctactttttaaaaggacgaa

SEQ ID NO: 146078 - DNA, 22 bp, synthetic construct
  misc_feature 1..22: note = chemically synthesized
  source 1..22: mol_type = other DNA
ctttttaaaaggacgaagtctc

SEQ ID NO: 146079 - DNA, 22 bp, synthetic construct
  misc_feature 1..22: note = chemically synthesized
  source 1..22: mol_type = other DNA
tttaaaaggacgaagtctctaa

SEQ ID NO: 146080 - DNA, 22 bp, synthetic construct
  misc_feature 1..22: note = chemically synthesized
  source 1..22: mol_type = other DNA
ttaaaaggacgaagtctctaaa

SEQ ID NO: 146081 - DNA, 22 bp, synthetic construct
  misc_feature 1..22: note = chemically synthesized
  source 1..22: mol_type = other DNA
taaaaggacgaagtctctaaaa

SEQ ID NO: 146082 - DNA, 22 bp, synthetic construct
  misc_feature 1..22: note = chemically synthesized
  source 1..22: mol_type = other DNA
aaaaggacgaagtctctaaaaa

SEQ ID NO: 146083 - DNA, 22 bp, synthetic construct
  misc_feature 1..22: note = chemically synthesized
  source 1..22: mol_type = other DNA
aaaggacgaagtctctaaaaaa

SEQ ID NO: 146084 - DNA, 22 bp, synthetic construct
  misc_feature 1..22: note = chemically synthesized
  source 1..22: mol_type = other DNA
taaaaaaaaaatgaaacaatca

SEQ ID NO: 146085 - DNA, 22 bp, synthetic construct
  misc_feature 1..22: note = chemically synthesized
  source 1..22: mol_type = other DNA
aaaaaaaaatgaaacaatcaca

SEQ ID NO: 146086 - DNA, 22 bp, synthetic construct
  misc_feature 1..22: note = chemically synthesized
  source 1..22: mol_type = other DNA
gggtagtgagttggcatagcaa

SEQ ID NO: 146087 - DNA, 22 bp, synthetic construct
  misc_feature 1..22: note = chemically synthesized
  source 1..22: mol_type = other DNA
gcatagcaagtaagagaaggat

SEQ ID NO: 146088 - DNA, 22 bp, synthetic construct
  misc_feature 1..22: note = chemically synthesized
  source 1..22: mol_type = other DNA
ccagtcatattgaagctgatat

SEQ ID NO: 146089 - DNA, 22 bp, synthetic construct
  misc_feature 1..22: note = chemically synthesized
  source 1..22: mol_type = other DNA
aagctgatatctagcccataat

SEQ ID NO: 146090 - DNA, 22 bp, synthetic construct
  misc_feature 1..22: note = chemically synthesized
  source 1..22: mol_type = other DNA
atatctagcccataatggtgag

SEQ ID NO: 146091 - DNA, 22 bp, synthetic construct
  misc_feature 1..22: note = chemically synthesized
  source 1..22: mol_type = other DNA
gcccataatggtgagagttgct

SEQ ID NO: 146092 - DNA, 22 bp, synthetic construct
  misc_feature 1..22: note = chemically synthesized
  source 1..22: mol_type = other DNA
ctcaaactctggtgaaaaagga

SEQ ID NO: 146093 - DNA, 22 bp, synthetic construct
  misc_feature 1..22: note = chemically synthesized
  source 1..22: mol_type = other DNA
aaactctggtgaaaaaggatgt

SEQ ID NO: 146094 - DNA, 22 bp, synthetic construct
  misc_feature 1..22: note = chemically synthesized
  source 1..22: mol_type = other DNA
tggtgaaaaaggatgtaagtgt

SEQ ID NO: 146095 - DNA, 22 bp, synthetic construct
  misc_feature 1..22: note = chemically synthesized
  source 1..22: mol_type = other DNA
gtgaaaaaggatgtaagtgtta

SEQ ID NO: 146096 - DNA, 22 bp, synthetic construct
  misc_feature 1..22: note = chemically synthesized
  source 1..22: mol_type = other DNA
tatctatttactgcaagtccag

SEQ ID NO: 146097 - DNA, 22 bp, synthetic construct
  misc_feature 1..22: note = chemically synthesized
  source 1..22: mol_type = other DNA
tttactgcaagtccagcttgag

SEQ ID NO: 146098 - DNA, 22 bp, synthetic construct
  misc_feature 1..22: note = chemically synthesized
  source 1..22: mol_type = other DNA
actgcaagtccagcttgaggcc

SEQ ID NO: 146099 - DNA, 22 bp, synthetic construct
  misc_feature 1..22: note = chemically synthesized
  source 1..22: mol_type = other DNA
ctgcaagtccagcttgaggcct

SEQ ID NO: 146100 - DNA, 22 bp, synthetic construct
  misc_feature 1..22: note = chemically synthesized
  source 1..22: mol_type = other DNA
caagtccagcttgaggccttct

SEQ ID NO: 146101 - DNA, 22 bp, synthetic construct
  misc_feature 1..22: note = chemically synthesized
  source 1..22: mol_type = other DNA
gaggccttctattcactatgta

SEQ ID NO: 146102 - DNA, 22 bp, synthetic construct
  misc_feature 1..22: note = chemically synthesized
  source 1..22: mol_type = other DNA
aggccttctattcactatgtac

SEQ ID NO: 146103 - DNA, 22 bp, synthetic construct
  misc_feature 1..22: note = chemically synthesized
  source 1..22: mol_type = other DNA
ctattcactatgtaccattttc

SEQ ID NO: 146104 - DNA, 22 bp, synthetic construct
  misc_feature 1..22: note = chemically synthesized
  source 1..22: mol_type = other DNA
tattcactatgtaccattttct

SEQ ID NO: 146105 - DNA, 22 bp, synthetic construct
  misc_feature 1..22: note = chemically synthesized
  source 1..22: mol_type = other DNA
ttcactatgtaccattttcttt

SEQ ID NO: 146106 - DNA, 22 bp, synthetic construct
  misc_feature 1..22: note = chemically synthesized
  source 1..22: mol_type = other DNA
actatgtaccattttctttttt

SEQ ID NO: 146107 - DNA, 22 bp, synthetic construct
  misc_feature 1..22: note = chemically synthesized
  source 1..22: mol_type = other DNA
tgtaccattttcttttttatct

SEQ ID NO: 146108 - DNA, 22 bp, synthetic construct
  misc_feature 1..22: note = chemically synthesized
  source 1..22: mol_type = other DNA
tcttttttatcttcactccctc

SEQ ID NO: 146109 - DNA, 22 bp, synthetic construct
  misc_feature 1..22: note = chemically synthesized
  source 1..22: mol_type = other DNA
cttttttatcttcactccctcc

SEQ ID NO: 146110 - DNA, 22 bp, synthetic construct
  misc_feature 1..22: note = chemically synthesized
  source 1..22: mol_type = other DNA
ttttttatcttcactccctccc

SEQ ID NO: 146111 - DNA, 22 bp, synthetic construct
  misc_feature 1..22: note = chemically synthesized
  source 1..22: mol_type = other DNA
ttttatcttcactccctcccca

SEQ ID NO: 146112 - DNA, 22 bp, synthetic construct
  misc_feature 1..22: note = chemically synthesized
  source 1..22: mol_type = other DNA
tttatcttcactccctccccag

SEQ ID NO: 146113 - DNA, 22 bp, synthetic construct
  misc_feature 1..22: note = chemically synthesized
  source 1..22: mol_type = other DNA
ttatcttcactccctccccagc

SEQ ID NO: 146114 - DNA, 22 bp, synthetic construct
  misc_feature 1..22: note = chemically synthesized
  source 1..22: mol_type = other DNA
tatcttcactccctccccagct

SEQ ID NO: 146115 - DNA, 22 bp, synthetic construct
  misc_feature 1..22: note = chemically synthesized
  source 1..22: mol_type = other DNA
atcttcactccctccccagctc

SEQ ID NO: 146116 - DNA, 22 bp, synthetic construct
  misc_feature 1..22: note = chemically synthesized
  source 1..22: mol_type = other DNA
tcttcactccctccccagctct

SEQ ID NO: 146117 - DNA, 22 bp, synthetic construct
  misc_feature 1..22: note = chemically synthesized
  source 1..22: mol_type = other DNA
cactccctccccagctcttagg

SEQ ID NO: 146118 - DNA, 22 bp, synthetic construct
  misc_feature 1..22: note = chemically synthesized
  source 1..22: mol_type = other DNA
actccctccccagctcttaggc

SEQ ID NO: 146119 - DNA, 22 bp, synthetic construct
  misc_feature 1..22: note = chemically synthesized
  source 1..22: mol_type = other DNA
cctccccagctcttaggcaacg

SEQ ID NO: 146120 - DNA, 22 bp, synthetic construct
  misc_feature 1..22: note = chemically synthesized
  source 1..22: mol_type = other DNA
cccagctcttaggcaacgtgat

SEQ ID NO: 146121 - DNA, 22 bp, synthetic construct
  misc_feature 1..22: note = chemically synthesized
  source 1..22: mol_type = other DNA
ttaggcaacgtgatattgattg

SEQ ID NO: 146122 - DNA, 22 bp, synthetic construct
  misc_feature 1..22: note = chemically synthesized
  source 1..22: mol_type = other DNA
aggcaacgtgatattgattgtt

SEQ ID NO: 146123 - DNA, 22 bp, synthetic construct
  misc_feature 1..22: note = chemically synthesized
  source 1..22: mol_type = other DNA
ggcaacgtgatattgattgttt

SEQ ID NO: 146124 - DNA, 22 bp, synthetic construct
  misc_feature 1..22: note = chemically synthesized
  source 1..22: mol_type = other DNA
attgttttggcaacccacttca

SEQ ID NO: 146125 - DNA, 22 bp, synthetic construct
  misc_feature 1..22: note = chemically synthesized
  source 1..22: mol_type = other DNA
ttttggcaacccacttcagcga

SEQ ID NO: 146126 - DNA, 22 bp, synthetic construct
  misc_feature 1..22: note = chemically synthesized
  source 1..22: mol_type = other DNA
tggcaacccacttcagcgagga

SEQ ID NO: 146127 - DNA, 22 bp, synthetic construct
  misc_feature 1..22: note = chemically synthesized
  source 1..22: mol_type = other DNA
ggcaacccacttcagcgaggat

SEQ ID NO: 146128 - DNA, 22 bp, synthetic construct
  misc_feature 1..22: note = chemically synthesized
  source 1..22: mol_type = other DNA
gcaacccacttcagcgaggatt

SEQ ID NO: 146129 - DNA, 22 bp, synthetic construct
  misc_feature 1..22: note = chemically synthesized
  source 1..22: mol_type = other DNA
cagcgaggattttaccctacag

SEQ ID NO: 146130 - DNA, 22 bp, synthetic construct
  misc_feature 1..22: note = chemically synthesized
  source 1..22: mol_type = other DNA
agcgaggattttaccctacaga

SEQ ID NO: 146131 - DNA, 22 bp, synthetic construct
  misc_feature 1..22: note = chemically synthesized
  source 1..22: mol_type = other DNA
taccctacagatacaggcttct

SEQ ID NO: 146132 - DNA, 22 bp, synthetic construct
  misc_feature 1..22: note = chemically synthesized
  source 1..22: mol_type = other DNA
accctacagatacaggcttctt

SEQ ID NO: 146133 - DNA, 22 bp, synthetic construct
  misc_feature 1..22: note = chemically synthesized
  source 1..22: mol_type = other DNA
ccctacagatacaggcttcttg

SEQ ID NO: 146134 - DNA, 22 bp, synthetic construct
  misc_feature 1..22: note = chemically synthesized
  source 1..22: mol_type = other DNA
cagatacaggcttcttggcagt

SEQ ID NO: 146135 - DNA, 22 bp, synthetic construct
  misc_feature 1..22: note = chemically synthesized
  source 1..22: mol_type = other DNA
cttggcagtaactaacaaatgc

SEQ ID NO: 146136 - DNA, 22 bp, synthetic construct
  misc_feature 1..22: note = chemically synthesized
  source 1..22: mol_type = other DNA
ttggcagtaactaacaaatgct

SEQ ID NO: 146137 - DNA, 22 bp, synthetic construct
  misc_feature 1..22: note = chemically synthesized
  source 1..22: mol_type = other DNA
ggcagtaactaacaaatgctgt

SEQ ID NO: 146138 - DNA, 22 bp, synthetic construct
  misc_feature 1..22: note = chemically synthesized
  source 1..22: mol_type = other DNA
gcagtaactaacaaatgctgtg

SEQ ID NO: 146139 - DNA, 22 bp, synthetic construct
  misc_feature 1..22: note = chemically synthesized
  source 1..22: mol_type = other DNA
acaaatgctgtggttaatgctg

SEQ ID NO: 146140 - DNA, 22 bp, synthetic construct
  misc_feature 1..22: note = chemically synthesized
  source 1..22: mol_type = other DNA
tggttaatgctgtagcccacaa

SEQ ID NO: 146141 - DNA, 22 bp, synthetic construct
  misc_feature 1..22: note = chemically synthesized
  source 1..22: mol_type = other DNA
atgctgtagcccacaagaccac

SEQ ID NO: 146142 - DNA, 22 bp, synthetic construct
  misc_feature 1..22: note = chemically synthesized
  source 1..22: mol_type = other DNA
tagcccacaagaccactgagtt

SEQ ID NO: 146143 - DNA, 22 bp, synthetic construct
  misc_feature 1..22: note = chemically synthesized
  source 1..22: mol_type = other DNA
agttccctgtccactatgtttg

SEQ ID NO: 146144 - DNA, 22 bp, synthetic construct
  misc_feature 1..22: note = chemically synthesized
  source 1..22: mol_type = other DNA
cctgtccactatgtttgtacct

SEQ ID NO: 146145 - DNA, 22 bp, synthetic construct
  misc_feature 1..22: note = chemically synthesized
  source 1..22: mol_type = other DNA
tccactatgtttgtacctatgg

SEQ ID NO: 146146 - DNA, 22 bp, synthetic construct
  misc_feature 1..22: note = chemically synthesized
  source 1..22: mol_type = other DNA
tgtttgtacctatggtccacta

SEQ ID NO: 146147 - DNA, 22 bp, synthetic construct
  misc_feature 1..22: note = chemically synthesized
  source 1..22: mol_type = other DNA
gtacctatggtccactatgttt

SEQ ID NO: 146148 - DNA, 22 bp, synthetic construct
  misc_feature 1..22: note = chemically synthesized
  source 1..22: mol_type = other DNA
tacctatggtccactatgtttg

SEQ ID NO: 146149 - DNA, 22 bp, synthetic construct
  misc_feature 1..22: note = chemically synthesized
  source 1..22: mol_type = other DNA
tggtccactatgtttgtaccta

SEQ ID NO: 146150 - DNA, 22 bp, synthetic construct
  misc_feature 1..22: note = chemically synthesized
  source 1..22: mol_type = other DNA
tgtttgtacctatgtcccaaaa

SEQ ID NO: 146151 - DNA, 22 bp, synthetic construct
  misc_feature 1..22: note = chemically synthesized
  source 1..22: mol_type = other DNA
gtacctatgtcccaaaatctca

SEQ ID NO: 146152 - DNA, 22 bp, synthetic construct
  misc_feature 1..22: note = chemically synthesized
  source 1..22: mol_type = other DNA
tacctatgtcccaaaatctcat

SEQ ID NO: 146153 - DNA, 22 bp, synthetic construct
  misc_feature 1..22: note = chemically synthesized
  source 1..22: mol_type = other DNA
tgtcccaaaatctcatctcctt

SEQ ID NO: 146154 - DNA, 22 bp, synthetic construct
  misc_feature 1..22: note = chemically synthesized
  source 1..22: mol_type = other DNA
atctcctttagatgggggaggt

SEQ ID NO: 146155 - DNA, 22 bp, synthetic construct
  misc_feature 1..22: note = chemically synthesized
  source 1..22: mol_type = other DNA
ctttagatgggggaggttgggg

SEQ ID NO: 146156 - DNA, 22 bp, synthetic construct
  misc_feature 1..22: note = chemically synthesized
  source 1..22: mol_type = other DNA
tagatgggggaggttggggaga

SEQ ID NO: 146157 - DNA, 22 bp, synthetic construct
  misc_feature 1..22: note = chemically synthesized
  source 1..22: mol_type = other DNA
agatgggggaggttggggagaa

SEQ ID NO: 146158 - DNA, 22 bp, synthetic construct
  misc_feature 1..22: note = chemically synthesized
  source 1..22: mol_type = other DNA
gatgggggaggttggggagaag

SEQ ID NO: 146159 - DNA, 22 bp, synthetic construct
  misc_feature 1..22: note = chemically synthesized
  source 1..22: mol_type = other DNA
gggagaagagcagtatcctgcc

SEQ ID NO: 146160 - DNA, 22 bp, synthetic construct
  misc_feature 1..22: note = chemically synthesized
  source 1..22: mol_type = other DNA
cctgctgattcagttcctgcat

SEQ ID NO: 146161 - DNA, 22 bp, synthetic construct
  misc_feature 1..22: note = chemically synthesized
  source 1..22: mol_type = other DNA
ctgattcagttcctgcatgata

SEQ ID NO: 146162 - DNA, 22 bp, synthetic construct
  misc_feature 1..22: note = chemically synthesized
  source 1..22: mol_type = other DNA
attcagttcctgcatgataaaa

SEQ ID NO: 146163 - DNA, 22 bp, synthetic construct
  misc_feature 1..22: note = chemically synthesized
  source 1..22: mol_type = other DNA
agttcctgcatgataaaaatag

SEQ ID NO: 146164 - DNA, 22 bp, synthetic construct
  misc_feature 1..22: note = chemically synthesized
  source 1..22: mol_type = other DNA
ctgcatgataaaaatagaataa

SEQ ID NO: 146165 - DNA, 22 bp, synthetic construct
  misc_feature 1..22: note = chemically synthesized
  source 1..22: mol_type = other DNA
catgataaaaatagaataaaga

SEQ ID NO: 146166 - DNA, 22 bp, synthetic construct
  misc_feature 1..22: note = chemically synthesized
  source 1..22: mol_type = other DNA
tctaagaaatatcattgtactc

SEQ ID NO: 146167 - DNA, 22 bp, synthetic construct
  misc_feature 1..22: note = chemically synthesized
  source 1..22: mol_type = other DNA
taagaaatatcattgtactctt

SEQ ID NO: 146168 - DNA, 22 bp, synthetic construct
  misc_feature 1..22: note = chemically synthesized
  source 1..22: mol_type = other DNA
agaaatatcattgtactctttt

SEQ ID NO: 146169 - DNA, 22 bp, synthetic construct
  misc_feature 1..22: note = chemically synthesized
  source 1..22: mol_type = other DNA
tactctttttctgtctttatat

SEQ ID NO: 146170 - DNA, 22 bp, synthetic construct
  misc_feature 1..22: note = chemically synthesized
  source 1..22: mol_type = other DNA
tttttctgtctttatattttac

SEQ ID NO: 146171 - DNA, 22 bp, synthetic construct
  misc_feature 1..22: note = chemically synthesized
  source 1..22: mol_type = other DNA
tttctgtctttatattttaccc

SEQ ID NO: 146172 - DNA, 22 bp, synthetic construct
  misc_feature 1..22: note = chemically synthesized
  source 1..22: mol_type = other DNA
ttctgtctttatattttaccct

SEQ ID NO: 146173 - DNA, 22 bp, synthetic construct
  misc_feature 1..22: note = chemically synthesized
  source 1..22: mol_type = other DNA
tctgtctttatattttaccctg

SEQ ID NO: 146174 - DNA, 22 bp, synthetic construct
  misc_feature 1..22: note = chemically synthesized
  source 1..22: mol_type = other DNA
ctgtctttatattttaccctga

SEQ ID NO: 146175 - DNA, 22 bp, synthetic construct
  misc_feature 1..22: note = chemically synthesized
  source 1..22: mol_type = other DNA
tgtctttatattttaccctgat

SEQ ID NO: 146176 - DNA, 22 bp, synthetic construct
  misc_feature 1..22: note = chemically synthesized
  source 1..22: mol_type = other DNA
tctttatattttaccctgattc

SEQ ID NO: 146177 - DNA, 22 bp, synthetic construct
  misc_feature 1..22: note = chemically synthesized
  source 1..22: mol_type = other DNA
tatattttaccctgattcagcc

SEQ ID NO: 146178 - DNA, 22 bp, synthetic construct
  misc_feature 1..22: note = chemically synthesized
  source 1..22: mol_type = other DNA
atattttaccctgattcagcca

SEQ ID NO: 146179 - DNA, 22 bp, synthetic construct
  misc_feature 1..22: note = chemically synthesized
  source 1..22: mol_type = other DNA
tattttaccctgattcagccaa

SEQ ID NO: 146180 - DNA, 22 bp, synthetic construct
  misc_feature 1..22: note = chemically synthesized
  source 1..22: mol_type = other DNA
taccctgattcagccaaaagga

SEQ ID NO: 146181 - DNA, 22 bp, synthetic construct
  misc_feature 1..22: note = chemically synthesized
  source 1..22: mol_type = other DNA
accctgattcagccaaaaggac

SEQ ID NO: 146182 - DNA, 22 bp, synthetic construct
  misc_feature 1..22: note = chemically synthesized
  source 1..22: mol_type = other DNA
ccctgattcagccaaaaggacg

SEQ ID NO: 146183 - DNA, 22 bp, synthetic construct
  misc_feature 1..22: note = chemically synthesized
  source 1..22: mol_type = other DNA
attcagccaaaaggacgcacta

SEQ ID NO: 146184 - DNA, 22 bp, synthetic construct
  misc_feature 1..22: note = chemically synthesized
  source 1..22: mol_type = other DNA
agccaaaaggacgcactatttc

SEQ ID NO: 146185 - DNA, 22 bp, synthetic construct
  misc_feature 1..22: note = chemically synthesized
  source 1..22: mol_type = other DNA
tttctgatggaaatgagaatgt

SEQ ID NO: 146186 - DNA, 22 bp, synthetic construct
  misc_feature 1..22: note = chemically synthesized
  source 1..22: mol_type = other DNA
ctgatggaaatgagaatgttgg

SEQ ID NO: 146187 - DNA, 22 bp, synthetic construct
  misc_feature 1..22: note = chemically synthesized
  source 1..22: mol_type = other DNA
tgatggaaatgagaatgttgga

SEQ ID NO: 146188 - DNA, 22 bp, synthetic construct
  misc_feature 1..22: note = chemically synthesized
  source 1..22: mol_type = other DNA
atggaaatgagaatgttggaga

SEQ ID NO: 146189 - DNA, 22 bp, synthetic construct
  misc_feature 1..22: note = chemically synthesized
  source 1..22: mol_type = other DNA
gagaatgggagtttaaggacag

SEQ ID NO: 146190 - DNA, 22 bp, synthetic construct
  misc_feature 1..22: note = chemically synthesized
  source 1..22: mol_type = other DNA
aaggacagagaagatactttct

SEQ ID NO: 146191 - DNA, 22 bp, synthetic construct
  misc_feature 1..22: note = chemically synthesized
  source 1..22: mol_type = other DNA
aggacagagaagatactttctt

SEQ ID NO: 146192 - DNA, 22 bp, synthetic construct
  misc_feature 1..22: note = chemically synthesized
  source 1..22: mol_type = other DNA
tcttgcaatcctgcaagaaaag

SEQ ID NO: 146193 - DNA, 22 bp, synthetic construct
  misc_feature 1..22: note = chemically synthesized
  source 1..22: mol_type = other DNA
cttgcaatcctgcaagaaaaga

SEQ ID NO: 146194 - DNA, 22 bp, synthetic construct
  misc_feature 1..22: note = chemically synthesized
  source 1..22: mol_type = other DNA
ttgcaatcctgcaagaaaagag

SEQ ID NO: 146195 - DNA, 22 bp, synthetic construct
  misc_feature 1..22: note = chemically synthesized
  source 1..22: mol_type = other DNA
gcaatcctgcaagaaaagagag

SEQ ID NO: 146196 - DNA, 22 bp, synthetic construct
  misc_feature 1..22: note = chemically synthesized
  source 1..22: mol_type = other DNA
caatcctgcaagaaaagagaga

SEQ ID NO: 146197 - DNA, 22 bp, synthetic construct
  misc_feature 1..22: note = chemically synthesized
  source 1..22: mol_type = other DNA
caagaaaagagagaactcgtgg

SEQ ID NO: 146198 - DNA, 22 bp, synthetic construct
  misc_feature 1..22: note = chemically synthesized
  source 1..22: mol_type = other DNA
gtgggtggatttagtggggtag

SEQ ID NO: 146199 - DNA, 22 bp, synthetic construct
  misc_feature 1..22: note = chemically synthesized
  source 1..22: mol_type = other DNA
agtggggtagttactcctagga

SEQ ID NO: 146200 - DNA, 22 bp, synthetic construct
  misc_feature 1..22: note = chemically synthesized
  source 1..22: mol_type = other DNA
gtggggtagttactcctaggaa

SEQ ID NO: 146201 - DNA, 22 bp, synthetic construct
  misc_feature 1..22: note = chemically synthesized
  source 1..22: mol_type = other DNA
ctcctaggaaggggaaatcgtc

SEQ ID NO: 146202 - DNA, 22 bp, synthetic construct
  misc_feature 1..22: note = chemically synthesized
  source 1..22: mol_type = other DNA
ctaggaaggggaaatcgtctct

SEQ ID NO: 146203 - DNA, 22 bp, synthetic construct
  misc_feature 1..22: note = chemically synthesized
  source 1..22: mol_type = other DNA
ggaaggggaaatcgtctctaga

SEQ ID NO: 146204 - DNA, 22 bp, synthetic construct
  misc_feature 1..22: note = chemically synthesized
  source 1..22: mol_type = other DNA
tagaataagacaatgtttttac

SEQ ID NO: 146205 - DNA, 22 bp, synthetic construct
  misc_feature 1..22: note = chemically synthesized
  source 1..22: mol_type = other DNA
gaataagacaatgtttttacag

SEQ ID NO: 146206 - DNA, 22 bp, synthetic construct
  misc_feature 1..22: note = chemically synthesized
  source 1..22: mol_type = other DNA
ttacagaaagggaggtcaatgg

SEQ ID NO: 146207 - DNA, 22 bp, synthetic construct
  misc_feature 1..22: note = chemically synthesized
  source 1..22: mol_type = other DNA
tacagaaagggaggtcaatgga

SEQ ID NO: 146208 - DNA, 22 bp, synthetic construct
  misc_feature 1..22: note = chemically synthesized
  source 1..22: mol_type = other DNA
acagaaagggaggtcaatggag

SEQ ID NO: 146209 - DNA, 22 bp, synthetic construct
  misc_feature 1..22: note = chemically synthesized
  source 1..22: mol_type = other DNA
cagaaagggaggtcaatggagg

SEQ ID NO: 146210 - DNA, 22 bp, synthetic construct
  misc_feature 1..22: note = chemically synthesized
  source 1..22: mol_type = other DNA
tttggaggtgtaagaggattgt

SEQ ID NO: 146211 - DNA, 22 bp, synthetic construct
  misc_feature 1..22: note = chemically synthesized
  source 1..22: mol_type = other DNA
tggaggtgtaagaggattgttg

SEQ ID NO: 146212 - DNA, 22 bp, synthetic construct
  misc_feature 1..22: note = chemically synthesized
  source 1..22: mol_type = other DNA
ggaggtgtaagaggattgttgg

SEQ ID NO: 146213 - DNA, 22 bp, synthetic construct
  misc_feature 1..22: note = chemically synthesized
  source 1..22: mol_type = other DNA
gaggtgtaagaggattgttggt

SEQ ID NO: 146214 - DNA, 22 bp, synthetic construct
  misc_feature 1..22: note = chemically synthesized
  source 1..22: mol_type = other DNA
ttggtagtgtgtagaggtatgt

SEQ ID NO: 146215 - DNA, 22 bp, synthetic construct
  misc_feature 1..22: note = chemically synthesized
  source 1..22: mol_type = other DNA
gtagtgtgtagaggtatgttag

SEQ ID NO: 146216 - DNA, 22 bp, synthetic construct
  misc_feature 1..22: note = chemically synthesized
  source 1..22: mol_type = other DNA
ggactcaaattagaagttctgt

SEQ ID NO: 146217 - DNA, 22 bp, synthetic construct
  misc_feature 1..22: note = chemically synthesized
  source 1..22: mol_type = other DNA
aaattagaagttctgtataggc

SEQ ID NO: 146218 - DNA, 22 bp, synthetic construct
  misc_feature 1..22: note = chemically synthesized
  source 1..22: mol_type = other DNA
gaagttctgtataggctattat

SEQ ID NO: 146219 - DNA, 22 bp, synthetic construct
  misc_feature 1..22: note = chemically synthesized
  source 1..22: mol_type = other DNA
tgtataggctattatttgtatg

SEQ ID NO: 146220 - DNA, 22 bp, synthetic construct
  misc_feature 1..22: note = chemically synthesized
  source 1..22: mol_type = other DNA
tataggctattatttgtatgaa

SEQ ID NO: 146221 - DNA, 22 bp, synthetic construct
  misc_feature 1..22: note = chemically synthesized
  source 1..22: mol_type = other DNA
ttatttgtatgaaactcaggat

SEQ ID NO: 146222 - DNA, 22 bp, synthetic construct
  misc_feature 1..22: note = chemically synthesized
  source 1..22: mol_type = other DNA
tttgtatgaaactcaggatata

SEQ ID NO: 146223 - DNA, 22 bp, synthetic construct
  misc_feature 1..22: note = chemically synthesized
  source 1..22: mol_type = other DNA
gtatgaaactcaggatatagct

SEQ ID NO: 146224 - DNA, 22 bp, synthetic construct
  misc_feature 1..22: note = chemically synthesized
  source 1..22: mol_type = other DNA
tatgaaactcaggatatagctc

SEQ ID NO: 146225 - DNA, 22 bp, synthetic construct
  misc_feature 1..22: note = chemically synthesized
  source 1..22: mol_type = other DNA
aggatatagctcatttggtgac

SEQ ID NO: 146226 - DNA, 22 bp, synthetic construct
  misc_feature 1..22: note = chemically synthesized
  source 1..22: mol_type = other DNA
atttggtgactgcagttcactt

SEQ ID NO: 146227 - DNA, 22 bp, synthetic construct
  misc_feature 1..22: note = chemically synthesized
  source 1..22: mol_type = other DNA
ggtgactgcagttcacttctac

SEQ ID NO: 146228 - DNA, 22 bp, synthetic construct
  misc_feature 1..22: note = chemically synthesized
  source 1..22: mol_type = other DNA
gtgactgcagttcacttctact

SEQ ID NO: 146229 - DNA, 22 bp, synthetic construct
  misc_feature 1..22: note = chemically synthesized
  source 1..22: mol_type = other DNA
cagttcacttctacttatttta

SEQ ID NO: 146230 - DNA, 22 bp, synthetic construct
  misc_feature 1..22: note = chemically synthesized
  source 1..22: mol_type = other DNA
acttctacttattttaaacaac

SEQ ID NO: 146231 - DNA, 22 bp, synthetic construct
  misc_feature 1..22: note = chemically synthesized
  source 1..22: mol_type = other DNA
ctacttattttaaacaacatat

SEQ ID NO: 146232 - DNA, 22 bp, synthetic construct
  misc_feature 1..22: note = chemically synthesized
  source 1..22: mol_type = other DNA
tacttattttaaacaacatatt

SEQ ID NO: 146233 - DNA, 22 bp, synthetic construct
  misc_feature 1..22: note = chemically synthesized
  source 1..22: mol_type = other DNA
cttattttaaacaacatatttt

SEQ ID NO: 146234 - DNA, 22 bp, synthetic construct
  misc_feature 1..22: note = chemically synthesized
  source 1..22: mol_type = other DNA
attttaaacaacatatttttta

SEQ ID NO: 146235 - DNA, 22 bp, synthetic construct
  misc_feature 1..22: note = chemically synthesized
  source 1..22: mol_type = other DNA
ttttaaacaacatattttttat

SEQ ID NO: 146236 - DNA, 22 bp, synthetic construct
  misc_feature 1..22: note = chemically synthesized
  source 1..22: mol_type = other DNA
taaacaacatattttttattat

SEQ ID NO: 146237 - DNA, 22 bp, synthetic construct
  misc_feature 1..22: note = chemically synthesized
  source 1..22: mol_type = other DNA
aaacaacatattttttattatt

SEQ ID NO: 146238 - DNA, 22 bp, synthetic construct
  misc_feature 1..22: note = chemically synthesized
  source 1..22: mol_type = other DNA
aacaacatattttttattattt

SEQ ID NO: 146239 - DNA, 22 bp, synthetic construct
  misc_feature 1..22: note = chemically synthesized
  source 1..22: mol_type = other DNA
tttattatttataatgaagtgg

SEQ ID NO: 146240 - DNA, 22 bp, synthetic construct
  misc_feature 1..22: note = chemically synthesized
  source 1..22: mol_type = other DNA
ttattatttataatgaagtggg

SEQ ID NO: 146241 - DNA, 22 bp, synthetic construct
  misc_feature 1..22: note = chemically synthesized
  source 1..22: mol_type = other DNA
tattatttataatgaagtgggg

SEQ ID NO: 146242 - DNA, 22 bp, synthetic construct
  misc_feature 1..22: note = chemically synthesized
  source 1..22: mol_type = other DNA
attatttataatgaagtgggga

SEQ ID NO: 146243 - DNA, 22 bp, synthetic construct
  misc_feature 1..22: note = chemically synthesized
  source 1..22: mol_type = other DNA
ttatttataatgaagtggggat

SEQ ID NO: 146244 - DNA, 22 bp, synthetic construct
  misc_feature 1..22: note = chemically synthesized
  source 1..22: mol_type = other DNA
tttataatgaagtggggatggg

SEQ ID NO: 146245 - DNA, 22 bp, synthetic construct
  misc_feature 1..22: note = chemically synthesized
  source 1..22: mol_type = other DNA
ataatgaagtggggatggggct

SEQ ID NO: 146246 - DNA, 22 bp, synthetic construct
  misc_feature 1..22: note = chemically synthesized
  source 1..22: mol_type = other DNA
taatgaagtggggatggggctt

SEQ ID NO: 146247 - DNA, 22 bp, synthetic construct
  misc_feature 1..22: note = chemically synthesized
  source 1..22: mol_type = other DNA
cctagagaccaatcaagggcca

SEQ ID NO: 146248 - DNA, 22 bp, synthetic construct
  misc_feature 1..22: note = chemically synthesized
  source 1..22: mol_type = other DNA
ctagagaccaatcaagggccaa

SEQ ID NO: 146249 - DNA, 22 bp, synthetic construct
  misc_feature 1..22: note = chemically synthesized
  source 1..22: mol_type = other DNA
gagaccaatcaagggccaaacc

SEQ ID NO: 146250 - DNA, 22 bp, synthetic construct
  misc_feature 1..22: note = chemically synthesized
  source 1..22: mol_type = other DNA
gaactttctcttaacgtcttca

SEQ ID NO: 146251 - DNA, 22 bp, synthetic construct
  misc_feature 1..22: note = chemically synthesized
  source 1..22: mol_type = other DNA
aactttctcttaacgtcttcaa

SEQ ID NO: 146252 - DNA, 22 bp, synthetic construct
  misc_feature 1..22: note = chemically synthesized
  source 1..22: mol_type = other DNA
tctcttaacgtcttcaatggta

SEQ ID NO: 146253 - DNA, 22 bp, synthetic construct
  misc_feature 1..22: note = chemically synthesized
  source 1..22: mol_type = other DNA
ctcttaacgtcttcaatggtat

SEQ ID NO: 146254 - DNA, 22 bp, synthetic construct
  misc_feature 1..22: note = chemically synthesized
  source 1..22: mol_type = other DNA
tcttaacgtcttcaatggtatt

SEQ ID NO: 146255 - DNA, 22 bp, synthetic construct
  misc_feature 1..22: note = chemically synthesized
  source 1..22: mol_type = other DNA
ttaacgtcttcaatggtattaa

SEQ ID NO: 146256 - DNA, 22 bp, synthetic construct
  misc_feature 1..22: note = chemically synthesized
  source 1..22: mol_type = other DNA
aacgtcttcaatggtattaata

SEQ ID NO: 146257 - DNA, 22 bp, synthetic construct
  misc_feature 1..22: note = chemically synthesized
  source 1..22: mol_type = other DNA
acgtcttcaatggtattaatag

SEQ ID NO: 146258 - DNA, 22 bp, synthetic construct
  misc_feature 1..22: note = chemically synthesized
  source 1..22: mol_type = other DNA
caatggtattaatagagaatta

SEQ ID NO: 146259 - DNA, 22 bp, synthetic construct
  misc_feature 1..22: note = chemically synthesized
  source 1..22: mol_type = other DNA
aatggtattaatagagaattat

SEQ ID NO: 146260 - DNA, 22 bp, synthetic construct
  misc_feature 1..22: note = chemically synthesized
  source 1..22: mol_type = other DNA
atagagaattatctctaaggca

SEQ ID NO: 146261 - DNA, 22 bp, synthetic construct
  misc_feature 1..22: note = chemically synthesized
  source 1..22: mol_type = other DNA
tctctaaggcatgtgaactggc

SEQ ID NO: 146262 - DNA, 22 bp, synthetic construct
  misc_feature 1..22: note = chemically synthesized
  source 1..22: mol_type = other DNA
taaggcatgtgaactggctgtc

SEQ ID NO: 146263 - DNA, 22 bp, synthetic construct
  misc_feature 1..22: note = chemically synthesized
  source 1..22: mol_type = other DNA
aggcatgtgaactggctgtctt

SEQ ID NO: 146264 - DNA, 22 bp, synthetic construct
  misc_feature 1..22: note = chemically synthesized
  source 1..22: mol_type = other DNA
gctgtcttggttttcatctgta

SEQ ID NO: 146265 - DNA, 22 bp, synthetic construct
  misc_feature 1..22: note = chemically synthesized
  source 1..22: mol_type = other DNA
tcttggttttcatctgtacttc

SEQ ID NO: 146266 - DNA, 22 bp, synthetic construct
  misc_feature 1..22: note = chemically synthesized
  source 1..22: mol_type = other DNA
ggttttcatctgtacttcatct

SEQ ID NO: 146267 - DNA, 22 bp, synthetic construct
  misc_feature 1..22: note = chemically synthesized
  source 1..22: mol_type = other DNA
gttttcatctgtacttcatctg

SEQ ID NO: 146268 - DNA, 22 bp, synthetic construct
  misc_feature 1..22: note = chemically synthesized
  source 1..22: mol_type = other DNA
tcatctgtacttcatctgctac

SEQ ID NO: 146269 - DNA, 22 bp, synthetic construct
  misc_feature 1..22: note = chemically synthesized
  source 1..22: mol_type = other DNA
catctgtacttcatctgctacc

SEQ ID NO: 146270 - DNA, 22 bp, synthetic construct
  misc_feature 1..22: note = chemically synthesized
  source 1..22: mol_type = other DNA
atctgtacttcatctgctacct

SEQ ID NO: 146271 - DNA, 22 bp, synthetic construct
  misc_feature 1..22: note = chemically synthesized
  source 1..22: mol_type = other DNA
tacttcatctgctacctctgtg

SEQ ID NO: 146272 - DNA, 22 bp, synthetic construct
  misc_feature 1..22: note = chemically synthesized
  source 1..22: mol_type = other DNA
catctgctacctctgtgacctg

SEQ ID NO: 146273 - DNA, 22 bp, synthetic construct
  misc_feature 1..22: note = chemically synthesized
  source 1..22: mol_type = other DNA
atctgctacctctgtgacctga

SEQ ID NO: 146274 - DNA, 22 bp, synthetic construct
  misc_feature 1..22: note = chemically synthesized
  source 1..22: mol_type = other DNA
ctacctctgtgacctgaaacat

SEQ ID NO: 146275 - DNA, 22 bp, synthetic construct
  misc_feature 1..22: note = chemically synthesized
  source 1..22: mol_type = other DNA
cctctgtgacctgaaacatatt

SEQ ID NO: 146276 - DNA, 22 bp, synthetic construct
  misc_feature 1..22: note = chemically synthesized
  source 1..22: mol_type = other DNA
tgtgacctgaaacatatttata

SEQ ID NO: 146277 - DNA, 22 bp, synthetic construct
  misc_feature 1..22: note = chemically synthesized
  source 1..22: mol_type = other DNA
tgacctgaaacatatttataat

SEQ ID NO: 146278 - DNA, 22 bp, synthetic construct
  misc_feature 1..22: note = chemically synthesized
  source 1..22: mol_type = other DNA
aaacatatttataattccatta

SEQ ID NO: 146279 - DNA, 22 bp, synthetic construct
  misc_feature 1..22: note = chemically synthesized
  source 1..22: mol_type = other DNA
ataattccattaagctgtgcat

SEQ ID NO: 146280 - DNA, 22 bp, synthetic construct
  misc_feature 1..22: note = chemically synthesized
  source 1..22: mol_type = other DNA
taattccattaagctgtgcata

SEQ ID NO: 146281 - DNA, 22 bp, synthetic construct
  misc_feature 1..22: note = chemically synthesized
  source 1..22: mol_type = other DNA
cattaagctgtgcatatgatag

SEQ ID NO: 146282 - DNA, 22 bp, synthetic construct
  misc_feature 1..22: note = chemically synthesized
  source 1..22: mol_type = other DNA
agctgtgcatatgatagattta

SEQ ID NO: 146283 - DNA, 22 bp, synthetic construct
  misc_feature 1..22: note = chemically synthesized
  source 1..22: mol_type = other DNA
tgcatatgatagatttatcata

SEQ ID NO: 146284 - DNA, 22 bp, synthetic construct
  misc_feature 1..22: note = chemically synthesized
  source 1..22: mol_type = other DNA
atcatatgtattttccttaaag

SEQ ID NO: 146285 - DNA, 22 bp, synthetic construct
  misc_feature 1..22: note = chemically synthesized
  source 1..22: mol_type = other DNA
tcatatgtattttccttaaagg

SEQ ID NO: 146286 - DNA, 22 bp, synthetic construct
  misc_feature 1..22: note = chemically synthesized
  source 1..22: mol_type = other DNA
tccttaaaggatttttgtaaga

SEQ ID NO: 146287 - DNA, 22 bp, synthetic construct
  misc_feature 1..22: note = chemically synthesized
  source 1..22: mol_type = other DNA
ccttaaaggatttttgtaagaa

SEQ ID NO: 146288 - DNA, 22 bp, synthetic construct
  misc_feature 1..22: note = chemically synthesized
  source 1..22: mol_type = other DNA
cttaaaggatttttgtaagaac

SEQ ID NO: 146289 - DNA, 22 bp, synthetic construct
  misc_feature 1..22: note = chemically synthesized
  source 1..22: mol_type = other DNA
aaaggatttttgtaagaactaa

SEQ ID NO: 146290 - DNA, 22 bp, synthetic construct
  misc_feature 1..22: note = chemically synthesized
  source 1..22: mol_type = other DNA
aaggatttttgtaagaactaat

SEQ ID NO: 146291 - DNA, 22 bp, synthetic construct
  misc_feature 1..22: note = chemically synthesized
  source 1..22: mol_type = other DNA
ttgtaagaactaattgaattga

SEQ ID NO: 146292 - DNA, 22 bp, synthetic construct
  misc_feature 1..22: note = chemically synthesized
  source 1..22: mol_type = other DNA
tgtaagaactaattgaattgat

SEQ ID NO: 146293 - DNA, 22 bp, synthetic construct
  misc_feature 1..22: note = chemically synthesized
  source 1..22: mol_type = other DNA
gtaagaactaattgaattgata

SEQ ID NO: 146294 - DNA, 22 bp, synthetic construct
  misc_feature 1..22: note = chemically synthesized
  source 1..22: mol_type = other DNA
taagaactaattgaattgatac

SEQ ID NO: 146295 - DNA, 22 bp, synthetic construct
  misc_feature 1..22: note = chemically synthesized
  source 1..22: mol_type = other DNA
attgaattgatacctgtaaagt

SEQ ID NO: 146296 - DNA, 22 bp, synthetic construct
  misc_feature 1..22: note = chemically synthesized
  source 1..22: mol_type = other DNA
aattgatacctgtaaagtcttt

SEQ ID NO: 146297 - DNA, 22 bp, synthetic construct
  misc_feature 1..22: note = chemically synthesized
  source 1..22: mol_type = other DNA
atacctgtaaagtctttatcac

SEQ ID NO: 146298 - DNA, 22 bp, synthetic construct
  misc_feature 1..22: note = chemically synthesized
  source 1..22: mol_type = other DNA
taaagtctttatcacactaccc

SEQ ID NO: 146299 - DNA, 22 bp, synthetic construct
  misc_feature 1..22: note = chemically synthesized
  source 1..22: mol_type = other DNA
tatcacactacccaataaataa

SEQ ID NO: 146300 - DNA, 22 bp, synthetic construct
  misc_feature 1..22: note = chemically synthesized
  source 1..22: mol_type = other DNA
atcacactacccaataaataat

SEQ ID NO: 146301 - DNA, 22 bp, synthetic construct
  misc_feature 1..22: note = chemically synthesized
  source 1..22: mol_type = other DNA
tcacactacccaataaataata

SEQ ID NO: 146302 - DNA, 22 bp, synthetic construct
  misc_feature 1..22: note = chemically synthesized
  source 1..22: mol_type = other DNA
cccaataaataataaatctctt

SEQ ID NO: 146303 - DNA, 22 bp, synthetic construct
  misc_feature 1..22: note = chemically synthesized
  source 1..22: mol_type = other DNA
tttgttcagctctctgtttcta

SEQ ID NO: 146304 - DNA, 22 bp, synthetic construct
  misc_feature 1..22: note = chemically synthesized
  source 1..22: mol_type = other DNA
tgttcagctctctgtttctata

SEQ ID NO: 146305 - DNA, 22 bp, synthetic construct
  misc_feature 1..22: note = chemically synthesized
  source 1..22: mol_type = other DNA
gttcagctctctgtttctataa

SEQ ID NO: 146306 - DNA, 22 bp, synthetic construct
  misc_feature 1..22: note = chemically synthesized
  source 1..22: mol_type = other DNA
ttcagctctctgtttctataaa

SEQ ID NO: 146307 - DNA, 22 bp, synthetic construct
  misc_feature 1..22: note = chemically synthesized
  source 1..22: mol_type = other DNA
agctctctgtttctataaatat

SEQ ID NO: 146308 - DNA, 22 bp, synthetic construct
  misc_feature 1..22: note = chemically synthesized
  source 1..22: mol_type = other DNA
tctgtttctataaatatgtaca

SEQ ID NO: 146309 - DNA, 22 bp, synthetic construct
  misc_feature 1..22: note = chemically synthesized
  source 1..22: mol_type = other DNA
tgtttctataaatatgtacaag

SEQ ID NO: 146310 - DNA, 22 bp, synthetic construct
  misc_feature 1..22: note = chemically synthesized
  source 1..22: mol_type = other DNA
tttctataaatatgtacaagtt

SEQ ID NO: 146311 - DNA, 22 bp, synthetic construct
  misc_feature 1..22: note = chemically synthesized
  source 1..22: mol_type = other DNA
ctataaatatgtacaagtttta

SEQ ID NO: 146312 - DNA, 22 bp, synthetic construct
  misc_feature 1..22: note = chemically synthesized
  source 1..22: mol_type = other DNA
tataaatatgtacaagttttat

SEQ ID NO: 146313 - DNA, 22 bp, synthetic construct
  misc_feature 1..22: note = chemically synthesized
  source 1..22: mol_type = other DNA
taaatatgtacaagttttattg

SEQ ID NO: 146314 - DNA, 22 bp, synthetic construct
  misc_feature 1..22: note = chemically synthesized
  source 1..22: mol_type = other DNA
tattgtttttagtggtagtgat

SEQ ID NO: 146315 - DNA, 22 bp, synthetic construct
  misc_feature 1..22: note = chemically synthesized
  source 1..22: mol_type = other DNA
attgtttttagtggtagtgatt

SEQ ID NO: 146316 - DNA, 22 bp, synthetic construct
  misc_feature 1..22: note = chemically synthesized
  source 1..22: mol_type = other DNA
ttgtttttagtggtagtgattt

SEQ ID NO: 146317 - DNA, 22 bp, synthetic construct
  misc_feature 1..22: note = chemically synthesized
  source 1..22: mol_type = other DNA
tttttagtggtagtgattttat

SEQ ID NO: 146318 - DNA, 22 bp, synthetic construct
  misc_feature 1..22: note = chemically synthesized
  source 1..22: mol_type = other DNA
ttagtggtagtgattttattct

SEQ ID NO: 146319 - DNA, 22 bp, synthetic construct
  misc_feature 1..22: note = chemically synthesized
  source 1..22: mol_type = other DNA
tagtggtagtgattttattctc

SEQ ID NO: 146320 - DNA, 22 bp, synthetic construct
  misc_feature 1..22: note = chemically synthesized
  source 1..22: mol_type = other DNA
agtggtagtgattttattctct

SEQ ID NO: 146321 - DNA, 22 bp, synthetic construct
  misc_feature 1..22: note = chemically synthesized
  source 1..22: mol_type = other DNA
gtggtagtgattttattctctt

SEQ ID NO: 146322 - DNA, 22 bp, synthetic construct
  misc_feature 1..22: note = chemically synthesized
  source 1..22: mol_type = other DNA
tattctctttctatatatatac

SEQ ID NO: 146323 - DNA, 22 bp, synthetic construct
  misc_feature 1..22: note = chemically synthesized
  source 1..22: mol_type = other DNA
attctctttctatatatataca

SEQ ID NO: 146324 - DNA, 22 bp, synthetic construct
  misc_feature 1..22: note = chemically synthesized
  source 1..22: mol_type = other DNA
ttctctttctatatatatacac

SEQ ID NO: 146325 - DNA, 22 bp, synthetic construct
  misc_feature 1..22: note = chemically synthesized
  source 1..22: mol_type = other DNA
tctttctatatatatacacaca

SEQ ID NO: 146326 - DNA, 22 bp, synthetic construct
  misc_feature 1..22: note = chemically synthesized
  source 1..22: mol_type = other DNA
tttctatatatatacacacaca

SEQ ID NO: 146327 - DNA, 22 bp, synthetic construct
  misc_feature 1..22: note = chemically synthesized
  source 1..22: mol_type = other DNA
tctatatatatacacacacatg

SEQ ID NO: 146328 - DNA, 22 bp, synthetic construct
  misc_feature 1..22: note = chemically synthesized
  source 1..22: mol_type = other DNA
ctatatatatacacacacatgt

SEQ ID NO: 146329 - DNA, 22 bp, synthetic construct
  misc_feature 1..22: note = chemically synthesized
  source 1..22: mol_type = other DNA
tatatatatacacacacatgtg

SEQ ID NO: 146330 - DNA, 22 bp, synthetic construct
  misc_feature 1..22: note = chemically synthesized
  source 1..22: mol_type = other DNA
tatatatacacacacatgtgtg

SEQ ID NO: 146331 - DNA, 22 bp, synthetic construct
  misc_feature 1..22: note = chemically synthesized
  source 1..22: mol_type = other DNA
ataaatatatacaatttttatg

SEQ ID NO: 146332 - DNA, 22 bp, synthetic construct
  misc_feature 1..22: note = chemically synthesized
  source 1..22: mol_type = other DNA
ttatgaataaaaaattattagc

SEQ ID NO: 146333 - DNA, 22 bp, synthetic construct
  misc_feature 1..22: note = chemically synthesized
  source 1..22: mol_type = other DNA
tatgaataaaaaattattagca

SEQ ID NO: 146334 - DNA, 22 bp, synthetic construct
  misc_feature 1..22: note = chemically synthesized
  source 1..22: mol_type = other DNA
atgaataaaaaattattagcaa

SEQ ID NO: 146335 - DNA, 22 bp, synthetic construct
  misc_feature 1..22: note = chemically synthesized
  source 1..22: mol_type = other DNA
tgaataaaaaattattagcaat

SEQ ID NO: 146336 - DNA, 22 bp, synthetic construct
  misc_feature 1..22: note = chemically synthesized
  source 1..22: mol_type = other DNA
ttagcaatcaatattgaaaacc

SEQ ID NO: 146337 - DNA, 22 bp, synthetic construct
  misc_feature 1..22: note = chemically synthesized
  source 1..22: mol_type = other DNA
gcaatcaatattgaaaaccact

SEQ ID NO: 146338 - DNA, 22 bp, synthetic construct
  misc_feature 1..22: note = chemically synthesized
  source 1..22: mol_type = other DNA
aaaaccactgatttttgtttat

SEQ ID NO: 146339 - DNA, 22 bp, synthetic construct
  misc_feature 1..22: note = chemically synthesized
  source 1..22: mol_type = other DNA
atttttgtttatgtgagcaaac

SEQ ID NO: 146340 - DNA, 22 bp, synthetic construct
  misc_feature 1..22: note = chemically synthesized
  source 1..22: mol_type = other DNA
ttgtttatgtgagcaaacagca

SEQ ID NO: 146341 - DNA, 22 bp, synthetic construct
  misc_feature 1..22: note = chemically synthesized
  source 1..22: mol_type = other DNA
tgtttatgtgagcaaacagcag

SEQ ID NO: 146342 - DNA, 22 bp, synthetic construct
  misc_feature 1..22: note = chemically synthesized
  source 1..22: mol_type = other DNA
gtttatgtgagcaaacagcaga

SEQ ID NO: 146343 - DNA, 22 bp, synthetic construct
  misc_feature 1..22: note = chemically synthesized
  source 1..22: mol_type = other DNA
tttatgtgagcaaacagcagat

SEQ ID NO: 146344 - DNA, 22 bp, synthetic construct
  misc_feature 1..22: note = chemically synthesized
  source 1..22: mol_type = other DNA
atgtgagcaaacagcagattaa

SEQ ID NO: 146345 - DNA, 22 bp, synthetic construct
  misc_feature 1..22: note = chemically synthesized
  source 1..22: mol_type = other DNA
tgtgagcaaacagcagattaaa

SEQ ID NO: 146346 - DNA, 22 bp, synthetic construct
  misc_feature 1..22: note = chemically synthesized
  source 1..22: mol_type = other DNA
aaaggctgagatttaggaaaca

SEQ ID NO: 146347 - DNA, 22 bp, synthetic construct
  misc_feature 1..22: note = chemically synthesized
  source 1..22: mol_type = other DNA
agatttaggaaacagcacgtta

SEQ ID NO: 146348 - DNA, 22 bp, synthetic construct
  misc_feature 1..22: note = chemically synthesized
  source 1..22: mol_type = other DNA
aggaaacagcacgttaagtcaa

SEQ ID NO: 146349 - DNA, 22 bp, synthetic construct
  misc_feature 1..22: note = chemically synthesized
  source 1..22: mol_type = other DNA
ggaaacagcacgttaagtcaag

SEQ ID NO: 146350 - DNA, 22 bp, synthetic construct
  misc_feature 1..22: note = chemically synthesized
  source 1..22: mol_type = other DNA
agtcaagttgatagaggagaat

SEQ ID NO: 146351 - DNA, 22 bp, synthetic construct
  misc_feature 1..22: note = chemically synthesized
  source 1..22: mol_type = other DNA
atagaggagaatatggacattt

SEQ ID NO: 146352 - DNA, 22 bp, synthetic construct
  misc_feature 1..22: note = chemically synthesized
  source 1..22: mol_type = other DNA
aaaagaggcaggatgatataaa

SEQ ID NO: 146353 - DNA, 22 bp, synthetic construct
  misc_feature 1..22: note = chemically synthesized
  source 1..22: mol_type = other DNA
aaagaggcaggatgatataaaa

SEQ ID NO: 146354 - DNA, 22 bp, synthetic construct
  misc_feature 1..22: note = chemically synthesized
  source 1..22: mol_type = other DNA
gggaaactggatgcagagacca

SEQ ID NO: 146355 - DNA, 22 bp, synthetic construct
  misc_feature 1..22: note = chemically synthesized
  source 1..22: mol_type = other DNA
gatgcagagaccagatgaagta

SEQ ID NO: 146356 - DNA, 22 bp, synthetic construct
  misc_feature 1..22: note = chemically synthesized
  source 1..22: mol_type = other DNA
tcgttttgagcaaaaatcactg

SEQ ID NO: 146357 - DNA, 22 bp, synthetic construct
  misc_feature 1..22: note = chemically synthesized
  source 1..22: mol_type = other DNA
tgagcaaaaatcactgaagttt

SEQ ID NO: 146358 - DNA, 22 bp, synthetic construct
  misc_feature 1..22: note = chemically synthesized
  source 1..22: mol_type = other DNA
gagcaaaaatcactgaagtttc

SEQ ID NO: 146359 - DNA, 22 bp, synthetic construct
  misc_feature 1..22: note = chemically synthesized
  source 1..22: mol_type = other DNA
agcaaaaatcactgaagtttct

SEQ ID NO: 146360 - DNA, 22 bp, synthetic construct
  misc_feature 1..22: note = chemically synthesized
  source 1..22: mol_type = other DNA
aagtttcttgcatatgagagtg

SEQ ID NO: 146361 - DNA, 22 bp, synthetic construct
  misc_feature 1..22: note = chemically synthesized
  source 1..22: mol_type = other DNA
cttgcatatgagagtgacataa

SEQ ID NO: 146362 - DNA, 22 bp, synthetic construct
  misc_feature 1..22: note = chemically synthesized
  source 1..22: mol_type = other DNA
ttgcatatgagagtgacataat

SEQ ID NO: 146363 - DNA, 22 bp, synthetic construct
  misc_feature 1..22: note = chemically synthesized
  source 1..22: mol_type = other DNA
gcatatgagagtgacataataa

SEQ ID NO: 146364 - DNA, 22 bp, synthetic construct
  misc_feature 1..22: note = chemically synthesized
  source 1..22: mol_type = other DNA
catatgagagtgacataataaa

SEQ ID NO: 146365 - DNA, 22 bp, synthetic construct
  misc_feature 1..22: note = chemically synthesized
  source 1..22: mol_type = other DNA
attcacatgtatatatatatat

SEQ ID NO: 146366 - DNA, 22 bp, synthetic construct
  misc_feature 1..22: note = chemically synthesized
  source 1..22: mol_type = other DNA
acatgtatatatatatatagaa

SEQ ID NO: 146367 - DNA, 22 bp, synthetic construct
  misc_feature 1..22: note = chemically synthesized
  source 1..22: mol_type = other DNA
attagacaaagtctaacttggg

SEQ ID NO: 146368 - DNA, 22 bp, synthetic construct
  misc_feature 1..22: note = chemically synthesized
  source 1..22: mol_type = other DNA
gacaaagtctaacttgggtata

SEQ ID NO: 146369 - DNA, 22 bp, synthetic construct
  misc_feature 1..22: note = chemically synthesized
  source 1..22: mol_type = other DNA
acttgggtatagtcagaggagc

SEQ ID NO: 146370 - DNA, 22 bp, synthetic construct
  misc_feature 1..22: note = chemically synthesized
  source 1..22: mol_type = other DNA
gggtatagtcagaggagcttgc

SEQ ID NO: 146371 - DNA, 22 bp, synthetic construct
  misc_feature 1..22: note = chemically synthesized
  source 1..22: mol_type = other DNA
ggtatagtcagaggagcttgct

SEQ ID NO: 146372 - DNA, 22 bp, synthetic construct
  misc_feature 1..22: note = chemically synthesized
  source 1..22: mol_type = other DNA
gctgtaattatattgaggtgat

SEQ ID NO: 146373 - DNA, 22 bp, synthetic construct
  misc_feature 1..22: note = chemically synthesized
  source 1..22: mol_type = other DNA
ctgtaattatattgaggtgatg

SEQ ID NO: 146374 - DNA, 22 bp, synthetic construct
  misc_feature 1..22: note = chemically synthesized
  source 1..22: mol_type = other DNA
taattatattgaggtgatggat

SEQ ID NO: 146375 - DNA, 22 bp, synthetic construct
  misc_feature 1..22: note = chemically synthesized
  source 1..22: mol_type = other DNA
tattgaggtgatggataaagaa

SEQ ID NO: 146376 - DNA, 22 bp, synthetic construct
  misc_feature 1..22: note = chemically synthesized
  source 1..22: mol_type = other DNA
aggtgatggataaagaactgaa

SEQ ID NO: 146377 - DNA, 22 bp, synthetic construct
  misc_feature 1..22: note = chemically synthesized
  source 1..22: mol_type = other DNA
aagttgatggaaacaatgaagt

SEQ ID NO: 146378 - DNA, 22 bp, synthetic construct
  misc_feature 1..22: note = chemically synthesized
  source 1..22: mol_type = other DNA
atggaaacaatgaagttaagaa

SEQ ID NO: 146379 - DNA, 22 bp, synthetic construct
  misc_feature 1..22: note = chemically synthesized
  source 1..22: mol_type = other DNA
agaaaaaaaatcgagtaagaga

SEQ ID NO: 146380 - DNA, 22 bp, synthetic construct
  misc_feature 1..22: note = chemically synthesized
  source 1..22: mol_type = other DNA
tggcagtgattgcacagaactg

SEQ ID NO: 146381 - DNA, 22 bp, synthetic construct
  misc_feature 1..22: note = chemically synthesized
  source 1..22: mol_type = other DNA
cacagaactggaaaacattgtg

SEQ ID NO: 146382 - DNA, 22 bp, synthetic construct
  misc_feature 1..22: note = chemically synthesized
  source 1..22: mol_type = other DNA
gaaaacattgtgaaacagagag

SEQ ID NO: 146383 - DNA, 22 bp, synthetic construct
  misc_feature 1..22: note = chemically synthesized
  source 1..22: mol_type = other DNA
tgaaacagagagtcagagatga

SEQ ID NO: 146384 - DNA, 22 bp, synthetic construct
  misc_feature 1..22: note = chemically synthesized
  source 1..22: mol_type = other DNA
aaatccctgtctgtgaatgaaa

SEQ ID NO: 146385 - DNA, 22 bp, synthetic construct
  misc_feature 1..22: note = chemically synthesized
  source 1..22: mol_type = other DNA
tctgtgaatgaaaagaaggaaa

SEQ ID NO: 146386 - DNA, 22 bp, synthetic construct
  misc_feature 1..22: note = chemically synthesized
  source 1..22: mol_type = other DNA
tgaatgaaaagaaggaaattta

SEQ ID NO: 146387 - DNA, 22 bp, synthetic construct
  misc_feature 1..22: note = chemically synthesized
  source 1..22: mol_type = other DNA
attgacagaacagcaaatgcct

SEQ ID NO: 146388 - DNA, 22 bp, synthetic construct
  misc_feature 1..22: note = chemically synthesized
  source 1..22: mol_type = other DNA
ttgacagaacagcaaatgccta

SEQ ID NO: 146389 - DNA, 22 bp, synthetic construct
  misc_feature 1..22: note = chemically synthesized
  source 1..22: mol_type = other DNA
acagaacagcaaatgcctacaa

SEQ ID NO: 146390 - DNA, 22 bp, synthetic construct
  misc_feature 1..22: note = chemically synthesized
  source 1..22: mol_type = other DNA
caagccccctgtttggatctgg

SEQ ID NO: 146391 - DNA, 22 bp, synthetic construct
  misc_feature 1..22: note = chemically synthesized
  source 1..22: mol_type = other DNA
tttggatctggcaatgaacgta

SEQ ID NO: 146392 - DNA, 22 bp, synthetic construct
  misc_feature 1..22: note = chemically synthesized
  source 1..22: mol_type = other DNA
ggatctggcaatgaacgtagcc

SEQ ID NO: 146393 - DNA, 22 bp, synthetic construct
  misc_feature 1..22: note = chemically synthesized
  source 1..22: mol_type = other DNA
gatctggcaatgaacgtagcca

SEQ ID NO: 146394 - DNA, 22 bp, synthetic construct
  misc_feature 1..22: note = chemically synthesized
  source 1..22: mol_type = other DNA
gcaatgaacgtagccattctgt

SEQ ID NO: 146395 - DNA, 22 bp, synthetic construct
  misc_feature 1..22: note = chemically synthesized
  source 1..22: mol_type = other DNA
tgtggcaatcacttcaaactcc

SEQ ID NO: 146396 - DNA, 22 bp, synthetic construct
  misc_feature 1..22: note = chemically synthesized
  source 1..22: mol_type = other DNA
tggcaatcacttcaaactcctg

SEQ ID NO: 146397 - DNA, 22 bp, synthetic construct
  misc_feature 1..22: note = chemically synthesized
  source 1..22: mol_type = other DNA
caaactcctgtacccaagaccc

SEQ ID NO: 146398 - DNA, 22 bp, synthetic construct
  misc_feature 1..22: note = chemically synthesized
  source 1..22: mol_type = other DNA
aaactcctgtacccaagaccct

SEQ ID NO: 146399 - DNA, 22 bp, synthetic construct
  misc_feature 1..22: note = chemically synthesized
  source 1..22: mol_type = other DNA
ctgtacccaagacccttaggaa

SEQ ID NO: 146400 - DNA, 22 bp, synthetic construct
  misc_feature 1..22: note = chemically synthesized
  source 1..22: mol_type = other DNA
tacccaagacccttaggaagta

SEQ ID NO: 146401 - DNA, 22 bp, synthetic construct
  misc_feature 1..22: note = chemically synthesized
  source 1..22: mol_type = other DNA
aggaagtatgtagcaccctcaa

SEQ ID NO: 146402 - DNA, 22 bp, synthetic construct
  misc_feature 1..22: note = chemically synthesized
  source 1..22: mol_type = other DNA
ggaagtatgtagcaccctcaaa

SEQ ID NO: 146403 - DNA, 22 bp, synthetic construct
  misc_feature 1..22: note = chemically synthesized
  source 1..22: mol_type = other DNA
aaacctaaaacctcaaagaaag

SEQ ID NO: 146404 - DNA, 22 bp, synthetic construct
  misc_feature 1..22: note = chemically synthesized
  source 1..22: mol_type = other DNA
aaacctcaaagaaagaggtttt

SEQ ID NO: 146405 - DNA, 22 bp, synthetic construct
  misc_feature 1..22: note = chemically synthesized
  source 1..22: mol_type = other DNA
aaagaaagaggttttagaagat

SEQ ID NO: 146406 - DNA, 22 bp, synthetic construct
  misc_feature 1..22: note = chemically synthesized
  source 1..22: mol_type = other DNA
tagaagatataataccctttct

SEQ ID NO: 146407 - DNA, 22 bp, synthetic construct
  misc_feature 1..22: note = chemically synthesized
  source 1..22: mol_type = other DNA
agaagatataataccctttctt

SEQ ID NO: 146408 - DNA, 22 bp, synthetic construct
  misc_feature 1..22: note = chemically synthesized
  source 1..22: mol_type = other DNA
gaagatataataccctttcttc

SEQ ID NO: 146409 - DNA, 22 bp, synthetic construct
  misc_feature 1..22: note = chemically synthesized
  source 1..22: mol_type = other DNA
tcttctccagtttcattaatcc

SEQ ID NO: 146410 - DNA, 22 bp, synthetic construct
  misc_feature 1..22: note = chemically synthesized
  source 1..22: mol_type = other DNA
cttctccagtttcattaatccc

SEQ ID NO: 146411 - DNA, 22 bp, synthetic construct
  misc_feature 1..22: note = chemically synthesized
  source 1..22: mol_type = other DNA
ttctccagtttcattaatccca

SEQ ID NO: 146412 - DNA, 22 bp, synthetic construct
  misc_feature 1..22: note = chemically synthesized
  source 1..22: mol_type = other DNA
ctccagtttcattaatcccaaa

SEQ ID NO: 146413 - DNA, 22 bp, synthetic construct
  misc_feature 1..22: note = chemically synthesized
  source 1..22: mol_type = other DNA
tccagtttcattaatcccaaaa

SEQ ID NO: 146414 - DNA, 22 bp, synthetic construct
  misc_feature 1..22: note = chemically synthesized
  source 1..22: mol_type = other DNA
cagtttcattaatcccaaaacc

SEQ ID NO: 146415 - DNA, 22 bp, synthetic construct
  misc_feature 1..22: note = chemically synthesized
  source 1..22: mol_type = other DNA
cattaatcccaaaacctctttc

SEQ ID NO: 146416 - DNA, 22 bp, synthetic construct
  misc_feature 1..22: note = chemically synthesized
  source 1..22: mol_type = other DNA
attaatcccaaaacctctttct

SEQ ID NO: 146417 - DNA, 22 bp, synthetic construct
  misc_feature 1..22: note = chemically synthesized
  source 1..22: mol_type = other DNA
atcccaaaacctctttctcaaa

SEQ ID NO: 146418 - DNA, 22 bp, synthetic construct
  misc_feature 1..22: note = chemically synthesized
  source 1..22: mol_type = other DNA
tttctcaaagtatttcctctat

SEQ ID NO: 146419 - DNA, 22 bp, synthetic construct
  misc_feature 1..22: note = chemically synthesized
  source 1..22: mol_type = other DNA
tctcaaagtatttcctctatgt

SEQ ID NO: 146420 - DNA, 22 bp, synthetic construct
  misc_feature 1..22: note = chemically synthesized
  source 1..22: mol_type = other DNA
ctcaaagtatttcctctatgtg

SEQ ID NO: 146421 - DNA, 22 bp, synthetic construct
  misc_feature 1..22: note = chemically synthesized
  source 1..22: mol_type = other DNA
tcaaagtatttcctctatgtgt

SEQ ID NO: 146422 - DNA, 22 bp, synthetic construct
  misc_feature 1..22: note = chemically synthesized
  source 1..22: mol_type = other DNA
aaagtatttcctctatgtgtcc

SEQ ID NO: 146423 - DNA, 22 bp, synthetic construct
  misc_feature 1..22: note = chemically synthesized
  source 1..22: mol_type = other DNA
cctctatgtgtccaccccaaag

SEQ ID NO: 146424 - DNA, 22 bp, synthetic construct
  misc_feature 1..22: note = chemically synthesized
  source 1..22: mol_type = other DNA
ctctatgtgtccaccccaaaga

SEQ ID NO: 146425 - DNA, 22 bp, synthetic construct
  misc_feature 1..22: note = chemically synthesized
  source 1..22: mol_type = other DNA
tatgtgtccaccccaaagagct

SEQ ID NO: 146426 - DNA, 22 bp, synthetic construct
  misc_feature 1..22: note = chemically synthesized
  source 1..22: mol_type = other DNA
tgtgtccaccccaaagagctca

SEQ ID NO: 146427 - DNA, 22 bp, synthetic construct
  misc_feature 1..22: note = chemically synthesized
  source 1..22: mol_type = other DNA
acctcaccatatctcttgagtg

SEQ ID NO: 146428 - DNA, 22 bp, synthetic construct
  misc_feature 1..22: note = chemically synthesized
  source 1..22: mol_type = other DNA
accatatctcttgagtgggagc

SEQ ID NO: 146429 - DNA, 22 bp, synthetic construct
  misc_feature 1..22: note = chemically synthesized
  source 1..22: mol_type = other DNA
ttgagtgggagcacatagatag

SEQ ID NO: 146430 - DNA, 22 bp, synthetic construct
  misc_feature 1..22: note = chemically synthesized
  source 1..22: mol_type = other DNA
gagtgggagcacatagataggc

SEQ ID NO: 146431 - DNA, 22 bp, synthetic construct
  misc_feature 1..22: note = chemically synthesized
  source 1..22: mol_type = other DNA
agtgggagcacatagataggcg

SEQ ID NO: 146432 - DNA, 22 bp, synthetic construct
  misc_feature 1..22: note = chemically synthesized
  source 1..22: mol_type = other DNA
ccatctaacagcttctgaaatt

SEQ ID NO: 146433 - DNA, 22 bp, synthetic construct
  misc_feature 1..22: note = chemically synthesized
  source 1..22: mol_type = other DNA
acagcttctgaaattcctttgt

SEQ ID NO: 146434 - DNA, 22 bp, synthetic construct
  misc_feature 1..22: note = chemically synthesized
  source 1..22: mol_type = other DNA
ctgaaattcctttgtcatattt

SEQ ID NO: 146435 - DNA, 22 bp, synthetic construct
  misc_feature 1..22: note = chemically synthesized
  source 1..22: mol_type = other DNA
tgaaattcctttgtcatatttt

SEQ ID NO: 146436 - DNA, 22 bp, synthetic construct
  misc_feature 1..22: note = chemically synthesized
  source 1..22: mol_type = other DNA
aaattcctttgtcatatttttg

SEQ ID NO: 146437 - DNA, 22 bp, synthetic construct
  misc_feature 1..22: note = chemically synthesized
  source 1..22: mol_type = other DNA
ctttgtcatatttttgagtccc

SEQ ID NO: 146438 - DNA, 22 bp, synthetic construct
  misc_feature 1..22: note = chemically synthesized
  source 1..22: mol_type = other DNA
tgtcatatttttgagtccccac

SEQ ID NO: 146439 - DNA, 22 bp, synthetic construct
  misc_feature 1..22: note = chemically synthesized
  source 1..22: mol_type = other DNA
gtcatatttttgagtccccact

SEQ ID NO: 146440 - DNA, 22 bp, synthetic construct
  misc_feature 1..22: note = chemically synthesized
  source 1..22: mol_type = other DNA
tcatatttttgagtccccacta

SEQ ID NO: 146441 - DNA, 22 bp, synthetic construct
  misc_feature 1..22: note = chemically synthesized
  source 1..22: mol_type = other DNA
ttgagtccccactaataaccca

SEQ ID NO: 146442 - DNA, 22 bp, synthetic construct
  misc_feature 1..22: note = chemically synthesized
  source 1..22: mol_type = other DNA
tgagtccccactaataacccac

SEQ ID NO: 146443 - DNA, 22 bp, synthetic construct
  misc_feature 1..22: note = chemically synthesized
  source 1..22: mol_type = other DNA
gagtccccactaataacccaca

SEQ ID NO: 146444 - DNA, 22 bp, synthetic construct
  misc_feature 1..22: note = chemically synthesized
  source 1..22: mol_type = other DNA
agtccccactaataacccacaa

SEQ ID NO: 146445 - DNA, 22 bp, synthetic construct
  misc_feature 1..22: note = chemically synthesized
  source 1..22: mol_type = other DNA
ataacccacaaagcagaataaa

SEQ ID NO: 146446 - DNA, 22 bp, synthetic construct
  misc_feature 1..22: note = chemically synthesized
  source 1..22: mol_type = other DNA
ctcatgtacaataatcactcaa

SEQ ID NO: 146447 - DNA, 22 bp, synthetic construct
  misc_feature 1..22: note = chemically synthesized
  source 1..22: mol_type = other DNA
atgtacaataatcactcaactg

SEQ ID NO: 146448 - DNA, 22 bp, synthetic construct
  misc_feature 1..22: note = chemically synthesized
  source 1..22: mol_type = other DNA
aactgctgtcttgtagcataca

SEQ ID NO: 146449 - DNA, 22 bp, synthetic construct
  misc_feature 1..22: note = chemically synthesized
  source 1..22: mol_type = other DNA
ctgtcttgtagcatacattaat

SEQ ID NO: 146450 - DNA, 22 bp, synthetic construct
  misc_feature 1..22: note = chemically synthesized
  source 1..22: mol_type = other DNA
tcttgtagcatacattaattaa

SEQ ID NO: 146451 - DNA, 22 bp, synthetic construct
  misc_feature 1..22: note = chemically synthesized
  source 1..22: mol_type = other DNA
gtagcatacattaattaagcac

SEQ ID NO: 146452 - DNA, 22 bp, synthetic construct
  misc_feature 1..22: note = chemically synthesized
  source 1..22: mol_type = other DNA
tagcatacattaattaagcaca

SEQ ID NO: 146453 - DNA, 22 bp, synthetic construct
  misc_feature 1..22: note = chemically synthesized
  source 1..22: mol_type = other DNA
attaagcacattctttgaataa

SEQ ID NO: 146454 - DNA, 22 bp, synthetic construct
  misc_feature 1..22: note = chemically synthesized
  source 1..22: mol_type = other DNA
agcacattctttgaataattac

SEQ ID NO: 146455 - DNA, 22 bp, synthetic construct
  misc_feature 1..22: note = chemically synthesized
  source 1..22: mol_type = other DNA
tttgaataattactgtgtccaa

SEQ ID NO: 146456 - DNA, 22 bp, synthetic construct
  misc_feature 1..22: note = chemically synthesized
  source 1..22: mol_type = other DNA
tgaataattactgtgtccaaac

SEQ ID NO: 146457 - DNA, 22 bp, synthetic construct
  misc_feature 1..22: note = chemically synthesized
  source 1..22: mol_type = other DNA
gaataattactgtgtccaaaca

SEQ ID NO: 146458 - DNA, 22 bp, synthetic construct
  misc_feature 1..22: note = chemically synthesized
  source 1..22: mol_type = other DNA
aataattactgtgtccaaacaa

SEQ ID NO: 146459 - DNA, 22 bp, synthetic construct
  misc_feature 1..22: note = chemically synthesized
  source 1..22: mol_type = other DNA
ctgtgtccaaacaatcacactt

SEQ ID NO: 146460 - DNA, 22 bp, synthetic construct
  misc_feature 1..22: note = chemically synthesized
  source 1..22: mol_type = other DNA
tgtccaaacaatcacactttaa

SEQ ID NO: 146461 - DNA, 22 bp, synthetic construct
  misc_feature 1..22: note = chemically synthesized
  source 1..22: mol_type = other DNA
taaaatctcacacttgtgctat

SEQ ID NO: 146462 - DNA, 22 bp, synthetic construct
  misc_feature 1..22: note = chemically synthesized
  source 1..22: mol_type = other DNA
aaaatctcacacttgtgctatc

SEQ ID NO: 146463 - DNA, 22 bp, synthetic construct
  misc_feature 1..22: note = chemically synthesized
  source 1..22: mol_type = other DNA
aaatctcacacttgtgctatcc

SEQ ID NO: 146464 - DNA, 22 bp, synthetic construct
  misc_feature 1..22: note = chemically synthesized
  source 1..22: mol_type = other DNA
acacttgtgctatcccttgccc

SEQ ID NO: 146465 - DNA, 22 bp, synthetic construct
  misc_feature 1..22: note = chemically synthesized
  source 1..22: mol_type = other DNA
gtgctatcccttgcccttctga

SEQ ID NO: 146466 - DNA, 22 bp, synthetic construct
  misc_feature 1..22: note = chemically synthesized
  source 1..22: mol_type = other DNA
tgctatcccttgcccttctgaa

SEQ ID NO: 146467 - DNA, 22 bp, synthetic construct
  misc_feature 1..22: note = chemically synthesized
  source 1..22: mol_type = other DNA
tcccttgcccttctgaatgtca

SEQ ID NO: 146468 - DNA, 22 bp, synthetic construct
  misc_feature 1..22: note = chemically synthesized
  source 1..22: mol_type = other DNA
gcccttctgaatgtcactctgt

SEQ ID NO: 146469 - DNA, 22 bp, synthetic construct
  misc_feature 1..22: note = chemically synthesized
  source 1..22: mol_type = other DNA
cccttctgaatgtcactctgta

SEQ ID NO: 146470 - DNA, 22 bp, synthetic construct
  misc_feature 1..22: note = chemically synthesized
  source 1..22: mol_type = other DNA
ctgaatgtcactctgtatttta

SEQ ID NO: 146471 - DNA, 22 bp, synthetic construct
  misc_feature 1..22: note = chemically synthesized
  source 1..22: mol_type = other DNA
tgaatgtcactctgtattttaa

SEQ ID NO: 146472 - DNA, 22 bp, synthetic construct
  misc_feature 1..22: note = chemically synthesized
  source 1..22: mol_type = other DNA
aatgtcactctgtattttaaat

SEQ ID NO: 146473 - DNA, 22 bp, synthetic construct
  misc_feature 1..22: note = chemically synthesized
  source 1..22: mol_type = other DNA
tgtattttaaatgaagagatga

SEQ ID NO: 146474 - DNA, 22 bp, synthetic construct
  misc_feature 1..22: note = chemically synthesized
  source 1..22: mol_type = other DNA
tattttaaatgaagagatgagg

SEQ ID NO: 146475 - DNA, 22 bp, synthetic construct
  misc_feature 1..22: note = chemically synthesized
  source 1..22: mol_type = other DNA
taaatgaagagatgagggttga

SEQ ID NO: 146476 - DNA, 22 bp, synthetic construct
  misc_feature 1..22: note = chemically synthesized
  source 1..22: mol_type = other DNA
aaatgaagagatgagggttgaa

SEQ ID NO: 146477 - DNA, 22 bp, synthetic construct
  misc_feature 1..22: note = chemically synthesized
  source 1..22: mol_type = other DNA
aatgaagagatgagggttgaat

SEQ ID NO: 146478 - DNA, 22 bp, synthetic construct
  misc_feature 1..22: note = chemically synthesized
  source 1..22: mol_type = other DNA
aatttcctgtgttacttattgt

SEQ ID NO: 146479 - DNA, 22 bp, synthetic construct
  misc_feature 1..22: note = chemically synthesized
  source 1..22: mol_type = other DNA
cctgtgttacttattgttcatt

SEQ ID NO: 146480 - DNA, 22 bp, synthetic construct
  misc_feature 1..22: note = chemically synthesized
  source 1..22: mol_type = other DNA
ctgtgttacttattgttcattt

SEQ ID NO: 146481 - DNA, 22 bp, synthetic construct
  misc_feature 1..22: note = chemically synthesized
  source 1..22: mol_type = other DNA
tgttacttattgttcatttctc

SEQ ID NO: 146482 - DNA, 22 bp, synthetic construct
  misc_feature 1..22: note = chemically synthesized
  source 1..22: mol_type = other DNA
cttattgttcatttctcgatga

SEQ ID NO: 146483 - DNA, 22 bp, synthetic construct
  misc_feature 1..22: note = chemically synthesized
  source 1..22: mol_type = other DNA
attgttcatttctcgatgagga

SEQ ID NO: 146484 - DNA, 22 bp, synthetic construct
  misc_feature 1..22: note = chemically synthesized
  source 1..22: mol_type = other DNA
ttgttcatttctcgatgaggag

SEQ ID NO: 146485 - DNA, 22 bp, synthetic construct
  misc_feature 1..22: note = chemically synthesized
  source 1..22: mol_type = other DNA
ttcatttctcgatgaggagttt

SEQ ID NO: 146486 - DNA, 22 bp, synthetic construct
  misc_feature 1..22: note = chemically synthesized
  source 1..22: mol_type = other DNA
atttctcgatgaggagttttca

SEQ ID NO: 146487 - DNA, 22 bp, synthetic construct
  misc_feature 1..22: note = chemically synthesized
  source 1..22: mol_type = other DNA
ctcgatgaggagttttcacatt

SEQ ID NO: 146488 - DNA, 22 bp, synthetic construct
  misc_feature 1..22: note = chemically synthesized
  source 1..22: mol_type = other DNA
tcgatgaggagttttcacattc

SEQ ID NO: 146489 - DNA, 22 bp, synthetic construct
  misc_feature 1..22: note = chemically synthesized
  source 1..22: mol_type = other DNA
gatgaggagttttcacattcac

SEQ ID NO: 146490 - DNA, 22 bp, synthetic construct
  misc_feature 1..22: note = chemically synthesized
  source 1..22: mol_type = other DNA
tcacattcacctttagtggaaa

SEQ ID NO: 146491 - DNA, 22 bp, synthetic construct
  misc_feature 1..22: note = chemically synthesized
  source 1..22: mol_type = other DNA
cacattcacctttagtggaaaa

SEQ ID NO: 146492 - DNA, 22 bp, synthetic construct
  misc_feature 1..22: note = chemically synthesized
  source 1..22: mol_type = other DNA
acattcacctttagtggaaaac

SEQ ID NO: 146493 - DNA, 22 bp, synthetic construct
  misc_feature 1..22: note = chemically synthesized
  source 1..22: mol_type = other DNA
acctttagtggaaaacacataa

SEQ ID NO: 146494 - DNA, 22 bp, synthetic construct
  misc_feature 1..22: note = chemically synthesized
  source 1..22: mol_type = other DNA
tagtggaaaacacataagtaca

SEQ ID NO: 146495 - DNA, 22 bp, synthetic construct
  misc_feature 1..22: note = chemically synthesized
  source 1..22: mol_type = other DNA
agtggaaaacacataagtacac

SEQ ID NO: 146496 - DNA, 22 bp, synthetic construct
  misc_feature 1..22: note = chemically synthesized
  source 1..22: mol_type = other DNA
gtggaaaacacataagtacaca

SEQ ID NO: 146497 - DNA, 22 bp, synthetic construct
  misc_feature 1..22: note = chemically synthesized
  source 1..22: mol_type = other DNA
acaggaaaaatataccaaactg

SEQ ID NO: 146498 - DNA, 22 bp, synthetic construct
  misc_feature 1..22: note = chemically synthesized
  source 1..22: mol_type = other DNA
caggaaaaatataccaaactga

SEQ ID NO: 146499 - DNA, 22 bp, synthetic construct
  misc_feature 1..22: note = chemically synthesized
  source 1..22: mol_type = other DNA
acatgtagcatgaatgcttgtg

SEQ ID NO: 146500 - DNA, 22 bp, synthetic construct
  misc_feature 1..22: note = chemically synthesized
  source 1..22: mol_type = other DNA
gtgcatgtagtcatataaaatc

SEQ ID NO: 146501 - DNA, 22 bp, synthetic construct
  misc_feature 1..22: note = chemically synthesized
  source 1..22: mol_type = other DNA
tgcatgtagtcatataaaatct

SEQ ID NO: 146502 - DNA, 22 bp, synthetic construct
  misc_feature 1..22: note = chemically synthesized
  source 1..22: mol_type = other DNA
gtagcaatgtaaacattctctg

SEQ ID NO: 146503 - DNA, 22 bp, synthetic construct
  misc_feature 1..22: note = chemically synthesized
  source 1..22: mol_type = other DNA
tagcaatgtaaacattctctga

SEQ ID NO: 146504 - DNA, 22 bp, synthetic construct
  misc_feature 1..22: note = chemically synthesized
  source 1..22: mol_type = other DNA
tctgatatacacatacagatgt

SEQ ID NO: 146505 - DNA, 22 bp, synthetic construct
  misc_feature 1..22: note = chemically synthesized
  source 1..22: mol_type = other DNA
tgatatacacatacagatgtgt

SEQ ID NO: 146506 - DNA, 22 bp, synthetic construct
  misc_feature 1..22: note = chemically synthesized
  source 1..22: mol_type = other DNA
atatacacatacagatgtgtct

SEQ ID NO: 146507 - DNA, 22 bp, synthetic construct
  misc_feature 1..22: note = chemically synthesized
  source 1..22: mol_type = other DNA
tatgtctacacaatttcttatg

SEQ ID NO: 146508 - DNA, 22 bp, synthetic construct
  misc_feature 1..22: note = chemically synthesized
  source 1..22: mol_type = other DNA
cacaatttcttatgctccatga

SEQ ID NO: 146509 - DNA, 22 bp, synthetic construct
  misc_feature 1..22: note = chemically synthesized
  source 1..22: mol_type = other DNA
cttatgctccatgaacaaacat

SEQ ID NO: 146510 - DNA, 22 bp, synthetic construct
  misc_feature 1..22: note = chemically synthesized
  source 1..22: mol_type = other DNA
ttatgctccatgaacaaacatt

SEQ ID NO: 146511 - DNA, 22 bp, synthetic construct
  misc_feature 1..22: note = chemically synthesized
  source 1..22: mol_type = other DNA
atgctccatgaacaaacattcc

SEQ ID NO: 146512 - DNA, 22 bp, synthetic construct
  misc_feature 1..22: note = chemically synthesized
  source 1..22: mol_type = other DNA
tgctccatgaacaaacattcca

SEQ ID NO: 146513 - DNA, 22 bp, synthetic construct
  misc_feature 1..22: note = chemically synthesized
  source 1..22: mol_type = other DNA
catgaacaaacattccatgcac

SEQ ID NO: 146514 - DNA, 22 bp, synthetic construct
  misc_feature 1..22: note = chemically synthesized
  source 1..22: mol_type = other DNA
catgcacacataagaacacaca

SEQ ID NO: 146515 - DNA, 22 bp, synthetic construct
  misc_feature 1..22: note = chemically synthesized
  source 1..22: mol_type = other DNA
ttacagatgcatacttgagtgc

SEQ ID NO: 146516 - DNA, 22 bp, synthetic construct
  misc_feature 1..22: note = chemically synthesized
  source 1..22: mol_type = other DNA
cagatgcatacttgagtgcatt

SEQ ID NO: 146517 - DNA, 22 bp, synthetic construct
  misc_feature 1..22: note = chemically synthesized
  source 1..22: mol_type = other DNA
gagtgcattgacaaaattaccc

SEQ ID NO: 146518 - DNA, 22 bp, synthetic construct
  misc_feature 1..22: note = chemically synthesized
  source 1..22: mol_type = other DNA
agtgcattgacaaaattacccc

SEQ ID NO: 146519 - DNA, 22 bp, synthetic construct
  misc_feature 1..22: note = chemically synthesized
  source 1..22: mol_type = other DNA
acaaaattaccccagtcaatct

SEQ ID NO: 146520 - DNA, 22 bp, synthetic construct
  misc_feature 1..22: note = chemically synthesized
  source 1..22: mol_type = other DNA
ccccagtcaatctagagaattt

SEQ ID NO: 146521 - DNA, 22 bp, synthetic construct
  misc_feature 1..22: note = chemically synthesized
  source 1..22: mol_type = other DNA
gagaatttggatttctgcattt

SEQ ID NO: 146522 - DNA, 22 bp, synthetic construct
  misc_feature 1..22: note = chemically synthesized
  source 1..22: mol_type = other DNA
ggatttctgcatttgactctgt

SEQ ID NO: 146523 - DNA, 22 bp, synthetic construct
  misc_feature 1..22: note = chemically synthesized
  source 1..22: mol_type = other DNA
gatttctgcatttgactctgtt

SEQ ID NO: 146524 - DNA, 22 bp, synthetic construct
  misc_feature 1..22: note = chemically synthesized
  source 1..22: mol_type = other DNA
ctgcatttgactctgttagctt

SEQ ID NO: 146525 - DNA, 22 bp, synthetic construct
  misc_feature 1..22: note = chemically synthesized
  source 1..22: mol_type = other DNA
tgcatttgactctgttagcttt

SEQ ID NO: 146526 - DNA, 22 bp, synthetic construct
  misc_feature 1..22: note = chemically synthesized
  source 1..22: mol_type = other DNA
catttgactctgttagctttgt

SEQ ID NO: 146527 - DNA, 22 bp, synthetic construct
  misc_feature 1..22: note = chemically synthesized
  source 1..22: mol_type = other DNA
gactctgttagctttgtacatg

SEQ ID NO: 146528 - DNA, 22 bp, synthetic construct
  misc_feature 1..22: note = chemically synthesized
  source 1..22: mol_type = other DNA
actctgttagctttgtacatgc

SEQ ID NO: 146529 - DNA, 22 bp, synthetic construct
  misc_feature 1..22: note = chemically synthesized
  source 1..22: mol_type = other DNA
tgttagctttgtacatgctgtt

SEQ ID NO: 146530 - DNA, 22 bp, synthetic construct
  misc_feature 1..22: note = chemically synthesized
  source 1..22: mol_type = other DNA
ttagctttgtacatgctgttca

SEQ ID NO: 146531 - DNA, 22 bp, synthetic construct
  misc_feature 1..22: note = chemically synthesized
  source 1..22: mol_type = other DNA
gctttgtacatgctgttcattt

SEQ ID NO: 146532 - DNA, 22 bp, synthetic construct
  misc_feature 1..22: note = chemically synthesized
  source 1..22: mol_type = other DNA
tgtacatgctgttcatttactc

SEQ ID NO: 146533 - DNA, 22 bp, synthetic construct
  misc_feature 1..22: note = chemically synthesized
  source 1..22: mol_type = other DNA
gtacatgctgttcatttactct

SEQ ID NO: 146534 - DNA, 22 bp, synthetic construct
  misc_feature 1..22: note = chemically synthesized
  source 1..22: mol_type = other DNA
tacatgctgttcatttactctg

SEQ ID NO: 146535 - DNA, 22 bp, synthetic construct
  misc_feature 1..22: note = chemically synthesized
  source 1..22: mol_type = other DNA
ttcatttactctgggtgatgtc

SEQ ID NO: 146536 - DNA, 22 bp, synthetic construct
  misc_feature 1..22: note = chemically synthesized
  source 1..22: mol_type = other DNA
atttactctgggtgatgtcttt

SEQ ID NO: 146537 - DNA, 22 bp, synthetic construct
  misc_feature 1..22: note = chemically synthesized
  source 1..22: mol_type = other DNA
actctgggtgatgtctttccct

SEQ ID NO: 146538 - DNA, 22 bp, synthetic construct
  misc_feature 1..22: note = chemically synthesized
  source 1..22: mol_type = other DNA
ctctgggtgatgtctttccctc

SEQ ID NO: 146539 - DNA, 22 bp, synthetic construct
  misc_feature 1..22: note = chemically synthesized
  source 1..22: mol_type = other DNA
tgggtgatgtctttccctcatt

SEQ ID NO: 146540 - DNA, 22 bp, synthetic construct
  misc_feature 1..22: note = chemically synthesized
  source 1..22: mol_type = other DNA
ggtgatgtctttccctcatttt

SEQ ID NO: 146541 - DNA, 22 bp, synthetic construct
  misc_feature 1..22: note = chemically synthesized
  source 1..22: mol_type = other DNA
tccctcattttgccttgtctat

SEQ ID NO: 146542 - DNA, 22 bp, synthetic construct
  misc_feature 1..22: note = chemically synthesized
  source 1..22: mol_type = other DNA
ccctcattttgccttgtctatc

SEQ ID NO: 146543 - DNA, 22 bp, synthetic construct
  misc_feature 1..22: note = chemically synthesized
  source 1..22: mol_type = other DNA
cctcattttgccttgtctatct

SEQ ID NO: 146544 - DNA, 22 bp, synthetic construct
  misc_feature 1..22: note = chemically synthesized
  source 1..22: mol_type = other DNA
attttgccttgtctatcttgta

SEQ ID NO: 146545 - DNA, 22 bp, synthetic construct
  misc_feature 1..22: note = chemically synthesized
  source 1..22: mol_type = other DNA
tgccttgtctatcttgtactca

SEQ ID NO: 146546 - DNA, 22 bp, synthetic construct
  misc_feature 1..22: note = chemically synthesized
  source 1..22: mol_type = other DNA
gccttgtctatcttgtactcat

SEQ ID NO: 146547 - DNA, 22 bp, synthetic construct
  misc_feature 1..22: note = chemically synthesized
  source 1..22: mol_type = other DNA
ccttgtctatcttgtactcata

SEQ ID NO: 146548 - DNA, 22 bp, synthetic construct
  misc_feature 1..22: note = chemically synthesized
  source 1..22: mol_type = other DNA
gtctatcttgtactcatacttt

SEQ ID NO: 146549 - DNA, 22 bp, synthetic construct
  misc_feature 1..22: note = chemically synthesized
  source 1..22: mol_type = other DNA
tctatcttgtactcatacttta

SEQ ID NO: 146550 - DNA, 22 bp, synthetic construct
  misc_feature 1..22: note = chemically synthesized
  source 1..22: mol_type = other DNA
tcttgtactcatactttaagtc

SEQ ID NO: 146551 - DNA, 22 bp, synthetic construct
  misc_feature 1..22: note = chemically synthesized
  source 1..22: mol_type = other DNA
gtactcatactttaagtcctaa

SEQ ID NO: 146552 - DNA, 22 bp, synthetic construct
  misc_feature 1..22: note = chemically synthesized
  source 1..22: mol_type = other DNA
tactcatactttaagtcctaac

SEQ ID NO: 146553 - DNA, 22 bp, synthetic construct
  misc_feature 1..22: note = chemically synthesized
  source 1..22: mol_type = other DNA
atactttaagtcctaacttata

SEQ ID NO: 146554 - DNA, 22 bp, synthetic construct
  misc_feature 1..22: note = chemically synthesized
  source 1..22: mol_type = other DNA
taagtcctaacttatatgttat

SEQ ID NO: 146555 - DNA, 22 bp, synthetic construct
  misc_feature 1..22: note = chemically synthesized
  source 1..22: mol_type = other DNA
aagtcctaacttatatgttatc

SEQ ID NO: 146556 - DNA, 22 bp, synthetic construct
  misc_feature 1..22: note = chemically synthesized
  source 1..22: mol_type = other DNA
agtcctaacttatatgttatct

SEQ ID NO: 146557 - DNA, 22 bp, synthetic construct
  misc_feature 1..22: note = chemically synthesized
  source 1..22: mol_type = other DNA
acttatatgttatctcaactaa

SEQ ID NO: 146558 - DNA, 22 bp, synthetic construct
  misc_feature 1..22: note = chemically synthesized
  source 1..22: mol_type = other DNA
atatgttatctcaactaagaag

SEQ ID NO: 146559 - DNA, 22 bp, synthetic construct
  misc_feature 1..22: note = chemically synthesized
  source 1..22: mol_type = other DNA
tatgttatctcaactaagaagc

SEQ ID NO: 146560 - DNA, 22 bp, synthetic construct
  misc_feature 1..22: note = chemically synthesized
  source 1..22: mol_type = other DNA
tctcaactaagaagctattttt

SEQ ID NO: 146561 - DNA, 22 bp, synthetic construct
  misc_feature 1..22: note = chemically synthesized
  source 1..22: mol_type = other DNA
aactaagaagctattttttttt

SEQ ID NO: 146562 - DNA, 22 bp, synthetic construct
  misc_feature 1..22: note = chemically synthesized
  source 1..22: mol_type = other DNA
agaagctatttttttttaattt

SEQ ID NO: 146563 - DNA, 22 bp, synthetic construct
  misc_feature 1..22: note = chemically synthesized
  source 1..22: mol_type = other DNA
tttttttttaattttaactggg

SEQ ID NO: 146564 - DNA, 22 bp, synthetic construct
  misc_feature 1..22: note = chemically synthesized
  source 1..22: mol_type = other DNA
ttttttaattttaactgggctt

SEQ ID NO: 146565 - DNA, 22 bp, synthetic construct
  misc_feature 1..22: note = chemically synthesized
  source 1..22: mol_type = other DNA
tttttaattttaactgggctta

SEQ ID NO: 146566 - DNA, 22 bp, synthetic construct
  misc_feature 1..22: note = chemically synthesized
  source 1..22: mol_type = other DNA
ttttaattttaactgggcttaa

SEQ ID NO: 146567 - DNA, 22 bp, synthetic construct
  misc_feature 1..22: note = chemically synthesized
  source 1..22: mol_type = other DNA
tttaattttaactgggcttaaa

SEQ ID NO: 146568 - DNA, 22 bp, synthetic construct
  misc_feature 1..22: note = chemically synthesized
  source 1..22: mol_type = other DNA
ttaattttaactgggcttaaag

SEQ ID NO: 146569 - DNA, 22 bp, synthetic construct
  misc_feature 1..22: note = chemically synthesized
  source 1..22: mol_type = other DNA
taattttaactgggcttaaagc

SEQ ID NO: 146570 - DNA, 22 bp, synthetic construct
  misc_feature 1..22: note = chemically synthesized
  source 1..22: mol_type = other DNA
aattttaactgggcttaaagcc

SEQ ID NO: 146571 - DNA, 22 bp, synthetic construct
  misc_feature 1..22: note = chemically synthesized
  source 1..22: mol_type = other DNA
attttaactgggcttaaagccc

SEQ ID NO: 146572 - DNA, 22 bp, synthetic construct
  misc_feature 1..22: note = chemically synthesized
  source 1..22: mol_type = other DNA
taactgggcttaaagccctgtc

SEQ ID NO: 146573 - DNA, 22 bp, synthetic construct
  misc_feature 1..22: note = chemically synthesized
  source 1..22: mol_type = other DNA
aactgggcttaaagccctgtct

SEQ ID NO: 146574 - DNA, 22 bp, synthetic construct
  misc_feature 1..22: note = chemically synthesized
  source 1..22: mol_type = other DNA
actgggcttaaagccctgtcta

SEQ ID NO: 146575 - DNA, 22 bp, synthetic construct
  misc_feature 1..22: note = chemically synthesized
  source 1..22: mol_type = other DNA
ggcttaaagccctgtctataaa

SEQ ID NO: 146576 - DNA, 22 bp, synthetic construct
  misc_feature 1..22: note = chemically synthesized
  source 1..22: mol_type = other DNA
aaagccctgtctataaactctg

SEQ ID NO: 146577 - DNA, 22 bp, synthetic construct
  misc_feature 1..22: note = chemically synthesized
  source 1..22: mol_type = other DNA
aagccctgtctataaactctgc

SEQ ID NO: 146578 - DNA, 22 bp, synthetic construct
  misc_feature 1..22: note = chemically synthesized
  source 1..22: mol_type = other DNA
tctataaactctgctacaatta

SEQ ID NO: 146579 - DNA, 22 bp, synthetic construct
  misc_feature 1..22: note = chemically synthesized
  source 1..22: mol_type = other DNA
taaactctgctacaattatggg

SEQ ID NO: 146580 - DNA, 22 bp, synthetic construct
  misc_feature 1..22: note = chemically synthesized
  source 1..22: mol_type = other DNA
tgctacaattatgggctctttc

SEQ ID NO: 146581 - DNA, 22 bp, synthetic construct
  misc_feature 1..22: note = chemically synthesized
  source 1..22: mol_type = other DNA
ctacaattatgggctctttctt

SEQ ID NO: 146582 - DNA, 22 bp, synthetic construct
  misc_feature 1..22: note = chemically synthesized
  source 1..22: mol_type = other DNA
caattatgggctctttcttata

SEQ ID NO: 146583 - DNA, 22 bp, synthetic construct
  misc_feature 1..22: note = chemically synthesized
  source 1..22: mol_type = other DNA
tgggctctttcttataatattt

SEQ ID NO: 146584 - DNA, 22 bp, synthetic construct
  misc_feature 1..22: note = chemically synthesized
  source 1..22: mol_type = other DNA
tttcttataatatttagtgttt

SEQ ID NO: 146585 - DNA, 22 bp, synthetic construct
  misc_feature 1..22: note = chemically synthesized
  source 1..22: mol_type = other DNA
tcttataatatttagtgttttt

SEQ ID NO: 146586 - DNA, 22 bp, synthetic construct
  misc_feature 1..22: note = chemically synthesized
  source 1..22: mol_type = other DNA
cttataatatttagtgtttttc

SEQ ID NO: 146587 - DNA, 22 bp, synthetic construct
  misc_feature 1..22: note = chemically synthesized
  source 1..22: mol_type = other DNA
ttataatatttagtgtttttcc

SEQ ID NO: 146588 - DNA, 22 bp, synthetic construct
  misc_feature 1..22: note = chemically synthesized
  source 1..22: mol_type = other DNA
ataatatttagtgtttttccta

SEQ ID NO: 146589 - DNA, 22 bp, synthetic construct
  misc_feature 1..22: note = chemically synthesized
  source 1..22: mol_type = other DNA
taatatttagtgtttttcctac

SEQ ID NO: 146590 - DNA, 22 bp, synthetic construct
  misc_feature 1..22: note = chemically synthesized
  source 1..22: mol_type = other DNA
agtgtttttcctactaatgtac

SEQ ID NO: 146591 - DNA, 22 bp, synthetic construct
  misc_feature 1..22: note = chemically synthesized
  source 1..22: mol_type = other DNA
gtgtttttcctactaatgtact

SEQ ID NO: 146592 - DNA, 22 bp, synthetic construct
  misc_feature 1..22: note = chemically synthesized
  source 1..22: mol_type = other DNA
ttcctactaatgtacttaatct

SEQ ID NO: 146593 - DNA, 22 bp, synthetic construct
  misc_feature 1..22: note = chemically synthesized
  source 1..22: mol_type = other DNA
tcctactaatgtacttaatctg

SEQ ID NO: 146594 - DNA, 22 bp, synthetic construct
  misc_feature 1..22: note = chemically synthesized
  source 1..22: mol_type = other DNA
cctactaatgtacttaatctgc

SEQ ID NO: 146595 - DNA, 22 bp, synthetic construct
  misc_feature 1..22: note = chemically synthesized
  source 1..22: mol_type = other DNA
ctactaatgtacttaatctgct

SEQ ID NO: 146596 - DNA, 22 bp, synthetic construct
  misc_feature 1..22: note = chemically synthesized
  source 1..22: mol_type = other DNA
ctaatgtacttaatctgctcat

SEQ ID NO: 146597 - DNA, 22 bp, synthetic construct
  misc_feature 1..22: note = chemically synthesized
  source 1..22: mol_type = other DNA
atgtacttaatctgctcattgt

SEQ ID NO: 146598 - DNA, 22 bp, synthetic construct
  misc_feature 1..22: note = chemically synthesized
  source 1..22: mol_type = other DNA
aatctgctcattgtatattcct

SEQ ID NO: 146599 - DNA, 22 bp, synthetic construct
  misc_feature 1..22: note = chemically synthesized
  source 1..22: mol_type = other DNA
atctgctcattgtatattccta

SEQ ID NO: 146600 - DNA, 22 bp, synthetic construct
  misc_feature 1..22: note = chemically synthesized
  source 1..22: mol_type = other DNA
ctcattgtatattcctaccact

SEQ ID NO: 146601 - DNA, 22 bp, synthetic construct
  misc_feature 1..22: note = chemically synthesized
  source 1..22: mol_type = other DNA
attgtatattcctaccactaaa

SEQ ID NO: 146602 - DNA, 22 bp, synthetic construct
  misc_feature 1..22: note = chemically synthesized
  source 1..22: mol_type = other DNA
tatattcctaccactaaatttt

SEQ ID NO: 146603 - DNA, 22 bp, synthetic construct
  misc_feature 1..22: note = chemically synthesized
  source 1..22: mol_type = other DNA
ctaccactaaattttaacctct

SEQ ID NO: 146604 - DNA, 22 bp, synthetic construct
  misc_feature 1..22: note = chemically synthesized
  source 1..22: mol_type = other DNA
ccactaaattttaacctctttt

SEQ ID NO: 146605 - DNA, 22 bp, synthetic construct
  misc_feature 1..22: note = chemically synthesized
  source 1..22: mol_type = other DNA
aattttaacctcttttatggta

SEQ ID NO: 146606 - DNA, 22 bp, synthetic construct
  misc_feature 1..22: note = chemically synthesized
  source 1..22: mol_type = other DNA
taacctcttttatggtagagac

SEQ ID NO: 146607 - DNA, 22 bp, synthetic construct
  misc_feature 1..22: note = chemically synthesized
  source 1..22: mol_type = other DNA
aacctcttttatggtagagaca

SEQ ID NO: 146608 - DNA, 22 bp, synthetic construct
  misc_feature 1..22: note = chemically synthesized
  source 1..22: mol_type = other DNA
acctcttttatggtagagacat

SEQ ID NO: 146609 - DNA, 22 bp, synthetic construct
  misc_feature 1..22: note = chemically synthesized
  source 1..22: mol_type = other DNA
ttttatggtagagacattgtct

SEQ ID NO: 146610 - DNA, 22 bp, synthetic construct
  misc_feature 1..22: note = chemically synthesized
  source 1..22: mol_type = other DNA
ttatggtagagacattgtcttg

SEQ ID NO: 146611 - DNA, 22 bp, synthetic construct
  misc_feature 1..22: note = chemically synthesized
  source 1..22: mol_type = other DNA
tatggtagagacattgtcttgt

SEQ ID NO: 146612 - DNA, 22 bp, synthetic construct
  misc_feature 1..22: note = chemically synthesized
  source 1..22: mol_type = other DNA
atggtagagacattgtcttgta

SEQ ID NO: 146613 - DNA, 22 bp, synthetic construct
  misc_feature 1..22: note = chemically synthesized
  source 1..22: mol_type = other DNA
tggtagagacattgtcttgtaa

SEQ ID NO: 146614 - DNA, 22 bp, synthetic construct
  misc_feature 1..22: note = chemically synthesized
  source 1..22: mol_type = other DNA
tcttgtaaactcttatttccct

SEQ ID NO: 146615 - DNA, 22 bp, synthetic construct
  misc_feature 1..22: note = chemically synthesized
  source 1..22: mol_type = other DNA
gtaaactcttatttccctagta

SEQ ID NO: 146616 - DNA, 22 bp, synthetic construct
  misc_feature 1..22: note = chemically synthesized
  source 1..22: mol_type = other DNA
taaactcttatttccctagtat

SEQ ID NO: 146617 - DNA, 22 bp, synthetic construct
  misc_feature 1..22: note = chemically synthesized
  source 1..22: mol_type = other DNA
ttatttccctagtatttggaga

SEQ ID NO: 146618 - DNA, 22 bp, synthetic construct
  misc_feature 1..22: note = chemically synthesized
  source 1..22: mol_type = other DNA
atttccctagtatttggagatg

SEQ ID NO: 146619 - DNA, 22 bp, synthetic construct
  misc_feature 1..22: note = chemically synthesized
  source 1..22: mol_type = other DNA
tttccctagtatttggagatga

SEQ ID NO: 146620 - DNA, 22 bp, synthetic construct
  misc_feature 1..22: note = chemically synthesized
  source 1..22: mol_type = other DNA
ccctagtatttggagatgaaaa

SEQ ID NO: 146621 - DNA, 22 bp, synthetic construct
  misc_feature 1..22: note = chemically synthesized
  source 1..22: mol_type = other DNA
cctagtatttggagatgaaaaa

SEQ ID NO: 146622 - DNA, 22 bp, synthetic construct
  misc_feature 1..22: note = chemically synthesized
  source 1..22: mol_type = other DNA
gtatttggagatgaaaaaaaag

SEQ ID NO: 146623 - DNA, 22 bp, synthetic construct
  misc_feature 1..22: note = chemically synthesized
  source 1..22: mol_type = other DNA
ggagatgaaaaaaaagattaaa

SEQ ID NO: 146624 - DNA, 22 bp, synthetic construct
  misc_feature 1..22: note = chemically synthesized
  source 1..22: mol_type = other DNA
gagatgaaaaaaaagattaaat

SEQ ID NO: 146625 - DNA, 22 bp, synthetic construct
  misc_feature 1..22: note = chemically synthesized
  source 1..22: mol_type = other DNA
aattatccaaaattagatctct

SEQ ID NO: 146626 - DNA, 22 bp, synthetic construct
  misc_feature 1..22: note = chemically synthesized
  source 1..22: mol_type = other DNA
tccaaaattagatctctctttt

SEQ ID NO: 146627 - DNA, 22 bp, synthetic construct
  misc_feature 1..22: note = chemically synthesized
  source 1..22: mol_type = other DNA
gatctctcttttctacattatg

SEQ ID NO: 146628 - DNA, 22 bp, synthetic construct
  misc_feature 1..22: note = chemically synthesized
  source 1..22: mol_type = other DNA
tcttttctacattatgagtatt

SEQ ID NO: 146629 - DNA, 22 bp, synthetic construct
  misc_feature 1..22: note = chemically synthesized
  source 1..22: mol_type = other DNA
ttttctacattatgagtattac

SEQ ID NO: 146630 - DNA, 22 bp, synthetic construct
  misc_feature 1..22: note = chemically synthesized
  source 1..22: mol_type = other DNA
ttctacattatgagtattacac

SEQ ID NO: 146631 - DNA, 22 bp, synthetic construct
  misc_feature 1..22: note = chemically synthesized
  source 1..22: mol_type = other DNA
tctacattatgagtattacact

SEQ ID NO: 146632 - DNA, 22 bp, synthetic construct
  misc_feature 1..22: note = chemically synthesized
  source 1..22: mol_type = other DNA
ctacattatgagtattacacta

SEQ ID NO: 146633 - DNA, 22 bp, synthetic construct
  misc_feature 1..22: note = chemically synthesized
  source 1..22: mol_type = other DNA
tacattatgagtattacactat

SEQ ID NO: 146634 - DNA, 22 bp, synthetic construct
  misc_feature 1..22: note = chemically synthesized
  source 1..22: mol_type = other DNA
cattatgagtattacactatcc

SEQ ID NO: 146635 - DNA, 22 bp, synthetic construct
  misc_feature 1..22: note = chemically synthesized
  source 1..22: mol_type = other DNA
tgagtattacactatccataga

SEQ ID NO: 146636 - DNA, 22 bp, synthetic construct
  misc_feature 1..22: note = chemically synthesized
  source 1..22: mol_type = other DNA
cactatccatagagaagtttgt

SEQ ID NO: 146637 - DNA, 22 bp, synthetic construct
  misc_feature 1..22: note = chemically synthesized
  source 1..22: mol_type = other DNA
tccatagagaagtttgtttgag

SEQ ID NO: 146638 - DNA, 22 bp, synthetic construct
  misc_feature 1..22: note = chemically synthesized
  source 1..22: mol_type = other DNA
gtttgagacctaaactgaggaa

SEQ ID NO: 146639 - DNA, 22 bp, synthetic construct
  misc_feature 1..22: note = chemically synthesized
  source 1..22: mol_type = other DNA
tttgagacctaaactgaggaac

SEQ ID NO: 146640 - DNA, 22 bp, synthetic construct
  misc_feature 1..22: note = chemically synthesized
  source 1..22: mol_type = other DNA
gagacctaaactgaggaacctt

SEQ ID NO: 146641 - DNA, 22 bp, synthetic construct
  misc_feature 1..22: note = chemically synthesized
  source 1..22: mol_type = other DNA
agacctaaactgaggaaccttt

SEQ ID NO: 146642 - DNA, 22 bp, synthetic construct
  misc_feature 1..22: note = chemically synthesized
  source 1..22: mol_type = other DNA
aactgaggaacctttggttcta

SEQ ID NO: 146643 - DNA, 22 bp, synthetic construct
  misc_feature 1..22: note = chemically synthesized
  source 1..22: mol_type = other DNA
aggaacctttggttctaaaatg

SEQ ID NO: 146644 - DNA, 22 bp, synthetic construct
  misc_feature 1..22: note = chemically synthesized
  source 1..22: mol_type = other DNA
tggttctaaaatgactatgtga

SEQ ID NO: 146645 - DNA, 22 bp, synthetic construct
  misc_feature 1..22: note = chemically synthesized
  source 1..22: mol_type = other DNA
ggttctaaaatgactatgtgat

SEQ ID NO: 146646 - DNA, 22 bp, synthetic construct
  misc_feature 1..22: note = chemically synthesized
  source 1..22: mol_type = other DNA
gttctaaaatgactatgtgata

SEQ ID NO: 146647 - DNA, 22 bp, synthetic construct
  misc_feature 1..22: note = chemically synthesized
  source 1..22: mol_type = other DNA
taaaatgactatgtgatatctt

SEQ ID NO: 146648 - DNA, 22 bp, synthetic construct
  misc_feature 1..22: note = chemically synthesized
  source 1..22: mol_type = other DNA
aaatgactatgtgatatcttag

SEQ ID NO: 146649 - DNA, 22 bp, synthetic construct
  misc_feature 1..22: note = chemically synthesized
  source 1..22: mol_type = other DNA
tgtgatatcttagtatttatag

SEQ ID NO: 146650 - DNA, 22 bp, synthetic construct
  misc_feature 1..22: note = chemically synthesized
  source 1..22: mol_type = other DNA
agtatttataggtcatgaggtt

SEQ ID NO: 146651 - DNA, 22 bp, synthetic construct
  misc_feature 1..22: note = chemically synthesized
  source 1..22: mol_type = other DNA
gtatttataggtcatgaggttc

SEQ ID NO: 146652 - DNA, 22 bp, synthetic construct
  misc_feature 1..22: note = chemically synthesized
  source 1..22: mol_type = other DNA
ataggtcatgaggttccttcct

SEQ ID NO: 146653 - DNA, 22 bp, synthetic construct
  misc_feature 1..22: note = chemically synthesized
  source 1..22: mol_type = other DNA
taggtcatgaggttccttcctc

SEQ ID NO: 146654 - DNA, 22 bp, synthetic construct
  misc_feature 1..22: note = chemically synthesized
  source 1..22: mol_type = other DNA
cttcctctgcctctgctatagt

SEQ ID NO: 146655 - DNA, 22 bp, synthetic construct
  misc_feature 1..22: note = chemically synthesized
  source 1..22: mol_type = other DNA
cctctgcctctgctatagtttg

SEQ ID NO: 146656 - DNA, 22 bp, synthetic construct
  misc_feature 1..22: note = chemically synthesized
  source 1..22: mol_type = other DNA
ctctgcctctgctatagtttga

SEQ ID NO: 146657 - DNA, 22 bp, synthetic construct
  misc_feature 1..22: note = chemically synthesized
  source 1..22: mol_type = other DNA
tgcctctgctatagtttgatta

SEQ ID NO: 146658 - DNA, 22 bp, synthetic construct
  misc_feature 1..22: note = chemically synthesized
  source 1..22: mol_type = other DNA
cctctgctatagtttgattagt

SEQ ID NO: 146659 - DNA, 22 bp, synthetic construct
  misc_feature 1..22: note = chemically synthesized
  source 1..22: mol_type = other DNA
tgctatagtttgattagtcaac

SEQ ID NO: 146660 - DNA, 22 bp, synthetic construct
  misc_feature 1..22: note = chemically synthesized
  source 1..22: mol_type = other DNA
ctatagtttgattagtcaacaa

SEQ ID NO: 146661 - DNA, 22 bp, synthetic construct
  misc_feature 1..22: note = chemically synthesized
  source 1..22: mol_type = other DNA
tagtttgattagtcaacaagca

SEQ ID NO: 146662 - DNA, 22 bp, synthetic construct
  misc_feature 1..22: note = chemically synthesized
  source 1..22: mol_type = other DNA
gattagtcaacaagcatgtgtc

SEQ ID NO: 146663 - DNA, 22 bp, synthetic construct
  misc_feature 1..22: note = chemically synthesized
  source 1..22: mol_type = other DNA
attagtcaacaagcatgtgtca

SEQ ID NO: 146664 - DNA, 22 bp, synthetic construct
  misc_feature 1..22: note = chemically synthesized
  source 1..22: mol_type = other DNA
gtcaacaagcatgtgtcatgca

SEQ ID NO: 146665 - DNA, 22 bp, synthetic construct
  misc_feature 1..22: note = chemically synthesized
  source 1..22: mol_type = other DNA
attcacatcagaatttcataca

SEQ ID NO: 146666 - DNA, 22 bp, synthetic construct
  misc_feature 1..22: note = chemically synthesized
  source 1..22: mol_type = other DNA
ttcacatcagaatttcatacac

SEQ ID NO: 146667 - DNA, 22 bp, synthetic construct
  misc_feature 1..22: note = chemically synthesized
  source 1..22: mol_type = other DNA
acatcagaatttcatacactaa

SEQ ID NO: 146668 - DNA, 22 bp, synthetic construct
  misc_feature 1..22: note = chemically synthesized
  source 1..22: mol_type = other DNA
catacactaataagacatagta

SEQ ID NO: 146669 - DNA, 22 bp, synthetic construct
  misc_feature 1..22: note = chemically synthesized
  source 1..22: mol_type = other DNA
atacactaataagacatagtat

SEQ ID NO: 146670 - DNA, 22 bp, synthetic construct
  misc_feature 1..22: note = chemically synthesized
  source 1..22: mol_type = other DNA
ataagacatagtatcagaagtc

SEQ ID NO: 146671 - DNA, 22 bp, synthetic construct
  misc_feature 1..22: note = chemically synthesized
  source 1..22: mol_type = other DNA
attagttatatcagttagggtc

SEQ ID NO: 146672 - DNA, 22 bp, synthetic construct
  misc_feature 1..22: note = chemically synthesized
  source 1..22: mol_type = other DNA
ttagttatatcagttagggtcc

SEQ ID NO: 146673 - DNA, 22 bp, synthetic construct
  misc_feature 1..22: note = chemically synthesized
  source 1..22: mol_type = other DNA
gttatatcagttagggtccatc

SEQ ID NO: 146674 - DNA, 22 bp, synthetic construct
  misc_feature 1..22: note = chemically synthesized
  source 1..22: mol_type = other DNA
tatcagttagggtccatcaagg

SEQ ID NO: 146675 - DNA, 22 bp, synthetic construct
  misc_feature 1..22: note = chemically synthesized
  source 1..22: mol_type = other DNA
gggtccatcaaggaaaggacaa

SEQ ID NO: 146676 - DNA, 22 bp, synthetic construct
  misc_feature 1..22: note = chemically synthesized
  source 1..22: mol_type = other DNA
tcagttactcaacctagaatta

SEQ ID NO: 146677 - DNA, 22 bp, synthetic construct
  misc_feature 1..22: note = chemically synthesized
  source 1..22: mol_type = other DNA
ctcaacctagaattaaatacag

SEQ ID NO: 146678 - DNA, 22 bp, synthetic construct
  misc_feature 1..22: note = chemically synthesized
  source 1..22: mol_type = other DNA
aacctagaattaaatacagctc

SEQ ID NO: 146679 - DNA, 22 bp, synthetic construct
  misc_feature 1..22: note = chemically synthesized
  source 1..22: mol_type = other DNA
gaattaaatacagctcttaata

SEQ ID NO: 146680 - DNA, 22 bp, synthetic construct
  misc_feature 1..22: note = chemically synthesized
  source 1..22: mol_type = other DNA
aatacagctcttaatagttaat

SEQ ID NO: 146681 - DNA, 22 bp, synthetic construct
  misc_feature 1..22: note = chemically synthesized
  source 1..22: mol_type = other DNA
ttaatagttaattatccttgta

SEQ ID NO: 146682 - DNA, 22 bp, synthetic construct
  misc_feature 1..22: note = chemically synthesized
  source 1..22: mol_type = other DNA
aatagttaattatccttgtatt

SEQ ID NO: 146683 - DNA, 22 bp, synthetic construct
  misc_feature 1..22: note = chemically synthesized
  source 1..22: mol_type = other DNA
atagttaattatccttgtattg

SEQ ID NO: 146684 - DNA, 22 bp, synthetic construct
  misc_feature 1..22: note = chemically synthesized
  source 1..22: mol_type = other DNA
attatccttgtattggaagagc

SEQ ID NO: 146685 - DNA, 22 bp, synthetic construct
  misc_feature 1..22: note = chemically synthesized
  source 1..22: mol_type = other DNA
tccttgtattggaagagctaaa

SEQ ID NO: 146686 - DNA, 22 bp, synthetic construct
  misc_feature 1..22: note = chemically synthesized
  source 1..22: mol_type = other DNA
gtattggaagagctaaaatatc

SEQ ID NO: 146687 - DNA, 22 bp, synthetic construct
  misc_feature 1..22: note = chemically synthesized
  source 1..22: mol_type = other DNA
tattggaagagctaaaatatca

SEQ ID NO: 146688 - DNA, 22 bp, synthetic construct
  misc_feature 1..22: note = chemically synthesized
  source 1..22: mol_type = other DNA
gaagagctaaaatatcaaataa

SEQ ID NO: 146689 - DNA, 22 bp, synthetic construct
  misc_feature 1..22: note = chemically synthesized
  source 1..22: mol_type = other DNA
aaatatcaaataaaggacagtg

SEQ ID NO: 146690 - DNA, 22 bp, synthetic construct
  misc_feature 1..22: note = chemically synthesized
  source 1..22: mol_type = other DNA
gatgttagtaacatcagaaaac

SEQ ID NO: 146691 - DNA, 22 bp, synthetic construct
  misc_feature 1..22: note = chemically synthesized
  source 1..22: mol_type = other DNA
gtaacatcagaaaacctcttcc

SEQ ID NO: 146692 - DNA, 22 bp, synthetic construct
  misc_feature 1..22: note = chemically synthesized
  source 1..22: mol_type = other DNA
ttccgccattaggcctagaagg

SEQ ID NO: 146693 - DNA, 22 bp, synthetic construct
  misc_feature 1..22: note = chemically synthesized
  source 1..22: mol_type = other DNA
ccgccattaggcctagaagggc

SEQ ID NO: 146694 - DNA, 22 bp, synthetic construct
  misc_feature 1..22: note = chemically synthesized
  source 1..22: mol_type = other DNA
cgccattaggcctagaagggca

SEQ ID NO: 146695 - DNA, 22 bp, synthetic construct
  misc_feature 1..22: note = chemically synthesized
  source 1..22: mol_type = other DNA
ggcctagaagggcagaaggaga

SEQ ID NO: 146696 - DNA, 22 bp, synthetic construct
  misc_feature 1..22: note = chemically synthesized
  source 1..22: mol_type = other DNA
gaagggcagaaggagaaaatgt

SEQ ID NO: 146697 - DNA, 22 bp, synthetic construct
  misc_feature 1..22: note = chemically synthesized
  source 1..22: mol_type = other DNA
ataccaccagagtccagaacca

SEQ ID NO: 146698 - DNA, 22 bp, synthetic construct
  misc_feature 1..22: note = chemically synthesized
  source 1..22: mol_type = other DNA
taccaccagagtccagaaccag

SEQ ID NO: 146699 - DNA, 22 bp, synthetic construct
  misc_feature 1..22: note = chemically synthesized
  source 1..22: mol_type = other DNA
gattcagtgagctagtgggtgc

SEQ ID NO: 146700 - DNA, 22 bp, synthetic construct
  misc_feature 1..22: note = chemically synthesized
  source 1..22: mol_type = other DNA
agtgagctagtgggtgctcctt

SEQ ID NO: 146701 - DNA, 22 bp, synthetic construct
  misc_feature 1..22: note = chemically synthesized
  source 1..22: mol_type = other DNA
gtgggtgctccttggagagagc

SEQ ID NO: 146702 - DNA, 22 bp, synthetic construct
  misc_feature 1..22: note = chemically synthesized
  source 1..22: mol_type = other DNA
cttggagagagccagaactgtc

SEQ ID NO: 146703 - DNA, 22 bp, synthetic construct
  misc_feature 1..22: note = chemically synthesized
  source 1..22: mol_type = other DNA
ggagagagccagaactgtctaa

SEQ ID NO: 146704 - DNA, 22 bp, synthetic construct
  misc_feature 1..22: note = chemically synthesized
  source 1..22: mol_type = other DNA
gagagagccagaactgtctaat

SEQ ID NO: 146705 - DNA, 22 bp, synthetic construct
  misc_feature 1..22: note = chemically synthesized
  source 1..22: mol_type = other DNA
tctaatgggggcatcaaagtat

SEQ ID NO: 146706 - DNA, 22 bp, synthetic construct
  misc_feature 1..22: note = chemically synthesized
  source 1..22: mol_type = other DNA
atgggggcatcaaagtatcagc

SEQ ID NO: 146707 - DNA, 22 bp, synthetic construct
  misc_feature 1..22: note = chemically synthesized
  source 1..22: mol_type = other DNA
tctgctgtaggagatccgttca

SEQ ID NO: 146708 - DNA, 22 bp, synthetic construct
  misc_feature 1..22: note = chemically synthesized
  source 1..22: mol_type = other DNA
ctgtaggagatccgttcagaga

SEQ ID NO: 146709 - DNA, 22 bp, synthetic construct
  misc_feature 1..22: note = chemically synthesized
  source 1..22: mol_type = other DNA
taggagatccgttcagagagag

SEQ ID NO: 146710 - DNA, 22 bp, synthetic construct
  misc_feature 1..22: note = chemically synthesized
  source 1..22: mol_type = other DNA
agagagagagagagaccagaaa

SEQ ID NO: 146711 - DNA, 22 bp, synthetic construct
  misc_feature 1..22: note = chemically synthesized
  source 1..22: mol_type = other DNA
gcttatgctttccctcagccag

SEQ ID NO: 146712 - DNA, 22 bp, synthetic construct
  misc_feature 1..22: note = chemically synthesized
  source 1..22: mol_type = other DNA
cttatgctttccctcagccagt

SEQ ID NO: 146713 - DNA, 22 bp, synthetic construct
  misc_feature 1..22: note = chemically synthesized
  source 1..22: mol_type = other DNA
atgctttccctcagccagtgtt

SEQ ID NO: 146714 - DNA, 22 bp, synthetic construct
  misc_feature 1..22: note = chemically synthesized
  source 1..22: mol_type = other DNA
tgctttccctcagccagtgttt

SEQ ID NO: 146715 - DNA, 22 bp, synthetic construct
  misc_feature 1..22: note = chemically synthesized
  source 1..22: mol_type = other DNA
tccctcagccagtgtttaccat

SEQ ID NO: 146716 - DNA, 22 bp, synthetic construct
  misc_feature 1..22: note = chemically synthesized
  source 1..22: mol_type = other DNA
ccctcagccagtgtttaccatt

SEQ ID NO: 146717 - DNA, 22 bp, synthetic construct
  misc_feature 1..22: note = chemically synthesized
  source 1..22: mol_type = other DNA
cctcagccagtgtttaccattg

SEQ ID NO: 146718 - DNA, 22 bp, synthetic construct
  misc_feature 1..22: note = chemically synthesized
  source 1..22: mol_type = other DNA
agccagtgtttaccattgcaga

SEQ ID NO: 146719 - DNA, 22 bp, synthetic construct
  misc_feature 1..22: note = chemically synthesized
  source 1..22: mol_type = other DNA
accattgcagaatgtacatgcg

SEQ ID NO: 146720 - DNA, 22 bp, synthetic construct
  misc_feature 1..22: note = chemically synthesized
  source 1..22: mol_type = other DNA
ccattgcagaatgtacatgcga

SEQ ID NO: 146721 - DNA, 22 bp, synthetic construct
  misc_feature 1..22: note = chemically synthesized
  source 1..22: mol_type = other DNA
cagaatgtacatgcgactgaaa

SEQ ID NO: 146722 - DNA, 22 bp, synthetic construct
  misc_feature 1..22: note = chemically synthesized
  source 1..22: mol_type = other DNA
aaagggtgaggaaacctgggaa

SEQ ID NO: 146723 - DNA, 22 bp, synthetic construct
  misc_feature 1..22: note = chemically synthesized
  source 1..22: mol_type = other DNA
ggaaatgtcagttcctcaaata

SEQ ID NO: 146724 - DNA, 22 bp, synthetic construct
  misc_feature 1..22: note = chemically synthesized
  source 1..22: mol_type = other DNA
ctcaaatacagagaacactgag

SEQ ID NO: 146725 - DNA, 22 bp, synthetic construct
  misc_feature 1..22: note = chemically synthesized
  source 1..22: mol_type = other DNA
aaatacagagaacactgaggga

SEQ ID NO: 146726 - DNA, 22 bp, synthetic construct
  misc_feature 1..22: note = chemically synthesized
  source 1..22: mol_type = other DNA
agggaaggatgagaaataaatg

SEQ ID NO: 146727 - DNA, 22 bp, synthetic construct
  misc_feature 1..22: note = chemically synthesized
  source 1..22: mol_type = other DNA
acagaaggaaactaggatgtgt

SEQ ID NO: 146728 - DNA, 22 bp, synthetic construct
  misc_feature 1..22: note = chemically synthesized
  source 1..22: mol_type = other DNA
ggatgtgtccagtaaatgaata

SEQ ID NO: 146729 - DNA, 22 bp, synthetic construct
  misc_feature 1..22: note = chemically synthesized
  source 1..22: mol_type = other DNA
cagtgtgcagtgattattgcaa

SEQ ID NO: 146730 - DNA, 22 bp, synthetic construct
  misc_feature 1..22: note = chemically synthesized
  source 1..22: mol_type = other DNA
ttgcaatgattaatgtattgat

SEQ ID NO: 146731 - DNA, 22 bp, synthetic construct
  misc_feature 1..22: note = chemically synthesized
  source 1..22: mol_type = other DNA
caatgattaatgtattgataag

SEQ ID NO: 146732 - DNA, 22 bp, synthetic construct
  misc_feature 1..22: note = chemically synthesized
  source 1..22: mol_type = other DNA
atgtattgataagataatatga

SEQ ID NO: 146733 - DNA, 22 bp, synthetic construct
  misc_feature 1..22: note = chemically synthesized
  source 1..22: mol_type = other DNA
ataagataatatgaaaacacag

SEQ ID NO: 146734 - DNA, 22 bp, synthetic construct
  misc_feature 1..22: note = chemically synthesized
  source 1..22: mol_type = other DNA
aaacagcagtgaactgagatta

SEQ ID NO: 146735 - DNA, 22 bp, synthetic construct
  misc_feature 1..22: note = chemically synthesized
  source 1..22: mol_type = other DNA
agattagaattgtggagagcac

SEQ ID NO: 146736 - DNA, 22 bp, synthetic construct
  misc_feature 1..22: note = chemically synthesized
  source 1..22: mol_type = other DNA
gaattgtggagagcactggcat

SEQ ID NO: 146737 - DNA, 22 bp, synthetic construct
  misc_feature 1..22: note = chemically synthesized
  source 1..22: mol_type = other DNA
tggagagcactggcatttaaga

SEQ ID NO: 146738 - DNA, 22 bp, synthetic construct
  misc_feature 1..22: note = chemically synthesized
  source 1..22: mol_type = other DNA
gcatttaagaatgtcacactta

SEQ ID NO: 146739 - DNA, 22 bp, synthetic construct
  misc_feature 1..22: note = chemically synthesized
  source 1..22: mol_type = other DNA
aagaatgtcacacttagaatgt

SEQ ID NO: 146740 - DNA, 22 bp, synthetic construct
  misc_feature 1..22: note = chemically synthesized
  source 1..22: mol_type = other DNA
agaatgtcacacttagaatgtg

SEQ ID NO: 146741 - DNA, 22 bp, synthetic construct
  misc_feature 1..22: note = chemically synthesized
  source 1..22: mol_type = other DNA
agaatgtgtctctaggcattgt

SEQ ID NO: 146742 - DNA, 22 bp, synthetic construct
  misc_feature 1..22: note = chemically synthesized
  source 1..22: mol_type = other DNA
gaatgtgtctctaggcattgtt

SEQ ID NO: 146743 - DNA, 22 bp, synthetic construct
  misc_feature 1..22: note = chemically synthesized
  source 1..22: mol_type = other DNA
taggcattgttctgtgcatata

SEQ ID NO: 146744 - DNA, 22 bp, synthetic construct
  misc_feature 1..22: note = chemically synthesized
  source 1..22: mol_type = other DNA
ggcattgttctgtgcatatatc

SEQ ID NO: 146745 - DNA, 22 bp, synthetic construct
  misc_feature 1..22: note = chemically synthesized
  source 1..22: mol_type = other DNA
ttctgtgcatatatcatctcaa

SEQ ID NO: 146746 - DNA, 22 bp, synthetic construct
  misc_feature 1..22: note = chemically synthesized
  source 1..22: mol_type = other DNA
tgtgcatatatcatctcaatat

SEQ ID NO: 146747 - DNA, 22 bp, synthetic construct
  misc_feature 1..22: note = chemically synthesized
  source 1..22: mol_type = other DNA
tgcatatatcatctcaatattc

SEQ ID NO: 146748 - DNA, 22 bp, synthetic construct
  misc_feature 1..22: note = chemically synthesized
  source 1..22: mol_type = other DNA
aatattcattatctgaaaatta

SEQ ID NO: 146749 - DNA, 22 bp, synthetic construct
  misc_feature 1..22: note = chemically synthesized
  source 1..22: mol_type = other DNA
attatctgaaaattatgaatta

SEQ ID NO: 146750 - DNA, 22 bp, synthetic construct
  misc_feature 1..22: note = chemically synthesized
  source 1..22: mol_type = other DNA
tctgaaaattatgaattaggta

SEQ ID NO: 146751 - DNA, 22 bp, synthetic construct
  misc_feature 1..22: note = chemically synthesized
  source 1..22: mol_type = other DNA
aaaattatgaattaggtacaaa

SEQ ID NO: 146752 - DNA, 22 bp, synthetic construct
  misc_feature 1..22: note = chemically synthesized
  source 1..22: mol_type = other DNA
tgaattaggtacaaagctcaaa

SEQ ID NO: 146753 - DNA, 22 bp, synthetic construct
  misc_feature 1..22: note = chemically synthesized
  source 1..22: mol_type = other DNA
ggtacaaagctcaaataattta

SEQ ID NO: 146754 - DNA, 22 bp, synthetic construct
  misc_feature 1..22: note = chemically synthesized
  source 1..22: mol_type = other DNA
aaataatttattttttcaggtt

SEQ ID NO: 146755 - DNA, 22 bp, synthetic construct
  misc_feature 1..22: note = chemically synthesized
  source 1..22: mol_type = other DNA
attttttcaggttagcaagaac

SEQ ID NO: 146756 - DNA, 22 bp, synthetic construct
  misc_feature 1..22: note = chemically synthesized
  source 1..22: mol_type = other DNA
ttttttcaggttagcaagaact

SEQ ID NO: 146757 - DNA, 22 bp, synthetic construct
  misc_feature 1..22: note = chemically synthesized
  source 1..22: mol_type = other DNA
tttcaggttagcaagaactttt

SEQ ID NO: 146758 - DNA, 22 bp, synthetic construct
  misc_feature 1..22: note = chemically synthesized
  source 1..22: mol_type = other DNA
ttcaggttagcaagaacttttt

SEQ ID NO: 146759 - DNA, 22 bp, synthetic construct
  misc_feature 1..22: note = chemically synthesized
  source 1..22: mol_type = other DNA
tcaggttagcaagaactttttt

SEQ ID NO: 146760 - DNA, 22 bp, synthetic construct
  misc_feature 1..22: note = chemically synthesized
  source 1..22: mol_type = other DNA
caggttagcaagaacttttttt

SEQ ID NO: 146761 - DNA, 22 bp, synthetic construct
  misc_feature 1..22: note = chemically synthesized
  source 1..22: mol_type = other DNA
aggttagcaagaactttttttt

SEQ ID NO: 146762 - DNA, 22 bp, synthetic construct
  misc_feature 1..22: note = chemically synthesized
  source 1..22: mol_type = other DNA
gcaagaactttttttttttttt

SEQ ID NO: 146763 - DNA, 22 bp, synthetic construct
  misc_feature 1..22: note = chemically synthesized
  source 1..22: mol_type = other DNA
tttttttttttttctgagatag

SEQ ID NO: 146764 - DNA, 22 bp, synthetic construct
  misc_feature 1..22: note = chemically synthesized
  source 1..22: mol_type = other DNA
ttttttttttttctgagataga

SEQ ID NO: 146765 - DNA, 22 bp, synthetic construct
  misc_feature 1..22: note = chemically synthesized
  source 1..22: mol_type = other DNA
tttttttttttctgagatagag

SEQ ID NO: 146766 - DNA, 22 bp, synthetic construct
  misc_feature 1..22: note = chemically synthesized
  source 1..22: mol_type = other DNA
ttttttttttctgagatagagc

SEQ ID NO: 146767 - DNA, 22 bp, synthetic construct
  misc_feature 1..22: note = chemically synthesized
  source 1..22: mol_type = other DNA
tttttttttctgagatagagca

SEQ ID NO: 146768 - DNA, 22 bp, synthetic construct
  misc_feature 1..22: note = chemically synthesized
  source 1..22: mol_type = other DNA
ttttttttctgagatagagcat

SEQ ID NO: 146769 - DNA, 22 bp, synthetic construct
  misc_feature 1..22: note = chemically synthesized
  source 1..22: mol_type = other DNA
tttttttctgagatagagcatt

SEQ ID NO: 146770 - DNA, 22 bp, synthetic construct
  misc_feature 1..22: note = chemically synthesized
  source 1..22: mol_type = other DNA
ttttttctgagatagagcattg

SEQ ID NO: 146771 - DNA, 22 bp, synthetic construct
  misc_feature 1..22: note = chemically synthesized
  source 1..22: mol_type = other DNA
tttttctgagatagagcattgc

SEQ ID NO: 146772 - DNA, 22 bp, synthetic construct
  misc_feature 1..22: note = chemically synthesized
  source 1..22: mol_type = other DNA
ttttctgagatagagcattgct

SEQ ID NO: 146773 - DNA, 22 bp, synthetic construct
  misc_feature 1..22: note = chemically synthesized
  source 1..22: mol_type = other DNA
tttctgagatagagcattgcta

SEQ ID NO: 146774 - DNA, 22 bp, synthetic construct
  misc_feature 1..22: note = chemically synthesized
  source 1..22: mol_type = other DNA
ttctgagatagagcattgctat

SEQ ID NO: 146775 - DNA, 22 bp, synthetic construct
  misc_feature 1..22: note = chemically synthesized
  source 1..22: mol_type = other DNA
tctgagatagagcattgctatg

SEQ ID NO: 146776 - DNA, 22 bp, synthetic construct
  misc_feature 1..22: note = chemically synthesized
  source 1..22: mol_type = other DNA
ctgagatagagcattgctatgg

SEQ ID NO: 146777 - DNA, 22 bp, synthetic construct
  misc_feature 1..22: note = chemically synthesized
  source 1..22: mol_type = other DNA
tgagatagagcattgctatggt

SEQ ID NO: 146778 - DNA, 22 bp, synthetic construct
  misc_feature 1..22: note = chemically synthesized
  source 1..22: mol_type = other DNA
agatagagcattgctatggttg

SEQ ID NO: 146779 - DNA, 22 bp, synthetic construct
  misc_feature 1..22: note = chemically synthesized
  source 1..22: mol_type = other DNA
ctatggttgcccaggctggagt

SEQ ID NO: 146780 - DNA, 22 bp, synthetic construct
  misc_feature 1..22: note = chemically synthesized
  source 1..22: mol_type = other DNA
tggttgcccaggctggagtgca

SEQ ID NO: 146781 - DNA, 22 bp, synthetic construct
  misc_feature 1..22: note = chemically synthesized
  source 1..22: mol_type = other DNA
cccaggctggagtgcaatggca

SEQ ID NO: 146782 - DNA, 22 bp, synthetic construct
  misc_feature 1..22: note = chemically synthesized
  source 1..22: mol_type = other DNA
gagtgcaatggcatgatccagg

SEQ ID NO: 146783 - DNA, 22 bp, synthetic construct
  misc_feature 1..22: note = chemically synthesized
  source 1..22: mol_type = other DNA
actgcaacatctgcctcccagg

SEQ ID NO: 146784 - DNA, 22 bp, synthetic construct
  misc_feature 1..22: note = chemically synthesized
  source 1..22: mol_type = other DNA
caacatctgcctcccaggttca

SEQ ID NO: 146785 - DNA, 22 bp, synthetic construct
  misc_feature 1..22: note = chemically synthesized
  source 1..22: mol_type = other DNA
cctcccaggttcaagcgattct

SEQ ID NO: 146786 - DNA, 22 bp, synthetic construct
  misc_feature 1..22: note = chemically synthesized
  source 1..22: mol_type = other DNA
ccaggttcaagcgattctcctg

SEQ ID NO: 146787 - DNA, 22 bp, synthetic construct
  misc_feature 1..22: note = chemically synthesized
  source 1..22: mol_type = other DNA
aagcgattctcctgcctcagcc

SEQ ID NO: 146788 - DNA, 22 bp, synthetic construct
  misc_feature 1..22: note = chemically synthesized
  source 1..22: mol_type = other DNA
tcctgcctcagcctcccaagta

SEQ ID NO: 146789 - DNA, 22 bp, synthetic construct
  misc_feature 1..22: note = chemically synthesized
  source 1..22: mol_type = other DNA
ctgcctcagcctcccaagtagc

SEQ ID NO: 146790 - DNA, 22 bp, synthetic construct
  misc_feature 1..22: note = chemically synthesized
  source 1..22: mol_type = other DNA
cctcagcctcccaagtagctgg

SEQ ID NO: 146791 - DNA, 22 bp, synthetic construct
  misc_feature 1..22: note = chemically synthesized
  source 1..22: mol_type = other DNA
agcctcccaagtagctggcact

SEQ ID NO: 146792 - DNA, 22 bp, synthetic construct
  misc_feature 1..22: note = chemically synthesized
  source 1..22: mol_type = other DNA
ccaagtagctggcactacaggc

SEQ ID NO: 146793 - DNA, 22 bp, synthetic construct
  misc_feature 1..22: note = chemically synthesized
  source 1..22: mol_type = other DNA
gcactacaggcatgtgccacca

SEQ ID NO: 146794 - DNA, 22 bp, synthetic construct
  misc_feature 1..22: note = chemically synthesized
  source 1..22: mol_type = other DNA
caggcatgtgccaccaccatgc

SEQ ID NO: 146795 - DNA, 22 bp, synthetic construct
  misc_feature 1..22: note = chemically synthesized
  source 1..22: mol_type = other DNA
gctaattttctatttttagtag

SEQ ID NO: 146796 - DNA, 22 bp, synthetic construct
  misc_feature 1..22: note = chemically synthesized
  source 1..22: mol_type = other DNA
attttctatttttagtagatag

SEQ ID NO: 146797 - DNA, 22 bp, synthetic construct
  misc_feature 1..22: note = chemically synthesized
  source 1..22: mol_type = other DNA
tctatttttagtagataggggg

SEQ ID NO: 146798 - DNA, 22 bp, synthetic construct
  misc_feature 1..22: note = chemically synthesized
  source 1..22: mol_type = other DNA
ctatttttagtagatagggggt

SEQ ID NO: 146799 - DNA, 22 bp, synthetic construct
  misc_feature 1..22: note = chemically synthesized
  source 1..22: mol_type = other DNA
tatttttagtagatagggggtt

SEQ ID NO: 146800 - DNA, 22 bp, synthetic construct
  misc_feature 1..22: note = chemically synthesized
  source 1..22: mol_type = other DNA
tttttagtagatagggggtttc

SEQ ID NO: 146801 - DNA, 22 bp, synthetic construct
  misc_feature 1..22: note = chemically synthesized
  source 1..22: mol_type = other DNA
ttagtagatagggggtttcacc

SEQ ID NO: 146802 - DNA, 22 bp, synthetic construct
  misc_feature 1..22: note = chemically synthesized
  source 1..22: mol_type = other DNA
tagtagatagggggtttcacca

SEQ ID NO: 146803 - DNA, 22 bp, synthetic construct
  misc_feature 1..22: note = chemically synthesized
  source 1..22: mol_type = other DNA
agtagatagggggtttcaccat

SEQ ID NO: 146804 - DNA, 22 bp, synthetic construct
  misc_feature 1..22: note = chemically synthesized
  source 1..22: mol_type = other DNA
gtagatagggggtttcaccatg

SEQ ID NO: 146805 - DNA, 22 bp, synthetic construct
  misc_feature 1..22: note = chemically synthesized
  source 1..22: mol_type = other DNA
caccatgttggtcaggctgatc

SEQ ID NO: 146806 - DNA, 22 bp, synthetic construct
  misc_feature 1..22: note = chemically synthesized
  source 1..22: mol_type = other DNA
accatgttggtcaggctgatct

SEQ ID NO: 146807 - DNA, 22 bp, synthetic construct
  misc_feature 1..22: note = chemically synthesized
  source 1..22: mol_type = other DNA
gtcaggctgatctcgaactcct

SEQ ID NO: 146808 - DNA, 22 bp, synthetic construct
  misc_feature 1..22: note = chemically synthesized
  source 1..22: mol_type = other DNA
atctcgaactcctaacatcagg

SEQ ID NO: 146809 - DNA, 22 bp, synthetic construct
  misc_feature 1..22: note = chemically synthesized
  source 1..22: mol_type = other DNA
gaactcctaacatcaggtgatc

SEQ ID NO: 146810 - DNA, 22 bp, synthetic construct
  misc_feature 1..22: note = chemically synthesized
  source 1..22: mol_type = other DNA
ctaacatcaggtgatccaccct

SEQ ID NO: 146811 - DNA, 22 bp, synthetic construct
  misc_feature 1..22: note = chemically synthesized
  source 1..22: mol_type = other DNA
acatcaggtgatccaccctcct

SEQ ID NO: 146812 - DNA, 22 bp, synthetic construct
  misc_feature 1..22: note = chemically synthesized
  source 1..22: mol_type = other DNA
ctcggcctctgaaagtgctggg

SEQ ID NO: 146813 - DNA, 22 bp, synthetic construct
  misc_feature 1..22: note = chemically synthesized
  source 1..22: mol_type = other DNA
ggcctctgaaagtgctgggatc

SEQ ID NO: 146814 - DNA, 22 bp, synthetic construct
  misc_feature 1..22: note = chemically synthesized
  source 1..22: mol_type = other DNA
tgaaagtgctgggatcacaggc

SEQ ID NO: 146815 - DNA, 22 bp, synthetic construct
  misc_feature 1..22: note = chemically synthesized
  source 1..22: mol_type = other DNA
aaagtgctgggatcacaggcgt

SEQ ID NO: 146816 - DNA, 22 bp, synthetic construct
  misc_feature 1..22: note = chemically synthesized
  source 1..22: mol_type = other DNA
ggatcacaggcgtgagccacca

SEQ ID NO: 146817 - DNA, 22 bp, synthetic construct
  misc_feature 1..22: note = chemically synthesized
  source 1..22: mol_type = other DNA
tgtagaaggatataacccatat

SEQ ID NO: 146818 - DNA, 22 bp, synthetic construct
  misc_feature 1..22: note = chemically synthesized
  source 1..22: mol_type = other DNA
gtagaaggatataacccatatt

SEQ ID NO: 146819 - DNA, 22 bp, synthetic construct
  misc_feature 1..22: note = chemically synthesized
  source 1..22: mol_type = other DNA
tagaaggatataacccatattt

SEQ ID NO: 146820 - DNA, 22 bp, synthetic construct
  misc_feature 1..22: note = chemically synthesized
  source 1..22: mol_type = other DNA
ctctgaccctagagtccttagt

SEQ ID NO: 146821 - DNA, 22 bp, synthetic construct
  misc_feature 1..22: note = chemically synthesized
  source 1..22: mol_type = other DNA
tctgaccctagagtccttagta

SEQ ID NO: 146822 - DNA, 22 bp, synthetic construct
  misc_feature 1..22: note = chemically synthesized
  source 1..22: mol_type = other DNA
tgaccctagagtccttagtata

SEQ ID NO: 146823 - DNA, 22 bp, synthetic construct
  misc_feature 1..22: note = chemically synthesized
  source 1..22: mol_type = other DNA
accctagagtccttagtatacc

SEQ ID NO: 146824 - DNA, 22 bp, synthetic construct
  misc_feature 1..22: note = chemically synthesized
  source 1..22: mol_type = other DNA
gagtccttagtatacctcccat

SEQ ID NO: 146825 - DNA, 22 bp, synthetic construct
  misc_feature 1..22: note = chemically synthesized
  source 1..22: mol_type = other DNA
agtatacctcccataccatgtg

SEQ ID NO: 146826 - DNA, 22 bp, synthetic construct
  misc_feature 1..22: note = chemically synthesized
  source 1..22: mol_type = other DNA
gtatacctcccataccatgtgg

SEQ ID NO: 146827 - DNA, 22 bp, synthetic construct
  misc_feature 1..22: note = chemically synthesized
  source 1..22: mol_type = other DNA
ccataccatgtggctcatcctc

SEQ ID NO: 146828 - DNA, 22 bp, synthetic construct
  misc_feature 1..22: note = chemically synthesized
  source 1..22: mol_type = other DNA
atcctccttacatacatttccc

SEQ ID NO: 146829 - DNA, 22 bp, synthetic construct
  misc_feature 1..22: note = chemically synthesized
  source 1..22: mol_type = other DNA
cttacatacatttcccatcttt

SEQ ID NO: 146830 - DNA, 22 bp, synthetic construct
  misc_feature 1..22: note = chemically synthesized
  source 1..22: mol_type = other DNA
acatacatttcccatctttcac

SEQ ID NO: 146831 - DNA, 22 bp, synthetic construct
  misc_feature 1..22: note = chemically synthesized
  source 1..22: mol_type = other DNA
catacatttcccatctttcacc

SEQ ID NO: 146832 - DNA, 22 bp, synthetic construct
  misc_feature 1..22: note = chemically synthesized
  source 1..22: mol_type = other DNA
cccatctttcaccctacctttt

SEQ ID NO: 146833 - DNA, 22 bp, synthetic construct
  misc_feature 1..22: note = chemically synthesized
  source 1..22: mol_type = other DNA
ccatctttcaccctaccttttc

SEQ ID NO: 146834 - DNA, 22 bp, synthetic construct
  misc_feature 1..22: note = chemically synthesized
  source 1..22: mol_type = other DNA
tcaccctaccttttcctttttg

SEQ ID NO: 146835 - DNA, 22 bp, synthetic construct
  misc_feature 1..22: note = chemically synthesized
  source 1..22: mol_type = other DNA
caccctaccttttcctttttgt

SEQ ID NO: 146836 - DNA, 22 bp, synthetic construct
  misc_feature 1..22: note = chemically synthesized
  source 1..22: mol_type = other DNA
accctaccttttcctttttgtt

SEQ ID NO: 146837 - DNA, 22 bp, synthetic construct
  misc_feature 1..22: note = chemically synthesized
  source 1..22: mol_type = other DNA
ccttttcctttttgtttcagct

SEQ ID NO: 146838 - DNA, 22 bp, synthetic construct
  misc_feature 1..22: note = chemically synthesized
  source 1..22: mol_type = other DNA
ttcctttttgtttcagcttttc

SEQ ID NO: 146839 - DNA, 22 bp, synthetic construct
  misc_feature 1..22: note = chemically synthesized
  source 1..22: mol_type = other DNA
tcctttttgtttcagcttttca

SEQ ID NO: 146840 - DNA, 22 bp, synthetic construct
  misc_feature 1..22: note = chemically synthesized
  source 1..22: mol_type = other DNA
cctttttgtttcagcttttcac

SEQ ID NO: 146841 - DNA, 22 bp, synthetic construct
  misc_feature 1..22: note = chemically synthesized
  source 1..22: mol_type = other DNA
ctttttgtttcagcttttcact

SEQ ID NO: 146842 - DNA, 22 bp, synthetic construct
  misc_feature 1..22: note = chemically synthesized
  source 1..22: mol_type = other DNA
tttgtttcagcttttcactgtg

SEQ ID NO: 146843 - DNA, 22 bp, synthetic construct
  misc_feature 1..22: note = chemically synthesized
  source 1..22: mol_type = other DNA
ttgtttcagcttttcactgtgt

SEQ ID NO: 146844 - DNA, 22 bp, synthetic construct
  misc_feature 1..22: note = chemically synthesized
  source 1..22: mol_type = other DNA
tgtttcagcttttcactgtgtc

SEQ ID NO: 146845 - DNA, 22 bp, synthetic construct
  misc_feature 1..22: note = chemically synthesized
  source 1..22: mol_type = other DNA
gtttcagcttttcactgtgtca

SEQ ID NO: 146846 - DNA, 22 bp, synthetic construct
  misc_feature 1..22: note = chemically synthesized
  source 1..22: mol_type = other DNA
tttcagcttttcactgtgtcaa

SEQ ID NO: 146847 - DNA, 22 bp, synthetic construct
  misc_feature 1..22: note = chemically synthesized
  source 1..22: mol_type = other DNA
cagcttttcactgtgtcaaaat

SEQ ID NO: 146848 - DNA, 22 bp, synthetic construct
  misc_feature 1..22: note = chemically synthesized
  source 1..22: mol_type = other DNA
agcttttcactgtgtcaaaatc

SEQ ID NO: 146849 - DNA, 22 bp, synthetic construct
  misc_feature 1..22: note = chemically synthesized
  source 1..22: mol_type = other DNA
ttcactgtgtcaaaatctagaa

SEQ ID NO: 146850 - DNA, 22 bp, synthetic construct
  misc_feature 1..22: note = chemically synthesized
  source 1..22: mol_type = other DNA
tcactgtgtcaaaatctagaac

SEQ ID NO: 146851 - DNA, 22 bp, synthetic construct
  misc_feature 1..22: note = chemically synthesized
  source 1..22: mol_type = other DNA
cactgtgtcaaaatctagaacc

SEQ ID NO: 146852 - DNA, 22 bp, synthetic construct
  misc_feature 1..22: note = chemically synthesized
  source 1..22: mol_type = other DNA
actgtgtcaaaatctagaacct

SEQ ID NO: 146853 - DNA, 22 bp, synthetic construct
  misc_feature 1..22: note = chemically synthesized
  source 1..22: mol_type = other DNA
tgtcaaaatctagaaccttatc

SEQ ID NO: 146854 - DNA, 22 bp, synthetic construct
  misc_feature 1..22: note = chemically synthesized
  source 1..22: mol_type = other DNA
gaaccttatctcctacctgctc

SEQ ID NO: 146855 - DNA, 22 bp, synthetic construct
  misc_feature 1..22: note = chemically synthesized
  source 1..22: mol_type = other DNA
atctcctacctgctctgaaacc

SEQ ID NO: 146856 - DNA, 22 bp, synthetic construct
  misc_feature 1..22: note = chemically synthesized
  source 1..22: mol_type = other DNA
tctcctacctgctctgaaacca

SEQ ID NO: 146857 - DNA, 22 bp, synthetic construct
  misc_feature 1..22: note = chemically synthesized
  source 1..22: mol_type = other DNA
ctacctgctctgaaaccaacag

SEQ ID NO: 146858 - DNA, 22 bp, synthetic construct
  misc_feature 1..22: note = chemically synthesized
  source 1..22: mol_type = other DNA
cctgctctgaaaccaacagcaa

SEQ ID NO: 146859 - DNA, 22 bp, synthetic construct
  misc_feature 1..22: note = chemically synthesized
  source 1..22: mol_type = other DNA
ctctgaaaccaacagcaagttg

SEQ ID NO: 146860 - DNA, 22 bp, synthetic construct
  misc_feature 1..22: note = chemically synthesized
  source 1..22: mol_type = other DNA
tgaaaccaacagcaagttgact

SEQ ID NO: 146861 - DNA, 22 bp, synthetic construct
  misc_feature 1..22: note = chemically synthesized
  source 1..22: mol_type = other DNA
aaaccaacagcaagttgacttc

SEQ ID NO: 146862 - DNA, 22 bp, synthetic construct
  misc_feature 1..22: note = chemically synthesized
  source 1..22: mol_type = other DNA
acttccattctaacccacattg

SEQ ID NO: 146863 - DNA, 22 bp, synthetic construct
  misc_feature 1..22: note = chemically synthesized
  source 1..22: mol_type = other DNA
ccattctaacccacattggcat

SEQ ID NO: 146864 - DNA, 22 bp, synthetic construct
  misc_feature 1..22: note = chemically synthesized
  source 1..22: mol_type = other DNA
cattctaacccacattggcatt

SEQ ID NO: 146865 - DNA, 22 bp, synthetic construct
  misc_feature 1..22: note = chemically synthesized
  source 1..22: mol_type = other DNA
taacccacattggcattacact

SEQ ID NO: 146866 - DNA, 22 bp, synthetic construct
  misc_feature 1..22: note = chemically synthesized
  source 1..22: mol_type = other DNA
acccacattggcattacactaa

SEQ ID NO: 146867 - DNA, 22 bp, synthetic construct
  misc_feature 1..22: note = chemically synthesized
  source 1..22: mol_type = other DNA
gcattacactaattaaaatcga

SEQ ID NO: 146868 - DNA, 22 bp, synthetic construct
  misc_feature 1..22: note = chemically synthesized
  source 1..22: mol_type = other DNA
cactaattaaaatcgatactga

SEQ ID NO: 146869 - DNA, 22 bp, synthetic construct
  misc_feature 1..22: note = chemically synthesized
  source 1..22: mol_type = other DNA
attaaaatcgatactgagttct

SEQ ID NO: 146870 - DNA, 22 bp, synthetic construct
  misc_feature 1..22: note = chemically synthesized
  source 1..22: mol_type = other DNA
aaatcgatactgagttctaaaa

SEQ ID NO: 146871 - DNA, 22 bp, synthetic construct
  misc_feature 1..22: note = chemically synthesized
  source 1..22: mol_type = other DNA
agttctaaaatcatcggggatt

SEQ ID NO: 146872 - DNA, 22 bp, synthetic construct
  misc_feature 1..22: note = chemically synthesized
  source 1..22: mol_type = other DNA
taaaatcatcggggattttggg

SEQ ID NO: 146873 - DNA, 22 bp, synthetic construct
  misc_feature 1..22: note = chemically synthesized
  source 1..22: mol_type = other DNA
aaatcatcggggattttgggga

SEQ ID NO: 146874 - DNA, 22 bp, synthetic construct
  misc_feature 1..22: note = chemically synthesized
  source 1..22: mol_type = other DNA
tggggactatgtcttacttcat

SEQ ID NO: 146875 - DNA, 22 bp, synthetic construct
  misc_feature 1..22: note = chemically synthesized
  source 1..22: mol_type = other DNA
ggggactatgtcttacttcata

SEQ ID NO: 146876 - DNA, 22 bp, synthetic construct
  misc_feature 1..22: note = chemically synthesized
  source 1..22: mol_type = other DNA
gggactatgtcttacttcatac

SEQ ID NO: 146877 - DNA, 22 bp, synthetic construct
  misc_feature 1..22: note = chemically synthesized
  source 1..22: mol_type = other DNA
tgtcttacttcatacttccttg

SEQ ID NO: 146878 - DNA, 22 bp, synthetic construct
  misc_feature 1..22: note = chemically synthesized
  source 1..22: mol_type = other DNA
acttcatacttccttgagattt

SEQ ID NO: 146879 - DNA, 22 bp, synthetic construct
  misc_feature 1..22: note = chemically synthesized
  source 1..22: mol_type = other DNA
cttcatacttccttgagatttc

SEQ ID NO: 146880 - DNA, 22 bp, synthetic construct
  misc_feature 1..22: note = chemically synthesized
  source 1..22: mol_type = other DNA
catacttccttgagatttcaca

SEQ ID NO: 146881 - DNA, 22 bp, synthetic construct
  misc_feature 1..22: note = chemically synthesized
  source 1..22: mol_type = other DNA
atacttccttgagatttcacat

SEQ ID NO: 146882 - DNA, 22 bp, synthetic construct
  misc_feature 1..22: note = chemically synthesized
  source 1..22: mol_type = other DNA
ccttgagatttcacattaaatg

SEQ ID NO: 146883 - DNA, 22 bp, synthetic construct
  misc_feature 1..22: note = chemically synthesized
  source 1..22: mol_type = other DNA
cttgagatttcacattaaatgt

SEQ ID NO: 146884 - DNA, 22 bp, synthetic construct
  misc_feature 1..22: note = chemically synthesized
  source 1..22: mol_type = other DNA
gagatttcacattaaatgttgg

SEQ ID NO: 146885 - DNA, 22 bp, synthetic construct
  misc_feature 1..22: note = chemically synthesized
  source 1..22: mol_type = other DNA
agatttcacattaaatgttggt

SEQ ID NO: 146886 - DNA, 22 bp, synthetic construct
  misc_feature 1..22: note = chemically synthesized
  source 1..22: mol_type = other DNA
cacattaaatgttggtgttcat

SEQ ID NO: 146887 - DNA, 22 bp, synthetic construct
  misc_feature 1..22: note = chemically synthesized
  source 1..22: mol_type = other DNA
acattaaatgttggtgttcatt

SEQ ID NO: 146888 - DNA, 22 bp, synthetic construct
  misc_feature 1..22: note = chemically synthesized
  source 1..22: mol_type = other DNA
aatgttggtgttcattaaaggt

SEQ ID NO: 146889 - DNA, 22 bp, synthetic construct
  misc_feature 1..22: note = chemically synthesized
  source 1..22: mol_type = other DNA
gtgttcattaaaggtccttcat

SEQ ID NO: 146890 - DNA, 22 bp, synthetic construct
  misc_feature 1..22: note = chemically synthesized
  source 1..22: mol_type = other DNA
attaaaggtccttcatttaact

SEQ ID NO: 146891 - DNA, 22 bp, synthetic construct
  misc_feature 1..22: note = chemically synthesized
  source 1..22: mol_type = other DNA
aaggtccttcatttaactttgt

SEQ ID NO: 146892 - DNA, 22 bp, synthetic construct
  misc_feature 1..22: note = chemically synthesized
  source 1..22: mol_type = other DNA
catttaactttgtattcatcac

SEQ ID NO: 146893 - DNA, 22 bp, synthetic construct
  misc_feature 1..22: note = chemically synthesized
  source 1..22: mol_type = other DNA
atttaactttgtattcatcaca

SEQ ID NO: 146894 - DNA, 22 bp, synthetic construct
  misc_feature 1..22: note = chemically synthesized
  source 1..22: mol_type = other DNA
aactttgtattcatcacactct

SEQ ID NO: 146895 - DNA, 22 bp, synthetic construct
  misc_feature 1..22: note = chemically synthesized
  source 1..22: mol_type = other DNA
actttgtattcatcacactctt

SEQ ID NO: 146896 - DNA, 22 bp, synthetic construct
  misc_feature 1..22: note = chemically synthesized
  source 1..22: mol_type = other DNA
tgtattcatcacactcttggat

SEQ ID NO: 146897 - DNA, 22 bp, synthetic construct
  misc_feature 1..22: note = chemically synthesized
  source 1..22: mol_type = other DNA
gtattcatcacactcttggatt

SEQ ID NO: 146898 - DNA, 22 bp, synthetic construct
  misc_feature 1..22: note = chemically synthesized
  source 1..22: mol_type = other DNA
tattcatcacactcttggattc

SEQ ID NO: 146899 - DNA, 22 bp, synthetic construct
  misc_feature 1..22: note = chemically synthesized
  source 1..22: mol_type = other DNA
atcacactcttggattcacagt

SEQ ID NO: 146900 - DNA, 22 bp, synthetic construct
  misc_feature 1..22: note = chemically synthesized
  source 1..22: mol_type = other DNA
ttggattcacagttatatctaa

SEQ ID NO: 146901 - DNA, 22 bp, synthetic construct
  misc_feature 1..22: note = chemically synthesized
  source 1..22: mol_type = other DNA
ggattcacagttatatctaaac

SEQ ID NO: 146902 - DNA, 22 bp, synthetic construct
  misc_feature 1..22: note = chemically synthesized
  source 1..22: mol_type = other DNA
gattcacagttatatctaaact

SEQ ID NO: 146903 - DNA, 22 bp, synthetic construct
  misc_feature 1..22: note = chemically synthesized
  source 1..22: mol_type = other DNA
acagttatatctaaactcttaa

SEQ ID NO: 146904 - DNA, 22 bp, synthetic construct
  misc_feature 1..22: note = chemically synthesized
  source 1..22: mol_type = other DNA
tatctaaactcttaaatacagc

SEQ ID NO: 146905 - DNA, 22 bp, synthetic construct
  misc_feature 1..22: note = chemically synthesized
  source 1..22: mol_type = other DNA
aactcttaaatacagcctgtat

SEQ ID NO: 146906 - DNA, 22 bp, synthetic construct
  misc_feature 1..22: note = chemically synthesized
  source 1..22: mol_type = other DNA
ttaaatacagcctgtataatcc

SEQ ID NO: 146907 - DNA, 22 bp, synthetic construct
  misc_feature 1..22: note = chemically synthesized
  source 1..22: mol_type = other DNA
aaatacagcctgtataatccca

SEQ ID NO: 146908 - DNA, 22 bp, synthetic construct
  misc_feature 1..22: note = chemically synthesized
  source 1..22: mol_type = other DNA
aatacagcctgtataatcccaa

SEQ ID NO: 146909 - DNA, 22 bp, synthetic construct
  misc_feature 1..22: note = chemically synthesized
  source 1..22: mol_type = other DNA
tataatcccaattcccaactct

SEQ ID NO: 146910 - DNA, 22 bp, synthetic construct
  misc_feature 1..22: note = chemically synthesized
  source 1..22: mol_type = other DNA
ccaactctgatttctaacctct

SEQ ID NO: 146911 - DNA, 22 bp, synthetic construct
  misc_feature 1..22: note = chemically synthesized
  source 1..22: mol_type = other DNA
tgatttctaacctctgacctcc

SEQ ID NO: 146912 - DNA, 22 bp, synthetic construct
  misc_feature 1..22: note = chemically synthesized
  source 1..22: mol_type = other DNA
atttctaacctctgacctccaa

SEQ ID NO: 146913 - DNA, 22 bp, synthetic construct
  misc_feature 1..22: note = chemically synthesized
  source 1..22: mol_type = other DNA
ctaacctctgacctccaacctc

SEQ ID NO: 146914 - DNA, 22 bp, synthetic construct
  misc_feature 1..22: note = chemically synthesized
  source 1..22: mol_type = other DNA
taacctctgacctccaacctca

SEQ ID NO: 146915 - DNA, 22 bp, synthetic construct
  misc_feature 1..22: note = chemically synthesized
  source 1..22: mol_type = other DNA
acctctgacctccaacctcagt

SEQ ID NO: 146916 - DNA, 22 bp, synthetic construct
  misc_feature 1..22: note = chemically synthesized
  source 1..22: mol_type = other DNA
tgacctccaacctcagtgccaa

SEQ ID NO: 146917 - DNA, 22 bp, synthetic construct
  misc_feature 1..22: note = chemically synthesized
  source 1..22: mol_type = other DNA
acctccaacctcagtgccaaac

SEQ ID NO: 146918 - DNA, 22 bp, synthetic construct
  misc_feature 1..22: note = chemically synthesized
  source 1..22: mol_type = other DNA
caacctcagtgccaaacccata

SEQ ID NO: 146919 - DNA, 22 bp, synthetic construct
  misc_feature 1..22: note = chemically synthesized
  source 1..22: mol_type = other DNA
agtgccaaacccatatatcaaa

SEQ ID NO: 146920 - DNA, 22 bp, synthetic construct
  misc_feature 1..22: note = chemically synthesized
  source 1..22: mol_type = other DNA
ggcttatttatatagatgtcct

SEQ ID NO: 146921 - DNA, 22 bp, synthetic construct
  misc_feature 1..22: note = chemically synthesized
  source 1..22: mol_type = other DNA
atttatatagatgtcctatagg

SEQ ID NO: 146922 - DNA, 22 bp, synthetic construct
  misc_feature 1..22: note = chemically synthesized
  source 1..22: mol_type = other DNA
tttatatagatgtcctataggc

SEQ ID NO: 146923 - DNA, 22 bp, synthetic construct
  misc_feature 1..22: note = chemically synthesized
  source 1..22: mol_type = other DNA
atatagatgtcctataggcacc

SEQ ID NO: 146924 - DNA, 22 bp, synthetic construct
  misc_feature 1..22: note = chemically synthesized
  source 1..22: mol_type = other DNA
tatagatgtcctataggcacct

SEQ ID NO: 146925 - DNA, 22 bp, synthetic construct
  misc_feature 1..22: note = chemically synthesized
  source 1..22: mol_type = other DNA
taggcacctcagactcagcatg

SEQ ID NO: 146926 - DNA, 22 bp, synthetic construct
  misc_feature 1..22: note = chemically synthesized
  source 1..22: mol_type = other DNA
agactcagcatgggtatttcac

SEQ ID NO: 146927 - DNA, 22 bp, synthetic construct
  misc_feature 1..22: note = chemically synthesized
  source 1..22: mol_type = other DNA
agcatgggtatttcacttgtta

SEQ ID NO: 146928 - DNA, 22 bp, synthetic construct
  misc_feature 1..22: note = chemically synthesized
  source 1..22: mol_type = other DNA
cacttgttatactaaaactgtt

SEQ ID NO: 146929 - DNA, 22 bp, synthetic construct
  misc_feature 1..22: note = chemically synthesized
  source 1..22: mol_type = other DNA
acttgttatactaaaactgttt

SEQ ID NO: 146930 - DNA, 22 bp, synthetic construct
  misc_feature 1..22: note = chemically synthesized
  source 1..22: mol_type = other DNA
gttatactaaaactgtttctct

SEQ ID NO: 146931 - DNA, 22 bp, synthetic construct
  misc_feature 1..22: note = chemically synthesized
  source 1..22: mol_type = other DNA
ttatactaaaactgtttctctt

SEQ ID NO: 146932 - DNA, 22 bp, synthetic construct
  misc_feature 1..22: note = chemically synthesized
  source 1..22: mol_type = other DNA
tactaaaactgtttctcttcca

SEQ ID NO: 146933 - DNA, 22 bp, synthetic construct
  misc_feature 1..22: note = chemically synthesized
  source 1..22: mol_type = other DNA
aaactgtttctcttccagtgtt

SEQ ID NO: 146934 - DNA, 22 bp, synthetic construct
  misc_feature 1..22: note = chemically synthesized
  source 1..22: mol_type = other DNA
tttctcttccagtgttttccat

SEQ ID NO: 146935 - DNA, 22 bp, synthetic construct
  misc_feature 1..22: note = chemically synthesized
  source 1..22: mol_type = other DNA
ctcttccagtgttttccatttt

SEQ ID NO: 146936 - DNA, 22 bp, synthetic construct
  misc_feature 1..22: note = chemically synthesized
  source 1..22: mol_type = other DNA
tcttccagtgttttccatttta

SEQ ID NO: 146937 - DNA, 22 bp, synthetic construct
  misc_feature 1..22: note = chemically synthesized
  source 1..22: mol_type = other DNA
ttccagtgttttccattttagt

SEQ ID NO: 146938 - DNA, 22 bp, synthetic construct
  misc_feature 1..22: note = chemically synthesized
  source 1..22: mol_type = other DNA
ccagtgttttccattttagtca

SEQ ID NO: 146939 - DNA, 22 bp, synthetic construct
  misc_feature 1..22: note = chemically synthesized
  source 1..22: mol_type = other DNA
cagtgttttccattttagtcat

SEQ ID NO: 146940 - DNA, 22 bp, synthetic construct
  misc_feature 1..22: note = chemically synthesized
  source 1..22: mol_type = other DNA
tccattttagtcattagatagc

SEQ ID NO: 146941 - DNA, 22 bp, synthetic construct
  misc_feature 1..22: note = chemically synthesized
  source 1..22: mol_type = other DNA
ccattttagtcattagatagct

SEQ ID NO: 146942 - DNA, 22 bp, synthetic construct
  misc_feature 1..22: note = chemically synthesized
  source 1..22: mol_type = other DNA
cattttagtcattagatagcta

SEQ ID NO: 146943 - DNA, 22 bp, synthetic construct
  misc_feature 1..22: note = chemically synthesized
  source 1..22: mol_type = other DNA
tagtcattagatagctacttgc

SEQ ID NO: 146944 - DNA, 22 bp, synthetic construct
  misc_feature 1..22: note = chemically synthesized
  source 1..22: mol_type = other DNA
agtcattagatagctacttgcc

SEQ ID NO: 146945 - DNA, 22 bp, synthetic construct
  misc_feature 1..22: note = chemically synthesized
  source 1..22: mol_type = other DNA
gtcattagatagctacttgccc

SEQ ID NO: 146946 - DNA, 22 bp, synthetic construct
  misc_feature 1..22: note = chemically synthesized
  source 1..22: mol_type = other DNA
gatagctacttgcccattcacc

SEQ ID NO: 146947 - DNA, 22 bp, synthetic construct
  misc_feature 1..22: note = chemically synthesized
  source 1..22: mol_type = other DNA
cttgcccattcaccaaggtcac

SEQ ID NO: 146948 - DNA, 22 bp, synthetic construct
  misc_feature 1..22: note = chemically synthesized
  source 1..22: mol_type = other DNA
gcccattcaccaaggtcacaga

SEQ ID NO: 146949 - DNA, 22 bp, synthetic construct
  misc_feature 1..22: note = chemically synthesized
  source 1..22: mol_type = other DNA
cccattcaccaaggtcacagat

SEQ ID NO: 146950 - DNA, 22 bp, synthetic construct
  misc_feature 1..22: note = chemically synthesized
  source 1..22: mol_type = other DNA
accaaggtcacagattaaaatc

SEQ ID NO: 146951 - DNA, 22 bp, synthetic construct
  misc_feature 1..22: note = chemically synthesized
  source 1..22: mol_type = other DNA
aaatcatttccctacctctaat

SEQ ID NO: 146952 - DNA, 22 bp, synthetic construct
  misc_feature 1..22: note = chemically synthesized
  source 1..22: mol_type = other DNA
ccctacctctaatcaacagttc

SEQ ID NO: 146953 - DNA, 22 bp, synthetic construct
  misc_feature 1..22: note = chemically synthesized
  source 1..22: mol_type = other DNA
cctacctctaatcaacagttcg

SEQ ID NO: 146954 - DNA, 22 bp, synthetic construct
  misc_feature 1..22: note = chemically synthesized
  source 1..22: mol_type = other DNA
cctctaatcaacagttcgattc

SEQ ID NO: 146955 - DNA, 22 bp, synthetic construct
  misc_feature 1..22: note = chemically synthesized
  source 1..22: mol_type = other DNA
taatcaacagttcgattctgct

SEQ ID NO: 146956 - DNA, 22 bp, synthetic construct
  misc_feature 1..22: note = chemically synthesized
  source 1..22: mol_type = other DNA
atcaacagttcgattctgcttc

SEQ ID NO: 146957 - DNA, 22 bp, synthetic construct
  misc_feature 1..22: note = chemically synthesized
  source 1..22: mol_type = other DNA
gattctgcttcaatttgtccct

SEQ ID NO: 146958 - DNA, 22 bp, synthetic construct
  misc_feature 1..22: note = chemically synthesized
  source 1..22: mol_type = other DNA
tgcttcaatttgtccctatcta

SEQ ID NO: 146959 - DNA, 22 bp, synthetic construct
  misc_feature 1..22: note = chemically synthesized
  source 1..22: mol_type = other DNA
cttcaatttgtccctatctatt

SEQ ID NO: 146960 - DNA, 22 bp, synthetic construct
  misc_feature 1..22: note = chemically synthesized
  source 1..22: mol_type = other DNA
caatttgtccctatctattaat

SEQ ID NO: 146961 - DNA, 22 bp, synthetic construct
  misc_feature 1..22: note = chemically synthesized
  source 1..22: mol_type = other DNA
aatttgtccctatctattaatc

SEQ ID NO: 146962 - DNA, 22 bp, synthetic construct
  misc_feature 1..22: note = chemically synthesized
  source 1..22: mol_type = other DNA
gtccctatctattaatcaccac

SEQ ID NO: 146963 - DNA, 22 bp, synthetic construct
  misc_feature 1..22: note = chemically synthesized
  source 1..22: mol_type = other DNA
tccctatctattaatcaccact

SEQ ID NO: 146964 - DNA, 22 bp, synthetic construct
  misc_feature 1..22: note = chemically synthesized
  source 1..22: mol_type = other DNA
tctattaatcaccactcttact

SEQ ID NO: 146965 - DNA, 22 bp, synthetic construct
  misc_feature 1..22: note = chemically synthesized
  source 1..22: mol_type = other DNA
ttaatcaccactcttactgccc

SEQ ID NO: 146966 - DNA, 22 bp, synthetic construct
  misc_feature 1..22: note = chemically synthesized
  source 1..22: mol_type = other DNA
atcaccactcttactgcccagt

SEQ ID NO: 146967 - DNA, 22 bp, synthetic construct
  misc_feature 1..22: note = chemically synthesized
  source 1..22: mol_type = other DNA
ttactgcccagtcaggtcctca

SEQ ID NO: 146968 - DNA, 22 bp, synthetic construct
  misc_feature 1..22: note = chemically synthesized
  source 1..22: mol_type = other DNA
actgcccagtcaggtcctcatt

SEQ ID NO: 146969 - DNA, 22 bp, synthetic construct
  misc_feature 1..22: note = chemically synthesized
  source 1..22: mol_type = other DNA
ctgcccagtcaggtcctcattg

SEQ ID NO: 146970 - DNA, 22 bp, synthetic construct
  misc_feature 1..22: note = chemically synthesized
  source 1..22: mol_type = other DNA
cccagtcaggtcctcattgttt

SEQ ID NO: 146971 - DNA, 22 bp, synthetic construct
  misc_feature 1..22: note = chemically synthesized
  source 1..22: mol_type = other DNA
attgtttcctgaacaagagtag

SEQ ID NO: 146972 - DNA, 22 bp, synthetic construct
  misc_feature 1..22: note = chemically synthesized
  source 1..22: mol_type = other DNA
tttcctgaacaagagtagatgc

SEQ ID NO: 146973 - DNA, 22 bp, synthetic construct
  misc_feature 1..22: note = chemically synthesized
  source 1..22: mol_type = other DNA
cctgaacaagagtagatgctat

SEQ ID NO: 146974 - DNA, 22 bp, synthetic construct
  misc_feature 1..22: note = chemically synthesized
  source 1..22: mol_type = other DNA
ctgaacaagagtagatgctatt

SEQ ID NO: 146975 - DNA, 22 bp, synthetic construct
  misc_feature 1..22: note = chemically synthesized
  source 1..22: mol_type = other DNA
aacaagagtagatgctattctt

SEQ ID NO: 146976 - DNA, 22 bp, synthetic construct
  misc_feature 1..22: note = chemically synthesized
  source 1..22: mol_type = other DNA
ttctttccacttttagacctta

SEQ ID NO: 146977 - DNA, 22 bp, synthetic construct
  misc_feature 1..22: note = chemically synthesized
  source 1..22: mol_type = other DNA
tttccacttttagaccttatcc

SEQ ID NO: 146978 - DNA, 22 bp, synthetic construct
  misc_feature 1..22: note = chemically synthesized
  source 1..22: mol_type = other DNA
tccacttttagaccttatcctg

SEQ ID NO: 146979 - DNA, 22 bp, synthetic construct
  misc_feature 1..22: note = chemically synthesized
  source 1..22: mol_type = other DNA
ccacttttagaccttatcctgg

SEQ ID NO: 146980 - DNA, 22 bp, synthetic construct
  misc_feature 1..22: note = chemically synthesized
  source 1..22: mol_type = other DNA
cacttttagaccttatcctggc

SEQ ID NO: 146981 - DNA, 22 bp, synthetic construct
  misc_feature 1..22: note = chemically synthesized
  source 1..22: mol_type = other DNA
ttagaccttatcctggctggat

SEQ ID NO: 146982 - DNA, 22 bp, synthetic construct
  misc_feature 1..22: note = chemically synthesized
  source 1..22: mol_type = other DNA
tagaccttatcctggctggatg

SEQ ID NO: 146983 - DNA, 22 bp, synthetic construct
  misc_feature 1..22: note = chemically synthesized
  source 1..22: mol_type = other DNA
agaccttatcctggctggatgc

SEQ ID NO: 146984 - DNA, 22 bp, synthetic construct
  misc_feature 1..22: note = chemically synthesized
  source 1..22: mol_type = other DNA
gaccttatcctggctggatgcg

SEQ ID NO: 146985 - DNA, 22 bp, synthetic construct
  misc_feature 1..22: note = chemically synthesized
  source 1..22: mol_type = other DNA
atcctggctggatgcggtggct

SEQ ID NO: 146986 - DNA, 22 bp, synthetic construct
  misc_feature 1..22: note = chemically synthesized
  source 1..22: mol_type = other DNA
tcctggctggatgcggtggctc

SEQ ID NO: 146987 - DNA, 22 bp, synthetic construct
  misc_feature 1..22: note = chemically synthesized
  source 1..22: mol_type = other DNA
gctggatgcggtggctcaggct

SEQ ID NO: 146988 - DNA, 22 bp, synthetic construct
  misc_feature 1..22: note = chemically synthesized
  source 1..22: mol_type = other DNA
gatgcggtggctcaggcttgta

SEQ ID NO: 146989 - DNA, 22 bp, synthetic construct
  misc_feature 1..22: note = chemically synthesized
  source 1..22: mol_type = other DNA
aggcttgtaaacccagcacttt

SEQ ID NO: 146990 - DNA, 22 bp, synthetic construct
  misc_feature 1..22: note = chemically synthesized
  source 1..22: mol_type = other DNA
gtaaacccagcactttgggagg

SEQ ID NO: 146991 - DNA, 22 bp, synthetic construct
  misc_feature 1..22: note = chemically synthesized
  source 1..22: mol_type = other DNA
taaacccagcactttgggaggc

SEQ ID NO: 146992 - DNA, 22 bp, synthetic construct
  misc_feature 1..22: note = chemically synthesized
  source 1..22: mol_type = other DNA
tgggaggccaaggcaggcagat

SEQ ID NO: 146993 - DNA, 22 bp, synthetic construct
  misc_feature 1..22: note = chemically synthesized
  source 1..22: mol_type = other DNA
gggaggccaaggcaggcagatc

SEQ ID NO: 146994 - DNA, 22 bp, synthetic construct
  misc_feature 1..22: note = chemically synthesized
  source 1..22: mol_type = other DNA
ggaggccaaggcaggcagatca

SEQ ID NO: 146995 - DNA, 22 bp, synthetic construct
  misc_feature 1..22: note = chemically synthesized
  source 1..22: mol_type = other DNA
gaggtcaggagttcaagaccag

SEQ ID NO: 146996 - DNA, 22 bp, synthetic construct
  misc_feature 1..22: note = chemically synthesized
  source 1..22: mol_type = other DNA
aggtcaggagttcaagaccagc

SEQ ID NO: 146997 - DNA, 22 bp, synthetic construct
  misc_feature 1..22: note = chemically synthesized
  source 1..22: mol_type = other DNA
aagaccagcctgaccaacatgg

SEQ ID NO: 146998 - DNA, 22 bp, synthetic construct
  misc_feature 1..22: note = chemically synthesized
  source 1..22: mol_type = other DNA
accaacatggtgaaaccccatc

SEQ ID NO: 146999 - DNA, 22 bp, synthetic construct
  misc_feature 1..22: note = chemically synthesized
  source 1..22: mol_type = other DNA
tactaaaaatacaaaatcagcc

SEQ ID NO: 147000 - DNA, 22 bp, synthetic construct
  misc_feature 1..22: note = chemically synthesized
  source 1..22: mol_type = other DNA
ctaaaaatacaaaatcagccgg

SEQ ID NO: 147001 - DNA, 22 bp, synthetic construct
  misc_feature 1..22: note = chemically synthesized
  source 1..22: mol_type = other DNA
aaaatacaaaatcagccgggcg

SEQ ID NO: 147002 - DNA, 22 bp, synthetic construct
  misc_feature 1..22: note = chemically synthesized
  source 1..22: mol_type = other DNA
cagtcccagctattcaggtggc

SEQ ID NO: 147003 - DNA, 22 bp, synthetic construct
  misc_feature 1..22: note = chemically synthesized
  source 1..22: mol_type = other DNA
ttcaggtggctgaggcaggaga

SEQ ID NO: 147004 - DNA, 22 bp, synthetic construct
  misc_feature 1..22: note = chemically synthesized
  source 1..22: mol_type = other DNA
aggtggctgaggcaggagaatt

SEQ ID NO: 147005 - DNA, 22 bp, synthetic construct
  misc_feature 1..22: note = chemically synthesized
  source 1..22: mol_type = other DNA
aggcaggagaattgcttgaacc

SEQ ID NO: 147006 - DNA, 22 bp, synthetic construct
  misc_feature 1..22: note = chemically synthesized
  source 1..22: mol_type = other DNA
cttgaacccaggaggcagaggt

SEQ ID NO: 147007 - DNA, 22 bp, synthetic construct
  misc_feature 1..22: note = chemically synthesized
  source 1..22: mol_type = other DNA
gaacccaggaggcagaggttgc

SEQ ID NO: 147008 - DNA, 22 bp, synthetic construct
  misc_feature 1..22: note = chemically synthesized
  source 1..22: mol_type = other DNA
aacccaggaggcagaggttgcg

SEQ ID NO: 147009 - DNA, 22 bp, synthetic construct
  misc_feature 1..22: note = chemically synthesized
  source 1..22: mol_type = other DNA
cggtgagcctagattgcaccat

SEQ ID NO: 147010 - DNA, 22 bp, synthetic construct
  misc_feature 1..22: note = chemically synthesized
  source 1..22: mol_type = other DNA
gattgcaccattgcactctagc

SEQ ID NO: 147011 - DNA, 22 bp, synthetic construct
  misc_feature 1..22: note = chemically synthesized
  source 1..22: mol_type = other DNA
caccattgcactctagcttggg

SEQ ID NO: 147012 - DNA, 22 bp, synthetic construct
  misc_feature 1..22: note = chemically synthesized
  source 1..22: mol_type = other DNA
cactctagcttgggcaataggg

SEQ ID NO: 147013 - DNA, 22 bp, synthetic construct
  misc_feature 1..22: note = chemically synthesized
  source 1..22: mol_type = other DNA
tagcttgggcaatagggatgaa

SEQ ID NO: 147014 - DNA, 22 bp, synthetic construct
  misc_feature 1..22: note = chemically synthesized
  source 1..22: mol_type = other DNA
gcttgggcaatagggatgaaac

SEQ ID NO: 147015 - DNA, 22 bp, synthetic construct
  misc_feature 1..22: note = chemically synthesized
  source 1..22: mol_type = other DNA
gggcaatagggatgaaactcca

SEQ ID NO: 147016 - DNA, 22 bp, synthetic construct
  misc_feature 1..22: note = chemically synthesized
  source 1..22: mol_type = other DNA
ggcaatagggatgaaactccat

SEQ ID NO: 147017 - DNA, 22 bp, synthetic construct
  misc_feature 1..22: note = chemically synthesized
  source 1..22: mol_type = other DNA
catctcagaagagaaaagaaaa

SEQ ID NO: 147018 - DNA, 22 bp, synthetic construct
  misc_feature 1..22: note = chemically synthesized
  source 1..22: mol_type = other DNA
agaagagaaaagaaaaaaagac

SEQ ID NO: 147019 - DNA, 22 bp, synthetic construct
  misc_feature 1..22: note = chemically synthesized
  source 1..22: mol_type = other DNA
attctgttatacaaatcctctc

SEQ ID NO: 147020 - DNA, 22 bp, synthetic construct
  misc_feature 1..22: note = chemically synthesized
  source 1..22: mol_type = other DNA
ttctgttatacaaatcctctca

SEQ ID NO: 147021 - DNA, 22 bp, synthetic construct
  misc_feature 1..22: note = chemically synthesized
  source 1..22: mol_type = other DNA
tgttatacaaatcctctcaatg

SEQ ID NO: 147022 - DNA, 22 bp, synthetic construct
  misc_feature 1..22: note = chemically synthesized
  source 1..22: mol_type = other DNA
ttatacaaatcctctcaatgca

SEQ ID NO: 147023 - DNA, 22 bp, synthetic construct
  misc_feature 1..22: note = chemically synthesized
  source 1..22: mol_type = other DNA
tacaaatcctctcaatgcaatc

SEQ ID NO: 147024 - DNA, 22 bp, synthetic construct
  misc_feature 1..22: note = chemically synthesized
  source 1..22: mol_type = other DNA
tcaatgcaatccatatagaata

SEQ ID NO: 147025 - DNA, 22 bp, synthetic construct
  misc_feature 1..22: note = chemically synthesized
  source 1..22: mol_type = other DNA
aatgcaatccatatagaataaa

SEQ ID NO: 147026 - DNA, 22 bp, synthetic construct
  misc_feature 1..22: note = chemically synthesized
  source 1..22: mol_type = other DNA
ccaatgtgtaaaatcatttcag

SEQ ID NO: 147027 - DNA, 22 bp, synthetic construct
  misc_feature 1..22: note = chemically synthesized
  source 1..22: mol_type = other DNA
caggtagaacagaattaaagtg

SEQ ID NO: 147028 - DNA, 22 bp, synthetic construct
  misc_feature 1..22: note = chemically synthesized
  source 1..22: mol_type = other DNA
aggtagaacagaattaaagtga

SEQ ID NO: 147029 - DNA, 22 bp, synthetic construct
  misc_feature 1..22: note = chemically synthesized
  source 1..22: mol_type = other DNA
aagtgaaaagccaagtctttgg

SEQ ID NO: 147030 - DNA, 22 bp, synthetic construct
  misc_feature 1..22: note = chemically synthesized
  source 1..22: mol_type = other DNA
tggaattaacagacaaagatca

SEQ ID NO: 147031 - DNA, 22 bp, synthetic construct
  misc_feature 1..22: note = chemically synthesized
  source 1..22: mol_type = other DNA
ggaattaacagacaaagatcaa

SEQ ID NO: 147032 - DNA, 22 bp, synthetic construct
  misc_feature 1..22: note = chemically synthesized
  source 1..22: mol_type = other DNA
gaattaacagacaaagatcaaa

SEQ ID NO: 147033 - DNA, 22 bp, synthetic construct
  misc_feature 1..22: note = chemically synthesized
  source 1..22: mol_type = other DNA
acagacaaagatcaaataacag

SEQ ID NO: 147034 - DNA, 22 bp, synthetic construct
  misc_feature 1..22: note = chemically synthesized
  source 1..22: mol_type = other DNA
atggccttaagaatttacctaa

SEQ ID NO: 147035 - DNA, 22 bp, synthetic construct
  misc_feature 1..22: note = chemically synthesized
  source 1..22: mol_type = other DNA
aagaatttacctaacatttttt

SEQ ID NO: 147036 - DNA, 22 bp, synthetic construct
  misc_feature 1..22: note = chemically synthesized
  source 1..22: mol_type = other DNA
agaatttacctaacattttttt

SEQ ID NO: 147037 - DNA, 22 bp, synthetic construct
  misc_feature 1..22: note = chemically synthesized
  source 1..22: mol_type = other DNA
acctaacattttttttagaatc

SEQ ID NO: 147038 - DNA, 22 bp, synthetic construct
  misc_feature 1..22: note = chemically synthesized
  source 1..22: mol_type = other DNA
cctaacattttttttagaatca

SEQ ID NO: 147039 - DNA, 22 bp, synthetic construct
  misc_feature 1..22: note = chemically synthesized
  source 1..22: mol_type = other DNA
acattttttttagaatcaattt

SEQ ID NO: 147040 - DNA, 22 bp, synthetic construct
  misc_feature 1..22: note = chemically synthesized
  source 1..22: mol_type = other DNA
tttttagaatcaattttcttat

SEQ ID NO: 147041 - DNA, 22 bp, synthetic construct
  misc_feature 1..22: note = chemically synthesized
  source 1..22: mol_type = other DNA
ttttagaatcaattttcttata

SEQ ID NO: 147042 - DNA, 22 bp, synthetic construct
  misc_feature 1..22: note = chemically synthesized
  source 1..22: mol_type = other DNA
tttagaatcaattttcttatat

SEQ ID NO: 147043 - DNA, 22 bp, synthetic construct
  misc_feature 1..22: note = chemically synthesized
  source 1..22: mol_type = other DNA
ttagaatcaattttcttatata

SEQ ID NO: 147044 - DNA, 22 bp, synthetic construct
  misc_feature 1..22: note = chemically synthesized
  source 1..22: mol_type = other DNA
tagaatcaattttcttatatat

SEQ ID NO: 147045 - DNA, 22 bp, synthetic construct
  misc_feature 1..22: note = chemically synthesized
  source 1..22: mol_type = other DNA
agaatcaattttcttatatatg

SEQ ID NO: 147046 - DNA, 22 bp, synthetic construct
  misc_feature 1..22: note = chemically synthesized
  source 1..22: mol_type = other DNA
gaatcaattttcttatatatga

SEQ ID NO: 147047 - DNA, 22 bp, synthetic construct
  misc_feature 1..22: note = chemically synthesized
  source 1..22: mol_type = other DNA
tcttatatatgaattggaaaca

SEQ ID NO: 147048 - DNA, 22 bp, synthetic construct
  misc_feature 1..22: note = chemically synthesized
  source 1..22: mol_type = other DNA
cttatatatgaattggaaacat

SEQ ID NO: 147049 - DNA, 22 bp, synthetic construct
  misc_feature 1..22: note = chemically synthesized
  source 1..22: mol_type = other DNA
ttatatatgaattggaaacata

SEQ ID NO: 147050 - DNA, 22 bp, synthetic construct
  misc_feature 1..22: note = chemically synthesized
  source 1..22: mol_type = other DNA
atatatgaattggaaacataat

SEQ ID NO: 147051 - DNA, 22 bp, synthetic construct
  misc_feature 1..22: note = chemically synthesized
  source 1..22: mol_type = other DNA
tatatgaattggaaacataatt

SEQ ID NO: 147052 - DNA, 22 bp, synthetic construct
  misc_feature 1..22: note = chemically synthesized
  source 1..22: mol_type = other DNA
gaaacataattcctccctcaca

SEQ ID NO: 147053 - DNA, 22 bp, synthetic construct
  misc_feature 1..22: note = chemically synthesized
  source 1..22: mol_type = other DNA
ctccctcacaaacacattctaa

SEQ ID NO: 147054 - DNA, 22 bp, synthetic construct
  misc_feature 1..22: note = chemically synthesized
  source 1..22: mol_type = other DNA
cctcacaaacacattctaagat

SEQ ID NO: 147055 - DNA, 22 bp, synthetic construct
  misc_feature 1..22: note = chemically synthesized
  source 1..22: mol_type = other DNA
acaaacacattctaagatttta

SEQ ID NO: 147056 - DNA, 22 bp, synthetic construct
  misc_feature 1..22: note = chemically synthesized
  source 1..22: mol_type = other DNA
taagattttaaggagatattga

SEQ ID NO: 147057 - DNA, 22 bp, synthetic construct
  misc_feature 1..22: note = chemically synthesized
  source 1..22: mol_type = other DNA
agattttaaggagatattgatg

SEQ ID NO: 147058 - DNA, 22 bp, synthetic construct
  misc_feature 1..22: note = chemically synthesized
  source 1..22: mol_type = other DNA
taaggagatattgatgaagtac

SEQ ID NO: 147059 - DNA, 22 bp, synthetic construct
  misc_feature 1..22: note = chemically synthesized
  source 1..22: mol_type = other DNA
aaggagatattgatgaagtaca

SEQ ID NO: 147060 - DNA, 22 bp, synthetic construct
  misc_feature 1..22: note = chemically synthesized
  source 1..22: mol_type = other DNA
aggagatattgatgaagtacat

SEQ ID NO: 147061 - DNA, 22 bp, synthetic construct
  misc_feature 1..22: note = chemically synthesized
  source 1..22: mol_type = other DNA
atgaagtacatcatctgtcatt

SEQ ID NO: 147062 - DNA, 22 bp, synthetic construct
  misc_feature 1..22: note = chemically synthesized
  source 1..22: mol_type = other DNA
tcatttttaacaggtagtggta

SEQ ID NO: 147063 - DNA, 22 bp, synthetic construct
  misc_feature 1..22: note = chemically synthesized
  source 1..22: mol_type = other DNA
ttaacaggtagtggtagtgatt

SEQ ID NO: 147064 - DNA, 22 bp, synthetic construct
  misc_feature 1..22: note = chemically synthesized
  source 1..22: mol_type = other DNA
taacaggtagtggtagtgattc

SEQ ID NO: 147065 - DNA, 22 bp, synthetic construct
  misc_feature 1..22: note = chemically synthesized
  source 1..22: mol_type = other DNA
aacaggtagtggtagtgattca

SEQ ID NO: 147066 - DNA, 22 bp, synthetic construct
  misc_feature 1..22: note = chemically synthesized
  source 1..22: mol_type = other DNA
acaggtagtggtagtgattcac

SEQ ID NO: 147067 - DNA, 22 bp, synthetic construct
  misc_feature 1..22: note = chemically synthesized
  source 1..22: mol_type = other DNA
acacagcacattatgatctgtt

SEQ ID NO: 147068 - DNA, 22 bp, synthetic construct
  misc_feature 1..22: note = chemically synthesized
  source 1..22: mol_type = other DNA
tgatctgttcttgtatgttctg

SEQ ID NO: 147069 - DNA, 22 bp, synthetic construct
  misc_feature 1..22: note = chemically synthesized
  source 1..22: mol_type = other DNA
ttcttgtatgttctgttccatt

SEQ ID NO: 147070 - DNA, 22 bp, synthetic construct
  misc_feature 1..22: note = chemically synthesized
  source 1..22: mol_type = other DNA
ttgtatgttctgttccattctg

SEQ ID NO: 147071 - DNA, 22 bp, synthetic construct
  misc_feature 1..22: note = chemically synthesized
  source 1..22: mol_type = other DNA
gtatgttctgttccattctgta

SEQ ID NO: 147072 - DNA, 22 bp, synthetic construct
  misc_feature 1..22: note = chemically synthesized
  source 1..22: mol_type = other DNA
tatgttctgttccattctgtat

SEQ ID NO: 147073 - DNA, 22 bp, synthetic construct
  misc_feature 1..22: note = chemically synthesized
  source 1..22: mol_type = other DNA
tgttccattctgtattcttgac

SEQ ID NO: 147074 - DNA, 22 bp, synthetic construct
  misc_feature 1..22: note = chemically synthesized
  source 1..22: mol_type = other DNA
ttccattctgtattcttgacct

SEQ ID NO: 147075 - DNA, 22 bp, synthetic construct
  misc_feature 1..22: note = chemically synthesized
  source 1..22: mol_type = other DNA
cattctgtattcttgacctggt

SEQ ID NO: 147076 - DNA, 22 bp, synthetic construct
  misc_feature 1..22: note = chemically synthesized
  source 1..22: mol_type = other DNA
tgtattcttgacctggttgtat

SEQ ID NO: 147077 - DNA, 22 bp, synthetic construct
  misc_feature 1..22: note = chemically synthesized
  source 1..22: mol_type = other DNA
tattcttgacctggttgtattc

SEQ ID NO: 147078 - DNA, 22 bp, synthetic construct
  misc_feature 1..22: note = chemically synthesized
  source 1..22: mol_type = other DNA
ttgacctggttgtattctttct

SEQ ID NO: 147079 - DNA, 22 bp, synthetic construct
  misc_feature 1..22: note = chemically synthesized
  source 1..22: mol_type = other DNA
gacctggttgtattctttctga

SEQ ID NO: 147080 - DNA, 22 bp, synthetic construct
  misc_feature 1..22: note = chemically synthesized
  source 1..22: mol_type = other DNA
acctggttgtattctttctgag

SEQ ID NO: 147081 - DNA, 22 bp, synthetic construct
  misc_feature 1..22: note = chemically synthesized
  source 1..22: mol_type = other DNA
gttgtattctttctgagctcca

SEQ ID NO: 147082 - DNA, 22 bp, synthetic construct
  misc_feature 1..22: note = chemically synthesized
  source 1..22: mol_type = other DNA
tattctttctgagctccagatc

SEQ ID NO: 147083 - DNA, 22 bp, synthetic construct
  misc_feature 1..22: note = chemically synthesized
  source 1..22: mol_type = other DNA
tttctgagctccagatccacat

SEQ ID NO: 147084 - DNA, 22 bp, synthetic construct
  misc_feature 1..22: note = chemically synthesized
  source 1..22: mol_type = other DNA
tctgagctccagatccacatat

SEQ ID NO: 147085 - DNA, 22 bp, synthetic construct
  misc_feature 1..22: note = chemically synthesized
  source 1..22: mol_type = other DNA
ctgagctccagatccacatatc

SEQ ID NO: 147086 - DNA, 22 bp, synthetic construct
  misc_feature 1..22: note = chemically synthesized
  source 1..22: mol_type = other DNA
tgagctccagatccacatatct

SEQ ID NO: 147087 - DNA, 22 bp, synthetic construct
  misc_feature 1..22: note = chemically synthesized
  source 1..22: mol_type = other DNA
agctccagatccacatatctaa

SEQ ID NO: 147088 - DNA, 22 bp, synthetic construct
  misc_feature 1..22: note = chemically synthesized
  source 1..22: mol_type = other DNA
cagatccacatatctaagtaca

SEQ ID NO: 147089 - DNA, 22 bp, synthetic construct
  misc_feature 1..22: note = chemically synthesized
  source 1..22: mol_type = other DNA
agtacatctttttgcattttac

SEQ ID NO: 147090 - DNA, 22 bp, synthetic construct
  misc_feature 1..22: note = chemically synthesized
  source 1..22: mol_type = other DNA
tttgcattttacaagagtgcat

SEQ ID NO: 147091 - DNA, 22 bp, synthetic construct
  misc_feature 1..22: note = chemically synthesized
  source 1..22: mol_type = other DNA
ttgcattttacaagagtgcata

SEQ ID NO: 147092 - DNA, 22 bp, synthetic construct
  misc_feature 1..22: note = chemically synthesized
  source 1..22: mol_type = other DNA
tgcattttacaagagtgcatac

SEQ ID NO: 147093 - DNA, 22 bp, synthetic construct
  misc_feature 1..22: note = chemically synthesized
  source 1..22: mol_type = other DNA
gcattttacaagagtgcataca

SEQ ID NO: 147094 - DNA, 22 bp, synthetic construct
  misc_feature 1..22: note = chemically synthesized
  source 1..22: mol_type = other DNA
cattttacaagagtgcatacaa

SEQ ID NO: 147095 - DNA, 22 bp, synthetic construct
  misc_feature 1..22: note = chemically synthesized
  source 1..22: mol_type = other DNA
tacaagagtgcatacaatacaa

SEQ ID NO: 147096 - DNA, 22 bp, synthetic construct
  misc_feature 1..22: note = chemically synthesized
  source 1..22: mol_type = other DNA
acaagagtgcatacaatacaat

SEQ ID NO: 147097 - DNA, 22 bp, synthetic construct
  misc_feature 1..22: note = chemically synthesized
  source 1..22: mol_type = other DNA
caagagtgcatacaatacaatg

SEQ ID NO: 147098 - DNA, 22 bp, synthetic construct
  misc_feature 1..22: note = chemically synthesized
  source 1..22: mol_type = other DNA
tatttctgattttatcgtacca

SEQ ID NO: 147099 - DNA, 22 bp, synthetic construct
  misc_feature 1..22: note = chemically synthesized
  source 1..22: mol_type = other DNA
ctgattttatcgtaccactaaa

SEQ ID NO: 147100 - DNA, 22 bp, synthetic construct
  misc_feature 1..22: note = chemically synthesized
  source 1..22: mol_type = other DNA
tgattttatcgtaccactaaac

SEQ ID NO: 147101 - DNA, 22 bp, synthetic construct
  misc_feature 1..22: note = chemically synthesized
  source 1..22: mol_type = other DNA
attttatcgtaccactaaactc

SEQ ID NO: 147102 - DNA, 22 bp, synthetic construct
  misc_feature 1..22: note = chemically synthesized
  source 1..22: mol_type = other DNA
tatcgtaccactaaactcacaa

SEQ ID NO: 147103 - DNA, 22 bp, synthetic construct
  misc_feature 1..22: note = chemically synthesized
  source 1..22: mol_type = other DNA
atcgtaccactaaactcacaaa

SEQ ID NO: 147104 - DNA, 22 bp, synthetic construct
  misc_feature 1..22: note = chemically synthesized
  source 1..22: mol_type = other DNA
tcgtaccactaaactcacaaat

SEQ ID NO: 147105 - DNA, 22 bp, synthetic construct
  misc_feature 1..22: note = chemically synthesized
  source 1..22: mol_type = other DNA
aactcacaaatgtggccctatt

SEQ ID NO: 147106 - DNA, 22 bp, synthetic construct
  misc_feature 1..22: note = chemically synthesized
  source 1..22: mol_type = other DNA
acaaatgtggccctattcttgt

SEQ ID NO: 147107 - DNA, 22 bp, synthetic construct
  misc_feature 1..22: note = chemically synthesized
  source 1..22: mol_type = other DNA
ttcttgtgttcacgactgacat

SEQ ID NO: 147108 - DNA, 22 bp, synthetic construct
  misc_feature 1..22: note = chemically synthesized
  source 1..22: mol_type = other DNA
ttgtgttcacgactgacatcac

SEQ ID NO: 147109 - DNA, 22 bp, synthetic construct
  misc_feature 1..22: note = chemically synthesized
  source 1..22: mol_type = other DNA
gtgttcacgactgacatcaccg

SEQ ID NO: 147110 - DNA, 22 bp, synthetic construct
  misc_feature 1..22: note = chemically synthesized
  source 1..22: mol_type = other DNA
tgttcacgactgacatcaccgt

SEQ ID NO: 147111 - DNA, 22 bp, synthetic construct
  misc_feature 1..22: note = chemically synthesized
  source 1..22: mol_type = other DNA
acgactgacatcaccgtcatgg

SEQ ID NO: 147112 - DNA, 22 bp, synthetic construct
  misc_feature 1..22: note = chemically synthesized
  source 1..22: mol_type = other DNA
acatcaccgtcatggtccaagt

SEQ ID NO: 147113 - DNA, 22 bp, synthetic construct
  misc_feature 1..22: note = chemically synthesized
  source 1..22: mol_type = other DNA
ataatagaaatggcattgtcac

SEQ ID NO: 147114 - DNA, 22 bp, synthetic construct
  misc_feature 1..22: note = chemically synthesized
  source 1..22: mol_type = other DNA
tcactttcttccctactgcaac

SEQ ID NO: 147115 - DNA, 22 bp, synthetic construct
  misc_feature 1..22: note = chemically synthesized
  source 1..22: mol_type = other DNA
tcttccctactgcaacagaagc

SEQ ID NO: 147116 - DNA, 22 bp, synthetic construct
  misc_feature 1..22: note = chemically synthesized
  source 1..22: mol_type = other DNA
cttccctactgcaacagaagcc

SEQ ID NO: 147117 - DNA, 22 bp, synthetic construct
  misc_feature 1..22: note = chemically synthesized
  source 1..22: mol_type = other DNA
ttccctactgcaacagaagccc

SEQ ID NO: 147118 - DNA, 22 bp, synthetic construct
  misc_feature 1..22: note = chemically synthesized
  source 1..22: mol_type = other DNA
ccctactgcaacagaagcccag

SEQ ID NO: 147119 - DNA, 22 bp, synthetic construct
  misc_feature 1..22: note = chemically synthesized
  source 1..22: mol_type = other DNA
cctactgcaacagaagcccagc

SEQ ID NO: 147120 - DNA, 22 bp, synthetic construct
  misc_feature 1..22: note = chemically synthesized
  source 1..22: mol_type = other DNA
ctgcaacagaagcccagctatt

SEQ ID NO: 147121 - DNA, 22 bp, synthetic construct
  misc_feature 1..22: note = chemically synthesized
  source 1..22: mol_type = other DNA
caacagaagcccagctatttgt

SEQ ID NO: 147122 - DNA, 22 bp, synthetic construct
  misc_feature 1..22: note = chemically synthesized
  source 1..22: mol_type = other DNA
tttgtctcccattttctctact

SEQ ID NO: 147123 - DNA, 22 bp, synthetic construct
  misc_feature 1..22: note = chemically synthesized
  source 1..22: mol_type = other DNA
gtctcccattttctctacttct

SEQ ID NO: 147124 - DNA, 22 bp, synthetic construct
  misc_feature 1..22: note = chemically synthesized
  source 1..22: mol_type = other DNA
tctcccattttctctacttcta

SEQ ID NO: 147125 - DNA, 22 bp, synthetic construct
  misc_feature 1..22: note = chemically synthesized
  source 1..22: mol_type = other DNA
ccattttctctacttctaaaat

SEQ ID NO: 147126 - DNA, 22 bp, synthetic construct
  misc_feature 1..22: note = chemically synthesized
  source 1..22: mol_type = other DNA
tctctacttctaaaatacattt

SEQ ID NO: 147127 - DNA, 22 bp, synthetic construct
  misc_feature 1..22: note = chemically synthesized
  source 1..22: mol_type = other DNA
ctctacttctaaaatacatttc

SEQ ID NO: 147128 - DNA, 22 bp, synthetic construct
  misc_feature 1..22: note = chemically synthesized
  source 1..22: mol_type = other DNA
tctacttctaaaatacatttct

SEQ ID NO: 147129 - DNA, 22 bp, synthetic construct
  misc_feature 1..22: note = chemically synthesized
  source 1..22: mol_type = other DNA
tacttctaaaatacatttcttc

SEQ ID NO: 147130 - DNA, 22 bp, synthetic construct
  misc_feature 1..22: note = chemically synthesized
  source 1..22: mol_type = other DNA
cttctaaaatacatttcttcac

SEQ ID NO: 147131 - DNA, 22 bp, synthetic construct
  misc_feature 1..22: note = chemically synthesized
  source 1..22: mol_type = other DNA
ctaaaatacatttcttcactaa

SEQ ID NO: 147132 - DNA, 22 bp, synthetic construct
  misc_feature 1..22: note = chemically synthesized
  source 1..22: mol_type = other DNA
taaaatacatttcttcactaag

SEQ ID NO: 147133 - DNA, 22 bp, synthetic construct
  misc_feature 1..22: note = chemically synthesized
  source 1..22: mol_type = other DNA
aaatacatttcttcactaagtg

SEQ ID NO: 147134 - DNA, 22 bp, synthetic construct
  misc_feature 1..22: note = chemically synthesized
  source 1..22: mol_type = other DNA
cttcactaagtgagaataatct

SEQ ID NO: 147135 - DNA, 22 bp, synthetic construct
  misc_feature 1..22: note = chemically synthesized
  source 1..22: mol_type = other DNA
ttcactaagtgagaataatctt

SEQ ID NO: 147136 - DNA, 22 bp, synthetic construct
  misc_feature 1..22: note = chemically synthesized
  source 1..22: mol_type = other DNA
cactaagtgagaataatctttt

SEQ ID NO: 147137 - DNA, 22 bp, synthetic construct
  misc_feature 1..22: note = chemically synthesized
  source 1..22: mol_type = other DNA
actaagtgagaataatctttta

SEQ ID NO: 147138 - DNA, 22 bp, synthetic construct
  misc_feature 1..22: note = chemically synthesized
  source 1..22: mol_type = other DNA
agtgagaataatcttttaaaga

SEQ ID NO: 147139 - DNA, 22 bp, synthetic construct
  misc_feature 1..22: note = chemically synthesized
  source 1..22: mol_type = other DNA
ttaaagacacaaatcaaaccat

SEQ ID NO: 147140 - DNA, 22 bp, synthetic construct
  misc_feature 1..22: note = chemically synthesized
  source 1..22: mol_type = other DNA
taaagacacaaatcaaaccatg

SEQ ID NO: 147141 - DNA, 22 bp, synthetic construct
  misc_feature 1..22: note = chemically synthesized
  source 1..22: mol_type = other DNA
aaagacacaaatcaaaccatgc

SEQ ID NO: 147142 - DNA, 22 bp, synthetic construct
  misc_feature 1..22: note = chemically synthesized
  source 1..22: mol_type = other DNA
aagacacaaatcaaaccatgcc

SEQ ID NO: 147143 - DNA, 22 bp, synthetic construct
  misc_feature 1..22: note = chemically synthesized
  source 1..22: mol_type = other DNA
tcttgaattattcaatatcttt

SEQ ID NO: 147144 - DNA, 22 bp, synthetic construct
  misc_feature 1..22: note = chemically synthesized
  source 1..22: mol_type = other DNA
cttgaattattcaatatctttc

SEQ ID NO: 147145 - DNA, 22 bp, synthetic construct
  misc_feature 1..22: note = chemically synthesized
  source 1..22: mol_type = other DNA
ttgaattattcaatatctttcg

SEQ ID NO: 147146 - DNA, 22 bp, synthetic construct
  misc_feature 1..22: note = chemically synthesized
  source 1..22: mol_type = other DNA
gaattattcaatatctttcgtt

SEQ ID NO: 147147 - DNA, 22 bp, synthetic construct
  misc_feature 1..22: note = chemically synthesized
  source 1..22: mol_type = other DNA
aattattcaatatctttcgttg

SEQ ID NO: 147148 - DNA, 22 bp, synthetic construct
  misc_feature 1..22: note = chemically synthesized
  source 1..22: mol_type = other DNA
ttcaatatctttcgttggcttc

SEQ ID NO: 147149 - DNA, 22 bp, synthetic construct
  misc_feature 1..22: note = chemically synthesized
  source 1..22: mol_type = other DNA
aatatctttcgttggcttccag

SEQ ID NO: 147150 - DNA, 22 bp, synthetic construct
  misc_feature 1..22: note = chemically synthesized
  source 1..22: mol_type = other DNA
tcgttggcttccaggttacaga

SEQ ID NO: 147151 - DNA, 22 bp, synthetic construct
  misc_feature 1..22: note = chemically synthesized
  source 1..22: mol_type = other DNA
cgttggcttccaggttacagaa

SEQ ID NO: 147152 - DNA, 22 bp, synthetic construct
  misc_feature 1..22: note = chemically synthesized
  source 1..22: mol_type = other DNA
gttggcttccaggttacagaaa

SEQ ID NO: 147153 - DNA, 22 bp, synthetic construct
  misc_feature 1..22: note = chemically synthesized
  source 1..22: mol_type = other DNA
gcttccaggttacagaaaaata

SEQ ID NO: 147154 - DNA, 22 bp, synthetic construct
  misc_feature 1..22: note = chemically synthesized
  source 1..22: mol_type = other DNA
ccaggttacagaaaaataactt

SEQ ID NO: 147155 - DNA, 22 bp, synthetic construct
  misc_feature 1..22: note = chemically synthesized
  source 1..22: mol_type = other DNA
caggttacagaaaaataacttg

SEQ ID NO: 147156 - DNA, 22 bp, synthetic construct
  misc_feature 1..22: note = chemically synthesized
  source 1..22: mol_type = other DNA
cagaaaaataacttgtaacaaa

SEQ ID NO: 147157 - DNA, 22 bp, synthetic construct
  misc_feature 1..22: note = chemically synthesized
  source 1..22: mol_type = other DNA
gtaacaaagtttaaaggtcatt

SEQ ID NO: 147158 - DNA, 22 bp, synthetic construct
  misc_feature 1..22: note = chemically synthesized
  source 1..22: mol_type = other DNA
taacaaagtttaaaggtcattc

SEQ ID NO: 147159 - DNA, 22 bp, synthetic construct
  misc_feature 1..22: note = chemically synthesized
  source 1..22: mol_type = other DNA
aaaggtcattcatggctcctct

SEQ ID NO: 147160 - DNA, 22 bp, synthetic construct
  misc_feature 1..22: note = chemically synthesized
  source 1..22: mol_type = other DNA
aaggtcattcatggctcctctc

SEQ ID NO: 147161 - DNA, 22 bp, synthetic construct
  misc_feature 1..22: note = chemically synthesized
  source 1..22: mol_type = other DNA
atggctcctctctaccctattt

SEQ ID NO: 147162 - DNA, 22 bp, synthetic construct
  misc_feature 1..22: note = chemically synthesized
  source 1..22: mol_type = other DNA
ctctctaccctattttataaca

SEQ ID NO: 147163 - DNA, 22 bp, synthetic construct
  misc_feature 1..22: note = chemically synthesized
  source 1..22: mol_type = other DNA
tctaccctattttataacattt

SEQ ID NO: 147164 - DNA, 22 bp, synthetic construct
  misc_feature 1..22: note = chemically synthesized
  source 1..22: mol_type = other DNA
taccctattttataacatttcc

SEQ ID NO: 147165 - DNA, 22 bp, synthetic construct
  misc_feature 1..22: note = chemically synthesized
  source 1..22: mol_type = other DNA
ccctattttataacatttcccc

SEQ ID NO: 147166 - DNA, 22 bp, synthetic construct
  misc_feature 1..22: note = chemically synthesized
  source 1..22: mol_type = other DNA
ttttataacatttccccttgtg

SEQ ID NO: 147167 - DNA, 22 bp, synthetic construct
  misc_feature 1..22: note = chemically synthesized
  source 1..22: mol_type = other DNA
tataacatttccccttgtgatc

SEQ ID NO: 147168 - DNA, 22 bp, synthetic construct
  misc_feature 1..22: note = chemically synthesized
  source 1..22: mol_type = other DNA
ataacatttccccttgtgatca

SEQ ID NO: 147169 - DNA, 22 bp, synthetic construct
  misc_feature 1..22: note = chemically synthesized
  source 1..22: mol_type = other DNA
taacatttccccttgtgatcag

SEQ ID NO: 147170 - DNA, 22 bp, synthetic construct
  misc_feature 1..22: note = chemically synthesized
  source 1..22: mol_type = other DNA
ccccttgtgatcagaatctcag

SEQ ID NO: 147171 - DNA, 22 bp, synthetic construct
  misc_feature 1..22: note = chemically synthesized
  source 1..22: mol_type = other DNA
cccttgtgatcagaatctcagg

SEQ ID NO: 147172 - DNA, 22 bp, synthetic construct
  misc_feature 1..22: note = chemically synthesized
  source 1..22: mol_type = other DNA
gtgatcagaatctcaggcacat

SEQ ID NO: 147173 - DNA, 22 bp, synthetic construct
  misc_feature 1..22: note = chemically synthesized
  source 1..22: mol_type = other DNA
tgatcagaatctcaggcacatc

SEQ ID NO: 147174 - DNA, 22 bp, synthetic construct
  misc_feature 1..22: note = chemically synthesized
  source 1..22: mol_type = other DNA
aggcacatcatccatctttcta

SEQ ID NO: 147175 - DNA, 22 bp, synthetic construct
  misc_feature 1..22: note = chemically synthesized
  source 1..22: mol_type = other DNA
tctatatacaaataaagtcata

SEQ ID NO: 147176 - DNA, 22 bp, synthetic construct
  misc_feature 1..22: note = chemically synthesized
  source 1..22: mol_type = other DNA
ctatatacaaataaagtcatat

SEQ ID NO: 147177 - DNA, 22 bp, synthetic construct
  misc_feature 1..22: note = chemically synthesized
  source 1..22: mol_type = other DNA
tatatacaaataaagtcatata

SEQ ID NO: 147178 - DNA, 22 bp, synthetic construct
  misc_feature 1..22: note = chemically synthesized
  source 1..22: mol_type = other DNA
tatacaaataaagtcatatagt

SEQ ID NO: 147179 - DNA, 22 bp, synthetic construct
  misc_feature 1..22: note = chemically synthesized
  source 1..22: mol_type = other DNA
gaactcacctctggttactttt

SEQ ID NO: 147180 - DNA, 22 bp, synthetic construct
  misc_feature 1..22: note = chemically synthesized
  source 1..22: mol_type = other DNA
aactcacctctggttactttta

SEQ ID NO: 147181 - DNA, 22 bp, synthetic construct
  misc_feature 1..22: note = chemically synthesized
  source 1..22: mol_type = other DNA
acctctggttacttttaatcaa

SEQ ID NO: 147182 - DNA, 22 bp, synthetic construct
  misc_feature 1..22: note = chemically synthesized
  source 1..22: mol_type = other DNA
tggttacttttaatcaaccaaa

SEQ ID NO: 147183 - DNA, 22 bp, synthetic construct
  misc_feature 1..22: note = chemically synthesized
  source 1..22: mol_type = other DNA
gttacttttaatcaaccaaatg

SEQ ID NO: 147184 - DNA, 22 bp, synthetic construct
  misc_feature 1..22: note = chemically synthesized
  source 1..22: mol_type = other DNA
cttttaatcaaccaaatgctgt

SEQ ID NO: 147185 - DNA, 22 bp, synthetic construct
  misc_feature 1..22: note = chemically synthesized
  source 1..22: mol_type = other DNA
ttaatcaaccaaatgctgtaaa

SEQ ID NO: 147186 - DNA, 22 bp, synthetic construct
  misc_feature 1..22: note = chemically synthesized
  source 1..22: mol_type = other DNA
taatcaaccaaatgctgtaaaa

SEQ ID NO: 147187 - DNA, 22 bp, synthetic construct
  misc_feature 1..22: note = chemically synthesized
  source 1..22: mol_type = other DNA
aatcaaccaaatgctgtaaaat

SEQ ID NO: 147188 - DNA, 22 bp, synthetic construct
  misc_feature 1..22: note = chemically synthesized
  source 1..22: mol_type = other DNA
atcaaccaaatgctgtaaaatg

SEQ ID NO: 147189 - DNA, 22 bp, synthetic construct
  misc_feature 1..22: note = chemically synthesized
  source 1..22: mol_type = other DNA
taaaatgcatttgtatcgctac

SEQ ID NO: 147190 - DNA, 22 bp, synthetic construct
  misc_feature 1..22: note = chemically synthesized
  source 1..22: mol_type = other DNA
gtatcgctacgtgttaagcagt

SEQ ID NO: 147191 - DNA, 22 bp, synthetic construct
  misc_feature 1..22: note = chemically synthesized
  source 1..22: mol_type = other DNA
tatcgctacgtgttaagcagta

SEQ ID NO: 147192 - DNA, 22 bp, synthetic construct
  misc_feature 1..22: note = chemically synthesized
  source 1..22: mol_type = other DNA
cgtgttaagcagtagttgattc

SEQ ID NO: 147193 - DNA, 22 bp, synthetic construct
  misc_feature 1..22: note = chemically synthesized
  source 1..22: mol_type = other DNA
agcagtagttgattcttttcat

SEQ ID NO: 147194 - DNA, 22 bp, synthetic construct
  misc_feature 1..22: note = chemically synthesized
  source 1..22: mol_type = other DNA
attcttttcatttctgtgtaat

SEQ ID NO: 147195 - DNA, 22 bp, synthetic construct
  misc_feature 1..22: note = chemically synthesized
  source 1..22: mol_type = other DNA
ttttcatttctgtgtaatattc

SEQ ID NO: 147196 - DNA, 22 bp, synthetic construct
  misc_feature 1..22: note = chemically synthesized
  source 1..22: mol_type = other DNA
ttcatttctgtgtaatattcta

SEQ ID NO: 147197 - DNA, 22 bp, synthetic construct
  misc_feature 1..22: note = chemically synthesized
  source 1..22: mol_type = other DNA
tcatttctgtgtaatattctat

SEQ ID NO: 147198 - DNA, 22 bp, synthetic construct
  misc_feature 1..22: note = chemically synthesized
  source 1..22: mol_type = other DNA
catttctgtgtaatattctatt

SEQ ID NO: 147199 - DNA, 22 bp, synthetic construct
  misc_feature 1..22: note = chemically synthesized
  source 1..22: mol_type = other DNA
atttctgtgtaatattctattc

SEQ ID NO: 147200 - DNA, 22 bp, synthetic construct
  misc_feature 1..22: note = chemically synthesized
  source 1..22: mol_type = other DNA
ctgtgtaatattctattctttg

SEQ ID NO: 147201 - DNA, 22 bp, synthetic construct
  misc_feature 1..22: note = chemically synthesized
  source 1..22: mol_type = other DNA
tgtgtaatattctattctttga

SEQ ID NO: 147202 - DNA, 22 bp, synthetic construct
  misc_feature 1..22: note = chemically synthesized
  source 1..22: mol_type = other DNA
tgtaatattctattctttgact

SEQ ID NO: 147203 - DNA, 22 bp, synthetic construct
  misc_feature 1..22: note = chemically synthesized
  source 1..22: mol_type = other DNA
tattctttgactataccgtaat

SEQ ID NO: 147204 - DNA, 22 bp, synthetic construct
  misc_feature 1..22: note = chemically synthesized
  source 1..22: mol_type = other DNA
ttctttgactataccgtaattt

SEQ ID NO: 147205 - DNA, 22 bp, synthetic construct
  misc_feature 1..22: note = chemically synthesized
  source 1..22: mol_type = other DNA
tttgactataccgtaatttatc

SEQ ID NO: 147206 - DNA, 22 bp, synthetic construct
  misc_feature 1..22: note = chemically synthesized
  source 1..22: mol_type = other DNA
tgactataccgtaatttatcaa

SEQ ID NO: 147207 - DNA, 22 bp, synthetic construct
  misc_feature 1..22: note = chemically synthesized
  source 1..22: mol_type = other DNA
gactataccgtaatttatcaat

SEQ ID NO: 147208 - DNA, 22 bp, synthetic construct
  misc_feature 1..22: note = chemically synthesized
  source 1..22: mol_type = other DNA
actataccgtaatttatcaatt

SEQ ID NO: 147209 - DNA, 22 bp, synthetic construct
  misc_feature 1..22: note = chemically synthesized
  source 1..22: mol_type = other DNA
taccgtaatttatcaattctac

SEQ ID NO: 147210 - DNA, 22 bp, synthetic construct
  misc_feature 1..22: note = chemically synthesized
  source 1..22: mol_type = other DNA
atcaattctactgttggtaagc

SEQ ID NO: 147211 - DNA, 22 bp, synthetic construct
  misc_feature 1..22: note = chemically synthesized
  source 1..22: mol_type = other DNA
tcaattctactgttggtaagca

SEQ ID NO: 147212 - DNA, 22 bp, synthetic construct
  misc_feature 1..22: note = chemically synthesized
  source 1..22: mol_type = other DNA
tactgttggtaagcatttaagt

SEQ ID NO: 147213 - DNA, 22 bp, synthetic construct
  misc_feature 1..22: note = chemically synthesized
  source 1..22: mol_type = other DNA
ctgttggtaagcatttaagtgg

SEQ ID NO: 147214 - DNA, 22 bp, synthetic construct
  misc_feature 1..22: note = chemically synthesized
  source 1..22: mol_type = other DNA
ttggtaagcatttaagtggcta

SEQ ID NO: 147215 - DNA, 22 bp, synthetic construct
  misc_feature 1..22: note = chemically synthesized
  source 1..22: mol_type = other DNA
gtaagcatttaagtggctaccg

SEQ ID NO: 147216 - DNA, 22 bp, synthetic construct
  misc_feature 1..22: note = chemically synthesized
  source 1..22: mol_type = other DNA
aagtggctaccggtttgaggtt

SEQ ID NO: 147217 - DNA, 22 bp, synthetic construct
  misc_feature 1..22: note = chemically synthesized
  source 1..22: mol_type = other DNA
agtggctaccggtttgaggttt

SEQ ID NO: 147218 - DNA, 22 bp, synthetic construct
  misc_feature 1..22: note = chemically synthesized
  source 1..22: mol_type = other DNA
ccggtttgaggtttttatgatt

SEQ ID NO: 147219 - DNA, 22 bp, synthetic construct
  misc_feature 1..22: note = chemically synthesized
  source 1..22: mol_type = other DNA
gaggtttttatgattattgctg

SEQ ID NO: 147220 - DNA, 22 bp, synthetic construct
  misc_feature 1..22: note = chemically synthesized
  source 1..22: mol_type = other DNA
aggtttttatgattattgctgt

SEQ ID NO: 147221 - DNA, 22 bp, synthetic construct
  misc_feature 1..22: note = chemically synthesized
  source 1..22: mol_type = other DNA
ttatgattattgctgtcataag

SEQ ID NO: 147222 - DNA, 22 bp, synthetic construct
  misc_feature 1..22: note = chemically synthesized
  source 1..22: mol_type = other DNA
tatgattattgctgtcataagc

SEQ ID NO: 147223 - DNA, 22 bp, synthetic construct
  misc_feature 1..22: note = chemically synthesized
  source 1..22: mol_type = other DNA
atgattattgctgtcataagca

SEQ ID NO: 147224 - DNA, 22 bp, synthetic construct
  misc_feature 1..22: note = chemically synthesized
  source 1..22: mol_type = other DNA
tgattattgctgtcataagcat

SEQ ID NO: 147225 - DNA, 22 bp, synthetic construct
  misc_feature 1..22: note = chemically synthesized
  source 1..22: mol_type = other DNA
ttgctgtcataagcatttctat

SEQ ID NO: 147226 - DNA, 22 bp, synthetic construct
  misc_feature 1..22: note = chemically synthesized
  source 1..22: mol_type = other DNA
ctgtcataagcatttctataca

SEQ ID NO: 147227 - DNA, 22 bp, synthetic construct
  misc_feature 1..22: note = chemically synthesized
  source 1..22: mol_type = other DNA
tcataagcatttctatacatgt

SEQ ID NO: 147228 - DNA, 22 bp, synthetic construct
  misc_feature 1..22: note = chemically synthesized
  source 1..22: mol_type = other DNA
ctatacatgtctttggatacac

SEQ ID NO: 147229 - DNA, 22 bp, synthetic construct
  misc_feature 1..22: note = chemically synthesized
  source 1..22: mol_type = other DNA
tatacatgtctttggatacaca

SEQ ID NO: 147230 - DNA, 22 bp, synthetic construct
  misc_feature 1..22: note = chemically synthesized
  source 1..22: mol_type = other DNA
tacatgtctttggatacacaca

SEQ ID NO: 147231 - DNA, 22 bp, synthetic construct
  misc_feature 1..22: note = chemically synthesized
  source 1..22: mol_type = other DNA
tggatacacacatgcatgtgtt

SEQ ID NO: 147232 - DNA, 22 bp, synthetic construct
  misc_feature 1..22: note = chemically synthesized
  source 1..22: mol_type = other DNA
ggatacacacatgcatgtgttt

SEQ ID NO: 147233 - DNA, 22 bp, synthetic construct
  misc_feature 1..22: note = chemically synthesized
  source 1..22: mol_type = other DNA
gatacacacatgcatgtgtttc

SEQ ID NO: 147234 - DNA, 22 bp, synthetic construct
  misc_feature 1..22: note = chemically synthesized
  source 1..22: mol_type = other DNA
ctgaatatctaaaaatgtaatt

SEQ ID NO: 147235 - DNA, 22 bp, synthetic construct
  misc_feature 1..22: note = chemically synthesized
  source 1..22: mol_type = other DNA
tgaatatctaaaaatgtaattg

SEQ ID NO: 147236 - DNA, 22 bp, synthetic construct
  misc_feature 1..22: note = chemically synthesized
  source 1..22: mol_type = other DNA
aatatctaaaaatgtaattgct

SEQ ID NO: 147237 - DNA, 22 bp, synthetic construct
  misc_feature 1..22: note = chemically synthesized
  source 1..22: mol_type = other DNA
aaaatgtaattgctaggtaata

SEQ ID NO: 147238 - DNA, 22 bp, synthetic construct
  misc_feature 1..22: note = chemically synthesized
  source 1..22: mol_type = other DNA
ctaggtaatagacttatcaagc

SEQ ID NO: 147239 - DNA, 22 bp, synthetic construct
  misc_feature 1..22: note = chemically synthesized
  source 1..22: mol_type = other DNA
ggtaatagacttatcaagcatc

SEQ ID NO: 147240 - DNA, 22 bp, synthetic construct
  misc_feature 1..22: note = chemically synthesized
  source 1..22: mol_type = other DNA
atcaagcatccagcatttgtgg

SEQ ID NO: 147241 - DNA, 22 bp, synthetic construct
  misc_feature 1..22: note = chemically synthesized
  source 1..22: mol_type = other DNA
tcaagcatccagcatttgtgga

SEQ ID NO: 147242 - DNA, 22 bp, synthetic construct
  misc_feature 1..22: note = chemically synthesized
  source 1..22: mol_type = other DNA
gtggatactattaaaggttttc

SEQ ID NO: 147243 - DNA, 22 bp, synthetic construct
  misc_feature 1..22: note = chemically synthesized
  source 1..22: mol_type = other DNA
tggatactattaaaggttttcc

SEQ ID NO: 147244 - DNA, 22 bp, synthetic construct
  misc_feature 1..22: note = chemically synthesized
  source 1..22: mol_type = other DNA
ttaaaggttttccaaaggggtt

SEQ ID NO: 147245 - DNA, 22 bp, synthetic construct
  misc_feature 1..22: note = chemically synthesized
  source 1..22: mol_type = other DNA
aaggttttccaaaggggttata

SEQ ID NO: 147246 - DNA, 22 bp, synthetic construct
  misc_feature 1..22: note = chemically synthesized
  source 1..22: mol_type = other DNA
tccaaaggggttatactattgt

SEQ ID NO: 147247 - DNA, 22 bp, synthetic construct
  misc_feature 1..22: note = chemically synthesized
  source 1..22: mol_type = other DNA
ccaaaggggttatactattgta

SEQ ID NO: 147248 - DNA, 22 bp, synthetic construct
  misc_feature 1..22: note = chemically synthesized
  source 1..22: mol_type = other DNA
caaaggggttatactattgtac

SEQ ID NO: 147249 - DNA, 22 bp, synthetic construct
  misc_feature 1..22: note = chemically synthesized
  source 1..22: mol_type = other DNA
tactattgtacagtgtcaccaa

SEQ ID NO: 147250 - DNA, 22 bp, synthetic construct
  misc_feature 1..22: note = chemically synthesized
  source 1..22: mol_type = other DNA
ttgtacagtgtcaccaacagag

SEQ ID NO: 147251 - DNA, 22 bp, synthetic construct
  misc_feature 1..22: note = chemically synthesized
  source 1..22: mol_type = other DNA
tacagtgtcaccaacagagttt

SEQ ID NO: 147252 - DNA, 22 bp, synthetic construct
  misc_feature 1..22: note = chemically synthesized
  source 1..22: mol_type = other DNA
gagtttctattgatccatatca

SEQ ID NO: 147253 - DNA, 22 bp, synthetic construct
  misc_feature 1..22: note = chemically synthesized
  source 1..22: mol_type = other DNA
agtttctattgatccatatcac

SEQ ID NO: 147254 - DNA, 22 bp, synthetic construct
  misc_feature 1..22: note = chemically synthesized
  source 1..22: mol_type = other DNA
ctattgatccatatcaccacca

SEQ ID NO: 147255 - DNA, 22 bp, synthetic construct
  misc_feature 1..22: note = chemically synthesized
  source 1..22: mol_type = other DNA
tattgatccatatcaccaccaa

SEQ ID NO: 147256 - DNA, 22 bp, synthetic construct
  misc_feature 1..22: note = chemically synthesized
  source 1..22: mol_type = other DNA
ttgatccatatcaccaccaaaa

SEQ ID NO: 147257 - DNA, 22 bp, synthetic construct
  misc_feature 1..22: note = chemically synthesized
  source 1..22: mol_type = other DNA
atccatatcaccaccaaaattt

SEQ ID NO: 147258 - DNA, 22 bp, synthetic construct
  misc_feature 1..22: note = chemically synthesized
  source 1..22: mol_type = other DNA
gaactgtcagtcttatctcttc

SEQ ID NO: 147259 - DNA, 22 bp, synthetic construct
  misc_feature 1..22: note = chemically synthesized
  source 1..22: mol_type = other DNA
aactgtcagtcttatctcttct

SEQ ID NO: 147260 - DNA, 22 bp, synthetic construct
  misc_feature 1..22: note = chemically synthesized
  source 1..22: mol_type = other DNA
tcagtcttatctcttctcttgt

SEQ ID NO: 147261 - DNA, 22 bp, synthetic construct
  misc_feature 1..22: note = chemically synthesized
  source 1..22: mol_type = other DNA
atctcttctcttgtctcttttt

SEQ ID NO: 147262 - DNA, 22 bp, synthetic construct
  misc_feature 1..22: note = chemically synthesized
  source 1..22: mol_type = other DNA
tctcttctcttgtctctttttt

SEQ ID NO: 147263 - DNA, 22 bp, synthetic construct
  misc_feature 1..22: note = chemically synthesized
  source 1..22: mol_type = other DNA
ttctcttgtctcttttttcctc

SEQ ID NO: 147264 - DNA, 22 bp, synthetic construct
  misc_feature 1..22: note = chemically synthesized
  source 1..22: mol_type = other DNA
ctcttgtctcttttttcctctt

SEQ ID NO: 147265 - DNA, 22 bp, synthetic construct
  misc_feature 1..22: note = chemically synthesized
  source 1..22: mol_type = other DNA
tcttgtctcttttttcctcttt

SEQ ID NO: 147266 - DNA, 22 bp, synthetic construct
  misc_feature 1..22: note = chemically synthesized
  source 1..22: mol_type = other DNA
ttgtctcttttttcctcttttt

SEQ ID NO: 147267 - DNA, 22 bp, synthetic construct
  misc_feature 1..22: note = chemically synthesized
  source 1..22: mol_type = other DNA
gtctcttttttcctcttttttt

SEQ ID NO: 147268 - DNA, 22 bp, synthetic construct
  misc_feature 1..22: note = chemically synthesized
  source 1..22: mol_type = other DNA
tctcttttttcctctttttttt

SEQ ID NO: 147269 - DNA, 22 bp, synthetic construct
  misc_feature 1..22: note = chemically synthesized
  source 1..22: mol_type = other DNA
ttttttcctcttttttttcctt

SEQ ID NO: 147270 - DNA, 22 bp, synthetic construct
  misc_feature 1..22: note = chemically synthesized
  source 1..22: mol_type = other DNA
ttttcctcttttttttccttcc

SEQ ID NO: 147271 - DNA, 22 bp, synthetic construct
  misc_feature 1..22: note = chemically synthesized
  source 1..22: mol_type = other DNA
tttcctcttttttttccttccc

SEQ ID NO: 147272 - DNA, 22 bp, synthetic construct
  misc_feature 1..22: note = chemically synthesized
  source 1..22: mol_type = other DNA
ttcctcttttttttccttccct

SEQ ID NO: 147273 - DNA, 22 bp, synthetic construct
  misc_feature 1..22: note = chemically synthesized
  source 1..22: mol_type = other DNA
tcctcttttttttccttccctt

SEQ ID NO: 147274 - DNA, 22 bp, synthetic construct
  misc_feature 1..22: note = chemically synthesized
  source 1..22: mol_type = other DNA
cctcttttttttccttcccttc

SEQ ID NO: 147275 - DNA, 22 bp, synthetic construct
  misc_feature 1..22: note = chemically synthesized
  source 1..22: mol_type = other DNA
ctcttttttttccttcccttcc

SEQ ID NO: 147276 - DNA, 22 bp, synthetic construct
  misc_feature 1..22: note = chemically synthesized
  source 1..22: mol_type = other DNA
ttttttttccttcccttcccct

SEQ ID NO: 147277 - DNA, 22 bp, synthetic construct
  misc_feature 1..22: note = chemically synthesized
  source 1..22: mol_type = other DNA
ttttttccttcccttcccctct

SEQ ID NO: 147278 - DNA, 22 bp, synthetic construct
  misc_feature 1..22: note = chemically synthesized
  source 1..22: mol_type = other DNA
tttttccttcccttcccctctc

SEQ ID NO: 147279 - DNA, 22 bp, synthetic construct
  misc_feature 1..22: note = chemically synthesized
  source 1..22: mol_type = other DNA
ttttccttcccttcccctctct

SEQ ID NO: 147280 - DNA, 22 bp, synthetic construct
  misc_feature 1..22: note = chemically synthesized
  source 1..22: mol_type = other DNA
tttccttcccttcccctctctt

SEQ ID NO: 147281 - DNA, 22 bp, synthetic construct
  misc_feature 1..22: note = chemically synthesized
  source 1..22: mol_type = other DNA
ttccttcccttcccctctcttc

SEQ ID NO: 147282 - DNA, 22 bp, synthetic construct
  misc_feature 1..22: note = chemically synthesized
  source 1..22: mol_type = other DNA
tccttcccttcccctctcttcg

SEQ ID NO: 147283 - DNA, 22 bp, synthetic construct
  misc_feature 1..22: note = chemically synthesized
  source 1..22: mol_type = other DNA
ccttcccttcccctctcttcgt

SEQ ID NO: 147284 - DNA, 22 bp, synthetic construct
  misc_feature 1..22: note = chemically synthesized
  source 1..22: mol_type = other DNA
cttcccttcccctctcttcgtt

SEQ ID NO: 147285 - DNA, 22 bp, synthetic construct
  misc_feature 1..22: note = chemically synthesized
  source 1..22: mol_type = other DNA
cccttcccctctcttcgtttct

SEQ ID NO: 147286 - DNA, 22 bp, synthetic construct
  misc_feature 1..22: note = chemically synthesized
  source 1..22: mol_type = other DNA
ccttcccctctcttcgtttctt

SEQ ID NO: 147287 - DNA, 22 bp, synthetic construct
  misc_feature 1..22: note = chemically synthesized
  source 1..22: mol_type = other DNA
cccctctcttcgtttcttttct

SEQ ID NO: 147288 - DNA, 22 bp, synthetic construct
  misc_feature 1..22: note = chemically synthesized
  source 1..22: mol_type = other DNA
ccctctcttcgtttcttttctc

SEQ ID NO: 147289 - DNA, 22 bp, synthetic construct
  misc_feature 1..22: note = chemically synthesized
  source 1..22: mol_type = other DNA
tcttcgtttcttttctctcctc

SEQ ID NO: 147290 - DNA, 22 bp, synthetic construct
  misc_feature 1..22: note = chemically synthesized
  source 1..22: mol_type = other DNA
ttcgtttcttttctctcctctt

SEQ ID NO: 147291 - DNA, 22 bp, synthetic construct
  misc_feature 1..22: note = chemically synthesized
  source 1..22: mol_type = other DNA
cgtttcttttctctcctcttct

SEQ ID NO: 147292 - DNA, 22 bp, synthetic construct
  misc_feature 1..22: note = chemically synthesized
  source 1..22: mol_type = other DNA
gtttcttttctctcctcttctc

SEQ ID NO: 147293 - DNA, 22 bp, synthetic construct
  misc_feature 1..22: note = chemically synthesized
  source 1..22: mol_type = other DNA
cttttctctcctcttctcttct

SEQ ID NO: 147294 - DNA, 22 bp, synthetic construct
  misc_feature 1..22: note = chemically synthesized
  source 1..22: mol_type = other DNA
ttttctctcctcttctcttctt

SEQ ID NO: 147295 - DNA, 22 bp, synthetic construct
  misc_feature 1..22: note = chemically synthesized
  source 1..22: mol_type = other DNA
ttctctcctcttctcttctttc

SEQ ID NO: 147296 - DNA, 22 bp, synthetic construct
  misc_feature 1..22: note = chemically synthesized
  source 1..22: mol_type = other DNA
tctctcctcttctcttctttcc

SEQ ID NO: 147297 - DNA, 22 bp, synthetic construct
  misc_feature 1..22: note = chemically synthesized
  source 1..22: mol_type = other DNA
ctctcctcttctcttctttcct

SEQ ID NO: 147298 - DNA, 22 bp, synthetic construct
  misc_feature 1..22: note = chemically synthesized
  source 1..22: mol_type = other DNA
tctcctcttctcttctttcctc

SEQ ID NO: 147299 - DNA, 22 bp, synthetic construct
  misc_feature 1..22: note = chemically synthesized
  source 1..22: mol_type = other DNA
tcctcttctcttctttcctctc

SEQ ID NO: 147300 - DNA, 22 bp, synthetic construct
  misc_feature 1..22: note = chemically synthesized
  source 1..22: mol_type = other DNA
ctcttctcttctttcctctctt

SEQ ID NO: 147301 - DNA, 22 bp, synthetic construct
  misc_feature 1..22: note = chemically synthesized
  source 1..22: mol_type = other DNA
ttctcttctttcctctcttccc

SEQ ID NO: 147302 - DNA, 22 bp, synthetic construct
  misc_feature 1..22: note = chemically synthesized
  source 1..22: mol_type = other DNA
ctcttctttcctctcttccctt

SEQ ID NO: 147303 - DNA, 22 bp, synthetic construct
  misc_feature 1..22: note = chemically synthesized
  source 1..22: mol_type = other DNA
tcttctttcctctcttcccttc

SEQ ID NO: 147304 - DNA, 22 bp, synthetic construct
  misc_feature 1..22: note = chemically synthesized
  source 1..22: mol_type = other DNA
ttctttcctctcttcccttccc

SEQ ID NO: 147305 - DNA, 22 bp, synthetic construct
  misc_feature 1..22: note = chemically synthesized
  source 1..22: mol_type = other DNA
ctttcctctcttcccttccctt

SEQ ID NO: 147306 - DNA, 22 bp, synthetic construct
  misc_feature 1..22: note = chemically synthesized
  source 1..22: mol_type = other DNA
tttcctctcttcccttcccttt

SEQ ID NO: 147307 - DNA, 22 bp, synthetic construct
  misc_feature 1..22: note = chemically synthesized
  source 1..22: mol_type = other DNA
tcctctcttcccttccctttct

SEQ ID NO: 147308 - DNA, 22 bp, synthetic construct
  misc_feature 1..22: note = chemically synthesized
  source 1..22: mol_type = other DNA
cctctcttcccttccctttctc

SEQ ID NO: 147309 - DNA, 22 bp, synthetic construct
  misc_feature 1..22: note = chemically synthesized
  source 1..22: mol_type = other DNA
ctctcttcccttccctttctct

SEQ ID NO: 147310 - DNA, 22 bp, synthetic construct
  misc_feature 1..22: note = chemically synthesized
  source 1..22: mol_type = other DNA
tcttcccttccctttctctttc

SEQ ID NO: 147311 - DNA, 22 bp, synthetic construct
  misc_feature 1..22: note = chemically synthesized
  source 1..22: mol_type = other DNA
ttcccttccctttctctttctc

SEQ ID NO: 147312 - DNA, 22 bp, synthetic construct
  misc_feature 1..22: note = chemically synthesized
  source 1..22: mol_type = other DNA
cccttccctttctctttctctt

SEQ ID NO: 147313 - DNA, 22 bp, synthetic construct
  misc_feature 1..22: note = chemically synthesized
  source 1..22: mol_type = other DNA
ccttccctttctctttctcttc

SEQ ID NO: 147314 - DNA, 22 bp, synthetic construct
  misc_feature 1..22: note = chemically synthesized
  source 1..22: mol_type = other DNA
ccctttctctttctcttcccta

SEQ ID NO: 147315 - DNA, 22 bp, synthetic construct
  misc_feature 1..22: note = chemically synthesized
  source 1..22: mol_type = other DNA
cctttctctttctcttccctat

SEQ ID NO: 147316 - DNA, 22 bp, synthetic construct
  misc_feature 1..22: note = chemically synthesized
  source 1..22: mol_type = other DNA
tctctttctcttccctatccct

SEQ ID NO: 147317 - DNA, 22 bp, synthetic construct
  misc_feature 1..22: note = chemically synthesized
  source 1..22: mol_type = other DNA
ctctttctcttccctatccctt

SEQ ID NO: 147318 - DNA, 22 bp, synthetic construct
  misc_feature 1..22: note = chemically synthesized
  source 1..22: mol_type = other DNA
tctttctcttccctatcccttc

SEQ ID NO: 147319 - DNA, 22 bp, synthetic construct
  misc_feature 1..22: note = chemically synthesized
  source 1..22: mol_type = other DNA
tttctcttccctatcccttctc

SEQ ID NO: 147320 - DNA, 22 bp, synthetic construct
  misc_feature 1..22: note = chemically synthesized
  source 1..22: mol_type = other DNA
tctcttccctatcccttctcct

SEQ ID NO: 147321 - DNA, 22 bp, synthetic construct
  misc_feature 1..22: note = chemically synthesized
  source 1..22: mol_type = other DNA
ctcttccctatcccttctcctc

SEQ ID NO: 147322 - DNA, 22 bp, synthetic construct
  misc_feature 1..22: note = chemically synthesized
  source 1..22: mol_type = other DNA
tcttccctatcccttctcctct

SEQ ID NO: 147323 - DNA, 22 bp, synthetic construct
  misc_feature 1..22: note = chemically synthesized
  source 1..22: mol_type = other DNA
ttccctatcccttctcctctcc

SEQ ID NO: 147324 - DNA, 22 bp, synthetic construct
  misc_feature 1..22: note = chemically synthesized
  source 1..22: mol_type = other DNA
ccctatcccttctcctctcctc

SEQ ID NO: 147325 - DNA, 22 bp, synthetic construct
  misc_feature 1..22: note = chemically synthesized
  source 1..22: mol_type = other DNA
cctatcccttctcctctcctct

SEQ ID NO: 147326 - DNA, 22 bp, synthetic construct
  misc_feature 1..22: note = chemically synthesized
  source 1..22: mol_type = other DNA
tcccttctcctctcctctcccc

SEQ ID NO: 147327 - DNA, 22 bp, synthetic construct
  misc_feature 1..22: note = chemically synthesized
  source 1..22: mol_type = other DNA
ctcctctcctctcccctccttt

SEQ ID NO: 147328 - DNA, 22 bp, synthetic construct
  misc_feature 1..22: note = chemically synthesized
  source 1..22: mol_type = other DNA
tcctctcctctcccctcctttt

SEQ ID NO: 147329 - DNA, 22 bp, synthetic construct
  misc_feature 1..22: note = chemically synthesized
  source 1..22: mol_type = other DNA
ctctcctctcccctcctttttt

SEQ ID NO: 147330 - DNA, 22 bp, synthetic construct
  misc_feature 1..22: note = chemically synthesized
  source 1..22: mol_type = other DNA
tcctctcccctccttttttctc

SEQ ID NO: 147331 - DNA, 22 bp, synthetic construct
  misc_feature 1..22: note = chemically synthesized
  source 1..22: mol_type = other DNA
ctctcccctccttttttctcct

SEQ ID NO: 147332 - DNA, 22 bp, synthetic construct
  misc_feature 1..22: note = chemically synthesized
  source 1..22: mol_type = other DNA
tcccctccttttttctcctctc

SEQ ID NO: 147333 - DNA, 22 bp, synthetic construct
  misc_feature 1..22: note = chemically synthesized
  source 1..22: mol_type = other DNA
ccctccttttttctcctctcct

SEQ ID NO: 147334 - DNA, 22 bp, synthetic construct
  misc_feature 1..22: note = chemically synthesized
  source 1..22: mol_type = other DNA
cttttttctcctctcctctcca

SEQ ID NO: 147335 - DNA, 22 bp, synthetic construct
  misc_feature 1..22: note = chemically synthesized
  source 1..22: mol_type = other DNA
ttttctcctctcctctccatta

SEQ ID NO: 147336 - DNA, 22 bp, synthetic construct
  misc_feature 1..22: note = chemically synthesized
  source 1..22: mol_type = other DNA
tttctcctctcctctccattat

SEQ ID NO: 147337 - DNA, 22 bp, synthetic construct
  misc_feature 1..22: note = chemically synthesized
  source 1..22: mol_type = other DNA
ttctcctctcctctccattatt

SEQ ID NO: 147338 - DNA, 22 bp, synthetic construct
  misc_feature 1..22: note = chemically synthesized
  source 1..22: mol_type = other DNA
tctcctctcctctccattattt

SEQ ID NO: 147339 - DNA, 22 bp, synthetic construct
  misc_feature 1..22: note = chemically synthesized
  source 1..22: mol_type = other DNA
ctcctctcctctccattattta

SEQ ID NO: 147340 - DNA, 22 bp, synthetic construct
  misc_feature 1..22: note = chemically synthesized
  source 1..22: mol_type = other DNA
tcctctcctctccattatttat

SEQ ID NO: 147341 - DNA, 22 bp, synthetic construct
  misc_feature 1..22: note = chemically synthesized
  source 1..22: mol_type = other DNA
ctctcctctccattatttattt

SEQ ID NO: 147342 - DNA, 22 bp, synthetic construct
  misc_feature 1..22: note = chemically synthesized
  source 1..22: mol_type = other DNA
tcctctccattatttatttttc

SEQ ID NO: 147343 - DNA, 22 bp, synthetic construct
  misc_feature 1..22: note = chemically synthesized
  source 1..22: mol_type = other DNA
ctctccattatttatttttcct

SEQ ID NO: 147344 - DNA, 22 bp, synthetic construct
  misc_feature 1..22: note = chemically synthesized
  source 1..22: mol_type = other DNA
tccattatttatttttccttct

SEQ ID NO: 147345 - DNA, 22 bp, synthetic construct
  misc_feature 1..22: note = chemically synthesized
  source 1..22: mol_type = other DNA
cattatttatttttccttcttc

SEQ ID NO: 147346 - DNA, 22 bp, synthetic construct
  misc_feature 1..22: note = chemically synthesized
  source 1..22: mol_type = other DNA
tttatttttccttcttctcctc

SEQ ID NO: 147347 - DNA, 22 bp, synthetic construct
  misc_feature 1..22: note = chemically synthesized
  source 1..22: mol_type = other DNA
atttttccttcttctcctccat

SEQ ID NO: 147348 - DNA, 22 bp, synthetic construct
  misc_feature 1..22: note = chemically synthesized
  source 1..22: mol_type = other DNA
tttttccttcttctcctccatc

SEQ ID NO: 147349 - DNA, 22 bp, synthetic construct
  misc_feature 1..22: note = chemically synthesized
  source 1..22: mol_type = other DNA
ttccttcttctcctccatccct

SEQ ID NO: 147350 - DNA, 22 bp, synthetic construct
  misc_feature 1..22: note = chemically synthesized
  source 1..22: mol_type = other DNA
tccttcttctcctccatccctt

SEQ ID NO: 147351 - DNA, 22 bp, synthetic construct
  misc_feature 1..22: note = chemically synthesized
  source 1..22: mol_type = other DNA
ccttcttctcctccatcccttc

SEQ ID NO: 147352 - DNA, 22 bp, synthetic construct
  misc_feature 1..22: note = chemically synthesized
  source 1..22: mol_type = other DNA
cttcttctcctccatcccttcc

SEQ ID NO: 147353 - DNA, 22 bp, synthetic construct
  misc_feature 1..22: note = chemically synthesized
  source 1..22: mol_type = other DNA
cttctcctccatcccttccatc

SEQ ID NO: 147354 - DNA, 22 bp, synthetic construct
  misc_feature 1..22: note = chemically synthesized
  source 1..22: mol_type = other DNA
ttctcctccatcccttccatcc

SEQ ID NO: 147355 - DNA, 22 bp, synthetic construct
  misc_feature 1..22: note = chemically synthesized
  source 1..22: mol_type = other DNA
ctcctccatcccttccatcctc

SEQ ID NO: 147356 - DNA, 22 bp, synthetic construct
  misc_feature 1..22: note = chemically synthesized
  source 1..22: mol_type = other DNA
tcctccatcccttccatcctct

SEQ ID NO: 147357 - DNA, 22 bp, synthetic construct
  misc_feature 1..22: note = chemically synthesized
  source 1..22: mol_type = other DNA
ctccatcccttccatcctctct

SEQ ID NO: 147358 - DNA, 22 bp, synthetic construct
  misc_feature 1..22: note = chemically synthesized
  source 1..22: mol_type = other DNA
catcccttccatcctctctctt

SEQ ID NO: 147359 - DNA, 22 bp, synthetic construct
  misc_feature 1..22: note = chemically synthesized
  source 1..22: mol_type = other DNA
ccatcctctctcttcccctctt

SEQ ID NO: 147360 - DNA, 22 bp, synthetic construct
  misc_feature 1..22: note = chemically synthesized
  source 1..22: mol_type = other DNA
catcctctctcttcccctcttc

SEQ ID NO: 147361 - DNA, 22 bp, synthetic construct
  misc_feature 1..22: note = chemically synthesized
  source 1..22: mol_type = other DNA
tctcttcccctcttccttcctt

SEQ ID NO: 147362 - DNA, 22 bp, synthetic construct
  misc_feature 1..22: note = chemically synthesized
  source 1..22: mol_type = other DNA
tcttcccctcttccttccttcc

SEQ ID NO: 147363 - DNA, 22 bp, synthetic construct
  misc_feature 1..22: note = chemically synthesized
  source 1..22: mol_type = other DNA
ttcccctcttccttccttcctt

SEQ ID NO: 147364 - DNA, 22 bp, synthetic construct
  misc_feature 1..22: note = chemically synthesized
  source 1..22: mol_type = other DNA
cccctcttccttccttcctttc

SEQ ID NO: 147365 - DNA, 22 bp, synthetic construct
  misc_feature 1..22: note = chemically synthesized
  source 1..22: mol_type = other DNA
ccctcttccttccttcctttct

SEQ ID NO: 147366 - DNA, 22 bp, synthetic construct
  misc_feature 1..22: note = chemically synthesized
  source 1..22: mol_type = other DNA
ttccttccttcctttctccatt

SEQ ID NO: 147367 - DNA, 22 bp, synthetic construct
  misc_feature 1..22: note = chemically synthesized
  source 1..22: mol_type = other DNA
ccttccttcctttctccatttc

SEQ ID NO: 147368 - DNA, 22 bp, synthetic construct
  misc_feature 1..22: note = chemically synthesized
  source 1..22: mol_type = other DNA
cttccttcctttctccatttct

SEQ ID NO: 147369 - DNA, 22 bp, synthetic construct
  misc_feature 1..22: note = chemically synthesized
  source 1..22: mol_type = other DNA
ccttcctttctccatttcttcc

SEQ ID NO: 147370 - DNA, 22 bp, synthetic construct
  misc_feature 1..22: note = chemically synthesized
  source 1..22: mol_type = other DNA
cttcctttctccatttcttcct

SEQ ID NO: 147371 - DNA, 22 bp, synthetic construct
  misc_feature 1..22: note = chemically synthesized
  source 1..22: mol_type = other DNA
cctttctccatttcttcctcct

SEQ ID NO: 147372 - DNA, 22 bp, synthetic construct
  misc_feature 1..22: note = chemically synthesized
  source 1..22: mol_type = other DNA
ctttctccatttcttcctcctc

SEQ ID NO: 147373 - DNA, 22 bp, synthetic construct
  misc_feature 1..22: note = chemically synthesized
  source 1..22: mol_type = other DNA
tctccatttcttcctcctcttt

SEQ ID NO: 147374 - DNA, 22 bp, synthetic construct
  misc_feature 1..22: note = chemically synthesized
  source 1..22: mol_type = other DNA
ctccatttcttcctcctctttc

SEQ ID NO: 147375 - DNA, 22 bp, synthetic construct
  misc_feature 1..22: note = chemically synthesized
  source 1..22: mol_type = other DNA
tccatttcttcctcctctttcc

SEQ ID NO: 147376 - DNA, 22 bp, synthetic construct
  misc_feature 1..22: note = chemically synthesized
  source 1..22: mol_type = other DNA
catttcttcctcctctttcctt

SEQ ID NO: 147377 - DNA, 22 bp, synthetic construct
  misc_feature 1..22: note = chemically synthesized
  source 1..22: mol_type = other DNA
cttcctcctctttccttcaatc

SEQ ID NO: 147378 - DNA, 22 bp, synthetic construct
  misc_feature 1..22: note = chemically synthesized
  source 1..22: mol_type = other DNA
ttcctcctctttccttcaatcc

SEQ ID NO: 147379 - DNA, 22 bp, synthetic construct
  misc_feature 1..22: note = chemically synthesized
  source 1..22: mol_type = other DNA
cctcctctttccttcaatcctt

SEQ ID NO: 147380 - DNA, 22 bp, synthetic construct
  misc_feature 1..22: note = chemically synthesized
  source 1..22: mol_type = other DNA
ctcctctttccttcaatccttc

SEQ ID NO: 147381 - DNA, 22 bp, synthetic construct
  misc_feature 1..22: note = chemically synthesized
  source 1..22: mol_type = other DNA
ctctttccttcaatccttcctt

SEQ ID NO: 147382 - DNA, 22 bp, synthetic construct
  misc_feature 1..22: note = chemically synthesized
  source 1..22: mol_type = other DNA
tttccttcaatccttccttttg

SEQ ID NO: 147383 - DNA, 22 bp, synthetic construct
  misc_feature 1..22: note = chemically synthesized
  source 1..22: mol_type = other DNA
tccttcaatccttccttttgga

SEQ ID NO: 147384 - DNA, 22 bp, synthetic construct
  misc_feature 1..22: note = chemically synthesized
  source 1..22: mol_type = other DNA
ccttcaatccttccttttggat

SEQ ID NO: 147385 - DNA, 22 bp, synthetic construct
  misc_feature 1..22: note = chemically synthesized
  source 1..22: mol_type = other DNA
cttcaatccttccttttggata

SEQ ID NO: 147386 - DNA, 22 bp, synthetic construct
  misc_feature 1..22: note = chemically synthesized
  source 1..22: mol_type = other DNA
caatccttccttttggatatgc

SEQ ID NO: 147387 - DNA, 22 bp, synthetic construct
  misc_feature 1..22: note = chemically synthesized
  source 1..22: mol_type = other DNA
aatccttccttttggatatgct

SEQ ID NO: 147388 - DNA, 22 bp, synthetic construct
  misc_feature 1..22: note = chemically synthesized
  source 1..22: mol_type = other DNA
ccttttggatatgctcatgggt

SEQ ID NO: 147389 - DNA, 22 bp, synthetic construct
  misc_feature 1..22: note = chemically synthesized
  source 1..22: mol_type = other DNA
cttttggatatgctcatgggtg

SEQ ID NO: 147390 - DNA, 22 bp, synthetic construct
  misc_feature 1..22: note = chemically synthesized
  source 1..22: mol_type = other DNA
ttggatatgctcatgggtgtgt

SEQ ID NO: 147391 - DNA, 22 bp, synthetic construct
  misc_feature 1..22: note = chemically synthesized
  source 1..22: mol_type = other DNA
tggatatgctcatgggtgtgta

SEQ ID NO: 147392 - DNA, 22 bp, synthetic construct
  misc_feature 1..22: note = chemically synthesized
  source 1..22: mol_type = other DNA
ggatatgctcatgggtgtgtat

SEQ ID NO: 147393 - DNA, 22 bp, synthetic construct
  misc_feature 1..22: note = chemically synthesized
  source 1..22: mol_type = other DNA
gatatgctcatgggtgtgtatt

SEQ ID NO: 147394 - DNA, 22 bp, synthetic construct
  misc_feature 1..22: note = chemically synthesized
  source 1..22: mol_type = other DNA
atgggtgtgtatttgtctgcca

SEQ ID NO: 147395 - DNA, 22 bp, synthetic construct
  misc_feature 1..22: note = chemically synthesized
  source 1..22: mol_type = other DNA
gtctgccattgtggcattattt

SEQ ID NO: 147396 - DNA, 22 bp, synthetic construct
  misc_feature 1..22: note = chemically synthesized
  source 1..22: mol_type = other DNA
tctgccattgtggcattatttg

SEQ ID NO: 147397 - DNA, 22 bp, synthetic construct
  misc_feature 1..22: note = chemically synthesized
  source 1..22: mol_type = other DNA
ccattgtggcattatttgaatt

SEQ ID NO: 147398 - DNA, 22 bp, synthetic construct
  misc_feature 1..22: note = chemically synthesized
  source 1..22: mol_type = other DNA
tggcattatttgaattcagaaa

SEQ ID NO: 147399 - DNA, 22 bp, synthetic construct
  misc_feature 1..22: note = chemically synthesized
  source 1..22: mol_type = other DNA
tttgaattcagaaaagagtgaa

SEQ ID NO: 147400 - DNA, 22 bp, synthetic construct
  misc_feature 1..22: note = chemically synthesized
  source 1..22: mol_type = other DNA
gaattcagaaaagagtgaaaaa

SEQ ID NO: 147401 - DNA, 22 bp, synthetic construct
  misc_feature 1..22: note = chemically synthesized
  source 1..22: mol_type = other DNA
aattcagaaaagagtgaaaaac

SEQ ID NO: 147402 - DNA, 22 bp, synthetic construct
  misc_feature 1..22: note = chemically synthesized
  source 1..22: mol_type = other DNA
agaaaagagtgaaaaactactg

SEQ ID NO: 147403 - DNA, 22 bp, synthetic construct
  misc_feature 1..22: note = chemically synthesized
  source 1..22: mol_type = other DNA
ctgggatcttcattcctgggtc

SEQ ID NO: 147404 - DNA, 22 bp, synthetic construct
  misc_feature 1..22: note = chemically synthesized
  source 1..22: mol_type = other DNA
ggatcttcattcctgggtctaa

SEQ ID NO: 147405 - DNA, 22 bp, synthetic construct
  misc_feature 1..22: note = chemically synthesized
  source 1..22: mol_type = other DNA
cattcctgggtctaattccaca

SEQ ID NO: 147406 - DNA, 22 bp, synthetic construct
  misc_feature 1..22: note = chemically synthesized
  source 1..22: mol_type = other DNA
attcctgggtctaattccacat

SEQ ID NO: 147407 - DNA, 22 bp, synthetic construct
  misc_feature 1..22: note = chemically synthesized
  source 1..22: mol_type = other DNA
ctgggtctaattccacattttt

SEQ ID NO: 147408 - DNA, 22 bp, synthetic construct
  misc_feature 1..22: note = chemically synthesized
  source 1..22: mol_type = other DNA
ggtctaattccacatttttttt

SEQ ID NO: 147409 - DNA, 22 bp, synthetic construct
  misc_feature 1..22: note = chemically synthesized
  source 1..22: mol_type = other DNA
attccacatttttttttaagaa

SEQ ID NO: 147410 - DNA, 22 bp, synthetic construct
  misc_feature 1..22: note = chemically synthesized
  source 1..22: mol_type = other DNA
cacatttttttttaagaacaca

SEQ ID NO: 147411 - DNA, 22 bp, synthetic construct
  misc_feature 1..22: note = chemically synthesized
  source 1..22: mol_type = other DNA
ttttttaagaacacatctgtaa

SEQ ID NO: 147412 - DNA, 22 bp, synthetic construct
  misc_feature 1..22: note = chemically synthesized
  source 1..22: mol_type = other DNA
tttttaagaacacatctgtaaa

SEQ ID NO: 147413 - DNA, 22 bp, synthetic construct
  misc_feature 1..22: note = chemically synthesized
  source 1..22: mol_type = other DNA
ttttaagaacacatctgtaaaa

SEQ ID NO: 147414 - DNA, 22 bp, synthetic construct
  misc_feature 1..22: note = chemically synthesized
  source 1..22: mol_type = other DNA
tttaagaacacatctgtaaaaa

SEQ ID NO: 147415 - DNA, 22 bp, synthetic construct
  misc_feature 1..22: note = chemically synthesized
  source 1..22: mol_type = other DNA
ttaagaacacatctgtaaaaat

SEQ ID NO: 147416 - DNA, 22 bp, synthetic construct
  misc_feature 1..22: note = chemically synthesized
  source 1..22: mol_type = other DNA
taagaacacatctgtaaaaatg

SEQ ID NO: 147417 - DNA, 22 bp, synthetic construct
  misc_feature 1..22: note = chemically synthesized
  source 1..22: mol_type = other DNA
aagaacacatctgtaaaaatgt

SEQ ID NO: 147418 - DNA, 22 bp, synthetic construct
  misc_feature 1..22: note = chemically synthesized
  source 1..22: mol_type = other DNA
agaacacatctgtaaaaatgtt

SEQ ID NO: 147419 - DNA, 22 bp, synthetic construct
  misc_feature 1..22: note = chemically synthesized
  source 1..22: mol_type = other DNA
taaaaatgttctgtactagcat

SEQ ID NO: 147420 - DNA, 22 bp, synthetic construct
  misc_feature 1..22: note = chemically synthesized
  source 1..22: mol_type = other DNA
tgtactagcatattcccaggaa

SEQ ID NO: 147421 - DNA, 22 bp, synthetic construct
  misc_feature 1..22: note = chemically synthesized
  source 1..22: mol_type = other DNA
tactagcatattcccaggaact

SEQ ID NO: 147422 - DNA, 22 bp, synthetic construct
  misc_feature 1..22: note = chemically synthesized
  source 1..22: mol_type = other DNA
gcatattcccaggaacttcgtt

SEQ ID NO: 147423 - DNA, 22 bp, synthetic construct
  misc_feature 1..22: note = chemically synthesized
  source 1..22: mol_type = other DNA
ccaggaacttcgttaaatttaa

SEQ ID NO: 147424 - DNA, 22 bp, synthetic construct
  misc_feature 1..22: note = chemically synthesized
  source 1..22: mol_type = other DNA
cgttaaatttaatctggctgaa

SEQ ID NO: 147425 - DNA, 22 bp, synthetic construct
  misc_feature 1..22: note = chemically synthesized
  source 1..22: mol_type = other DNA
gttaaatttaatctggctgaat

SEQ ID NO: 147426 - DNA, 22 bp, synthetic construct
  misc_feature 1..22: note = chemically synthesized
  source 1..22: mol_type = other DNA
aatttaatctggctgaatatgg

SEQ ID NO: 147427 - DNA, 22 bp, synthetic construct
  misc_feature 1..22: note = chemically synthesized
  source 1..22: mol_type = other DNA
aatctggctgaatatggtaaat

SEQ ID NO: 147428 - DNA, 22 bp, synthetic construct
  misc_feature 1..22: note = chemically synthesized
  source 1..22: mol_type = other DNA
atctggctgaatatggtaaatc

SEQ ID NO: 147429 - DNA, 22 bp, synthetic construct
  misc_feature 1..22: note = chemically synthesized
  source 1..22: mol_type = other DNA
gctgaatatggtaaatctactt

SEQ ID NO: 147430 - DNA, 22 bp, synthetic construct
  misc_feature 1..22: note = chemically synthesized
  source 1..22: mol_type = other DNA
aatatggtaaatctacttttca

SEQ ID NO: 147431 - DNA, 22 bp, synthetic construct
  misc_feature 1..22: note = chemically synthesized
  source 1..22: mol_type = other DNA
cttttcactttgcattctttct

SEQ ID NO: 147432 - DNA, 22 bp, synthetic construct
  misc_feature 1..22: note = chemically synthesized
  source 1..22: mol_type = other DNA
ttcactttgcattctttcttta

SEQ ID NO: 147433 - DNA, 22 bp, synthetic construct
  misc_feature 1..22: note = chemically synthesized
  source 1..22: mol_type = other DNA
tcactttgcattctttctttag

SEQ ID NO: 147434 - DNA, 22 bp, synthetic construct
  misc_feature 1..22: note = chemically synthesized
  source 1..22: mol_type = other DNA
cactttgcattctttctttagt

SEQ ID NO: 147435 - DNA, 22 bp, synthetic construct
  misc_feature 1..22: note = chemically synthesized
  source 1..22: mol_type = other DNA
actttgcattctttctttagtc

SEQ ID NO: 147436 - DNA, 22 bp, synthetic construct
  misc_feature 1..22: note = chemically synthesized
  source 1..22: mol_type = other DNA
tgcattctttctttagtcatac

SEQ ID NO: 147437 - DNA, 22 bp, synthetic construct
  misc_feature 1..22: note = chemically synthesized
  source 1..22: mol_type = other DNA
gcattctttctttagtcatacc

SEQ ID NO: 147438 - DNA, 22 bp, synthetic construct
  misc_feature 1..22: note = chemically synthesized
  source 1..22: mol_type = other DNA
cattctttctttagtcatacca

SEQ ID NO: 147439 - DNA, 22 bp, synthetic construct
  misc_feature 1..22: note = chemically synthesized
  source 1..22: mol_type = other DNA
tttctttagtcataccataatt

SEQ ID NO: 147440 - DNA, 22 bp, synthetic construct
  misc_feature 1..22: note = chemically synthesized
  source 1..22: mol_type = other DNA
tctttagtcataccataatttt

SEQ ID NO: 147441 - DNA, 22 bp, synthetic construct
  misc_feature 1..22: note = chemically synthesized
  source 1..22: mol_type = other DNA
ctttagtcataccataatttta

SEQ ID NO: 147442 - DNA, 22 bp, synthetic construct
  misc_feature 1..22: note = chemically synthesized
  source 1..22: mol_type = other DNA
tttagtcataccataattttaa

SEQ ID NO: 147443 - DNA, 22 bp, synthetic construct
  misc_feature 1..22: note = chemically synthesized
  source 1..22: mol_type = other DNA
tagtcataccataattttaaac

SEQ ID NO: 147444 - DNA, 22 bp, synthetic construct
  misc_feature 1..22: note = chemically synthesized
  source 1..22: mol_type = other DNA
agtcataccataattttaaaca

SEQ ID NO: 147445 - DNA, 22 bp, synthetic construct
  misc_feature 1..22: note = chemically synthesized
  source 1..22: mol_type = other DNA
gtcataccataattttaaacat

SEQ ID NO: 147446 - DNA, 22 bp, synthetic construct
  misc_feature 1..22: note = chemically synthesized
  source 1..22: mol_type = other DNA
taaacattcaaaatatttgtat

SEQ ID NO: 147447 - DNA, 22 bp, synthetic construct
  misc_feature 1..22: note = chemically synthesized
  source 1..22: mol_type = other DNA
aaacattcaaaatatttgtata

SEQ ID NO: 147448 - DNA, 22 bp, synthetic construct
  misc_feature 1..22: note = chemically synthesized
  source 1..22: mol_type = other DNA
aacattcaaaatatttgtatat

SEQ ID NO: 147449 - DNA, 22 bp, synthetic construct
  misc_feature 1..22: note = chemically synthesized
  source 1..22: mol_type = other DNA
aaaatatttgtatataatattt

SEQ ID NO: 147450 - DNA, 22 bp, synthetic construct
  misc_feature 1..22: note = chemically synthesized
  source 1..22: mol_type = other DNA
gtatataatatttgattttatc

SEQ ID NO: 147451 - DNA, 22 bp, synthetic construct
  misc_feature 1..22: note = chemically synthesized
  source 1..22: mol_type = other DNA
tatataatatttgattttatct

SEQ ID NO: 147452 - DNA, 22 bp, synthetic construct
  misc_feature 1..22: note = chemically synthesized
  source 1..22: mol_type = other DNA
gattttatctgtcattaaaatg

SEQ ID NO: 147453 - DNA, 22 bp, synthetic construct
  misc_feature 1..22: note = chemically synthesized
  source 1..22: mol_type = other DNA
attttatctgtcattaaaatgt

SEQ ID NO: 147454 - DNA, 22 bp, synthetic construct
  misc_feature 1..22: note = chemically synthesized
  source 1..22: mol_type = other DNA
tatctgtcattaaaatgttaac

SEQ ID NO: 147455 - DNA, 22 bp, synthetic construct
  misc_feature 1..22: note = chemically synthesized
  source 1..22: mol_type = other DNA
atctgtcattaaaatgttaacc

SEQ ID NO: 147456 - DNA, 22 bp, synthetic construct
  misc_feature 1..22: note = chemically synthesized
  source 1..22: mol_type = other DNA
tctgtcattaaaatgttaacct

SEQ ID NO: 147457 - DNA, 22 bp, synthetic construct
  misc_feature 1..22: note = chemically synthesized
  source 1..22: mol_type = other DNA
tcattaaaatgttaaccttaaa

SEQ ID NO: 147458 - DNA, 22 bp, synthetic construct
  misc_feature 1..22: note = chemically synthesized
  source 1..22: mol_type = other DNA
aaatgttaaccttaaaattcat

SEQ ID NO: 147459 - DNA, 22 bp, synthetic construct
  misc_feature 1..22: note = chemically synthesized
  source 1..22: mol_type = other DNA
accttaaaattcatgtttccag

SEQ ID NO: 147460 - DNA, 22 bp, synthetic construct
  misc_feature 1..22: note = chemically synthesized
  source 1..22: mol_type = other DNA
aaaattcatgtttccagaacct

SEQ ID NO: 147461 - DNA, 22 bp, synthetic construct
  misc_feature 1..22: note = chemically synthesized
  source 1..22: mol_type = other DNA
aaattcatgtttccagaaccta

SEQ ID NO: 147462 - DNA, 22 bp, synthetic construct
  misc_feature 1..22: note = chemically synthesized
  source 1..22: mol_type = other DNA
atgtttccagaacctatttcaa

SEQ ID NO: 147463 - DNA, 22 bp, synthetic construct
  misc_feature 1..22: note = chemically synthesized
  source 1..22: mol_type = other DNA
ccagaacctatttcaataactg

SEQ ID NO: 147464 - DNA, 22 bp, synthetic construct
  misc_feature 1..22: note = chemically synthesized
  source 1..22: mol_type = other DNA
cagaacctatttcaataactgg

SEQ ID NO: 147465 - DNA, 22 bp, synthetic construct
  misc_feature 1..22: note = chemically synthesized
  source 1..22: mol_type = other DNA
tttcaataactggtaaataaac

SEQ ID NO: 147466 - DNA, 22 bp, synthetic construct
  misc_feature 1..22: note = chemically synthesized
  source 1..22: mol_type = other DNA
caataactggtaaataaacact

SEQ ID NO: 147467 - DNA, 22 bp, synthetic construct
  misc_feature 1..22: note = chemically synthesized
  source 1..22: mol_type = other DNA
aataactggtaaataaacacta

SEQ ID NO: 147468 - DNA, 22 bp, synthetic construct
  misc_feature 1..22: note = chemically synthesized
  source 1..22: mol_type = other DNA
gtaaataaacactattcatttt

SEQ ID NO: 147469 - DNA, 22 bp, synthetic construct
  misc_feature 1..22: note = chemically synthesized
  source 1..22: mol_type = other DNA
ttcattttttaaatattctttt

SEQ ID NO: 147470 - DNA, 22 bp, synthetic construct
  misc_feature 1..22: note = chemically synthesized
  source 1..22: mol_type = other DNA
attttttaaatattcttttaat

SEQ ID NO: 147471 - DNA, 22 bp, synthetic construct
  misc_feature 1..22: note = chemically synthesized
  source 1..22: mol_type = other DNA
tttaaatattcttttaatggat

SEQ ID NO: 147472 - DNA, 22 bp, synthetic construct
  misc_feature 1..22: note = chemically synthesized
  source 1..22: mol_type = other DNA
ttaaatattcttttaatggata

SEQ ID NO: 147473 - DNA, 22 bp, synthetic construct
  misc_feature 1..22: note = chemically synthesized
  source 1..22: mol_type = other DNA
taaatattcttttaatggatat

SEQ ID NO: 147474 - DNA, 22 bp, synthetic construct
  misc_feature 1..22: note = chemically synthesized
  source 1..22: mol_type = other DNA
aaatattcttttaatggatatt

SEQ ID NO: 147475 - DNA, 22 bp, synthetic construct
  misc_feature 1..22: note = chemically synthesized
  source 1..22: mol_type = other DNA
aatattcttttaatggatattt

SEQ ID NO: 147476 - DNA, 22 bp, synthetic construct
  misc_feature 1..22: note = chemically synthesized
  source 1..22: mol_type = other DNA
ttttaatggatatttatttcaa

SEQ ID NO: 147477 - DNA, 22 bp, synthetic construct
  misc_feature 1..22: note = chemically synthesized
  source 1..22: mol_type = other DNA
ttaatggatatttatttcaata

SEQ ID NO: 147478 - DNA, 22 bp, synthetic construct
  misc_feature 1..22: note = chemically synthesized
  source 1..22: mol_type = other DNA
taatggatatttatttcaatat

SEQ ID NO: 147479 - DNA, 22 bp, synthetic construct
  misc_feature 1..22: note = chemically synthesized
  source 1..22: mol_type = other DNA
aatggatatttatttcaatata

SEQ ID NO: 147480 - DNA, 22 bp, synthetic construct
  misc_feature 1..22: note = chemically synthesized
  source 1..22: mol_type = other DNA
atggatatttatttcaatataa

SEQ ID NO: 147481 - DNA, 22 bp, synthetic construct
  misc_feature 1..22: note = chemically synthesized
  source 1..22: mol_type = other DNA
atttcaatataataaaaaatta

SEQ ID NO: 147482 - DNA, 22 bp, synthetic construct
  misc_feature 1..22: note = chemically synthesized
  source 1..22: mol_type = other DNA
tttcaatataataaaaaattag

SEQ ID NO: 147483 - DNA, 22 bp, synthetic construct
  misc_feature 1..22: note = chemically synthesized
  source 1..22: mol_type = other DNA
caatataataaaaaattagagt

SEQ ID NO: 147484 - DNA, 22 bp, synthetic construct
  misc_feature 1..22: note = chemically synthesized
  source 1..22: mol_type = other DNA
aatataataaaaaattagagtt

SEQ ID NO: 147485 - DNA, 22 bp, synthetic construct
  misc_feature 1..22: note = chemically synthesized
  source 1..22: mol_type = other DNA
gagttttattataggaagaatt

SEQ ID NO: 147486 - DNA, 22 bp, synthetic construct
  misc_feature 1..22: note = chemically synthesized
  source 1..22: mol_type = other DNA
tattataggaagaatttaccaa

SEQ ID NO: 147487 - DNA, 22 bp, synthetic construct
  misc_feature 1..22: note = chemically synthesized
  source 1..22: mol_type = other DNA
attataggaagaatttaccaaa

SEQ ID NO: 147488 - DNA, 22 bp, synthetic construct
  misc_feature 1..22: note = chemically synthesized
  source 1..22: mol_type = other DNA
ttataggaagaatttaccaaaa

SEQ ID NO: 147489 - DNA, 22 bp, synthetic construct
  misc_feature 1..22: note = chemically synthesized
  source 1..22: mol_type = other DNA
taggaagaatttaccaaaagaa

SEQ ID NO: 147490 - DNA, 22 bp, synthetic construct
  misc_feature 1..22: note = chemically synthesized
  source 1..22: mol_type = other DNA
accaaaagaaggaggaagcaag

SEQ ID NO: 147491 - DNA, 22 bp, synthetic construct
  misc_feature 1..22: note = chemically synthesized
  source 1..22: mol_type = other DNA
ccaaaagaaggaggaagcaagc

SEQ ID NO: 147492 - DNA, 22 bp, synthetic construct
  misc_feature 1..22: note = chemically synthesized
  source 1..22: mol_type = other DNA
aaactgcagcaatagatttgtc

SEQ ID NO: 147493 - DNA, 22 bp, synthetic construct
  misc_feature 1..22: note = chemically synthesized
  source 1..22: mol_type = other DNA
aactgcagcaatagatttgtcc

SEQ ID NO: 147494 - DNA, 22 bp, synthetic construct
  misc_feature 1..22: note = chemically synthesized
  source 1..22: mol_type = other DNA
cagcaatagatttgtccattcc

SEQ ID NO: 147495 - DNA, 22 bp, synthetic construct
  misc_feature 1..22: note = chemically synthesized
  source 1..22: mol_type = other DNA
gtccattccaacctctcaaaat

SEQ ID NO: 147496 - DNA, 22 bp, synthetic construct
  misc_feature 1..22: note = chemically synthesized
  source 1..22: mol_type = other DNA
tccattccaacctctcaaaatt

SEQ ID NO: 147497 - DNA, 22 bp, synthetic construct
  misc_feature 1..22: note = chemically synthesized
  source 1..22: mol_type = other DNA
caacctctcaaaattcccttgg

SEQ ID NO: 147498 - DNA, 22 bp, synthetic construct
  misc_feature 1..22: note = chemically synthesized
  source 1..22: mol_type = other DNA
tcaaaattcccttggagacaaa

SEQ ID NO: 147499 - DNA, 22 bp, synthetic construct
  misc_feature 1..22: note = chemically synthesized
  source 1..22: mol_type = other DNA
aaaattcccttggagacaaaaa

SEQ ID NO: 147500 - DNA, 22 bp, synthetic construct
  misc_feature 1..22: note = chemically synthesized
  source 1..22: mol_type = other DNA
ccttggagacaaaaatctctag

SEQ ID NO: 147501 - DNA, 22 bp, synthetic construct
  misc_feature 1..22: note = chemically synthesized
  source 1..22: mol_type = other DNA
ggagacaaaaatctctagaggc

SEQ ID NO: 147502 - DNA, 22 bp, synthetic construct
  misc_feature 1..22: note = chemically synthesized
  source 1..22: mol_type = other DNA
gagacaaaaatctctagaggca

SEQ ID NO: 147503 - DNA, 22 bp, synthetic construct
  misc_feature 1..22: note = chemically synthesized
  source 1..22: mol_type = other DNA
tagaggcaaagaagaactttat

SEQ ID NO: 147504 - DNA, 22 bp, synthetic construct
  misc_feature 1..22: note = chemically synthesized
  source 1..22: mol_type = other DNA
gaggcaaagaagaactttatat

SEQ ID NO: 147505 - DNA, 22 bp, synthetic construct
  misc_feature 1..22: note = chemically synthesized
  source 1..22: mol_type = other DNA
tatattgagtcaacttgttaaa

SEQ ID NO: 147506 - DNA, 22 bp, synthetic construct
  misc_feature 1..22: note = chemically synthesized
  source 1..22: mol_type = other DNA
atattgagtcaacttgttaaaa

SEQ ID NO: 147507 - DNA, 22 bp, synthetic construct
  misc_feature 1..22: note = chemically synthesized
  source 1..22: mol_type = other DNA
tattgagtcaacttgttaaaac

SEQ ID NO: 147508 - DNA, 22 bp, synthetic construct
  misc_feature 1..22: note = chemically synthesized
  source 1..22: mol_type = other DNA
agtcaacttgttaaaacatctg

SEQ ID NO: 147509 - DNA, 22 bp, synthetic construct
  misc_feature 1..22: note = chemically synthesized
  source 1..22: mol_type = other DNA
gttaaaacatctgcttttagat

SEQ ID NO: 147510 - DNA, 22 bp, synthetic construct
  misc_feature 1..22: note = chemically synthesized
  source 1..22: mol_type = other DNA
ttaaaacatctgcttttagata

SEQ ID NO: 147511 - DNA, 22 bp, synthetic construct
  misc_feature 1..22: note = chemically synthesized
  source 1..22: mol_type = other DNA
aaacatctgcttttagataagt

SEQ ID NO: 147512 - DNA, 22 bp, synthetic construct
  misc_feature 1..22: note = chemically synthesized
  source 1..22: mol_type = other DNA
cttttagataagttttcttagt

SEQ ID NO: 147513 - DNA, 22 bp, synthetic construct
  misc_feature 1..22: note = chemically synthesized
  source 1..22: mol_type = other DNA
ttagataagttttcttagtata

SEQ ID NO: 147514 - DNA, 22 bp, synthetic construct
  misc_feature 1..22: note = chemically synthesized
  source 1..22: mol_type = other DNA
tagataagttttcttagtataa

SEQ ID NO: 147515 - DNA, 22 bp, synthetic construct
  misc_feature 1..22: note = chemically synthesized
  source 1..22: mol_type = other DNA
agataagttttcttagtataaa

SEQ ID NO: 147516 - DNA, 22 bp, synthetic construct
  misc_feature 1..22: note = chemically synthesized
  source 1..22: mol_type = other DNA
gataagttttcttagtataaag

SEQ ID NO: 147517 - DNA, 22 bp, synthetic construct
  misc_feature 1..22: note = chemically synthesized
  source 1..22: mol_type = other DNA
tcttagtataaagtgacagaaa

SEQ ID NO: 147518 - DNA, 22 bp, synthetic construct
  misc_feature 1..22: note = chemically synthesized
  source 1..22: mol_type = other DNA
cttagtataaagtgacagaaac

SEQ ID NO: 147519 - DNA, 22 bp, synthetic construct
  misc_feature 1..22: note = chemically synthesized
  source 1..22: mol_type = other DNA
ttagtataaagtgacagaaaca

SEQ ID NO: 147520 - DNA, 22 bp, synthetic construct
  misc_feature 1..22: note = chemically synthesized
  source 1..22: mol_type = other DNA
agtataaagtgacagaaacaaa

SEQ ID NO: 147521 - DNA, 22 bp, synthetic construct
  misc_feature 1..22: note = chemically synthesized
  source 1..22: mol_type = other DNA
gtataaagtgacagaaacaaat

SEQ ID NO: 147522 - DNA, 22 bp, synthetic construct
  misc_feature 1..22: note = chemically synthesized
  source 1..22: mol_type = other DNA
aactctaagatacattccacta

SEQ ID NO: 147523 - DNA, 22 bp, synthetic construct
  misc_feature 1..22: note = chemically synthesized
  source 1..22: mol_type = other DNA
taagatacattccactatatta

SEQ ID NO: 147524 - DNA, 22 bp, synthetic construct
  misc_feature 1..22: note = chemically synthesized
  source 1..22: mol_type = other DNA
agatacattccactatattagc

SEQ ID NO: 147525 - DNA, 22 bp, synthetic construct
  misc_feature 1..22: note = chemically synthesized
  source 1..22: mol_type = other DNA
cactatattagcctaaaacact

SEQ ID NO: 147526 - DNA, 22 bp, synthetic construct
  misc_feature 1..22: note = chemically synthesized
  source 1..22: mol_type = other DNA
tattagcctaaaacacttctgc

SEQ ID NO: 147527 - DNA, 22 bp, synthetic construct
  misc_feature 1..22: note = chemically synthesized
  source 1..22: mol_type = other DNA
gcctaaaacacttctgcaaaaa

SEQ ID NO: 147528 - DNA, 22 bp, synthetic construct
  misc_feature 1..22: note = chemically synthesized
  source 1..22: mol_type = other DNA
aaacacttctgcaaaaatgaaa

SEQ ID NO: 147529 - DNA, 22 bp, synthetic construct
  misc_feature 1..22: note = chemically synthesized
  source 1..22: mol_type = other DNA
ctgcaaaaatgaaactaggagg

SEQ ID NO: 147530 - DNA, 22 bp, synthetic construct
  misc_feature 1..22: note = chemically synthesized
  source 1..22: mol_type = other DNA
tgcaaaaatgaaactaggagga

SEQ ID NO: 147531 - DNA, 22 bp, synthetic construct
  misc_feature 1..22: note = chemically synthesized
  source 1..22: mol_type = other DNA
caaaaatgaaactaggaggata

SEQ ID NO: 147532 - DNA, 22 bp, synthetic construct
  misc_feature 1..22: note = chemically synthesized
  source 1..22: mol_type = other DNA
ggaggatatttttagaaacaac

SEQ ID NO: 147533 - DNA, 22 bp, synthetic construct
  misc_feature 1..22: note = chemically synthesized
  source 1..22: mol_type = other DNA
ttagaaacaactgctgaaagag

SEQ ID NO: 147534 - DNA, 22 bp, synthetic construct
  misc_feature 1..22: note = chemically synthesized
  source 1..22: mol_type = other DNA
tagaaacaactgctgaaagaga

SEQ ID NO: 147535 - DNA, 22 bp, synthetic construct
  misc_feature 1..22: note = chemically synthesized
  source 1..22: mol_type = other DNA
agaaacaactgctgaaagagat

SEQ ID NO: 147536 - DNA, 22 bp, synthetic construct
  misc_feature 1..22: note = chemically synthesized
  source 1..22: mol_type = other DNA
gaaacaactgctgaaagagatg

SEQ ID NO: 147537 - DNA, 22 bp, synthetic construct
  misc_feature 1..22: note = chemically synthesized
  source 1..22: mol_type = other DNA
ctgaaagagatgcggtggggag

SEQ ID NO: 147538 - DNA, 22 bp, synthetic construct
  misc_feature 1..22: note = chemically synthesized
  source 1..22: mol_type = other DNA
aaagagatgcggtggggagata

SEQ ID NO: 147539 - DNA, 22 bp, synthetic construct
  misc_feature 1..22: note = chemically synthesized
  source 1..22: mol_type = other DNA
ctgagtcaagacacacatgaca

SEQ ID NO: 147540 - DNA, 22 bp, synthetic construct
  misc_feature 1..22: note = chemically synthesized
  source 1..22: mol_type = other DNA
tgagtcaagacacacatgacag

SEQ ID NO: 147541 - DNA, 22 bp, synthetic construct
  misc_feature 1..22: note = chemically synthesized
  source 1..22: mol_type = other DNA
agtcaagacacacatgacagaa

SEQ ID NO: 147542 - DNA, 22 bp, synthetic construct
  misc_feature 1..22: note = chemically synthesized
  source 1..22: mol_type = other DNA
agggcaagttaagggaatagtg

SEQ ID NO: 147543 - DNA, 22 bp, synthetic construct
  misc_feature 1..22: note = chemically synthesized
  source 1..22: mol_type = other DNA
agggaatagtggaatgaaggtt

SEQ ID NO: 147544 - DNA, 22 bp, synthetic construct
  misc_feature 1..22: note = chemically synthesized
  source 1..22: mol_type = other DNA
atttttcattctcacaaactaa

SEQ ID NO: 147545 - DNA, 22 bp, synthetic construct
  misc_feature 1..22: note = chemically synthesized
  source 1..22: mol_type = other DNA
ttcattctcacaaactaatgaa

SEQ ID NO: 147546 - DNA, 22 bp, synthetic construct
  misc_feature 1..22: note = chemically synthesized
  source 1..22: mol_type = other DNA
tcattctcacaaactaatgaaa

SEQ ID NO: 147547 - DNA, 22 bp, synthetic construct
  misc_feature 1..22: note = chemically synthesized
  source 1..22: mol_type = other DNA
cattctcacaaactaatgaaac

SEQ ID NO: 147548 - DNA, 22 bp, synthetic construct
  misc_feature 1..22: note = chemically synthesized
  source 1..22: mol_type = other DNA
attctcacaaactaatgaaacc

SEQ ID NO: 147549 - DNA, 22 bp, synthetic construct
  misc_feature 1..22: note = chemically synthesized
  source 1..22: mol_type = other DNA
tcacaaactaatgaaaccctgc

SEQ ID NO: 147550 - DNA, 22 bp, synthetic construct
  misc_feature 1..22: note = chemically synthesized
  source 1..22: mol_type = other DNA
acaaactaatgaaaccctgctt

SEQ ID NO: 147551 - DNA, 22 bp, synthetic construct
  misc_feature 1..22: note = chemically synthesized
  source 1..22: mol_type = other DNA
atgaaaccctgcttatcttaaa

SEQ ID NO: 147552 - DNA, 22 bp, synthetic construct
  misc_feature 1..22: note = chemically synthesized
  source 1..22: mol_type = other DNA
cttatcttaaaccaacctgctc

SEQ ID NO: 147553 - DNA, 22 bp, synthetic construct
  misc_feature 1..22: note = chemically synthesized
  source 1..22: mol_type = other DNA
atcttaaaccaacctgctcact

SEQ ID NO: 147554 - DNA, 22 bp, synthetic construct
  misc_feature 1..22: note = chemically synthesized
  source 1..22: mol_type = other DNA
tcttaaaccaacctgctcactg

SEQ ID NO: 147555 - DNA, 22 bp, synthetic construct
  misc_feature 1..22: note = chemically synthesized
  source 1..22: mol_type = other DNA
aaaccaacctgctcactggagc

SEQ ID NO: 147556 - DNA, 22 bp, synthetic construct
  misc_feature 1..22: note = chemically synthesized
  source 1..22: mol_type = other DNA
aaccaacctgctcactggagca

SEQ ID NO: 147557 - DNA, 22 bp, synthetic construct
  misc_feature 1..22: note = chemically synthesized
  source 1..22: mol_type = other DNA
ctcactggagcagggaggacag

SEQ ID NO: 147558 - DNA, 22 bp, synthetic construct
  misc_feature 1..22: note = chemically synthesized
  source 1..22: mol_type = other DNA
actggagcagggaggacaggac

SEQ ID NO: 147559 - DNA, 22 bp, synthetic construct
  misc_feature 1..22: note = chemically synthesized
  source 1..22: mol_type = other DNA
gagcagggaggacaggaccagc

SEQ ID NO: 147560 - DNA, 22 bp, synthetic construct
  misc_feature 1..22: note = chemically synthesized
  source 1..22: mol_type = other DNA
ttgcttacactttcttctgaca

SEQ ID NO: 147561 - DNA, 22 bp, synthetic construct
  misc_feature 1..22: note = chemically synthesized
  source 1..22: mol_type = other DNA
cttacactttcttctgacataa

SEQ ID NO: 147562 - DNA, 22 bp, synthetic construct
  misc_feature 1..22: note = chemically synthesized
  source 1..22: mol_type = other DNA
acactttcttctgacataacag

SEQ ID NO: 147563 - DNA, 22 bp, synthetic construct
  misc_feature 1..22: note = chemically synthesized
  source 1..22: mol_type = other DNA
cactttcttctgacataacagt

SEQ ID NO: 147564 - DNA, 22 bp, synthetic construct
  misc_feature 1..22: note = chemically synthesized
  source 1..22: mol_type = other DNA
tcttctgacataacagtgttca

SEQ ID NO: 147565 - DNA, 22 bp, synthetic construct
  misc_feature 1..22: note = chemically synthesized
  source 1..22: mol_type = other DNA
cttctgacataacagtgttcac

SEQ ID NO: 147566 - DNA, 22 bp, synthetic construct
  misc_feature 1..22: note = chemically synthesized
  source 1..22: mol_type = other DNA
ttctgacataacagtgttcact

SEQ ID NO: 147567 - DNA, 22 bp, synthetic construct
  misc_feature 1..22: note = chemically synthesized
  source 1..22: mol_type = other DNA
ctgacataacagtgttcactag

SEQ ID NO: 147568 - DNA, 22 bp, synthetic construct
  misc_feature 1..22: note = chemically synthesized
  source 1..22: mol_type = other DNA
tgacataacagtgttcactagc

SEQ ID NO: 147569 - DNA, 22 bp, synthetic construct
  misc_feature 1..22: note = chemically synthesized
  source 1..22: mol_type = other DNA
acataacagtgttcactagcaa

SEQ ID NO: 147570 - DNA, 22 bp, synthetic construct
  misc_feature 1..22: note = chemically synthesized
  source 1..22: mol_type = other DNA
actagcaacctcaaacagacac

SEQ ID NO: 147571 - DNA, 22 bp, synthetic construct
  misc_feature 1..22: note = chemically synthesized
  source 1..22: mol_type = other DNA
gcaacctcaaacagacaccatg

SEQ ID NO: 147572 - DNA, 22 bp, synthetic construct
  misc_feature 1..22: note = chemically synthesized
  source 1..22: mol_type = other DNA
aaacagacaccatggtgcatct

SEQ ID NO: 147573 - DNA, 22 bp, synthetic construct
  misc_feature 1..22: note = chemically synthesized
  source 1..22: mol_type = other DNA
actcctgaggagaagactgctg

SEQ ID NO: 147574 - DNA, 22 bp, synthetic construct
  misc_feature 1..22: note = chemically synthesized
  source 1..22: mol_type = other DNA
ctgaggagaagactgctgtcaa

SEQ ID NO: 147575 - DNA, 22 bp, synthetic construct
  misc_feature 1..22: note = chemically synthesized
  source 1..22: mol_type = other DNA
aggagaagactgctgtcaatgc

SEQ ID NO: 147576 - DNA, 22 bp, synthetic construct
  misc_feature 1..22: note = chemically synthesized
  source 1..22: mol_type = other DNA
ctgtcaatgccctgtggggcaa

SEQ ID NO: 147577 - DNA, 22 bp, synthetic construct
  misc_feature 1..22: note = chemically synthesized
  source 1..22: mol_type = other DNA
tcaatgccctgtggggcaaagt

SEQ ID NO: 147578 - DNA, 22 bp, synthetic construct
  misc_feature 1..22: note = chemically synthesized
  source 1..22: mol_type = other DNA
tggggcaaagtgaacgtggatg

SEQ ID NO: 147579 - DNA, 22 bp, synthetic construct
  misc_feature 1..22: note = chemically synthesized
  source 1..22: mol_type = other DNA
gtggtgaggccctgggcaggtt

SEQ ID NO: 147580 - DNA, 22 bp, synthetic construct
  misc_feature 1..22: note = chemically synthesized
  source 1..22: mol_type = other DNA
ggcaggttggtatcaaggttat

SEQ ID NO: 147581 - DNA, 22 bp, synthetic construct
  misc_feature 1..22: note = chemically synthesized
  source 1..22: mol_type = other DNA
gtatcaaggttataagagaggc

SEQ ID NO: 147582 - DNA, 22 bp, synthetic construct
  misc_feature 1..22: note = chemically synthesized
  source 1..22: mol_type = other DNA
taagagaggctcaaggaggcaa

SEQ ID NO: 147583 - DNA, 22 bp, synthetic construct
  misc_feature 1..22: note = chemically synthesized
  source 1..22: mol_type = other DNA
aaggaggcaaatggaaactggg

SEQ ID NO: 147584 - DNA, 22 bp, synthetic construct
  misc_feature 1..22: note = chemically synthesized
  source 1..22: mol_type = other DNA
ggcatgtgtagacagagaagac

SEQ ID NO: 147585 - DNA, 22 bp, synthetic construct
  misc_feature 1..22: note = chemically synthesized
  source 1..22: mol_type = other DNA
ttgggtttctgataggcactga

SEQ ID NO: 147586 - DNA, 22 bp, synthetic construct
  misc_feature 1..22: note = chemically synthesized
  source 1..22: mol_type = other DNA
gggtttctgataggcactgact

SEQ ID NO: 147587 - DNA, 22 bp, synthetic construct
  misc_feature 1..22: note = chemically synthesized
  source 1..22: mol_type = other DNA
ggtttctgataggcactgactc

SEQ ID NO: 147588 - DNA, 22 bp, synthetic construct
  misc_feature 1..22: note = chemically synthesized
  source 1..22: mol_type = other DNA
ctgataggcactgactctctgt

SEQ ID NO: 147589 - DNA, 22 bp, synthetic construct
  misc_feature 1..22: note = chemically synthesized
  source 1..22: mol_type = other DNA
tgataggcactgactctctgtc

SEQ ID NO: 147590 - DNA, 22 bp, synthetic construct
  misc_feature 1..22: note = chemically synthesized
  source 1..22: mol_type = other DNA
ataggcactgactctctgtccc

SEQ ID NO: 147591 - DNA, 22 bp, synthetic construct
  misc_feature 1..22: note = chemically synthesized
  source 1..22: mol_type = other DNA
actctctgtcccttgggctgtt

SEQ ID NO: 147592 - DNA, 22 bp, synthetic construct
  misc_feature 1..22: note = chemically synthesized
  source 1..22: mol_type = other DNA
tctgtcccttgggctgttttcc

SEQ ID NO: 147593 - DNA, 22 bp, synthetic construct
  misc_feature 1..22: note = chemically synthesized
  source 1..22: mol_type = other DNA
tgtcccttgggctgttttccta

SEQ ID NO: 147594 - DNA, 22 bp, synthetic construct
  misc_feature 1..22: note = chemically synthesized
  source 1..22: mol_type = other DNA
tcccttgggctgttttcctacc

SEQ ID NO: 147595 - DNA, 22 bp, synthetic construct
  misc_feature 1..22: note = chemically synthesized
  source 1..22: mol_type = other DNA
gggctgttttcctaccctcaga

SEQ ID NO: 147596 - DNA, 22 bp, synthetic construct
  misc_feature 1..22: note = chemically synthesized
  source 1..22: mol_type = other DNA
ggctgttttcctaccctcagat

SEQ ID NO: 147597 - DNA, 22 bp, synthetic construct
  misc_feature 1..22: note = chemically synthesized
  source 1..22: mol_type = other DNA
ttttcctaccctcagattactg

SEQ ID NO: 147598 - DNA, 22 bp, synthetic construct
  misc_feature 1..22: note = chemically synthesized
  source 1..22: mol_type = other DNA
tcctaccctcagattactggtg

SEQ ID NO: 147599 - DNA, 22 bp, synthetic construct
  misc_feature 1..22: note = chemically synthesized
  source 1..22: mol_type = other DNA
cctaccctcagattactggtgg

SEQ ID NO: 147600 - DNA, 22 bp, synthetic construct
  misc_feature 1..22: note = chemically synthesized
  source 1..22: mol_type = other DNA
ctaccctcagattactggtggt

SEQ ID NO: 147601 - DNA, 22 bp, synthetic construct
  misc_feature 1..22: note = chemically synthesized
  source 1..22: mol_type = other DNA
ccctcagattactggtggtcta

SEQ ID NO: 147602 - DNA, 22 bp, synthetic construct
  misc_feature 1..22: note = chemically synthesized
  source 1..22: mol_type = other DNA
agattactggtggtctaccctt

SEQ ID NO: 147603 - DNA, 22 bp, synthetic construct
  misc_feature 1..22: note = chemically synthesized
  source 1..22: mol_type = other DNA
ctggtggtctacccttggaccc

SEQ ID NO: 147604 - DNA, 22 bp, synthetic construct
  misc_feature 1..22: note = chemically synthesized
  source 1..22: mol_type = other DNA
gtggtctacccttggacccaga

SEQ ID NO: 147605 - DNA, 22 bp, synthetic construct
  misc_feature 1..22: note = chemically synthesized
  source 1..22: mol_type = other DNA
cccttggacccagaggttcttt

SEQ ID NO: 147606 - DNA, 22 bp, synthetic construct
  misc_feature 1..22: note = chemically synthesized
  source 1..22: mol_type = other DNA
ggacccagaggttctttgagtc

SEQ ID NO: 147607 - DNA, 22 bp, synthetic construct
  misc_feature 1..22: note = chemically synthesized
  source 1..22: mol_type = other DNA
gacccagaggttctttgagtcc

SEQ ID NO: 147608 - DNA, 22 bp, synthetic construct
  misc_feature 1..22: note = chemically synthesized
  source 1..22: mol_type = other DNA
tttgagtcctttggggatctgt

SEQ ID NO: 147609 - DNA, 22 bp, synthetic construct
  misc_feature 1..22: note = chemically synthesized
  source 1..22: mol_type = other DNA
tgagtcctttggggatctgtcc

SEQ ID NO: 147610 - DNA, 22 bp, synthetic construct
  misc_feature 1..22: note = chemically synthesized
  source 1..22: mol_type = other DNA
gagtcctttggggatctgtcct

SEQ ID NO: 147611 - DNA, 22 bp, synthetic construct
  misc_feature 1..22: note = chemically synthesized
  source 1..22: mol_type = other DNA
agtcctttggggatctgtcctc

SEQ ID NO: 147612 - DNA, 22 bp, synthetic construct
  misc_feature 1..22: note = chemically synthesized
  source 1..22: mol_type = other DNA
tggggatctgtcctctcctgat

SEQ ID NO: 147613 - DNA, 22 bp, synthetic construct
  misc_feature 1..22: note = chemically synthesized
  source 1..22: mol_type = other DNA
ggggatctgtcctctcctgatg

SEQ ID NO: 147614 - DNA, 22 bp, synthetic construct
  misc_feature 1..22: note = chemically synthesized
  source 1..22: mol_type = other DNA
gggatctgtcctctcctgatgc

SEQ ID NO: 147615 - DNA, 22 bp, synthetic construct
  misc_feature 1..22: note = chemically synthesized
  source 1..22: mol_type = other DNA
tcctctcctgatgctgttatgg

SEQ ID NO: 147616 - DNA, 22 bp, synthetic construct
  misc_feature 1..22: note = chemically synthesized
  source 1..22: mol_type = other DNA
tcctgatgctgttatgggcaac

SEQ ID NO: 147617 - DNA, 22 bp, synthetic construct
  misc_feature 1..22: note = chemically synthesized
  source 1..22: mol_type = other DNA
ctgatgctgttatgggcaaccc

SEQ ID NO: 147618 - DNA, 22 bp, synthetic construct
  misc_feature 1..22: note = chemically synthesized
  source 1..22: mol_type = other DNA
atgctgttatgggcaaccctaa

SEQ ID NO: 147619 - DNA, 22 bp, synthetic construct
  misc_feature 1..22: note = chemically synthesized
  source 1..22: mol_type = other DNA
ttatgggcaaccctaaggtgaa

SEQ ID NO: 147620 - DNA, 22 bp, synthetic construct
  misc_feature 1..22: note = chemically synthesized
  source 1..22: mol_type = other DNA
tgggcaaccctaaggtgaaggc

SEQ ID NO: 147621 - DNA, 22 bp, synthetic construct
  misc_feature 1..22: note = chemically synthesized
  source 1..22: mol_type = other DNA
aggtgaaggctcatggcaagaa

SEQ ID NO: 147622 - DNA, 22 bp, synthetic construct
  misc_feature 1..22: note = chemically synthesized
  source 1..22: mol_type = other DNA
atggcaagaaggtgctaggtgc

SEQ ID NO: 147623 - DNA, 22 bp, synthetic construct
  misc_feature 1..22: note = chemically synthesized
  source 1..22: mol_type = other DNA
ggtgcctttagtgatggcctgg

SEQ ID NO: 147624 - DNA, 22 bp, synthetic construct
  misc_feature 1..22: note = chemically synthesized
  source 1..22: mol_type = other DNA
tagtgatggcctggctcacctg

SEQ ID NO: 147625 - DNA, 22 bp, synthetic construct
  misc_feature 1..22: note = chemically synthesized
  source 1..22: mol_type = other DNA
agtgatggcctggctcacctgg

SEQ ID NO: 147626 - DNA, 22 bp, synthetic construct
  misc_feature 1..22: note = chemically synthesized
  source 1..22: mol_type = other DNA
gtgatggcctggctcacctgga

SEQ ID NO: 147627 - DNA, 22 bp, synthetic construct
  misc_feature 1..22: note = chemically synthesized
  source 1..22: mol_type = other DNA
gctcacctggacaacctcaagg

SEQ ID NO: 147628 - DNA, 22 bp, synthetic construct
  misc_feature 1..22: note = chemically synthesized
  source 1..22: mol_type = other DNA
acctggacaacctcaagggcac

SEQ ID NO: 147629 - DNA, 22 bp, synthetic construct
  misc_feature 1..22: note = chemically synthesized
  source 1..22: mol_type = other DNA
gacaacctcaagggcacttttt

SEQ ID NO: 147630 - DNA, 22 bp, synthetic construct
  misc_feature 1..22: note = chemically synthesized
  source 1..22: mol_type = other DNA
aagggcactttttctcagctga

SEQ ID NO: 147631 - DNA, 22 bp, synthetic construct
  misc_feature 1..22: note = chemically synthesized
  source 1..22: mol_type = other DNA
tttctcagctgagtgagctgca

SEQ ID NO: 147632 - DNA, 22 bp, synthetic construct
  misc_feature 1..22: note = chemically synthesized
  source 1..22: mol_type = other DNA
ttctcagctgagtgagctgcac

SEQ ID NO: 147633 - DNA, 22 bp, synthetic construct
  misc_feature 1..22: note = chemically synthesized
  source 1..22: mol_type = other DNA
tctcagctgagtgagctgcact

SEQ ID NO: 147634 - DNA, 22 bp, synthetic construct
  misc_feature 1..22: note = chemically synthesized
  source 1..22: mol_type = other DNA
ctcagctgagtgagctgcactg

SEQ ID NO: 147635 - DNA, 22 bp, synthetic construct
  misc_feature 1..22: note = chemically synthesized
  source 1..22: mol_type = other DNA
tcagctgagtgagctgcactgt

SEQ ID NO: 147636 - DNA, 22 bp, synthetic construct
  misc_feature 1..22: note = chemically synthesized
  source 1..22: mol_type = other DNA
agctgagtgagctgcactgtga

SEQ ID NO: 147637 - DNA, 22 bp, synthetic construct
  misc_feature 1..22: note = chemically synthesized
  source 1..22: mol_type = other DNA
agtgagctgcactgtgacaagc

SEQ ID NO: 147638 - DNA, 22 bp, synthetic construct
  misc_feature 1..22: note = chemically synthesized
  source 1..22: mol_type = other DNA
cactgtgacaagctgcacgtgg

SEQ ID NO: 147639 - DNA, 22 bp, synthetic construct
  misc_feature 1..22: note = chemically synthesized
  source 1..22: mol_type = other DNA
tgacaagctgcacgtggatcct

SEQ ID NO: 147640 - DNA, 22 bp, synthetic construct
  misc_feature 1..22: note = chemically synthesized
  source 1..22: mol_type = other DNA
cacgtggatcctgagaacttca

SEQ ID NO: 147641 - DNA, 22 bp, synthetic construct
  misc_feature 1..22: note = chemically synthesized
  source 1..22: mol_type = other DNA
agaacttcagggtgagtccagg

SEQ ID NO: 147642 - DNA, 22 bp, synthetic construct
  misc_feature 1..22: note = chemically synthesized
  source 1..22: mol_type = other DNA
cagggtgagtccaggagatgct

SEQ ID NO: 147643 - DNA, 22 bp, synthetic construct
  misc_feature 1..22: note = chemically synthesized
  source 1..22: mol_type = other DNA
agggtgagtccaggagatgctt

SEQ ID NO: 147644 - DNA, 22 bp, synthetic construct
  misc_feature 1..22: note = chemically synthesized
  source 1..22: mol_type = other DNA
cacttttctctttttactttct

SEQ ID NO: 147645 - DNA, 22 bp, synthetic construct
  misc_feature 1..22: note = chemically synthesized
  source 1..22: mol_type = other DNA
acttttctctttttactttcta

SEQ ID NO: 147646 - DNA, 22 bp, synthetic construct
  misc_feature 1..22: note = chemically synthesized
  source 1..22: mol_type = other DNA
ttctctttttactttctaatct

SEQ ID NO: 147647 - DNA, 22 bp, synthetic construct
  misc_feature 1..22: note = chemically synthesized
  source 1..22: mol_type = other DNA
tctctttttactttctaatctt

SEQ ID NO: 147648 - DNA, 22 bp, synthetic construct
  misc_feature 1..22: note = chemically synthesized
  source 1..22: mol_type = other DNA
ctctttttactttctaatctta

SEQ ID NO: 147649 - DNA, 22 bp, synthetic construct
  misc_feature 1..22: note = chemically synthesized
  source 1..22: mol_type = other DNA
tctttttactttctaatcttac

SEQ ID NO: 147650 - DNA, 22 bp, synthetic construct
  misc_feature 1..22: note = chemically synthesized
  source 1..22: mol_type = other DNA
tttttactttctaatcttacat

SEQ ID NO: 147651 - DNA, 22 bp, synthetic construct
  misc_feature 1..22: note = chemically synthesized
  source 1..22: mol_type = other DNA
tttactttctaatcttacattt

SEQ ID NO: 147652 - DNA, 22 bp, synthetic construct
  misc_feature 1..22: note = chemically synthesized
  source 1..22: mol_type = other DNA
ttactttctaatcttacatttt

SEQ ID NO: 147653 - DNA, 22 bp, synthetic construct
  misc_feature 1..22: note = chemically synthesized
  source 1..22: mol_type = other DNA
tactttctaatcttacattttg

SEQ ID NO: 147654 - DNA, 22 bp, synthetic construct
  misc_feature 1..22: note = chemically synthesized
  source 1..22: mol_type = other DNA
actttctaatcttacattttgg

SEQ ID NO: 147655 - DNA, 22 bp, synthetic construct
  misc_feature 1..22: note = chemically synthesized
  source 1..22: mol_type = other DNA
ctttctaatcttacattttggt

SEQ ID NO: 147656 - DNA, 22 bp, synthetic construct
  misc_feature 1..22: note = chemically synthesized
  source 1..22: mol_type = other DNA
tctaatcttacattttggttct

SEQ ID NO: 147657 - DNA, 22 bp, synthetic construct
  misc_feature 1..22: note = chemically synthesized
  source 1..22: mol_type = other DNA
ctaatcttacattttggttctt

SEQ ID NO: 147658 - DNA, 22 bp, synthetic construct
  misc_feature 1..22: note = chemically synthesized
  source 1..22: mol_type = other DNA
taatcttacattttggttcttt

SEQ ID NO: 147659 - DNA, 22 bp, synthetic construct
  misc_feature 1..22: note = chemically synthesized
  source 1..22: mol_type = other DNA
atcttacattttggttctttta

SEQ ID NO: 147660 - DNA, 22 bp, synthetic construct
  misc_feature 1..22: note = chemically synthesized
  source 1..22: mol_type = other DNA
acattttggttcttttacctac

SEQ ID NO: 147661 - DNA, 22 bp, synthetic construct
  misc_feature 1..22: note = chemically synthesized
  source 1..22: mol_type = other DNA
cattttggttcttttacctacc

SEQ ID NO: 147662 - DNA, 22 bp, synthetic construct
  misc_feature 1..22: note = chemically synthesized
  source 1..22: mol_type = other DNA
tggttcttttacctacctgctc

SEQ ID NO: 147663 - DNA, 22 bp, synthetic construct
  misc_feature 1..22: note = chemically synthesized
  source 1..22: mol_type = other DNA
ggttcttttacctacctgctct

SEQ ID NO: 147664 - DNA, 22 bp, synthetic construct
  misc_feature 1..22: note = chemically synthesized
  source 1..22: mol_type = other DNA
gttcttttacctacctgctctt

SEQ ID NO: 147665 - DNA, 22 bp, synthetic construct
  misc_feature 1..22: note = chemically synthesized
  source 1..22: mol_type = other DNA
ttttacctacctgctcttctcc

SEQ ID NO: 147666 - DNA, 22 bp, synthetic construct
  misc_feature 1..22: note = chemically synthesized
  source 1..22: mol_type = other DNA
ttacctacctgctcttctccca

SEQ ID NO: 147667 - DNA, 22 bp, synthetic construct
  misc_feature 1..22: note = chemically synthesized
  source 1..22: mol_type = other DNA
tacctacctgctcttctcccac

SEQ ID NO: 147668 - DNA, 22 bp, synthetic construct
  misc_feature 1..22: note = chemically synthesized
  source 1..22: mol_type = other DNA
acctacctgctcttctcccaca

SEQ ID NO: 147669 - DNA, 22 bp, synthetic construct
  misc_feature 1..22: note = chemically synthesized
  source 1..22: mol_type = other DNA
cctacctgctcttctcccacat

SEQ ID NO: 147670 - DNA, 22 bp, synthetic construct
  misc_feature 1..22: note = chemically synthesized
  source 1..22: mol_type = other DNA
cctgctcttctcccacattttt

SEQ ID NO: 147671 - DNA, 22 bp, synthetic construct
  misc_feature 1..22: note = chemically synthesized
  source 1..22: mol_type = other DNA
ctcttctcccacatttttgtca

SEQ ID NO: 147672 - DNA, 22 bp, synthetic construct
  misc_feature 1..22: note = chemically synthesized
  source 1..22: mol_type = other DNA
ttctcccacatttttgtcattt

SEQ ID NO: 147673 - DNA, 22 bp, synthetic construct
  misc_feature 1..22: note = chemically synthesized
  source 1..22: mol_type = other DNA
ctcccacatttttgtcatttta

SEQ ID NO: 147674 - DNA, 22 bp, synthetic construct
  misc_feature 1..22: note = chemically synthesized
  source 1..22: mol_type = other DNA
tcccacatttttgtcattttac

SEQ ID NO: 147675 - DNA, 22 bp, synthetic construct
  misc_feature 1..22: note = chemically synthesized
  source 1..22: mol_type = other DNA
ccacatttttgtcattttacta

SEQ ID NO: 147676 - DNA, 22 bp, synthetic construct
  misc_feature 1..22: note = chemically synthesized
  source 1..22: mol_type = other DNA
ttgtcattttactatattttat

SEQ ID NO: 147677 - DNA, 22 bp, synthetic construct
  misc_feature 1..22: note = chemically synthesized
  source 1..22: mol_type = other DNA
tgtcattttactatattttatc

SEQ ID NO: 147678 - DNA, 22 bp, synthetic construct
  misc_feature 1..22: note = chemically synthesized
  source 1..22: mol_type = other DNA
gtcattttactatattttatca

SEQ ID NO: 147679 - DNA, 22 bp, synthetic construct
  misc_feature 1..22: note = chemically synthesized
  source 1..22: mol_type = other DNA
tcattttactatattttatcat

SEQ ID NO: 147680 - DNA, 22 bp, synthetic construct
  misc_feature 1..22: note = chemically synthesized
  source 1..22: mol_type = other DNA
tactatattttatcatttaatg

SEQ ID NO: 147681 - DNA, 22 bp, synthetic construct
  misc_feature 1..22: note = chemically synthesized
  source 1..22: mol_type = other DNA
actatattttatcatttaatgc

SEQ ID NO: 147682 - DNA, 22 bp, synthetic construct
  misc_feature 1..22: note = chemically synthesized
  source 1..22: mol_type = other DNA
ctatattttatcatttaatgct

SEQ ID NO: 147683 - DNA, 22 bp, synthetic construct
  misc_feature 1..22: note = chemically synthesized
  source 1..22: mol_type = other DNA
tattttatcatttaatgcttct

SEQ ID NO: 147684 - DNA, 22 bp, synthetic construct
  misc_feature 1..22: note = chemically synthesized
  source 1..22: mol_type = other DNA
tatcatttaatgcttctaaaat

SEQ ID NO: 147685 - DNA, 22 bp, synthetic construct
  misc_feature 1..22: note = chemically synthesized
  source 1..22: mol_type = other DNA
atcatttaatgcttctaaaatt

SEQ ID NO: 147686 - DNA, 22 bp, synthetic construct
  misc_feature 1..22: note = chemically synthesized
  source 1..22: mol_type = other DNA
tcatttaatgcttctaaaattt

SEQ ID NO: 147687 - DNA, 22 bp, synthetic construct
  misc_feature 1..22: note = chemically synthesized
  source 1..22: mol_type = other DNA
aatgcttctaaaattttgttaa

SEQ ID NO: 147688 - DNA, 22 bp, synthetic construct
  misc_feature 1..22: note = chemically synthesized
  source 1..22: mol_type = other DNA
atgcttctaaaattttgttaat

SEQ ID NO: 147689 - DNA, 22 bp, synthetic construct
  misc_feature 1..22: note = chemically synthesized
  source 1..22: mol_type = other DNA
ctaaaattttgttaatttttta

SEQ ID NO: 147690 - DNA, 22 bp, synthetic construct
  misc_feature 1..22: note = chemically synthesized
  source 1..22: mol_type = other DNA
taaaattttgttaattttttat

SEQ ID NO: 147691 - DNA, 22 bp, synthetic construct
  misc_feature 1..22: note = chemically synthesized
  source 1..22: mol_type = other DNA
aaattttgttaattttttattt

SEQ ID NO: 147692 - DNA, 22 bp, synthetic construct
  misc_feature 1..22: note = chemically synthesized
  source 1..22: mol_type = other DNA
tgttaattttttatttaaatat

SEQ ID NO: 147693 - DNA, 22 bp, synthetic construct
  misc_feature 1..22: note = chemically synthesized
  source 1..22: mol_type = other DNA
gttaattttttatttaaatatt

SEQ ID NO: 147694 - DNA, 22 bp, synthetic construct
  misc_feature 1..22: note = chemically synthesized
  source 1..22: mol_type = other DNA
ttaattttttatttaaatattc

SEQ ID NO: 147695 - DNA, 22 bp, synthetic construct
  misc_feature 1..22: note = chemically synthesized
  source 1..22: mol_type = other DNA
attttttatttaaatattctgc

SEQ ID NO: 147696 - DNA, 22 bp, synthetic construct
  misc_feature 1..22: note = chemically synthesized
  source 1..22: mol_type = other DNA
tttatttaaatattctgcattt

SEQ ID NO: 147697 - DNA, 22 bp, synthetic construct
  misc_feature 1..22: note = chemically synthesized
  source 1..22: mol_type = other DNA
ttatttaaatattctgcatttt

SEQ ID NO: 147698 - DNA, 22 bp, synthetic construct
  misc_feature 1..22: note = chemically synthesized
  source 1..22: mol_type = other DNA
tatttaaatattctgcattttt

SEQ ID NO: 147699 - DNA, 22 bp, synthetic construct
  misc_feature 1..22: note = chemically synthesized
  source 1..22: mol_type = other DNA
atttaaatattctgcatttttt

SEQ ID NO: 147700 - DNA, 22 bp, synthetic construct
  misc_feature 1..22: note = chemically synthesized
  source 1..22: mol_type = other DNA
tttaaatattctgcattttttc

SEQ ID NO: 147701 - DNA, 22 bp, synthetic construct
  misc_feature 1..22: note = chemically synthesized
  source 1..22: mol_type = other DNA
aaatattctgcattttttcctt

SEQ ID NO: 147702 - DNA, 22 bp, synthetic construct
  misc_feature 1..22: note = chemically synthesized
  source 1..22: mol_type = other DNA
aatattctgcattttttccttc

SEQ ID NO: 147703 - DNA, 22 bp, synthetic construct
  misc_feature 1..22: note = chemically synthesized
  source 1..22: mol_type = other DNA
tgcattttttccttcctcacaa

SEQ ID NO: 147704 - DNA, 22 bp, synthetic construct
  misc_feature 1..22: note = chemically synthesized
  source 1..22: mol_type = other DNA
cattttttccttcctcacaatc

SEQ ID NO: 147705 - DNA, 22 bp, synthetic construct
  misc_feature 1..22: note = chemically synthesized
  source 1..22: mol_type = other DNA
tttccttcctcacaatcttgct

SEQ ID NO: 147706 - DNA, 22 bp, synthetic construct
  misc_feature 1..22: note = chemically synthesized
  source 1..22: mol_type = other DNA
ttccttcctcacaatcttgcta

SEQ ID NO: 147707 - DNA, 22 bp, synthetic construct
  misc_feature 1..22: note = chemically synthesized
  source 1..22: mol_type = other DNA
tccttcctcacaatcttgctat

SEQ ID NO: 147708 - DNA, 22 bp, synthetic construct
  misc_feature 1..22: note = chemically synthesized
  source 1..22: mol_type = other DNA
ccttcctcacaatcttgctatt

SEQ ID NO: 147709 - DNA, 22 bp, synthetic construct
  misc_feature 1..22: note = chemically synthesized
  source 1..22: mol_type = other DNA
cttcctcacaatcttgctattt

SEQ ID NO: 147710 - DNA, 22 bp, synthetic construct
  misc_feature 1..22: note = chemically synthesized
  source 1..22: mol_type = other DNA
cctcacaatcttgctattttaa

SEQ ID NO: 147711 - DNA, 22 bp, synthetic construct
  misc_feature 1..22: note = chemically synthesized
  source 1..22: mol_type = other DNA
ctcacaatcttgctattttaaa

SEQ ID NO: 147712 - DNA, 22 bp, synthetic construct
  misc_feature 1..22: note = chemically synthesized
  source 1..22: mol_type = other DNA
acaatcttgctattttaaatta

SEQ ID NO: 147713 - DNA, 22 bp, synthetic construct
  misc_feature 1..22: note = chemically synthesized
  source 1..22: mol_type = other DNA
gctattttaaattatttaatat

SEQ ID NO: 147714 - DNA, 22 bp, synthetic construct
  misc_feature 1..22: note = chemically synthesized
  source 1..22: mol_type = other DNA
ctattttaaattatttaatatc

SEQ ID NO: 147715 - DNA, 22 bp, synthetic construct
  misc_feature 1..22: note = chemically synthesized
  source 1..22: mol_type = other DNA
ttttaaattatttaatatcctg

SEQ ID NO: 147716 - DNA, 22 bp, synthetic construct
  misc_feature 1..22: note = chemically synthesized
  source 1..22: mol_type = other DNA
taaattatttaatatcctgtct

SEQ ID NO: 147717 - DNA, 22 bp, synthetic construct
  misc_feature 1..22: note = chemically synthesized
  source 1..22: mol_type = other DNA
aaattatttaatatcctgtctt

SEQ ID NO: 147718 - DNA, 22 bp, synthetic construct
  misc_feature 1..22: note = chemically synthesized
  source 1..22: mol_type = other DNA
aattatttaatatcctgtcttt

SEQ ID NO: 147719 - DNA, 22 bp, synthetic construct
  misc_feature 1..22: note = chemically synthesized
  source 1..22: mol_type = other DNA
tttaatatcctgtctttctctc

SEQ ID NO: 147720 - DNA, 22 bp, synthetic construct
  misc_feature 1..22: note = chemically synthesized
  source 1..22: mol_type = other DNA
aatatcctgtctttctctccca

SEQ ID NO: 147721 - DNA, 22 bp, synthetic construct
  misc_feature 1..22: note = chemically synthesized
  source 1..22: mol_type = other DNA
atatcctgtctttctctcccaa

SEQ ID NO: 147722 - DNA, 22 bp, synthetic construct
  misc_feature 1..22: note = chemically synthesized
  source 1..22: mol_type = other DNA
tctttctctcccaaccccctcc

SEQ ID NO: 147723 - DNA, 22 bp, synthetic construct
  misc_feature 1..22: note = chemically synthesized
  source 1..22: mol_type = other DNA
tctctcccaaccccctcccttc

SEQ ID NO: 147724 - DNA, 22 bp, synthetic construct
  misc_feature 1..22: note = chemically synthesized
  source 1..22: mol_type = other DNA
ctctcccaaccccctcccttca

SEQ ID NO: 147725 - DNA, 22 bp, synthetic construct
  misc_feature 1..22: note = chemically synthesized
  source 1..22: mol_type = other DNA
tctcccaaccccctcccttcat

SEQ ID NO: 147726 - DNA, 22 bp, synthetic construct
  misc_feature 1..22: note = chemically synthesized
  source 1..22: mol_type = other DNA
tcccaaccccctcccttcattt

SEQ ID NO: 147727 - DNA, 22 bp, synthetic construct
  misc_feature 1..22: note = chemically synthesized
  source 1..22: mol_type = other DNA
ccaaccccctcccttcattttt

SEQ ID NO: 147728 - DNA, 22 bp, synthetic construct
  misc_feature 1..22: note = chemically synthesized
  source 1..22: mol_type = other DNA
ccttcatttttccttctctaac

SEQ ID NO: 147729 - DNA, 22 bp, synthetic construct
  misc_feature 1..22: note = chemically synthesized
  source 1..22: mol_type = other DNA
catttttccttctctaacaaca

SEQ ID NO: 147730 - DNA, 22 bp, synthetic construct
  misc_feature 1..22: note = chemically synthesized
  source 1..22: mol_type = other DNA
atttttccttctctaacaacaa

SEQ ID NO: 147731 - DNA, 22 bp, synthetic construct
  misc_feature 1..22: note = chemically synthesized
  source 1..22: mol_type = other DNA
ttccttctctaacaacaactca

SEQ ID NO: 147732 - DNA, 22 bp, synthetic construct
  misc_feature 1..22: note = chemically synthesized
  source 1..22: mol_type = other DNA
tccttctctaacaacaactcaa

SEQ ID NO: 147733 - DNA, 22 bp, synthetic construct
  misc_feature 1..22: note = chemically synthesized
  source 1..22: mol_type = other DNA
ccttctctaacaacaactcaaa

SEQ ID NO: 147734 - DNA, 22 bp, synthetic construct
  misc_feature 1..22: note = chemically synthesized
  source 1..22: mol_type = other DNA
cttctctaacaacaactcaaat

SEQ ID NO: 147735 - DNA, 22 bp, synthetic construct
  misc_feature 1..22: note = chemically synthesized
  source 1..22: mol_type = other DNA
ctctaacaacaactcaaattat

SEQ ID NO: 147736 - DNA, 22 bp, synthetic construct
  misc_feature 1..22: note = chemically synthesized
  source 1..22: mol_type = other DNA
tctaacaacaactcaaattatg

SEQ ID NO: 147737 - DNA, 22 bp, synthetic construct
  misc_feature 1..22: note = chemically synthesized
  source 1..22: mol_type = other DNA
taacaacaactcaaattatgca

SEQ ID NO: 147738 - DNA, 22 bp, synthetic construct
  misc_feature 1..22: note = chemically synthesized
  source 1..22: mol_type = other DNA
acaacaactcaaattatgcata

SEQ ID NO: 147739 - DNA, 22 bp, synthetic construct
  misc_feature 1..22: note = chemically synthesized
  source 1..22: mol_type = other DNA
aaattatgcataccagctctca

SEQ ID NO: 147740 - DNA, 22 bp, synthetic construct
  misc_feature 1..22: note = chemically synthesized
  source 1..22: mol_type = other DNA
tgcataccagctctcacctgct

SEQ ID NO: 147741 - DNA, 22 bp, synthetic construct
  misc_feature 1..22: note = chemically synthesized
  source 1..22: mol_type = other DNA
tcacctgctaattctgcactta

SEQ ID NO: 147742 - DNA, 22 bp, synthetic construct
  misc_feature 1..22: note = chemically synthesized
  source 1..22: mol_type = other DNA
acctgctaattctgcacttaga

SEQ ID NO: 147743 - DNA, 22 bp, synthetic construct
  misc_feature 1..22: note = chemically synthesized
  source 1..22: mol_type = other DNA
ctaattctgcacttagaataat

SEQ ID NO: 147744 - DNA, 22 bp, synthetic construct
  misc_feature 1..22: note = chemically synthesized
  source 1..22: mol_type = other DNA
attctgcacttagaataatcct

SEQ ID NO: 147745 - DNA, 22 bp, synthetic construct
  misc_feature 1..22: note = chemically synthesized
  source 1..22: mol_type = other DNA
tgcacttagaataatccttttg

SEQ ID NO: 147746 - DNA, 22 bp, synthetic construct
  misc_feature 1..22: note = chemically synthesized
  source 1..22: mol_type = other DNA
cacttagaataatccttttgtc

SEQ ID NO: 147747 - DNA, 22 bp, synthetic construct
  misc_feature 1..22: note = chemically synthesized
  source 1..22: mol_type = other DNA
agaataatccttttgtctctcc

SEQ ID NO: 147748 - DNA, 22 bp, synthetic construct
  misc_feature 1..22: note = chemically synthesized
  source 1..22: mol_type = other DNA
gaataatccttttgtctctcca

SEQ ID NO: 147749 - DNA, 22 bp, synthetic construct
  misc_feature 1..22: note = chemically synthesized
  source 1..22: mol_type = other DNA
ttgtctctccacatgggtatgg

SEQ ID NO: 147750 - DNA, 22 bp, synthetic construct
  misc_feature 1..22: note = chemically synthesized
  source 1..22: mol_type = other DNA
tgtctctccacatgggtatggg

SEQ ID NO: 147751 - DNA, 22 bp, synthetic construct
  misc_feature 1..22: note = chemically synthesized
  source 1..22: mol_type = other DNA
gtctctccacatgggtatggga

SEQ ID NO: 147752 - DNA, 22 bp, synthetic construct
  misc_feature 1..22: note = chemically synthesized
  source 1..22: mol_type = other DNA
tctctccacatgggtatgggag

SEQ ID NO: 147753 - DNA, 22 bp, synthetic construct
  misc_feature 1..22: note = chemically synthesized
  source 1..22: mol_type = other DNA
tccacatgggtatgggagaggc

SEQ ID NO: 147754 - DNA, 22 bp, synthetic construct
  misc_feature 1..22: note = chemically synthesized
  source 1..22: mol_type = other DNA
cacatgggtatgggagaggctc

SEQ ID NO: 147755 - DNA, 22 bp, synthetic construct
  misc_feature 1..22: note = chemically synthesized
  source 1..22: mol_type = other DNA
caactcaaagatgagaggcata

SEQ ID NO: 147756 - DNA, 22 bp, synthetic construct
  misc_feature 1..22: note = chemically synthesized
  source 1..22: mol_type = other DNA
aaagatgagaggcatagaatac

SEQ ID NO: 147757 - DNA, 22 bp, synthetic construct
  misc_feature 1..22: note = chemically synthesized
  source 1..22: mol_type = other DNA
ttttagaggctataaatcattt

SEQ ID NO: 147758 - DNA, 22 bp, synthetic construct
  misc_feature 1..22: note = chemically synthesized
  source 1..22: mol_type = other DNA
tagaggctataaatcattttac

SEQ ID NO: 147759 - DNA, 22 bp, synthetic construct
  misc_feature 1..22: note = chemically synthesized
  source 1..22: mol_type = other DNA
agaggctataaatcattttaca

SEQ ID NO: 147760 - DNA, 22 bp, synthetic construct
  misc_feature 1..22: note = chemically synthesized
  source 1..22: mol_type = other DNA
gaggctataaatcattttacaa

SEQ ID NO: 147761 - DNA, 22 bp, synthetic construct
  misc_feature 1..22: note = chemically synthesized
  source 1..22: mol_type = other DNA
taaatcattttacaataaggaa

SEQ ID NO: 147762 - DNA, 22 bp, synthetic construct
  misc_feature 1..22: note = chemically synthesized
  source 1..22: mol_type = other DNA
tacaataaggaataattggaat

SEQ ID NO: 147763 - DNA, 22 bp, synthetic construct
  misc_feature 1..22: note = chemically synthesized
  source 1..22: mol_type = other DNA
acaataaggaataattggaatt

SEQ ID NO: 147764 - DNA, 22 bp, synthetic construct
  misc_feature 1..22: note = chemically synthesized
  source 1..22: mol_type = other DNA
caataaggaataattggaattt

SEQ ID NO: 147765 - DNA, 22 bp, synthetic construct
  misc_feature 1..22: note = chemically synthesized
  source 1..22: mol_type = other DNA
gaattttataaattctgtagta

SEQ ID NO: 147766 - DNA, 22 bp, synthetic construct
  misc_feature 1..22: note = chemically synthesized
  source 1..22: mol_type = other DNA
tataaattctgtagtaaatgga

SEQ ID NO: 147767 - DNA, 22 bp, synthetic construct
  misc_feature 1..22: note = chemically synthesized
  source 1..22: mol_type = other DNA
ataaattctgtagtaaatggaa

SEQ ID NO: 147768 - DNA, 22 bp, synthetic construct
  misc_feature 1..22: note = chemically synthesized
  source 1..22: mol_type = other DNA
taaattctgtagtaaatggaat

SEQ ID NO: 147769 - DNA, 22 bp, synthetic construct
  misc_feature 1..22: note = chemically synthesized
  source 1..22: mol_type = other DNA
tgtagtaaatggaatggaaagg

SEQ ID NO: 147770 - DNA, 22 bp, synthetic construct
  misc_feature 1..22: note = chemically synthesized
  source 1..22: mol_type = other DNA
tagtaaatggaatggaaaggaa

SEQ ID NO: 147771 - DNA, 22 bp, synthetic construct
  misc_feature 1..22: note = chemically synthesized
  source 1..22: mol_type = other DNA
gattatgaaagactaggcagtt

SEQ ID NO: 147772 - DNA, 22 bp, synthetic construct
  misc_feature 1..22: note = chemically synthesized
  source 1..22: mol_type = other DNA
attatgaaagactaggcagtta

SEQ ID NO: 147773 - DNA, 22 bp, synthetic construct
  misc_feature 1..22: note = chemically synthesized
  source 1..22: mol_type = other DNA
tgaaagactaggcagttacact

SEQ ID NO: 147774 - DNA, 22 bp, synthetic construct
  misc_feature 1..22: note = chemically synthesized
  source 1..22: mol_type = other DNA
ggcagttacactggaggtgggg

SEQ ID NO: 147775 - DNA, 22 bp, synthetic construct
  misc_feature 1..22: note = chemically synthesized
  source 1..22: mol_type = other DNA
cactggaggtggggcagaagtc

SEQ ID NO: 147776 - DNA, 22 bp, synthetic construct
  misc_feature 1..22: note = chemically synthesized
  source 1..22: mol_type = other DNA
gaggtggggcagaagtcgttgc

SEQ ID NO: 147777 - DNA, 22 bp, synthetic construct
  misc_feature 1..22: note = chemically synthesized
  source 1..22: mol_type = other DNA
ctaggagacagcccatcatcac

SEQ ID NO: 147778 - DNA, 22 bp, synthetic construct
  misc_feature 1..22: note = chemically synthesized
  source 1..22: mol_type = other DNA
ggagacagcccatcatcacact

SEQ ID NO: 147779 - DNA, 22 bp, synthetic construct
  misc_feature 1..22: note = chemically synthesized
  source 1..22: mol_type = other DNA
attaatcaattaatttgtatct

SEQ ID NO: 147780 - DNA, 22 bp, synthetic construct
  misc_feature 1..22: note = chemically synthesized
  source 1..22: mol_type = other DNA
atcaattaatttgtatctatta

SEQ ID NO: 147781 - DNA, 22 bp, synthetic construct
  misc_feature 1..22: note = chemically synthesized
  source 1..22: mol_type = other DNA
atttgtatctattaatctgttt

SEQ ID NO: 147782 - DNA, 22 bp, synthetic construct
  misc_feature 1..22: note = chemically synthesized
  source 1..22: mol_type = other DNA
gtatctattaatctgtttatag

SEQ ID NO: 147783 - DNA, 22 bp, synthetic construct
  misc_feature 1..22: note = chemically synthesized
  source 1..22: mol_type = other DNA
tatctattaatctgtttatagt

SEQ ID NO: 147784 - DNA, 22 bp, synthetic construct
  misc_feature 1..22: note = chemically synthesized
  source 1..22: mol_type = other DNA
ttaatctgtttatagtaattaa

SEQ ID NO: 147785 - DNA, 22 bp, synthetic construct
  misc_feature 1..22: note = chemically synthesized
  source 1..22: mol_type = other DNA
atctgtttatagtaattaattt

SEQ ID NO: 147786 - DNA, 22 bp, synthetic construct
  misc_feature 1..22: note = chemically synthesized
  source 1..22: mol_type = other DNA
tttatagtaattaatttgtata

SEQ ID NO: 147787 - DNA, 22 bp, synthetic construct
  misc_feature 1..22: note = chemically synthesized
  source 1..22: mol_type = other DNA
atagtaattaatttgtatatgc

SEQ ID NO: 147788 - DNA, 22 bp, synthetic construct
  misc_feature 1..22: note = chemically synthesized
  source 1..22: mol_type = other DNA
tagtaattaatttgtatatgct

SEQ ID NO: 147789 - DNA, 22 bp, synthetic construct
  misc_feature 1..22: note = chemically synthesized
  source 1..22: mol_type = other DNA
atttgtatatgctatatacaca

SEQ ID NO: 147790 - DNA, 22 bp, synthetic construct
  misc_feature 1..22: note = chemically synthesized
  source 1..22: mol_type = other DNA
gtatatgctatatacacataca

SEQ ID NO: 147791 - DNA, 22 bp, synthetic construct
  misc_feature 1..22: note = chemically synthesized
  source 1..22: mol_type = other DNA
tatatgctatatacacatacaa

SEQ ID NO: 147792 - DNA, 22 bp, synthetic construct
  misc_feature 1..22: note = chemically synthesized
  source 1..22: mol_type = other DNA
tatacacatacaaaattaaaac

SEQ ID NO: 147793 - DNA, 22 bp, synthetic construct
  misc_feature 1..22: note = chemically synthesized
  source 1..22: mol_type = other DNA
aaactaatttggaattaatttg

SEQ ID NO: 147794 - DNA, 22 bp, synthetic construct
  misc_feature 1..22: note = chemically synthesized
  source 1..22: mol_type = other DNA
atttggaattaatttgtatata

SEQ ID NO: 147795 - DNA, 22 bp, synthetic construct
  misc_feature 1..22: note = chemically synthesized
  source 1..22: mol_type = other DNA
ggaattaatttgtatatagtat

SEQ ID NO: 147796 - DNA, 22 bp, synthetic construct
  misc_feature 1..22: note = chemically synthesized
  source 1..22: mol_type = other DNA
gaattaatttgtatatagtatt

SEQ ID NO: 147797 - DNA, 22 bp, synthetic construct
  misc_feature 1..22: note = chemically synthesized
  source 1..22: mol_type = other DNA
atttgtatatagtattatacag

SEQ ID NO: 147798 - DNA, 22 bp, synthetic construct
  misc_feature 1..22: note = chemically synthesized
  source 1..22: mol_type = other DNA
gtatatagtattatacagcata

SEQ ID NO: 147799 - DNA, 22 bp, synthetic construct
  misc_feature 1..22: note = chemically synthesized
  source 1..22: mol_type = other DNA
tatatagtattatacagcatat

SEQ ID NO: 147800 - DNA, 22 bp, synthetic construct
  misc_feature 1..22: note = chemically synthesized
  source 1..22: mol_type = other DNA
tacagcatatatagcatatatg

SEQ ID NO: 147801 - DNA, 22 bp, synthetic construct
  misc_feature 1..22: note = chemically synthesized
  source 1..22: mol_type = other DNA
catgctagttaagtacatagag

SEQ ID NO: 147802 - DNA, 22 bp, synthetic construct
  misc_feature 1..22: note = chemically synthesized
  source 1..22: mol_type = other DNA
gttaagtacatagaggatgtgt

SEQ ID NO: 147803 - DNA, 22 bp, synthetic construct
  misc_feature 1..22: note = chemically synthesized
  source 1..22: mol_type = other DNA
agtacatagaggatgtgtgtgt

SEQ ID NO: 147804 - DNA, 22 bp, synthetic construct
  misc_feature 1..22: note = chemically synthesized
  source 1..22: mol_type = other DNA
tatgtatgcattcatatatgta

SEQ ID NO: 147805 - DNA, 22 bp, synthetic construct
  misc_feature 1..22: note = chemically synthesized
  source 1..22: mol_type = other DNA
atatatgtacttatttatgctg

SEQ ID NO: 147806 - DNA, 22 bp, synthetic construct
  misc_feature 1..22: note = chemically synthesized
  source 1..22: mol_type = other DNA
atttatgctgatgggaataacc

SEQ ID NO: 147807 - DNA, 22 bp, synthetic construct
  misc_feature 1..22: note = chemically synthesized
  source 1..22: mol_type = other DNA
tttatgctgatgggaataacct

SEQ ID NO: 147808 - DNA, 22 bp, synthetic construct
  misc_feature 1..22: note = chemically synthesized
  source 1..22: mol_type = other DNA
atgctgatgggaataacctggg

SEQ ID NO: 147809 - DNA, 22 bp, synthetic construct
  misc_feature 1..22: note = chemically synthesized
  source 1..22: mol_type = other DNA
tgctgatgggaataacctgggg

SEQ ID NO: 147810 - DNA, 22 bp, synthetic construct
  misc_feature 1..22: note = chemically synthesized
  source 1..22: mol_type = other DNA
atgggaataacctggggatcag

SEQ ID NO: 147811 - DNA, 22 bp, synthetic construct
  misc_feature 1..22: note = chemically synthesized
  source 1..22: mol_type = other DNA
gggatcagttttgtctaagatt

SEQ ID NO: 147812 - DNA, 22 bp, synthetic construct
  misc_feature 1..22: note = chemically synthesized
  source 1..22: mol_type = other DNA
tgtctaagatttgggcagaaaa

SEQ ID NO: 147813 - DNA, 22 bp, synthetic construct
  misc_feature 1..22: note = chemically synthesized
  source 1..22: mol_type = other DNA
gtctaagatttgggcagaaaaa

SEQ ID NO: 147814 - DNA, 22 bp, synthetic construct
  misc_feature 1..22: note = chemically synthesized
  source 1..22: mol_type = other DNA
tctaagatttgggcagaaaaaa

SEQ ID NO: 147815 - DNA, 22 bp, synthetic construct
  misc_feature 1..22: note = chemically synthesized
  source 1..22: mol_type = other DNA
agatttgggcagaaaaaaatgg

SEQ ID NO: 147816 - DNA, 22 bp, synthetic construct
  misc_feature 1..22: note = chemically synthesized
  source 1..22: mol_type = other DNA
gggcagaaaaaaatgggtgttg

SEQ ID NO: 147817 - DNA, 22 bp, synthetic construct
  misc_feature 1..22: note = chemically synthesized
  source 1..22: mol_type = other DNA
ggcagaaaaaaatgggtgttgg

SEQ ID NO: 147818 - DNA, 22 bp, synthetic construct
  misc_feature 1..22: note = chemically synthesized
  source 1..22: mol_type = other DNA
gctcagtttctcagaagccagt

SEQ ID NO: 147819 - DNA, 22 bp, synthetic construct
  misc_feature 1..22: note = chemically synthesized
  source 1..22: mol_type = other DNA
agtttctcagaagccagtcttt

SEQ ID NO: 147820 - DNA, 22 bp, synthetic construct
  misc_feature 1..22: note = chemically synthesized
  source 1..22: mol_type = other DNA
ctcagaagccagtctttatttc

SEQ ID NO: 147821 - DNA, 22 bp, synthetic construct
  misc_feature 1..22: note = chemically synthesized
  source 1..22: mol_type = other DNA
tcagaagccagtctttatttct

SEQ ID NO: 147822 - DNA, 22 bp, synthetic construct
  misc_feature 1..22: note = chemically synthesized
  source 1..22: mol_type = other DNA
agaagccagtctttatttctct

SEQ ID NO: 147823 - DNA, 22 bp, synthetic construct
  misc_feature 1..22: note = chemically synthesized
  source 1..22: mol_type = other DNA
tatttctctgttaaccatatgc

SEQ ID NO: 147824 - DNA, 22 bp, synthetic construct
  misc_feature 1..22: note = chemically synthesized
  source 1..22: mol_type = other DNA
atttctctgttaaccatatgca

SEQ ID NO: 147825 - DNA, 22 bp, synthetic construct
  misc_feature 1..22: note = chemically synthesized
  source 1..22: mol_type = other DNA
tttctctgttaaccatatgcat

SEQ ID NO: 147826 - DNA, 22 bp, synthetic construct
  misc_feature 1..22: note = chemically synthesized
  source 1..22: mol_type = other DNA
ctctgttaaccatatgcatgta

SEQ ID NO: 147827 - DNA, 22 bp, synthetic construct
  misc_feature 1..22: note = chemically synthesized
  source 1..22: mol_type = other DNA
tctgttaaccatatgcatgtat

SEQ ID NO: 147828 - DNA, 22 bp, synthetic construct
  misc_feature 1..22: note = chemically synthesized
  source 1..22: mol_type = other DNA
tgttaaccatatgcatgtatct

SEQ ID NO: 147829 - DNA, 22 bp, synthetic construct
  misc_feature 1..22: note = chemically synthesized
  source 1..22: mol_type = other DNA
ttaaccatatgcatgtatctgc

SEQ ID NO: 147830 - DNA, 22 bp, synthetic construct
  misc_feature 1..22: note = chemically synthesized
  source 1..22: mol_type = other DNA
accatatgcatgtatctgccta

SEQ ID NO: 147831 - DNA, 22 bp, synthetic construct
  misc_feature 1..22: note = chemically synthesized
  source 1..22: mol_type = other DNA
cctacctcttctccgcagctct

SEQ ID NO: 147832 - DNA, 22 bp, synthetic construct
  misc_feature 1..22: note = chemically synthesized
  source 1..22: mol_type = other DNA
cctcttctccgcagctcttggg

SEQ ID NO: 147833 - DNA, 22 bp, synthetic construct
  misc_feature 1..22: note = chemically synthesized
  source 1..22: mol_type = other DNA
ttctccgcagctcttgggcaat

SEQ ID NO: 147834 - DNA, 22 bp, synthetic construct
  misc_feature 1..22: note = chemically synthesized
  source 1..22: mol_type = other DNA
ctccgcagctcttgggcaatgt

SEQ ID NO: 147835 - DNA, 22 bp, synthetic construct
  misc_feature 1..22: note = chemically synthesized
  source 1..22: mol_type = other DNA
tccgcagctcttgggcaatgtg

SEQ ID NO: 147836 - DNA, 22 bp, synthetic construct
  misc_feature 1..22: note = chemically synthesized
  source 1..22: mol_type = other DNA
cgcagctcttgggcaatgtgct

SEQ ID NO: 147837 - DNA, 22 bp, synthetic construct
  misc_feature 1..22: note = chemically synthesized
  source 1..22: mol_type = other DNA
ttgggcaatgtgctggtgtgtg

SEQ ID NO: 147838 - DNA, 22 bp, synthetic construct
  misc_feature 1..22: note = chemically synthesized
  source 1..22: mol_type = other DNA
gggcaatgtgctggtgtgtgtg

SEQ ID NO: 147839 - DNA, 22 bp, synthetic construct
  misc_feature 1..22: note = chemically synthesized
  source 1..22: mol_type = other DNA
ggcaatgtgctggtgtgtgtgc

SEQ ID NO: 147840 - DNA, 22 bp, synthetic construct
  misc_feature 1..22: note = chemically synthesized
  source 1..22: mol_type = other DNA
gtgtgtgtgctggcccgcaact

SEQ ID NO: 147841 - DNA, 22 bp, synthetic construct
  misc_feature 1..22: note = chemically synthesized
  source 1..22: mol_type = other DNA
gcccgcaactttggcaaggaat

SEQ ID NO: 147842 - DNA, 22 bp, synthetic construct
  misc_feature 1..22: note = chemically synthesized
  source 1..22: mol_type = other DNA
tggcaaggaattcaccccacaa

SEQ ID NO: 147843 - DNA, 22 bp, synthetic construct
  misc_feature 1..22: note = chemically synthesized
  source 1..22: mol_type = other DNA
ggcaaggaattcaccccacaaa

SEQ ID NO: 147844 - DNA, 22 bp, synthetic construct
  misc_feature 1..22: note = chemically synthesized
  source 1..22: mol_type = other DNA
gcaaggaattcaccccacaaat

SEQ ID NO: 147845 - DNA, 22 bp, synthetic construct
  misc_feature 1..22: note = chemically synthesized
  source 1..22: mol_type = other DNA
accccacaaatgcaggctgcct

SEQ ID NO: 147846 - DNA, 22 bp, synthetic construct
  misc_feature 1..22: note = chemically synthesized
  source 1..22: mol_type = other DNA
cctatcagaaggtggtggctgg

SEQ ID NO: 147847 - DNA, 22 bp, synthetic construct
  misc_feature 1..22: note = chemically synthesized
  source 1..22: mol_type = other DNA
tcagaaggtggtggctggtgtg

SEQ ID NO: 147848 - DNA, 22 bp, synthetic construct
  misc_feature 1..22: note = chemically synthesized
  source 1..22: mol_type = other DNA
gtgtggctaatgccctggctca

SEQ ID NO: 147849 - DNA, 22 bp, synthetic construct
  misc_feature 1..22: note = chemically synthesized
  source 1..22: mol_type = other DNA
atgccctggctcacaagtacca

SEQ ID NO: 147850 - DNA, 22 bp, synthetic construct
  misc_feature 1..22: note = chemically synthesized
  source 1..22: mol_type = other DNA
gctcacaagtaccattgagatc

SEQ ID NO: 147851 - DNA, 22 bp, synthetic construct
  misc_feature 1..22: note = chemically synthesized
  source 1..22: mol_type = other DNA
acaagtaccattgagatcctgg

SEQ ID NO: 147852 - DNA, 22 bp, synthetic construct
  misc_feature 1..22: note = chemically synthesized
  source 1..22: mol_type = other DNA
agatcctggactgtttcctgat

SEQ ID NO: 147853 - DNA, 22 bp, synthetic construct
  misc_feature 1..22: note = chemically synthesized
  source 1..22: mol_type = other DNA
gactgtttcctgataaccataa

SEQ ID NO: 147854 - DNA, 22 bp, synthetic construct
  misc_feature 1..22: note = chemically synthesized
  source 1..22: mol_type = other DNA
tttcctgataaccataagaaga

SEQ ID NO: 147855 - DNA, 22 bp, synthetic construct
  misc_feature 1..22: note = chemically synthesized
  source 1..22: mol_type = other DNA
cctgataaccataagaagaccc

SEQ ID NO: 147856 - DNA, 22 bp, synthetic construct
  misc_feature 1..22: note = chemically synthesized
  source 1..22: mol_type = other DNA
ctgataaccataagaagaccct

SEQ ID NO: 147857 - DNA, 22 bp, synthetic construct
  misc_feature 1..22: note = chemically synthesized
  source 1..22: mol_type = other DNA
ataaccataagaagaccctatt

SEQ ID NO: 147858 - DNA, 22 bp, synthetic construct
  misc_feature 1..22: note = chemically synthesized
  source 1..22: mol_type = other DNA
tttccctagattctattttctg

SEQ ID NO: 147859 - DNA, 22 bp, synthetic construct
  misc_feature 1..22: note = chemically synthesized
  source 1..22: mol_type = other DNA
ccctagattctattttctgaac

SEQ ID NO: 147860 - DNA, 22 bp, synthetic construct
  misc_feature 1..22: note = chemically synthesized
  source 1..22: mol_type = other DNA
cctagattctattttctgaact

SEQ ID NO: 147861 - DNA, 22 bp, synthetic construct
  misc_feature 1..22: note = chemically synthesized
  source 1..22: mol_type = other DNA
gattctattttctgaacttggg

SEQ ID NO: 147862 - DNA, 22 bp, synthetic construct
  misc_feature 1..22: note = chemically synthesized
  source 1..22: mol_type = other DNA
tattttctgaacttgggaacac

SEQ ID NO: 147863 - DNA, 22 bp, synthetic construct
  misc_feature 1..22: note = chemically synthesized
  source 1..22: mol_type = other DNA
ttttctgaacttgggaacacaa

SEQ ID NO: 147864 - DNA, 22 bp, synthetic construct
  misc_feature 1..22: note = chemically synthesized
  source 1..22: mol_type = other DNA
tctgaacttgggaacacaatgc

SEQ ID NO: 147865 - DNA, 22 bp, synthetic construct
  misc_feature 1..22: note = chemically synthesized
  source 1..22: mol_type = other DNA
ctgaacttgggaacacaatgcc

SEQ ID NO: 147866 - DNA, 22 bp, synthetic construct
  misc_feature 1..22: note = chemically synthesized
  source 1..22: mol_type = other DNA
tgaacttgggaacacaatgcct

SEQ ID NO: 147867 - DNA, 22 bp, synthetic construct
  misc_feature 1..22: note = chemically synthesized
  source 1..22: mol_type = other DNA
aacttgggaacacaatgcctac

SEQ ID NO: 147868 - DNA, 22 bp, synthetic construct
  misc_feature 1..22: note = chemically synthesized
  source 1..22: mol_type = other DNA
gggaacacaatgcctacttcaa

SEQ ID NO: 147869 - DNA, 22 bp, synthetic construct
  misc_feature 1..22: note = chemically synthesized
  source 1..22: mol_type = other DNA
ggaacacaatgcctacttcaag

SEQ ID NO: 147870 - DNA, 22 bp, synthetic construct
  misc_feature 1..22: note = chemically synthesized
  source 1..22: mol_type = other DNA
cttcaagggtatggcttctgcc

SEQ ID NO: 147871 - DNA, 22 bp, synthetic construct
  misc_feature 1..22: note = chemically synthesized
  source 1..22: mol_type = other DNA
caagggtatggcttctgcctaa

SEQ ID NO: 147872 - DNA, 22 bp, synthetic construct
  misc_feature 1..22: note = chemically synthesized
  source 1..22: mol_type = other DNA
aagggtatggcttctgcctaat

SEQ ID NO: 147873 - DNA, 22 bp, synthetic construct
  misc_feature 1..22: note = chemically synthesized
  source 1..22: mol_type = other DNA
ctgcctaataaagaatgttcag

SEQ ID NO: 147874 - DNA, 22 bp, synthetic construct
  misc_feature 1..22: note = chemically synthesized
  source 1..22: mol_type = other DNA
tgcctaataaagaatgttcagc

SEQ ID NO: 147875 - DNA, 22 bp, synthetic construct
  misc_feature 1..22: note = chemically synthesized
  source 1..22: mol_type = other DNA
cctaataaagaatgttcagctc

SEQ ID NO: 147876 - DNA, 22 bp, synthetic construct
  misc_feature 1..22: note = chemically synthesized
  source 1..22: mol_type = other DNA
ataaagaatgttcagctcaact

SEQ ID NO: 147877 - DNA, 22 bp, synthetic construct
  misc_feature 1..22: note = chemically synthesized
  source 1..22: mol_type = other DNA
agctcaacttcctgattaattt

SEQ ID NO: 147878 - DNA, 22 bp, synthetic construct
  misc_feature 1..22: note = chemically synthesized
  source 1..22: mol_type = other DNA
aacttcctgattaatttcactt

SEQ ID NO: 147879 - DNA, 22 bp, synthetic construct
  misc_feature 1..22: note = chemically synthesized
  source 1..22: mol_type = other DNA
cctgattaatttcacttatttc

SEQ ID NO: 147880 - DNA, 22 bp, synthetic construct
  misc_feature 1..22: note = chemically synthesized
  source 1..22: mol_type = other DNA
ctgattaatttcacttatttca

SEQ ID NO: 147881 - DNA, 22 bp, synthetic construct
  misc_feature 1..22: note = chemically synthesized
  source 1..22: mol_type = other DNA
attaatttcacttatttcattt

SEQ ID NO: 147882 - DNA, 22 bp, synthetic construct
  misc_feature 1..22: note = chemically synthesized
  source 1..22: mol_type = other DNA
atttcacttatttcattttttt

SEQ ID NO: 147883 - DNA, 22 bp, synthetic construct
  misc_feature 1..22: note = chemically synthesized
  source 1..22: mol_type = other DNA
cacttatttcatttttttgtcc

SEQ ID NO: 147884 - DNA, 22 bp, synthetic construct
  misc_feature 1..22: note = chemically synthesized
  source 1..22: mol_type = other DNA
acttatttcatttttttgtcca

SEQ ID NO: 147885 - DNA, 22 bp, synthetic construct
  misc_feature 1..22: note = chemically synthesized
  source 1..22: mol_type = other DNA
atttcatttttttgtccaggtg

SEQ ID NO: 147886 - DNA, 22 bp, synthetic construct
  misc_feature 1..22: note = chemically synthesized
  source 1..22: mol_type = other DNA
tttcatttttttgtccaggtgt

SEQ ID NO: 147887 - DNA, 22 bp, synthetic construct
  misc_feature 1..22: note = chemically synthesized
  source 1..22: mol_type = other DNA
catttttttgtccaggtgtgta

SEQ ID NO: 147888 - DNA, 22 bp, synthetic construct
  misc_feature 1..22: note = chemically synthesized
  source 1..22: mol_type = other DNA
atttttttgtccaggtgtgtaa

SEQ ID NO: 147889 - DNA, 22 bp, synthetic construct
  misc_feature 1..22: note = chemically synthesized
  source 1..22: mol_type = other DNA
ttttgtccaggtgtgtaagaag

SEQ ID NO: 147890 - DNA, 22 bp, synthetic construct
  misc_feature 1..22: note = chemically synthesized
  source 1..22: mol_type = other DNA
tttgtccaggtgtgtaagaagg

SEQ ID NO: 147891 - DNA, 22 bp, synthetic construct
  misc_feature 1..22: note = chemically synthesized
  source 1..22: mol_type = other DNA
ttgtccaggtgtgtaagaaggt

SEQ ID NO: 147892 - DNA, 22 bp, synthetic construct
  misc_feature 1..22: note = chemically synthesized
  source 1..22: mol_type = other DNA
tgtccaggtgtgtaagaaggtt

SEQ ID NO: 147893 - DNA, 22 bp, synthetic construct
  misc_feature 1..22: note = chemically synthesized
  source 1..22: mol_type = other DNA
gtccaggtgtgtaagaaggttc

SEQ ID NO: 147894 - DNA, 22 bp, synthetic construct
  misc_feature 1..22: note = chemically synthesized
  source 1..22: mol_type = other DNA
tccaggtgtgtaagaaggttcc

SEQ ID NO: 147895 - DNA, 22 bp, synthetic construct
  misc_feature 1..22: note = chemically synthesized
  source 1..22: mol_type = other DNA
ctgaggctctacagatagggag

SEQ ID NO: 147896 - DNA, 22 bp, synthetic construct
  misc_feature 1..22: note = chemically synthesized
  source 1..22: mol_type = other DNA
aggctctacagatagggagcac

SEQ ID NO: 147897 - DNA, 22 bp, synthetic construct
  misc_feature 1..22: note = chemically synthesized
  source 1..22: mol_type = other DNA
tacagatagggagcacttgttt

SEQ ID NO: 147898 - DNA, 22 bp, synthetic construct
  misc_feature 1..22: note = chemically synthesized
  source 1..22: mol_type = other DNA
cagatagggagcacttgtttat

SEQ ID NO: 147899 - DNA, 22 bp, synthetic construct
  misc_feature 1..22: note = chemically synthesized
  source 1..22: mol_type = other DNA
gtttattttacaaagagtacat

SEQ ID NO: 147900 - DNA, 22 bp, synthetic construct
  misc_feature 1..22: note = chemically synthesized
  source 1..22: mol_type = other DNA
tttattttacaaagagtacatg

SEQ ID NO: 147901 - DNA, 22 bp, synthetic construct
  misc_feature 1..22: note = chemically synthesized
  source 1..22: mol_type = other DNA
attttacaaagagtacatggga

SEQ ID NO: 147902 - DNA, 22 bp, synthetic construct
  misc_feature 1..22: note = chemically synthesized
  source 1..22: mol_type = other DNA
ttttacaaagagtacatgggaa

SEQ ID NO: 147903 - DNA, 22 bp, synthetic construct
  misc_feature 1..22: note = chemically synthesized
  source 1..22: mol_type = other DNA
tacaaagagtacatgggaaaag

SEQ ID NO: 147904 - DNA, 22 bp, synthetic construct
  misc_feature 1..22: note = chemically synthesized
  source 1..22: mol_type = other DNA
acaaagagtacatgggaaaaga

SEQ ID NO: 147905 - DNA, 22 bp, synthetic construct
  misc_feature 1..22: note = chemically synthesized
  source 1..22: mol_type = other DNA
caaagagtacatgggaaaagag

SEQ ID NO: 147906 - DNA, 22 bp, synthetic construct
  misc_feature 1..22: note = chemically synthesized
  source 1..22: mol_type = other DNA
atgggtgacacttctacctcca

SEQ ID NO: 147907 - DNA, 22 bp, synthetic construct
  misc_feature 1..22: note = chemically synthesized
  source 1..22: mol_type = other DNA
ctacctccaaagagcagaaatt

SEQ ID NO: 147908 - DNA, 22 bp, synthetic construct
  misc_feature 1..22: note = chemically synthesized
  source 1..22: mol_type = other DNA
tacctccaaagagcagaaatta

SEQ ID NO: 147909 - DNA, 22 bp, synthetic construct
  misc_feature 1..22: note = chemically synthesized
  source 1..22: mol_type = other DNA
cctccaaagagcagaaattatc

SEQ ID NO: 147910 - DNA, 22 bp, synthetic construct
  misc_feature 1..22: note = chemically synthesized
  source 1..22: mol_type = other DNA
caaagagcagaaattatcaaga

SEQ ID NO: 147911 - DNA, 22 bp, synthetic construct
  misc_feature 1..22: note = chemically synthesized
  source 1..22: mol_type = other DNA
tcaagaactcttgatacaaaga

SEQ ID NO: 147912 - DNA, 22 bp, synthetic construct
  misc_feature 1..22: note = chemically synthesized
  source 1..22: mol_type = other DNA
ttgatacaaagataatactggc

SEQ ID NO: 147913 - DNA, 22 bp, synthetic construct
  misc_feature 1..22: note = chemically synthesized
  source 1..22: mol_type = other DNA
gatacaaagataatactggcac

SEQ ID NO: 147914 - DNA, 22 bp, synthetic construct
  misc_feature 1..22: note = chemically synthesized
  source 1..22: mol_type = other DNA
atacaaagataatactggcact

SEQ ID NO: 147915 - DNA, 22 bp, synthetic construct
  misc_feature 1..22: note = chemically synthesized
  source 1..22: mol_type = other DNA
gcactgcagaggttctagggaa

SEQ ID NO: 147916 - DNA, 22 bp, synthetic construct
  misc_feature 1..22: note = chemically synthesized
  source 1..22: mol_type = other DNA
cagaggttctagggaagacctc

SEQ ID NO: 147917 - DNA, 22 bp, synthetic construct
  misc_feature 1..22: note = chemically synthesized
  source 1..22: mol_type = other DNA
tagggaagacctcaaccctaag

SEQ ID NO: 147918 - DNA, 22 bp, synthetic construct
  misc_feature 1..22: note = chemically synthesized
  source 1..22: mol_type = other DNA
gggaagacctcaaccctaagac

SEQ ID NO: 147919 - DNA, 22 bp, synthetic construct
  misc_feature 1..22: note = chemically synthesized
  source 1..22: mol_type = other DNA
aaccctaagacatagcctcaag

SEQ ID NO: 147920 - DNA, 22 bp, synthetic construct
  misc_feature 1..22: note = chemically synthesized
  source 1..22: mol_type = other DNA
agacatagcctcaagggtaatg

SEQ ID NO: 147921 - DNA, 22 bp, synthetic construct
  misc_feature 1..22: note = chemically synthesized
  source 1..22: mol_type = other DNA
aagggtaatgctacgattaaac

SEQ ID NO: 147922 - DNA, 22 bp, synthetic construct
  misc_feature 1..22: note = chemically synthesized
  source 1..22: mol_type = other DNA
cgattaaactccaacaattact

SEQ ID NO: 147923 - DNA, 22 bp, synthetic construct
  misc_feature 1..22: note = chemically synthesized
  source 1..22: mol_type = other DNA
aactccaacaattactgagaaa

SEQ ID NO: 147924 - DNA, 22 bp, synthetic construct
  misc_feature 1..22: note = chemically synthesized
  source 1..22: mol_type = other DNA
caacaattactgagaaaataat

SEQ ID NO: 147925 - DNA, 22 bp, synthetic construct
  misc_feature 1..22: note = chemically synthesized
  source 1..22: mol_type = other DNA
ctgagaaaataatgtgctcaat

SEQ ID NO: 147926 - DNA, 22 bp, synthetic construct
  misc_feature 1..22: note = chemically synthesized
  source 1..22: mol_type = other DNA
agaaaataatgtgctcaattaa

SEQ ID NO: 147927 - DNA, 22 bp, synthetic construct
  misc_feature 1..22: note = chemically synthesized
  source 1..22: mol_type = other DNA
aattaaaggcataatgattact

SEQ ID NO: 147928 - DNA, 22 bp, synthetic construct
  misc_feature 1..22: note = chemically synthesized
  source 1..22: mol_type = other DNA
aaggcataatgattactcaaga

SEQ ID NO: 147929 - DNA, 22 bp, synthetic construct
  misc_feature 1..22: note = chemically synthesized
  source 1..22: mol_type = other DNA
ctcaagacaatgttatgttgtc

SEQ ID NO: 147930 - DNA, 22 bp, synthetic construct
  misc_feature 1..22: note = chemically synthesized
  source 1..22: mol_type = other DNA
aagacaatgttatgttgtcttt

SEQ ID NO: 147931 - DNA, 22 bp, synthetic construct
  misc_feature 1..22: note = chemically synthesized
  source 1..22: mol_type = other DNA
tgttgtctttcttcctccttcc

SEQ ID NO: 147932 - DNA, 22 bp, synthetic construct
  misc_feature 1..22: note = chemically synthesized
  source 1..22: mol_type = other DNA
tctttcttcctccttcctttgc

SEQ ID NO: 147933 - DNA, 22 bp, synthetic construct
  misc_feature 1..22: note = chemically synthesized
  source 1..22: mol_type = other DNA
tcttcctccttcctttgcctgc

SEQ ID NO: 147934 - DNA, 22 bp, synthetic construct
  misc_feature 1..22: note = chemically synthesized
  source 1..22: mol_type = other DNA
cttcctccttcctttgcctgca

SEQ ID NO: 147935 - DNA, 22 bp, synthetic construct
  misc_feature 1..22: note = chemically synthesized
  source 1..22: mol_type = other DNA
ttcctccttcctttgcctgcac

SEQ ID NO: 147936 - DNA, 22 bp, synthetic construct
  misc_feature 1..22: note = chemically synthesized
  source 1..22: mol_type = other DNA
cctccttcctttgcctgcacat

SEQ ID NO: 147937 - DNA, 22 bp, synthetic construct
  misc_feature 1..22: note = chemically synthesized
  source 1..22: mol_type = other DNA
ctccttcctttgcctgcacatt

SEQ ID NO: 147938 - DNA, 22 bp, synthetic construct
  misc_feature 1..22: note = chemically synthesized
  source 1..22: mol_type = other DNA
cttcctttgcctgcacattgta

SEQ ID NO: 147939 - DNA, 22 bp, synthetic construct
  misc_feature 1..22: note = chemically synthesized
  source 1..22: mol_type = other DNA
cctttgcctgcacattgtagcc

SEQ ID NO: 147940 - DNA, 22 bp, synthetic construct
  misc_feature 1..22: note = chemically synthesized
  source 1..22: mol_type = other DNA
ctttgcctgcacattgtagccc

SEQ ID NO: 147941 - DNA, 22 bp, synthetic construct
  misc_feature 1..22: note = chemically synthesized
  source 1..22: mol_type = other DNA
tgcctgcacattgtagcccata

SEQ ID NO: 147942 - DNA, 22 bp, synthetic construct
  misc_feature 1..22: note = chemically synthesized
  source 1..22: mol_type = other DNA
gcctgcacattgtagcccataa

SEQ ID NO: 147943 - DNA, 22 bp, synthetic construct
  misc_feature 1..22: note = chemically synthesized
  source 1..22: mol_type = other DNA
cctgcacattgtagcccataat

SEQ ID NO: 147944 - DNA, 22 bp, synthetic construct
  misc_feature 1..22: note = chemically synthesized
  source 1..22: mol_type = other DNA
cacattgtagcccataatacta

SEQ ID NO: 147945 - DNA, 22 bp, synthetic construct
  misc_feature 1..22: note = chemically synthesized
  source 1..22: mol_type = other DNA
tagcccataatactatacccca

SEQ ID NO: 147946 - DNA, 22 bp, synthetic construct
  misc_feature 1..22: note = chemically synthesized
  source 1..22: mol_type = other DNA
taccccatcaagtgttcctgct

SEQ ID NO: 147947 - DNA, 22 bp, synthetic construct
  misc_feature 1..22: note = chemically synthesized
  source 1..22: mol_type = other DNA
ctgctccaagaaatagcttcct

SEQ ID NO: 147948 - DNA, 22 bp, synthetic construct
  misc_feature 1..22: note = chemically synthesized
  source 1..22: mol_type = other DNA
ctccaagaaatagcttcctcct

SEQ ID NO: 147949 - DNA, 22 bp, synthetic construct
  misc_feature 1..22: note = chemically synthesized
  source 1..22: mol_type = other DNA
caagaaatagcttcctcctctt

SEQ ID NO: 147950 - DNA, 22 bp, synthetic construct
  misc_feature 1..22: note = chemically synthesized
  source 1..22: mol_type = other DNA
cctcctcttacttgccccagaa

SEQ ID NO: 147951 - DNA, 22 bp, synthetic construct
  misc_feature 1..22: note = chemically synthesized
  source 1..22: mol_type = other DNA
ctcctcttacttgccccagaac

SEQ ID NO: 147952 - DNA, 22 bp, synthetic construct
  misc_feature 1..22: note = chemically synthesized
  source 1..22: mol_type = other DNA
ctcttacttgccccagaacatc

SEQ ID NO: 147953 - DNA, 22 bp, synthetic construct
  misc_feature 1..22: note = chemically synthesized
  source 1..22: mol_type = other DNA
ttacttgccccagaacatctct

SEQ ID NO: 147954 - DNA, 22 bp, synthetic construct
  misc_feature 1..22: note = chemically synthesized
  source 1..22: mol_type = other DNA
acttgccccagaacatctctgt

SEQ ID NO: 147955 - DNA, 22 bp, synthetic construct
  misc_feature 1..22: note = chemically synthesized
  source 1..22: mol_type = other DNA
cttgccccagaacatctctgta

SEQ ID NO: 147956 - DNA, 22 bp, synthetic construct
  misc_feature 1..22: note = chemically synthesized
  source 1..22: mol_type = other DNA
gccccagaacatctctgtaaag

SEQ ID NO: 147957 - DNA, 22 bp, synthetic construct
  misc_feature 1..22: note = chemically synthesized
  source 1..22: mol_type = other DNA
ccccagaacatctctgtaaaga

SEQ ID NO: 147958 - DNA, 22 bp, synthetic construct
  misc_feature 1..22: note = chemically synthesized
  source 1..22: mol_type = other DNA
tgtaaagaatttcctcttatct

SEQ ID NO: 147959 - DNA, 22 bp, synthetic construct
  misc_feature 1..22: note = chemically synthesized
  source 1..22: mol_type = other DNA
taaagaatttcctcttatcttc

SEQ ID NO: 147960 - DNA, 22 bp, synthetic construct
  misc_feature 1..22: note = chemically synthesized
  source 1..22: mol_type = other DNA
cctcttatcttcccatatttca

SEQ ID NO: 147961 - DNA, 22 bp, synthetic construct
  misc_feature 1..22: note = chemically synthesized
  source 1..22: mol_type = other DNA
ctcttatcttcccatatttcag

SEQ ID NO: 147962 - DNA, 22 bp, synthetic construct
  misc_feature 1..22: note = chemically synthesized
  source 1..22: mol_type = other DNA
ttatcttcccatatttcagtca

SEQ ID NO: 147963 - DNA, 22 bp, synthetic construct
  misc_feature 1..22: note = chemically synthesized
  source 1..22: mol_type = other DNA
atcttcccatatttcagtcaag

SEQ ID NO: 147964 - DNA, 22 bp, synthetic construct
  misc_feature 1..22: note = chemically synthesized
  source 1..22: mol_type = other DNA
tcttcccatatttcagtcaaga

SEQ ID NO: 147965 - DNA, 22 bp, synthetic construct
  misc_feature 1..22: note = chemically synthesized
  source 1..22: mol_type = other DNA
cccatatttcagtcaagattca

SEQ ID NO: 147966 - DNA, 22 bp, synthetic construct
  misc_feature 1..22: note = chemically synthesized
  source 1..22: mol_type = other DNA
ccatatttcagtcaagattcat

SEQ ID NO: 147967 - DNA, 22 bp, synthetic construct
  misc_feature 1..22: note = chemically synthesized
  source 1..22: mol_type = other DNA
cagtcaagattcattgctcacg

SEQ ID NO: 147968 - DNA, 22 bp, synthetic construct
  misc_feature 1..22: note = chemically synthesized
  source 1..22: mol_type = other DNA
agtcaagattcattgctcacgt

SEQ ID NO: 147969 - DNA, 22 bp, synthetic construct
  misc_feature 1..22: note = chemically synthesized
  source 1..22: mol_type = other DNA
attgctcacgtattacttgtga

SEQ ID NO: 147970 - DNA, 22 bp, synthetic construct
  misc_feature 1..22: note = chemically synthesized
  source 1..22: mol_type = other DNA
ctcacgtattacttgtgacctc

SEQ ID NO: 147971 - DNA, 22 bp, synthetic construct
  misc_feature 1..22: note = chemically synthesized
  source 1..22: mol_type = other DNA
acgtattacttgtgacctctct

SEQ ID NO: 147972 - DNA, 22 bp, synthetic construct
  misc_feature 1..22: note = chemically synthesized
  source 1..22: mol_type = other DNA
cttgtgacctctcttgacccca

SEQ ID NO: 147973 - DNA, 22 bp, synthetic construct
  misc_feature 1..22: note = chemically synthesized
  source 1..22: mol_type = other DNA
gtgacctctcttgaccccagcc

SEQ ID NO: 147974 - DNA, 22 bp, synthetic construct
  misc_feature 1..22: note = chemically synthesized
  source 1..22: mol_type = other DNA
tgacctctcttgaccccagcca

SEQ ID NO: 147975 - DNA, 22 bp, synthetic construct
  misc_feature 1..22: note = chemically synthesized
  source 1..22: mol_type = other DNA
tcttgaccccagccacaataaa

SEQ ID NO: 147976 - DNA, 22 bp, synthetic construct
  misc_feature 1..22: note = chemically synthesized
  source 1..22: mol_type = other DNA
ttgaccccagccacaataaact

SEQ ID NO: 147977 - DNA, 22 bp, synthetic construct
  misc_feature 1..22: note = chemically synthesized
  source 1..22: mol_type = other DNA
gaccccagccacaataaacttc

SEQ ID NO: 147978 - DNA, 22 bp, synthetic construct
  misc_feature 1..22: note = chemically synthesized
  source 1..22: mol_type = other DNA
accccagccacaataaacttct

SEQ ID NO: 147979 - DNA, 22 bp, synthetic construct
  misc_feature 1..22: note = chemically synthesized
  source 1..22: mol_type = other DNA
ctctatactacccaaaaaatct

SEQ ID NO: 147980 - DNA, 22 bp, synthetic construct
  misc_feature 1..22: note = chemically synthesized
  source 1..22: mol_type = other DNA
tctatactacccaaaaaatctt

SEQ ID NO: 147981 - DNA, 22 bp, synthetic construct
  misc_feature 1..22: note = chemically synthesized
  source 1..22: mol_type = other DNA
tatactacccaaaaaatctttc

SEQ ID NO: 147982 - DNA, 22 bp, synthetic construct
  misc_feature 1..22: note = chemically synthesized
  source 1..22: mol_type = other DNA
tactacccaaaaaatctttcca

SEQ ID NO: 147983 - DNA, 22 bp, synthetic construct
  misc_feature 1..22: note = chemically synthesized
  source 1..22: mol_type = other DNA
cccaaaaaatctttccaaaccc

SEQ ID NO: 147984 - DNA, 22 bp, synthetic construct
  misc_feature 1..22: note = chemically synthesized
  source 1..22: mol_type = other DNA
tccaaaccctcccccacaccat

SEQ ID NO: 147985 - DNA, 22 bp, synthetic construct
  misc_feature 1..22: note = chemically synthesized
  source 1..22: mol_type = other DNA
ccaaaccctcccccacaccatt

SEQ ID NO: 147986 - DNA, 22 bp, synthetic construct
  misc_feature 1..22: note = chemically synthesized
  source 1..22: mol_type = other DNA
caaaccctcccccacaccattt

SEQ ID NO: 147987 - DNA, 22 bp, synthetic construct
  misc_feature 1..22: note = chemically synthesized
  source 1..22: mol_type = other DNA
ccccacaccattttttatattt

SEQ ID NO: 147988 - DNA, 22 bp, synthetic construct
  misc_feature 1..22: note = chemically synthesized
  source 1..22: mol_type = other DNA
tttatatttttatatttttctt

SEQ ID NO: 147989 - DNA, 22 bp, synthetic construct
  misc_feature 1..22: note = chemically synthesized
  source 1..22: mol_type = other DNA
ttatatttttatatttttctta

SEQ ID NO: 147990 - DNA, 22 bp, synthetic construct
  misc_feature 1..22: note = chemically synthesized
  source 1..22: mol_type = other DNA
tatatttttatatttttcttat

SEQ ID NO: 147991 - DNA, 22 bp, synthetic construct
  misc_feature 1..22: note = chemically synthesized
  source 1..22: mol_type = other DNA
atatttttatatttttcttatt

SEQ ID NO: 147992 - DNA, 22 bp, synthetic construct
  misc_feature 1..22: note = chemically synthesized
  source 1..22: mol_type = other DNA
tatttttatatttttcttattt

SEQ ID NO: 147993 - DNA, 22 bp, synthetic construct
  misc_feature 1..22: note = chemically synthesized
  source 1..22: mol_type = other DNA
ttatatttttcttatttatttc

SEQ ID NO: 147994 - DNA, 22 bp, synthetic construct
  misc_feature 1..22: note = chemically synthesized
  source 1..22: mol_type = other DNA
tatatttttcttatttatttca

SEQ ID NO: 147995 - DNA, 22 bp, synthetic construct
  misc_feature 1..22: note = chemically synthesized
  source 1..22: mol_type = other DNA
atatttttcttatttatttcat

SEQ ID NO: 147996 - DNA, 22 bp, synthetic construct
  misc_feature 1..22: note = chemically synthesized
  source 1..22: mol_type = other DNA
tatttttcttatttatttcatg

SEQ ID NO: 147997 - DNA, 22 bp, synthetic construct
  misc_feature 1..22: note = chemically synthesized
  source 1..22: mol_type = other DNA
ttcttatttatttcatgcacac

SEQ ID NO: 147998 - DNA, 22 bp, synthetic construct
  misc_feature 1..22: note = chemically synthesized
  source 1..22: mol_type = other DNA
tcttatttatttcatgcacaca

SEQ ID NO: 147999 - DNA, 22 bp, synthetic construct
  misc_feature 1..22: note = chemically synthesized
  source 1..22: mol_type = other DNA
cttatttatttcatgcacacac

SEQ ID NO: 148000 - DNA, 22 bp, synthetic construct
  misc_feature 1..22: note = chemically synthesized
  source 1..22: mol_type = other DNA
ttatttatttcatgcacacaca

SEQ ID NO: 148001 - DNA, 22 bp, synthetic construct
  misc_feature 1..22: note = chemically synthesized
  source 1..22: mol_type = other DNA
atttatttcatgcacacacaca

SEQ ID NO: 148002 - DNA, 22 bp, synthetic construct
  misc_feature 1..22: note = chemically synthesized
  source 1..22: mol_type = other DNA
tttatttcatgcacacacacac

SEQ ID NO: 148003 - DNA, 22 bp, synthetic construct
  misc_feature 1..22: note = chemically synthesized
  source 1..22: mol_type = other DNA
atttcatgcacacacacacact

SEQ ID NO: 148004 - DNA, 22 bp, synthetic construct
  misc_feature 1..22: note = chemically synthesized
  source 1..22: mol_type = other DNA
tttcatgcacacacacacactc

SEQ ID NO: 148005 - DNA, 22 bp, synthetic construct
  misc_feature 1..22: note = chemically synthesized
  source 1..22: mol_type = other DNA
catgcacacacacacactccgt

SEQ ID NO: 148006 - DNA, 22 bp, synthetic construct
  misc_feature 1..22: note = chemically synthesized
  source 1..22: mol_type = other DNA
atgcacacacacacactccgtg

SEQ ID NO: 148007 - DNA, 22 bp, synthetic construct
  misc_feature 1..22: note = chemically synthesized
  source 1..22: mol_type = other DNA
cgtgctttataagcaattctgc

SEQ ID NO: 148008 - DNA, 22 bp, synthetic construct
  misc_feature 1..22: note = chemically synthesized
  source 1..22: mol_type = other DNA
tataagcaattctgcctattct

SEQ ID NO: 148009 - DNA, 22 bp, synthetic construct
  misc_feature 1..22: note = chemically synthesized
  source 1..22: mol_type = other DNA
ataagcaattctgcctattctc

SEQ ID NO: 148010 - DNA, 22 bp, synthetic construct
  misc_feature 1..22: note = chemically synthesized
  source 1..22: mol_type = other DNA
taagcaattctgcctattctct

SEQ ID NO: 148011 - DNA, 22 bp, synthetic construct
  misc_feature 1..22: note = chemically synthesized
  source 1..22: mol_type = other DNA
tgcctattctctaccttcttac

SEQ ID NO: 148012 - DNA, 22 bp, synthetic construct
  misc_feature 1..22: note = chemically synthesized
  source 1..22: mol_type = other DNA
cctattctctaccttcttacat

SEQ ID NO: 148013 - DNA, 22 bp, synthetic construct
  misc_feature 1..22: note = chemically synthesized
  source 1..22: mol_type = other DNA
ttctctaccttcttacatgcct

SEQ ID NO: 148014 - DNA, 22 bp, synthetic construct
  misc_feature 1..22: note = chemically synthesized
  source 1..22: mol_type = other DNA
tctaccttcttacatgcctact

SEQ ID NO: 148015 - DNA, 22 bp, synthetic construct
  misc_feature 1..22: note = chemically synthesized
  source 1..22: mol_type = other DNA
taccttcttacatgcctactgt

SEQ ID NO: 148016 - DNA, 22 bp, synthetic construct
  misc_feature 1..22: note = chemically synthesized
  source 1..22: mol_type = other DNA
ccttcttacatgcctactgtgc

SEQ ID NO: 148017 - DNA, 22 bp, synthetic construct
  misc_feature 1..22: note = chemically synthesized
  source 1..22: mol_type = other DNA
cttacatgcctactgtgcctca

SEQ ID NO: 148018 - DNA, 22 bp, synthetic construct
  misc_feature 1..22: note = chemically synthesized
  source 1..22: mol_type = other DNA
ttacatgcctactgtgcctcat

SEQ ID NO: 148019 - DNA, 22 bp, synthetic construct
  misc_feature 1..22: note = chemically synthesized
  source 1..22: mol_type = other DNA
acatgcctactgtgcctcatat

SEQ ID NO: 148020 - DNA, 22 bp, synthetic construct
  misc_feature 1..22: note = chemically synthesized
  source 1..22: mol_type = other DNA
catgcctactgtgcctcatatt

SEQ ID NO: 148021 - DNA, 22 bp, synthetic construct
  misc_feature 1..22: note = chemically synthesized
  source 1..22: mol_type = other DNA
ctgtgcctcatattaaattcat

SEQ ID NO: 148022 - DNA, 22 bp, synthetic construct
  misc_feature 1..22: note = chemically synthesized
  source 1..22: mol_type = other DNA
tgcctcatattaaattcatcaa

SEQ ID NO: 148023 - DNA, 22 bp, synthetic construct
  misc_feature 1..22: note = chemically synthesized
  source 1..22: mol_type = other DNA
atattaaattcatcaatgggca

SEQ ID NO: 148024 - DNA, 22 bp, synthetic construct
  misc_feature 1..22: note = chemically synthesized
  source 1..22: mol_type = other DNA
aattcatcaatgggcagaaaga

SEQ ID NO: 148025 - DNA, 22 bp, synthetic construct
  misc_feature 1..22: note = chemically synthesized
  source 1..22: mol_type = other DNA
atcaatgggcagaaagaaaata

SEQ ID NO: 148026 - DNA, 22 bp, synthetic construct
  misc_feature 1..22: note = chemically synthesized
  source 1..22: mol_type = other DNA
attcaagaaaacagtgaatgaa

SEQ ID NO: 148027 - DNA, 22 bp, synthetic construct
  misc_feature 1..22: note = chemically synthesized
  source 1..22: mol_type = other DNA
ttcaagaaaacagtgaatgaat

SEQ ID NO: 148028 - DNA, 22 bp, synthetic construct
  misc_feature 1..22: note = chemically synthesized
  source 1..22: mol_type = other DNA
aagaaaacagtgaatgaatgaa

SEQ ID NO: 148029 - DNA, 22 bp, synthetic construct
  misc_feature 1..22: note = chemically synthesized
  source 1..22: mol_type = other DNA
ttccttgctttagaacttctgg

SEQ ID NO: 148030 - DNA, 22 bp, synthetic construct
  misc_feature 1..22: note = chemically synthesized
  source 1..22: mol_type = other DNA
cttgctttagaacttctggaat

SEQ ID NO: 148031 - DNA, 22 bp, synthetic construct
  misc_feature 1..22: note = chemically synthesized
  source 1..22: mol_type = other DNA
gctttagaacttctggaattag

SEQ ID NO: 148032 - DNA, 22 bp, synthetic construct
  misc_feature 1..22: note = chemically synthesized
  source 1..22: mol_type = other DNA
ctttagaacttctggaattaga

SEQ ID NO: 148033 - DNA, 22 bp, synthetic construct
  misc_feature 1..22: note = chemically synthesized
  source 1..22: mol_type = other DNA
tagaacttctggaattagagga

SEQ ID NO: 148034 - DNA, 22 bp, synthetic construct
  misc_feature 1..22: note = chemically synthesized
  source 1..22: mol_type = other DNA
agaacttctggaattagaggac

SEQ ID NO: 148035 - DNA, 22 bp, synthetic construct
  misc_feature 1..22: note = chemically synthesized
  source 1..22: mol_type = other DNA
gaacttctggaattagaggaca

SEQ ID NO: 148036 - DNA, 22 bp, synthetic construct
  misc_feature 1..22: note = chemically synthesized
  source 1..22: mol_type = other DNA
ctggaattagaggacaatatta

SEQ ID NO: 148037 - DNA, 22 bp, synthetic construct
  misc_feature 1..22: note = chemically synthesized
  source 1..22: mol_type = other DNA
tggaattagaggacaatattaa

SEQ ID NO: 148038 - DNA, 22 bp, synthetic construct
  misc_feature 1..22: note = chemically synthesized
  source 1..22: mol_type = other DNA
gaattagaggacaatattaata

SEQ ID NO: 148039 - DNA, 22 bp, synthetic construct
  misc_feature 1..22: note = chemically synthesized
  source 1..22: mol_type = other DNA
gaggacaatattaataatacca

SEQ ID NO: 148040 - DNA, 22 bp, synthetic construct
  misc_feature 1..22: note = chemically synthesized
  source 1..22: mol_type = other DNA
ataataccatcgcacagtgttt

SEQ ID NO: 148041 - DNA, 22 bp, synthetic construct
  misc_feature 1..22: note = chemically synthesized
  source 1..22: mol_type = other DNA
ctttgttgttaatgctacaaca

SEQ ID NO: 148042 - DNA, 22 bp, synthetic construct
  misc_feature 1..22: note = chemically synthesized
  source 1..22: mol_type = other DNA
tttgttgttaatgctacaacat

SEQ ID NO: 148043 - DNA, 22 bp, synthetic construct
  misc_feature 1..22: note = chemically synthesized
  source 1..22: mol_type = other DNA
tgttgttaatgctacaacatac

SEQ ID NO: 148044 - DNA, 22 bp, synthetic construct
  misc_feature 1..22: note = chemically synthesized
  source 1..22: mol_type = other DNA
gttgttaatgctacaacataca

SEQ ID NO: 148045 - DNA, 22 bp, synthetic construct
  misc_feature 1..22: note = chemically synthesized
  source 1..22: mol_type = other DNA
ttgttaatgctacaacatacaa

SEQ ID NO: 148046 - DNA, 22 bp, synthetic construct
  misc_feature 1..22: note = chemically synthesized
  source 1..22: mol_type = other DNA
ttaatgctacaacatacaaaga

SEQ ID NO: 148047 - DNA, 22 bp, synthetic construct
  misc_feature 1..22: note = chemically synthesized
  source 1..22: mol_type = other DNA
atgctacaacatacaaagagga

SEQ ID NO: 148048 - DNA, 22 bp, synthetic construct
  misc_feature 1..22: note = chemically synthesized
  source 1..22: mol_type = other DNA
caacatacaaagaggaagcatg

SEQ ID NO: 148049 - DNA, 22 bp, synthetic construct
  misc_feature 1..22: note = chemically synthesized
  source 1..22: mol_type = other DNA
tttcctttctgatcataggagt

SEQ ID NO: 148050 - DNA, 22 bp, synthetic construct
  misc_feature 1..22: note = chemically synthesized
  source 1..22: mol_type = other DNA
cctttctgatcataggagtaat

SEQ ID NO: 148051 - DNA, 22 bp, synthetic construct
  misc_feature 1..22: note = chemically synthesized
  source 1..22: mol_type = other DNA
ctttctgatcataggagtaata

SEQ ID NO: 148052 - DNA, 22 bp, synthetic construct
  misc_feature 1..22: note = chemically synthesized
  source 1..22: mol_type = other DNA
tctgatcataggagtaatattt

SEQ ID NO: 148053 - DNA, 22 bp, synthetic construct
  misc_feature 1..22: note = chemically synthesized
  source 1..22: mol_type = other DNA
ctgatcataggagtaatatttt

SEQ ID NO: 148054 - DNA, 22 bp, synthetic construct
  misc_feature 1..22: note = chemically synthesized
  source 1..22: mol_type = other DNA
tgatcataggagtaatattttt

SEQ ID NO: 148055 - DNA, 22 bp, synthetic construct
  misc_feature 1..22: note = chemically synthesized
  source 1..22: mol_type = other DNA
atcataggagtaatattttttt

SEQ ID NO: 148056 - DNA, 22 bp, synthetic construct
  misc_feature 1..22: note = chemically synthesized
  source 1..22: mol_type = other DNA
ttttccttgagcaccatttttg

SEQ ID NO: 148057 - DNA, 22 bp, synthetic construct
  misc_feature 1..22: note = chemically synthesized
  source 1..22: mol_type = other DNA
tttccttgagcaccatttttgc

SEQ ID NO: 148058 - DNA, 22 bp, synthetic construct
  misc_feature 1..22: note = chemically synthesized
  source 1..22: mol_type = other DNA
ttccttgagcaccatttttgcc

SEQ ID NO: 148059 - DNA, 22 bp, synthetic construct
  misc_feature 1..22: note = chemically synthesized
  source 1..22: mol_type = other DNA
tccttgagcaccatttttgcca

SEQ ID NO: 148060 - DNA, 22 bp, synthetic construct
  misc_feature 1..22: note = chemically synthesized
  source 1..22: mol_type = other DNA
ccttgagcaccatttttgccat

SEQ ID NO: 148061 - DNA, 22 bp, synthetic construct
  misc_feature 1..22: note = chemically synthesized
  source 1..22: mol_type = other DNA
cttgagcaccatttttgccata

SEQ ID NO: 148062 - DNA, 22 bp, synthetic construct
  misc_feature 1..22: note = chemically synthesized
  source 1..22: mol_type = other DNA
gagcaccatttttgccataggt

SEQ ID NO: 148063 - DNA, 22 bp, synthetic construct
  misc_feature 1..22: note = chemically synthesized
  source 1..22: mol_type = other DNA
agcaccatttttgccataggta

SEQ ID NO: 148064 - DNA, 22 bp, synthetic construct
  misc_feature 1..22: note = chemically synthesized
  source 1..22: mol_type = other DNA
ttgccataggtaaaattagaag

SEQ ID NO: 148065 - DNA, 22 bp, synthetic construct
  misc_feature 1..22: note = chemically synthesized
  source 1..22: mol_type = other DNA
tgccataggtaaaattagaagg

SEQ ID NO: 148066 - DNA, 22 bp, synthetic construct
  misc_feature 1..22: note = chemically synthesized
  source 1..22: mol_type = other DNA
gccataggtaaaattagaagga

SEQ ID NO: 148067 - DNA, 22 bp, synthetic construct
  misc_feature 1..22: note = chemically synthesized
  source 1..22: mol_type = other DNA
ccataggtaaaattagaaggat

SEQ ID NO: 148068 - DNA, 22 bp, synthetic construct
  misc_feature 1..22: note = chemically synthesized
  source 1..22: mol_type = other DNA
gaaggatttttagaactttctc

SEQ ID NO: 148069 - DNA, 22 bp, synthetic construct
  misc_feature 1..22: note = chemically synthesized
  source 1..22: mol_type = other DNA
ttagaactttctcagttgtata

SEQ ID NO: 148070 - DNA, 22 bp, synthetic construct
  misc_feature 1..22: note = chemically synthesized
  source 1..22: mol_type = other DNA
tagaactttctcagttgtatac

SEQ ID NO: 148071 - DNA, 22 bp, synthetic construct
  misc_feature 1..22: note = chemically synthesized
  source 1..22: mol_type = other DNA
agaactttctcagttgtataca

SEQ ID NO: 148072 - DNA, 22 bp, synthetic construct
  misc_feature 1..22: note = chemically synthesized
  source 1..22: mol_type = other DNA
gaactttctcagttgtatacat

SEQ ID NO: 148073 - DNA, 22 bp, synthetic construct
  misc_feature 1..22: note = chemically synthesized
  source 1..22: mol_type = other DNA
tctcagttgtatacatttttaa

SEQ ID NO: 148074 - DNA, 22 bp, synthetic construct
  misc_feature 1..22: note = chemically synthesized
  source 1..22: mol_type = other DNA
ctcagttgtatacatttttaaa

SEQ ID NO: 148075 - DNA, 22 bp, synthetic construct
  misc_feature 1..22: note = chemically synthesized
  source 1..22: mol_type = other DNA
tcagttgtatacatttttaaaa

SEQ ID NO: 148076 - DNA, 22 bp, synthetic construct
  misc_feature 1..22: note = chemically synthesized
  source 1..22: mol_type = other DNA
agttgtatacatttttaaaaat

SEQ ID NO: 148077 - DNA, 22 bp, synthetic construct
  misc_feature 1..22: note = chemically synthesized
  source 1..22: mol_type = other DNA
tatacatttttaaaaatctgta

SEQ ID NO: 148078 - DNA, 22 bp, synthetic construct
  misc_feature 1..22: note = chemically synthesized
  source 1..22: mol_type = other DNA
ttaaaaatctgtattatatgca

SEQ ID NO: 148079 - DNA, 22 bp, synthetic construct
  misc_feature 1..22: note = chemically synthesized
  source 1..22: mol_type = other DNA
taaaaatctgtattatatgcat

SEQ ID NO: 148080 - DNA, 22 bp, synthetic construct
  misc_feature 1..22: note = chemically synthesized
  source 1..22: mol_type = other DNA
aaaaatctgtattatatgcatg

SEQ ID NO: 148081 - DNA, 22 bp, synthetic construct
  misc_feature 1..22: note = chemically synthesized
  source 1..22: mol_type = other DNA
aaaatctgtattatatgcatgt

SEQ ID NO: 148082 - DNA, 22 bp, synthetic construct
  misc_feature 1..22: note = chemically synthesized
  source 1..22: mol_type = other DNA
tattatatgcatgttgattaat

SEQ ID NO: 148083 - DNA, 22 bp, synthetic construct
  misc_feature 1..22: note = chemically synthesized
  source 1..22: mol_type = other DNA
tatgcatgttgattaattttaa

SEQ ID NO: 148084 - DNA, 22 bp, synthetic construct
  misc_feature 1..22: note = chemically synthesized
  source 1..22: mol_type = other DNA
attaattttaaacttacttgaa

SEQ ID NO: 148085 - DNA, 22 bp, synthetic construct
  misc_feature 1..22: note = chemically synthesized
  source 1..22: mol_type = other DNA
attttaaacttacttgaatacc

SEQ ID NO: 148086 - DNA, 22 bp, synthetic construct
  misc_feature 1..22: note = chemically synthesized
  source 1..22: mol_type = other DNA
taaacttacttgaatacctaaa

SEQ ID NO: 148087 - DNA, 22 bp, synthetic construct
  misc_feature 1..22: note = chemically synthesized
  source 1..22: mol_type = other DNA
aaacttacttgaatacctaaac

SEQ ID NO: 148088 - DNA, 22 bp, synthetic construct
  misc_feature 1..22: note = chemically synthesized
  source 1..22: mol_type = other DNA
aacttacttgaatacctaaaca

SEQ ID NO: 148089 - DNA, 22 bp, synthetic construct
  misc_feature 1..22: note = chemically synthesized
  source 1..22: mol_type = other DNA
acttgaatacctaaacagaatc

SEQ ID NO: 148090 - DNA, 22 bp, synthetic construct
  misc_feature 1..22: note = chemically synthesized
  source 1..22: mol_type = other DNA
cttgaatacctaaacagaatct

SEQ ID NO: 148091 - DNA, 22 bp, synthetic construct
  misc_feature 1..22: note = chemically synthesized
  source 1..22: mol_type = other DNA
gaatacctaaacagaatctgtt

SEQ ID NO: 148092 - DNA, 22 bp, synthetic construct
  misc_feature 1..22: note = chemically synthesized
  source 1..22: mol_type = other DNA
aatacctaaacagaatctgttg

SEQ ID NO: 148093 - DNA, 22 bp, synthetic construct
  misc_feature 1..22: note = chemically synthesized
  source 1..22: mol_type = other DNA
aacagaatctgttgtttccttg

SEQ ID NO: 148094 - DNA, 22 bp, synthetic construct
  misc_feature 1..22: note = chemically synthesized
  source 1..22: mol_type = other DNA
ttgtttccttgtgtttgaaagt

SEQ ID NO: 148095 - DNA, 22 bp, synthetic construct
  misc_feature 1..22: note = chemically synthesized
  source 1..22: mol_type = other DNA
tttccttgtgtttgaaagtgct

SEQ ID NO: 148096 - DNA, 22 bp, synthetic construct
  misc_feature 1..22: note = chemically synthesized
  source 1..22: mol_type = other DNA
ccttgtgtttgaaagtgctttc

SEQ ID NO: 148097 - DNA, 22 bp, synthetic construct
  misc_feature 1..22: note = chemically synthesized
  source 1..22: mol_type = other DNA
cttgtgtttgaaagtgctttca

SEQ ID NO: 148098 - DNA, 22 bp, synthetic construct
  misc_feature 1..22: note = chemically synthesized
  source 1..22: mol_type = other DNA
gtgtttgaaagtgctttcacag

SEQ ID NO: 148099 - DNA, 22 bp, synthetic construct
  misc_feature 1..22: note = chemically synthesized
  source 1..22: mol_type = other DNA
tgtttgaaagtgctttcacagt

SEQ ID NO: 148100 - DNA, 22 bp, synthetic construct
  misc_feature 1..22: note = chemically synthesized
  source 1..22: mol_type = other DNA
gaaagtgctttcacagtaactc

SEQ ID NO: 148101 - DNA, 22 bp, synthetic construct
  misc_feature 1..22: note = chemically synthesized
  source 1..22: mol_type = other DNA
aaagtgctttcacagtaactct

SEQ ID NO: 148102 - DNA, 22 bp, synthetic construct
  misc_feature 1..22: note = chemically synthesized
  source 1..22: mol_type = other DNA
tcacagtaactctgtctgtact

SEQ ID NO: 148103 - DNA, 22 bp, synthetic construct
  misc_feature 1..22: note = chemically synthesized
  source 1..22: mol_type = other DNA
cacagtaactctgtctgtactg

SEQ ID NO: 148104 - DNA, 22 bp, synthetic construct
  misc_feature 1..22: note = chemically synthesized
  source 1..22: mol_type = other DNA
acagtaactctgtctgtactgc

SEQ ID NO: 148105 - DNA, 22 bp, synthetic construct
  misc_feature 1..22: note = chemically synthesized
  source 1..22: mol_type = other DNA
tgtctgtactgccagaatatac

SEQ ID NO: 148106 - DNA, 22 bp, synthetic construct
  misc_feature 1..22: note = chemically synthesized
  source 1..22: mol_type = other DNA
tctgtactgccagaatatactg

SEQ ID NO: 148107 - DNA, 22 bp, synthetic construct
  misc_feature 1..22: note = chemically synthesized
  source 1..22: mol_type = other DNA
tactgccagaatatactgacaa

SEQ ID NO: 148108 - DNA, 22 bp, synthetic construct
  misc_feature 1..22: note = chemically synthesized
  source 1..22: mol_type = other DNA
ccagaatatactgacaatgtgt

SEQ ID NO: 148109 - DNA, 22 bp, synthetic construct
  misc_feature 1..22: note = chemically synthesized
  source 1..22: mol_type = other DNA
acaatgtgttatagttaactgt

SEQ ID NO: 148110 - DNA, 22 bp, synthetic construct
  misc_feature 1..22: note = chemically synthesized
  source 1..22: mol_type = other DNA
tagttaactgttttgatcacaa

SEQ ID NO: 148111 - DNA, 22 bp, synthetic construct
  misc_feature 1..22: note = chemically synthesized
  source 1..22: mol_type = other DNA
actgttttgatcacaacatttt

SEQ ID NO: 148112 - DNA, 22 bp, synthetic construct
  misc_feature 1..22: note = chemically synthesized
  source 1..22: mol_type = other DNA
ttttgatcacaacattttgaat

SEQ ID NO: 148113 - DNA, 22 bp, synthetic construct
  misc_feature 1..22: note = chemically synthesized
  source 1..22: mol_type = other DNA
tgatcacaacattttgaattga

SEQ ID NO: 148114 - DNA, 22 bp, synthetic construct
  misc_feature 1..22: note = chemically synthesized
  source 1..22: mol_type = other DNA
gatcacaacattttgaattgac

SEQ ID NO: 148115 - DNA, 22 bp, synthetic construct
  misc_feature 1..22: note = chemically synthesized
  source 1..22: mol_type = other DNA
atcacaacattttgaattgact

SEQ ID NO: 148116 - DNA, 22 bp, synthetic construct
  misc_feature 1..22: note = chemically synthesized
  source 1..22: mol_type = other DNA
tgaattgactggcagcagaagc

SEQ ID NO: 148117 - DNA, 22 bp, synthetic construct
  misc_feature 1..22: note = chemically synthesized
  source 1..22: mol_type = other DNA
gaattgactggcagcagaagct

SEQ ID NO: 148118 - DNA, 22 bp, synthetic construct
  misc_feature 1..22: note = chemically synthesized
  source 1..22: mol_type = other DNA
aattgactggcagcagaagctc

SEQ ID NO: 148119 - DNA, 22 bp, synthetic construct
  misc_feature 1..22: note = chemically synthesized
  source 1..22: mol_type = other DNA
actggcagcagaagctctttta

SEQ ID NO: 148120 - DNA, 22 bp, synthetic construct
  misc_feature 1..22: note = chemically synthesized
  source 1..22: mol_type = other DNA
gcagcagaagctcttttatatc

SEQ ID NO: 148121 - DNA, 22 bp, synthetic construct
  misc_feature 1..22: note = chemically synthesized
  source 1..22: mol_type = other DNA
ttttatatccatgtgttttcct

SEQ ID NO: 148122 - DNA, 22 bp, synthetic construct
  misc_feature 1..22: note = chemically synthesized
  source 1..22: mol_type = other DNA
ttatatccatgtgttttcctta

SEQ ID NO: 148123 - DNA, 22 bp, synthetic construct
  misc_feature 1..22: note = chemically synthesized
  source 1..22: mol_type = other DNA
tatatccatgtgttttccttaa

SEQ ID NO: 148124 - DNA, 22 bp, synthetic construct
  misc_feature 1..22: note = chemically synthesized
  source 1..22: mol_type = other DNA
atatccatgtgttttccttaag

SEQ ID NO: 148125 - DNA, 22 bp, synthetic construct
  misc_feature 1..22: note = chemically synthesized
  source 1..22: mol_type = other DNA
tatccatgtgttttccttaagt

SEQ ID NO: 148126 - DNA, 22 bp, synthetic construct
  misc_feature 1..22: note = chemically synthesized
  source 1..22: mol_type = other DNA
tccttaagtcattatacatagt

SEQ ID NO: 148127 - DNA, 22 bp, synthetic construct
  misc_feature 1..22: note = chemically synthesized
  source 1..22: mol_type = other DNA
ccttaagtcattatacatagta

SEQ ID NO: 148128 - DNA, 22 bp, synthetic construct
  misc_feature 1..22: note = chemically synthesized
  source 1..22: mol_type = other DNA
cttaagtcattatacatagtag

SEQ ID NO: 148129 - DNA, 22 bp, synthetic construct
  misc_feature 1..22: note = chemically synthesized
  source 1..22: mol_type = other DNA
aagtcattatacatagtaggca

SEQ ID NO: 148130 - DNA, 22 bp, synthetic construct
  misc_feature 1..22: note = chemically synthesized
  source 1..22: mol_type = other DNA
agtcattatacatagtaggcac

SEQ ID NO: 148131 - DNA, 22 bp, synthetic construct
  misc_feature 1..22: note = chemically synthesized
  source 1..22: mol_type = other DNA
tacatagtaggcactgagaact

SEQ ID NO: 148132 - DNA, 22 bp, synthetic construct
  misc_feature 1..22: note = chemically synthesized
  source 1..22: mol_type = other DNA
agaactctttatatctgaataa

SEQ ID NO: 148133 - DNA, 22 bp, synthetic construct
  misc_feature 1..22: note = chemically synthesized
  source 1..22: mol_type = other DNA
tttatatctgaataagatattt

SEQ ID NO: 148134 - DNA, 22 bp, synthetic construct
  misc_feature 1..22: note = chemically synthesized
  source 1..22: mol_type = other DNA
tatatctgaataagatatttag

SEQ ID NO: 148135 - DNA, 22 bp, synthetic construct
  misc_feature 1..22: note = chemically synthesized
  source 1..22: mol_type = other DNA
atatctgaataagatatttagg

SEQ ID NO: 148136 - DNA, 22 bp, synthetic construct
  misc_feature 1..22: note = chemically synthesized
  source 1..22: mol_type = other DNA
tatctgaataagatatttagga

SEQ ID NO: 148137 - DNA, 22 bp, synthetic construct
  misc_feature 1..22: note = chemically synthesized
  source 1..22: mol_type = other DNA
aataagatatttaggaaccact

SEQ ID NO: 148138 - DNA, 22 bp, synthetic construct
  misc_feature 1..22: note = chemically synthesized
  source 1..22: mol_type = other DNA
aggaaccactggtttacatatc

SEQ ID NO: 148139 - DNA, 22 bp, synthetic construct
  misc_feature 1..22: note = chemically synthesized
  source 1..22: mol_type = other DNA
ggaaccactggtttacatatca

SEQ ID NO: 148140 - DNA, 22 bp, synthetic construct
  misc_feature 1..22: note = chemically synthesized
  source 1..22: mol_type = other DNA
gtttacatatcagaagcagagc

SEQ ID NO: 148141 - DNA, 22 bp, synthetic construct
  misc_feature 1..22: note = chemically synthesized
  source 1..22: mol_type = other DNA
acatatcagaagcagagctact

SEQ ID NO: 148142 - DNA, 22 bp, synthetic construct
  misc_feature 1..22: note = chemically synthesized
  source 1..22: mol_type = other DNA
catatcagaagcagagctactc

SEQ ID NO: 148143 - DNA, 22 bp, synthetic construct
  misc_feature 1..22: note = chemically synthesized
  source 1..22: mol_type = other DNA
ctcagggcattttggggaagat

SEQ ID NO: 148144 - DNA, 22 bp, synthetic construct
  misc_feature 1..22: note = chemically synthesized
  source 1..22: mol_type = other DNA
agggcattttggggaagatcac

SEQ ID NO: 148145 - DNA, 22 bp, synthetic construct
  misc_feature 1..22: note = chemically synthesized
  source 1..22: mol_type = other DNA
tggggaagatcactttcacatt

SEQ ID NO: 148146 - DNA, 22 bp, synthetic construct
  misc_feature 1..22: note = chemically synthesized
  source 1..22: mol_type = other DNA
ggggaagatcactttcacattc

SEQ ID NO: 148147 - DNA, 22 bp, synthetic construct
  misc_feature 1..22: note = chemically synthesized
  source 1..22: mol_type = other DNA
gggaagatcactttcacattcc

SEQ ID NO: 148148 - DNA, 22 bp, synthetic construct
  misc_feature 1..22: note = chemically synthesized
  source 1..22: mol_type = other DNA
tcacattcctgagcatagggaa

SEQ ID NO: 148149 - DNA, 22 bp, synthetic construct
  misc_feature 1..22: note = chemically synthesized
  source 1..22: mol_type = other DNA
cacattcctgagcatagggaag

SEQ ID NO: 148150 - DNA, 22 bp, synthetic construct
  misc_feature 1..22: note = chemically synthesized
  source 1..22: mol_type = other DNA
acattcctgagcatagggaagt

SEQ ID NO: 148151 - DNA, 22 bp, synthetic construct
  misc_feature 1..22: note = chemically synthesized
  source 1..22: mol_type = other DNA
ctgagcatagggaagttctcat

SEQ ID NO: 148152 - DNA, 22 bp, synthetic construct
  misc_feature 1..22: note = chemically synthesized
  source 1..22: mol_type = other DNA
agcatagggaagttctcataag

SEQ ID NO: 148153 - DNA, 22 bp, synthetic construct
  misc_feature 1..22: note = chemically synthesized
  source 1..22: mol_type = other DNA
tcataagagtaagatattaaaa

SEQ ID NO: 148154 - DNA, 22 bp, synthetic construct
  misc_feature 1..22: note = chemically synthesized
  source 1..22: mol_type = other DNA
ataagagtaagatattaaaagg

SEQ ID NO: 148155 - DNA, 22 bp, synthetic construct
  misc_feature 1..22: note = chemically synthesized
  source 1..22: mol_type = other DNA
aaaggagatacttgtgtggtat

SEQ ID NO: 148156 - DNA, 22 bp, synthetic construct
  misc_feature 1..22: note = chemically synthesized
  source 1..22: mol_type = other DNA
gtgtggtattcgaaagacagta

SEQ ID NO: 148157 - DNA, 22 bp, synthetic construct
  misc_feature 1..22: note = chemically synthesized
  source 1..22: mol_type = other DNA
tgtggtattcgaaagacagtaa

SEQ ID NO: 148158 - DNA, 22 bp, synthetic construct
  misc_feature 1..22: note = chemically synthesized
  source 1..22: mol_type = other DNA
gaaagacagtaagagagattgt

SEQ ID NO: 148159 - DNA, 22 bp, synthetic construct
  misc_feature 1..22: note = chemically synthesized
  source 1..22: mol_type = other DNA
tagaccttatgatcttgatagg

SEQ ID NO: 148160 - DNA, 22 bp, synthetic construct
  misc_feature 1..22: note = chemically synthesized
  source 1..22: mol_type = other DNA
atgatcttgatagggaaaacaa

SEQ ID NO: 148161 - DNA, 22 bp, synthetic construct
  misc_feature 1..22: note = chemically synthesized
  source 1..22: mol_type = other DNA
tgatcttgatagggaaaacaaa

SEQ ID NO: 148162 - DNA, 22 bp, synthetic construct
  misc_feature 1..22: note = chemically synthesized
  source 1..22: mol_type = other DNA
gatagggaaaacaaactacatt

SEQ ID NO: 148163 - DNA, 22 bp, synthetic construct
  misc_feature 1..22: note = chemically synthesized
  source 1..22: mol_type = other DNA
atagggaaaacaaactacattc

SEQ ID NO: 148164 - DNA, 22 bp, synthetic construct
  misc_feature 1..22: note = chemically synthesized
  source 1..22: mol_type = other DNA
cattcctttctccaaaagtcaa

SEQ ID NO: 148165 - DNA, 22 bp, synthetic construct
  misc_feature 1..22: note = chemically synthesized
  source 1..22: mol_type = other DNA
ctttctccaaaagtcaaaaaaa

SEQ ID NO: 148166 - DNA, 22 bp, synthetic construct
  misc_feature 1..22: note = chemically synthesized
  source 1..22: mol_type = other DNA
tctccaaaagtcaaaaaaaaag

SEQ ID NO: 148167 - DNA, 22 bp, synthetic construct
  misc_feature 1..22: note = chemically synthesized
  source 1..22: mol_type = other DNA
ctccaaaagtcaaaaaaaaaga

SEQ ID NO: 148168 - DNA, 22 bp, synthetic construct
  misc_feature 1..22: note = chemically synthesized
  source 1..22: mol_type = other DNA
tccaaaagtcaaaaaaaaagag

SEQ ID NO: 148169 - DNA, 22 bp, synthetic construct
  misc_feature 1..22: note = chemically synthesized
  source 1..22: mol_type = other DNA
caaaagtcaaaaaaaaagagca

SEQ ID NO: 148170 - DNA, 22 bp, synthetic construct
  misc_feature 1..22: note = chemically synthesized
  source 1..22: mol_type = other DNA
actataccttctattcctacac

SEQ ID NO: 148171 - DNA, 22 bp, synthetic construct
  misc_feature 1..22: note = chemically synthesized
  source 1..22: mol_type = other DNA
ctataccttctattcctacacc

SEQ ID NO: 148172 - DNA, 22 bp, synthetic construct
  misc_feature 1..22: note = chemically synthesized
  source 1..22: mol_type = other DNA
taccttctattcctacaccatt

SEQ ID NO: 148173 - DNA, 22 bp, synthetic construct
  misc_feature 1..22: note = chemically synthesized
  source 1..22: mol_type = other DNA
ctattcctacaccattagaagt

SEQ ID NO: 148174 - DNA, 22 bp, synthetic construct
  misc_feature 1..22: note = chemically synthesized
  source 1..22: mol_type = other DNA
tattcctacaccattagaagta

SEQ ID NO: 148175 - DNA, 22 bp, synthetic construct
  misc_feature 1..22: note = chemically synthesized
  source 1..22: mol_type = other DNA
ttcctacaccattagaagtagt

SEQ ID NO: 148176 - DNA, 22 bp, synthetic construct
  misc_feature 1..22: note = chemically synthesized
  source 1..22: mol_type = other DNA
ctacaccattagaagtagtcag

SEQ ID NO: 148177 - DNA, 22 bp, synthetic construct
  misc_feature 1..22: note = chemically synthesized
  source 1..22: mol_type = other DNA
caccattagaagtagtcagtga

SEQ ID NO: 148178 - DNA, 22 bp, synthetic construct
  misc_feature 1..22: note = chemically synthesized
  source 1..22: mol_type = other DNA
gaagtagtcagtgagtctaggc

SEQ ID NO: 148179 - DNA, 22 bp, synthetic construct
  misc_feature 1..22: note = chemically synthesized
  source 1..22: mol_type = other DNA
ggcaagatgttggccctaaaaa

SEQ ID NO: 148180 - DNA, 22 bp, synthetic construct
  misc_feature 1..22: note = chemically synthesized
  source 1..22: mol_type = other DNA
gccctaaaaatccaaataccag

SEQ ID NO: 148181 - DNA, 22 bp, synthetic construct
  misc_feature 1..22: note = chemically synthesized
  source 1..22: mol_type = other DNA
aaaatccaaataccagagaatt

SEQ ID NO: 148182 - DNA, 22 bp, synthetic construct
  misc_feature 1..22: note = chemically synthesized
  source 1..22: mol_type = other DNA
atgagaacatcacctggatggg

SEQ ID NO: 148183 - DNA, 22 bp, synthetic construct
  misc_feature 1..22: note = chemically synthesized
  source 1..22: mol_type = other DNA
gatgggacatgtgccgagcaca

SEQ ID NO: 148184 - DNA, 22 bp, synthetic construct
  misc_feature 1..22: note = chemically synthesized
  source 1..22: mol_type = other DNA
ctatatgctaggcattgctatc

SEQ ID NO: 148185 - DNA, 22 bp, synthetic construct
  misc_feature 1..22: note = chemically synthesized
  source 1..22: mol_type = other DNA
tatgctaggcattgctatcttc

SEQ ID NO: 148186 - DNA, 22 bp, synthetic construct
  misc_feature 1..22: note = chemically synthesized
  source 1..22: mol_type = other DNA
ggcattgctatcttcatattga

SEQ ID NO: 148187 - DNA, 22 bp, synthetic construct
  misc_feature 1..22: note = chemically synthesized
  source 1..22: mol_type = other DNA
ctatcttcatattgaagatgag

SEQ ID NO: 148188 - DNA, 22 bp, synthetic construct
  misc_feature 1..22: note = chemically synthesized
  source 1..22: mol_type = other DNA
tcttcatattgaagatgaggag

SEQ ID NO: 148189 - DNA, 22 bp, synthetic construct
  misc_feature 1..22: note = chemically synthesized
  source 1..22: mol_type = other DNA
catattgaagatgaggaggtca

SEQ ID NO: 148190 - DNA, 22 bp, synthetic construct
  misc_feature 1..22: note = chemically synthesized
  source 1..22: mol_type = other DNA
atattgaagatgaggaggtcaa

SEQ ID NO: 148191 - DNA, 22 bp, synthetic construct
  misc_feature 1..22: note = chemically synthesized
  source 1..22: mol_type = other DNA
aagatgaggaggtcaagagatg

SEQ ID NO: 148192 - DNA, 22 bp, synthetic construct
  misc_feature 1..22: note = chemically synthesized
  source 1..22: mol_type = other DNA
ggcaccttgttgttatattaaa

SEQ ID NO: 148193 - DNA, 22 bp, synthetic construct
  misc_feature 1..22: note = chemically synthesized
  source 1..22: mol_type = other DNA
gcaccttgttgttatattaaaa

SEQ ID NO: 148194 - DNA, 22 bp, synthetic construct
  misc_feature 1..22: note = chemically synthesized
  source 1..22: mol_type = other DNA
gttgttatattaaaattatttg

SEQ ID NO: 148195 - DNA, 22 bp, synthetic construct
  misc_feature 1..22: note = chemically synthesized
  source 1..22: mol_type = other DNA
ttgttatattaaaattatttgt

SEQ ID NO: 148196 - DNA, 22 bp, synthetic construct
  misc_feature 1..22: note = chemically synthesized
  source 1..22: mol_type = other DNA
ttatattaaaattatttgttag

SEQ ID NO: 148197 - DNA, 22 bp, synthetic construct
  misc_feature 1..22: note = chemically synthesized
  source 1..22: mol_type = other DNA
tattaaaattatttgttagagt

SEQ ID NO: 148198 - DNA, 22 bp, synthetic construct
  misc_feature 1..22: note = chemically synthesized
  source 1..22: mol_type = other DNA
aaattatttgttagagtagagc

SEQ ID NO: 148199 - DNA, 22 bp, synthetic construct
  misc_feature 1..22: note = chemically synthesized
  source 1..22: mol_type = other DNA
tttgttagagtagagcttttgt

SEQ ID NO: 148200 - DNA, 22 bp, synthetic construct
  misc_feature 1..22: note = chemically synthesized
  source 1..22: mol_type = other DNA
gttagagtagagcttttgtaag

SEQ ID NO: 148201 - DNA, 22 bp, synthetic construct
  misc_feature 1..22: note = chemically synthesized
  source 1..22: mol_type = other DNA
ttagagtagagcttttgtaaga

SEQ ID NO: 148202 - DNA, 22 bp, synthetic construct
  misc_feature 1..22: note = chemically synthesized
  source 1..22: mol_type = other DNA
gagtagagcttttgtaagagtc

SEQ ID NO: 148203 - DNA, 22 bp, synthetic construct
  misc_feature 1..22: note = chemically synthesized
  source 1..22: mol_type = other DNA
ttgtaagagtctaggagtgtgg

SEQ ID NO: 148204 - DNA, 22 bp, synthetic construct
  misc_feature 1..22: note = chemically synthesized
  source 1..22: mol_type = other DNA
tgtaagagtctaggagtgtggg

SEQ ID NO: 148205 - DNA, 22 bp, synthetic construct
  misc_feature 1..22: note = chemically synthesized
  source 1..22: mol_type = other DNA
gtaagagtctaggagtgtggga

SEQ ID NO: 148206 - DNA, 22 bp, synthetic construct
  misc_feature 1..22: note = chemically synthesized
  source 1..22: mol_type = other DNA
taagagtctaggagtgtgggag

SEQ ID NO: 148207 - DNA, 22 bp, synthetic construct
  misc_feature 1..22: note = chemically synthesized
  source 1..22: mol_type = other DNA
ggagtgtgggagctaaatgatg

SEQ ID NO: 148208 - DNA, 22 bp, synthetic construct
  misc_feature 1..22: note = chemically synthesized
  source 1..22: mol_type = other DNA
aatgatgatacacatggacaca

SEQ ID NO: 148209 - DNA, 22 bp, synthetic construct
  misc_feature 1..22: note = chemically synthesized
  source 1..22: mol_type = other DNA
cttgagggttgagggtgggaag

SEQ ID NO: 148210 - DNA, 22 bp, synthetic construct
  misc_feature 1..22: note = chemically synthesized
  source 1..22: mol_type = other DNA
gagggttgagggtgggaagagg

SEQ ID NO: 148211 - DNA, 22 bp, synthetic construct
  misc_feature 1..22: note = chemically synthesized
  source 1..22: mol_type = other DNA
agggttgagggtgggaagaggg

SEQ ID NO: 148212 - DNA, 22 bp, synthetic construct
  misc_feature 1..22: note = chemically synthesized
  source 1..22: mol_type = other DNA
agggtgggaagagggagacgat

SEQ ID NO: 148213 - DNA, 22 bp, synthetic construct
  misc_feature 1..22: note = chemically synthesized
  source 1..22: mol_type = other DNA
ttgggtattaagttcatcactg

SEQ ID NO: 148214 - DNA, 22 bp, synthetic construct
  misc_feature 1..22: note = chemically synthesized
  source 1..22: mol_type = other DNA
ggtattaagttcatcactgagt

SEQ ID NO: 148215 - DNA, 22 bp, synthetic construct
  misc_feature 1..22: note = chemically synthesized
  source 1..22: mol_type = other DNA
agttcatcactgagtgatgaaa

SEQ ID NO: 148216 - DNA, 22 bp, synthetic construct
  misc_feature 1..22: note = chemically synthesized
  source 1..22: mol_type = other DNA
atcactgagtgatgaaataatc

SEQ ID NO: 148217 - DNA, 22 bp, synthetic construct
  misc_feature 1..22: note = chemically synthesized
  source 1..22: mol_type = other DNA
agtgatgaaataatctgtacat

SEQ ID NO: 148218 - DNA, 22 bp, synthetic construct
  misc_feature 1..22: note = chemically synthesized
  source 1..22: mol_type = other DNA
tacatcaagacccagtgatatg

SEQ ID NO: 148219 - DNA, 22 bp, synthetic construct
  misc_feature 1..22: note = chemically synthesized
  source 1..22: mol_type = other DNA
acctatataacttgtacatgta

SEQ ID NO: 148220 - DNA, 22 bp, synthetic construct
  misc_feature 1..22: note = chemically synthesized
  source 1..22: mol_type = other DNA
cctatataacttgtacatgtac

SEQ ID NO: 148221 - DNA, 22 bp, synthetic construct
  misc_feature 1..22: note = chemically synthesized
  source 1..22: mol_type = other DNA
tataacttgtacatgtaccccc

SEQ ID NO: 148222 - DNA, 22 bp, synthetic construct
  misc_feature 1..22: note = chemically synthesized
  source 1..22: mol_type = other DNA
gtacatgtacccccaaatttaa

SEQ ID NO: 148223 - DNA, 22 bp, synthetic construct
  misc_feature 1..22: note = chemically synthesized
  source 1..22: mol_type = other DNA
tacatgtacccccaaatttaaa

SEQ ID NO: 148224 - DNA, 22 bp, synthetic construct
  misc_feature 1..22: note = chemically synthesized
  source 1..22: mol_type = other DNA
aaaatgaaagttaaaacaaagt

SEQ ID NO: 148225 - DNA, 22 bp, synthetic construct
  misc_feature 1..22: note = chemically synthesized
  source 1..22: mol_type = other DNA
aaatgaaagttaaaacaaagta

SEQ ID NO: 148226 - DNA, 22 bp, synthetic construct
  misc_feature 1..22: note = chemically synthesized
  source 1..22: mol_type = other DNA
aaacaaagtataggaatggaat

SEQ ID NO: 148227 - DNA, 22 bp, synthetic construct
  misc_feature 1..22: note = chemically synthesized
  source 1..22: mol_type = other DNA
attcctcaagatttggctttaa

SEQ ID NO: 148228 - DNA, 22 bp, synthetic construct
  misc_feature 1..22: note = chemically synthesized
  source 1..22: mol_type = other DNA
ctcaagatttggctttaatttt

SEQ ID NO: 148229 - DNA, 22 bp, synthetic construct
  misc_feature 1..22: note = chemically synthesized
  source 1..22: mol_type = other DNA
aagatttggctttaattttatt

SEQ ID NO: 148230 - DNA, 22 bp, synthetic construct
  misc_feature 1..22: note = chemically synthesized
  source 1..22: mol_type = other DNA
ggctttaattttatttgataat

SEQ ID NO: 148231 - DNA, 22 bp, synthetic construct
  misc_feature 1..22: note = chemically synthesized
  source 1..22: mol_type = other DNA
gctttaattttatttgataatt

SEQ ID NO: 148232 - DNA, 22 bp, synthetic construct
  misc_feature 1..22: note = chemically synthesized
  source 1..22: mol_type = other DNA
taattttatttgataatttatc

SEQ ID NO: 148233 - DNA, 22 bp, synthetic construct
  misc_feature 1..22: note = chemically synthesized
  source 1..22: mol_type = other DNA
aattttatttgataatttatca

SEQ ID NO: 148234 - DNA, 22 bp, synthetic construct
  misc_feature 1..22: note = chemically synthesized
  source 1..22: mol_type = other DNA
attttatttgataatttatcaa

SEQ ID NO: 148235 - DNA, 22 bp, synthetic construct
  misc_feature 1..22: note = chemically synthesized
  source 1..22: mol_type = other DNA
tatttgataatttatcaaatgg

SEQ ID NO: 148236 - DNA, 22 bp, synthetic construct
  misc_feature 1..22: note = chemically synthesized
  source 1..22: mol_type = other DNA
atttgataatttatcaaatggt

SEQ ID NO: 148237 - DNA, 22 bp, synthetic construct
  misc_feature 1..22: note = chemically synthesized
  source 1..22: mol_type = other DNA
tttgataatttatcaaatggtt

SEQ ID NO: 148238 - DNA, 22 bp, synthetic construct
  misc_feature 1..22: note = chemically synthesized
  source 1..22: mol_type = other DNA
gataatttatcaaatggttgtt

SEQ ID NO: 148239 - DNA, 22 bp, synthetic construct
  misc_feature 1..22: note = chemically synthesized
  source 1..22: mol_type = other DNA
ataatttatcaaatggttgttt

SEQ ID NO: 148240 - DNA, 22 bp, synthetic construct
  misc_feature 1..22: note = chemically synthesized
  source 1..22: mol_type = other DNA
atcaaatggttgtttttctttt

SEQ ID NO: 148241 - DNA, 22 bp, synthetic construct
  misc_feature 1..22: note = chemically synthesized
  source 1..22: mol_type = other DNA
tcaaatggttgtttttcttttc

SEQ ID NO: 148242 - DNA, 22 bp, synthetic construct
  misc_feature 1..22: note = chemically synthesized
  source 1..22: mol_type = other DNA
tttttcttttctcactatggcg

SEQ ID NO: 148243 - DNA, 22 bp, synthetic construct
  misc_feature 1..22: note = chemically synthesized
  source 1..22: mol_type = other DNA
ttcttttctcactatggcgttg

SEQ ID NO: 148244 - DNA, 22 bp, synthetic construct
  misc_feature 1..22: note = chemically synthesized
  source 1..22: mol_type = other DNA
tcttttctcactatggcgttgc

SEQ ID NO: 148245 - DNA, 22 bp, synthetic construct
  misc_feature 1..22: note = chemically synthesized
  source 1..22: mol_type = other DNA
cttttctcactatggcgttgct

SEQ ID NO: 148246 - DNA, 22 bp, synthetic construct
  misc_feature 1..22: note = chemically synthesized
  source 1..22: mol_type = other DNA
ttttctcactatggcgttgctt

SEQ ID NO: 148247 - DNA, 22 bp, synthetic construct
  misc_feature 1..22: note = chemically synthesized
  source 1..22: mol_type = other DNA
ttctcactatggcgttgcttta

SEQ ID NO: 148248 - DNA, 22 bp, synthetic construct
  misc_feature 1..22: note = chemically synthesized
  source 1..22: mol_type = other DNA
tctcactatggcgttgctttat

SEQ ID NO: 148249 - DNA, 22 bp, synthetic construct
  misc_feature 1..22: note = chemically synthesized
  source 1..22: mol_type = other DNA
ctcactatggcgttgctttata

SEQ ID NO: 148250 - DNA, 22 bp, synthetic construct
  misc_feature 1..22: note = chemically synthesized
  source 1..22: mol_type = other DNA
tcactatggcgttgctttataa

SEQ ID NO: 148251 - DNA, 22 bp, synthetic construct
  misc_feature 1..22: note = chemically synthesized
  source 1..22: mol_type = other DNA
actatggcgttgctttataaac

SEQ ID NO: 148252 - DNA, 22 bp, synthetic construct
  misc_feature 1..22: note = chemically synthesized
  source 1..22: mol_type = other DNA
tggcgttgctttataaactatg

SEQ ID NO: 148253 - DNA, 22 bp, synthetic construct
  misc_feature 1..22: note = chemically synthesized
  source 1..22: mol_type = other DNA
ctttataaactatgttcagtat

SEQ ID NO: 148254 - DNA, 22 bp, synthetic construct
  misc_feature 1..22: note = chemically synthesized
  source 1..22: mol_type = other DNA
tataaactatgttcagtatgtc

SEQ ID NO: 148255 - DNA, 22 bp, synthetic construct
  misc_feature 1..22: note = chemically synthesized
  source 1..22: mol_type = other DNA
ataaactatgttcagtatgtct

SEQ ID NO: 148256 - DNA, 22 bp, synthetic construct
  misc_feature 1..22: note = chemically synthesized
  source 1..22: mol_type = other DNA
taaactatgttcagtatgtctg

SEQ ID NO: 148257 - DNA, 22 bp, synthetic construct
  misc_feature 1..22: note = chemically synthesized
  source 1..22: mol_type = other DNA
tgttcagtatgtctgaatgaaa

SEQ ID NO: 148258 - DNA, 22 bp, synthetic construct
  misc_feature 1..22: note = chemically synthesized
  source 1..22: mol_type = other DNA
agtatgtctgaatgaaagggtg

SEQ ID NO: 148259 - DNA, 22 bp, synthetic construct
  misc_feature 1..22: note = chemically synthesized
  source 1..22: mol_type = other DNA
aatgaaagggtgtgtgtgtgtg

SEQ ID NO: 148260 - DNA, 22 bp, synthetic construct
  misc_feature 1..22: note = chemically synthesized
  source 1..22: mol_type = other DNA
gagttcatgaaaatttttcaat

SEQ ID NO: 148261 - DNA, 22 bp, synthetic construct
  misc_feature 1..22: note = chemically synthesized
  source 1..22: mol_type = other DNA
agttcatgaaaatttttcaata

SEQ ID NO: 148262 - DNA, 22 bp, synthetic construct
  misc_feature 1..22: note = chemically synthesized
  source 1..22: mol_type = other DNA
atgaaaatttttcaataaaata

SEQ ID NO: 148263 - DNA, 22 bp, synthetic construct
  misc_feature 1..22: note = chemically synthesized
  source 1..22: mol_type = other DNA
ttcaataaaataatttaatgtc

SEQ ID NO: 148264 - DNA, 22 bp, synthetic construct
  misc_feature 1..22: note = chemically synthesized
  source 1..22: mol_type = other DNA
tcaataaaataatttaatgtca

SEQ ID NO: 148265 - DNA, 22 bp, synthetic construct
  misc_feature 1..22: note = chemically synthesized
  source 1..22: mol_type = other DNA
caataaaataatttaatgtcag

SEQ ID NO: 148266 - DNA, 22 bp, synthetic construct
  misc_feature 1..22: note = chemically synthesized
  source 1..22: mol_type = other DNA
aataaaataatttaatgtcagg

SEQ ID NO: 148267 - DNA, 22 bp, synthetic construct
  misc_feature 1..22: note = chemically synthesized
  source 1..22: mol_type = other DNA
aatgtcaggagaattaagccta

SEQ ID NO: 148268 - DNA, 22 bp, synthetic construct
  misc_feature 1..22: note = chemically synthesized
  source 1..22: mol_type = other DNA
atgtcaggagaattaagcctaa

SEQ ID NO: 148269 - DNA, 22 bp, synthetic construct
  misc_feature 1..22: note = chemically synthesized
  source 1..22: mol_type = other DNA
agcctaatagtctcctaaatca

SEQ ID NO: 148270 - DNA, 22 bp, synthetic construct
  misc_feature 1..22: note = chemically synthesized
  source 1..22: mol_type = other DNA
atagtctcctaaatcatccatc

SEQ ID NO: 148271 - DNA, 22 bp, synthetic construct
  misc_feature 1..22: note = chemically synthesized
  source 1..22: mol_type = other DNA
ctaaatcatccatctcttgagc

SEQ ID NO: 148272 - DNA, 22 bp, synthetic construct
  misc_feature 1..22: note = chemically synthesized
  source 1..22: mol_type = other DNA
aatcatccatctcttgagcttc

SEQ ID NO: 148273 - DNA, 22 bp, synthetic construct
  misc_feature 1..22: note = chemically synthesized
  source 1..22: mol_type = other DNA
ttgagcttcagagcagtcctct

SEQ ID NO: 148274 - DNA, 22 bp, synthetic construct
  misc_feature 1..22: note = chemically synthesized
  source 1..22: mol_type = other DNA
gagcttcagagcagtcctctga

SEQ ID NO: 148275 - DNA, 22 bp, synthetic construct
  misc_feature 1..22: note = chemically synthesized
  source 1..22: mol_type = other DNA
agcttcagagcagtcctctgaa

SEQ ID NO: 148276 - DNA, 22 bp, synthetic construct
  misc_feature 1..22: note = chemically synthesized
  source 1..22: mol_type = other DNA
cagagcagtcctctgaattaat

SEQ ID NO: 148277 - DNA, 22 bp, synthetic construct
  misc_feature 1..22: note = chemically synthesized
  source 1..22: mol_type = other DNA
agagcagtcctctgaattaatg

SEQ ID NO: 148278 - DNA, 22 bp, synthetic construct
  misc_feature 1..22: note = chemically synthesized
  source 1..22: mol_type = other DNA
tgaattaatgcctacatgtttg

SEQ ID NO: 148279 - DNA, 22 bp, synthetic construct
  misc_feature 1..22: note = chemically synthesized
  source 1..22: mol_type = other DNA
aattaatgcctacatgtttgta

SEQ ID NO: 148280 - DNA, 22 bp, synthetic construct
  misc_feature 1..22: note = chemically synthesized
  source 1..22: mol_type = other DNA
atgcctacatgtttgtaaaggg

SEQ ID NO: 148281 - DNA, 22 bp, synthetic construct
  misc_feature 1..22: note = chemically synthesized
  source 1..22: mol_type = other DNA
catgtttgtaaagggtgttcag

SEQ ID NO: 148282 - DNA, 22 bp, synthetic construct
  misc_feature 1..22: note = chemically synthesized
  source 1..22: mol_type = other DNA
gtaaagggtgttcagactgaag

SEQ ID NO: 148283 - DNA, 22 bp, synthetic construct
  misc_feature 1..22: note = chemically synthesized
  source 1..22: mol_type = other DNA
taaagggtgttcagactgaagc

SEQ ID NO: 148284 - DNA, 22 bp, synthetic construct
  misc_feature 1..22: note = chemically synthesized
  source 1..22: mol_type = other DNA
agactgaagccaagattctacc

SEQ ID NO: 148285 - DNA, 22 bp, synthetic construct
  misc_feature 1..22: note = chemically synthesized
  source 1..22: mol_type = other DNA
aagccaagattctacctctaaa

SEQ ID NO: 148286 - DNA, 22 bp, synthetic construct
  misc_feature 1..22: note = chemically synthesized
  source 1..22: mol_type = other DNA
tacctctaaagagatgcaatct

SEQ ID NO: 148287 - DNA, 22 bp, synthetic construct
  misc_feature 1..22: note = chemically synthesized
  source 1..22: mol_type = other DNA
cctctaaagagatgcaatctca

SEQ ID NO: 148288 - DNA, 22 bp, synthetic construct
  misc_feature 1..22: note = chemically synthesized
  source 1..22: mol_type = other DNA
taaagagatgcaatctcaaatt

SEQ ID NO: 148289 - DNA, 22 bp, synthetic construct
  misc_feature 1..22: note = chemically synthesized
  source 1..22: mol_type = other DNA
aagagatgcaatctcaaattta

SEQ ID NO: 148290 - DNA, 22 bp, synthetic construct
  misc_feature 1..22: note = chemically synthesized
  source 1..22: mol_type = other DNA
aaatttatctgaagactgtacc

SEQ ID NO: 148291 - DNA, 22 bp, synthetic construct
  misc_feature 1..22: note = chemically synthesized
  source 1..22: mol_type = other DNA
atctgaagactgtacctctgct

SEQ ID NO: 148292 - DNA, 22 bp, synthetic construct
  misc_feature 1..22: note = chemically synthesized
  source 1..22: mol_type = other DNA
tctgaagactgtacctctgctc

SEQ ID NO: 148293 - DNA, 22 bp, synthetic construct
  misc_feature 1..22: note = chemically synthesized
  source 1..22: mol_type = other DNA
aagactgtacctctgctctcca

SEQ ID NO: 148294 - DNA, 22 bp, synthetic construct
  misc_feature 1..22: note = chemically synthesized
  source 1..22: mol_type = other DNA
tacctctgctctccataaattg

SEQ ID NO: 148295 - DNA, 22 bp, synthetic construct
  misc_feature 1..22: note = chemically synthesized
  source 1..22: mol_type = other DNA
tgctctccataaattgacacca

SEQ ID NO: 148296 - DNA, 22 bp, synthetic construct
  misc_feature 1..22: note = chemically synthesized
  source 1..22: mol_type = other DNA
ctctccataaattgacaccatg

SEQ ID NO: 148297 - DNA, 22 bp, synthetic construct
  misc_feature 1..22: note = chemically synthesized
  source 1..22: mol_type = other DNA
tccataaattgacaccatggcc

SEQ ID NO: 148298 - DNA, 22 bp, synthetic construct
  misc_feature 1..22: note = chemically synthesized
  source 1..22: mol_type = other DNA
cataaattgacaccatggccca

SEQ ID NO: 148299 - DNA, 22 bp, synthetic construct
  misc_feature 1..22: note = chemically synthesized
  source 1..22: mol_type = other DNA
acaccatggcccacttaatgag

SEQ ID NO: 148300 - DNA, 22 bp, synthetic construct
  misc_feature 1..22: note = chemically synthesized
  source 1..22: mol_type = other DNA
aatgaggttaaaaaaaagctaa

SEQ ID NO: 148301 - DNA, 22 bp, synthetic construct
  misc_feature 1..22: note = chemically synthesized
  source 1..22: mol_type = other DNA
atgaggttaaaaaaaagctaat

SEQ ID NO: 148302 - DNA, 22 bp, synthetic construct
  misc_feature 1..22: note = chemically synthesized
  source 1..22: mol_type = other DNA
aaaaaaagctaattctgaatga

SEQ ID NO: 148303 - DNA, 22 bp, synthetic construct
  misc_feature 1..22: note = chemically synthesized
  source 1..22: mol_type = other DNA
attctgaatgaaaatctgagcc

SEQ ID NO: 148304 - DNA, 22 bp, synthetic construct
  misc_feature 1..22: note = chemically synthesized
  source 1..22: mol_type = other DNA
tgaatgaaaatctgagcccagt

SEQ ID NO: 148305 - DNA, 22 bp, synthetic construct
  misc_feature 1..22: note = chemically synthesized
  source 1..22: mol_type = other DNA
aatgaaaatctgagcccagtgg

SEQ ID NO: 148306 - DNA, 22 bp, synthetic construct
  misc_feature 1..22: note = chemically synthesized
  source 1..22: mol_type = other DNA
agcccagtggaggaaatattaa

SEQ ID NO: 148307 - DNA, 22 bp, synthetic construct
  misc_feature 1..22: note = chemically synthesized
  source 1..22: mol_type = other DNA
atgaacaaggtgcagactgaaa

SEQ ID NO: 148308 - DNA, 22 bp, synthetic construct
  misc_feature 1..22: note = chemically synthesized
  source 1..22: mol_type = other DNA
aaatataaatttttctgtaata

SEQ ID NO: 148309 - DNA, 22 bp, synthetic construct
  misc_feature 1..22: note = chemically synthesized
  source 1..22: mol_type = other DNA
ttctgtaataattatgcatata

SEQ ID NO: 148310 - DNA, 22 bp, synthetic construct
  misc_feature 1..22: note = chemically synthesized
  source 1..22: mol_type = other DNA
tctgtaataattatgcatatac

SEQ ID NO: 148311 - DNA, 22 bp, synthetic construct
  misc_feature 1..22: note = chemically synthesized
  source 1..22: mol_type = other DNA
ctgtaataattatgcatatact

SEQ ID NO: 148312 - DNA, 22 bp, synthetic construct
  misc_feature 1..22: note = chemically synthesized
  source 1..22: mol_type = other DNA
tgtaataattatgcatatactt

SEQ ID NO: 148313 - DNA, 22 bp, synthetic construct
  misc_feature 1..22: note = chemically synthesized
  source 1..22: mol_type = other DNA
taataattatgcatatacttta

SEQ ID NO: 148314 - DNA, 22 bp, synthetic construct
  misc_feature 1..22: note = chemically synthesized
  source 1..22: mol_type = other DNA
tgcatatactttagcaaagttc

SEQ ID NO: 148315 - DNA, 22 bp, synthetic construct
  misc_feature 1..22: note = chemically synthesized
  source 1..22: mol_type = other DNA
tagcaaagttctgtctatgttg

SEQ ID NO: 148316 - DNA, 22 bp, synthetic construct
  misc_feature 1..22: note = chemically synthesized
  source 1..22: mol_type = other DNA
agcaaagttctgtctatgttga

SEQ ID NO: 148317 - DNA, 22 bp, synthetic construct
  misc_feature 1..22: note = chemically synthesized
  source 1..22: mol_type = other DNA
gcaaagttctgtctatgttgac

SEQ ID NO: 148318 - DNA, 22 bp, synthetic construct
  misc_feature 1..22: note = chemically synthesized
  source 1..22: mol_type = other DNA
tgtctatgttgactttattgct

SEQ ID NO: 148319 - DNA, 22 bp, synthetic construct
  misc_feature 1..22: note = chemically synthesized
  source 1..22: mol_type = other DNA
tctatgttgactttattgcttt

SEQ ID NO: 148320 - DNA, 22 bp, synthetic construct
  misc_feature 1..22: note = chemically synthesized
  source 1..22: mol_type = other DNA
tgttgactttattgctttttgg

SEQ ID NO: 148321 - DNA, 22 bp, synthetic construct
  misc_feature 1..22: note = chemically synthesized
  source 1..22: mol_type = other DNA
actttattgctttttggtaaga

SEQ ID NO: 148322 - DNA, 22 bp, synthetic construct
  misc_feature 1..22: note = chemically synthesized
  source 1..22: mol_type = other DNA
tattgctttttggtaagaaata

SEQ ID NO: 148323 - DNA, 22 bp, synthetic construct
  misc_feature 1..22: note = chemically synthesized
  source 1..22: mol_type = other DNA
attgctttttggtaagaaatac

SEQ ID NO: 148324 - DNA, 22 bp, synthetic construct
  misc_feature 1..22: note = chemically synthesized
  source 1..22: mol_type = other DNA
ttgctttttggtaagaaataca

SEQ ID NO: 148325 - DNA, 22 bp, synthetic construct
  misc_feature 1..22: note = chemically synthesized
  source 1..22: mol_type = other DNA
ctttttggtaagaaatacaact

SEQ ID NO: 148326 - DNA, 22 bp, synthetic construct
  misc_feature 1..22: note = chemically synthesized
  source 1..22: mol_type = other DNA
tttggtaagaaatacaactttt

SEQ ID NO: 148327 - DNA, 22 bp, synthetic construct
  misc_feature 1..22: note = chemically synthesized
  source 1..22: mol_type = other DNA
ttggtaagaaatacaacttttt

SEQ ID NO: 148328 - DNA, 22 bp, synthetic construct
  misc_feature 1..22: note = chemically synthesized
  source 1..22: mol_type = other DNA
tggtaagaaatacaacttttta

SEQ ID NO: 148329 - DNA, 22 bp, synthetic construct
  misc_feature 1..22: note = chemically synthesized
  source 1..22: mol_type = other DNA
ggtaagaaatacaactttttaa

SEQ ID NO: 148330 - DNA, 22 bp, synthetic construct
  misc_feature 1..22: note = chemically synthesized
  source 1..22: mol_type = other DNA
gtaagaaatacaactttttaaa

SEQ ID NO: 148331 - DNA, 22 bp, synthetic construct
  misc_feature 1..22: note = chemically synthesized
  source 1..22: mol_type = other DNA
tttaaagtgaactaaactatcc

SEQ ID NO: 148332 - DNA, 22 bp, synthetic construct
  misc_feature 1..22: note = chemically synthesized
  source 1..22: mol_type = other DNA
ttaaagtgaactaaactatcct

SEQ ID NO: 148333 - DNA, 22 bp, synthetic construct
  misc_feature 1..22: note = chemically synthesized
  source 1..22: mol_type = other DNA
taaagtgaactaaactatccta

SEQ ID NO: 148334 - DNA, 22 bp, synthetic construct
  misc_feature 1..22: note = chemically synthesized
  source 1..22: mol_type = other DNA
aaagtgaactaaactatcctat

SEQ ID NO: 148335 - DNA, 22 bp, synthetic construct
  misc_feature 1..22: note = chemically synthesized
  source 1..22: mol_type = other DNA
aagtgaactaaactatcctatt

SEQ ID NO: 148336 - DNA, 22 bp, synthetic construct
  misc_feature 1..22: note = chemically synthesized
  source 1..22: mol_type = other DNA
aactatcctatttccaaactat

SEQ ID NO: 148337 - DNA, 22 bp, synthetic construct
  misc_feature 1..22: note = chemically synthesized
  source 1..22: mol_type = other DNA
tcctatttccaaactattttgt

SEQ ID NO: 148338 - DNA, 22 bp, synthetic construct
  misc_feature 1..22: note = chemically synthesized
  source 1..22: mol_type = other DNA
tttccaaactattttgtgtgtg

SEQ ID NO: 148339 - DNA, 22 bp, synthetic construct
  misc_feature 1..22: note = chemically synthesized
  source 1..22: mol_type = other DNA
ccaaactattttgtgtgtgtgc

SEQ ID NO: 148340 - DNA, 22 bp, synthetic construct
  misc_feature 1..22: note = chemically synthesized
  source 1..22: mol_type = other DNA
caaactattttgtgtgtgtgcg

SEQ ID NO: 148341 - DNA, 22 bp, synthetic construct
  misc_feature 1..22: note = chemically synthesized
  source 1..22: mol_type = other DNA
ttttgtgtgtgtgcggtttgtt

SEQ ID NO: 148342 - DNA, 22 bp, synthetic construct
  misc_feature 1..22: note = chemically synthesized
  source 1..22: mol_type = other DNA
tgtgtgtgtgcggtttgtttct

SEQ ID NO: 148343 - DNA, 22 bp, synthetic construct
  misc_feature 1..22: note = chemically synthesized
  source 1..22: mol_type = other DNA
gtgtgtgtgcggtttgtttcta

SEQ ID NO: 148344 - DNA, 22 bp, synthetic construct
  misc_feature 1..22: note = chemically synthesized
  source 1..22: mol_type = other DNA
tgtgtgtgcggtttgtttctat

SEQ ID NO: 148345 - DNA, 22 bp, synthetic construct
  misc_feature 1..22: note = chemically synthesized
  source 1..22: mol_type = other DNA
gtttctatgggttctggttttc

SEQ ID NO: 148346 - DNA, 22 bp, synthetic construct
  misc_feature 1..22: note = chemically synthesized
  source 1..22: mol_type = other DNA
tttctatgggttctggttttct

SEQ ID NO: 148347 - DNA, 22 bp, synthetic construct
  misc_feature 1..22: note = chemically synthesized
  source 1..22: mol_type = other DNA
ctatgggttctggttttcttgg

SEQ ID NO: 148348 - DNA, 22 bp, synthetic construct
  misc_feature 1..22: note = chemically synthesized
  source 1..22: mol_type = other DNA
tatgggttctggttttcttgga

SEQ ID NO: 148349 - DNA, 22 bp, synthetic construct
  misc_feature 1..22: note = chemically synthesized
  source 1..22: mol_type = other DNA
tgggttctggttttcttggagc

SEQ ID NO: 148350 - DNA, 22 bp, synthetic construct
  misc_feature 1..22: note = chemically synthesized
  source 1..22: mol_type = other DNA
tggttttcttggagcattttta

SEQ ID NO: 148351 - DNA, 22 bp, synthetic construct
  misc_feature 1..22: note = chemically synthesized
  source 1..22: mol_type = other DNA
gttttcttggagcatttttatt

SEQ ID NO: 148352 - DNA, 22 bp, synthetic construct
  misc_feature 1..22: note = chemically synthesized
  source 1..22: mol_type = other DNA
tcttggagcatttttatttcat

SEQ ID NO: 148353 - DNA, 22 bp, synthetic construct
  misc_feature 1..22: note = chemically synthesized
  source 1..22: mol_type = other DNA
cttggagcatttttatttcatt

SEQ ID NO: 148354 - DNA, 22 bp, synthetic construct
  misc_feature 1..22: note = chemically synthesized
  source 1..22: mol_type = other DNA
ttggagcatttttatttcattt

SEQ ID NO: 148355 - DNA, 22 bp, synthetic construct
  misc_feature 1..22: note = chemically synthesized
  source 1..22: mol_type = other DNA
ggagcatttttatttcatttta

SEQ ID NO: 148356 - DNA, 22 bp, synthetic construct
  misc_feature 1..22: note = chemically synthesized
  source 1..22: mol_type = other DNA
gagcatttttatttcattttaa

SEQ ID NO: 148357 - DNA, 22 bp, synthetic construct
  misc_feature 1..22: note = chemically synthesized
  source 1..22: mol_type = other DNA
ttatttcattttaattaattaa

SEQ ID NO: 148358 - DNA, 22 bp, synthetic construct
  misc_feature 1..22: note = chemically synthesized
  source 1..22: mol_type = other DNA
tatttcattttaattaattaat

SEQ ID NO: 148359 - DNA, 22 bp, synthetic construct
  misc_feature 1..22: note = chemically synthesized
  source 1..22: mol_type = other DNA
atttcattttaattaattaatt

SEQ ID NO: 148360 - DNA, 22 bp, synthetic construct
  misc_feature 1..22: note = chemically synthesized
  source 1..22: mol_type = other DNA
tttcattttaattaattaattc

SEQ ID NO: 148361 - DNA, 22 bp, synthetic construct
  misc_feature 1..22: note = chemically synthesized
  source 1..22: mol_type = other DNA
cattttaattaattaattctga

SEQ ID NO: 148362 - DNA, 22 bp, synthetic construct
  misc_feature 1..22: note = chemically synthesized
  source 1..22: mol_type = other DNA
attttaattaattaattctgag

SEQ ID NO: 148363 - DNA, 22 bp, synthetic construct
  misc_feature 1..22: note = chemically synthesized
  source 1..22: mol_type = other DNA
taattaattaattctgagagct

SEQ ID NO: 148364 - DNA, 22 bp, synthetic construct
  misc_feature 1..22: note = chemically synthesized
  source 1..22: mol_type = other DNA
aattaattaattctgagagctg

SEQ ID NO: 148365 - DNA, 22 bp, synthetic construct
  misc_feature 1..22: note = chemically synthesized
  source 1..22: mol_type = other DNA
attaattaattctgagagctgc

SEQ ID NO: 148366 - DNA, 22 bp, synthetic construct
  misc_feature 1..22: note = chemically synthesized
  source 1..22: mol_type = other DNA
attaattctgagagctgctgag

SEQ ID NO: 148367 - DNA, 22 bp, synthetic construct
  misc_feature 1..22: note = chemically synthesized
  source 1..22: mol_type = other DNA
attctgagagctgctgagttgt

SEQ ID NO: 148368 - DNA, 22 bp, synthetic construct
  misc_feature 1..22: note = chemically synthesized
  source 1..22: mol_type = other DNA
tgagagctgctgagttgtgttt

SEQ ID NO: 148369 - DNA, 22 bp, synthetic construct
  misc_feature 1..22: note = chemically synthesized
  source 1..22: mol_type = other DNA
agagctgctgagttgtgtttac

SEQ ID NO: 148370 - DNA, 22 bp, synthetic construct
  misc_feature 1..22: note = chemically synthesized
  source 1..22: mol_type = other DNA
ctgagttgtgtttactgagaga

SEQ ID NO: 148371 - DNA, 22 bp, synthetic construct
  misc_feature 1..22: note = chemically synthesized
  source 1..22: mol_type = other DNA
agttgtgtttactgagagattg

SEQ ID NO: 148372 - DNA, 22 bp, synthetic construct
  misc_feature 1..22: note = chemically synthesized
  source 1..22: mol_type = other DNA
tgtttactgagagattgtgtat

SEQ ID NO: 148373 - DNA, 22 bp, synthetic construct
  misc_feature 1..22: note = chemically synthesized
  source 1..22: mol_type = other DNA
actgagagattgtgtatctgcg

SEQ ID NO: 148374 - DNA, 22 bp, synthetic construct
  misc_feature 1..22: note = chemically synthesized
  source 1..22: mol_type = other DNA
ctgagagattgtgtatctgcga

SEQ ID NO: 148375 - DNA, 22 bp, synthetic construct
  misc_feature 1..22: note = chemically synthesized
  source 1..22: mol_type = other DNA
agagattgtgtatctgcgagag

SEQ ID NO: 148376 - DNA, 22 bp, synthetic construct
  misc_feature 1..22: note = chemically synthesized
  source 1..22: mol_type = other DNA
tgtatctgcgagagaagtctgt

SEQ ID NO: 148377 - DNA, 22 bp, synthetic construct
  misc_feature 1..22: note = chemically synthesized
  source 1..22: mol_type = other DNA
cgagagaagtctgtagcaagta

SEQ ID NO: 148378 - DNA, 22 bp, synthetic construct
  misc_feature 1..22: note = chemically synthesized
  source 1..22: mol_type = other DNA
tagcaagtagctagactgtgct

SEQ ID NO: 148379 - DNA, 22 bp, synthetic construct
  misc_feature 1..22: note = chemically synthesized
  source 1..22: mol_type = other DNA
gactgtgcttgacctaggaaca

SEQ ID NO: 148380 - DNA, 22 bp, synthetic construct
  misc_feature 1..22: note = chemically synthesized
  source 1..22: mol_type = other DNA
tgcttgacctaggaacatatac

SEQ ID NO: 148381 - DNA, 22 bp, synthetic construct
  misc_feature 1..22: note = chemically synthesized
  source 1..22: mol_type = other DNA
gacctaggaacatatacagtag

SEQ ID NO: 148382 - DNA, 22 bp, synthetic construct
  misc_feature 1..22: note = chemically synthesized
  source 1..22: mol_type = other DNA
acctaggaacatatacagtaga

SEQ ID NO: 148383 - DNA, 22 bp, synthetic construct
  misc_feature 1..22: note = chemically synthesized
  source 1..22: mol_type = other DNA
ggaacatatacagtagattgct

SEQ ID NO: 148384 - DNA, 22 bp, synthetic construct
  misc_feature 1..22: note = chemically synthesized
  source 1..22: mol_type = other DNA
ctaaaatgtctcacttggggaa

SEQ ID NO: 148385 - DNA, 22 bp, synthetic construct
  misc_feature 1..22: note = chemically synthesized
  source 1..22: mol_type = other DNA
aaatgtctcacttggggaattt

SEQ ID NO: 148386 - DNA, 22 bp, synthetic construct
  misc_feature 1..22: note = chemically synthesized
  source 1..22: mol_type = other DNA
acttggggaattttagactaaa

SEQ ID NO: 148387 - DNA, 22 bp, synthetic construct
  misc_feature 1..22: note = chemically synthesized
  source 1..22: mol_type = other DNA
ggggaattttagactaaacagt

SEQ ID NO: 148388 - DNA, 22 bp, synthetic construct
  misc_feature 1..22: note = chemically synthesized
  source 1..22: mol_type = other DNA
gggaattttagactaaacagta

SEQ ID NO: 148389 - DNA, 22 bp, synthetic construct
  misc_feature 1..22: note = chemically synthesized
  source 1..22: mol_type = other DNA
tagactaaacagtagagcatgt

SEQ ID NO: 148390 - DNA, 22 bp, synthetic construct
  misc_feature 1..22: note = chemically synthesized
  source 1..22: mol_type = other DNA
agactaaacagtagagcatgta

SEQ ID NO: 148391 - DNA, 22 bp, synthetic construct
  misc_feature 1..22: note = chemically synthesized
  source 1..22: mol_type = other DNA
gactaaacagtagagcatgtat

SEQ ID NO: 148392 - DNA, 22 bp, synthetic construct
  misc_feature 1..22: note = chemically synthesized
  source 1..22: mol_type = other DNA
aacagtagagcatgtataaaaa

SEQ ID NO: 148393 - DNA, 22 bp, synthetic construct
  misc_feature 1..22: note = chemically synthesized
  source 1..22: mol_type = other DNA
tagtcaagtgctgcttttgaaa

SEQ ID NO: 148394 - DNA, 22 bp, synthetic construct
  misc_feature 1..22: note = chemically synthesized
  source 1..22: mol_type = other DNA
gtcaagtgctgcttttgaaaca

SEQ ID NO: 148395 - DNA, 22 bp, synthetic construct
  misc_feature 1..22: note = chemically synthesized
  source 1..22: mol_type = other DNA
cttttgaaacaaatgataaaac

SEQ ID NO: 148396 - DNA, 22 bp, synthetic construct
  misc_feature 1..22: note = chemically synthesized
  source 1..22: mol_type = other DNA
ttgaaacaaatgataaaaccac

SEQ ID NO: 148397 - DNA, 22 bp, synthetic construct
  misc_feature 1..22: note = chemically synthesized
  source 1..22: mol_type = other DNA
tgaaacaaatgataaaaccaca

SEQ ID NO: 148398 - DNA, 22 bp, synthetic construct
  misc_feature 1..22: note = chemically synthesized
  source 1..22: mol_type = other DNA
gaaacaaatgataaaaccacac

SEQ ID NO: 148399 - DNA, 22 bp, synthetic construct
  misc_feature 1..22: note = chemically synthesized
  source 1..22: mol_type = other DNA
aaacaaatgataaaaccacact

SEQ ID NO: 148400 - DNA, 22 bp, synthetic construct
  misc_feature 1..22: note = chemically synthesized
  source 1..22: mol_type = other DNA
ccatagatgagtgtcatgattt

SEQ ID NO: 148401 - DNA, 22 bp, synthetic construct
  misc_feature 1..22: note = chemically synthesized
  source 1..22: mol_type = other DNA
tcatggaggaagttaatattca

SEQ ID NO: 148402 - DNA, 22 bp, synthetic construct
  misc_feature 1..22: note = chemically synthesized
  source 1..22: mol_type = other DNA
catggaggaagttaatattcat

SEQ ID NO: 148403 - DNA, 22 bp, synthetic construct
  misc_feature 1..22: note = chemically synthesized
  source 1..22: mol_type = other DNA
atggaggaagttaatattcatc

SEQ ID NO: 148404 - DNA, 22 bp, synthetic construct
  misc_feature 1..22: note = chemically synthesized
  source 1..22: mol_type = other DNA
atattcatcctctaagtatacc

SEQ ID NO: 148405 - DNA, 22 bp, synthetic construct
  misc_feature 1..22: note = chemically synthesized
  source 1..22: mol_type = other DNA
atcctctaagtatacccagact

SEQ ID NO: 148406 - DNA, 22 bp, synthetic construct
  misc_feature 1..22: note = chemically synthesized
  source 1..22: mol_type = other DNA
taagtatacccagactagggcc

SEQ ID NO: 148407 - DNA, 22 bp, synthetic construct
  misc_feature 1..22: note = chemically synthesized
  source 1..22: mol_type = other DNA
agtatacccagactagggccat

SEQ ID NO: 148408 - DNA, 22 bp, synthetic construct
  misc_feature 1..22: note = chemically synthesized
  source 1..22: mol_type = other DNA
gggccattctgatataaaacat

SEQ ID NO: 148409 - DNA, 22 bp, synthetic construct
  misc_feature 1..22: note = chemically synthesized
  source 1..22: mol_type = other DNA
tgatataaaacattaggactta

SEQ ID NO: 148410 - DNA, 22 bp, synthetic construct
  misc_feature 1..22: note = chemically synthesized
  source 1..22: mol_type = other DNA
atataaaacattaggacttaag

SEQ ID NO: 148411 - DNA, 22 bp, synthetic construct
  misc_feature 1..22: note = chemically synthesized
  source 1..22: mol_type = other DNA
ggacttaagaaagattaataga

SEQ ID NO: 148412 - DNA, 22 bp, synthetic construct
  misc_feature 1..22: note = chemically synthesized
  source 1..22: mol_type = other DNA
aagaaagattaatagactggag

SEQ ID NO: 148413 - DNA, 22 bp, synthetic construct
  misc_feature 1..22: note = chemically synthesized
  source 1..22: mol_type = other DNA
agaaagattaatagactggagt

SEQ ID NO: 148414 - DNA, 22 bp, synthetic construct
  misc_feature 1..22: note = chemically synthesized
  source 1..22: mol_type = other DNA
atagactggagtaaaggaaatg

SEQ ID NO: 148415 - DNA, 22 bp, synthetic construct
  misc_feature 1..22: note = chemically synthesized
  source 1..22: mol_type = other DNA
gagtaaaggaaatggacctctg

SEQ ID NO: 148416 - DNA, 22 bp, synthetic construct
  misc_feature 1..22: note = chemically synthesized
  source 1..22: mol_type = other DNA
tgtctctctcgctgtctctttt

SEQ ID NO: 148417 - DNA, 22 bp, synthetic construct
  misc_feature 1..22: note = chemically synthesized
  source 1..22: mol_type = other DNA
tctctctcgctgtctctttttt

SEQ ID NO: 148418 - DNA, 22 bp, synthetic construct
  misc_feature 1..22: note = chemically synthesized
  source 1..22: mol_type = other DNA
tctcgctgtctcttttttgagg

SEQ ID NO: 148419 - DNA, 22 bp, synthetic construct
  misc_feature 1..22: note = chemically synthesized
  source 1..22: mol_type = other DNA
tcgctgtctcttttttgaggac

SEQ ID NO: 148420 - DNA, 22 bp, synthetic construct
  misc_feature 1..22: note = chemically synthesized
  source 1..22: mol_type = other DNA
gctgtctcttttttgaggactt

SEQ ID NO: 148421 - DNA, 22 bp, synthetic construct
  misc_feature 1..22: note = chemically synthesized
  source 1..22: mol_type = other DNA
tctcttttttgaggacttgtgt

SEQ ID NO: 148422 - DNA, 22 bp, synthetic construct
  misc_feature 1..22: note = chemically synthesized
  source 1..22: mol_type = other DNA
ttttttgaggacttgtgtgtgt

SEQ ID NO: 148423 - DNA, 22 bp, synthetic construct
  misc_feature 1..22: note = chemically synthesized
  source 1..22: mol_type = other DNA
ttttgaggacttgtgtgtgtgt

SEQ ID NO: 148424 - DNA, 22 bp, synthetic construct
  misc_feature 1..22: note = chemically synthesized
  source 1..22: mol_type = other DNA
tttgaggacttgtgtgtgtgtg

SEQ ID NO: 148425 - DNA, 22 bp, synthetic construct
  misc_feature 1..22: note = chemically synthesized
  source 1..22: mol_type = other DNA
ttgaggacttgtgtgtgtgtgt

SEQ ID NO: 148426 - DNA, 22 bp, synthetic construct
  misc_feature 1..22: note = chemically synthesized
  source 1..22: mol_type = other DNA
tgaggacttgtgtgtgtgtgtg

SEQ ID NO: 148427 - DNA, 22 bp, synthetic construct
  misc_feature 1..22: note = chemically synthesized
  source 1..22: mol_type = other DNA
gaggacttgtgtgtgtgtgtgt

SEQ ID NO: 148428 - DNA, 22 bp, synthetic construct
  misc_feature 1..22: note = chemically synthesized
  source 1..22: mol_type = other DNA
aggacttgtgtgtgtgtgtgtg

SEQ ID NO: 148429 - DNA, 22 bp, synthetic construct
  misc_feature 1..22: note = chemically synthesized
  source 1..22: mol_type = other DNA
gtgtgtgtgtgtgtgtgtgtgt

SEQ ID NO: 148430 - DNA, 22 bp, synthetic construct
  misc_feature 1..22: note = chemically synthesized
  source 1..22: mol_type = other DNA
tgtgtgtgtgtgtgtgtgtgtg

SEQ ID NO: 148431 - DNA, 22 bp, synthetic construct
  misc_feature 1..22: note = chemically synthesized
  source 1..22: mol_type = other DNA
tggtcagtggggctggaataaa

SEQ ID NO: 148432 - DNA, 22 bp, synthetic construct
  misc_feature 1..22: note = chemically synthesized
  source 1..22: mol_type = other DNA
gaataaaagtagaatagacctg

SEQ ID NO: 148433 - DNA, 22 bp, synthetic construct
  misc_feature 1..22: note = chemically synthesized
  source 1..22: mol_type = other DNA
cacctgctgtggcatccattca

SEQ ID NO: 148434 - DNA, 22 bp, synthetic construct
  misc_feature 1..22: note = chemically synthesized
  source 1..22: mol_type = other DNA
ctgtggcatccattcacagagt

SEQ ID NO: 148435 - DNA, 22 bp, synthetic construct
  misc_feature 1..22: note = chemically synthesized
  source 1..22: mol_type = other DNA
tggcatccattcacagagtaga

SEQ ID NO: 148436 - DNA, 22 bp, synthetic construct
  misc_feature 1..22: note = chemically synthesized
  source 1..22: mol_type = other DNA
acagagtagaagcaagctcaca

SEQ ID NO: 148437 - DNA, 22 bp, synthetic construct
  misc_feature 1..22: note = chemically synthesized
  source 1..22: mol_type = other DNA
acaatagtgaagatgtcagtaa

SEQ ID NO: 148438 - DNA, 22 bp, synthetic construct
  misc_feature 1..22: note = chemically synthesized
  source 1..22: mol_type = other DNA
gaatagtttttcaggaactttg

SEQ ID NO: 148439 - DNA, 22 bp, synthetic construct
  misc_feature 1..22: note = chemically synthesized
  source 1..22: mol_type = other DNA
aatagtttttcaggaactttga

SEQ ID NO: 148440 - DNA, 22 bp, synthetic construct
  misc_feature 1..22: note = chemically synthesized
  source 1..22: mol_type = other DNA
ttcaggaactttgaatgctgat

SEQ ID NO: 148441 - DNA, 22 bp, synthetic construct
  misc_feature 1..22: note = chemically synthesized
  source 1..22: mol_type = other DNA
tcaggaactttgaatgctgatt

SEQ ID NO: 148442 - DNA, 22 bp, synthetic construct
  misc_feature 1..22: note = chemically synthesized
  source 1..22: mol_type = other DNA
caggaactttgaatgctgattt

SEQ ID NO: 148443 - DNA, 22 bp, synthetic construct
  misc_feature 1..22: note = chemically synthesized
  source 1..22: mol_type = other DNA
aggaactttgaatgctgattta

SEQ ID NO: 148444 - DNA, 22 bp, synthetic construct
  misc_feature 1..22: note = chemically synthesized
  source 1..22: mol_type = other DNA
tgaatgctgatttagatttgaa

SEQ ID NO: 148445 - DNA, 22 bp, synthetic construct
  misc_feature 1..22: note = chemically synthesized
  source 1..22: mol_type = other DNA
gaatgctgatttagatttgaaa

SEQ ID NO: 148446 - DNA, 22 bp, synthetic construct
  misc_feature 1..22: note = chemically synthesized
  source 1..22: mol_type = other DNA
aatgctgatttagatttgaaac

SEQ ID NO: 148447 - DNA, 22 bp, synthetic construct
  misc_feature 1..22: note = chemically synthesized
  source 1..22: mol_type = other DNA
atttagatttgaaactgaggct

SEQ ID NO: 148448 - DNA, 22 bp, synthetic construct
  misc_feature 1..22: note = chemically synthesized
  source 1..22: mol_type = other DNA
agatttgaaactgaggctctga

SEQ ID NO: 148449 - DNA, 22 bp, synthetic construct
  misc_feature 1..22: note = chemically synthesized
  source 1..22: mol_type = other DNA
gatttgaaactgaggctctgac

SEQ ID NO: 148450 - DNA, 22 bp, synthetic construct
  misc_feature 1..22: note = chemically synthesized
  source 1..22: mol_type = other DNA
gaaactgaggctctgaccataa

SEQ ID NO: 148451 - DNA, 22 bp, synthetic construct
  misc_feature 1..22: note = chemically synthesized
  source 1..22: mol_type = other DNA
aaactgaggctctgaccataac

SEQ ID NO: 148452 - DNA, 22 bp, synthetic construct
  misc_feature 1..22: note = chemically synthesized
  source 1..22: mol_type = other DNA
aggctctgaccataaccaaatt

SEQ ID NO: 148453 - DNA, 22 bp, synthetic construct
  misc_feature 1..22: note = chemically synthesized
  source 1..22: mol_type = other DNA
tgaccataaccaaatttgcact

SEQ ID NO: 148454 - DNA, 22 bp, synthetic construct
  misc_feature 1..22: note = chemically synthesized
  source 1..22: mol_type = other DNA
accataaccaaatttgcactat

SEQ ID NO: 148455 - DNA, 22 bp, synthetic construct
  misc_feature 1..22: note = chemically synthesized
  source 1..22: mol_type = other DNA
gcactatttattgcttcttgaa

SEQ ID NO: 148456 - DNA, 22 bp, synthetic construct
  misc_feature 1..22: note = chemically synthesized
  source 1..22: mol_type = other DNA
cactatttattgcttcttgaaa

SEQ ID NO: 148457 - DNA, 22 bp, synthetic construct
  misc_feature 1..22: note = chemically synthesized
  source 1..22: mol_type = other DNA
tttattgcttcttgaaacttat

SEQ ID NO: 148458 - DNA, 22 bp, synthetic construct
  misc_feature 1..22: note = chemically synthesized
  source 1..22: mol_type = other DNA
attgcttcttgaaacttatttg

SEQ ID NO: 148459 - DNA, 22 bp, synthetic construct
  misc_feature 1..22: note = chemically synthesized
  source 1..22: mol_type = other DNA
ttgcttcttgaaacttatttgc

SEQ ID NO: 148460 - DNA, 22 bp, synthetic construct
  misc_feature 1..22: note = chemically synthesized
  source 1..22: mol_type = other DNA
cttcttgaaacttatttgcctg

SEQ ID NO: 148461 - DNA, 22 bp, synthetic construct
  misc_feature 1..22: note = chemically synthesized
  source 1..22: mol_type = other DNA
cttgaaacttatttgcctggta

SEQ ID NO: 148462 - DNA, 22 bp, synthetic construct
  misc_feature 1..22: note = chemically synthesized
  source 1..22: mol_type = other DNA
ttgaaacttatttgcctggtat

SEQ ID NO: 148463 - DNA, 22 bp, synthetic construct
  misc_feature 1..22: note = chemically synthesized
  source 1..22: mol_type = other DNA
gaaacttatttgcctggtatgc

SEQ ID NO: 148464 - DNA, 22 bp, synthetic construct
  misc_feature 1..22: note = chemically synthesized
  source 1..22: mol_type = other DNA
aaacttatttgcctggtatgcc

SEQ ID NO: 148465 - DNA, 22 bp, synthetic construct
  misc_feature 1..22: note = chemically synthesized
  source 1..22: mol_type = other DNA
atttgcctggtatgcctgggct

SEQ ID NO: 148466 - DNA, 22 bp, synthetic construct
  misc_feature 1..22: note = chemically synthesized
  source 1..22: mol_type = other DNA
tttgcctggtatgcctgggctt

SEQ ID NO: 148467 - DNA, 22 bp, synthetic construct
  misc_feature 1..22: note = chemically synthesized
  source 1..22: mol_type = other DNA
gcctggtatgcctgggcttttg

SEQ ID NO: 148468 - DNA, 22 bp, synthetic construct
  misc_feature 1..22: note = chemically synthesized
  source 1..22: mol_type = other DNA
cctggtatgcctgggcttttga

SEQ ID NO: 148469 - DNA, 22 bp, synthetic construct
  misc_feature 1..22: note = chemically synthesized
  source 1..22: mol_type = other DNA
gtatgcctgggcttttgatggt

SEQ ID NO: 148470 - DNA, 22 bp, synthetic construct
  misc_feature 1..22: note = chemically synthesized
  source 1..22: mol_type = other DNA
ggcttttgatggtcttagtata

SEQ ID NO: 148471 - DNA, 22 bp, synthetic construct
  misc_feature 1..22: note = chemically synthesized
  source 1..22: mol_type = other DNA
ttgatggtcttagtatagcttg

SEQ ID NO: 148472 - DNA, 22 bp, synthetic construct
  misc_feature 1..22: note = chemically synthesized
  source 1..22: mol_type = other DNA
tgatggtcttagtatagcttgc

SEQ ID NO: 148473 - DNA, 22 bp, synthetic construct
  misc_feature 1..22: note = chemically synthesized
  source 1..22: mol_type = other DNA
gatggtcttagtatagcttgca

SEQ ID NO: 148474 - DNA, 22 bp, synthetic construct
  misc_feature 1..22: note = chemically synthesized
  source 1..22: mol_type = other DNA
atggtcttagtatagcttgcag

SEQ ID NO: 148475 - DNA, 22 bp, synthetic construct
  misc_feature 1..22: note = chemically synthesized
  source 1..22: mol_type = other DNA
agtatagcttgcagccttgtcc

SEQ ID NO: 148476 - DNA, 22 bp, synthetic construct
  misc_feature 1..22: note = chemically synthesized
  source 1..22: mol_type = other DNA
gtatagcttgcagccttgtccc

SEQ ID NO: 148477 - DNA, 22 bp, synthetic construct
  misc_feature 1..22: note = chemically synthesized
  source 1..22: mol_type = other DNA
gcagccttgtccctgcagggta

SEQ ID NO: 148478 - DNA, 22 bp, synthetic construct
  misc_feature 1..22: note = chemically synthesized
  source 1..22: mol_type = other DNA
cagccttgtccctgcagggtat

SEQ ID NO: 148479 - DNA, 22 bp, synthetic construct
  misc_feature 1..22: note = chemically synthesized
  source 1..22: mol_type = other DNA
gtccctgcagggtattatgggt

SEQ ID NO: 148480 - DNA, 22 bp, synthetic construct
  misc_feature 1..22: note = chemically synthesized
  source 1..22: mol_type = other DNA
tccctgcagggtattatgggta

SEQ ID NO: 148481 - DNA, 22 bp, synthetic construct
  misc_feature 1..22: note = chemically synthesized
  source 1..22: mol_type = other DNA
cagggtattatgggtaatagaa

SEQ ID NO: 148482 - DNA, 22 bp, synthetic construct
  misc_feature 1..22: note = chemically synthesized
  source 1..22: mol_type = other DNA
tgggtaatagaaagaaaagtct

SEQ ID NO: 148483 - DNA, 22 bp, synthetic construct
  misc_feature 1..22: note = chemically synthesized
  source 1..22: mol_type = other DNA
cgttacactctagtcacactaa

SEQ ID NO: 148484 - DNA, 22 bp, synthetic construct
  misc_feature 1..22: note = chemically synthesized
  source 1..22: mol_type = other DNA
cactctagtcacactaagtaac

SEQ ID NO: 148485 - DNA, 22 bp, synthetic construct
  misc_feature 1..22: note = chemically synthesized
  source 1..22: mol_type = other DNA
tagtcacactaagtaactacca

SEQ ID NO: 148486 - DNA, 22 bp, synthetic construct
  misc_feature 1..22: note = chemically synthesized
  source 1..22: mol_type = other DNA
gtcacactaagtaactaccatt

SEQ ID NO: 148487 - DNA, 22 bp, synthetic construct
  misc_feature 1..22: note = chemically synthesized
  source 1..22: mol_type = other DNA
agtaactaccattggaaaagca

SEQ ID NO: 148488 - DNA, 22 bp, synthetic construct
  misc_feature 1..22: note = chemically synthesized
  source 1..22: mol_type = other DNA
ccattggaaaagcaacccctgc

SEQ ID NO: 148489 - DNA, 22 bp, synthetic construct
  misc_feature 1..22: note = chemically synthesized
  source 1..22: mol_type = other DNA
gaaaagcaacccctgccttgaa

SEQ ID NO: 148490 - DNA, 22 bp, synthetic construct
  misc_feature 1..22: note = chemically synthesized
  source 1..22: mol_type = other DNA
ccttgaagccaggatgatggta

SEQ ID NO: 148491 - DNA, 22 bp, synthetic construct
  misc_feature 1..22: note = chemically synthesized
  source 1..22: mol_type = other DNA
gaagccaggatgatggtatctg

SEQ ID NO: 148492 - DNA, 22 bp, synthetic construct
  misc_feature 1..22: note = chemically synthesized
  source 1..22: mol_type = other DNA
aagccaggatgatggtatctgc

SEQ ID NO: 148493 - DNA, 22 bp, synthetic construct
  misc_feature 1..22: note = chemically synthesized
  source 1..22: mol_type = other DNA
cagcagttgccaacacaagaga

SEQ ID NO: 148494 - DNA, 22 bp, synthetic construct
  misc_feature 1..22: note = chemically synthesized
  source 1..22: mol_type = other DNA
ccaacacaagagaaggatccat

SEQ ID NO: 148495 - DNA, 22 bp, synthetic construct
  misc_feature 1..22: note = chemically synthesized
  source 1..22: mol_type = other DNA
atcatttaaaaaagaaaacaaa

SEQ ID NO: 148496 - DNA, 22 bp, synthetic construct
  misc_feature 1..22: note = chemically synthesized
  source 1..22: mol_type = other DNA
aaaaaagaaaacaaaatagaaa

SEQ ID NO: 148497 - DNA, 22 bp, synthetic construct
  misc_feature 1..22: note = chemically synthesized
  source 1..22: mol_type = other DNA
aaaaagaaaacaaaatagaaaa

SEQ ID NO: 148498 - DNA, 22 bp, synthetic construct
  misc_feature 1..22: note = chemically synthesized
  source 1..22: mol_type = other DNA
tttctgagcataagaagttgta

SEQ ID NO: 148499 - DNA, 22 bp, synthetic construct
  misc_feature 1..22: note = chemically synthesized
  source 1..22: mol_type = other DNA
ctgagcataagaagttgtaggg

SEQ ID NO: 148500 - DNA, 22 bp, synthetic construct
  misc_feature 1..22: note = chemically synthesized
  source 1..22: mol_type = other DNA
tgagcataagaagttgtagggt

SEQ ID NO: 148501 - DNA, 22 bp, synthetic construct
  misc_feature 1..22: note = chemically synthesized
  source 1..22: mol_type = other DNA
agcataagaagttgtagggtaa

SEQ ID NO: 148502 - DNA, 22 bp, synthetic construct
  misc_feature 1..22: note = chemically synthesized
  source 1..22: mol_type = other DNA
tagggtaagtctttaagaaggt

SEQ ID NO: 148503 - DNA, 22 bp, synthetic construct
  misc_feature 1..22: note = chemically synthesized
  source 1..22: mol_type = other DNA
taagaaggtgacaatttctgcc

SEQ ID NO: 148504 - DNA, 22 bp, synthetic construct
  misc_feature 1..22: note = chemically synthesized
  source 1..22: mol_type = other DNA
aagaaggtgacaatttctgcca

SEQ ID NO: 148505 - DNA, 22 bp, synthetic construct
  misc_feature 1..22: note = chemically synthesized
  source 1..22: mol_type = other DNA
agaaggtgacaatttctgccaa

SEQ ID NO: 148506 - DNA, 22 bp, synthetic construct
  misc_feature 1..22: note = chemically synthesized
  source 1..22: mol_type = other DNA
ctgccaatcaggatttcaaagc

SEQ ID NO: 148507 - DNA, 22 bp, synthetic construct
  misc_feature 1..22: note = chemically synthesized
  source 1..22: mol_type = other DNA
tgccaatcaggatttcaaagct

SEQ ID NO: 148508 - DNA, 22 bp, synthetic construct
  misc_feature 1..22: note = chemically synthesized
  source 1..22: mol_type = other DNA
ccaatcaggatttcaaagctct

SEQ ID NO: 148509 - DNA, 22 bp, synthetic construct
  misc_feature 1..22: note = chemically synthesized
  source 1..22: mol_type = other DNA
caaagctcttgctttgacaatt

SEQ ID NO: 148510 - DNA, 22 bp, synthetic construct
  misc_feature 1..22: note = chemically synthesized
  source 1..22: mol_type = other DNA
aaagctcttgctttgacaattt

SEQ ID NO: 148511 - DNA, 22 bp, synthetic construct
  misc_feature 1..22: note = chemically synthesized
  source 1..22: mol_type = other DNA
ttgctttgacaattttggtctt

SEQ ID NO: 148512 - DNA, 22 bp, synthetic construct
  misc_feature 1..22: note = chemically synthesized
  source 1..22: mol_type = other DNA
gctttgacaattttggtctttc

SEQ ID NO: 148513 - DNA, 22 bp, synthetic construct
  misc_feature 1..22: note = chemically synthesized
  source 1..22: mol_type = other DNA
ctttgacaattttggtctttca

SEQ ID NO: 148514 - DNA, 22 bp, synthetic construct
  misc_feature 1..22: note = chemically synthesized
  source 1..22: mol_type = other DNA
tgacaattttggtctttcagaa

SEQ ID NO: 148515 - DNA, 22 bp, synthetic construct
  misc_feature 1..22: note = chemically synthesized
  source 1..22: mol_type = other DNA
gacaattttggtctttcagaat

SEQ ID NO: 148516 - DNA, 22 bp, synthetic construct
  misc_feature 1..22: note = chemically synthesized
  source 1..22: mol_type = other DNA
acaattttggtctttcagaata

SEQ ID NO: 148517 - DNA, 22 bp, synthetic construct
  misc_feature 1..22: note = chemically synthesized
  source 1..22: mol_type = other DNA
tggtctttcagaatactataaa

SEQ ID NO: 148518 - DNA, 22 bp, synthetic construct
  misc_feature 1..22: note = chemically synthesized
  source 1..22: mol_type = other DNA
ggtctttcagaatactataaat

SEQ ID NO: 148519 - DNA, 22 bp, synthetic construct
  misc_feature 1..22: note = chemically synthesized
  source 1..22: mol_type = other DNA
gtctttcagaatactataaata

SEQ ID NO: 148520 - DNA, 22 bp, synthetic construct
  misc_feature 1..22: note = chemically synthesized
  source 1..22: mol_type = other DNA
tcagaatactataaatataacc

SEQ ID NO: 148521 - DNA, 22 bp, synthetic construct
  misc_feature 1..22: note = chemically synthesized
  source 1..22: mol_type = other DNA
cagaatactataaatataacct

SEQ ID NO: 148522 - DNA, 22 bp, synthetic construct
  misc_feature 1..22: note = chemically synthesized
  source 1..22: mol_type = other DNA
agaatactataaatataaccta

SEQ ID NO: 148523 - DNA, 22 bp, synthetic construct
  misc_feature 1..22: note = chemically synthesized
  source 1..22: mol_type = other DNA
taaatataacctatattataat

SEQ ID NO: 148524 - DNA, 22 bp, synthetic construct
  misc_feature 1..22: note = chemically synthesized
  source 1..22: mol_type = other DNA
tattataatttcataaagtctg

SEQ ID NO: 148525 - DNA, 22 bp, synthetic construct
  misc_feature 1..22: note = chemically synthesized
  source 1..22: mol_type = other DNA
taatttcataaagtctgtgcat

SEQ ID NO: 148526 - DNA, 22 bp, synthetic construct
  misc_feature 1..22: note = chemically synthesized
  source 1..22: mol_type = other DNA
cataaagtctgtgcattttctt

SEQ ID NO: 148527 - DNA, 22 bp, synthetic construct
  misc_feature 1..22: note = chemically synthesized
  source 1..22: mol_type = other DNA
ataaagtctgtgcattttcttt

SEQ ID NO: 148528 - DNA, 22 bp, synthetic construct
  misc_feature 1..22: note = chemically synthesized
  source 1..22: mol_type = other DNA
tgcattttctttgacccaggat

SEQ ID NO: 148529 - DNA, 22 bp, synthetic construct
  misc_feature 1..22: note = chemically synthesized
  source 1..22: mol_type = other DNA
tctttgacccaggatatttgca

SEQ ID NO: 148530 - DNA, 22 bp, synthetic construct
  misc_feature 1..22: note = chemically synthesized
  source 1..22: mol_type = other DNA
ctttgacccaggatatttgcaa

SEQ ID NO: 148531 - DNA, 22 bp, synthetic construct
  misc_feature 1..22: note = chemically synthesized
  source 1..22: mol_type = other DNA
tttgacccaggatatttgcaaa

SEQ ID NO: 148532 - DNA, 22 bp, synthetic construct
  misc_feature 1..22: note = chemically synthesized
  source 1..22: mol_type = other DNA
tgacccaggatatttgcaaaag

SEQ ID NO: 148533 - DNA, 22 bp, synthetic construct
  misc_feature 1..22: note = chemically synthesized
  source 1..22: mol_type = other DNA
gacccaggatatttgcaaaaga

SEQ ID NO: 148534 - DNA, 22 bp, synthetic construct
  misc_feature 1..22: note = chemically synthesized
  source 1..22: mol_type = other DNA
acccaggatatttgcaaaagac

SEQ ID NO: 148535 - DNA, 22 bp, synthetic construct
  misc_feature 1..22: note = chemically synthesized
  source 1..22: mol_type = other DNA
gcaaaagacatattcaaacttc

SEQ ID NO: 148536 - DNA, 22 bp, synthetic construct
  misc_feature 1..22: note = chemically synthesized
  source 1..22: mol_type = other DNA
caaaagacatattcaaacttcc

SEQ ID NO: 148537 - DNA, 22 bp, synthetic construct
  misc_feature 1..22: note = chemically synthesized
  source 1..22: mol_type = other DNA
aaacttccgcagaacactttat

SEQ ID NO: 148538 - DNA, 22 bp, synthetic construct
  misc_feature 1..22: note = chemically synthesized
  source 1..22: mol_type = other DNA
ccgcagaacactttatttcaca

SEQ ID NO: 148539 - DNA, 22 bp, synthetic construct
  misc_feature 1..22: note = chemically synthesized
  source 1..22: mol_type = other DNA
cgcagaacactttatttcacat

SEQ ID NO: 148540 - DNA, 22 bp, synthetic construct
  misc_feature 1..22: note = chemically synthesized
  source 1..22: mol_type = other DNA
tatttcacatatacatgcctct

SEQ ID NO: 148541 - DNA, 22 bp, synthetic construct
  misc_feature 1..22: note = chemically synthesized
  source 1..22: mol_type = other DNA
atttcacatatacatgcctctt

SEQ ID NO: 148542 - DNA, 22 bp, synthetic construct
  misc_feature 1..22: note = chemically synthesized
  source 1..22: mol_type = other DNA
tttcacatatacatgcctctta

SEQ ID NO: 148543 - DNA, 22 bp, synthetic construct
  misc_feature 1..22: note = chemically synthesized
  source 1..22: mol_type = other DNA
cacatatacatgcctcttatat

SEQ ID NO: 148544 - DNA, 22 bp, synthetic construct
  misc_feature 1..22: note = chemically synthesized
  source 1..22: mol_type = other DNA
acatatacatgcctcttatatc

SEQ ID NO: 148545 - DNA, 22 bp, synthetic construct
  misc_feature 1..22: note = chemically synthesized
  source 1..22: mol_type = other DNA
ttatatcagggatgtgaaacag

SEQ ID NO: 148546 - DNA, 22 bp, synthetic construct
  misc_feature 1..22: note = chemically synthesized
  source 1..22: mol_type = other DNA
atatcagggatgtgaaacaggg

SEQ ID NO: 148547 - DNA, 22 bp, synthetic construct
  misc_feature 1..22: note = chemically synthesized
  source 1..22: mol_type = other DNA
tatcagggatgtgaaacagggt

SEQ ID NO: 148548 - DNA, 22 bp, synthetic construct
  misc_feature 1..22: note = chemically synthesized
  source 1..22: mol_type = other DNA
gaaaactgtctaaatctaaaac

SEQ ID NO: 148549 - DNA, 22 bp, synthetic construct
  misc_feature 1..22: note = chemically synthesized
  source 1..22: mol_type = other DNA
aaaactgtctaaatctaaaaca

SEQ ID NO: 148550 - DNA, 22 bp, synthetic construct
  misc_feature 1..22: note = chemically synthesized
  source 1..22: mol_type = other DNA
tctaaatctaaaacaatgctaa

SEQ ID NO: 148551 - DNA, 22 bp, synthetic construct
  misc_feature 1..22: note = chemically synthesized
  source 1..22: mol_type = other DNA
aatctaaaacaatgctaatgca

SEQ ID NO: 148552 - DNA, 22 bp, synthetic construct
  misc_feature 1..22: note = chemically synthesized
  source 1..22: mol_type = other DNA
aaacaatgctaatgcaggttta

SEQ ID NO: 148553 - DNA, 22 bp, synthetic construct
  misc_feature 1..22: note = chemically synthesized
  source 1..22: mol_type = other DNA
atgcaggtttaaatttaataaa

SEQ ID NO: 148554 - DNA, 22 bp, synthetic construct
  misc_feature 1..22: note = chemically synthesized
  source 1..22: mol_type = other DNA
aaatttaataaaataaaatcca

SEQ ID NO: 148555 - DNA, 22 bp, synthetic construct
  misc_feature 1..22: note = chemically synthesized
  source 1..22: mol_type = other DNA
aatttaataaaataaaatccaa

SEQ ID NO: 148556 - DNA, 22 bp, synthetic construct
  misc_feature 1..22: note = chemically synthesized
  source 1..22: mol_type = other DNA
aataaaataaaatccaaaatct

SEQ ID NO: 148557 - DNA, 22 bp, synthetic construct
  misc_feature 1..22: note = chemically synthesized
  source 1..22: mol_type = other DNA
ataaaataaaatccaaaatcta

SEQ ID NO: 148558 - DNA, 22 bp, synthetic construct
  misc_feature 1..22: note = chemically synthesized
  source 1..22: mol_type = other DNA
acagccaagtcaaatctgcatg

SEQ ID NO: 148559 - DNA, 22 bp, synthetic construct
  misc_feature 1..22: note = chemically synthesized
  source 1..22: mol_type = other DNA
catgttttaacatttaaaatat

SEQ ID NO: 148560 - DNA, 22 bp, synthetic construct
  misc_feature 1..22: note = chemically synthesized
  source 1..22: mol_type = other DNA
taacatttaaaatattttaaag

SEQ ID NO: 148561 - DNA, 22 bp, synthetic construct
  misc_feature 1..22: note = chemically synthesized
  source 1..22: mol_type = other DNA
aacatttaaaatattttaaaga

SEQ ID NO: 148562 - DNA, 22 bp, synthetic construct
  misc_feature 1..22: note = chemically synthesized
  source 1..22: mol_type = other DNA
acatttaaaatattttaaagac

SEQ ID NO: 148563 - DNA, 22 bp, synthetic construct
  misc_feature 1..22: note = chemically synthesized
  source 1..22: mol_type = other DNA
aaaatattttaaagacgtcttt

SEQ ID NO: 148564 - DNA, 22 bp, synthetic construct
  misc_feature 1..22: note = chemically synthesized
  source 1..22: mol_type = other DNA
aaatattttaaagacgtctttt

SEQ ID NO: 148565 - DNA, 22 bp, synthetic construct
  misc_feature 1..22: note = chemically synthesized
  source 1..22: mol_type = other DNA
taaagacgtcttttcccaggat

SEQ ID NO: 148566 - DNA, 22 bp, synthetic construct
  misc_feature 1..22: note = chemically synthesized
  source 1..22: mol_type = other DNA
aaagacgtcttttcccaggatt

SEQ ID NO: 148567 - DNA, 22 bp, synthetic construct
  misc_feature 1..22: note = chemically synthesized
  source 1..22: mol_type = other DNA
aagacgtcttttcccaggattc

SEQ ID NO: 148568 - DNA, 22 bp, synthetic construct
  misc_feature 1..22: note = chemically synthesized
  source 1..22: mol_type = other DNA
ttcccaggattcaacatgtgaa

SEQ ID NO: 148569 - DNA, 22 bp, synthetic construct
  misc_feature 1..22: note = chemically synthesized
  source 1..22: mol_type = other DNA
tcccaggattcaacatgtgaaa

SEQ ID NO: 148570 - DNA, 22 bp, synthetic construct
  misc_feature 1..22: note = chemically synthesized
  source 1..22: mol_type = other DNA
cccaggattcaacatgtgaaat

SEQ ID NO: 148571 - DNA, 22 bp, synthetic construct
  misc_feature 1..22: note = chemically synthesized
  source 1..22: mol_type = other DNA
ccaggattcaacatgtgaaatc

SEQ ID NO: 148572 - DNA, 22 bp, synthetic construct
  misc_feature 1..22: note = chemically synthesized
  source 1..22: mol_type = other DNA
aacatgtgaaatcttttctcag

SEQ ID NO: 148573 - DNA, 22 bp, synthetic construct
  misc_feature 1..22: note = chemically synthesized
  source 1..22: mol_type = other DNA
ttctcagggatacacgtgtgcc

SEQ ID NO: 148574 - DNA, 22 bp, synthetic construct
  misc_feature 1..22: note = chemically synthesized
  source 1..22: mol_type = other DNA
tctcagggatacacgtgtgcct

SEQ ID NO: 148575 - DNA, 22 bp, synthetic construct
  misc_feature 1..22: note = chemically synthesized
  source 1..22: mol_type = other DNA
ctcagggatacacgtgtgccta

SEQ ID NO: 148576 - DNA, 22 bp, synthetic construct
  misc_feature 1..22: note = chemically synthesized
  source 1..22: mol_type = other DNA
tcagggatacacgtgtgcctag

SEQ ID NO: 148577 - DNA, 22 bp, synthetic construct
  misc_feature 1..22: note = chemically synthesized
  source 1..22: mol_type = other DNA
agggatacacgtgtgcctagat

SEQ ID NO: 148578 - DNA, 22 bp, synthetic construct
  misc_feature 1..22: note = chemically synthesized
  source 1..22: mol_type = other DNA
gatcctcattgctttagttttt

SEQ ID NO: 148579 - DNA, 22 bp, synthetic construct
  misc_feature 1..22: note = chemically synthesized
  source 1..22: mol_type = other DNA
attgctttagttttttacagag

SEQ ID NO: 148580 - DNA, 22 bp, synthetic construct
  misc_feature 1..22: note = chemically synthesized
  source 1..22: mol_type = other DNA
ctttagttttttacagaggaat

SEQ ID NO: 148581 - DNA, 22 bp, synthetic construct
  misc_feature 1..22: note = chemically synthesized
  source 1..22: mol_type = other DNA
tagttttttacagaggaatgaa

SEQ ID NO: 148582 - DNA, 22 bp, synthetic construct
  misc_feature 1..22: note = chemically synthesized
  source 1..22: mol_type = other DNA
agttttttacagaggaatgaat

SEQ ID NO: 148583 - DNA, 22 bp, synthetic construct
  misc_feature 1..22: note = chemically synthesized
  source 1..22: mol_type = other DNA
gttttttacagaggaatgaata

SEQ ID NO: 148584 - DNA, 22 bp, synthetic construct
  misc_feature 1..22: note = chemically synthesized
  source 1..22: mol_type = other DNA
tttacagaggaatgaatataaa

SEQ ID NO: 148585 - DNA, 22 bp, synthetic construct
  misc_feature 1..22: note = chemically synthesized
  source 1..22: mol_type = other DNA
ttacagaggaatgaatataaaa

SEQ ID NO: 148586 - DNA, 22 bp, synthetic construct
  misc_feature 1..22: note = chemically synthesized
  source 1..22: mol_type = other DNA
tacagaggaatgaatataaaaa

SEQ ID NO: 148587 - DNA, 22 bp, synthetic construct
  misc_feature 1..22: note = chemically synthesized
  source 1..22: mol_type = other DNA
acagaggaatgaatataaaaag

SEQ ID NO: 148588 - DNA, 22 bp, synthetic construct
  misc_feature 1..22: note = chemically synthesized
  source 1..22: mol_type = other DNA
cagaggaatgaatataaaaaga

SEQ ID NO: 148589 - DNA, 22 bp, synthetic construct
  misc_feature 1..22: note = chemically synthesized
  source 1..22: mol_type = other DNA
aaattttatccctcttacctct

SEQ ID NO: 148590 - DNA, 22 bp, synthetic construct
  misc_feature 1..22: note = chemically synthesized
  source 1..22: mol_type = other DNA
aattttatccctcttacctcta

SEQ ID NO: 148591 - DNA, 22 bp, synthetic construct
  misc_feature 1..22: note = chemically synthesized
  source 1..22: mol_type = other DNA
tatccctcttacctctataatc

SEQ ID NO: 148592 - DNA, 22 bp, synthetic construct
  misc_feature 1..22: note = chemically synthesized
  source 1..22: mol_type = other DNA
atccctcttacctctataatca

SEQ ID NO: 148593 - DNA, 22 bp, synthetic construct
  misc_feature 1..22: note = chemically synthesized
  source 1..22: mol_type = other DNA
tccctcttacctctataatcat

SEQ ID NO: 148594 - DNA, 22 bp, synthetic construct
  misc_feature 1..22: note = chemically synthesized
  source 1..22: mol_type = other DNA
ttacctctataatcatacatag

SEQ ID NO: 148595 - DNA, 22 bp, synthetic construct
  misc_feature 1..22: note = chemically synthesized
  source 1..22: mol_type = other DNA
acctctataatcatacataggc

SEQ ID NO: 148596 - DNA, 22 bp, synthetic construct
  misc_feature 1..22: note = chemically synthesized
  source 1..22: mol_type = other DNA
cctctataatcatacataggca

SEQ ID NO: 148597 - DNA, 22 bp, synthetic construct
  misc_feature 1..22: note = chemically synthesized
  source 1..22: mol_type = other DNA
tataatcatacataggcataat

SEQ ID NO: 148598 - DNA, 22 bp, synthetic construct
  misc_feature 1..22: note = chemically synthesized
  source 1..22: mol_type = other DNA
taatcatacataggcataattt

SEQ ID NO: 148599 - DNA, 22 bp, synthetic construct
  misc_feature 1..22: note = chemically synthesized
  source 1..22: mol_type = other DNA
tttaacctaggctccagatagc

SEQ ID NO: 148600 - DNA, 22 bp, synthetic construct
  misc_feature 1..22: note = chemically synthesized
  source 1..22: mol_type = other DNA
ttaacctaggctccagatagcc

SEQ ID NO: 148601 - DNA, 22 bp, synthetic construct
  misc_feature 1..22: note = chemically synthesized
  source 1..22: mol_type = other DNA
taacctaggctccagatagcca

SEQ ID NO: 148602 - DNA, 22 bp, synthetic construct
  misc_feature 1..22: note = chemically synthesized
  source 1..22: mol_type = other DNA
aacctaggctccagatagccat

SEQ ID NO: 148603 - DNA, 22 bp, synthetic construct
  misc_feature 1..22: note = chemically synthesized
  source 1..22: mol_type = other DNA
acctaggctccagatagccata

SEQ ID NO: 148604 - DNA, 22 bp, synthetic construct
  misc_feature 1..22: note = chemically synthesized
  source 1..22: mol_type = other DNA
ggctccagatagccatagaaga

SEQ ID NO: 148605 - DNA, 22 bp, synthetic construct
  misc_feature 1..22: note = chemically synthesized
  source 1..22: mol_type = other DNA
cagatagccatagaagaaccaa

SEQ ID NO: 148606 - DNA, 22 bp, synthetic construct
  misc_feature 1..22: note = chemically synthesized
  source 1..22: mol_type = other DNA
tctgcgtgtgtgagaataatca

SEQ ID NO: 148607 - DNA, 22 bp, synthetic construct
  misc_feature 1..22: note = chemically synthesized
  source 1..22: mol_type = other DNA
ctgcgtgtgtgagaataatcag

SEQ ID NO: 148608 - DNA, 22 bp, synthetic construct
  misc_feature 1..22: note = chemically synthesized
  source 1..22: mol_type = other DNA
tgcgtgtgtgagaataatcaga

SEQ ID NO: 148609 - DNA, 22 bp, synthetic construct
  misc_feature 1..22: note = chemically synthesized
  source 1..22: mol_type = other DNA
cgtgtgtgagaataatcagagt

SEQ ID NO: 148610 - DNA, 22 bp, synthetic construct
  misc_feature 1..22: note = chemically synthesized
  source 1..22: mol_type = other DNA
tttcacaagtacctgatgaggg

SEQ ID NO: 148611 - DNA, 22 bp, synthetic construct
  misc_feature 1..22: note = chemically synthesized
  source 1..22: mol_type = other DNA
ttcacaagtacctgatgagggt

SEQ ID NO: 148612 - DNA, 22 bp, synthetic construct
  misc_feature 1..22: note = chemically synthesized
  source 1..22: mol_type = other DNA
tcacaagtacctgatgagggtt

SEQ ID NO: 148613 - DNA, 22 bp, synthetic construct
  misc_feature 1..22: note = chemically synthesized
  source 1..22: mol_type = other DNA
cacaagtacctgatgagggttg

SEQ ID NO: 148614 - DNA, 22 bp, synthetic construct
  misc_feature 1..22: note = chemically synthesized
  source 1..22: mol_type = other DNA
acaagtacctgatgagggttga

SEQ ID NO: 148615 - DNA, 22 bp, synthetic construct
  misc_feature 1..22: note = chemically synthesized
  source 1..22: mol_type = other DNA
atgagggttgagacaggtagaa

SEQ ID NO: 148616 - DNA, 22 bp, synthetic construct
  misc_feature 1..22: note = chemically synthesized
  source 1..22: mol_type = other DNA
agacaggtagaaaaagtgagag

SEQ ID NO: 148617 - DNA, 22 bp, synthetic construct
  misc_feature 1..22: note = chemically synthesized
  source 1..22: mol_type = other DNA
tatttatttagcaataatagag

SEQ ID NO: 148618 - DNA, 22 bp, synthetic construct
  misc_feature 1..22: note = chemically synthesized
  source 1..22: mol_type = other DNA
tttatttagcaataatagagaa

SEQ ID NO: 148619 - DNA, 22 bp, synthetic construct
  misc_feature 1..22: note = chemically synthesized
  source 1..22: mol_type = other DNA
atttagcaataatagagaaagc

SEQ ID NO: 148620 - DNA, 22 bp, synthetic construct
  misc_feature 1..22: note = chemically synthesized
  source 1..22: mol_type = other DNA
tttagcaataatagagaaagca

SEQ ID NO: 148621 - DNA, 22 bp, synthetic construct
  misc_feature 1..22: note = chemically synthesized
  source 1..22: mol_type = other DNA
agcaataatagagaaagcattt

SEQ ID NO: 148622 - DNA, 22 bp, synthetic construct
  misc_feature 1..22: note = chemically synthesized
  source 1..22: mol_type = other DNA
gcaataatagagaaagcattta

SEQ ID NO: 148623 - DNA, 22 bp, synthetic construct
  misc_feature 1..22: note = chemically synthesized
  source 1..22: mol_type = other DNA
aagagaataaagcaatggaaat

SEQ ID NO: 148624 - DNA, 22 bp, synthetic construct
  misc_feature 1..22: note = chemically synthesized
  source 1..22: mol_type = other DNA
agagaataaagcaatggaaata

SEQ ID NO: 148625 - DNA, 22 bp, synthetic construct
  misc_feature 1..22: note = chemically synthesized
  source 1..22: mol_type = other DNA
gtaaatttccttctgataacta

SEQ ID NO: 148626 - DNA, 22 bp, synthetic construct
  misc_feature 1..22: note = chemically synthesized
  source 1..22: mol_type = other DNA
taaatttccttctgataactag

SEQ ID NO: 148627 - DNA, 22 bp, synthetic construct
  misc_feature 1..22: note = chemically synthesized
  source 1..22: mol_type = other DNA
ccttctgataactagaaataga

SEQ ID NO: 148628 - DNA, 22 bp, synthetic construct
  misc_feature 1..22: note = chemically synthesized
  source 1..22: mol_type = other DNA
cttctgataactagaaatagag

SEQ ID NO: 148629 - DNA, 22 bp, synthetic construct
  misc_feature 1..22: note = chemically synthesized
  source 1..22: mol_type = other DNA
ctgataactagaaatagaggat

SEQ ID NO: 148630 - DNA, 22 bp, synthetic construct
  misc_feature 1..22: note = chemically synthesized
  source 1..22: mol_type = other DNA
tgataactagaaatagaggatc

SEQ ID NO: 148631 - DNA, 22 bp, synthetic construct
  misc_feature 1..22: note = chemically synthesized
  source 1..22: mol_type = other DNA
ataactagaaatagaggatcca

SEQ ID NO: 148632 - DNA, 22 bp, synthetic construct
  misc_feature 1..22: note = chemically synthesized
  source 1..22: mol_type = other DNA
gaaatagaggatccagtttctt

SEQ ID NO: 148633 - DNA, 22 bp, synthetic construct
  misc_feature 1..22: note = chemically synthesized
  source 1..22: mol_type = other DNA
cttttggttaacctaaatttta

SEQ ID NO: 148634 - DNA, 22 bp, synthetic construct
  misc_feature 1..22: note = chemically synthesized
  source 1..22: mol_type = other DNA
ttttggttaacctaaattttat

SEQ ID NO: 148635 - DNA, 22 bp, synthetic construct
  misc_feature 1..22: note = chemically synthesized
  source 1..22: mol_type = other DNA
ttggttaacctaaattttattt

SEQ ID NO: 148636 - DNA, 22 bp, synthetic construct
  misc_feature 1..22: note = chemically synthesized
  source 1..22: mol_type = other DNA
tggttaacctaaattttatttc

SEQ ID NO: 148637 - DNA, 22 bp, synthetic construct
  misc_feature 1..22: note = chemically synthesized
  source 1..22: mol_type = other DNA
ggttaacctaaattttatttca

SEQ ID NO: 148638 - DNA, 22 bp, synthetic construct
  misc_feature 1..22: note = chemically synthesized
  source 1..22: mol_type = other DNA
gttaacctaaattttatttcat

SEQ ID NO: 148639 - DNA, 22 bp, synthetic construct
  misc_feature 1..22: note = chemically synthesized
  source 1..22: mol_type = other DNA
acctaaattttatttcatttta

SEQ ID NO: 148640 - DNA, 22 bp, synthetic construct
  misc_feature 1..22: note = chemically synthesized
  source 1..22: mol_type = other DNA
aattttatttcattttattgtt

SEQ ID NO: 148641 - DNA, 22 bp, synthetic construct
  misc_feature 1..22: note = chemically synthesized
  source 1..22: mol_type = other DNA
tatttcattttattgttttatt

SEQ ID NO: 148642 - DNA, 22 bp, synthetic construct
  misc_feature 1..22: note = chemically synthesized
  source 1..22: mol_type = other DNA
atttcattttattgttttattt

SEQ ID NO: 148643 - DNA, 22 bp, synthetic construct
  misc_feature 1..22: note = chemically synthesized
  source 1..22: mol_type = other DNA
tttcattttattgttttatttt

SEQ ID NO: 148644 - DNA, 22 bp, synthetic construct
  misc_feature 1..22: note = chemically synthesized
  source 1..22: mol_type = other DNA
cattttattgttttattttatt

SEQ ID NO: 148645 - DNA, 22 bp, synthetic construct
  misc_feature 1..22: note = chemically synthesized
  source 1..22: mol_type = other DNA
attttattgttttattttattt

SEQ ID NO: 148646 - DNA, 22 bp, synthetic construct
  misc_feature 1..22: note = chemically synthesized
  source 1..22: mol_type = other DNA
tattgttttattttattttatt

SEQ ID NO: 148647 - DNA, 22 bp, synthetic construct
  misc_feature 1..22: note = chemically synthesized
  source 1..22: mol_type = other DNA
attgttttattttattttattt

SEQ ID NO: 148648 - DNA, 22 bp, synthetic construct
  misc_feature 1..22: note = chemically synthesized
  source 1..22: mol_type = other DNA
ttgttttattttattttatttt

SEQ ID NO: 148649 - DNA, 22 bp, synthetic construct
  misc_feature 1..22: note = chemically synthesized
  source 1..22: mol_type = other DNA
ttttattttattttattttatt

SEQ ID NO: 148650 - DNA, 22 bp, synthetic construct
  misc_feature 1..22: note = chemically synthesized
  source 1..22: mol_type = other DNA
tattttattttattttatttta

SEQ ID NO: 148651 - DNA, 22 bp, synthetic construct
  misc_feature 1..22: note = chemically synthesized
  source 1..22: mol_type = other DNA
attttattttattttattttat

SEQ ID NO: 148652 - DNA, 22 bp, synthetic construct
  misc_feature 1..22: note = chemically synthesized
  source 1..22: mol_type = other DNA
ttttattttattttattttatt

SEQ ID NO: 148653 - DNA, 22 bp, synthetic construct
  misc_feature 1..22: note = chemically synthesized
  source 1..22: mol_type = other DNA
tattttattttattttattttg

SEQ ID NO: 148654 - DNA, 22 bp, synthetic construct
  misc_feature 1..22: note = chemically synthesized
  source 1..22: mol_type = other DNA
attttattttattttattttgt

SEQ ID NO: 148655 - DNA, 22 bp, synthetic construct
  misc_feature 1..22: note = chemically synthesized
  source 1..22: mol_type = other DNA
ttttattttattttattttgtg

SEQ ID NO: 148656 - DNA, 22 bp, synthetic construct
  misc_feature 1..22: note = chemically synthesized
  source 1..22: mol_type = other DNA
tattttattttattttgtgtaa

SEQ ID NO: 148657 - DNA, 22 bp, synthetic construct
  misc_feature 1..22: note = chemically synthesized
  source 1..22: mol_type = other DNA
attttattttattttgtgtaat

SEQ ID NO: 148658 - DNA, 22 bp, synthetic construct
  misc_feature 1..22: note = chemically synthesized
  source 1..22: mol_type = other DNA
ttttattttattttgtgtaatc

SEQ ID NO: 148659 - DNA, 22 bp, synthetic construct
  misc_feature 1..22: note = chemically synthesized
  source 1..22: mol_type = other DNA
tattttattttgtgtaatcgta

SEQ ID NO: 148660 - DNA, 22 bp, synthetic construct
  misc_feature 1..22: note = chemically synthesized
  source 1..22: mol_type = other DNA
attttattttgtgtaatcgtag

SEQ ID NO: 148661 - DNA, 22 bp, synthetic construct
  misc_feature 1..22: note = chemically synthesized
  source 1..22: mol_type = other DNA
ttttattttgtgtaatcgtagt

SEQ ID NO: 148662 - DNA, 22 bp, synthetic construct
  misc_feature 1..22: note = chemically synthesized
  source 1..22: mol_type = other DNA
tattttgtgtaatcgtagtttc

SEQ ID NO: 148663 - DNA, 22 bp, synthetic construct
  misc_feature 1..22: note = chemically synthesized
  source 1..22: mol_type = other DNA
attttgtgtaatcgtagtttca

SEQ ID NO: 148664 - DNA, 22 bp, synthetic construct
  misc_feature 1..22: note = chemically synthesized
  source 1..22: mol_type = other DNA
ttttgtgtaatcgtagtttcag

SEQ ID NO: 148665 - DNA, 22 bp, synthetic construct
  misc_feature 1..22: note = chemically synthesized
  source 1..22: mol_type = other DNA
tgtgtaatcgtagtttcagagt

SEQ ID NO: 148666 - DNA, 22 bp, synthetic construct
  misc_feature 1..22: note = chemically synthesized
  source 1..22: mol_type = other DNA
gtgtaatcgtagtttcagagtg

SEQ ID NO: 148667 - DNA, 22 bp, synthetic construct
  misc_feature 1..22: note = chemically synthesized
  source 1..22: mol_type = other DNA
tgtaatcgtagtttcagagtgt

SEQ ID NO: 148668 - DNA, 22 bp, synthetic construct
  misc_feature 1..22: note = chemically synthesized
  source 1..22: mol_type = other DNA
cagagtgttagagctgaaagga

SEQ ID NO: 148669 - DNA, 22 bp, synthetic construct
  misc_feature 1..22: note = chemically synthesized
  source 1..22: mol_type = other DNA
agagtgttagagctgaaaggaa

SEQ ID NO: 148670 - DNA, 22 bp, synthetic construct
  misc_feature 1..22: note = chemically synthesized
  source 1..22: mol_type = other DNA
gagctgaaaggaagaagtagga

SEQ ID NO: 148671 - DNA, 22 bp, synthetic construct
  misc_feature 1..22: note = chemically synthesized
  source 1..22: mol_type = other DNA
aaaggaagaagtaggagaaaca

SEQ ID NO: 148672 - DNA, 22 bp, synthetic construct
  misc_feature 1..22: note = chemically synthesized
  source 1..22: mol_type = other DNA
tccttactaaaccgacatgggt

SEQ ID NO: 148673 - DNA, 22 bp, synthetic construct
  misc_feature 1..22: note = chemically synthesized
  source 1..22: mol_type = other DNA
ccttactaaaccgacatgggtt

SEQ ID NO: 148674 - DNA, 22 bp, synthetic construct
  misc_feature 1..22: note = chemically synthesized
  source 1..22: mol_type = other DNA
cttactaaaccgacatgggttt

SEQ ID NO: 148675 - DNA, 22 bp, synthetic construct
  misc_feature 1..22: note = chemically synthesized
  source 1..22: mol_type = other DNA
actaaaccgacatgggtttcca

SEQ ID NO: 148676 - DNA, 22 bp, synthetic construct
  misc_feature 1..22: note = chemically synthesized
  source 1..22: mol_type = other DNA
ctaaaccgacatgggtttccag

SEQ ID NO: 148677 - DNA, 22 bp, synthetic construct
  misc_feature 1..22: note = chemically synthesized
  source 1..22: mol_type = other DNA
aaccgacatgggtttccaggta

SEQ ID NO: 148678 - DNA, 22 bp, synthetic construct
  misc_feature 1..22: note = chemically synthesized
  source 1..22: mol_type = other DNA
ccaggtaggggcaggattcagg

SEQ ID NO: 148679 - DNA, 22 bp, synthetic construct
  misc_feature 1..22: note = chemically synthesized
  source 1..22: mol_type = other DNA
caggtaggggcaggattcagga

SEQ ID NO: 148680 - DNA, 22 bp, synthetic construct
  misc_feature 1..22: note = chemically synthesized
  source 1..22: mol_type = other DNA
aggatgactgacagggccctta

SEQ ID NO: 148681 - DNA, 22 bp, synthetic construct
  misc_feature 1..22: note = chemically synthesized
  source 1..22: mol_type = other DNA
acagggcccttagggaacactg

SEQ ID NO: 148682 - DNA, 22 bp, synthetic construct
  misc_feature 1..22: note = chemically synthesized
  source 1..22: mol_type = other DNA
agggaacactgagaccctacgc

SEQ ID NO: 148683 - DNA, 22 bp, synthetic construct
  misc_feature 1..22: note = chemically synthesized
  source 1..22: mol_type = other DNA
gggaacactgagaccctacgct

SEQ ID NO: 148684 - DNA, 22 bp, synthetic construct
  misc_feature 1..22: note = chemically synthesized
  source 1..22: mol_type = other DNA
agaccctacgctgacctcataa

SEQ ID NO: 148685 - DNA, 22 bp, synthetic construct
  misc_feature 1..22: note = chemically synthesized
  source 1..22: mol_type = other DNA
cgctgacctcataaatgcttgc

SEQ ID NO: 148686 - DNA, 22 bp, synthetic construct
  misc_feature 1..22: note = chemically synthesized
  source 1..22: mol_type = other DNA
acctcataaatgcttgctacct

SEQ ID NO: 148687 - DNA, 22 bp, synthetic construct
  misc_feature 1..22: note = chemically synthesized
  source 1..22: mol_type = other DNA
ataaatgcttgctacctttgct

SEQ ID NO: 148688 - DNA, 22 bp, synthetic construct
  misc_feature 1..22: note = chemically synthesized
  source 1..22: mol_type = other DNA
gctacctttgctgttttaatta

SEQ ID NO: 148689 - DNA, 22 bp, synthetic construct
  misc_feature 1..22: note = chemically synthesized
  source 1..22: mol_type = other DNA
ctacctttgctgttttaattac

SEQ ID NO: 148690 - DNA, 22 bp, synthetic construct
  misc_feature 1..22: note = chemically synthesized
  source 1..22: mol_type = other DNA
cctttgctgttttaattacatc

SEQ ID NO: 148691 - DNA, 22 bp, synthetic construct
  misc_feature 1..22: note = chemically synthesized
  source 1..22: mol_type = other DNA
tgctgttttaattacatctttt

SEQ ID NO: 148692 - DNA, 22 bp, synthetic construct
  misc_feature 1..22: note = chemically synthesized
  source 1..22: mol_type = other DNA
gctgttttaattacatctttta

SEQ ID NO: 148693 - DNA, 22 bp, synthetic construct
  misc_feature 1..22: note = chemically synthesized
  source 1..22: mol_type = other DNA
ctgttttaattacatcttttaa

SEQ ID NO: 148694 - DNA, 22 bp, synthetic construct
  misc_feature 1..22: note = chemically synthesized
  source 1..22: mol_type = other DNA
ttttaattacatcttttaatag

SEQ ID NO: 148695 - DNA, 22 bp, synthetic construct
  misc_feature 1..22: note = chemically synthesized
  source 1..22: mol_type = other DNA
taattacatcttttaatagcag

SEQ ID NO: 148696 - DNA, 22 bp, synthetic construct
  misc_feature 1..22: note = chemically synthesized
  source 1..22: mol_type = other DNA
aattacatcttttaatagcagg

SEQ ID NO: 148697 - DNA, 22 bp, synthetic construct
  misc_feature 1..22: note = chemically synthesized
  source 1..22: mol_type = other DNA
attacatcttttaatagcagga

SEQ ID NO: 148698 - DNA, 22 bp, synthetic construct
  misc_feature 1..22: note = chemically synthesized
  source 1..22: mol_type = other DNA
catcttttaatagcaggaagca

SEQ ID NO: 148699 - DNA, 22 bp, synthetic construct
  misc_feature 1..22: note = chemically synthesized
  source 1..22: mol_type = other DNA
ttaatagcaggaagcagaactc

SEQ ID NO: 148700 - DNA, 22 bp, synthetic construct
  misc_feature 1..22: note = chemically synthesized
  source 1..22: mol_type = other DNA
taatagcaggaagcagaactct

SEQ ID NO: 148701 - DNA, 22 bp, synthetic construct
  misc_feature 1..22: note = chemically synthesized
  source 1..22: mol_type = other DNA
aatagcaggaagcagaactctg

SEQ ID NO: 148702 - DNA, 22 bp, synthetic construct
  misc_feature 1..22: note = chemically synthesized
  source 1..22: mol_type = other DNA
atagcaggaagcagaactctgc

SEQ ID NO: 148703 - DNA, 22 bp, synthetic construct
  misc_feature 1..22: note = chemically synthesized
  source 1..22: mol_type = other DNA
tgcacttcaaaagtttttcctc

SEQ ID NO: 148704 - DNA, 22 bp, synthetic construct
  misc_feature 1..22: note = chemically synthesized
  source 1..22: mol_type = other DNA
cacttcaaaagtttttcctcac

SEQ ID NO: 148705 - DNA, 22 bp, synthetic construct
  misc_feature 1..22: note = chemically synthesized
  source 1..22: mol_type = other DNA
caaaagtttttcctcacctgag

SEQ ID NO: 148706 - DNA, 22 bp, synthetic construct
  misc_feature 1..22: note = chemically synthesized
  source 1..22: mol_type = other DNA
aaaagtttttcctcacctgagg

SEQ ID NO: 148707 - DNA, 22 bp, synthetic construct
  misc_feature 1..22: note = chemically synthesized
  source 1..22: mol_type = other DNA
ttcctcacctgaggagttaatt

SEQ ID NO: 148708 - DNA, 22 bp, synthetic construct
  misc_feature 1..22: note = chemically synthesized
  source 1..22: mol_type = other DNA
tcctcacctgaggagttaattt

SEQ ID NO: 148709 - DNA, 22 bp, synthetic construct
  misc_feature 1..22: note = chemically synthesized
  source 1..22: mol_type = other DNA
cctcacctgaggagttaattta

SEQ ID NO: 148710 - DNA, 22 bp, synthetic construct
  misc_feature 1..22: note = chemically synthesized
  source 1..22: mol_type = other DNA
ctcacctgaggagttaatttag

SEQ ID NO: 148711 - DNA, 22 bp, synthetic construct
  misc_feature 1..22: note = chemically synthesized
  source 1..22: mol_type = other DNA
acctgaggagttaatttagtac

SEQ ID NO: 148712 - DNA, 22 bp, synthetic construct
  misc_feature 1..22: note = chemically synthesized
  source 1..22: mol_type = other DNA
aggagttaatttagtacaaggg

SEQ ID NO: 148713 - DNA, 22 bp, synthetic construct
  misc_feature 1..22: note = chemically synthesized
  source 1..22: mol_type = other DNA
atttagtacaaggggaaaaagt

SEQ ID NO: 148714 - DNA, 22 bp, synthetic construct
  misc_feature 1..22: note = chemically synthesized
  source 1..22: mol_type = other DNA
agtacaaggggaaaaagtacag

SEQ ID NO: 148715 - DNA, 22 bp, synthetic construct
  misc_feature 1..22: note = chemically synthesized
  source 1..22: mol_type = other DNA
gtacaaggggaaaaagtacagg

SEQ ID NO: 148716 - DNA, 22 bp, synthetic construct
  misc_feature 1..22: note = chemically synthesized
  source 1..22: mol_type = other DNA
ggaagctatagagaaagaagag

SEQ ID NO: 148717 - DNA, 22 bp, synthetic construct
  misc_feature 1..22: note = chemically synthesized
  source 1..22: mol_type = other DNA
tagagaaagaagagtaaatttt

SEQ ID NO: 148718 - DNA, 22 bp, synthetic construct
  misc_feature 1..22: note = chemically synthesized
  source 1..22: mol_type = other DNA
tagtaaaggaggtttaaacaaa

SEQ ID NO: 148719 - DNA, 22 bp, synthetic construct
  misc_feature 1..22: note = chemically synthesized
  source 1..22: mol_type = other DNA
agtaaaggaggtttaaacaaac

SEQ ID NO: 148720 - DNA, 22 bp, synthetic construct
  misc_feature 1..22: note = chemically synthesized
  source 1..22: mol_type = other DNA
gtaaaggaggtttaaacaaaca

SEQ ID NO: 148721 - DNA, 22 bp, synthetic construct
  misc_feature 1..22: note = chemically synthesized
  source 1..22: mol_type = other DNA
aaacaaacaaaatataaagaga

SEQ ID NO: 148722 - DNA, 22 bp, synthetic construct
  misc_feature 1..22: note = chemically synthesized
  source 1..22: mol_type = other DNA
aacaaacaaaatataaagagaa

SEQ ID NO: 148723 - DNA, 22 bp, synthetic construct
  misc_feature 1..22: note = chemically synthesized
  source 1..22: mol_type = other DNA
gaatcaaggaaatgattttaaa

SEQ ID NO: 148724 - DNA, 22 bp, synthetic construct
  misc_feature 1..22: note = chemically synthesized
  source 1..22: mol_type = other DNA
aatcaaggaaatgattttaaaa

SEQ ID NO: 148725 - DNA, 22 bp, synthetic construct
  misc_feature 1..22: note = chemically synthesized
  source 1..22: mol_type = other DNA
taaaacgcagtattcttagtgg

SEQ ID NO: 148726 - DNA, 22 bp, synthetic construct
  misc_feature 1..22: note = chemically synthesized
  source 1..22: mol_type = other DNA
aaaacgcagtattcttagtgga

SEQ ID NO: 148727 - DNA, 22 bp, synthetic construct
  misc_feature 1..22: note = chemically synthesized
  source 1..22: mol_type = other DNA
aaacgcagtattcttagtggac

SEQ ID NO: 148728 - DNA, 22 bp, synthetic construct
  misc_feature 1..22: note = chemically synthesized
  source 1..22: mol_type = other DNA
ttagtggactagaggaaaaaaa

SEQ ID NO: 148729 - DNA, 22 bp, synthetic construct
  misc_feature 1..22: note = chemically synthesized
  source 1..22: mol_type = other DNA
agtggactagaggaaaaaaata

SEQ ID NO: 148730 - DNA, 22 bp, synthetic construct
  misc_feature 1..22: note = chemically synthesized
  source 1..22: mol_type = other DNA
gtggactagaggaaaaaaataa

SEQ ID NO: 148731 - DNA, 22 bp, synthetic construct
  misc_feature 1..22: note = chemically synthesized
  source 1..22: mol_type = other DNA
gaggaaaaaaataatctgagcc

SEQ ID NO: 148732 - DNA, 22 bp, synthetic construct
  misc_feature 1..22: note = chemically synthesized
  source 1..22: mol_type = other DNA
agccaagtagaagaccttttcc

SEQ ID NO: 148733 - DNA, 22 bp, synthetic construct
  misc_feature 1..22: note = chemically synthesized
  source 1..22: mol_type = other DNA
ttcccctcctacccctactttc

SEQ ID NO: 148734 - DNA, 22 bp, synthetic construct
  misc_feature 1..22: note = chemically synthesized
  source 1..22: mol_type = other DNA
tcccctcctacccctactttct

SEQ ID NO: 148735 - DNA, 22 bp, synthetic construct
  misc_feature 1..22: note = chemically synthesized
  source 1..22: mol_type = other DNA
cccctcctacccctactttcta

SEQ ID NO: 148736 - DNA, 22 bp, synthetic construct
  misc_feature 1..22: note = chemically synthesized
  source 1..22: mol_type = other DNA
ccctcctacccctactttctaa

SEQ ID NO: 148737 - DNA, 22 bp, synthetic construct
  misc_feature 1..22: note = chemically synthesized
  source 1..22: mol_type = other DNA
ctacccctactttctaagtcac

SEQ ID NO: 148738 - DNA, 22 bp, synthetic construct
  misc_feature 1..22: note = chemically synthesized
  source 1..22: mol_type = other DNA
cccctactttctaagtcacaga

SEQ ID NO: 148739 - DNA, 22 bp, synthetic construct
  misc_feature 1..22: note = chemically synthesized
  source 1..22: mol_type = other DNA
ctttctaagtcacagaggcttt

SEQ ID NO: 148740 - DNA, 22 bp, synthetic construct
  misc_feature 1..22: note = chemically synthesized
  source 1..22: mol_type = other DNA
tctaagtcacagaggctttttg

SEQ ID NO: 148741 - DNA, 22 bp, synthetic construct
  misc_feature 1..22: note = chemically synthesized
  source 1..22: mol_type = other DNA
ctaagtcacagaggctttttgt

SEQ ID NO: 148742 - DNA, 22 bp, synthetic construct
  misc_feature 1..22: note = chemically synthesized
  source 1..22: mol_type = other DNA
taagtcacagaggctttttgtt

SEQ ID NO: 148743 - DNA, 22 bp, synthetic construct
  misc_feature 1..22: note = chemically synthesized
  source 1..22: mol_type = other DNA
agtcacagaggctttttgttcc

SEQ ID NO: 148744 - DNA, 22 bp, synthetic construct
  misc_feature 1..22: note = chemically synthesized
  source 1..22: mol_type = other DNA
tttgttcccccagacactcttg

SEQ ID NO: 148745 - DNA, 22 bp, synthetic construct
  misc_feature 1..22: note = chemically synthesized
  source 1..22: mol_type = other DNA
ttgttcccccagacactcttgc

SEQ ID NO: 148746 - DNA, 22 bp, synthetic construct
  misc_feature 1..22: note = chemically synthesized
  source 1..22: mol_type = other DNA
tgttcccccagacactcttgca

SEQ ID NO: 148747 - DNA, 22 bp, synthetic construct
  misc_feature 1..22: note = chemically synthesized
  source 1..22: mol_type = other DNA
gttcccccagacactcttgcag

SEQ ID NO: 148748 - DNA, 22 bp, synthetic construct
  misc_feature 1..22: note = chemically synthesized
  source 1..22: mol_type = other DNA
ttcccccagacactcttgcaga

SEQ ID NO: 148749 - DNA, 22 bp, synthetic construct
  misc_feature 1..22: note = chemically synthesized
  source 1..22: mol_type = other DNA
ccccagacactcttgcagatta

SEQ ID NO: 148750 - DNA, 22 bp, synthetic construct
  misc_feature 1..22: note = chemically synthesized
  source 1..22: mol_type = other DNA
ttgcagattagtccaggcagaa

SEQ ID NO: 148751 - DNA, 22 bp, synthetic construct
  misc_feature 1..22: note = chemically synthesized
  source 1..22: mol_type = other DNA
gcagattagtccaggcagaaac

SEQ ID NO: 148752 - DNA, 22 bp, synthetic construct
  misc_feature 1..22: note = chemically synthesized
  source 1..22: mol_type = other DNA
cagattagtccaggcagaaaca

SEQ ID NO: 148753 - DNA, 22 bp, synthetic construct
  misc_feature 1..22: note = chemically synthesized
  source 1..22: mol_type = other DNA
gtccaggcagaaacagttagat

SEQ ID NO: 148754 - DNA, 22 bp, synthetic construct
  misc_feature 1..22: note = chemically synthesized
  source 1..22: mol_type = other DNA
gatgtccccagttaacctccta

SEQ ID NO: 148755 - DNA, 22 bp, synthetic construct
  misc_feature 1..22: note = chemically synthesized
  source 1..22: mol_type = other DNA
acctcctatttgacaccactga

SEQ ID NO: 148756 - DNA, 22 bp, synthetic construct
  misc_feature 1..22: note = chemically synthesized
  source 1..22: mol_type = other DNA
ctatttgacaccactgattacc

SEQ ID NO: 148757 - DNA, 22 bp, synthetic construct
  misc_feature 1..22: note = chemically synthesized
  source 1..22: mol_type = other DNA
tttgacaccactgattacccca

SEQ ID NO: 148758 - DNA, 22 bp, synthetic construct
  misc_feature 1..22: note = chemically synthesized
  source 1..22: mol_type = other DNA
gacaccactgattaccccattg

SEQ ID NO: 148759 - DNA, 22 bp, synthetic construct
  misc_feature 1..22: note = chemically synthesized
  source 1..22: mol_type = other DNA
acaccactgattaccccattga

SEQ ID NO: 148760 - DNA, 22 bp, synthetic construct
  misc_feature 1..22: note = chemically synthesized
  source 1..22: mol_type = other DNA
attaccccattgatagtcacac

SEQ ID NO: 148761 - DNA, 22 bp, synthetic construct
  misc_feature 1..22: note = chemically synthesized
  source 1..22: mol_type = other DNA
ccccattgatagtcacactttg

SEQ ID NO: 148762 - DNA, 22 bp, synthetic construct
  misc_feature 1..22: note = chemically synthesized
  source 1..22: mol_type = other DNA
atagtcacactttgggttgtaa

SEQ ID NO: 148763 - DNA, 22 bp, synthetic construct
  misc_feature 1..22: note = chemically synthesized
  source 1..22: mol_type = other DNA
tgggttgtaagtgactttttat

SEQ ID NO: 148764 - DNA, 22 bp, synthetic construct
  misc_feature 1..22: note = chemically synthesized
  source 1..22: mol_type = other DNA
gggttgtaagtgactttttatt

SEQ ID NO: 148765 - DNA, 22 bp, synthetic construct
  misc_feature 1..22: note = chemically synthesized
  source 1..22: mol_type = other DNA
ggttgtaagtgactttttattt

SEQ ID NO: 148766 - DNA, 22 bp, synthetic construct
  misc_feature 1..22: note = chemically synthesized
  source 1..22: mol_type = other DNA
taagtgactttttatttatttg

SEQ ID NO: 148767 - DNA, 22 bp, synthetic construct
  misc_feature 1..22: note = chemically synthesized
  source 1..22: mol_type = other DNA
tttatttatttgtatttttgac

SEQ ID NO: 148768 - DNA, 22 bp, synthetic construct
  misc_feature 1..22: note = chemically synthesized
  source 1..22: mol_type = other DNA
ttatttatttgtatttttgact

SEQ ID NO: 148769 - DNA, 22 bp, synthetic construct
  misc_feature 1..22: note = chemically synthesized
  source 1..22: mol_type = other DNA
tatttatttgtatttttgactg

SEQ ID NO: 148770 - DNA, 22 bp, synthetic construct
  misc_feature 1..22: note = chemically synthesized
  source 1..22: mol_type = other DNA
atttatttgtatttttgactgc

SEQ ID NO: 148771 - DNA, 22 bp, synthetic construct
  misc_feature 1..22: note = chemically synthesized
  source 1..22: mol_type = other DNA
tttatttgtatttttgactgca

SEQ ID NO: 148772 - DNA, 22 bp, synthetic construct
  misc_feature 1..22: note = chemically synthesized
  source 1..22: mol_type = other DNA
atttgtatttttgactgcatta

SEQ ID NO: 148773 - DNA, 22 bp, synthetic construct
  misc_feature 1..22: note = chemically synthesized
  source 1..22: mol_type = other DNA
tttgtatttttgactgcattaa

SEQ ID NO: 148774 - DNA, 22 bp, synthetic construct
  misc_feature 1..22: note = chemically synthesized
  source 1..22: mol_type = other DNA
gtatttttgactgcattaagag

SEQ ID NO: 148775 - DNA, 22 bp, synthetic construct
  misc_feature 1..22: note = chemically synthesized
  source 1..22: mol_type = other DNA
tatttttgactgcattaagagg

SEQ ID NO: 148776 - DNA, 22 bp, synthetic construct
  misc_feature 1..22: note = chemically synthesized
  source 1..22: mol_type = other DNA
ttgactgcattaagaggtctct

SEQ ID NO: 148777 - DNA, 22 bp, synthetic construct
  misc_feature 1..22: note = chemically synthesized
  source 1..22: mol_type = other DNA
tgactgcattaagaggtctcta

SEQ ID NO: 148778 - DNA, 22 bp, synthetic construct
  misc_feature 1..22: note = chemically synthesized
  source 1..22: mol_type = other DNA
gactgcattaagaggtctctag

SEQ ID NO: 148779 - DNA, 22 bp, synthetic construct
  misc_feature 1..22: note = chemically synthesized
  source 1..22: mol_type = other DNA
actgcattaagaggtctctagt

SEQ ID NO: 148780 - DNA, 22 bp, synthetic construct
  misc_feature 1..22: note = chemically synthesized
  source 1..22: mol_type = other DNA
cattaagaggtctctagttttt

SEQ ID NO: 148781 - DNA, 22 bp, synthetic construct
  misc_feature 1..22: note = chemically synthesized
  source 1..22: mol_type = other DNA
agaggtctctagttttttatct

SEQ ID NO: 148782 - DNA, 22 bp, synthetic construct
  misc_feature 1..22: note = chemically synthesized
  source 1..22: mol_type = other DNA
tagttttttatctcttgtttcc

SEQ ID NO: 148783 - DNA, 22 bp, synthetic construct
  misc_feature 1..22: note = chemically synthesized
  source 1..22: mol_type = other DNA
gttttttatctcttgtttccca

SEQ ID NO: 148784 - DNA, 22 bp, synthetic construct
  misc_feature 1..22: note = chemically synthesized
  source 1..22: mol_type = other DNA
tttatctcttgtttcccaaaac

SEQ ID NO: 148785 - DNA, 22 bp, synthetic construct
  misc_feature 1..22: note = chemically synthesized
  source 1..22: mol_type = other DNA
ttatctcttgtttcccaaaacc

SEQ ID NO: 148786 - DNA, 22 bp, synthetic construct
  misc_feature 1..22: note = chemically synthesized
  source 1..22: mol_type = other DNA
tatctcttgtttcccaaaacct

SEQ ID NO: 148787 - DNA, 22 bp, synthetic construct
  misc_feature 1..22: note = chemically synthesized
  source 1..22: mol_type = other DNA
atctcttgtttcccaaaaccta

SEQ ID NO: 148788 - DNA, 22 bp, synthetic construct
  misc_feature 1..22: note = chemically synthesized
  source 1..22: mol_type = other DNA
tctcttgtttcccaaaacctaa

SEQ ID NO: 148789 - DNA, 22 bp, synthetic construct
  misc_feature 1..22: note = chemically synthesized
  source 1..22: mol_type = other DNA
ttgtttcccaaaacctaataag

SEQ ID NO: 148790 - DNA, 22 bp, synthetic construct
  misc_feature 1..22: note = chemically synthesized
  source 1..22: mol_type = other DNA
gtttcccaaaacctaataagta

SEQ ID NO: 148791 - DNA, 22 bp, synthetic construct
  misc_feature 1..22: note = chemically synthesized
  source 1..22: mol_type = other DNA
tttcccaaaacctaataagtaa

SEQ ID NO: 148792 - DNA, 22 bp, synthetic construct
  misc_feature 1..22: note = chemically synthesized
  source 1..22: mol_type = other DNA
cccaaaacctaataagtaacta

SEQ ID NO: 148793 - DNA, 22 bp, synthetic construct
  misc_feature 1..22: note = chemically synthesized
  source 1..22: mol_type = other DNA
ccaaaacctaataagtaactaa

SEQ ID NO: 148794 - DNA, 22 bp, synthetic construct
  misc_feature 1..22: note = chemically synthesized
  source 1..22: mol_type = other DNA
ataagtaactaatgcacagagc

SEQ ID NO: 148795 - DNA, 22 bp, synthetic construct
  misc_feature 1..22: note = chemically synthesized
  source 1..22: mol_type = other DNA
atgcacagagcacattgatttg

SEQ ID NO: 148796 - DNA, 22 bp, synthetic construct
  misc_feature 1..22: note = chemically synthesized
  source 1..22: mol_type = other DNA
atttgtatttattctattttta

SEQ ID NO: 148797 - DNA, 22 bp, synthetic construct
  misc_feature 1..22: note = chemically synthesized
  source 1..22: mol_type = other DNA
gtatttattctatttttagaca

SEQ ID NO: 148798 - DNA, 22 bp, synthetic construct
  misc_feature 1..22: note = chemically synthesized
  source 1..22: mol_type = other DNA
tatttattctatttttagacat

SEQ ID NO: 148799 - DNA, 22 bp, synthetic construct
  misc_feature 1..22: note = chemically synthesized
  source 1..22: mol_type = other DNA
attctatttttagacataattt

SEQ ID NO: 148800 - DNA, 22 bp, synthetic construct
  misc_feature 1..22: note = chemically synthesized
  source 1..22: mol_type = other DNA
ttctatttttagacataattta

SEQ ID NO: 148801 - DNA, 22 bp, synthetic construct
  misc_feature 1..22: note = chemically synthesized
  source 1..22: mol_type = other DNA
tatttttagacataatttatta

SEQ ID NO: 148802 - DNA, 22 bp, synthetic construct
  misc_feature 1..22: note = chemically synthesized
  source 1..22: mol_type = other DNA
tttttagacataatttattagc

SEQ ID NO: 148803 - DNA, 22 bp, synthetic construct
  misc_feature 1..22: note = chemically synthesized
  source 1..22: mol_type = other DNA
ttagacataatttattagcatg

SEQ ID NO: 148804 - DNA, 22 bp, synthetic construct
  misc_feature 1..22: note = chemically synthesized
  source 1..22: mol_type = other DNA
tagacataatttattagcatgc

SEQ ID NO: 148805 - DNA, 22 bp, synthetic construct
  misc_feature 1..22: note = chemically synthesized
  source 1..22: mol_type = other DNA
agacataatttattagcatgca

SEQ ID NO: 148806 - DNA, 22 bp, synthetic construct
  misc_feature 1..22: note = chemically synthesized
  source 1..22: mol_type = other DNA
gacataatttattagcatgcat

SEQ ID NO: 148807 - DNA, 22 bp, synthetic construct
  misc_feature 1..22: note = chemically synthesized
  source 1..22: mol_type = other DNA
attagcatgcatgagcaaatta

SEQ ID NO: 148808 - DNA, 22 bp, synthetic construct
  misc_feature 1..22: note = chemically synthesized
  source 1..22: mol_type = other DNA
ttagcatgcatgagcaaattaa

SEQ ID NO: 148809 - DNA, 22 bp, synthetic construct
  misc_feature 1..22: note = chemically synthesized
  source 1..22: mol_type = other DNA
gcatgcatgagcaaattaagaa

SEQ ID NO: 148810 - DNA, 22 bp, synthetic construct
  misc_feature 1..22: note = chemically synthesized
  source 1..22: mol_type = other DNA
agaaaaacaacaacaaatgaat

SEQ ID NO: 148811 - DNA, 22 bp, synthetic construct
  misc_feature 1..22: note = chemically synthesized
  source 1..22: mol_type = other DNA
tttcttttcttaccagaaggtt

SEQ ID NO: 148812 - DNA, 22 bp, synthetic construct
  misc_feature 1..22: note = chemically synthesized
  source 1..22: mol_type = other DNA
ttcttttcttaccagaaggttt

SEQ ID NO: 148813 - DNA, 22 bp, synthetic construct
  misc_feature 1..22: note = chemically synthesized
  source 1..22: mol_type = other DNA
tcttttcttaccagaaggtttt

SEQ ID NO: 148814 - DNA, 22 bp, synthetic construct
  misc_feature 1..22: note = chemically synthesized
  source 1..22: mol_type = other DNA
cttttcttaccagaaggtttta

SEQ ID NO: 148815 - DNA, 22 bp, synthetic construct
  misc_feature 1..22: note = chemically synthesized
  source 1..22: mol_type = other DNA
ttttcttaccagaaggttttaa

SEQ ID NO: 148816 - DNA, 22 bp, synthetic construct
  misc_feature 1..22: note = chemically synthesized
  source 1..22: mol_type = other DNA
ttcttaccagaaggttttaatc

SEQ ID NO: 148817 - DNA, 22 bp, synthetic construct
  misc_feature 1..22: note = chemically synthesized
  source 1..22: mol_type = other DNA
tcttaccagaaggttttaatcc

SEQ ID NO: 148818 - DNA, 22 bp, synthetic construct
  misc_feature 1..22: note = chemically synthesized
  source 1..22: mol_type = other DNA
cttaccagaaggttttaatcca

SEQ ID NO: 148819 - DNA, 22 bp, synthetic construct
  misc_feature 1..22: note = chemically synthesized
  source 1..22: mol_type = other DNA
ttaccagaaggttttaatccaa

SEQ ID NO: 148820 - DNA, 22 bp, synthetic construct
  misc_feature 1..22: note = chemically synthesized
  source 1..22: mol_type = other DNA
accagaaggttttaatccaaat

SEQ ID NO: 148821 - DNA, 22 bp, synthetic construct
  misc_feature 1..22: note = chemically synthesized
  source 1..22: mol_type = other DNA
ccagaaggttttaatccaaata

SEQ ID NO: 148822 - DNA, 22 bp, synthetic construct
  misc_feature 1..22: note = chemically synthesized
  source 1..22: mol_type = other DNA
taatccaaataaggagaagata

SEQ ID NO: 148823 - DNA, 22 bp, synthetic construct
  misc_feature 1..22: note = chemically synthesized
  source 1..22: mol_type = other DNA
aatccaaataaggagaagatat

SEQ ID NO: 148824 - DNA, 22 bp, synthetic construct
  misc_feature 1..22: note = chemically synthesized
  source 1..22: mol_type = other DNA
atccaaataaggagaagatatg

SEQ ID NO: 148825 - DNA, 22 bp, synthetic construct
  misc_feature 1..22: note = chemically synthesized
  source 1..22: mol_type = other DNA
agaaccgaggtagagttttcat

SEQ ID NO: 148826 - DNA, 22 bp, synthetic construct
  misc_feature 1..22: note = chemically synthesized
  source 1..22: mol_type = other DNA
gaaccgaggtagagttttcatc

SEQ ID NO: 148827 - DNA, 22 bp, synthetic construct
  misc_feature 1..22: note = chemically synthesized
  source 1..22: mol_type = other DNA
tcatccattctgtcctgtaagt

SEQ ID NO: 148828 - DNA, 22 bp, synthetic construct
  misc_feature 1..22: note = chemically synthesized
  source 1..22: mol_type = other DNA
catccattctgtcctgtaagta

SEQ ID NO: 148829 - DNA, 22 bp, synthetic construct
  misc_feature 1..22: note = chemically synthesized
  source 1..22: mol_type = other DNA
atccattctgtcctgtaagtat

SEQ ID NO: 148830 - DNA, 22 bp, synthetic construct
  misc_feature 1..22: note = chemically synthesized
  source 1..22: mol_type = other DNA
tgtcctgtaagtattttgcata

SEQ ID NO: 148831 - DNA, 22 bp, synthetic construct
  misc_feature 1..22: note = chemically synthesized
  source 1..22: mol_type = other DNA
tcctgtaagtattttgcatatt

SEQ ID NO: 148832 - DNA, 22 bp, synthetic construct
  misc_feature 1..22: note = chemically synthesized
  source 1..22: mol_type = other DNA
taagtattttgcatattctgga

SEQ ID NO: 148833 - DNA, 22 bp, synthetic construct
  misc_feature 1..22: note = chemically synthesized
  source 1..22: mol_type = other DNA
tgcatattctggagacgcagga

SEQ ID NO: 148834 - DNA, 22 bp, synthetic construct
  misc_feature 1..22: note = chemically synthesized
  source 1..22: mol_type = other DNA
gcatattctggagacgcaggaa

SEQ ID NO: 148835 - DNA, 22 bp, synthetic construct
  misc_feature 1..22: note = chemically synthesized
  source 1..22: mol_type = other DNA
catattctggagacgcaggaag

SEQ ID NO: 148836 - DNA, 22 bp, synthetic construct
  misc_feature 1..22: note = chemically synthesized
  source 1..22: mol_type = other DNA
tggagacgcaggaagagatcca

SEQ ID NO: 148837 - DNA, 22 bp, synthetic construct
  misc_feature 1..22: note = chemically synthesized
  source 1..22: mol_type = other DNA
gagacgcaggaagagatccatc

SEQ ID NO: 148838 - DNA, 22 bp, synthetic construct
  misc_feature 1..22: note = chemically synthesized
  source 1..22: mol_type = other DNA
catatcccaaagctgaattatg

SEQ ID NO: 148839 - DNA, 22 bp, synthetic construct
  misc_feature 1..22: note = chemically synthesized
  source 1..22: mol_type = other DNA
aattatggtagacaaaactctt

SEQ ID NO: 148840 - DNA, 22 bp, synthetic construct
  misc_feature 1..22: note = chemically synthesized
  source 1..22: mol_type = other DNA
tggtagacaaaactcttccact

SEQ ID NO: 148841 - DNA, 22 bp, synthetic construct
  misc_feature 1..22: note = chemically synthesized
  source 1..22: mol_type = other DNA
ttccacttttagtgcatcaact

SEQ ID NO: 148842 - DNA, 22 bp, synthetic construct
  misc_feature 1..22: note = chemically synthesized
  source 1..22: mol_type = other DNA
ccacttttagtgcatcaacttc

SEQ ID NO: 148843 - DNA, 22 bp, synthetic construct
  misc_feature 1..22: note = chemically synthesized
  source 1..22: mol_type = other DNA
cacttttagtgcatcaacttct

SEQ ID NO: 148844 - DNA, 22 bp, synthetic construct
  misc_feature 1..22: note = chemically synthesized
  source 1..22: mol_type = other DNA
ttagtgcatcaacttcttattt

SEQ ID NO: 148845 - DNA, 22 bp, synthetic construct
  misc_feature 1..22: note = chemically synthesized
  source 1..22: mol_type = other DNA
tagtgcatcaacttcttatttg

SEQ ID NO: 148846 - DNA, 22 bp, synthetic construct
  misc_feature 1..22: note = chemically synthesized
  source 1..22: mol_type = other DNA
agtgcatcaacttcttatttgt

SEQ ID NO: 148847 - DNA, 22 bp, synthetic construct
  misc_feature 1..22: note = chemically synthesized
  source 1..22: mol_type = other DNA
gtgcatcaacttcttatttgtg

SEQ ID NO: 148848 - DNA, 22 bp, synthetic construct
  misc_feature 1..22: note = chemically synthesized
  source 1..22: mol_type = other DNA
cttatttgtgtaataagaaaat

SEQ ID NO: 148849 - DNA, 22 bp, synthetic construct
  misc_feature 1..22: note = chemically synthesized
  source 1..22: mol_type = other DNA
ttatttgtgtaataagaaaatt

SEQ ID NO: 148850 - DNA, 22 bp, synthetic construct
  misc_feature 1..22: note = chemically synthesized
  source 1..22: mol_type = other DNA
atttgtgtaataagaaaattgg

SEQ ID NO: 148851 - DNA, 22 bp, synthetic construct
  misc_feature 1..22: note = chemically synthesized
  source 1..22: mol_type = other DNA
tttgtgtaataagaaaattggg

SEQ ID NO: 148852 - DNA, 22 bp, synthetic construct
  misc_feature 1..22: note = chemically synthesized
  source 1..22: mol_type = other DNA
gtgtaataagaaaattgggaaa

SEQ ID NO: 148853 - DNA, 22 bp, synthetic construct
  misc_feature 1..22: note = chemically synthesized
  source 1..22: mol_type = other DNA
tgtaataagaaaattgggaaaa

SEQ ID NO: 148854 - DNA, 22 bp, synthetic construct
  misc_feature 1..22: note = chemically synthesized
  source 1..22: mol_type = other DNA
ggaaaacgatcttcaatatgct

SEQ ID NO: 148855 - DNA, 22 bp, synthetic construct
  misc_feature 1..22: note = chemically synthesized
  source 1..22: mol_type = other DNA
caatatgcttaccaagctgtga

SEQ ID NO: 148856 - DNA, 22 bp, synthetic construct
  misc_feature 1..22: note = chemically synthesized
  source 1..22: mol_type = other DNA
aatatgcttaccaagctgtgat

SEQ ID NO: 148857 - DNA, 22 bp, synthetic construct
  misc_feature 1..22: note = chemically synthesized
  source 1..22: mol_type = other DNA
accaagctgtgattccaaatat

SEQ ID NO: 148858 - DNA, 22 bp, synthetic construct
  misc_feature 1..22: note = chemically synthesized
  source 1..22: mol_type = other DNA
ccaagctgtgattccaaatatt

SEQ ID NO: 148859 - DNA, 22 bp, synthetic construct
  misc_feature 1..22: note = chemically synthesized
  source 1..22: mol_type = other DNA
tgattccaaatattacgtaaat

SEQ ID NO: 148860 - DNA, 22 bp, synthetic construct
  misc_feature 1..22: note = chemically synthesized
  source 1..22: mol_type = other DNA
caaatattacgtaaatacactt

SEQ ID NO: 148861 - DNA, 22 bp, synthetic construct
  misc_feature 1..22: note = chemically synthesized
  source 1..22: mol_type = other DNA
cgtaaatacacttgcaaaggag

SEQ ID NO: 148862 - DNA, 22 bp, synthetic construct
  misc_feature 1..22: note = chemically synthesized
  source 1..22: mol_type = other DNA
gcaaaggaggatgtttttagta

SEQ ID NO: 148863 - DNA, 22 bp, synthetic construct
  misc_feature 1..22: note = chemically synthesized
  source 1..22: mol_type = other DNA
caaaggaggatgtttttagtag

SEQ ID NO: 148864 - DNA, 22 bp, synthetic construct
  misc_feature 1..22: note = chemically synthesized
  source 1..22: mol_type = other DNA
ttagtagcaatttgtactgatg

SEQ ID NO: 148865 - DNA, 22 bp, synthetic construct
  misc_feature 1..22: note = chemically synthesized
  source 1..22: mol_type = other DNA
tagtagcaatttgtactgatgg

SEQ ID NO: 148866 - DNA, 22 bp, synthetic construct
  misc_feature 1..22: note = chemically synthesized
  source 1..22: mol_type = other DNA
agtagcaatttgtactgatggt

SEQ ID NO: 148867 - DNA, 22 bp, synthetic construct
  misc_feature 1..22: note = chemically synthesized
  source 1..22: mol_type = other DNA
gtagcaatttgtactgatggta

SEQ ID NO: 148868 - DNA, 22 bp, synthetic construct
  misc_feature 1..22: note = chemically synthesized
  source 1..22: mol_type = other DNA
gtactgatggtatggggccaag

SEQ ID NO: 148869 - DNA, 22 bp, synthetic construct
  misc_feature 1..22: note = chemically synthesized
  source 1..22: mol_type = other DNA
tactgatggtatggggccaaga

SEQ ID NO: 148870 - DNA, 22 bp, synthetic construct
  misc_feature 1..22: note = chemically synthesized
  source 1..22: mol_type = other DNA
atggtatggggccaagagatat

SEQ ID NO: 148871 - DNA, 22 bp, synthetic construct
  misc_feature 1..22: note = chemically synthesized
  source 1..22: mol_type = other DNA
agagggagggctgagggtttga

SEQ ID NO: 148872 - DNA, 22 bp, synthetic construct
  misc_feature 1..22: note = chemically synthesized
  source 1..22: mol_type = other DNA
gagggagggctgagggtttgaa

SEQ ID NO: 148873 - DNA, 22 bp, synthetic construct
  misc_feature 1..22: note = chemically synthesized
  source 1..22: mol_type = other DNA
agggtttgaagtccaactccta

SEQ ID NO: 148874 - DNA, 22 bp, synthetic construct
  misc_feature 1..22: note = chemically synthesized
  source 1..22: mol_type = other DNA
gaagtccaactcctaagccagt

SEQ ID NO: 148875 - DNA, 22 bp, synthetic construct
  misc_feature 1..22: note = chemically synthesized
  source 1..22: mol_type = other DNA
aagtccaactcctaagccagtg

SEQ ID NO: 148876 - DNA, 22 bp, synthetic construct
  misc_feature 1..22: note = chemically synthesized
  source 1..22: mol_type = other DNA
ctaagccagtgccagaagagcc

SEQ ID NO: 148877 - DNA, 22 bp, synthetic construct
  misc_feature 1..22: note = chemically synthesized
  source 1..22: mol_type = other DNA
agccagtgccagaagagccaag

SEQ ID NO: 148878 - DNA, 22 bp, synthetic construct
  misc_feature 1..22: note = chemically synthesized
  source 1..22: mol_type = other DNA
tcatcacttagacctcaccctg

SEQ ID NO: 148879 - DNA, 22 bp, synthetic construct
  misc_feature 1..22: note = chemically synthesized
  source 1..22: mol_type = other DNA
agacctcaccctgtggagccac

SEQ ID NO: 148880 - DNA, 22 bp, synthetic construct
  misc_feature 1..22: note = chemically synthesized
  source 1..22: mol_type = other DNA
gacctcaccctgtggagccaca

SEQ ID NO: 148881 - DNA, 22 bp, synthetic construct
  misc_feature 1..22: note = chemically synthesized
  source 1..22: mol_type = other DNA
accctgtggagccacaccctag

SEQ ID NO: 148882 - DNA, 22 bp, synthetic construct
  misc_feature 1..22: note = chemically synthesized
  source 1..22: mol_type = other DNA
tggagccacaccctagggttgg

SEQ ID NO: 148883 - DNA, 22 bp, synthetic construct
  misc_feature 1..22: note = chemically synthesized
  source 1..22: mol_type = other DNA
gggttggccaatctactcccag

SEQ ID NO: 148884 - DNA, 22 bp, synthetic construct
  misc_feature 1..22: note = chemically synthesized
  source 1..22: mol_type = other DNA
gccaatctactcccaggagcag

SEQ ID NO: 148885 - DNA, 22 bp, synthetic construct
  misc_feature 1..22: note = chemically synthesized
  source 1..22: mol_type = other DNA
ctcccaggagcagggagggcag

SEQ ID NO: 148886 - DNA, 22 bp, synthetic construct
  misc_feature 1..22: note = chemically synthesized
  source 1..22: mol_type = other DNA
ccaggagcagggagggcaggag

SEQ ID NO: 148887 - DNA, 22 bp, synthetic construct
  misc_feature 1..22: note = chemically synthesized
  source 1..22: mol_type = other DNA
ggcataaaagtcagggcagagc

SEQ ID NO: 148888 - DNA, 22 bp, synthetic construct
  misc_feature 1..22: note = chemically synthesized
  source 1..22: mol_type = other DNA
ttgcttacatttgcttctgaca

SEQ ID NO: 148889 - DNA, 22 bp, synthetic construct
  misc_feature 1..22: note = chemically synthesized
  source 1..22: mol_type = other DNA
cttacatttgcttctgacacaa

SEQ ID NO: 148890 - DNA, 22 bp, synthetic construct
  misc_feature 1..22: note = chemically synthesized
  source 1..22: mol_type = other DNA
acatttgcttctgacacaactg

SEQ ID NO: 148891 - DNA, 22 bp, synthetic construct
  misc_feature 1..22: note = chemically synthesized
  source 1..22: mol_type = other DNA
catttgcttctgacacaactgt

SEQ ID NO: 148892 - DNA, 22 bp, synthetic construct
  misc_feature 1..22: note = chemically synthesized
  source 1..22: mol_type = other DNA
gcttctgacacaactgtgttca

SEQ ID NO: 148893 - DNA, 22 bp, synthetic construct
  misc_feature 1..22: note = chemically synthesized
  source 1..22: mol_type = other DNA
cttctgacacaactgtgttcac

SEQ ID NO: 148894 - DNA, 22 bp, synthetic construct
  misc_feature 1..22: note = chemically synthesized
  source 1..22: mol_type = other DNA
ctgacacaactgtgttcactag

SEQ ID NO: 148895 - DNA, 22 bp, synthetic construct
  misc_feature 1..22: note = chemically synthesized
  source 1..22: mol_type = other DNA
tgacacaactgtgttcactagc

SEQ ID NO: 148896 - DNA, 22 bp, synthetic construct
  misc_feature 1..22: note = chemically synthesized
  source 1..22: mol_type = other DNA
acacaactgtgttcactagcaa

SEQ ID NO: 148897 - DNA, 22 bp, synthetic construct
  misc_feature 1..22: note = chemically synthesized
  source 1..22: mol_type = other DNA
tgttcactagcaacctcaaaca

SEQ ID NO: 148898 - DNA, 22 bp, synthetic construct
  misc_feature 1..22: note = chemically synthesized
  source 1..22: mol_type = other DNA
actagcaacctcaaacagacac

SEQ ID NO: 148899 - DNA, 22 bp, synthetic construct
  misc_feature 1..22: note = chemically synthesized
  source 1..22: mol_type = other DNA
gcaacctcaaacagacaccatg

SEQ ID NO: 148900 - DNA, 22 bp, synthetic construct
  misc_feature 1..22: note = chemically synthesized
  source 1..22: mol_type = other DNA
aaacagacaccatggtgcatct

SEQ ID NO: 148901 - DNA, 22 bp, synthetic construct
  misc_feature 1..22: note = chemically synthesized
  source 1..22: mol_type = other DNA
actcctgaggagaagtctgccg

SEQ ID NO: 148902 - DNA, 22 bp, synthetic construct
  misc_feature 1..22: note = chemically synthesized
  source 1..22: mol_type = other DNA
ctgaggagaagtctgccgttac

SEQ ID NO: 148903 - DNA, 22 bp, synthetic construct
  misc_feature 1..22: note = chemically synthesized
  source 1..22: mol_type = other DNA
aggagaagtctgccgttactgc

SEQ ID NO: 148904 - DNA, 22 bp, synthetic construct
  misc_feature 1..22: note = chemically synthesized
  source 1..22: mol_type = other DNA
ccgttactgccctgtggggcaa

SEQ ID NO: 148905 - DNA, 22 bp, synthetic construct
  misc_feature 1..22: note = chemically synthesized
  source 1..22: mol_type = other DNA
ctgccctgtggggcaaggtgaa

SEQ ID NO: 148906 - DNA, 22 bp, synthetic construct
  misc_feature 1..22: note = chemically synthesized
  source 1..22: mol_type = other DNA
ccctgtggggcaaggtgaacgt

SEQ ID NO: 148907 - DNA, 22 bp, synthetic construct
  misc_feature 1..22: note = chemically synthesized
  source 1..22: mol_type = other DNA
tggggcaaggtgaacgtggatg

SEQ ID NO: 148908 - DNA, 22 bp, synthetic construct
  misc_feature 1..22: note = chemically synthesized
  source 1..22: mol_type = other DNA
gtggtgaggccctgggcaggtt

SEQ ID NO: 148909 - DNA, 22 bp, synthetic construct
  misc_feature 1..22: note = chemically synthesized
  source 1..22: mol_type = other DNA
ggcaggttggtatcaaggttac

SEQ ID NO: 148910 - DNA, 22 bp, synthetic construct
  misc_feature 1..22: note = chemically synthesized
  source 1..22: mol_type = other DNA
gtatcaaggttacaagacaggt

SEQ ID NO: 148911 - DNA, 22 bp, synthetic construct
  misc_feature 1..22: note = chemically synthesized
  source 1..22: mol_type = other DNA
caagacaggtttaaggagacca

SEQ ID NO: 148912 - DNA, 22 bp, synthetic construct
  misc_feature 1..22: note = chemically synthesized
  source 1..22: mol_type = other DNA
aaggagaccaatagaaactggg

SEQ ID NO: 148913 - DNA, 22 bp, synthetic construct
  misc_feature 1..22: note = chemically synthesized
  source 1..22: mol_type = other DNA
aggagaccaatagaaactgggc

SEQ ID NO: 148914 - DNA, 22 bp, synthetic construct
  misc_feature 1..22: note = chemically synthesized
  source 1..22: mol_type = other DNA
ggcatgtggagacagagaagac

SEQ ID NO: 148915 - DNA, 22 bp, synthetic construct
  misc_feature 1..22: note = chemically synthesized
  source 1..22: mol_type = other DNA
ttgggtttctgataggcactga

SEQ ID NO: 148916 - DNA, 22 bp, synthetic construct
  misc_feature 1..22: note = chemically synthesized
  source 1..22: mol_type = other DNA
gggtttctgataggcactgact

SEQ ID NO: 148917 - DNA, 22 bp, synthetic construct
  misc_feature 1..22: note = chemically synthesized
  source 1..22: mol_type = other DNA
ggtttctgataggcactgactc

SEQ ID NO: 148918 - DNA, 22 bp, synthetic construct
  misc_feature 1..22: note = chemically synthesized
  source 1..22: mol_type = other DNA
ctgataggcactgactctctct

SEQ ID NO: 148919 - DNA, 22 bp, synthetic construct
  misc_feature 1..22: note = chemically synthesized
  source 1..22: mol_type = other DNA
tgataggcactgactctctctg

SEQ ID NO: 148920 - DNA, 22 bp, synthetic construct
  misc_feature 1..22: note = chemically synthesized
  source 1..22: mol_type = other DNA
ataggcactgactctctctgcc

SEQ ID NO: 148921 - DNA, 22 bp, synthetic construct
  misc_feature 1..22: note = chemically synthesized
  source 1..22: mol_type = other DNA
actctctctgcctattggtcta

SEQ ID NO: 148922 - DNA, 22 bp, synthetic construct
  misc_feature 1..22: note = chemically synthesized
  source 1..22: mol_type = other DNA
tctctgcctattggtctatttt

SEQ ID NO: 148923 - DNA, 22 bp, synthetic construct
  misc_feature 1..22: note = chemically synthesized
  source 1..22: mol_type = other DNA
tctgcctattggtctattttcc

SEQ ID NO: 148924 - DNA, 22 bp, synthetic construct
  misc_feature 1..22: note = chemically synthesized
  source 1..22: mol_type = other DNA
tgcctattggtctattttccca

SEQ ID NO: 148925 - DNA, 22 bp, synthetic construct
  misc_feature 1..22: note = chemically synthesized
  source 1..22: mol_type = other DNA
cctattggtctattttcccacc

SEQ ID NO: 148926 - DNA, 22 bp, synthetic construct
  misc_feature 1..22: note = chemically synthesized
  source 1..22: mol_type = other DNA
ttggtctattttcccaccctta

SEQ ID NO: 148927 - DNA, 22 bp, synthetic construct
  misc_feature 1..22: note = chemically synthesized
  source 1..22: mol_type = other DNA
gtctattttcccacccttaggc

SEQ ID NO: 148928 - DNA, 22 bp, synthetic construct
  misc_feature 1..22: note = chemically synthesized
  source 1..22: mol_type = other DNA
ttttcccacccttaggctgctg

SEQ ID NO: 148929 - DNA, 22 bp, synthetic construct
  misc_feature 1..22: note = chemically synthesized
  source 1..22: mol_type = other DNA
tcccacccttaggctgctggtg

SEQ ID NO: 148930 - DNA, 22 bp, synthetic construct
  misc_feature 1..22: note = chemically synthesized
  source 1..22: mol_type = other DNA
cccacccttaggctgctggtgg

SEQ ID NO: 148931 - DNA, 22 bp, synthetic construct
  misc_feature 1..22: note = chemically synthesized
  source 1..22: mol_type = other DNA
ccacccttaggctgctggtggt

SEQ ID NO: 148932 - DNA, 22 bp, synthetic construct
  misc_feature 1..22: note = chemically synthesized
  source 1..22: mol_type = other DNA
aggctgctggtggtctaccctt

SEQ ID NO: 148933 - DNA, 22 bp, synthetic construct
  misc_feature 1..22: note = chemically synthesized
  source 1..22: mol_type = other DNA
ggctgctggtggtctacccttg

SEQ ID NO: 148934 - DNA, 22 bp, synthetic construct
  misc_feature 1..22: note = chemically synthesized
  source 1..22: mol_type = other DNA
ctggtggtctacccttggaccc

SEQ ID NO: 148935 - DNA, 22 bp, synthetic construct
  misc_feature 1..22: note = chemically synthesized
  source 1..22: mol_type = other DNA
gtggtctacccttggacccaga

SEQ ID NO: 148936 - DNA, 22 bp, synthetic construct
  misc_feature 1..22: note = chemically synthesized
  source 1..22: mol_type = other DNA
cccttggacccagaggttcttt

SEQ ID NO: 148937 - DNA, 22 bp, synthetic construct
  misc_feature 1..22: note = chemically synthesized
  source 1..22: mol_type = other DNA
ggacccagaggttctttgagtc

SEQ ID NO: 148938 - DNA, 22 bp, synthetic construct
  misc_feature 1..22: note = chemically synthesized
  source 1..22: mol_type = other DNA
gacccagaggttctttgagtcc

SEQ ID NO: 148939 - DNA, 22 bp, synthetic construct
  misc_feature 1..22: note = chemically synthesized
  source 1..22: mol_type = other DNA
tttgagtcctttggggatctgt

SEQ ID NO: 148940 - DNA, 22 bp, synthetic construct
  misc_feature 1..22: note = chemically synthesized
  source 1..22: mol_type = other DNA
tgagtcctttggggatctgtcc

SEQ ID NO: 148941 - DNA, 22 bp, synthetic construct
  misc_feature 1..22: note = chemically synthesized
  source 1..22: mol_type = other DNA
gagtcctttggggatctgtcca

SEQ ID NO: 148942 - DNA, 22 bp, synthetic construct
  misc_feature 1..22: note = chemically synthesized
  source 1..22: mol_type = other DNA
agtcctttggggatctgtccac

SEQ ID NO: 148943 - DNA, 22 bp, synthetic construct
  misc_feature 1..22: note = chemically synthesized
  source 1..22: mol_type = other DNA
tggggatctgtccactcctgat

SEQ ID NO: 148944 - DNA, 22 bp, synthetic construct
  misc_feature 1..22: note = chemically synthesized
  source 1..22: mol_type = other DNA
ggggatctgtccactcctgatg

SEQ ID NO: 148945 - DNA, 22 bp, synthetic construct
  misc_feature 1..22: note = chemically synthesized
  source 1..22: mol_type = other DNA
gggatctgtccactcctgatgc

SEQ ID NO: 148946 - DNA, 22 bp, synthetic construct
  misc_feature 1..22: note = chemically synthesized
  source 1..22: mol_type = other DNA
tccactcctgatgctgttatgg

SEQ ID NO: 148947 - DNA, 22 bp, synthetic construct
  misc_feature 1..22: note = chemically synthesized
  source 1..22: mol_type = other DNA
ctgatgctgttatgggcaaccc

SEQ ID NO: 148948 - DNA, 22 bp, synthetic construct
  misc_feature 1..22: note = chemically synthesized
  source 1..22: mol_type = other DNA
atgctgttatgggcaaccctaa

SEQ ID NO: 148949 - DNA, 22 bp, synthetic construct
  misc_feature 1..22: note = chemically synthesized
  source 1..22: mol_type = other DNA
ttatgggcaaccctaaggtgaa

SEQ ID NO: 148950 - DNA, 22 bp, synthetic construct
  misc_feature 1..22: note = chemically synthesized
  source 1..22: mol_type = other DNA
tgggcaaccctaaggtgaaggc

SEQ ID NO: 148951 - DNA, 22 bp, synthetic construct
  misc_feature 1..22: note = chemically synthesized
  source 1..22: mol_type = other DNA
aggtgaaggctcatggcaagaa

SEQ ID NO: 148952 - DNA, 22 bp, synthetic construct
  misc_feature 1..22: note = chemically synthesized
  source 1..22: mol_type = other DNA
atggcaagaaagtgctcggtgc

SEQ ID NO: 148953 - DNA, 22 bp, synthetic construct
  misc_feature 1..22: note = chemically synthesized
  source 1..22: mol_type = other DNA
ggtgcctttagtgatggcctgg

SEQ ID NO: 148954 - DNA, 22 bp, synthetic construct
  misc_feature 1..22: note = chemically synthesized
  source 1..22: mol_type = other DNA
tagtgatggcctggctcacctg

SEQ ID NO: 148955 - DNA, 22 bp, synthetic construct
  misc_feature 1..22: note = chemically synthesized
  source 1..22: mol_type = other DNA
agtgatggcctggctcacctgg

SEQ ID NO: 148956 - DNA, 22 bp, synthetic construct
  misc_feature 1..22: note = chemically synthesized
  source 1..22: mol_type = other DNA
gtgatggcctggctcacctgga

SEQ ID NO: 148957 - DNA, 22 bp, synthetic construct
  misc_feature 1..22: note = chemically synthesized
  source 1..22: mol_type = other DNA
gctcacctggacaacctcaagg

SEQ ID NO: 148958 - DNA, 22 bp, synthetic construct
  misc_feature 1..22: note = chemically synthesized
  source 1..22: mol_type = other DNA
acctggacaacctcaagggcac

SEQ ID NO: 148959 - DNA, 22 bp, synthetic construct
  misc_feature 1..22: note = chemically synthesized
  source 1..22: mol_type = other DNA
gacaacctcaagggcacctttg

SEQ ID NO: 148960 - DNA, 22 bp, synthetic construct
  misc_feature 1..22: note = chemically synthesized
  source 1..22: mol_type = other DNA
aagggcacctttgccacactga

SEQ ID NO: 148961 - DNA, 22 bp, synthetic construct
  misc_feature 1..22: note = chemically synthesized
  source 1..22: mol_type = other DNA
tgccacactgagtgagctgcac

SEQ ID NO: 148962 - DNA, 22 bp, synthetic construct
  misc_feature 1..22: note = chemically synthesized
  source 1..22: mol_type = other DNA
gccacactgagtgagctgcact

SEQ ID NO: 148963 - DNA, 22 bp, synthetic construct
  misc_feature 1..22: note = chemically synthesized
  source 1..22: mol_type = other DNA
ccacactgagtgagctgcactg

SEQ ID NO: 148964 - DNA, 22 bp, synthetic construct
  misc_feature 1..22: note = chemically synthesized
  source 1..22: mol_type = other DNA
agtgagctgcactgtgacaagc

SEQ ID NO: 148965 - DNA, 22 bp, synthetic construct
  misc_feature 1..22: note = chemically synthesized
  source 1..22: mol_type = other DNA
cactgtgacaagctgcacgtgg

SEQ ID NO: 148966 - DNA, 22 bp, synthetic construct
  misc_feature 1..22: note = chemically synthesized
  source 1..22: mol_type = other DNA
tgacaagctgcacgtggatcct

SEQ ID NO: 148967 - DNA, 22 bp, synthetic construct
  misc_feature 1..22: note = chemically synthesized
  source 1..22: mol_type = other DNA
cacgtggatcctgagaacttca

SEQ ID NO: 148968 - DNA, 22 bp, synthetic construct
  misc_feature 1..22: note = chemically synthesized
  source 1..22: mol_type = other DNA
agaacttcagggtgagtctatg

SEQ ID NO: 148969 - DNA, 22 bp, synthetic construct
  misc_feature 1..22: note = chemically synthesized
  source 1..22: mol_type = other DNA
cagggtgagtctatgggacgct

SEQ ID NO: 148970 - DNA, 22 bp, synthetic construct
  misc_feature 1..22: note = chemically synthesized
  source 1..22: mol_type = other DNA
agggtgagtctatgggacgctt

SEQ ID NO: 148971 - DNA, 22 bp, synthetic construct
  misc_feature 1..22: note = chemically synthesized
  source 1..22: mol_type = other DNA
tgggacgcttgatgttttcttt

SEQ ID NO: 148972 - DNA, 22 bp, synthetic construct
  misc_feature 1..22: note = chemically synthesized
  source 1..22: mol_type = other DNA
gatgttttctttccccttcttt

SEQ ID NO: 148973 - DNA, 22 bp, synthetic construct
  misc_feature 1..22: note = chemically synthesized
  source 1..22: mol_type = other DNA
atgttttctttccccttctttt

SEQ ID NO: 148974 - DNA, 22 bp, synthetic construct
  misc_feature 1..22: note = chemically synthesized
  source 1..22: mol_type = other DNA
tctttccccttcttttctatgg

SEQ ID NO: 148975 - DNA, 22 bp, synthetic construct
  misc_feature 1..22: note = chemically synthesized
  source 1..22: mol_type = other DNA
ctttccccttcttttctatggt

SEQ ID NO: 148976 - DNA, 22 bp, synthetic construct
  misc_feature 1..22: note = chemically synthesized
  source 1..22: mol_type = other DNA
tttccccttcttttctatggtt

SEQ ID NO: 148977 - DNA, 22 bp, synthetic construct
  misc_feature 1..22: note = chemically synthesized
  source 1..22: mol_type = other DNA
tccccttcttttctatggttaa

SEQ ID NO: 148978 - DNA, 22 bp, synthetic construct
  misc_feature 1..22: note = chemically synthesized
  source 1..22: mol_type = other DNA
ccccttcttttctatggttaag

SEQ ID NO: 148979 - DNA, 22 bp, synthetic construct
  misc_feature 1..22: note = chemically synthesized
  source 1..22: mol_type = other DNA
cccttcttttctatggttaagt

SEQ ID NO: 148980 - DNA, 22 bp, synthetic construct
  misc_feature 1..22: note = chemically synthesized
  source 1..22: mol_type = other DNA
cttttctatggttaagttcatg

SEQ ID NO: 148981 - DNA, 22 bp, synthetic construct
  misc_feature 1..22: note = chemically synthesized
  source 1..22: mol_type = other DNA
ttttctatggttaagttcatgt

SEQ ID NO: 148982 - DNA, 22 bp, synthetic construct
  misc_feature 1..22: note = chemically synthesized
  source 1..22: mol_type = other DNA
ttctatggttaagttcatgtca

SEQ ID NO: 148983 - DNA, 22 bp, synthetic construct
  misc_feature 1..22: note = chemically synthesized
  source 1..22: mol_type = other DNA
tctatggttaagttcatgtcat

SEQ ID NO: 148984 - DNA, 22 bp, synthetic construct
  misc_feature 1..22: note = chemically synthesized
  source 1..22: mol_type = other DNA
ctatggttaagttcatgtcata

SEQ ID NO: 148985 - DNA, 22 bp, synthetic construct
  misc_feature 1..22: note = chemically synthesized
  source 1..22: mol_type = other DNA
tatggttaagttcatgtcatag

SEQ ID NO: 148986 - DNA, 22 bp, synthetic construct
  misc_feature 1..22: note = chemically synthesized
  source 1..22: mol_type = other DNA
tggttaagttcatgtcatagga

SEQ ID NO: 148987 - DNA, 22 bp, synthetic construct
  misc_feature 1..22: note = chemically synthesized
  source 1..22: mol_type = other DNA
agttcatgtcataggaagggga

SEQ ID NO: 148988 - DNA, 22 bp, synthetic construct
  misc_feature 1..22: note = chemically synthesized
  source 1..22: mol_type = other DNA
atgtcataggaaggggataagt

SEQ ID NO: 148989 - DNA, 22 bp, synthetic construct
  misc_feature 1..22: note = chemically synthesized
  source 1..22: mol_type = other DNA
agaatgggaaacagacgaatga

SEQ ID NO: 148990 - DNA, 22 bp, synthetic construct
  misc_feature 1..22: note = chemically synthesized
  source 1..22: mol_type = other DNA
gaatgggaaacagacgaatgat

SEQ ID NO: 148991 - DNA, 22 bp, synthetic construct
  misc_feature 1..22: note = chemically synthesized
  source 1..22: mol_type = other DNA
catcagtgtggaagtctcagga

SEQ ID NO: 148992 - DNA, 22 bp, synthetic construct
  misc_feature 1..22: note = chemically synthesized
  source 1..22: mol_type = other DNA
aggatcgttttagtttctttta

SEQ ID NO: 148993 - DNA, 22 bp, synthetic construct
  misc_feature 1..22: note = chemically synthesized
  source 1..22: mol_type = other DNA
tagtttcttttatttgctgttc

SEQ ID NO: 148994 - DNA, 22 bp, synthetic construct
  misc_feature 1..22: note = chemically synthesized
  source 1..22: mol_type = other DNA
agtttcttttatttgctgttca

SEQ ID NO: 148995 - DNA, 22 bp, synthetic construct
  misc_feature 1..22: note = chemically synthesized
  source 1..22: mol_type = other DNA
gtttcttttatttgctgttcat

SEQ ID NO: 148996 - DNA, 22 bp, synthetic construct
  misc_feature 1..22: note = chemically synthesized
  source 1..22: mol_type = other DNA
cttttatttgctgttcataaca

SEQ ID NO: 148997 - DNA, 22 bp, synthetic construct
  misc_feature 1..22: note = chemically synthesized
  source 1..22: mol_type = other DNA
ttttatttgctgttcataacaa

SEQ ID NO: 148998 - DNA, 22 bp, synthetic construct
  misc_feature 1..22: note = chemically synthesized
  source 1..22: mol_type = other DNA
ttatttgctgttcataacaatt

SEQ ID NO: 148999 - DNA, 22 bp, synthetic construct
  misc_feature 1..22: note = chemically synthesized
  source 1..22: mol_type = other DNA
tatttgctgttcataacaattg

SEQ ID NO: 149000 - DNA, 22 bp, synthetic construct
  misc_feature 1..22: note = chemically synthesized
  source 1..22: mol_type = other DNA
atttgctgttcataacaattgt

SEQ ID NO: 149001 - DNA, 22 bp, synthetic construct
  misc_feature 1..22: note = chemically synthesized
  source 1..22: mol_type = other DNA
tttgctgttcataacaattgtt

SEQ ID NO: 149002 - DNA, 22 bp, synthetic construct
  misc_feature 1..22: note = chemically synthesized
  source 1..22: mol_type = other DNA
gctgttcataacaattgttttc

SEQ ID NO: 149003 - DNA, 22 bp, synthetic construct
  misc_feature 1..22: note = chemically synthesized
  source 1..22: mol_type = other DNA
ctgttcataacaattgttttct

SEQ ID NO: 149004 - DNA, 22 bp, synthetic construct
  misc_feature 1..22: note = chemically synthesized
  source 1..22: mol_type = other DNA
ttcataacaattgttttctttt

SEQ ID NO: 149005 - DNA, 22 bp, synthetic construct
  misc_feature 1..22: note = chemically synthesized
  source 1..22: mol_type = other DNA
ataacaattgttttcttttgtt

SEQ ID NO: 149006 - DNA, 22 bp, synthetic construct
  misc_feature 1..22: note = chemically synthesized
  source 1..22: mol_type = other DNA
ttttcttttgtttaattcttgc

SEQ ID NO: 149007 - DNA, 22 bp, synthetic construct
  misc_feature 1..22: note = chemically synthesized
  source 1..22: mol_type = other DNA
tcttttgtttaattcttgcttt

SEQ ID NO: 149008 - DNA, 22 bp, synthetic construct
  misc_feature 1..22: note = chemically synthesized
  source 1..22: mol_type = other DNA
cttttgtttaattcttgctttc

SEQ ID NO: 149009 - DNA, 22 bp, synthetic construct
  misc_feature 1..22: note = chemically synthesized
  source 1..22: mol_type = other DNA
ttttgtttaattcttgctttct

SEQ ID NO: 149010 - DNA, 22 bp, synthetic construct
  misc_feature 1..22: note = chemically synthesized
  source 1..22: mol_type = other DNA
ttgtttaattcttgctttcttt

SEQ ID NO: 149011 - DNA, 22 bp, synthetic construct
  misc_feature 1..22: note = chemically synthesized
  source 1..22: mol_type = other DNA
tgtttaattcttgctttctttt

SEQ ID NO: 149012 - DNA, 22 bp, synthetic construct
  misc_feature 1..22: note = chemically synthesized
  source 1..22: mol_type = other DNA
gtttaattcttgctttcttttt

SEQ ID NO: 149013 - DNA, 22 bp, synthetic construct
  misc_feature 1..22: note = chemically synthesized
  source 1..22: mol_type = other DNA
tttaattcttgctttctttttt

SEQ ID NO: 149014 - DNA, 22 bp, synthetic construct
  misc_feature 1..22: note = chemically synthesized
  source 1..22: mol_type = other DNA
aattcttgctttcttttttttt

SEQ ID NO: 149015 - DNA, 22 bp, synthetic construct
  misc_feature 1..22: note = chemically synthesized
  source 1..22: mol_type = other DNA
attcttgctttctttttttttc

SEQ ID NO: 149016 - DNA, 22 bp, synthetic construct
  misc_feature 1..22: note = chemically synthesized
  source 1..22: mol_type = other DNA
ttgctttctttttttttcttct

SEQ ID NO: 149017 - DNA, 22 bp, synthetic construct
  misc_feature 1..22: note = chemically synthesized
  source 1..22: mol_type = other DNA
gctttctttttttttcttctcc

SEQ ID NO: 149018 - DNA, 22 bp, synthetic construct
  misc_feature 1..22: note = chemically synthesized
  source 1..22: mol_type = other DNA
ctttctttttttttcttctccg

SEQ ID NO: 149019 - DNA, 22 bp, synthetic construct
  misc_feature 1..22: note = chemically synthesized
  source 1..22: mol_type = other DNA
tctttttttttcttctccgcaa

SEQ ID NO: 149020 - DNA, 22 bp, synthetic construct
  misc_feature 1..22: note = chemically synthesized
  source 1..22: mol_type = other DNA
ctttttttttcttctccgcaat

SEQ ID NO: 149021 - DNA, 22 bp, synthetic construct
  misc_feature 1..22: note = chemically synthesized
  source 1..22: mol_type = other DNA
tttttttttcttctccgcaatt

SEQ ID NO: 149022 - DNA, 22 bp, synthetic construct
  misc_feature 1..22: note = chemically synthesized
  source 1..22: mol_type = other DNA
tttttttcttctccgcaatttt

SEQ ID NO: 149023 - DNA, 22 bp, synthetic construct
  misc_feature 1..22: note = chemically synthesized
  source 1..22: mol_type = other DNA
ttttttcttctccgcaattttt

SEQ ID NO: 149024 - DNA, 22 bp, synthetic construct
  misc_feature 1..22: note = chemically synthesized
  source 1..22: mol_type = other DNA
tttttcttctccgcaattttta

SEQ ID NO: 149025 - DNA, 22 bp, synthetic construct
  misc_feature 1..22: note = chemically synthesized
  source 1..22: mol_type = other DNA
ttttcttctccgcaatttttac

SEQ ID NO: 149026 - DNA, 22 bp, synthetic construct
  misc_feature 1..22: note = chemically synthesized
  source 1..22: mol_type = other DNA
tttcttctccgcaatttttact

SEQ ID NO: 149027 - DNA, 22 bp, synthetic construct
  misc_feature 1..22: note = chemically synthesized
  source 1..22: mol_type = other DNA
ttcttctccgcaatttttacta

SEQ ID NO: 149028 - DNA, 22 bp, synthetic construct
  misc_feature 1..22: note = chemically synthesized
  source 1..22: mol_type = other DNA
tcttctccgcaatttttactat

SEQ ID NO: 149029 - DNA, 22 bp, synthetic construct
  misc_feature 1..22: note = chemically synthesized
  source 1..22: mol_type = other DNA
cttctccgcaatttttactatt

SEQ ID NO: 149030 - DNA, 22 bp, synthetic construct
  misc_feature 1..22: note = chemically synthesized
  source 1..22: mol_type = other DNA
ttctccgcaatttttactatta

SEQ ID NO: 149031 - DNA, 22 bp, synthetic construct
  misc_feature 1..22: note = chemically synthesized
  source 1..22: mol_type = other DNA
ctccgcaatttttactattata

SEQ ID NO: 149032 - DNA, 22 bp, synthetic construct
  misc_feature 1..22: note = chemically synthesized
  source 1..22: mol_type = other DNA
tccgcaatttttactattatac

SEQ ID NO: 149033 - DNA, 22 bp, synthetic construct
  misc_feature 1..22: note = chemically synthesized
  source 1..22: mol_type = other DNA
cgcaatttttactattatactt

SEQ ID NO: 149034 - DNA, 22 bp, synthetic construct
  misc_feature 1..22: note = chemically synthesized
  source 1..22: mol_type = other DNA
ttactattatacttaatgcctt

SEQ ID NO: 149035 - DNA, 22 bp, synthetic construct
  misc_feature 1..22: note = chemically synthesized
  source 1..22: mol_type = other DNA
tactattatacttaatgcctta

SEQ ID NO: 149036 - DNA, 22 bp, synthetic construct
  misc_feature 1..22: note = chemically synthesized
  source 1..22: mol_type = other DNA
actattatacttaatgccttaa

SEQ ID NO: 149037 - DNA, 22 bp, synthetic construct
  misc_feature 1..22: note = chemically synthesized
  source 1..22: mol_type = other DNA
ctattatacttaatgccttaac

SEQ ID NO: 149038 - DNA, 22 bp, synthetic construct
  misc_feature 1..22: note = chemically synthesized
  source 1..22: mol_type = other DNA
ttatacttaatgccttaacatt

SEQ ID NO: 149039 - DNA, 22 bp, synthetic construct
  misc_feature 1..22: note = chemically synthesized
  source 1..22: mol_type = other DNA
tacttaatgccttaacattgtg

SEQ ID NO: 149040 - DNA, 22 bp, synthetic construct
  misc_feature 1..22: note = chemically synthesized
  source 1..22: mol_type = other DNA
aatgccttaacattgtgtataa

SEQ ID NO: 149041 - DNA, 22 bp, synthetic construct
  misc_feature 1..22: note = chemically synthesized
  source 1..22: mol_type = other DNA
atgccttaacattgtgtataac

SEQ ID NO: 149042 - DNA, 22 bp, synthetic construct
  misc_feature 1..22: note = chemically synthesized
  source 1..22: mol_type = other DNA
aacattgtgtataacaaaagga

SEQ ID NO: 149043 - DNA, 22 bp, synthetic construct
  misc_feature 1..22: note = chemically synthesized
  source 1..22: mol_type = other DNA
acattgtgtataacaaaaggaa

SEQ ID NO: 149044 - DNA, 22 bp, synthetic construct
  misc_feature 1..22: note = chemically synthesized
  source 1..22: mol_type = other DNA
tgtataacaaaaggaaatatct

SEQ ID NO: 149045 - DNA, 22 bp, synthetic construct
  misc_feature 1..22: note = chemically synthesized
  source 1..22: mol_type = other DNA
tgagatacattaagtaacttaa

SEQ ID NO: 149046 - DNA, 22 bp, synthetic construct
  misc_feature 1..22: note = chemically synthesized
  source 1..22: mol_type = other DNA
agatacattaagtaacttaaaa

SEQ ID NO: 149047 - DNA, 22 bp, synthetic construct
  misc_feature 1..22: note = chemically synthesized
  source 1..22: mol_type = other DNA
agtaacttaaaaaaaaacttta

SEQ ID NO: 149048 - DNA, 22 bp, synthetic construct
  misc_feature 1..22: note = chemically synthesized
  source 1..22: mol_type = other DNA
aaaaaaaaactttacacagtct

SEQ ID NO: 149049 - DNA, 22 bp, synthetic construct
  misc_feature 1..22: note = chemically synthesized
  source 1..22: mol_type = other DNA
aaaaaaaactttacacagtctg

SEQ ID NO: 149050 - DNA, 22 bp, synthetic construct
  misc_feature 1..22: note = chemically synthesized
  source 1..22: mol_type = other DNA
tacacagtctgcctagtacatt

SEQ ID NO: 149051 - DNA, 22 bp, synthetic construct
  misc_feature 1..22: note = chemically synthesized
  source 1..22: mol_type = other DNA
acacagtctgcctagtacatta

SEQ ID NO: 149052 - DNA, 22 bp, synthetic construct
  misc_feature 1..22: note = chemically synthesized
  source 1..22: mol_type = other DNA
cacagtctgcctagtacattac

SEQ ID NO: 149053 - DNA, 22 bp, synthetic construct
  misc_feature 1..22: note = chemically synthesized
  source 1..22: mol_type = other DNA
cctagtacattactatttggaa

SEQ ID NO: 149054 - DNA, 22 bp, synthetic construct
  misc_feature 1..22: note = chemically synthesized
  source 1..22: mol_type = other DNA
gtacattactatttggaatata

SEQ ID NO: 149055 - DNA, 22 bp, synthetic construct
  misc_feature 1..22: note = chemically synthesized
  source 1..22: mol_type = other DNA
ctatttggaatatatgtgtgct

SEQ ID NO: 149056 - DNA, 22 bp, synthetic construct
  misc_feature 1..22: note = chemically synthesized
  source 1..22: mol_type = other DNA
tttggaatatatgtgtgcttat

SEQ ID NO: 149057 - DNA, 22 bp, synthetic construct
  misc_feature 1..22: note = chemically synthesized
  source 1..22: mol_type = other DNA
ggaatatatgtgtgcttatttg

SEQ ID NO: 149058 - DNA, 22 bp, synthetic construct
  misc_feature 1..22: note = chemically synthesized
  source 1..22: mol_type = other DNA
gaatatatgtgtgcttatttgc

SEQ ID NO: 149059 - DNA, 22 bp, synthetic construct
  misc_feature 1..22: note = chemically synthesized
  source 1..22: mol_type = other DNA
atttgcatattcataatctccc

SEQ ID NO: 149060 - DNA, 22 bp, synthetic construct
  misc_feature 1..22: note = chemically synthesized
  source 1..22: mol_type = other DNA
tttgcatattcataatctccct

SEQ ID NO: 149061 - DNA, 22 bp, synthetic construct
  misc_feature 1..22: note = chemically synthesized
  source 1..22: mol_type = other DNA
gcatattcataatctccctact

SEQ ID NO: 149062 - DNA, 22 bp, synthetic construct
  misc_feature 1..22: note = chemically synthesized
  source 1..22: mol_type = other DNA
catattcataatctccctactt

SEQ ID NO: 149063 - DNA, 22 bp, synthetic construct
  misc_feature 1..22: note = chemically synthesized
  source 1..22: mol_type = other DNA
ataatctccctactttattttc

SEQ ID NO: 149064 - DNA, 22 bp, synthetic construct
  misc_feature 1..22: note = chemically synthesized
  source 1..22: mol_type = other DNA
cctactttattttcttttattt

SEQ ID NO: 149065 - DNA, 22 bp, synthetic construct
  misc_feature 1..22: note = chemically synthesized
  source 1..22: mol_type = other DNA
ctttattttcttttatttttaa

SEQ ID NO: 149066 - DNA, 22 bp, synthetic construct
  misc_feature 1..22: note = chemically synthesized
  source 1..22: mol_type = other DNA
tattttcttttatttttaattg

SEQ ID NO: 149067 - DNA, 22 bp, synthetic construct
  misc_feature 1..22: note = chemically synthesized
  source 1..22: mol_type = other DNA
attttcttttatttttaattga

SEQ ID NO: 149068 - DNA, 22 bp, synthetic construct
  misc_feature 1..22: note = chemically synthesized
  source 1..22: mol_type = other DNA
ttttcttttatttttaattgat

SEQ ID NO: 149069 - DNA, 22 bp, synthetic construct
  misc_feature 1..22: note = chemically synthesized
  source 1..22: mol_type = other DNA
tcttttatttttaattgataca

SEQ ID NO: 149070 - DNA, 22 bp, synthetic construct
  misc_feature 1..22: note = chemically synthesized
  source 1..22: mol_type = other DNA
cttttatttttaattgatacat

SEQ ID NO: 149071 - DNA, 22 bp, synthetic construct
  misc_feature 1..22: note = chemically synthesized
  source 1..22: mol_type = other DNA
ttttatttttaattgatacata

SEQ ID NO: 149072 - DNA, 22 bp, synthetic construct
  misc_feature 1..22: note = chemically synthesized
  source 1..22: mol_type = other DNA
ttatttttaattgatacataat

SEQ ID NO: 149073 - DNA, 22 bp, synthetic construct
  misc_feature 1..22: note = chemically synthesized
  source 1..22: mol_type = other DNA
tatttttaattgatacataatc

SEQ ID NO: 149074 - DNA, 22 bp, synthetic construct
  misc_feature 1..22: note = chemically synthesized
  source 1..22: mol_type = other DNA
atttttaattgatacataatca

SEQ ID NO: 149075 - DNA, 22 bp, synthetic construct
  misc_feature 1..22: note = chemically synthesized
  source 1..22: mol_type = other DNA
tttttaattgatacataatcat

SEQ ID NO: 149076 - DNA, 22 bp, synthetic construct
  misc_feature 1..22: note = chemically synthesized
  source 1..22: mol_type = other DNA
ttaattgatacataatcattat

SEQ ID NO: 149077 - DNA, 22 bp, synthetic construct
  misc_feature 1..22: note = chemically synthesized
  source 1..22: mol_type = other DNA
taattgatacataatcattata

SEQ ID NO: 149078 - DNA, 22 bp, synthetic construct
  misc_feature 1..22: note = chemically synthesized
  source 1..22: mol_type = other DNA
aattgatacataatcattatac

SEQ ID NO: 149079 - DNA, 22 bp, synthetic construct
  misc_feature 1..22: note = chemically synthesized
  source 1..22: mol_type = other DNA
attgatacataatcattataca

SEQ ID NO: 149080 - DNA, 22 bp, synthetic construct
  misc_feature 1..22: note = chemically synthesized
  source 1..22: mol_type = other DNA
atacataatcattatacatatt

SEQ ID NO: 149081 - DNA, 22 bp, synthetic construct
  misc_feature 1..22: note = chemically synthesized
  source 1..22: mol_type = other DNA
tacatatttatgggttaaagtg

SEQ ID NO: 149082 - DNA, 22 bp, synthetic construct
  misc_feature 1..22: note = chemically synthesized
  source 1..22: mol_type = other DNA
atgggttaaagtgtaatgtttt

SEQ ID NO: 149083 - DNA, 22 bp, synthetic construct
  misc_feature 1..22: note = chemically synthesized
  source 1..22: mol_type = other DNA
tgggttaaagtgtaatgtttta

SEQ ID NO: 149084 - DNA, 22 bp, synthetic construct
  misc_feature 1..22: note = chemically synthesized
  source 1..22: mol_type = other DNA
aagtgtaatgttttaatatgtg

SEQ ID NO: 149085 - DNA, 22 bp, synthetic construct
  misc_feature 1..22: note = chemically synthesized
  source 1..22: mol_type = other DNA
taatatgtgtacacatattgac

SEQ ID NO: 149086 - DNA, 22 bp, synthetic construct
  misc_feature 1..22: note = chemically synthesized
  source 1..22: mol_type = other DNA
aatatgtgtacacatattgacc

SEQ ID NO: 149087 - DNA, 22 bp, synthetic construct
  misc_feature 1..22: note = chemically synthesized
  source 1..22: mol_type = other DNA
atatgtgtacacatattgacca

SEQ ID NO: 149088 - DNA, 22 bp, synthetic construct
  misc_feature 1..22: note = chemically synthesized
  source 1..22: mol_type = other DNA
accaaatcagggtaattttgca

SEQ ID NO: 149089 - DNA, 22 bp, synthetic construct
  misc_feature 1..22: note = chemically synthesized
  source 1..22: mol_type = other DNA
tgcatttgtaattttaaaaaat

SEQ ID NO: 149090 - DNA, 22 bp, synthetic construct
  misc_feature 1..22: note = chemically synthesized
  source 1..22: mol_type = other DNA
gcatttgtaattttaaaaaatg

SEQ ID NO: 149091 - DNA, 22 bp, synthetic construct
  misc_feature 1..22: note = chemically synthesized
  source 1..22: mol_type = other DNA
catttgtaattttaaaaaatgc

SEQ ID NO: 149092 - DNA, 22 bp, synthetic construct
  misc_feature 1..22: note = chemically synthesized
  source 1..22: mol_type = other DNA
gtaattttaaaaaatgctttct

SEQ ID NO: 149093 - DNA, 22 bp, synthetic construct
  misc_feature 1..22: note = chemically synthesized
  source 1..22: mol_type = other DNA
taattttaaaaaatgctttctt

SEQ ID NO: 149094 - DNA, 22 bp, synthetic construct
  misc_feature 1..22: note = chemically synthesized
  source 1..22: mol_type = other DNA
taaaaaatgctttcttctttta

SEQ ID NO: 149095 - DNA, 22 bp, synthetic construct
  misc_feature 1..22: note = chemically synthesized
  source 1..22: mol_type = other DNA
aaaaaatgctttcttcttttaa

SEQ ID NO: 149096 - DNA, 22 bp, synthetic construct
  misc_feature 1..22: note = chemically synthesized
  source 1..22: mol_type = other DNA
aaaaatgctttcttcttttaat

SEQ ID NO: 149097 - DNA, 22 bp, synthetic construct
  misc_feature 1..22: note = chemically synthesized
  source 1..22: mol_type = other DNA
tcttcttttaatatactttttt

SEQ ID NO: 149098 - DNA, 22 bp, synthetic construct
  misc_feature 1..22: note = chemically synthesized
  source 1..22: mol_type = other DNA
cttcttttaatatacttttttg

SEQ ID NO: 149099 - DNA, 22 bp, synthetic construct
  misc_feature 1..22: note = chemically synthesized
  source 1..22: mol_type = other DNA
ttcttttaatatacttttttgt

SEQ ID NO: 149100 - DNA, 22 bp, synthetic construct
  misc_feature 1..22: note = chemically synthesized
  source 1..22: mol_type = other DNA
cttttaatatacttttttgttt

SEQ ID NO: 149101 - DNA, 22 bp, synthetic construct
  misc_feature 1..22: note = chemically synthesized
  source 1..22: mol_type = other DNA
ttttaatatacttttttgttta

SEQ ID NO: 149102 - DNA, 22 bp, synthetic construct
  misc_feature 1..22: note = chemically synthesized
  source 1..22: mol_type = other DNA
ttaatatacttttttgtttatc

SEQ ID NO: 149103 - DNA, 22 bp, synthetic construct
  misc_feature 1..22: note = chemically synthesized
  source 1..22: mol_type = other DNA
taatatacttttttgtttatct

SEQ ID NO: 149104 - DNA, 22 bp, synthetic construct
  misc_feature 1..22: note = chemically synthesized
  source 1..22: mol_type = other DNA
aatatacttttttgtttatctt

SEQ ID NO: 149105 - DNA, 22 bp, synthetic construct
  misc_feature 1..22: note = chemically synthesized
  source 1..22: mol_type = other DNA
atatacttttttgtttatctta

SEQ ID NO: 149106 - DNA, 22 bp, synthetic construct
  misc_feature 1..22: note = chemically synthesized
  source 1..22: mol_type = other DNA
ttttgtttatcttatttctaat

SEQ ID NO: 149107 - DNA, 22 bp, synthetic construct
  misc_feature 1..22: note = chemically synthesized
  source 1..22: mol_type = other DNA
tttgtttatcttatttctaata

SEQ ID NO: 149108 - DNA, 22 bp, synthetic construct
  misc_feature 1..22: note = chemically synthesized
  source 1..22: mol_type = other DNA
ttgtttatcttatttctaatac

SEQ ID NO: 149109 - DNA, 22 bp, synthetic construct
  misc_feature 1..22: note = chemically synthesized
  source 1..22: mol_type = other DNA
tgtttatcttatttctaatact

SEQ ID NO: 149110 - DNA, 22 bp, synthetic construct
  misc_feature 1..22: note = chemically synthesized
  source 1..22: mol_type = other DNA
gtttatcttatttctaatactt

SEQ ID NO: 149111 - DNA, 22 bp, synthetic construct
  misc_feature 1..22: note = chemically synthesized
  source 1..22: mol_type = other DNA
tttatcttatttctaatacttt

SEQ ID NO: 149112 - DNA, 22 bp, synthetic construct
  misc_feature 1..22: note = chemically synthesized
  source 1..22: mol_type = other DNA
atcttatttctaatactttccc

SEQ ID NO: 149113 - DNA, 22 bp, synthetic construct
  misc_feature 1..22: note = chemically synthesized
  source 1..22: mol_type = other DNA
tcttatttctaatactttccct

SEQ ID NO: 149114 - DNA, 22 bp, synthetic construct
  misc_feature 1..22: note = chemically synthesized
  source 1..22: mol_type = other DNA
atttctaatactttccctaatc

SEQ ID NO: 149115 - DNA, 22 bp, synthetic construct
  misc_feature 1..22: note = chemically synthesized
  source 1..22: mol_type = other DNA
tttctaatactttccctaatct

SEQ ID NO: 149116 - DNA, 22 bp, synthetic construct
  misc_feature 1..22: note = chemically synthesized
  source 1..22: mol_type = other DNA
ctaatactttccctaatctctt

SEQ ID NO: 149117 - DNA, 22 bp, synthetic construct
  misc_feature 1..22: note = chemically synthesized
  source 1..22: mol_type = other DNA
taatactttccctaatctcttt

SEQ ID NO: 149118 - DNA, 22 bp, synthetic construct
  misc_feature 1..22: note = chemically synthesized
  source 1..22: mol_type = other DNA
atactttccctaatctctttct

SEQ ID NO: 149119 - DNA, 22 bp, synthetic construct
  misc_feature 1..22: note = chemically synthesized
  source 1..22: mol_type = other DNA
tccctaatctctttctttcagg

SEQ ID NO: 149120 - DNA, 22 bp, synthetic construct
  misc_feature 1..22: note = chemically synthesized
  source 1..22: mol_type = other DNA
ccctaatctctttctttcaggg

SEQ ID NO: 149121 - DNA, 22 bp, synthetic construct
  misc_feature 1..22: note = chemically synthesized
  source 1..22: mol_type = other DNA
cctaatctctttctttcagggc

SEQ ID NO: 149122 - DNA, 22 bp, synthetic construct
  misc_feature 1..22: note = chemically synthesized
  source 1..22: mol_type = other DNA
atctctttctttcagggcaata

SEQ ID NO: 149123 - DNA, 22 bp, synthetic construct
  misc_feature 1..22: note = chemically synthesized
  source 1..22: mol_type = other DNA
tttctttcagggcaataatgat

SEQ ID NO: 149124 - DNA, 22 bp, synthetic construct
  misc_feature 1..22: note = chemically synthesized
  source 1..22: mol_type = other DNA
tctttcagggcaataatgatac

SEQ ID NO: 149125 - DNA, 22 bp, synthetic construct
  misc_feature 1..22: note = chemically synthesized
  source 1..22: mol_type = other DNA
ctttcagggcaataatgataca

SEQ ID NO: 149126 - DNA, 22 bp, synthetic construct
  misc_feature 1..22: note = chemically synthesized
  source 1..22: mol_type = other DNA
tttcagggcaataatgatacaa

SEQ ID NO: 149127 - DNA, 22 bp, synthetic construct
  misc_feature 1..22: note = chemically synthesized
  source 1..22: mol_type = other DNA
tcagggcaataatgatacaatg

SEQ ID NO: 149128 - DNA, 22 bp, synthetic construct
  misc_feature 1..22: note = chemically synthesized
  source 1..22: mol_type = other DNA
cagggcaataatgatacaatgt

SEQ ID NO: 149129 - DNA, 22 bp, synthetic construct
  misc_feature 1..22: note = chemically synthesized
  source 1..22: mol_type = other DNA
agggcaataatgatacaatgta

SEQ ID NO: 149130 - DNA, 22 bp, synthetic construct
  misc_feature 1..22: note = chemically synthesized
  source 1..22: mol_type = other DNA
tttgcaccattctaaagaataa

SEQ ID NO: 149131 - DNA, 22 bp, synthetic construct
  misc_feature 1..22: note = chemically synthesized
  source 1..22: mol_type = other DNA
tgcaccattctaaagaataaca

SEQ ID NO: 149132 - DNA, 22 bp, synthetic construct
  misc_feature 1..22: note = chemically synthesized
  source 1..22: mol_type = other DNA
gcaccattctaaagaataacag

SEQ ID NO: 149133 - DNA, 22 bp, synthetic construct
  misc_feature 1..22: note = chemically synthesized
  source 1..22: mol_type = other DNA
caccattctaaagaataacagt

SEQ ID NO: 149134 - DNA, 22 bp, synthetic construct
  misc_feature 1..22: note = chemically synthesized
  source 1..22: mol_type = other DNA
taaagaataacagtgataattt

SEQ ID NO: 149135 - DNA, 22 bp, synthetic construct
  misc_feature 1..22: note = chemically synthesized
  source 1..22: mol_type = other DNA
aagaataacagtgataatttct

SEQ ID NO: 149136 - DNA, 22 bp, synthetic construct
  misc_feature 1..22: note = chemically synthesized
  source 1..22: mol_type = other DNA
ctgggttaaggcaatagcaata

SEQ ID NO: 149137 - DNA, 22 bp, synthetic construct
  misc_feature 1..22: note = chemically synthesized
  source 1..22: mol_type = other DNA
tgggttaaggcaatagcaatat

SEQ ID NO: 149138 - DNA, 22 bp, synthetic construct
  misc_feature 1..22: note = chemically synthesized
  source 1..22: mol_type = other DNA
ggttaaggcaatagcaatatct

SEQ ID NO: 149139 - DNA, 22 bp, synthetic construct
  misc_feature 1..22: note = chemically synthesized
  source 1..22: mol_type = other DNA
aggcaatagcaatatctctgca

SEQ ID NO: 149140 - DNA, 22 bp, synthetic construct
  misc_feature 1..22: note = chemically synthesized
  source 1..22: mol_type = other DNA
tgcatataaatatttctgcata

SEQ ID NO: 149141 - DNA, 22 bp, synthetic construct
  misc_feature 1..22: note = chemically synthesized
  source 1..22: mol_type = other DNA
catataaatatttctgcatata

SEQ ID NO: 149142 - DNA, 22 bp, synthetic construct
  misc_feature 1..22: note = chemically synthesized
  source 1..22: mol_type = other DNA
ctgcatataaattgtaactgat

SEQ ID NO: 149143 - DNA, 22 bp, synthetic construct
  misc_feature 1..22: note = chemically synthesized
  source 1..22: mol_type = other DNA
tgcatataaattgtaactgatg

SEQ ID NO: 149144 - DNA, 22 bp, synthetic construct
  misc_feature 1..22: note = chemically synthesized
  source 1..22: mol_type = other DNA
catataaattgtaactgatgta

SEQ ID NO: 149145 - DNA, 22 bp, synthetic construct
  misc_feature 1..22: note = chemically synthesized
  source 1..22: mol_type = other DNA
taactgatgtaagaggtttcat

SEQ ID NO: 149146 - DNA, 22 bp, synthetic construct
  misc_feature 1..22: note = chemically synthesized
  source 1..22: mol_type = other DNA
atgtaagaggtttcatattgct

SEQ ID NO: 149147 - DNA, 22 bp, synthetic construct
  misc_feature 1..22: note = chemically synthesized
  source 1..22: mol_type = other DNA
catattgctaatagcagctaca

SEQ ID NO: 149148 - DNA, 22 bp, synthetic construct
  misc_feature 1..22: note = chemically synthesized
  source 1..22: mol_type = other DNA
atattgctaatagcagctacaa

SEQ ID NO: 149149 - DNA, 22 bp, synthetic construct
  misc_feature 1..22: note = chemically synthesized
  source 1..22: mol_type = other DNA
ctaatagcagctacaatccagc

SEQ ID NO: 149150 - DNA, 22 bp, synthetic construct
  misc_feature 1..22: note = chemically synthesized
  source 1..22: mol_type = other DNA
atagcagctacaatccagctac

SEQ ID NO: 149151 - DNA, 22 bp, synthetic construct
  misc_feature 1..22: note = chemically synthesized
  source 1..22: mol_type = other DNA
caatccagctaccattctgctt

SEQ ID NO: 149152 - DNA, 22 bp, synthetic construct
  misc_feature 1..22: note = chemically synthesized
  source 1..22: mol_type = other DNA
ccattctgcttttattttatgg

SEQ ID NO: 149153 - DNA, 22 bp, synthetic construct
  misc_feature 1..22: note = chemically synthesized
  source 1..22: mol_type = other DNA
tgcttttattttatggttggga

SEQ ID NO: 149154 - DNA, 22 bp, synthetic construct
  misc_feature 1..22: note = chemically synthesized
  source 1..22: mol_type = other DNA
cttttattttatggttgggata

SEQ ID NO: 149155 - DNA, 22 bp, synthetic construct
  misc_feature 1..22: note = chemically synthesized
  source 1..22: mol_type = other DNA
ttattttatggttgggataagg

SEQ ID NO: 149156 - DNA, 22 bp, synthetic construct
  misc_feature 1..22: note = chemically synthesized
  source 1..22: mol_type = other DNA
tattttatggttgggataaggc

SEQ ID NO: 149157 - DNA, 22 bp, synthetic construct
  misc_feature 1..22: note = chemically synthesized
  source 1..22: mol_type = other DNA
attttatggttgggataaggct

SEQ ID NO: 149158 - DNA, 22 bp, synthetic construct
  misc_feature 1..22: note = chemically synthesized
  source 1..22: mol_type = other DNA
ttttatggttgggataaggctg

SEQ ID NO: 149159 - DNA, 22 bp, synthetic construct
  misc_feature 1..22: note = chemically synthesized
  source 1..22: mol_type = other DNA
tatggttgggataaggctggat

SEQ ID NO: 149160 - DNA, 22 bp, synthetic construct
  misc_feature 1..22: note = chemically synthesized
  source 1..22: mol_type = other DNA
atggttgggataaggctggatt

SEQ ID NO: 149161 - DNA, 22 bp, synthetic construct
  misc_feature 1..22: note = chemically synthesized
  source 1..22: mol_type = other DNA
tggttgggataaggctggatta

SEQ ID NO: 149162 - DNA, 22 bp, synthetic construct
  misc_feature 1..22: note = chemically synthesized
  source 1..22: mol_type = other DNA
ggataaggctggattattctga

SEQ ID NO: 149163 - DNA, 22 bp, synthetic construct
  misc_feature 1..22: note = chemically synthesized
  source 1..22: mol_type = other DNA
gattattctgagtccaagctag

SEQ ID NO: 149164 - DNA, 22 bp, synthetic construct
  misc_feature 1..22: note = chemically synthesized
  source 1..22: mol_type = other DNA
ttctgagtccaagctaggccct

SEQ ID NO: 149165 - DNA, 22 bp, synthetic construct
  misc_feature 1..22: note = chemically synthesized
  source 1..22: mol_type = other DNA
tgagtccaagctaggccctttt

SEQ ID NO: 149166 - DNA, 22 bp, synthetic construct
  misc_feature 1..22: note = chemically synthesized
  source 1..22: mol_type = other DNA
agtccaagctaggcccttttgc

SEQ ID NO: 149167 - DNA, 22 bp, synthetic construct
  misc_feature 1..22: note = chemically synthesized
  source 1..22: mol_type = other DNA
ggcccttttgctaatcatgttc

SEQ ID NO: 149168 - DNA, 22 bp, synthetic construct
  misc_feature 1..22: note = chemically synthesized
  source 1..22: mol_type = other DNA
ttgctaatcatgttcatacctc

SEQ ID NO: 149169 - DNA, 22 bp, synthetic construct
  misc_feature 1..22: note = chemically synthesized
  source 1..22: mol_type = other DNA
tgctaatcatgttcatacctct

SEQ ID NO: 149170 - DNA, 22 bp, synthetic construct
  misc_feature 1..22: note = chemically synthesized
  source 1..22: mol_type = other DNA
gctaatcatgttcatacctctt

SEQ ID NO: 149171 - DNA, 22 bp, synthetic construct
  misc_feature 1..22: note = chemically synthesized
  source 1..22: mol_type = other DNA
ctaatcatgttcatacctctta

SEQ ID NO: 149172 - DNA, 22 bp, synthetic construct
  misc_feature 1..22: note = chemically synthesized
  source 1..22: mol_type = other DNA
atcatgttcatacctcttatct

SEQ ID NO: 149173 - DNA, 22 bp, synthetic construct
  misc_feature 1..22: note = chemically synthesized
  source 1..22: mol_type = other DNA
atacctcttatcttcctcccac

SEQ ID NO: 149174 - DNA, 22 bp, synthetic construct
  misc_feature 1..22: note = chemically synthesized
  source 1..22: mol_type = other DNA
ttatcttcctcccacagctcct

SEQ ID NO: 149175 - DNA, 22 bp, synthetic construct
  misc_feature 1..22: note = chemically synthesized
  source 1..22: mol_type = other DNA
atcttcctcccacagctcctgg

SEQ ID NO: 149176 - DNA, 22 bp, synthetic construct
  misc_feature 1..22: note = chemically synthesized
  source 1..22: mol_type = other DNA
tcttcctcccacagctcctggg

SEQ ID NO: 149177 - DNA, 22 bp, synthetic construct
  misc_feature 1..22: note = chemically synthesized
  source 1..22: mol_type = other DNA
cctcccacagctcctgggcaac

SEQ ID NO: 149178 - DNA, 22 bp, synthetic construct
  misc_feature 1..22: note = chemically synthesized
  source 1..22: mol_type = other DNA
ctcccacagctcctgggcaacg

SEQ ID NO: 149179 - DNA, 22 bp, synthetic construct
  misc_feature 1..22: note = chemically synthesized
  source 1..22: mol_type = other DNA
ccacagctcctgggcaacgtgc

SEQ ID NO: 149180 - DNA, 22 bp, synthetic construct
  misc_feature 1..22: note = chemically synthesized
  source 1..22: mol_type = other DNA
ctgggcaacgtgctggtctgtg

SEQ ID NO: 149181 - DNA, 22 bp, synthetic construct
  misc_feature 1..22: note = chemically synthesized
  source 1..22: mol_type = other DNA
ggcaacgtgctggtctgtgtgc

SEQ ID NO: 149182 - DNA, 22 bp, synthetic construct
  misc_feature 1..22: note = chemically synthesized
  source 1..22: mol_type = other DNA
gtctgtgtgctggcccatcact

SEQ ID NO: 149183 - DNA, 22 bp, synthetic construct
  misc_feature 1..22: note = chemically synthesized
  source 1..22: mol_type = other DNA
tgtgctggcccatcactttggc

SEQ ID NO: 149184 - DNA, 22 bp, synthetic construct
  misc_feature 1..22: note = chemically synthesized
  source 1..22: mol_type = other DNA
gcccatcactttggcaaagaat

SEQ ID NO: 149185 - DNA, 22 bp, synthetic construct
  misc_feature 1..22: note = chemically synthesized
  source 1..22: mol_type = other DNA
tggcaaagaattcaccccacca

SEQ ID NO: 149186 - DNA, 22 bp, synthetic construct
  misc_feature 1..22: note = chemically synthesized
  source 1..22: mol_type = other DNA
ggcaaagaattcaccccaccag

SEQ ID NO: 149187 - DNA, 22 bp, synthetic construct
  misc_feature 1..22: note = chemically synthesized
  source 1..22: mol_type = other DNA
gcaaagaattcaccccaccagt

SEQ ID NO: 149188 - DNA, 22 bp, synthetic construct
  misc_feature 1..22: note = chemically synthesized
  source 1..22: mol_type = other DNA
accccaccagtgcaggctgcct

SEQ ID NO: 149189 - DNA, 22 bp, synthetic construct
  misc_feature 1..22: note = chemically synthesized
  source 1..22: mol_type = other DNA
cctatcagaaagtggtggctgg

SEQ ID NO: 149190 - DNA, 22 bp, synthetic construct
  misc_feature 1..22: note = chemically synthesized
  source 1..22: mol_type = other DNA
tcagaaagtggtggctggtgtg

SEQ ID NO: 149191 - DNA, 22 bp, synthetic construct
  misc_feature 1..22: note = chemically synthesized
  source 1..22: mol_type = other DNA
gtgtggctaatgccctggccca

SEQ ID NO: 149192 - DNA, 22 bp, synthetic construct
  misc_feature 1..22: note = chemically synthesized
  source 1..22: mol_type = other DNA
atgccctggcccacaagtatca

SEQ ID NO: 149193 - DNA, 22 bp, synthetic construct
  misc_feature 1..22: note = chemically synthesized
  source 1..22: mol_type = other DNA
gcccacaagtatcactaagctc

SEQ ID NO: 149194 - DNA, 22 bp, synthetic construct
  misc_feature 1..22: note = chemically synthesized
  source 1..22: mol_type = other DNA
agctcgctttcttgctgtccaa

SEQ ID NO: 149195 - DNA, 22 bp, synthetic construct
  misc_feature 1..22: note = chemically synthesized
  source 1..22: mol_type = other DNA
gctttcttgctgtccaatttct

SEQ ID NO: 149196 - DNA, 22 bp, synthetic construct
  misc_feature 1..22: note = chemically synthesized
  source 1..22: mol_type = other DNA
tcttgctgtccaatttctatta

SEQ ID NO: 149197 - DNA, 22 bp, synthetic construct
  misc_feature 1..22: note = chemically synthesized
  source 1..22: mol_type = other DNA
cttgctgtccaatttctattaa

SEQ ID NO: 149198 - DNA, 22 bp, synthetic construct
  misc_feature 1..22: note = chemically synthesized
  source 1..22: mol_type = other DNA
ttgctgtccaatttctattaaa

SEQ ID NO: 149199 - DNA, 22 bp, synthetic construct
  misc_feature 1..22: note = chemically synthesized
  source 1..22: mol_type = other DNA
gctgtccaatttctattaaagg

SEQ ID NO: 149200 - DNA, 22 bp, synthetic construct
  misc_feature 1..22: note = chemically synthesized
  source 1..22: mol_type = other DNA
ctgtccaatttctattaaaggt

SEQ ID NO: 149201 - DNA, 22 bp, synthetic construct
  misc_feature 1..22: note = chemically synthesized
  source 1..22: mol_type = other DNA
tccaatttctattaaaggttcc

SEQ ID NO: 149202 - DNA, 22 bp, synthetic construct
  misc_feature 1..22: note = chemically synthesized
  source 1..22: mol_type = other DNA
ctattaaaggttcctttgttcc

SEQ ID NO: 149203 - DNA, 22 bp, synthetic construct
  misc_feature 1..22: note = chemically synthesized
  source 1..22: mol_type = other DNA
tattaaaggttcctttgttccc

SEQ ID NO: 149204 - DNA, 22 bp, synthetic construct
  misc_feature 1..22: note = chemically synthesized
  source 1..22: mol_type = other DNA
ttaaaggttcctttgttcccta

SEQ ID NO: 149205 - DNA, 22 bp, synthetic construct
  misc_feature 1..22: note = chemically synthesized
  source 1..22: mol_type = other DNA
aaggttcctttgttccctaagt

SEQ ID NO: 149206 - DNA, 22 bp, synthetic construct
  misc_feature 1..22: note = chemically synthesized
  source 1..22: mol_type = other DNA
ctttgttccctaagtccaacta

SEQ ID NO: 149207 - DNA, 22 bp, synthetic construct
  misc_feature 1..22: note = chemically synthesized
  source 1..22: mol_type = other DNA
tgttccctaagtccaactacta

SEQ ID NO: 149208 - DNA, 22 bp, synthetic construct
  misc_feature 1..22: note = chemically synthesized
  source 1..22: mol_type = other DNA
gttccctaagtccaactactaa

SEQ ID NO: 149209 - DNA, 22 bp, synthetic construct
  misc_feature 1..22: note = chemically synthesized
  source 1..22: mol_type = other DNA
ttccctaagtccaactactaaa

SEQ ID NO: 149210 - DNA, 22 bp, synthetic construct
  misc_feature 1..22: note = chemically synthesized
  source 1..22: mol_type = other DNA
cctaagtccaactactaaactg

SEQ ID NO: 149211 - DNA, 22 bp, synthetic construct
  misc_feature 1..22: note = chemically synthesized
  source 1..22: mol_type = other DNA
agtccaactactaaactggggg

SEQ ID NO: 149212 - DNA, 22 bp, synthetic construct
  misc_feature 1..22: note = chemically synthesized
  source 1..22: mol_type = other DNA
ctaaactgggggatattatgaa

SEQ ID NO: 149213 - DNA, 22 bp, synthetic construct
  misc_feature 1..22: note = chemically synthesized
  source 1..22: mol_type = other DNA
aactgggggatattatgaaggg

SEQ ID NO: 149214 - DNA, 22 bp, synthetic construct
  misc_feature 1..22: note = chemically synthesized
  source 1..22: mol_type = other DNA
ggggatattatgaagggccttg

SEQ ID NO: 149215 - DNA, 22 bp, synthetic construct
  misc_feature 1..22: note = chemically synthesized
  source 1..22: mol_type = other DNA
tgaagggccttgagcatctgga

SEQ ID NO: 149216 - DNA, 22 bp, synthetic construct
  misc_feature 1..22: note = chemically synthesized
  source 1..22: mol_type = other DNA
gagcatctggattctgcctaat

SEQ ID NO: 149217 - DNA, 22 bp, synthetic construct
  misc_feature 1..22: note = chemically synthesized
  source 1..22: mol_type = other DNA
agcatctggattctgcctaata

SEQ ID NO: 149218 - DNA, 22 bp, synthetic construct
  misc_feature 1..22: note = chemically synthesized
  source 1..22: mol_type = other DNA
gattctgcctaataaaaaacat

SEQ ID NO: 149219 - DNA, 22 bp, synthetic construct
  misc_feature 1..22: note = chemically synthesized
  source 1..22: mol_type = other DNA
tgcctaataaaaaacatttatt

SEQ ID NO: 149220 - DNA, 22 bp, synthetic construct
  misc_feature 1..22: note = chemically synthesized
  source 1..22: mol_type = other DNA
cctaataaaaaacatttatttt

SEQ ID NO: 149221 - DNA, 22 bp, synthetic construct
  misc_feature 1..22: note = chemically synthesized
  source 1..22: mol_type = other DNA
ataaaaaacatttattttcatt

SEQ ID NO: 149222 - DNA, 22 bp, synthetic construct
  misc_feature 1..22: note = chemically synthesized
  source 1..22: mol_type = other DNA
attttcattgcaatgatgtatt

SEQ ID NO: 149223 - DNA, 22 bp, synthetic construct
  misc_feature 1..22: note = chemically synthesized
  source 1..22: mol_type = other DNA
ttttcattgcaatgatgtattt

SEQ ID NO: 149224 - DNA, 22 bp, synthetic construct
  misc_feature 1..22: note = chemically synthesized
  source 1..22: mol_type = other DNA
tcattgcaatgatgtatttaaa

SEQ ID NO: 149225 - DNA, 22 bp, synthetic construct
  misc_feature 1..22: note = chemically synthesized
  source 1..22: mol_type = other DNA
cattgcaatgatgtatttaaat

SEQ ID NO: 149226 - DNA, 22 bp, synthetic construct
  misc_feature 1..22: note = chemically synthesized
  source 1..22: mol_type = other DNA
attgcaatgatgtatttaaatt

SEQ ID NO: 149227 - DNA, 22 bp, synthetic construct
  misc_feature 1..22: note = chemically synthesized
  source 1..22: mol_type = other DNA
caatgatgtatttaaattattt

SEQ ID NO: 149228 - DNA, 22 bp, synthetic construct
  misc_feature 1..22: note = chemically synthesized
  source 1..22: mol_type = other DNA
aaattatttctgaatattttac

SEQ ID NO: 149229 - DNA, 22 bp, synthetic construct
  misc_feature 1..22: note = chemically synthesized
  source 1..22: mol_type = other DNA
aattatttctgaatattttact

SEQ ID NO: 149230 - DNA, 22 bp, synthetic construct
  misc_feature 1..22: note = chemically synthesized
  source 1..22: mol_type = other DNA
tttctgaatattttactaaaaa

SEQ ID NO: 149231 - DNA, 22 bp, synthetic construct
  misc_feature 1..22: note = chemically synthesized
  source 1..22: mol_type = other DNA
ctgaatattttactaaaaaggg

SEQ ID NO: 149232 - DNA, 22 bp, synthetic construct
  misc_feature 1..22: note = chemically synthesized
  source 1..22: mol_type = other DNA
tgaatattttactaaaaaggga

SEQ ID NO: 149233 - DNA, 22 bp, synthetic construct
  misc_feature 1..22: note = chemically synthesized
  source 1..22: mol_type = other DNA
aatattttactaaaaagggaat

SEQ ID NO: 149234 - DNA, 22 bp, synthetic construct
  misc_feature 1..22: note = chemically synthesized
  source 1..22: mol_type = other DNA
tactaaaaagggaatgtgggag

SEQ ID NO: 149235 - DNA, 22 bp, synthetic construct
  misc_feature 1..22: note = chemically synthesized
  source 1..22: mol_type = other DNA
actaaaaagggaatgtgggagg

SEQ ID NO: 149236 - DNA, 22 bp, synthetic construct
  misc_feature 1..22: note = chemically synthesized
  source 1..22: mol_type = other DNA
ctaaaaagggaatgtgggaggt

SEQ ID NO: 149237 - DNA, 22 bp, synthetic construct
  misc_feature 1..22: note = chemically synthesized
  source 1..22: mol_type = other DNA
aaaagggaatgtgggaggtcag

SEQ ID NO: 149238 - DNA, 22 bp, synthetic construct
  misc_feature 1..22: note = chemically synthesized
  source 1..22: mol_type = other DNA
aaaacataaagaaatgaagagc

SEQ ID NO: 149239 - DNA, 22 bp, synthetic construct
  misc_feature 1..22: note = chemically synthesized
  source 1..22: mol_type = other DNA
aaacataaagaaatgaagagct

SEQ ID NO: 149240 - DNA, 22 bp, synthetic construct
  misc_feature 1..22: note = chemically synthesized
  source 1..22: mol_type = other DNA
gttcaaaccttgggaaaataca

SEQ ID NO: 149241 - DNA, 22 bp, synthetic construct
  misc_feature 1..22: note = chemically synthesized
  source 1..22: mol_type = other DNA
aaaccttgggaaaatacactat

SEQ ID NO: 149242 - DNA, 22 bp, synthetic construct
  misc_feature 1..22: note = chemically synthesized
  source 1..22: mol_type = other DNA
gggaaaatacactatatcttaa

SEQ ID NO: 149243 - DNA, 22 bp, synthetic construct
  misc_feature 1..22: note = chemically synthesized
  source 1..22: mol_type = other DNA
ggaaaatacactatatcttaaa

SEQ ID NO: 149244 - DNA, 22 bp, synthetic construct
  misc_feature 1..22: note = chemically synthesized
  source 1..22: mol_type = other DNA
tatcttaaactccatgaaagaa

SEQ ID NO: 149245 - DNA, 22 bp, synthetic construct
  misc_feature 1..22: note = chemically synthesized
  source 1..22: mol_type = other DNA
aaactccatgaaagaaggtgag

SEQ ID NO: 149246 - DNA, 22 bp, synthetic construct
  misc_feature 1..22: note = chemically synthesized
  source 1..22: mol_type = other DNA
aactccatgaaagaaggtgagg

SEQ ID NO: 149247 - DNA, 22 bp, synthetic construct
  misc_feature 1..22: note = chemically synthesized
  source 1..22: mol_type = other DNA
catgaaagaaggtgaggctgca

SEQ ID NO: 149248 - DNA, 22 bp, synthetic construct
  misc_feature 1..22: note = chemically synthesized
  source 1..22: mol_type = other DNA
caaacagctaatgcacattggc

SEQ ID NO: 149249 - DNA, 22 bp, synthetic construct
  misc_feature 1..22: note = chemically synthesized
  source 1..22: mol_type = other DNA
atgcacattggcaacagcccct

SEQ ID NO: 149250 - DNA, 22 bp, synthetic construct
  misc_feature 1..22: note = chemically synthesized
  source 1..22: mol_type = other DNA
gcaacagcccctgatgcatatg

SEQ ID NO: 149251 - DNA, 22 bp, synthetic construct
  misc_feature 1..22: note = chemically synthesized
  source 1..22: mol_type = other DNA
atgcatatgccttattcatccc

SEQ ID NO: 149252 - DNA, 22 bp, synthetic construct
  misc_feature 1..22: note = chemically synthesized
  source 1..22: mol_type = other DNA
attcatccctcagaaaaggatt

SEQ ID NO: 149253 - DNA, 22 bp, synthetic construct
  misc_feature 1..22: note = chemically synthesized
  source 1..22: mol_type = other DNA
ttcatccctcagaaaaggattc

SEQ ID NO: 149254 - DNA, 22 bp, synthetic construct
  misc_feature 1..22: note = chemically synthesized
  source 1..22: mol_type = other DNA
atccctcagaaaaggattcaag

SEQ ID NO: 149255 - DNA, 22 bp, synthetic construct
  misc_feature 1..22: note = chemically synthesized
  source 1..22: mol_type = other DNA
agaaaaggattcaagtagaggc

SEQ ID NO: 149256 - DNA, 22 bp, synthetic construct
  misc_feature 1..22: note = chemically synthesized
  source 1..22: mol_type = other DNA
aagtagaggcttgatttggagg

SEQ ID NO: 149257 - DNA, 22 bp, synthetic construct
  misc_feature 1..22: note = chemically synthesized
  source 1..22: mol_type = other DNA
gatttggaggttaaagttttgc

SEQ ID NO: 149258 - DNA, 22 bp, synthetic construct
  misc_feature 1..22: note = chemically synthesized
  source 1..22: mol_type = other DNA
atttggaggttaaagttttgct

SEQ ID NO: 149259 - DNA, 22 bp, synthetic construct
  misc_feature 1..22: note = chemically synthesized
  source 1..22: mol_type = other DNA
ggaggttaaagttttgctatgc

SEQ ID NO: 149260 - DNA, 22 bp, synthetic construct
  misc_feature 1..22: note = chemically synthesized
  source 1..22: mol_type = other DNA
gaggttaaagttttgctatgct

SEQ ID NO: 149261 - DNA, 22 bp, synthetic construct
  misc_feature 1..22: note = chemically synthesized
  source 1..22: mol_type = other DNA
aagttttgctatgctgtatttt

SEQ ID NO: 149262 - DNA, 22 bp, synthetic construct
  misc_feature 1..22: note = chemically synthesized
  source 1..22: mol_type = other DNA
tgctatgctgtattttacatta

SEQ ID NO: 149263 - DNA, 22 bp, synthetic construct
  misc_feature 1..22: note = chemically synthesized
  source 1..22: mol_type = other DNA
gctatgctgtattttacattac

SEQ ID NO: 149264 - DNA, 22 bp, synthetic construct
  misc_feature 1..22: note = chemically synthesized
  source 1..22: mol_type = other DNA
ctatgctgtattttacattact

SEQ ID NO: 149265 - DNA, 22 bp, synthetic construct
  misc_feature 1..22: note = chemically synthesized
  source 1..22: mol_type = other DNA
tgctgtattttacattacttat

SEQ ID NO: 149266 - DNA, 22 bp, synthetic construct
  misc_feature 1..22: note = chemically synthesized
  source 1..22: mol_type = other DNA
tattttacattacttattgttt

SEQ ID NO: 149267 - DNA, 22 bp, synthetic construct
  misc_feature 1..22: note = chemically synthesized
  source 1..22: mol_type = other DNA
tacattacttattgttttagct

SEQ ID NO: 149268 - DNA, 22 bp, synthetic construct
  misc_feature 1..22: note = chemically synthesized
  source 1..22: mol_type = other DNA
acattacttattgttttagctg

SEQ ID NO: 149269 - DNA, 22 bp, synthetic construct
  misc_feature 1..22: note = chemically synthesized
  source 1..22: mol_type = other DNA
cattacttattgttttagctgt

SEQ ID NO: 149270 - DNA, 22 bp, synthetic construct
  misc_feature 1..22: note = chemically synthesized
  source 1..22: mol_type = other DNA
cttattgttttagctgtcctca

SEQ ID NO: 149271 - DNA, 22 bp, synthetic construct
  misc_feature 1..22: note = chemically synthesized
  source 1..22: mol_type = other DNA
attgttttagctgtcctcatga

SEQ ID NO: 149272 - DNA, 22 bp, synthetic construct
  misc_feature 1..22: note = chemically synthesized
  source 1..22: mol_type = other DNA
ttgttttagctgtcctcatgaa

SEQ ID NO: 149273 - DNA, 22 bp, synthetic construct
  misc_feature 1..22: note = chemically synthesized
  source 1..22: mol_type = other DNA
ttttagctgtcctcatgaatgt

SEQ ID NO: 149274 - DNA, 22 bp, synthetic construct
  misc_feature 1..22: note = chemically synthesized
  source 1..22: mol_type = other DNA
tagctgtcctcatgaatgtctt

SEQ ID NO: 149275 - DNA, 22 bp, synthetic construct
  misc_feature 1..22: note = chemically synthesized
  source 1..22: mol_type = other DNA
agctgtcctcatgaatgtcttt

SEQ ID NO: 149276 - DNA, 22 bp, synthetic construct
  misc_feature 1..22: note = chemically synthesized
  source 1..22: mol_type = other DNA
gctgtcctcatgaatgtctttt

SEQ ID NO: 149277 - DNA, 22 bp, synthetic construct
  misc_feature 1..22: note = chemically synthesized
  source 1..22: mol_type = other DNA
tcctcatgaatgtcttttcact

SEQ ID NO: 149278 - DNA, 22 bp, synthetic construct
  misc_feature 1..22: note = chemically synthesized
  source 1..22: mol_type = other DNA
atgaatgtcttttcactaccca

SEQ ID NO: 149279 - DNA, 22 bp, synthetic construct
  misc_feature 1..22: note = chemically synthesized
  source 1..22: mol_type = other DNA
ttcactacccatttgcttatcc

SEQ ID NO: 149280 - DNA, 22 bp, synthetic construct
  misc_feature 1..22: note = chemically synthesized
  source 1..22: mol_type = other DNA
tcactacccatttgcttatcct

SEQ ID NO: 149281 - DNA, 22 bp, synthetic construct
  misc_feature 1..22: note = chemically synthesized
  source 1..22: mol_type = other DNA
cactacccatttgcttatcctg

SEQ ID NO: 149282 - DNA, 22 bp, synthetic construct
  misc_feature 1..22: note = chemically synthesized
  source 1..22: mol_type = other DNA
actacccatttgcttatcctgc

SEQ ID NO: 149283 - DNA, 22 bp, synthetic construct
  misc_feature 1..22: note = chemically synthesized
  source 1..22: mol_type = other DNA
cccatttgcttatcctgcatct

SEQ ID NO: 149284 - DNA, 22 bp, synthetic construct
  misc_feature 1..22: note = chemically synthesized
  source 1..22: mol_type = other DNA
gcttatcctgcatctctcagcc

SEQ ID NO: 149285 - DNA, 22 bp, synthetic construct
  misc_feature 1..22: note = chemically synthesized
  source 1..22: mol_type = other DNA
cttatcctgcatctctcagcct

SEQ ID NO: 149286 - DNA, 22 bp, synthetic construct
  misc_feature 1..22: note = chemically synthesized
  source 1..22: mol_type = other DNA
atcctgcatctctcagccttga

SEQ ID NO: 149287 - DNA, 22 bp, synthetic construct
  misc_feature 1..22: note = chemically synthesized
  source 1..22: mol_type = other DNA
tcctgcatctctcagccttgac

SEQ ID NO: 149288 - DNA, 22 bp, synthetic construct
  misc_feature 1..22: note = chemically synthesized
  source 1..22: mol_type = other DNA
catctctcagccttgactccac

SEQ ID NO: 149289 - DNA, 22 bp, synthetic construct
  misc_feature 1..22: note = chemically synthesized
  source 1..22: mol_type = other DNA
tcagccttgactccactcagtt

SEQ ID NO: 149290 - DNA, 22 bp, synthetic construct
  misc_feature 1..22: note = chemically synthesized
  source 1..22: mol_type = other DNA
agccttgactccactcagttct

SEQ ID NO: 149291 - DNA, 22 bp, synthetic construct
  misc_feature 1..22: note = chemically synthesized
  source 1..22: mol_type = other DNA
gactccactcagttctcttgct

SEQ ID NO: 149292 - DNA, 22 bp, synthetic construct
  misc_feature 1..22: note = chemically synthesized
  source 1..22: mol_type = other DNA
actccactcagttctcttgctt

SEQ ID NO: 149293 - DNA, 22 bp, synthetic construct
  misc_feature 1..22: note = chemically synthesized
  source 1..22: mol_type = other DNA
cactcagttctcttgcttagag

SEQ ID NO: 149294 - DNA, 22 bp, synthetic construct
  misc_feature 1..22: note = chemically synthesized
  source 1..22: mol_type = other DNA
agttctcttgcttagagatacc

SEQ ID NO: 149295 - DNA, 22 bp, synthetic construct
  misc_feature 1..22: note = chemically synthesized
  source 1..22: mol_type = other DNA
tcttgcttagagataccacctt

SEQ ID NO: 149296 - DNA, 22 bp, synthetic construct
  misc_feature 1..22: note = chemically synthesized
  source 1..22: mol_type = other DNA
ttgcttagagataccacctttc

SEQ ID NO: 149297 - DNA, 22 bp, synthetic construct
  misc_feature 1..22: note = chemically synthesized
  source 1..22: mol_type = other DNA
gcttagagataccacctttccc

SEQ ID NO: 149298 - DNA, 22 bp, synthetic construct
  misc_feature 1..22: note = chemically synthesized
  source 1..22: mol_type = other DNA
cttagagataccacctttcccc

SEQ ID NO: 149299 - DNA, 22 bp, synthetic construct
  misc_feature 1..22: note = chemically synthesized
  source 1..22: mol_type = other DNA
agagataccacctttcccctga

SEQ ID NO: 149300 - DNA, 22 bp, synthetic construct
  misc_feature 1..22: note = chemically synthesized
  source 1..22: mol_type = other DNA
gagataccacctttcccctgaa

SEQ ID NO: 149301 - DNA, 22 bp, synthetic construct
  misc_feature 1..22: note = chemically synthesized
  source 1..22: mol_type = other DNA
tcccctgaagtgttccttccat

SEQ ID NO: 149302 - DNA, 22 bp, synthetic construct
  misc_feature 1..22: note = chemically synthesized
  source 1..22: mol_type = other DNA
cccctgaagtgttccttccatg

SEQ ID NO: 149303 - DNA, 22 bp, synthetic construct
  misc_feature 1..22: note = chemically synthesized
  source 1..22: mol_type = other DNA
ccctgaagtgttccttccatgt

SEQ ID NO: 149304 - DNA, 22 bp, synthetic construct
  misc_feature 1..22: note = chemically synthesized
  source 1..22: mol_type = other DNA
aagtgttccttccatgttttac

SEQ ID NO: 149305 - DNA, 22 bp, synthetic construct
  misc_feature 1..22: note = chemically synthesized
  source 1..22: mol_type = other DNA
cttccatgttttacggcgagat

SEQ ID NO: 149306 - DNA, 22 bp, synthetic construct
  misc_feature 1..22: note = chemically synthesized
  source 1..22: mol_type = other DNA
ccatgttttacggcgagatggt

SEQ ID NO: 149307 - DNA, 22 bp, synthetic construct
  misc_feature 1..22: note = chemically synthesized
  source 1..22: mol_type = other DNA
catgttttacggcgagatggtt

SEQ ID NO: 149308 - DNA, 22 bp, synthetic construct
  misc_feature 1..22: note = chemically synthesized
  source 1..22: mol_type = other DNA
tacggcgagatggtttctcctc

SEQ ID NO: 149309 - DNA, 22 bp, synthetic construct
  misc_feature 1..22: note = chemically synthesized
  source 1..22: mol_type = other DNA
acggcgagatggtttctcctcg

SEQ ID NO: 149310 - DNA, 22 bp, synthetic construct
  misc_feature 1..22: note = chemically synthesized
  source 1..22: mol_type = other DNA
cggcgagatggtttctcctcgc

SEQ ID NO: 149311 - DNA, 22 bp, synthetic construct
  misc_feature 1..22: note = chemically synthesized
  source 1..22: mol_type = other DNA
ctcctcgcctggccactcagcc

SEQ ID NO: 149312 - DNA, 22 bp, synthetic construct
  misc_feature 1..22: note = chemically synthesized
  source 1..22: mol_type = other DNA
tcctcgcctggccactcagcct

SEQ ID NO: 149313 - DNA, 22 bp, synthetic construct
  misc_feature 1..22: note = chemically synthesized
  source 1..22: mol_type = other DNA
ctcgcctggccactcagcctta

SEQ ID NO: 149314 - DNA, 22 bp, synthetic construct
  misc_feature 1..22: note = chemically synthesized
  source 1..22: mol_type = other DNA
gcctggccactcagccttagtt

SEQ ID NO: 149315 - DNA, 22 bp, synthetic construct
  misc_feature 1..22: note = chemically synthesized
  source 1..22: mol_type = other DNA
gccactcagccttagttgtctc

SEQ ID NO: 149316 - DNA, 22 bp, synthetic construct
  misc_feature 1..22: note = chemically synthesized
  source 1..22: mol_type = other DNA
agccttagttgtctctgttgtc

SEQ ID NO: 149317 - DNA, 22 bp, synthetic construct
  misc_feature 1..22: note = chemically synthesized
  source 1..22: mol_type = other DNA
agttgtctctgttgtcttatag

SEQ ID NO: 149318 - DNA, 22 bp, synthetic construct
  misc_feature 1..22: note = chemically synthesized
  source 1..22: mol_type = other DNA
gttgtctctgttgtcttataga

SEQ ID NO: 149319 - DNA, 22 bp, synthetic construct
  misc_feature 1..22: note = chemically synthesized
  source 1..22: mol_type = other DNA
tctctgttgtcttatagaggtc

SEQ ID NO: 149320 - DNA, 22 bp, synthetic construct
  misc_feature 1..22: note = chemically synthesized
  source 1..22: mol_type = other DNA
tgttgtcttatagaggtctact

SEQ ID NO: 149321 - DNA, 22 bp, synthetic construct
  misc_feature 1..22: note = chemically synthesized
  source 1..22: mol_type = other DNA
ttgtcttatagaggtctacttg

SEQ ID NO: 149322 - DNA, 22 bp, synthetic construct
  misc_feature 1..22: note = chemically synthesized
  source 1..22: mol_type = other DNA
tcttatagaggtctacttgaag

SEQ ID NO: 149323 - DNA, 22 bp, synthetic construct
  misc_feature 1..22: note = chemically synthesized
  source 1..22: mol_type = other DNA
atagaggtctacttgaagaagg

SEQ ID NO: 149324 - DNA, 22 bp, synthetic construct
  misc_feature 1..22: note = chemically synthesized
  source 1..22: mol_type = other DNA
tagaggtctacttgaagaagga

SEQ ID NO: 149325 - DNA, 22 bp, synthetic construct
  misc_feature 1..22: note = chemically synthesized
  source 1..22: mol_type = other DNA
cttgaagaaggaaaaacagggg

SEQ ID NO: 149326 - DNA, 22 bp, synthetic construct
  misc_feature 1..22: note = chemically synthesized
  source 1..22: mol_type = other DNA
gaagaaggaaaaacaggggtca

SEQ ID NO: 149327 - DNA, 22 bp, synthetic construct
  misc_feature 1..22: note = chemically synthesized
  source 1..22: mol_type = other DNA
aagaaggaaaaacaggggtcat

SEQ ID NO: 149328 - DNA, 22 bp, synthetic construct
  misc_feature 1..22: note = chemically synthesized
  source 1..22: mol_type = other DNA
gactgtcctgtgagcccttctt

SEQ ID NO: 149329 - DNA, 22 bp, synthetic construct
  misc_feature 1..22: note = chemically synthesized
  source 1..22: mol_type = other DNA
actgtcctgtgagcccttcttc

SEQ ID NO: 149330 - DNA, 22 bp, synthetic construct
  misc_feature 1..22: note = chemically synthesized
  source 1..22: mol_type = other DNA
tcctgtgagcccttcttccctg

SEQ ID NO: 149331 - DNA, 22 bp, synthetic construct
  misc_feature 1..22: note = chemically synthesized
  source 1..22: mol_type = other DNA
tgagcccttcttccctgcctcc

SEQ ID NO: 149332 - DNA, 22 bp, synthetic construct
  misc_feature 1..22: note = chemically synthesized
  source 1..22: mol_type = other DNA
cttccctgcctcccccactcac

SEQ ID NO: 149333 - DNA, 22 bp, synthetic construct
  misc_feature 1..22: note = chemically synthesized
  source 1..22: mol_type = other DNA
ttccctgcctcccccactcaca

SEQ ID NO: 149334 - DNA, 22 bp, synthetic construct
  misc_feature 1..22: note = chemically synthesized
  source 1..22: mol_type = other DNA
ccctgcctcccccactcacagt

SEQ ID NO: 149335 - DNA, 22 bp, synthetic construct
  misc_feature 1..22: note = chemically synthesized
  source 1..22: mol_type = other DNA
cctgcctcccccactcacagtg

SEQ ID NO: 149336 - DNA, 22 bp, synthetic construct
  misc_feature 1..22: note = chemically synthesized
  source 1..22: mol_type = other DNA
cctcccccactcacagtgaccc

SEQ ID NO: 149337 - DNA, 22 bp, synthetic construct
  misc_feature 1..22: note = chemically synthesized
  source 1..22: mol_type = other DNA
ccccactcacagtgacccggaa

SEQ ID NO: 149338 - DNA, 22 bp, synthetic construct
  misc_feature 1..22: note = chemically synthesized
  source 1..22: mol_type = other DNA
acagtgacccggaatctgcagt

SEQ ID NO: 149339 - DNA, 22 bp, synthetic construct
  misc_feature 1..22: note = chemically synthesized
  source 1..22: mol_type = other DNA
cagtgctagtctcccggaacta

SEQ ID NO: 149340 - DNA, 22 bp, synthetic construct
  misc_feature 1..22: note = chemically synthesized
  source 1..22: mol_type = other DNA
gtctcccggaactatcactctt

SEQ ID NO: 149341 - DNA, 22 bp, synthetic construct
  misc_feature 1..22: note = chemically synthesized
  source 1..22: mol_type = other DNA
ccggaactatcactctttcaca

SEQ ID NO: 149342 - DNA, 22 bp, synthetic construct
  misc_feature 1..22: note = chemically synthesized
  source 1..22: mol_type = other DNA
tcactctttcacagtctgcttt

SEQ ID NO: 149343 - DNA, 22 bp, synthetic construct
  misc_feature 1..22: note = chemically synthesized
  source 1..22: mol_type = other DNA
tttcacagtctgctttggaagg

SEQ ID NO: 149344 - DNA, 22 bp, synthetic construct
  misc_feature 1..22: note = chemically synthesized
  source 1..22: mol_type = other DNA
tcacagtctgctttggaaggac

SEQ ID NO: 149345 - DNA, 22 bp, synthetic construct
  misc_feature 1..22: note = chemically synthesized
  source 1..22: mol_type = other DNA
cacagtctgctttggaaggact

SEQ ID NO: 149346 - DNA, 22 bp, synthetic construct
  misc_feature 1..22: note = chemically synthesized
  source 1..22: mol_type = other DNA
acagtctgctttggaaggactg

SEQ ID NO: 149347 - DNA, 22 bp, synthetic construct
  misc_feature 1..22: note = chemically synthesized
  source 1..22: mol_type = other DNA
ctttggaaggactgggcttagt

SEQ ID NO: 149348 - DNA, 22 bp, synthetic construct
  misc_feature 1..22: note = chemically synthesized
  source 1..22: mol_type = other DNA
tggaaggactgggcttagtatg

SEQ ID NO: 149349 - DNA, 22 bp, synthetic construct
  misc_feature 1..22: note = chemically synthesized
  source 1..22: mol_type = other DNA
ggaaggactgggcttagtatga

SEQ ID NO: 149350 - DNA, 22 bp, synthetic construct
  misc_feature 1..22: note = chemically synthesized
  source 1..22: mol_type = other DNA
gaaggactgggcttagtatgaa

SEQ ID NO: 149351 - DNA, 22 bp, synthetic construct
  misc_feature 1..22: note = chemically synthesized
  source 1..22: mol_type = other DNA
ggcttagtatgaaaagttagga

SEQ ID NO: 149352 - DNA, 22 bp, synthetic construct
  misc_feature 1..22: note = chemically synthesized
  source 1..22: mol_type = other DNA
agtatgaaaagttaggactgag

SEQ ID NO: 149353 - DNA, 22 bp, synthetic construct
  misc_feature 1..22: note = chemically synthesized
  source 1..22: mol_type = other DNA
gtatgaaaagttaggactgaga

SEQ ID NO: 149354 - DNA, 22 bp, synthetic construct
  misc_feature 1..22: note = chemically synthesized
  source 1..22: mol_type = other DNA
ggactgagaagaatttgaaagg

SEQ ID NO: 149355 - DNA, 22 bp, synthetic construct
  misc_feature 1..22: note = chemically synthesized
  source 1..22: mol_type = other DNA
agaagaatttgaaaggcggctt

SEQ ID NO: 149356 - DNA, 22 bp, synthetic construct
  misc_feature 1..22: note = chemically synthesized
  source 1..22: mol_type = other DNA
gaaaggcggctttttgtagctt

SEQ ID NO: 149357 - DNA, 22 bp, synthetic construct
  misc_feature 1..22: note = chemically synthesized
  source 1..22: mol_type = other DNA
aaaggcggctttttgtagcttg

SEQ ID NO: 149358 - DNA, 22 bp, synthetic construct
  misc_feature 1..22: note = chemically synthesized
  source 1..22: mol_type = other DNA
tttgtagcttgatattcactac

SEQ ID NO: 149359 - DNA, 22 bp, synthetic construct
  misc_feature 1..22: note = chemically synthesized
  source 1..22: mol_type = other DNA
ttgtagcttgatattcactact

SEQ ID NO: 149360 - DNA, 22 bp, synthetic construct
  misc_feature 1..22: note = chemically synthesized
  source 1..22: mol_type = other DNA
tgtagcttgatattcactactg

SEQ ID NO: 149361 - DNA, 22 bp, synthetic construct
  misc_feature 1..22: note = chemically synthesized
  source 1..22: mol_type = other DNA
gtagcttgatattcactactgt

SEQ ID NO: 149362 - DNA, 22 bp, synthetic construct
  misc_feature 1..22: note = chemically synthesized
  source 1..22: mol_type = other DNA
tagcttgatattcactactgtc

SEQ ID NO: 149363 - DNA, 22 bp, synthetic construct
  misc_feature 1..22: note = chemically synthesized
  source 1..22: mol_type = other DNA
gatattcactactgtcttatta

SEQ ID NO: 149364 - DNA, 22 bp, synthetic construct
  misc_feature 1..22: note = chemically synthesized
  source 1..22: mol_type = other DNA
atattcactactgtcttattac

SEQ ID NO: 149365 - DNA, 22 bp, synthetic construct
  misc_feature 1..22: note = chemically synthesized
  source 1..22: mol_type = other DNA
actactgtcttattaccctgtc

SEQ ID NO: 149366 - DNA, 22 bp, synthetic construct
  misc_feature 1..22: note = chemically synthesized
  source 1..22: mol_type = other DNA
ctgtcttattaccctgtcatag

SEQ ID NO: 149367 - DNA, 22 bp, synthetic construct
  misc_feature 1..22: note = chemically synthesized
  source 1..22: mol_type = other DNA
tcttattaccctgtcataggcc

SEQ ID NO: 149368 - DNA, 22 bp, synthetic construct
  misc_feature 1..22: note = chemically synthesized
  source 1..22: mol_type = other DNA
attaccctgtcataggcccacc

SEQ ID NO: 149369 - DNA, 22 bp, synthetic construct
  misc_feature 1..22: note = chemically synthesized
  source 1..22: mol_type = other DNA
ttaccctgtcataggcccaccc

SEQ ID NO: 149370 - DNA, 22 bp, synthetic construct
  misc_feature 1..22: note = chemically synthesized
  source 1..22: mol_type = other DNA
ccctgtcataggcccaccccaa

SEQ ID NO: 149371 - DNA, 22 bp, synthetic construct
  misc_feature 1..22: note = chemically synthesized
  source 1..22: mol_type = other DNA
tcataggcccaccccaaatgga

SEQ ID NO: 149372 - DNA, 22 bp, synthetic construct
  misc_feature 1..22: note = chemically synthesized
  source 1..22: mol_type = other DNA
ttcctcaggatgtttaagatta

SEQ ID NO: 149373 - DNA, 22 bp, synthetic construct
  misc_feature 1..22: note = chemically synthesized
  source 1..22: mol_type = other DNA
cctcaggatgtttaagattagc

SEQ ID NO: 149374 - DNA, 22 bp, synthetic construct
  misc_feature 1..22: note = chemically synthesized
  source 1..22: mol_type = other DNA
ctcaggatgtttaagattagca

SEQ ID NO: 149375 - DNA, 22 bp, synthetic construct
  misc_feature 1..22: note = chemically synthesized
  source 1..22: mol_type = other DNA
aggatgtttaagattagcattc

SEQ ID NO: 149376 - DNA, 22 bp, synthetic construct
  misc_feature 1..22: note = chemically synthesized
  source 1..22: mol_type = other DNA
aagattagcattcaggaagaga

SEQ ID NO: 149377 - DNA, 22 bp, synthetic construct
  misc_feature 1..22: note = chemically synthesized
  source 1..22: mol_type = other DNA
agattagcattcaggaagagat

SEQ ID NO: 149378 - DNA, 22 bp, synthetic construct
  misc_feature 1..22: note = chemically synthesized
  source 1..22: mol_type = other DNA
gcattcaggaagagatcagagg

SEQ ID NO: 149379 - DNA, 22 bp, synthetic construct
  misc_feature 1..22: note = chemically synthesized
  source 1..22: mol_type = other DNA
aggaagagatcagaggtctgct

SEQ ID NO: 149380 - DNA, 22 bp, synthetic construct
  misc_feature 1..22: note = chemically synthesized
  source 1..22: mol_type = other DNA
ctggctcccttatcatgtccct

SEQ ID NO: 149381 - DNA, 22 bp, synthetic construct
  misc_feature 1..22: note = chemically synthesized
  source 1..22: mol_type = other DNA
gctcccttatcatgtcccttat

SEQ ID NO: 149382 - DNA, 22 bp, synthetic construct
  misc_feature 1..22: note = chemically synthesized
  source 1..22: mol_type = other DNA
ccttatcatgtcccttatggtg

SEQ ID NO: 149383 - DNA, 22 bp, synthetic construct
  misc_feature 1..22: note = chemically synthesized
  source 1..22: mol_type = other DNA
atcatgtcccttatggtgcttc

SEQ ID NO: 149384 - DNA, 22 bp, synthetic construct
  misc_feature 1..22: note = chemically synthesized
  source 1..22: mol_type = other DNA
tcatgtcccttatggtgcttct

SEQ ID NO: 149385 - DNA, 22 bp, synthetic construct
  misc_feature 1..22: note = chemically synthesized
  source 1..22: mol_type = other DNA
atggtgcttctggctctgcagt

SEQ ID NO: 149386 - DNA, 22 bp, synthetic construct
  misc_feature 1..22: note = chemically synthesized
  source 1..22: mol_type = other DNA
tggtgcttctggctctgcagtt

SEQ ID NO: 149387 - DNA, 22 bp, synthetic construct
  misc_feature 1..22: note = chemically synthesized
  source 1..22: mol_type = other DNA
ctggctctgcagttattagcat

SEQ ID NO: 149388 - DNA, 22 bp, synthetic construct
  misc_feature 1..22: note = chemically synthesized
  source 1..22: mol_type = other DNA
tggctctgcagttattagcata

SEQ ID NO: 149389 - DNA, 22 bp, synthetic construct
  misc_feature 1..22: note = chemically synthesized
  source 1..22: mol_type = other DNA
gctctgcagttattagcatagt

SEQ ID NO: 149390 - DNA, 22 bp, synthetic construct
  misc_feature 1..22: note = chemically synthesized
  source 1..22: mol_type = other DNA
tgcagttattagcatagtgtta

SEQ ID NO: 149391 - DNA, 22 bp, synthetic construct
  misc_feature 1..22: note = chemically synthesized
  source 1..22: mol_type = other DNA
cagttattagcatagtgttacc

SEQ ID NO: 149392 - DNA, 22 bp, synthetic construct
  misc_feature 1..22: note = chemically synthesized
  source 1..22: mol_type = other DNA
ttagcatagtgttaccatcaac

SEQ ID NO: 149393 - DNA, 22 bp, synthetic construct
  misc_feature 1..22: note = chemically synthesized
  source 1..22: mol_type = other DNA
gcatagtgttaccatcaaccac

SEQ ID NO: 149394 - DNA, 22 bp, synthetic construct
  misc_feature 1..22: note = chemically synthesized
  source 1..22: mol_type = other DNA
ccatcaaccaccttaacttcat

SEQ ID NO: 149395 - DNA, 22 bp, synthetic construct
  misc_feature 1..22: note = chemically synthesized
  source 1..22: mol_type = other DNA
aacttcatttttcttattcaat

SEQ ID NO: 149396 - DNA, 22 bp, synthetic construct
  misc_feature 1..22: note = chemically synthesized
  source 1..22: mol_type = other DNA
acttcatttttcttattcaata

SEQ ID NO: 149397 - DNA, 22 bp, synthetic construct
  misc_feature 1..22: note = chemically synthesized
  source 1..22: mol_type = other DNA
catttttcttattcaataccta

SEQ ID NO: 149398 - DNA, 22 bp, synthetic construct
  misc_feature 1..22: note = chemically synthesized
  source 1..22: mol_type = other DNA
atttttcttattcaatacctag

SEQ ID NO: 149399 - DNA, 22 bp, synthetic construct
  misc_feature 1..22: note = chemically synthesized
  source 1..22: mol_type = other DNA
ttcttattcaatacctaggtag

SEQ ID NO: 149400 - DNA, 22 bp, synthetic construct
  misc_feature 1..22: note = chemically synthesized
  source 1..22: mol_type = other DNA
tcttattcaatacctaggtagg

SEQ ID NO: 149401 - DNA, 22 bp, synthetic construct
  misc_feature 1..22: note = chemically synthesized
  source 1..22: mol_type = other DNA
cttattcaatacctaggtaggt

SEQ ID NO: 149402 - DNA, 22 bp, synthetic construct
  misc_feature 1..22: note = chemically synthesized
  source 1..22: mol_type = other DNA
ttattcaatacctaggtaggta

SEQ ID NO: 149403 - DNA, 22 bp, synthetic construct
  misc_feature 1..22: note = chemically synthesized
  source 1..22: mol_type = other DNA
attcaatacctaggtaggtaga

SEQ ID NO: 149404 - DNA, 22 bp, synthetic construct
  misc_feature 1..22: note = chemically synthesized
  source 1..22: mol_type = other DNA
ttcaatacctaggtaggtagat

SEQ ID NO: 149405 - DNA, 22 bp, synthetic construct
  misc_feature 1..22: note = chemically synthesized
  source 1..22: mol_type = other DNA
aatacctaggtaggtagatgct

SEQ ID NO: 149406 - DNA, 22 bp, synthetic construct
  misc_feature 1..22: note = chemically synthesized
  source 1..22: mol_type = other DNA
ggtaggtagatgctagattctg

SEQ ID NO: 149407 - DNA, 22 bp, synthetic construct
  misc_feature 1..22: note = chemically synthesized
  source 1..22: mol_type = other DNA
gattctggaaataaaatatgag

SEQ ID NO: 149408 - DNA, 22 bp, synthetic construct
  misc_feature 1..22: note = chemically synthesized
  source 1..22: mol_type = other DNA
tggaaataaaatatgagtctca

SEQ ID NO: 149409 - DNA, 22 bp, synthetic construct
  misc_feature 1..22: note = chemically synthesized
  source 1..22: mol_type = other DNA
gaaataaaatatgagtctcaag

SEQ ID NO: 149410 - DNA, 22 bp, synthetic construct
  misc_feature 1..22: note = chemically synthesized
  source 1..22: mol_type = other DNA
aagtggtccttgtcctctctcc

SEQ ID NO: 149411 - DNA, 22 bp, synthetic construct
  misc_feature 1..22: note = chemically synthesized
  source 1..22: mol_type = other DNA
gtcctctctcccagtcaaattc

SEQ ID NO: 149412 - DNA, 22 bp, synthetic construct
  misc_feature 1..22: note = chemically synthesized
  source 1..22: mol_type = other DNA
tcctctctcccagtcaaattct

SEQ ID NO: 149413 - DNA, 22 bp, synthetic construct
  misc_feature 1..22: note = chemically synthesized
  source 1..22: mol_type = other DNA
tctcccagtcaaattctgaatc

SEQ ID NO: 149414 - DNA, 22 bp, synthetic construct
  misc_feature 1..22: note = chemically synthesized
  source 1..22: mol_type = other DNA
tcccagtcaaattctgaatcta

SEQ ID NO: 149415 - DNA, 22 bp, synthetic construct
  misc_feature 1..22: note = chemically synthesized
  source 1..22: mol_type = other DNA
ccagtcaaattctgaatctagt

SEQ ID NO: 149416 - DNA, 22 bp, synthetic construct
  misc_feature 1..22: note = chemically synthesized
  source 1..22: mol_type = other DNA
tgaatctagttggcaagattct

SEQ ID NO: 149417 - DNA, 22 bp, synthetic construct
  misc_feature 1..22: note = chemically synthesized
  source 1..22: mol_type = other DNA
aatctagttggcaagattctga

SEQ ID NO: 149418 - DNA, 22 bp, synthetic construct
  misc_feature 1..22: note = chemically synthesized
  source 1..22: mol_type = other DNA
gttggcaagattctgaaatcaa

SEQ ID NO: 149419 - DNA, 22 bp, synthetic construct
  misc_feature 1..22: note = chemically synthesized
  source 1..22: mol_type = other DNA
gcaagattctgaaatcaaggca

SEQ ID NO: 149420 - DNA, 22 bp, synthetic construct
  misc_feature 1..22: note = chemically synthesized
  source 1..22: mol_type = other DNA
tgaaatcaaggcatataatcag

SEQ ID NO: 149421 - DNA, 22 bp, synthetic construct
  misc_feature 1..22: note = chemically synthesized
  source 1..22: mol_type = other DNA
aaatcaaggcatataatcagta

SEQ ID NO: 149422 - DNA, 22 bp, synthetic construct
  misc_feature 1..22: note = chemically synthesized
  source 1..22: mol_type = other DNA
tattatatgagagggtgaaacc

SEQ ID NO: 149423 - DNA, 22 bp, synthetic construct
  misc_feature 1..22: note = chemically synthesized
  source 1..22: mol_type = other DNA
attatatgagagggtgaaaccc

SEQ ID NO: 149424 - DNA, 22 bp, synthetic construct
  misc_feature 1..22: note = chemically synthesized
  source 1..22: mol_type = other DNA
ttatatgagagggtgaaaccct

SEQ ID NO: 149425 - DNA, 22 bp, synthetic construct
  misc_feature 1..22: note = chemically synthesized
  source 1..22: mol_type = other DNA
tatgagagggtgaaaccctcaa

SEQ ID NO: 149426 - DNA, 22 bp, synthetic construct
  misc_feature 1..22: note = chemically synthesized
  source 1..22: mol_type = other DNA
aaaatgaaatgaaatcagaccc

SEQ ID NO: 149427 - DNA, 22 bp, synthetic construct
  misc_feature 1..22: note = chemically synthesized
  source 1..22: mol_type = other DNA
gtcttacaccataaacaaaaat

SEQ ID NO: 149428 - DNA, 22 bp, synthetic construct
  misc_feature 1..22: note = chemically synthesized
  source 1..22: mol_type = other DNA
tcttacaccataaacaaaaata

SEQ ID NO: 149429 - DNA, 22 bp, synthetic construct
  misc_feature 1..22: note = chemically synthesized
  source 1..22: mol_type = other DNA
acaccataaacaaaaataaatt

SEQ ID NO: 149430 - DNA, 22 bp, synthetic construct
  misc_feature 1..22: note = chemically synthesized
  source 1..22: mol_type = other DNA
caccataaacaaaaataaattt

SEQ ID NO: 149431 - DNA, 22 bp, synthetic construct
  misc_feature 1..22: note = chemically synthesized
  source 1..22: mol_type = other DNA
gaatgggttaaagaattaaact

SEQ ID NO: 149432 - DNA, 22 bp, synthetic construct
  misc_feature 1..22: note = chemically synthesized
  source 1..22: mol_type = other DNA
aatgggttaaagaattaaacta

SEQ ID NO: 149433 - DNA, 22 bp, synthetic construct
  misc_feature 1..22: note = chemically synthesized
  source 1..22: mol_type = other DNA
aagaattaaactaagacctaaa

SEQ ID NO: 149434 - DNA, 22 bp, synthetic construct
  misc_feature 1..22: note = chemically synthesized
  source 1..22: mol_type = other DNA
aactaagacctaaaaccataaa

SEQ ID NO: 149435 - DNA, 22 bp, synthetic construct
  misc_feature 1..22: note = chemically synthesized
  source 1..22: mol_type = other DNA
agacctaaaaccataaaaattt

SEQ ID NO: 149436 - DNA, 22 bp, synthetic construct
  misc_feature 1..22: note = chemically synthesized
  source 1..22: mol_type = other DNA
aaaccataaaaatttttaaaga

SEQ ID NO: 149437 - DNA, 22 bp, synthetic construct
  misc_feature 1..22: note = chemically synthesized
  source 1..22: mol_type = other DNA
ttaaagaaatcaaaagaagaaa

SEQ ID NO: 149438 - DNA, 22 bp, synthetic construct
  misc_feature 1..22: note = chemically synthesized
  source 1..22: mol_type = other DNA
taaagaaatcaaaagaagaaaa

SEQ ID NO: 149439 - DNA, 22 bp, synthetic construct
  misc_feature 1..22: note = chemically synthesized
  source 1..22: mol_type = other DNA
aaagaaatcaaaagaagaaaat

SEQ ID NO: 149440 - DNA, 22 bp, synthetic construct
  misc_feature 1..22: note = chemically synthesized
  source 1..22: mol_type = other DNA
aagaaatcaaaagaagaaaatt

SEQ ID NO: 149441 - DNA, 22 bp, synthetic construct
  misc_feature 1..22: note = chemically synthesized
  source 1..22: mol_type = other DNA
taatattcacgttgcagccgtt

SEQ ID NO: 149442 - DNA, 22 bp, synthetic construct
  misc_feature 1..22: note = chemically synthesized
  source 1..22: mol_type = other DNA
atattcacgttgcagccgtttt

SEQ ID NO: 149443 - DNA, 22 bp, synthetic construct
  misc_feature 1..22: note = chemically synthesized
  source 1..22: mol_type = other DNA
acgttgcagccgttttttgaat

SEQ ID NO: 149444 - DNA, 22 bp, synthetic construct
  misc_feature 1..22: note = chemically synthesized
  source 1..22: mol_type = other DNA
cagccgttttttgaatttgata

SEQ ID NO: 149445 - DNA, 22 bp, synthetic construct
  misc_feature 1..22: note = chemically synthesized
  source 1..22: mol_type = other DNA
tttgaatttgatatgagaagca

SEQ ID NO: 149446 - DNA, 22 bp, synthetic construct
  misc_feature 1..22: note = chemically synthesized
  source 1..22: mol_type = other DNA
ttgaatttgatatgagaagcaa

SEQ ID NO: 149447 - DNA, 22 bp, synthetic construct
  misc_feature 1..22: note = chemically synthesized
  source 1..22: mol_type = other DNA
tgaatttgatatgagaagcaaa

SEQ ID NO: 149448 - DNA, 22 bp, synthetic construct
  misc_feature 1..22: note = chemically synthesized
  source 1..22: mol_type = other DNA
gaatttgatatgagaagcaaag

SEQ ID NO: 149449 - DNA, 22 bp, synthetic construct
  misc_feature 1..22: note = chemically synthesized
  source 1..22: mol_type = other DNA
aatttgatatgagaagcaaagg

SEQ ID NO: 149450 - DNA, 22 bp, synthetic construct
  misc_feature 1..22: note = chemically synthesized
  source 1..22: mol_type = other DNA
gatatgagaagcaaaggcaaca

SEQ ID NO: 149451 - DNA, 22 bp, synthetic construct
  misc_feature 1..22: note = chemically synthesized
  source 1..22: mol_type = other DNA
atatgagaagcaaaggcaacaa

SEQ ID NO: 149452 - DNA, 22 bp, synthetic construct
  misc_feature 1..22: note = chemically synthesized
  source 1..22: mol_type = other DNA
catcaaactaaaaaatttccac

SEQ ID NO: 149453 - DNA, 22 bp, synthetic construct
  misc_feature 1..22: note = chemically synthesized
  source 1..22: mol_type = other DNA
aaaaatttccacacaaaaaaca

SEQ ID NO: 149454 - DNA, 22 bp, synthetic construct
  misc_feature 1..22: note = chemically synthesized
  source 1..22: mol_type = other DNA
ccacacaaaaaacaaaacaatg

SEQ ID NO: 149455 - DNA, 22 bp, synthetic construct
  misc_feature 1..22: note = chemically synthesized
  source 1..22: mol_type = other DNA
cacacaaaaaacaaaacaatga

SEQ ID NO: 149456 - DNA, 22 bp, synthetic construct
  misc_feature 1..22: note = chemically synthesized
  source 1..22: mol_type = other DNA
gcaaaccaaatatttcttaaat

SEQ ID NO: 149457 - DNA, 22 bp, synthetic construct
  misc_feature 1..22: note = chemically synthesized
  source 1..22: mol_type = other DNA
caaaccaaatatttcttaaata

SEQ ID NO: 149458 - DNA, 22 bp, synthetic construct
  misc_feature 1..22: note = chemically synthesized
  source 1..22: mol_type = other DNA
cttaaatattttggttaatatc

SEQ ID NO: 149459 - DNA, 22 bp, synthetic construct
  misc_feature 1..22: note = chemically synthesized
  source 1..22: mol_type = other DNA
ttaaatattttggttaatatcc

SEQ ID NO: 149460 - DNA, 22 bp, synthetic construct
  misc_feature 1..22: note = chemically synthesized
  source 1..22: mol_type = other DNA
aaatattttggttaatatccaa

SEQ ID NO: 149461 - DNA, 22 bp, synthetic construct
  misc_feature 1..22: note = chemically synthesized
  source 1..22: mol_type = other DNA
aatattttggttaatatccaaa

SEQ ID NO: 149462 - DNA, 22 bp, synthetic construct
  misc_feature 1..22: note = chemically synthesized
  source 1..22: mol_type = other DNA
tggttaatatccaaaatatata

SEQ ID NO: 149463 - DNA, 22 bp, synthetic construct
  misc_feature 1..22: note = chemically synthesized
  source 1..22: mol_type = other DNA
ggttaatatccaaaatatataa

SEQ ID NO: 149464 - DNA, 22 bp, synthetic construct
  misc_feature 1..22: note = chemically synthesized
  source 1..22: mol_type = other DNA
gttaatatccaaaatatataag

SEQ ID NO: 149465 - DNA, 22 bp, synthetic construct
  misc_feature 1..22: note = chemically synthesized
  source 1..22: mol_type = other DNA
atatccaaaatatataagaaac

SEQ ID NO: 149466 - DNA, 22 bp, synthetic construct
  misc_feature 1..22: note = chemically synthesized
  source 1..22: mol_type = other DNA
aataacaaacaaaaaattaaaa

SEQ ID NO: 149467 - DNA, 22 bp, synthetic construct
  misc_feature 1..22: note = chemically synthesized
  source 1..22: mol_type = other DNA
aaaataggaaaataaaaaaatt

SEQ ID NO: 149468 - DNA, 22 bp, synthetic construct
  misc_feature 1..22: note = chemically synthesized
  source 1..22: mol_type = other DNA
aaaagaagaaaatcctgccatt

SEQ ID NO: 149469 - DNA, 22 bp, synthetic construct
  misc_feature 1..22: note = chemically synthesized
  source 1..22: mol_type = other DNA
ccatttatggcagaattgatga

SEQ ID NO: 149470 - DNA, 22 bp, synthetic construct
  misc_feature 1..22: note = chemically synthesized
  source 1..22: mol_type = other DNA
atggcagaattgatgaacctgg

SEQ ID NO: 149471 - DNA, 22 bp, synthetic construct
  misc_feature 1..22: note = chemically synthesized
  source 1..22: mol_type = other DNA
tggcagaattgatgaacctgga

SEQ ID NO: 149472 - DNA, 22 bp, synthetic construct
  misc_feature 1..22: note = chemically synthesized
  source 1..22: mol_type = other DNA
atgaacctggaggatgtaaaac

SEQ ID NO: 149473 - DNA, 22 bp, synthetic construct
  misc_feature 1..22: note = chemically synthesized
  source 1..22: mol_type = other DNA
gaggatgtaaaactaagaaaaa

SEQ ID NO: 149474 - DNA, 22 bp, synthetic construct
  misc_feature 1..22: note = chemically synthesized
  source 1..22: mol_type = other DNA
agaaaaataagcctgacacaaa

SEQ ID NO: 149475 - DNA, 22 bp, synthetic construct
  misc_feature 1..22: note = chemically synthesized
  source 1..22: mol_type = other DNA
acacaaaaagacaaatactaca

SEQ ID NO: 149476 - DNA, 22 bp, synthetic construct
  misc_feature 1..22: note = chemically synthesized
  source 1..22: mol_type = other DNA
cacaaccttgctcatatgtgaa

SEQ ID NO: 149477 - DNA, 22 bp, synthetic construct
  misc_feature 1..22: note = chemically synthesized
  source 1..22: mol_type = other DNA
gctcatatgtgaaacataaaaa

SEQ ID NO: 149478 - DNA, 22 bp, synthetic construct
  misc_feature 1..22: note = chemically synthesized
  source 1..22: mol_type = other DNA
ctcatatgtgaaacataaaaaa

SEQ ID NO: 149479 - DNA, 22 bp, synthetic construct
  misc_feature 1..22: note = chemically synthesized
  source 1..22: mol_type = other DNA
atatgtgaaacataaaaaagtc

SEQ ID NO: 149480 - DNA, 22 bp, synthetic construct
  misc_feature 1..22: note = chemically synthesized
  source 1..22: mol_type = other DNA
tcatggaaacagacagtagagg

SEQ ID NO: 149481 - DNA, 22 bp, synthetic construct
  misc_feature 1..22: note = chemically synthesized
  source 1..22: mol_type = other DNA
atggaaacagacagtagaggta

SEQ ID NO: 149482 - DNA, 22 bp, synthetic construct
  misc_feature 1..22: note = chemically synthesized
  source 1..22: mol_type = other DNA
ccaggggttgggggtgggagaa

SEQ ID NO: 149483 - DNA, 22 bp, synthetic construct
  misc_feature 1..22: note = chemically synthesized
  source 1..22: mol_type = other DNA
caggggttgggggtgggagaat

SEQ ID NO: 149484 - DNA, 22 bp, synthetic construct
  misc_feature 1..22: note = chemically synthesized
  source 1..22: mol_type = other DNA
ggggtgggagaatcaggaaact

SEQ ID NO: 149485 - DNA, 22 bp, synthetic construct
  misc_feature 1..22: note = chemically synthesized
  source 1..22: mol_type = other DNA
ttactcaaagggtataaaattt

SEQ ID NO: 149486 - DNA, 22 bp, synthetic construct
  misc_feature 1..22: note = chemically synthesized
  source 1..22: mol_type = other DNA
ctcaaagggtataaaatttcag

SEQ ID NO: 149487 - DNA, 22 bp, synthetic construct
  misc_feature 1..22: note = chemically synthesized
  source 1..22: mol_type = other DNA
aaagggtataaaatttcagtta

SEQ ID NO: 149488 - DNA, 22 bp, synthetic construct
  misc_feature 1..22: note = chemically synthesized
  source 1..22: mol_type = other DNA
cagttatgtgggatgaataaat

SEQ ID NO: 149489 - DNA, 22 bp, synthetic construct
  misc_feature 1..22: note = chemically synthesized
  source 1..22: mol_type = other DNA
agttatgtgggatgaataaatt

SEQ ID NO: 149490 - DNA, 22 bp, synthetic construct
  misc_feature 1..22: note = chemically synthesized
  source 1..22: mol_type = other DNA
tgtgggatgaataaattctaga

SEQ ID NO: 149491 - DNA, 22 bp, synthetic construct
  misc_feature 1..22: note = chemically synthesized
  source 1..22: mol_type = other DNA
tagatatctaatgtacagcatc

SEQ ID NO: 149492 - DNA, 22 bp, synthetic construct
  misc_feature 1..22: note = chemically synthesized
  source 1..22: mol_type = other DNA
gatatctaatgtacagcatcgt

SEQ ID NO: 149493 - DNA, 22 bp, synthetic construct
  misc_feature 1..22: note = chemically synthesized
  source 1..22: mol_type = other DNA
atgtacagcatcgtgactgtag

SEQ ID NO: 149494 - DNA, 22 bp, synthetic construct
  misc_feature 1..22: note = chemically synthesized
  source 1..22: mol_type = other DNA
tagttaattgtactgtaagtat

SEQ ID NO: 149495 - DNA, 22 bp, synthetic construct
  misc_feature 1..22: note = chemically synthesized
  source 1..22: mol_type = other DNA
attgtactgtaagtatatttaa

SEQ ID NO: 149496 - DNA, 22 bp, synthetic construct
  misc_feature 1..22: note = chemically synthesized
  source 1..22: mol_type = other DNA
tactgtaagtatatttaaaatt

SEQ ID NO: 149497 - DNA, 22 bp, synthetic construct
  misc_feature 1..22: note = chemically synthesized
  source 1..22: mol_type = other DNA
taagtatatttaaaatttgcaa

SEQ ID NO: 149498 - DNA, 22 bp, synthetic construct
  misc_feature 1..22: note = chemically synthesized
  source 1..22: mol_type = other DNA
aaaatttgcaaagagagtagat

SEQ ID NO: 149499 - DNA, 22 bp, synthetic construct
  misc_feature 1..22: note = chemically synthesized
  source 1..22: mol_type = other DNA
aaatttgcaaagagagtagatt

SEQ ID NO: 149500 - DNA, 22 bp, synthetic construct
  misc_feature 1..22: note = chemically synthesized
  source 1..22: mol_type = other DNA
gcaaagagagtagatttttttt

SEQ ID NO: 149501 - DNA, 22 bp, synthetic construct
  misc_feature 1..22: note = chemically synthesized
  source 1..22: mol_type = other DNA
caaagagagtagattttttttt

SEQ ID NO: 149502 - DNA, 22 bp, synthetic construct
  misc_feature 1..22: note = chemically synthesized
  source 1..22: mol_type = other DNA
ttttttttttttagatggagtt

SEQ ID NO: 149503 - DNA, 22 bp, synthetic construct
  misc_feature 1..22: note = chemically synthesized
  source 1..22: mol_type = other DNA
tttttttttttagatggagttt

SEQ ID NO: 149504 - DNA, 22 bp, synthetic construct
  misc_feature 1..22: note = chemically synthesized
  source 1..22: mol_type = other DNA
ttttttttttagatggagtttt

SEQ ID NO: 149505 - DNA, 22 bp, synthetic construct
  misc_feature 1..22: note = chemically synthesized
  source 1..22: mol_type = other DNA
tttttttttagatggagttttg

SEQ ID NO: 149506 - DNA, 22 bp, synthetic construct
  misc_feature 1..22: note = chemically synthesized
  source 1..22: mol_type = other DNA
ttttttttagatggagttttgc

SEQ ID NO: 149507 - DNA, 22 bp, synthetic construct
  misc_feature 1..22: note = chemically synthesized
  source 1..22: mol_type = other DNA
tttttttagatggagttttgct

SEQ ID NO: 149508 - DNA, 22 bp, synthetic construct
  misc_feature 1..22: note = chemically synthesized
  source 1..22: mol_type = other DNA
ttttttagatggagttttgctc

SEQ ID NO: 149509 - DNA, 22 bp, synthetic construct
  misc_feature 1..22: note = chemically synthesized
  source 1..22: mol_type = other DNA
tttttagatggagttttgctct

SEQ ID NO: 149510 - DNA, 22 bp, synthetic construct
  misc_feature 1..22: note = chemically synthesized
  source 1..22: mol_type = other DNA
ttttagatggagttttgctctt

SEQ ID NO: 149511 - DNA, 22 bp, synthetic construct
  misc_feature 1..22: note = chemically synthesized
  source 1..22: mol_type = other DNA
tttagatggagttttgctcttg

SEQ ID NO: 149512 - DNA, 22 bp, synthetic construct
  misc_feature 1..22: note = chemically synthesized
  source 1..22: mol_type = other DNA
ttagatggagttttgctcttgt

SEQ ID NO: 149513 - DNA, 22 bp, synthetic construct
  misc_feature 1..22: note = chemically synthesized
  source 1..22: mol_type = other DNA
tagatggagttttgctcttgtt

SEQ ID NO: 149514 - DNA, 22 bp, synthetic construct
  misc_feature 1..22: note = chemically synthesized
  source 1..22: mol_type = other DNA
agatggagttttgctcttgttg

SEQ ID NO: 149515 - DNA, 22 bp, synthetic construct
  misc_feature 1..22: note = chemically synthesized
  source 1..22: mol_type = other DNA
gatggagttttgctcttgttgt

SEQ ID NO: 149516 - DNA, 22 bp, synthetic construct
  misc_feature 1..22: note = chemically synthesized
  source 1..22: mol_type = other DNA
tgctcttgttgtccaggctgga

SEQ ID NO: 149517 - DNA, 22 bp, synthetic construct
  misc_feature 1..22: note = chemically synthesized
  source 1..22: mol_type = other DNA
gctcttgttgtccaggctggag

SEQ ID NO: 149518 - DNA, 22 bp, synthetic construct
  misc_feature 1..22: note = chemically synthesized
  source 1..22: mol_type = other DNA
ctcttgttgtccaggctggagt

SEQ ID NO: 149519 - DNA, 22 bp, synthetic construct
  misc_feature 1..22: note = chemically synthesized
  source 1..22: mol_type = other DNA
ttgttgtccaggctggagtgca

SEQ ID NO: 149520 - DNA, 22 bp, synthetic construct
  misc_feature 1..22: note = chemically synthesized
  source 1..22: mol_type = other DNA
gttgtccaggctggagtgcaat

SEQ ID NO: 149521 - DNA, 22 bp, synthetic construct
  misc_feature 1..22: note = chemically synthesized
  source 1..22: mol_type = other DNA
ttgtccaggctggagtgcaatg

SEQ ID NO: 149522 - DNA, 22 bp, synthetic construct
  misc_feature 1..22: note = chemically synthesized
  source 1..22: mol_type = other DNA
tccaggctggagtgcaatggca

SEQ ID NO: 149523 - DNA, 22 bp, synthetic construct
  misc_feature 1..22: note = chemically synthesized
  source 1..22: mol_type = other DNA
gagtgcaatggcaagatcttgg

SEQ ID NO: 149524 - DNA, 22 bp, synthetic construct
  misc_feature 1..22: note = chemically synthesized
  source 1..22: mol_type = other DNA
ggctcactgcaacctccgcctc

SEQ ID NO: 149525 - DNA, 22 bp, synthetic construct
  misc_feature 1..22: note = chemically synthesized
  source 1..22: mol_type = other DNA
gctcactgcaacctccgcctcc

SEQ ID NO: 149526 - DNA, 22 bp, synthetic construct
  misc_feature 1..22: note = chemically synthesized
  source 1..22: mol_type = other DNA
actgcaacctccgcctcctggg

SEQ ID NO: 149527 - DNA, 22 bp, synthetic construct
  misc_feature 1..22: note = chemically synthesized
  source 1..22: mol_type = other DNA
caacctccgcctcctgggttca

SEQ ID NO: 149528 - DNA, 22 bp, synthetic construct
  misc_feature 1..22: note = chemically synthesized
  source 1..22: mol_type = other DNA
cgcctcctgggttcaagcaaat

SEQ ID NO: 149529 - DNA, 22 bp, synthetic construct
  misc_feature 1..22: note = chemically synthesized
  source 1..22: mol_type = other DNA
ctgggttcaagcaaatctcctg

SEQ ID NO: 149530 - DNA, 22 bp, synthetic construct
  misc_feature 1..22: note = chemically synthesized
  source 1..22: mol_type = other DNA
ggttcaagcaaatctcctgcct

SEQ ID NO: 149531 - DNA, 22 bp, synthetic construct
  misc_feature 1..22: note = chemically synthesized
  source 1..22: mol_type = other DNA
aagcaaatctcctgcctcagcc

SEQ ID NO: 149532 - DNA, 22 bp, synthetic construct
  misc_feature 1..22: note = chemically synthesized
  source 1..22: mol_type = other DNA
ctgcctcagcctcccgagtagc

SEQ ID NO: 149533 - DNA, 22 bp, synthetic construct
  misc_feature 1..22: note = chemically synthesized
  source 1..22: mol_type = other DNA
cctcagcctcccgagtagctgg

SEQ ID NO: 149534 - DNA, 22 bp, synthetic construct
  misc_feature 1..22: note = chemically synthesized
  source 1..22: mol_type = other DNA
agcctcccgagtagctgggatt

SEQ ID NO: 149535 - DNA, 22 bp, synthetic construct
  misc_feature 1..22: note = chemically synthesized
  source 1..22: mol_type = other DNA
ccgagtagctgggattacaggc

SEQ ID NO: 149536 - DNA, 22 bp, synthetic construct
  misc_feature 1..22: note = chemically synthesized
  source 1..22: mol_type = other DNA
ggattacaggcatgcgacacca

SEQ ID NO: 149537 - DNA, 22 bp, synthetic construct
  misc_feature 1..22: note = chemically synthesized
  source 1..22: mol_type = other DNA
caggcatgcgacaccatgccca

SEQ ID NO: 149538 - DNA, 22 bp, synthetic construct
  misc_feature 1..22: note = chemically synthesized
  source 1..22: mol_type = other DNA
attttgtatttttagtagagac

SEQ ID NO: 149539 - DNA, 22 bp, synthetic construct
  misc_feature 1..22: note = chemically synthesized
  source 1..22: mol_type = other DNA
tgtatttttagtagagacgggg

SEQ ID NO: 149540 - DNA, 22 bp, synthetic construct
  misc_feature 1..22: note = chemically synthesized
  source 1..22: mol_type = other DNA
gtatttttagtagagacggggt

SEQ ID NO: 149541 - DNA, 22 bp, synthetic construct
  misc_feature 1..22: note = chemically synthesized
  source 1..22: mol_type = other DNA
tatttttagtagagacggggtt

SEQ ID NO: 149542 - DNA, 22 bp, synthetic construct
  misc_feature 1..22: note = chemically synthesized
  source 1..22: mol_type = other DNA
ttagtagagacggggtttctcc

SEQ ID NO: 149543 - DNA, 22 bp, synthetic construct
  misc_feature 1..22: note = chemically synthesized
  source 1..22: mol_type = other DNA
tagtagagacggggtttctcca

SEQ ID NO: 149544 - DNA, 22 bp, synthetic construct
  misc_feature 1..22: note = chemically synthesized
  source 1..22: mol_type = other DNA
agtagagacggggtttctccat

SEQ ID NO: 149545 - DNA, 22 bp, synthetic construct
  misc_feature 1..22: note = chemically synthesized
  source 1..22: mol_type = other DNA
gtagagacggggtttctccatg

SEQ ID NO: 149546 - DNA, 22 bp, synthetic construct
  misc_feature 1..22: note = chemically synthesized
  source 1..22: mol_type = other DNA
ctccatgttggtcaggctgatc

SEQ ID NO: 149547 - DNA, 22 bp, synthetic construct
  misc_feature 1..22: note = chemically synthesized
  source 1..22: mol_type = other DNA
tccatgttggtcaggctgatcc

SEQ ID NO: 149548 - DNA, 22 bp, synthetic construct
  misc_feature 1..22: note = chemically synthesized
  source 1..22: mol_type = other DNA
catgttggtcaggctgatccgc

SEQ ID NO: 149549 - DNA, 22 bp, synthetic construct
  misc_feature 1..22: note = chemically synthesized
  source 1..22: mol_type = other DNA
gtcaggctgatccgcctgcctc

SEQ ID NO: 149550 - DNA, 22 bp, synthetic construct
  misc_feature 1..22: note = chemically synthesized
  source 1..22: mol_type = other DNA
atccgcctgcctcggccaccca

SEQ ID NO: 149551 - DNA, 22 bp, synthetic construct
  misc_feature 1..22: note = chemically synthesized
  source 1..22: mol_type = other DNA
cctcggccacccaaagggctgg

SEQ ID NO: 149552 - DNA, 22 bp, synthetic construct
  misc_feature 1..22: note = chemically synthesized
  source 1..22: mol_type = other DNA
ggccacccaaagggctgggatt

SEQ ID NO: 149553 - DNA, 22 bp, synthetic construct
  misc_feature 1..22: note = chemically synthesized
  source 1..22: mol_type = other DNA
ggattacaggcgtgagccaccg

SEQ ID NO: 149554 - DNA, 22 bp, synthetic construct
  misc_feature 1..22: note = chemically synthesized
  source 1..22: mol_type = other DNA
caggcgtgagccaccgggcctg

SEQ ID NO: 149555 - DNA, 22 bp, synthetic construct
  misc_feature 1..22: note = chemically synthesized
  source 1..22: mol_type = other DNA
gccgagagtagatcttaaaagc

SEQ ID NO: 149556 - DNA, 22 bp, synthetic construct
  misc_feature 1..22: note = chemically synthesized
  source 1..22: mol_type = other DNA
aaaagcatttaccacaagaaaa

SEQ ID NO: 149557 - DNA, 22 bp, synthetic construct
  misc_feature 1..22: note = chemically synthesized
  source 1..22: mol_type = other DNA
aaagcatttaccacaagaaaaa

SEQ ID NO: 149558 - DNA, 22 bp, synthetic construct
  misc_feature 1..22: note = chemically synthesized
  source 1..22: mol_type = other DNA
accacaagaaaaaggtaactat

SEQ ID NO: 149559 - DNA, 22 bp, synthetic construct
  misc_feature 1..22: note = chemically synthesized
  source 1..22: mol_type = other DNA
ccacaagaaaaaggtaactatg

SEQ ID NO: 149560 - DNA, 22 bp, synthetic construct
  misc_feature 1..22: note = chemically synthesized
  source 1..22: mol_type = other DNA
tgtgagataatgggtatgttaa

SEQ ID NO: 149561 - DNA, 22 bp, synthetic construct
  misc_feature 1..22: note = chemically synthesized
  source 1..22: mol_type = other DNA
attagcttgattgtggtaatca

SEQ ID NO: 149562 - DNA, 22 bp, synthetic construct
  misc_feature 1..22: note = chemically synthesized
  source 1..22: mol_type = other DNA
gcttgattgtggtaatcatttc

SEQ ID NO: 149563 - DNA, 22 bp, synthetic construct
  misc_feature 1..22: note = chemically synthesized
  source 1..22: mol_type = other DNA
gattgtggtaatcatttcacaa

SEQ ID NO: 149564 - DNA, 22 bp, synthetic construct
  misc_feature 1..22: note = chemically synthesized
  source 1..22: mol_type = other DNA
attgtggtaatcatttcacaag

SEQ ID NO: 149565 - DNA, 22 bp, synthetic construct
  misc_feature 1..22: note = chemically synthesized
  source 1..22: mol_type = other DNA
tggtaatcatttcacaaggtat

SEQ ID NO: 149566 - DNA, 22 bp, synthetic construct
  misc_feature 1..22: note = chemically synthesized
  source 1..22: mol_type = other DNA
cacaaggtatacatatattaaa

SEQ ID NO: 149567 - DNA, 22 bp, synthetic construct
  misc_feature 1..22: note = chemically synthesized
  source 1..22: mol_type = other DNA
acaaggtatacatatattaaaa

SEQ ID NO: 149568 - DNA, 22 bp, synthetic construct
  misc_feature 1..22: note = chemically synthesized
  source 1..22: mol_type = other DNA
aaacatcatgttgtacacctta

SEQ ID NO: 149569 - DNA, 22 bp, synthetic construct
  misc_feature 1..22: note = chemically synthesized
  source 1..22: mol_type = other DNA
tacaccttaaatatatacaatt

SEQ ID NO: 149570 - DNA, 22 bp, synthetic construct
  misc_feature 1..22: note = chemically synthesized
  source 1..22: mol_type = other DNA
aaatatatacaatttttatttg

SEQ ID NO: 149571 - DNA, 22 bp, synthetic construct
  misc_feature 1..22: note = chemically synthesized
  source 1..22: mol_type = other DNA
aatatatacaatttttatttgt

SEQ ID NO: 149572 - DNA, 22 bp, synthetic construct
  misc_feature 1..22: note = chemically synthesized
  source 1..22: mol_type = other DNA
ttatttgtgaatgatacctcaa

SEQ ID NO: 149573 - DNA, 22 bp, synthetic construct
  misc_feature 1..22: note = chemically synthesized
  source 1..22: mol_type = other DNA
tatttgtgaatgatacctcaat

SEQ ID NO: 149574 - DNA, 22 bp, synthetic construct
  misc_feature 1..22: note = chemically synthesized
  source 1..22: mol_type = other DNA
atttgtgaatgatacctcaata

SEQ ID NO: 149575 - DNA, 22 bp, synthetic construct
  misc_feature 1..22: note = chemically synthesized
  source 1..22: mol_type = other DNA
tttgtgaatgatacctcaataa

SEQ ID NO: 149576 - DNA, 22 bp, synthetic construct
  misc_feature 1..22: note = chemically synthesized
  source 1..22: mol_type = other DNA
gtgaatgatacctcaataaagt

SEQ ID NO: 149577 - DNA, 22 bp, synthetic construct
  misc_feature 1..22: note = chemically synthesized
  source 1..22: mol_type = other DNA
tgaatgatacctcaataaagtt

SEQ ID NO: 149578 - DNA, 22 bp, synthetic construct
  misc_feature 1..22: note = chemically synthesized
  source 1..22: mol_type = other DNA
aataaagttgaagaataataaa

SEQ ID NO: 149579 - DNA, 22 bp, synthetic construct
  misc_feature 1..22: note = chemically synthesized
  source 1..22: mol_type = other DNA
aagaataataaaaaagaataga

SEQ ID NO: 149580 - DNA, 22 bp, synthetic construct
  misc_feature 1..22: note = chemically synthesized
  source 1..22: mol_type = other DNA
aaaaactaaaaaataaaaaaat

SEQ ID NO: 149581 - DNA, 22 bp, synthetic construct
  misc_feature 1..22: note = chemically synthesized
  source 1..22: mol_type = other DNA
aaaaataaaaaaatgcatcttg

SEQ ID NO: 149582 - DNA, 22 bp, synthetic construct
  misc_feature 1..22: note = chemically synthesized
  source 1..22: mol_type = other DNA
gatgattagaattgcattcttg

SEQ ID NO: 149583 - DNA, 22 bp, synthetic construct
  misc_feature 1..22: note = chemically synthesized
  source 1..22: mol_type = other DNA
atgattagaattgcattcttga

SEQ ID NO: 149584 - DNA, 22 bp, synthetic construct
  misc_feature 1..22: note = chemically synthesized
  source 1..22: mol_type = other DNA
gaattgcattcttgatttttca

SEQ ID NO: 149585 - DNA, 22 bp, synthetic construct
  misc_feature 1..22: note = chemically synthesized
  source 1..22: mol_type = other DNA
cattcttgatttttcagataca

SEQ ID NO: 149586 - DNA, 22 bp, synthetic construct
  misc_feature 1..22: note = chemically synthesized
  source 1..22: mol_type = other DNA
ttgatttttcagatacaaatat

SEQ ID NO: 149587 - DNA, 22 bp, synthetic construct
  misc_feature 1..22: note = chemically synthesized
  source 1..22: mol_type = other DNA
gatttttcagatacaaatatcc

SEQ ID NO: 149588 - DNA, 22 bp, synthetic construct
  misc_feature 1..22: note = chemically synthesized
  source 1..22: mol_type = other DNA
atttttcagatacaaatatcca

SEQ ID NO: 149589 - DNA, 22 bp, synthetic construct
  misc_feature 1..22: note = chemically synthesized
  source 1..22: mol_type = other DNA
ttcagatacaaatatccatttg

SEQ ID NO: 149590 - DNA, 22 bp, synthetic construct
  misc_feature 1..22: note = chemically synthesized
  source 1..22: mol_type = other DNA
tcagatacaaatatccatttga

SEQ ID NO: 149591 - DNA, 22 bp, synthetic construct
  misc_feature 1..22: note = chemically synthesized
  source 1..22: mol_type = other DNA
cagatacaaatatccatttgac

SEQ ID NO: 149592 - DNA, 22 bp, synthetic construct
  misc_feature 1..22: note = chemically synthesized
  source 1..22: mol_type = other DNA
agatacaaatatccatttgact

SEQ ID NO: 149593 - DNA, 22 bp, synthetic construct
  misc_feature 1..22: note = chemically synthesized
  source 1..22: mol_type = other DNA
gactgtttactcttttccaaaa

SEQ ID NO: 149594 - DNA, 22 bp, synthetic construct
  misc_feature 1..22: note = chemically synthesized
  source 1..22: mol_type = other DNA
actgtttactcttttccaaaac

SEQ ID NO: 149595 - DNA, 22 bp, synthetic construct
  misc_feature 1..22: note = chemically synthesized
  source 1..22: mol_type = other DNA
tttactcttttccaaaacaata

SEQ ID NO: 149596 - DNA, 22 bp, synthetic construct
  misc_feature 1..22: note = chemically synthesized
  source 1..22: mol_type = other DNA
actcttttccaaaacaatacaa

SEQ ID NO: 149597 - DNA, 22 bp, synthetic construct
  misc_feature 1..22: note = chemically synthesized
  source 1..22: mol_type = other DNA
ctcttttccaaaacaatacaat

SEQ ID NO: 149598 - DNA, 22 bp, synthetic construct
  misc_feature 1..22: note = chemically synthesized
  source 1..22: mol_type = other DNA
ttttccaaaacaatacaataaa

SEQ ID NO: 149599 - DNA, 22 bp, synthetic construct
  misc_feature 1..22: note = chemically synthesized
  source 1..22: mol_type = other DNA
ttccaaaacaatacaataaatt

SEQ ID NO: 149600 - DNA, 22 bp, synthetic construct
  misc_feature 1..22: note = chemically synthesized
  source 1..22: mol_type = other DNA
tccaaaacaatacaataaattt

SEQ ID NO: 149601 - DNA, 22 bp, synthetic construct
  misc_feature 1..22: note = chemically synthesized
  source 1..22: mol_type = other DNA
ccaaaacaatacaataaatttt

SEQ ID NO: 149602 - DNA, 22 bp, synthetic construct
  misc_feature 1..22: note = chemically synthesized
  source 1..22: mol_type = other DNA
caaaacaatacaataaatttta

SEQ ID NO: 149603 - DNA, 22 bp, synthetic construct
  misc_feature 1..22: note = chemically synthesized
  source 1..22: mol_type = other DNA
tagcactttatcttcattttcc

SEQ ID NO: 149604 - DNA, 22 bp, synthetic construct
  misc_feature 1..22: note = chemically synthesized
  source 1..22: mol_type = other DNA
agcactttatcttcattttccc

SEQ ID NO: 149605 - DNA, 22 bp, synthetic construct
  misc_feature 1..22: note = chemically synthesized
  source 1..22: mol_type = other DNA
gcactttatcttcattttcccc

SEQ ID NO: 149606 - DNA, 22 bp, synthetic construct
  misc_feature 1..22: note = chemically synthesized
  source 1..22: mol_type = other DNA
tatcttcattttccccttccca

SEQ ID NO: 149607 - DNA, 22 bp, synthetic construct
  misc_feature 1..22: note = chemically synthesized
  source 1..22: mol_type = other DNA
atcttcattttccccttcccaa

SEQ ID NO: 149608 - DNA, 22 bp, synthetic construct
  misc_feature 1..22: note = chemically synthesized
  source 1..22: mol_type = other DNA
tcttcattttccccttcccaat

SEQ ID NO: 149609 - DNA, 22 bp, synthetic construct
  misc_feature 1..22: note = chemically synthesized
  source 1..22: mol_type = other DNA
cattttccccttcccaatctat

SEQ ID NO: 149610 - DNA, 22 bp, synthetic construct
  misc_feature 1..22: note = chemically synthesized
  source 1..22: mol_type = other DNA
attttccccttcccaatctata

SEQ ID NO: 149611 - DNA, 22 bp, synthetic construct
  misc_feature 1..22: note = chemically synthesized
  source 1..22: mol_type = other DNA
tccccttcccaatctataatta

SEQ ID NO: 149612 - DNA, 22 bp, synthetic construct
  misc_feature 1..22: note = chemically synthesized
  source 1..22: mol_type = other DNA
ccccttcccaatctataattat

SEQ ID NO: 149613 - DNA, 22 bp, synthetic construct
  misc_feature 1..22: note = chemically synthesized
  source 1..22: mol_type = other DNA
cccttcccaatctataattata

SEQ ID NO: 149614 - DNA, 22 bp, synthetic construct
  misc_feature 1..22: note = chemically synthesized
  source 1..22: mol_type = other DNA
cccaatctataattatatatat

SEQ ID NO: 149615 - DNA, 22 bp, synthetic construct
  misc_feature 1..22: note = chemically synthesized
  source 1..22: mol_type = other DNA
ccaatctataattatatatata

SEQ ID NO: 149616 - DNA, 22 bp, synthetic construct
  misc_feature 1..22: note = chemically synthesized
  source 1..22: mol_type = other DNA
taattatatatatatatatttt

SEQ ID NO: 149617 - DNA, 22 bp, synthetic construct
  misc_feature 1..22: note = chemically synthesized
  source 1..22: mol_type = other DNA
tatatatatatattttagatat

SEQ ID NO: 149618 - DNA, 22 bp, synthetic construct
  misc_feature 1..22: note = chemically synthesized
  source 1..22: mol_type = other DNA
tagatattttgtatagttttac

SEQ ID NO: 149619 - DNA, 22 bp, synthetic construct
  misc_feature 1..22: note = chemically synthesized
  source 1..22: mol_type = other DNA
agatattttgtatagttttact

SEQ ID NO: 149620 - DNA, 22 bp, synthetic construct
  misc_feature 1..22: note = chemically synthesized
  source 1..22: mol_type = other DNA
gatattttgtatagttttactc

SEQ ID NO: 149621 - DNA, 22 bp, synthetic construct
  misc_feature 1..22: note = chemically synthesized
  source 1..22: mol_type = other DNA
tgtatagttttactccctagat

SEQ ID NO: 149622 - DNA, 22 bp, synthetic construct
  misc_feature 1..22: note = chemically synthesized
  source 1..22: mol_type = other DNA
gtatagttttactccctagatt

SEQ ID NO: 149623 - DNA, 22 bp, synthetic construct
  misc_feature 1..22: note = chemically synthesized
  source 1..22: mol_type = other DNA
tatagttttactccctagattt

SEQ ID NO: 149624 - DNA, 22 bp, synthetic construct
  misc_feature 1..22: note = chemically synthesized
  source 1..22: mol_type = other DNA
tactccctagattttctagtgt

SEQ ID NO: 149625 - DNA, 22 bp, synthetic construct
  misc_feature 1..22: note = chemically synthesized
  source 1..22: mol_type = other DNA
actccctagattttctagtgtt

SEQ ID NO: 149626 - DNA, 22 bp, synthetic construct
  misc_feature 1..22: note = chemically synthesized
  source 1..22: mol_type = other DNA
ctccctagattttctagtgtta

SEQ ID NO: 149627 - DNA, 22 bp, synthetic construct
  misc_feature 1..22: note = chemically synthesized
  source 1..22: mol_type = other DNA
cctagattttctagtgttatta

SEQ ID NO: 149628 - DNA, 22 bp, synthetic construct
  misc_feature 1..22: note = chemically synthesized
  source 1..22: mol_type = other DNA
gattttctagtgttattattaa

SEQ ID NO: 149629 - DNA, 22 bp, synthetic construct
  misc_feature 1..22: note = chemically synthesized
  source 1..22: mol_type = other DNA
tctagtgttattattaaatagt

SEQ ID NO: 149630 - DNA, 22 bp, synthetic construct
  misc_feature 1..22: note = chemically synthesized
  source 1..22: mol_type = other DNA
ctagtgttattattaaatagtg

SEQ ID NO: 149631 - DNA, 22 bp, synthetic construct
  misc_feature 1..22: note = chemically synthesized
  source 1..22: mol_type = other DNA
tagtgttattattaaatagtga

SEQ ID NO: 149632 - DNA, 22 bp, synthetic construct
  misc_feature 1..22: note = chemically synthesized
  source 1..22: mol_type = other DNA
gtgttattattaaatagtgaag

SEQ ID NO: 149633 - DNA, 22 bp, synthetic construct
  misc_feature 1..22: note = chemically synthesized
  source 1..22: mol_type = other DNA
ttattaaatagtgaagaaatgt

SEQ ID NO: 149634 - DNA, 22 bp, synthetic construct
  misc_feature 1..22: note = chemically synthesized
  source 1..22: mol_type = other DNA
ttaaatagtgaagaaatgttta

SEQ ID NO: 149635 - DNA, 22 bp, synthetic construct
  misc_feature 1..22: note = chemically synthesized
  source 1..22: mol_type = other DNA
aatagtgaagaaatgtttacac

SEQ ID NO: 149636 - DNA, 22 bp, synthetic construct
  misc_feature 1..22: note = chemically synthesized
  source 1..22: mol_type = other DNA
acacttatgtacaaaatgtttt

SEQ ID NO: 149637 - DNA, 22 bp, synthetic construct
  misc_feature 1..22: note = chemically synthesized
  source 1..22: mol_type = other DNA
cacttatgtacaaaatgttttg

SEQ ID NO: 149638 - DNA, 22 bp, synthetic construct
  misc_feature 1..22: note = chemically synthesized
  source 1..22: mol_type = other DNA
atgtacaaaatgttttgcatgc

SEQ ID NO: 149639 - DNA, 22 bp, synthetic construct
  misc_feature 1..22: note = chemically synthesized
  source 1..22: mol_type = other DNA
tgtacaaaatgttttgcatgct

SEQ ID NO: 149640 - DNA, 22 bp, synthetic construct
  misc_feature 1..22: note = chemically synthesized
  source 1..22: mol_type = other DNA
tgcatgcttttcttcatttcta

SEQ ID NO: 149641 - DNA, 22 bp, synthetic construct
  misc_feature 1..22: note = chemically synthesized
  source 1..22: mol_type = other DNA
gcatgcttttcttcatttctaa

SEQ ID NO: 149642 - DNA, 22 bp, synthetic construct
  misc_feature 1..22: note = chemically synthesized
  source 1..22: mol_type = other DNA
catgcttttcttcatttctaac

SEQ ID NO: 149643 - DNA, 22 bp, synthetic construct
  misc_feature 1..22: note = chemically synthesized
  source 1..22: mol_type = other DNA
ttcttcatttctaacattctct

SEQ ID NO: 149644 - DNA, 22 bp, synthetic construct
  misc_feature 1..22: note = chemically synthesized
  source 1..22: mol_type = other DNA
tcttcatttctaacattctctc

SEQ ID NO: 149645 - DNA, 22 bp, synthetic construct
  misc_feature 1..22: note = chemically synthesized
  source 1..22: mol_type = other DNA
cttcatttctaacattctctct

SEQ ID NO: 149646 - DNA, 22 bp, synthetic construct
  misc_feature 1..22: note = chemically synthesized
  source 1..22: mol_type = other DNA
ttcatttctaacattctctcta

SEQ ID NO: 149647 - DNA, 22 bp, synthetic construct
  misc_feature 1..22: note = chemically synthesized
  source 1..22: mol_type = other DNA
catttctaacattctctctaag

SEQ ID NO: 149648 - DNA, 22 bp, synthetic construct
  misc_feature 1..22: note = chemically synthesized
  source 1..22: mol_type = other DNA
atttctaacattctctctaagt

SEQ ID NO: 149649 - DNA, 22 bp, synthetic construct
  misc_feature 1..22: note = chemically synthesized
  source 1..22: mol_type = other DNA
ctaacattctctctaagtttat

SEQ ID NO: 149650 - DNA, 22 bp, synthetic construct
  misc_feature 1..22: note = chemically synthesized
  source 1..22: mol_type = other DNA
taacattctctctaagtttatt

SEQ ID NO: 149651 - DNA, 22 bp, synthetic construct
  misc_feature 1..22: note = chemically synthesized
  source 1..22: mol_type = other DNA
acattctctctaagtttattct

SEQ ID NO: 149652 - DNA, 22 bp, synthetic construct
  misc_feature 1..22: note = chemically synthesized
  source 1..22: mol_type = other DNA
tctctaagtttattctattttt

SEQ ID NO: 149653 - DNA, 22 bp, synthetic construct
  misc_feature 1..22: note = chemically synthesized
  source 1..22: mol_type = other DNA
tctaagtttattctattttttt

SEQ ID NO: 149654 - DNA, 22 bp, synthetic construct
  misc_feature 1..22: note = chemically synthesized
  source 1..22: mol_type = other DNA
taagtttattctatttttttct

SEQ ID NO: 149655 - DNA, 22 bp, synthetic construct
  misc_feature 1..22: note = chemically synthesized
  source 1..22: mol_type = other DNA
agtttattctatttttttctga

SEQ ID NO: 149656 - DNA, 22 bp, synthetic construct
  misc_feature 1..22: note = chemically synthesized
  source 1..22: mol_type = other DNA
attctatttttttctgattatc

SEQ ID NO: 149657 - DNA, 22 bp, synthetic construct
  misc_feature 1..22: note = chemically synthesized
  source 1..22: mol_type = other DNA
ttctatttttttctgattatcc

SEQ ID NO: 149658 - DNA, 22 bp, synthetic construct
  misc_feature 1..22: note = chemically synthesized
  source 1..22: mol_type = other DNA
tatttttttctgattatcctta

SEQ ID NO: 149659 - DNA, 22 bp, synthetic construct
  misc_feature 1..22: note = chemically synthesized
  source 1..22: mol_type = other DNA
tttttttctgattatccttaat

SEQ ID NO: 149660 - DNA, 22 bp, synthetic construct
  misc_feature 1..22: note = chemically synthesized
  source 1..22: mol_type = other DNA
ttttctgattatccttaatatt

SEQ ID NO: 149661 - DNA, 22 bp, synthetic construct
  misc_feature 1..22: note = chemically synthesized
  source 1..22: mol_type = other DNA
tttctgattatccttaatatta

SEQ ID NO: 149662 - DNA, 22 bp, synthetic construct
  misc_feature 1..22: note = chemically synthesized
  source 1..22: mol_type = other DNA
ttctgattatccttaatattat

SEQ ID NO: 149663 - DNA, 22 bp, synthetic construct
  misc_feature 1..22: note = chemically synthesized
  source 1..22: mol_type = other DNA
tctgattatccttaatattatc

SEQ ID NO: 149664 - DNA, 22 bp, synthetic construct
  misc_feature 1..22: note = chemically synthesized
  source 1..22: mol_type = other DNA
ctgattatccttaatattatct

SEQ ID NO: 149665 - DNA, 22 bp, synthetic construct
  misc_feature 1..22: note = chemically synthesized
  source 1..22: mol_type = other DNA
tgattatccttaatattatctc

SEQ ID NO: 149666 - DNA, 22 bp, synthetic construct
  misc_feature 1..22: note = chemically synthesized
  source 1..22: mol_type = other DNA
attatccttaatattatctctt

SEQ ID NO: 149667 - DNA, 22 bp, synthetic construct
  misc_feature 1..22: note = chemically synthesized
  source 1..22: mol_type = other DNA
tccttaatattatctctttctg

SEQ ID NO: 149668 - DNA, 22 bp, synthetic construct
  misc_feature 1..22: note = chemically synthesized
  source 1..22: mol_type = other DNA
aatattatctctttctgctgga

SEQ ID NO: 149669 - DNA, 22 bp, synthetic construct
  misc_feature 1..22: note = chemically synthesized
  source 1..22: mol_type = other DNA
atattatctctttctgctggaa

SEQ ID NO: 149670 - DNA, 22 bp, synthetic construct
  misc_feature 1..22: note = chemically synthesized
  source 1..22: mol_type = other DNA
tctctttctgctggaaatacat

SEQ ID NO: 149671 - DNA, 22 bp, synthetic construct
  misc_feature 1..22: note = chemically synthesized
  source 1..22: mol_type = other DNA
tttctgctggaaatacattgtt

SEQ ID NO: 149672 - DNA, 22 bp, synthetic construct
  misc_feature 1..22: note = chemically synthesized
  source 1..22: mol_type = other DNA
tctgctggaaatacattgttac

SEQ ID NO: 149673 - DNA, 22 bp, synthetic construct
  misc_feature 1..22: note = chemically synthesized
  source 1..22: mol_type = other DNA
ctgctggaaatacattgttact

SEQ ID NO: 149674 - DNA, 22 bp, synthetic construct
  misc_feature 1..22: note = chemically synthesized
  source 1..22: mol_type = other DNA
tgctggaaatacattgttactt

SEQ ID NO: 149675 - DNA, 22 bp, synthetic construct
  misc_feature 1..22: note = chemically synthesized
  source 1..22: mol_type = other DNA
ctggaaatacattgttactttt

SEQ ID NO: 149676 - DNA, 22 bp, synthetic construct
  misc_feature 1..22: note = chemically synthesized
  source 1..22: mol_type = other DNA
gaaatacattgttacttttggt

SEQ ID NO: 149677 - DNA, 22 bp, synthetic construct
  misc_feature 1..22: note = chemically synthesized
  source 1..22: mol_type = other DNA
ttacttttggtttatctaaaaa

SEQ ID NO: 149678 - DNA, 22 bp, synthetic construct
  misc_feature 1..22: note = chemically synthesized
  source 1..22: mol_type = other DNA
cttttggtttatctaaaaatgg

SEQ ID NO: 149679 - DNA, 22 bp, synthetic construct
  misc_feature 1..22: note = chemically synthesized
  source 1..22: mol_type = other DNA
ttggtttatctaaaaatggctt

SEQ ID NO: 149680 - DNA, 22 bp, synthetic construct
  misc_feature 1..22: note = chemically synthesized
  source 1..22: mol_type = other DNA
tggtttatctaaaaatggcttc

SEQ ID NO: 149681 - DNA, 22 bp, synthetic construct
  misc_feature 1..22: note = chemically synthesized
  source 1..22: mol_type = other DNA
ggtttatctaaaaatggcttca

SEQ ID NO: 149682 - DNA, 22 bp, synthetic construct
  misc_feature 1..22: note = chemically synthesized
  source 1..22: mol_type = other DNA
gtttatctaaaaatggcttcat

SEQ ID NO: 149683 - DNA, 22 bp, synthetic construct
  misc_feature 1..22: note = chemically synthesized
  source 1..22: mol_type = other DNA
atctaaaaatggcttcattttc

SEQ ID NO: 149684 - DNA, 22 bp, synthetic construct
  misc_feature 1..22: note = chemically synthesized
  source 1..22: mol_type = other DNA
tctaaaaatggcttcattttct

SEQ ID NO: 149685 - DNA, 22 bp, synthetic construct
  misc_feature 1..22: note = chemically synthesized
  source 1..22: mol_type = other DNA
aaaatggcttcattttcttcat

SEQ ID NO: 149686 - DNA, 22 bp, synthetic construct
  misc_feature 1..22: note = chemically synthesized
  source 1..22: mol_type = other DNA
cattttcttcattctaaaatca

SEQ ID NO: 149687 - DNA, 22 bp, synthetic construct
  misc_feature 1..22: note = chemically synthesized
  source 1..22: mol_type = other DNA
attttcttcattctaaaatcat

SEQ ID NO: 149688 - DNA, 22 bp, synthetic construct
  misc_feature 1..22: note = chemically synthesized
  source 1..22: mol_type = other DNA
tcttcattctaaaatcatgtta

SEQ ID NO: 149689 - DNA, 22 bp, synthetic construct
  misc_feature 1..22: note = chemically synthesized
  source 1..22: mol_type = other DNA
cttcattctaaaatcatgttaa

SEQ ID NO: 149690 - DNA, 22 bp, synthetic construct
  misc_feature 1..22: note = chemically synthesized
  source 1..22: mol_type = other DNA
ttcattctaaaatcatgttaaa

SEQ ID NO: 149691 - DNA, 22 bp, synthetic construct
  misc_feature 1..22: note = chemically synthesized
  source 1..22: mol_type = other DNA
cattctaaaatcatgttaaatt

SEQ ID NO: 149692 - DNA, 22 bp, synthetic construct
  misc_feature 1..22: note = chemically synthesized
  source 1..22: mol_type = other DNA
attctaaaatcatgttaaatta

SEQ ID NO: 149693 - DNA, 22 bp, synthetic construct
  misc_feature 1..22: note = chemically synthesized
  source 1..22: mol_type = other DNA
taaaatcatgttaaattaatac

SEQ ID NO: 149694 - DNA, 22 bp, synthetic construct
  misc_feature 1..22: note = chemically synthesized
  source 1..22: mol_type = other DNA
aaatcatgttaaattaatacca

SEQ ID NO: 149695 - DNA, 22 bp, synthetic construct
  misc_feature 1..22: note = chemically synthesized
  source 1..22: mol_type = other DNA
aattaataccactcatgtgtaa

SEQ ID NO: 149696 - DNA, 22 bp, synthetic construct
  misc_feature 1..22: note = chemically synthesized
  source 1..22: mol_type = other DNA
ataccactcatgtgtaagtaag

SEQ ID NO: 149697 - DNA, 22 bp, synthetic construct
  misc_feature 1..22: note = chemically synthesized
  source 1..22: mol_type = other DNA
atgtgtaagtaagatagtggaa

SEQ ID NO: 149698 - DNA, 22 bp, synthetic construct
  misc_feature 1..22: note = chemically synthesized
  source 1..22: mol_type = other DNA
aatctcactaaaatataataat

SEQ ID NO: 149699 - DNA, 22 bp, synthetic construct
  misc_feature 1..22: note = chemically synthesized
  source 1..22: mol_type = other DNA
actaaaatataataatgtgata

SEQ ID NO: 149700 - DNA, 22 bp, synthetic construct
  misc_feature 1..22: note = chemically synthesized
  source 1..22: mol_type = other DNA
aaatataataatgtgatatata

SEQ ID NO: 149701 - DNA, 22 bp, synthetic construct
  misc_feature 1..22: note = chemically synthesized
  source 1..22: mol_type = other DNA
ttaaatttagcttggaaataaa

SEQ ID NO: 149702 - DNA, 22 bp, synthetic construct
  misc_feature 1..22: note = chemically synthesized
  source 1..22: mol_type = other DNA
taaatttagcttggaaataaaa

SEQ ID NO: 149703 - DNA, 22 bp, synthetic construct
  misc_feature 1..22: note = chemically synthesized
  source 1..22: mol_type = other DNA
aaatttagcttggaaataaaaa

SEQ ID NO: 149704 - DNA, 22 bp, synthetic construct
  misc_feature 1..22: note = chemically synthesized
  source 1..22: mol_type = other DNA
aatttagcttggaaataaaaaa

SEQ ID NO: 149705 - DNA, 22 bp, synthetic construct
  misc_feature 1..22: note = chemically synthesized
  source 1..22: mol_type = other DNA
agcttggaaataaaaaacaaac

SEQ ID NO: 149706 - DNA, 22 bp, synthetic construct
  misc_feature 1..22: note = chemically synthesized
  source 1..22: mol_type = other DNA
gcttggaaataaaaaacaaaca

SEQ ID NO: 149707 - DNA, 22 bp, synthetic construct
  misc_feature 1..22: note = chemically synthesized
  source 1..22: mol_type = other DNA
ggaaataaaaaacaaacagtaa

SEQ ID NO: 149708 - DNA, 22 bp, synthetic construct
  misc_feature 1..22: note = chemically synthesized
  source 1..22: mol_type = other DNA
gaaataaaaaacaaacagtaat

SEQ ID NO: 149709 - DNA, 22 bp, synthetic construct
  misc_feature 1..22: note = chemically synthesized
  source 1..22: mol_type = other DNA
aacaactatactttttgaaaag

SEQ ID NO: 149710 - DNA, 22 bp, synthetic construct
  misc_feature 1..22: note = chemically synthesized
  source 1..22: mol_type = other DNA
tactttttgaaaagagtaaagt

SEQ ID NO: 149711 - DNA, 22 bp, synthetic construct
  misc_feature 1..22: note = chemically synthesized
  source 1..22: mol_type = other DNA
tttgaaaagagtaaagtgaaat

SEQ ID NO: 149712 - DNA, 22 bp, synthetic construct
  misc_feature 1..22: note = chemically synthesized
  source 1..22: mol_type = other DNA
ttgaaaagagtaaagtgaaatg

SEQ ID NO: 149713 - DNA, 22 bp, synthetic construct
  misc_feature 1..22: note = chemically synthesized
  source 1..22: mol_type = other DNA
tgaaaagagtaaagtgaaatgc

SEQ ID NO: 149714 - DNA, 22 bp, synthetic construct
  misc_feature 1..22: note = chemically synthesized
  source 1..22: mol_type = other DNA
gaaaagagtaaagtgaaatgct

SEQ ID NO: 149715 - DNA, 22 bp, synthetic construct
  misc_feature 1..22: note = chemically synthesized
  source 1..22: mol_type = other DNA
aaaagagtaaagtgaaatgctt

SEQ ID NO: 149716 - DNA, 22 bp, synthetic construct
  misc_feature 1..22: note = chemically synthesized
  source 1..22: mol_type = other DNA
aactgcatataccacaatcgat

SEQ ID NO: 149717 - DNA, 22 bp, synthetic construct
  misc_feature 1..22: note = chemically synthesized
  source 1..22: mol_type = other DNA
actgcatataccacaatcgatt

SEQ ID NO: 149718 - DNA, 22 bp, synthetic construct
  misc_feature 1..22: note = chemically synthesized
  source 1..22: mol_type = other DNA
catataccacaatcgattacac

SEQ ID NO: 149719 - DNA, 22 bp, synthetic construct
  misc_feature 1..22: note = chemically synthesized
  source 1..22: mol_type = other DNA
cacaattaggtgtgaaggtaaa

SEQ ID NO: 149720 - DNA, 22 bp, synthetic construct
  misc_feature 1..22: note = chemically synthesized
  source 1..22: mol_type = other DNA
ggtgtgaaggtaaaattcagtc

SEQ ID NO: 149721 - DNA, 22 bp, synthetic construct
  misc_feature 1..22: note = chemically synthesized
  source 1..22: mol_type = other DNA
agtcacgaaaaaactagaataa

SEQ ID NO: 149722 - DNA, 22 bp, synthetic construct
  misc_feature 1..22: note = chemically synthesized
  source 1..22: mol_type = other DNA
gaataaaaatatgggaagacat

SEQ ID NO: 149723 - DNA, 22 bp, synthetic construct
  misc_feature 1..22: note = chemically synthesized
  source 1..22: mol_type = other DNA
agagataacactgttatttaat

SEQ ID NO: 149724 - DNA, 22 bp, synthetic construct
  misc_feature 1..22: note = chemically synthesized
  source 1..22: mol_type = other DNA
gagataacactgttatttaatt

SEQ ID NO: 149725 - DNA, 22 bp, synthetic construct
  misc_feature 1..22: note = chemically synthesized
  source 1..22: mol_type = other DNA
ttatttaattatcaacccaaag

SEQ ID NO: 149726 - DNA, 22 bp, synthetic construct
  misc_feature 1..22: note = chemically synthesized
  source 1..22: mol_type = other DNA
tttaattatcaacccaaagtag

SEQ ID NO: 149727 - DNA, 22 bp, synthetic construct
  misc_feature 1..22: note = chemically synthesized
  source 1..22: mol_type = other DNA
aattatcaacccaaagtagaaa

SEQ ID NO: 149728 - DNA, 22 bp, synthetic construct
  misc_feature 1..22: note = chemically synthesized
  source 1..22: mol_type = other DNA
attatcaacccaaagtagaaac

SEQ ID NO: 149729 - DNA, 22 bp, synthetic construct
  misc_feature 1..22: note = chemically synthesized
  source 1..22: mol_type = other DNA
tcaacccaaagtagaaactatc

SEQ ID NO: 149730 - DNA, 22 bp, synthetic construct
  misc_feature 1..22: note = chemically synthesized
  source 1..22: mol_type = other DNA
tcaagggagaaataaattcagt

SEQ ID NO: 149731 - DNA, 22 bp, synthetic construct
  misc_feature 1..22: note = chemically synthesized
  source 1..22: mol_type = other DNA
agtcaacaataaaagcatttaa

SEQ ID NO: 149732 - DNA, 22 bp, synthetic construct
  misc_feature 1..22: note = chemically synthesized
  source 1..22: mol_type = other DNA
aagaagttattctaggctggga

SEQ ID NO: 149733 - DNA, 22 bp, synthetic construct
  misc_feature 1..22: note = chemically synthesized
  source 1..22: mol_type = other DNA
agaagttattctaggctgggag

SEQ ID NO: 149734 - DNA, 22 bp, synthetic construct
  misc_feature 1..22: note = chemically synthesized
  source 1..22: mol_type = other DNA
ttctaggctgggagcggtggct

SEQ ID NO: 149735 - DNA, 22 bp, synthetic construct
  misc_feature 1..22: note = chemically synthesized
  source 1..22: mol_type = other DNA
taggctgggagcggtggctcac

SEQ ID NO: 149736 - DNA, 22 bp, synthetic construct
  misc_feature 1..22: note = chemically synthesized
  source 1..22: mol_type = other DNA
ggctgggagcggtggctcacac

SEQ ID NO: 149737 - DNA, 22 bp, synthetic construct
  misc_feature 1..22: note = chemically synthesized
  source 1..22: mol_type = other DNA
ggagcggtggctcacacctgca

SEQ ID NO: 149738 - DNA, 22 bp, synthetic construct
  misc_feature 1..22: note = chemically synthesized
  source 1..22: mol_type = other DNA
acacctgcaattgcagcacttt

SEQ ID NO: 149739 - DNA, 22 bp, synthetic construct
  misc_feature 1..22: note = chemically synthesized
  source 1..22: mol_type = other DNA
caattgcagcactttgggaggc

SEQ ID NO: 149740 - DNA, 22 bp, synthetic construct
  misc_feature 1..22: note = chemically synthesized
  source 1..22: mol_type = other DNA
cagcactttgggaggcctagac

SEQ ID NO: 149741 - DNA, 22 bp, synthetic construct
  misc_feature 1..22: note = chemically synthesized
  source 1..22: mol_type = other DNA
tgggaggcctagacaggcggat

SEQ ID NO: 149742 - DNA, 22 bp, synthetic construct
  misc_feature 1..22: note = chemically synthesized
  source 1..22: mol_type = other DNA
gggaggcctagacaggcggatc

SEQ ID NO: 149743 - DNA, 22 bp, synthetic construct
  misc_feature 1..22: note = chemically synthesized
  source 1..22: mol_type = other DNA
ggaggcctagacaggcggatca

SEQ ID NO: 149744 - DNA, 22 bp, synthetic construct
  misc_feature 1..22: note = chemically synthesized
  source 1..22: mol_type = other DNA
gacaggcggatcacgacgtcag

SEQ ID NO: 149745 - DNA, 22 bp, synthetic construct
  misc_feature 1..22: note = chemically synthesized
  source 1..22: mol_type = other DNA
aagatcagcctggccaacatag

SEQ ID NO: 149746 - DNA, 22 bp, synthetic construct
  misc_feature 1..22: note = chemically synthesized
  source 1..22: mol_type = other DNA
gccaacatagtgaaacctcatc

SEQ ID NO: 149747 - DNA, 22 bp, synthetic construct
  misc_feature 1..22: note = chemically synthesized
  source 1..22: mol_type = other DNA
atcgctactaaaaatataaaaa

SEQ ID NO: 149748 - DNA, 22 bp, synthetic construct
  misc_feature 1..22: note = chemically synthesized
  source 1..22: mol_type = other DNA
ctaaaaatataaaaacttagcc

SEQ ID NO: 149749 - DNA, 22 bp, synthetic construct
  misc_feature 1..22: note = chemically synthesized
  source 1..22: mol_type = other DNA
aaaatataaaaacttagcctgg

SEQ ID NO: 149750 - DNA, 22 bp, synthetic construct
  misc_feature 1..22: note = chemically synthesized
  source 1..22: mol_type = other DNA
agcctggcgtggtggcaggcat

SEQ ID NO: 149751 - DNA, 22 bp, synthetic construct
  misc_feature 1..22: note = chemically synthesized
  source 1..22: mol_type = other DNA
gcctggcgtggtggcaggcatg

SEQ ID NO: 149752 - DNA, 22 bp, synthetic construct
  misc_feature 1..22: note = chemically synthesized
  source 1..22: mol_type = other DNA
gcgtggtggcaggcatgtgtaa

SEQ ID NO: 149753 - DNA, 22 bp, synthetic construct
  misc_feature 1..22: note = chemically synthesized
  source 1..22: mol_type = other DNA
gggaggctgaggcaggagaatc

SEQ ID NO: 149754 - DNA, 22 bp, synthetic construct
  misc_feature 1..22: note = chemically synthesized
  source 1..22: mol_type = other DNA
ggaggctgaggcaggagaatcg

SEQ ID NO: 149755 - DNA, 22 bp, synthetic construct
  misc_feature 1..22: note = chemically synthesized
  source 1..22: mol_type = other DNA
aggcaggagaatcgcttgatcc

SEQ ID NO: 149756 - DNA, 22 bp, synthetic construct
  misc_feature 1..22: note = chemically synthesized
  source 1..22: mol_type = other DNA
gatcctgggaggcagaggttgc

SEQ ID NO: 149757 - DNA, 22 bp, synthetic construct
  misc_feature 1..22: note = chemically synthesized
  source 1..22: mol_type = other DNA
atcctgggaggcagaggttgca

SEQ ID NO: 149758 - DNA, 22 bp, synthetic construct
  misc_feature 1..22: note = chemically synthesized
  source 1..22: mol_type = other DNA
ggaggcagaggttgcagtgagc

SEQ ID NO: 149759 - DNA, 22 bp, synthetic construct
  misc_feature 1..22: note = chemically synthesized
  source 1..22: mol_type = other DNA
cagtgagccaagattgtgccac

SEQ ID NO: 149760 - DNA, 22 bp, synthetic construct
  misc_feature 1..22: note = chemically synthesized
  source 1..22: mol_type = other DNA
tgccactgcattccagcccagg

SEQ ID NO: 149761 - DNA, 22 bp, synthetic construct
  misc_feature 1..22: note = chemically synthesized
  source 1..22: mol_type = other DNA
cattccagcccaggtgacagca

SEQ ID NO: 149762 - DNA, 22 bp, synthetic construct
  misc_feature 1..22: note = chemically synthesized
  source 1..22: mol_type = other DNA
cagcccaggtgacagcatgaga

SEQ ID NO: 149763 - DNA, 22 bp, synthetic construct
  misc_feature 1..22: note = chemically synthesized
  source 1..22: mol_type = other DNA
cgtcacaaaaaaaaaagaaaaa

SEQ ID NO: 149764 - DNA, 22 bp, synthetic construct
  misc_feature 1..22: note = chemically synthesized
  source 1..22: mol_type = other DNA
cagtctatagctcccatcgtga

SEQ ID NO: 149765 - DNA, 22 bp, synthetic construct
  misc_feature 1..22: note = chemically synthesized
  source 1..22: mol_type = other DNA
tagctcccatcgtgagtgacgc

SEQ ID NO: 149766 - DNA, 22 bp, synthetic construct
  misc_feature 1..22: note = chemically synthesized
  source 1..22: mol_type = other DNA
ccatcgtgagtgacgcagaaga

SEQ ID NO: 149767 - DNA, 22 bp, synthetic construct
  misc_feature 1..22: note = chemically synthesized
  source 1..22: mol_type = other DNA
ctgcatttccaactgaggtacc

SEQ ID NO: 149768 - DNA, 22 bp, synthetic construct
  misc_feature 1..22: note = chemically synthesized
  source 1..22: mol_type = other DNA
tgcatttccaactgaggtacca

SEQ ID NO: 149769 - DNA, 22 bp, synthetic construct
  misc_feature 1..22: note = chemically synthesized
  source 1..22: mol_type = other DNA
catttccaactgaggtaccagg

SEQ ID NO: 149770 - DNA, 22 bp, synthetic construct
  misc_feature 1..22: note = chemically synthesized
  source 1..22: mol_type = other DNA
ccaactgaggtaccaggttcat

SEQ ID NO: 149771 - DNA, 22 bp, synthetic construct
  misc_feature 1..22: note = chemically synthesized
  source 1..22: mol_type = other DNA
caactgaggtaccaggttcatc

SEQ ID NO: 149772 - DNA, 22 bp, synthetic construct
  misc_feature 1..22: note = chemically synthesized
  source 1..22: mol_type = other DNA
aggtaccaggttcatctcacag

SEQ ID NO: 149773 - DNA, 22 bp, synthetic construct
  misc_feature 1..22: note = chemically synthesized
  source 1..22: mol_type = other DNA
atctcacagggaagtgccaggc

SEQ ID NO: 149774 - DNA, 22 bp, synthetic construct
  misc_feature 1..22: note = chemically synthesized
  source 1..22: mol_type = other DNA
acagggaagtgccaggcagtgg

SEQ ID NO: 149775 - DNA, 22 bp, synthetic construct
  misc_feature 1..22: note = chemically synthesized
  source 1..22: mol_type = other DNA
tgcatgagccaaagcagggcga

SEQ ID NO: 149776 - DNA, 22 bp, synthetic construct
  misc_feature 1..22: note = chemically synthesized
  source 1..22: mol_type = other DNA
acccgggaagcacaaggggtca

SEQ ID NO: 149777 - DNA, 22 bp, synthetic construct
  misc_feature 1..22: note = chemically synthesized
  source 1..22: mol_type = other DNA
cctttcctagtcaaagaaaagg

SEQ ID NO: 149778 - DNA, 22 bp, synthetic construct
  misc_feature 1..22: note = chemically synthesized
  source 1..22: mol_type = other DNA
tcctagtcaaagaaaagggtga

SEQ ID NO: 149779 - DNA, 22 bp, synthetic construct
  misc_feature 1..22: note = chemically synthesized
  source 1..22: mol_type = other DNA
cctagtcaaagaaaagggtgac

SEQ ID NO: 149780 - DNA, 22 bp, synthetic construct
  misc_feature 1..22: note = chemically synthesized
  source 1..22: mol_type = other DNA
ctagtcaaagaaaagggtgaca

SEQ ID NO: 149781 - DNA, 22 bp, synthetic construct
  misc_feature 1..22: note = chemically synthesized
  source 1..22: mol_type = other DNA
gtcaaagaaaagggtgacagat

SEQ ID NO: 149782 - DNA, 22 bp, synthetic construct
  misc_feature 1..22: note = chemically synthesized
  source 1..22: mol_type = other DNA
gaaaatcgggtcactcccgccc

SEQ ID NO: 149783 - DNA, 22 bp, synthetic construct
  misc_feature 1..22: note = chemically synthesized
  source 1..22: mol_type = other DNA
ccgccctaatactgcgctcttc

SEQ ID NO: 149784 - DNA, 22 bp, synthetic construct
  misc_feature 1..22: note = chemically synthesized
  source 1..22: mol_type = other DNA
atactgcgctcttccaacaagc

SEQ ID NO: 149785 - DNA, 22 bp, synthetic construct
  misc_feature 1..22: note = chemically synthesized
  source 1..22: mol_type = other DNA
cgctcttccaacaagcttaaca

SEQ ID NO: 149786 - DNA, 22 bp, synthetic construct
  misc_feature 1..22: note = chemically synthesized
  source 1..22: mol_type = other DNA
ttccaacaagcttaacaaatgg

SEQ ID NO: 149787 - DNA, 22 bp, synthetic construct
  misc_feature 1..22: note = chemically synthesized
  source 1..22: mol_type = other DNA
ccaacaagcttaacaaatggca

SEQ ID NO: 149788 - DNA, 22 bp, synthetic construct
  misc_feature 1..22: note = chemically synthesized
  source 1..22: mol_type = other DNA
caacaagcttaacaaatggcac

SEQ ID NO: 149789 - DNA, 22 bp, synthetic construct
  misc_feature 1..22: note = chemically synthesized
  source 1..22: mol_type = other DNA
aacaaatggcacaccaggagat

SEQ ID NO: 149790 - DNA, 22 bp, synthetic construct
  misc_feature 1..22: note = chemically synthesized
  source 1..22: mol_type = other DNA
acaaatggcacaccaggagatt

SEQ ID NO: 149791 - DNA, 22 bp, synthetic construct
  misc_feature 1..22: note = chemically synthesized
  source 1..22: mol_type = other DNA
tatcccatgcctggctcagagg

SEQ ID NO: 149792 - DNA, 22 bp, synthetic construct
  misc_feature 1..22: note = chemically synthesized
  source 1..22: mol_type = other DNA
gctcagagggtcctacgcccat

SEQ ID NO: 149793 - DNA, 22 bp, synthetic construct
  misc_feature 1..22: note = chemically synthesized
  source 1..22: mol_type = other DNA
agagggtcctacgcccatggag

SEQ ID NO: 149794 - DNA, 22 bp, synthetic construct
  misc_feature 1..22: note = chemically synthesized
  source 1..22: mol_type = other DNA
cgcccatggagcctcgctcatt

SEQ ID NO: 149795 - DNA, 22 bp, synthetic construct
  misc_feature 1..22: note = chemically synthesized
  source 1..22: mol_type = other DNA
gctcattgctagcacagcagtc

SEQ ID NO: 149796 - DNA, 22 bp, synthetic construct
  misc_feature 1..22: note = chemically synthesized
  source 1..22: mol_type = other DNA
attgctagcacagcagtctgag

SEQ ID NO: 149797 - DNA, 22 bp, synthetic construct
  misc_feature 1..22: note = chemically synthesized
  source 1..22: mol_type = other DNA
ctagcacagcagtctgaggtca

SEQ ID NO: 149798 - DNA, 22 bp, synthetic construct
  misc_feature 1..22: note = chemically synthesized
  source 1..22: mol_type = other DNA
gcacagcagtctgaggtcaaac

SEQ ID NO: 149799 - DNA, 22 bp, synthetic construct
  misc_feature 1..22: note = chemically synthesized
  source 1..22: mol_type = other DNA
aggtcaaactgcaaggtggcag

SEQ ID NO: 149800 - DNA, 22 bp, synthetic construct
  misc_feature 1..22: note = chemically synthesized
  source 1..22: mol_type = other DNA
caaggtggcagtgaggctgggg

SEQ ID NO: 149801 - DNA, 22 bp, synthetic construct
  misc_feature 1..22: note = chemically synthesized
  source 1..22: mol_type = other DNA
ggggaggggtgcccaccattgt

SEQ ID NO: 149802 - DNA, 22 bp, synthetic construct
  misc_feature 1..22: note = chemically synthesized
  source 1..22: mol_type = other DNA
tccaggcttgagcaggtaaaca

SEQ ID NO: 149803 - DNA, 22 bp, synthetic construct
  misc_feature 1..22: note = chemically synthesized
  source 1..22: mol_type = other DNA
gagcaggtaaacaaagccgcct

SEQ ID NO: 149804 - DNA, 22 bp, synthetic construct
  misc_feature 1..22: note = chemically synthesized
  source 1..22: mol_type = other DNA
agcaggtaaacaaagccgcctg

SEQ ID NO: 149805 - DNA, 22 bp, synthetic construct
  misc_feature 1..22: note = chemically synthesized
  source 1..22: mol_type = other DNA
gaagctcgaactgggtggagcc

SEQ ID NO: 149806 - DNA, 22 bp, synthetic construct
  misc_feature 1..22: note = chemically synthesized
  source 1..22: mol_type = other DNA
gaactgggtggagcccaccaca

SEQ ID NO: 149807 - DNA, 22 bp, synthetic construct
  misc_feature 1..22: note = chemically synthesized
  source 1..22: mol_type = other DNA
ggtggagcccaccacagctcaa

SEQ ID NO: 149808 - DNA, 22 bp, synthetic construct
  misc_feature 1..22: note = chemically synthesized
  source 1..22: mol_type = other DNA
aaggaggcctgcctgcctctgt

SEQ ID NO: 149809 - DNA, 22 bp, synthetic construct
  misc_feature 1..22: note = chemically synthesized
  source 1..22: mol_type = other DNA
cctgcctctgtaggctccacct

SEQ ID NO: 149810 - DNA, 22 bp, synthetic construct
  misc_feature 1..22: note = chemically synthesized
  source 1..22: mol_type = other DNA
cctctgtaggctccacctctag

SEQ ID NO: 149811 - DNA, 22 bp, synthetic construct
  misc_feature 1..22: note = chemically synthesized
  source 1..22: mol_type = other DNA
tgtaggctccacctctaggggc

SEQ ID NO: 149812 - DNA, 22 bp, synthetic construct
  misc_feature 1..22: note = chemically synthesized
  source 1..22: mol_type = other DNA
taggctccacctctaggggcag

SEQ ID NO: 149813 - DNA, 22 bp, synthetic construct
  misc_feature 1..22: note = chemically synthesized
  source 1..22: mol_type = other DNA
cacctctaggggcagggcacag

SEQ ID NO: 149814 - DNA, 22 bp, synthetic construct
  misc_feature 1..22: note = chemically synthesized
  source 1..22: mol_type = other DNA
taggggcagggcacagacaaac

SEQ ID NO: 149815 - DNA, 22 bp, synthetic construct
  misc_feature 1..22: note = chemically synthesized
  source 1..22: mol_type = other DNA
ggggcagggcacagacaaacaa

SEQ ID NO: 149816 - DNA, 22 bp, synthetic construct
  misc_feature 1..22: note = chemically synthesized
  source 1..22: mol_type = other DNA
tgcagacttaaatgtccctgtc

SEQ ID NO: 149817 - DNA, 22 bp, synthetic construct
  misc_feature 1..22: note = chemically synthesized
  source 1..22: mol_type = other DNA
cagacttaaatgtccctgtctg

SEQ ID NO: 149818 - DNA, 22 bp, synthetic construct
  misc_feature 1..22: note = chemically synthesized
  source 1..22: mol_type = other DNA
aaatgtccctgtctgacagctt

SEQ ID NO: 149819 - DNA, 22 bp, synthetic construct
  misc_feature 1..22: note = chemically synthesized
  source 1..22: mol_type = other DNA
aatgtccctgtctgacagcttt

SEQ ID NO: 149820 - DNA, 22 bp, synthetic construct
  misc_feature 1..22: note = chemically synthesized
  source 1..22: mol_type = other DNA
tctgacagctttgaagagagta

SEQ ID NO: 149821 - DNA, 22 bp, synthetic construct
  misc_feature 1..22: note = chemically synthesized
  source 1..22: mol_type = other DNA
acagctttgaagagagtagtgg

SEQ ID NO: 149822 - DNA, 22 bp, synthetic construct
  misc_feature 1..22: note = chemically synthesized
  source 1..22: mol_type = other DNA
tgaagagagtagtggttctccc

SEQ ID NO: 149823 - DNA, 22 bp, synthetic construct
  misc_feature 1..22: note = chemically synthesized
  source 1..22: mol_type = other DNA
gaagagagtagtggttctccca

SEQ ID NO: 149824 - DNA, 22 bp, synthetic construct
  misc_feature 1..22: note = chemically synthesized
  source 1..22: mol_type = other DNA
aagagagtagtggttctcccag

SEQ ID NO: 149825 - DNA, 22 bp, synthetic construct
  misc_feature 1..22: note = chemically synthesized
  source 1..22: mol_type = other DNA
tcccagcacatagcttcagatc

SEQ ID NO: 149826 - DNA, 22 bp, synthetic construct
  misc_feature 1..22: note = chemically synthesized
  source 1..22: mol_type = other DNA
ccagcacatagcttcagatctg

SEQ ID NO: 149827 - DNA, 22 bp, synthetic construct
  misc_feature 1..22: note = chemically synthesized
  source 1..22: mol_type = other DNA
cagatctgagaacaggcagact

SEQ ID NO: 149828 - DNA, 22 bp, synthetic construct
  misc_feature 1..22: note = chemically synthesized
  source 1..22: mol_type = other DNA
agatctgagaacaggcagactg

SEQ ID NO: 149829 - DNA, 22 bp, synthetic construct
  misc_feature 1..22: note = chemically synthesized
  source 1..22: mol_type = other DNA
agaacaggcagactgcctcctc

SEQ ID NO: 149830 - DNA, 22 bp, synthetic construct
  misc_feature 1..22: note = chemically synthesized
  source 1..22: mol_type = other DNA
cctcctcaagtgggtccctgac

SEQ ID NO: 149831 - DNA, 22 bp, synthetic construct
  misc_feature 1..22: note = chemically synthesized
  source 1..22: mol_type = other DNA
ctcaagtgggtccctgaccccc

SEQ ID NO: 149832 - DNA, 22 bp, synthetic construct
  misc_feature 1..22: note = chemically synthesized
  source 1..22: mol_type = other DNA
aagtgggtccctgacccccgag

SEQ ID NO: 149833 - DNA, 22 bp, synthetic construct
  misc_feature 1..22: note = chemically synthesized
  source 1..22: mol_type = other DNA
acccccgagtagcctaactggg

SEQ ID NO: 149834 - DNA, 22 bp, synthetic construct
  misc_feature 1..22: note = chemically synthesized
  source 1..22: mol_type = other DNA
actgggaggcatcccccagtag

SEQ ID NO: 149835 - DNA, 22 bp, synthetic construct
  misc_feature 1..22: note = chemically synthesized
  source 1..22: mol_type = other DNA
ggaggcatcccccagtaggggc

SEQ ID NO: 149836 - DNA, 22 bp, synthetic construct
  misc_feature 1..22: note = chemically synthesized
  source 1..22: mol_type = other DNA
acacctcacatggctggtactc

SEQ ID NO: 149837 - DNA, 22 bp, synthetic construct
  misc_feature 1..22: note = chemically synthesized
  source 1..22: mol_type = other DNA
acatggctggtactcctctaag

SEQ ID NO: 149838 - DNA, 22 bp, synthetic construct
  misc_feature 1..22: note = chemically synthesized
  source 1..22: mol_type = other DNA
gtactcctctaagacaaaactt

SEQ ID NO: 149839 - DNA, 22 bp, synthetic construct
  misc_feature 1..22: note = chemically synthesized
  source 1..22: mol_type = other DNA
ctctaagacaaaacttccagag

SEQ ID NO: 149840 - DNA, 22 bp, synthetic construct
  misc_feature 1..22: note = chemically synthesized
  source 1..22: mol_type = other DNA
taagacaaaacttccagaggaa

SEQ ID NO: 149841 - DNA, 22 bp, synthetic construct
  misc_feature 1..22: note = chemically synthesized
  source 1..22: mol_type = other DNA
agacaaaacttccagaggaatg

SEQ ID NO: 149842 - DNA, 22 bp, synthetic construct
  misc_feature 1..22: note = chemically synthesized
  source 1..22: mol_type = other DNA
ccagaggaatgatcaggcagca

SEQ ID NO: 149843 - DNA, 22 bp, synthetic construct
  misc_feature 1..22: note = chemically synthesized
  source 1..22: mol_type = other DNA
cagaggaatgatcaggcagcag

SEQ ID NO: 149844 - DNA, 22 bp, synthetic construct
  misc_feature 1..22: note = chemically synthesized
  source 1..22: mol_type = other DNA
gcggttcaccaatatccactgt

SEQ ID NO: 149845 - DNA, 22 bp, synthetic construct
  misc_feature 1..22: note = chemically synthesized
  source 1..22: mol_type = other DNA
cggttcaccaatatccactgtt

SEQ ID NO: 149846 - DNA, 22 bp, synthetic construct
  misc_feature 1..22: note = chemically synthesized
  source 1..22: mol_type = other DNA
accaatatccactgttctgcag

SEQ ID NO: 149847 - DNA, 22 bp, synthetic construct
  misc_feature 1..22: note = chemically synthesized
  source 1..22: mol_type = other DNA
ttctgcagccaccgctgttgat

SEQ ID NO: 149848 - DNA, 22 bp, synthetic construct
  misc_feature 1..22: note = chemically synthesized
  source 1..22: mol_type = other DNA
tgcagccaccgctgttgatacc

SEQ ID NO: 149849 - DNA, 22 bp, synthetic construct
  misc_feature 1..22: note = chemically synthesized
  source 1..22: mol_type = other DNA
cagccaccgctgttgataccca

SEQ ID NO: 149850 - DNA, 22 bp, synthetic construct
  misc_feature 1..22: note = chemically synthesized
  source 1..22: mol_type = other DNA
ttgatacccaggaaaacagctt

SEQ ID NO: 149851 - DNA, 22 bp, synthetic construct
  misc_feature 1..22: note = chemically synthesized
  source 1..22: mol_type = other DNA
atacccaggaaaacagcttctg

SEQ ID NO: 149852 - DNA, 22 bp, synthetic construct
  misc_feature 1..22: note = chemically synthesized
  source 1..22: mol_type = other DNA
ctggagtggacctccagtaaac

SEQ ID NO: 149853 - DNA, 22 bp, synthetic construct
  misc_feature 1..22: note = chemically synthesized
  source 1..22: mol_type = other DNA
tggagtggacctccagtaaact

SEQ ID NO: 149854 - DNA, 22 bp, synthetic construct
  misc_feature 1..22: note = chemically synthesized
  source 1..22: mol_type = other DNA
gagtggacctccagtaaactcc

SEQ ID NO: 149855 - DNA, 22 bp, synthetic construct
  misc_feature 1..22: note = chemically synthesized
  source 1..22: mol_type = other DNA
cagtaaactccaacagacctgc

SEQ ID NO: 149856 - DNA, 22 bp, synthetic construct
  misc_feature 1..22: note = chemically synthesized
  source 1..22: mol_type = other DNA
caacagacctgcagctgagggt

SEQ ID NO: 149857 - DNA, 22 bp, synthetic construct
  misc_feature 1..22: note = chemically synthesized
  source 1..22: mol_type = other DNA
cagctgagggtcctgactgtta

SEQ ID NO: 149858 - DNA, 22 bp, synthetic construct
  misc_feature 1..22: note = chemically synthesized
  source 1..22: mol_type = other DNA
agggtcctgactgttagaagga

SEQ ID NO: 149859 - DNA, 22 bp, synthetic construct
  misc_feature 1..22: note = chemically synthesized
  source 1..22: mol_type = other DNA
actgttagaaggaaaactaaca

SEQ ID NO: 149860 - DNA, 22 bp, synthetic construct
  misc_feature 1..22: note = chemically synthesized
  source 1..22: mol_type = other DNA
ttagaaggaaaactaacaaaca

SEQ ID NO: 149861 - DNA, 22 bp, synthetic construct
  misc_feature 1..22: note = chemically synthesized
  source 1..22: mol_type = other DNA
gaaggaaaactaacaaacagaa

SEQ ID NO: 149862 - DNA, 22 bp, synthetic construct
  misc_feature 1..22: note = chemically synthesized
  source 1..22: mol_type = other DNA
acaaacagaaaggacatccaca

SEQ ID NO: 149863 - DNA, 22 bp, synthetic construct
  misc_feature 1..22: note = chemically synthesized
  source 1..22: mol_type = other DNA
tacatcgccatcatcaaagacc

SEQ ID NO: 149864 - DNA, 22 bp, synthetic construct
  misc_feature 1..22: note = chemically synthesized
  source 1..22: mol_type = other DNA
gacactctaaaaatgagagtgc

SEQ ID NO: 149865 - DNA, 22 bp, synthetic construct
  misc_feature 1..22: note = chemically synthesized
  source 1..22: mol_type = other DNA
taaaaatgagagtgcctctcct

SEQ ID NO: 149866 - DNA, 22 bp, synthetic construct
  misc_feature 1..22: note = chemically synthesized
  source 1..22: mol_type = other DNA
aaaatgagagtgcctctcctcc

SEQ ID NO: 149867 - DNA, 22 bp, synthetic construct
  misc_feature 1..22: note = chemically synthesized
  source 1..22: mol_type = other DNA
tcctcctccaaagtaacgcagc

SEQ ID NO: 149868 - DNA, 22 bp, synthetic construct
  misc_feature 1..22: note = chemically synthesized
  source 1..22: mol_type = other DNA
ctcctccaaagtaacgcagctc

SEQ ID NO: 149869 - DNA, 22 bp, synthetic construct
  misc_feature 1..22: note = chemically synthesized
  source 1..22: mol_type = other DNA
ctccaaagtaacgcagctcctc

SEQ ID NO: 149870 - DNA, 22 bp, synthetic construct
  misc_feature 1..22: note = chemically synthesized
  source 1..22: mol_type = other DNA
caaagtaacgcagctcctcacc

SEQ ID NO: 149871 - DNA, 22 bp, synthetic construct
  misc_feature 1..22: note = chemically synthesized
  source 1..22: mol_type = other DNA
ctcaccagcaatggaacaaagc

SEQ ID NO: 149872 - DNA, 22 bp, synthetic construct
  misc_feature 1..22: note = chemically synthesized
  source 1..22: mol_type = other DNA
accagcaatggaacaaagctgg

SEQ ID NO: 149873 - DNA, 22 bp, synthetic construct
  misc_feature 1..22: note = chemically synthesized
  source 1..22: mol_type = other DNA
ggcagagaatgactttgacgag

SEQ ID NO: 149874 - DNA, 22 bp, synthetic construct
  misc_feature 1..22: note = chemically synthesized
  source 1..22: mol_type = other DNA
tgacgagttgagagaggaaggc

SEQ ID NO: 149875 - DNA, 22 bp, synthetic construct
  misc_feature 1..22: note = chemically synthesized
  source 1..22: mol_type = other DNA
gacgagttgagagaggaaggct

SEQ ID NO: 149876 - DNA, 22 bp, synthetic construct
  misc_feature 1..22: note = chemically synthesized
  source 1..22: mol_type = other DNA
acgagttgagagaggaaggctt

SEQ ID NO: 149877 - DNA, 22 bp, synthetic construct
  misc_feature 1..22: note = chemically synthesized
  source 1..22: mol_type = other DNA
agagaggaaggcttcagaagat

SEQ ID NO: 149878 - DNA, 22 bp, synthetic construct
  misc_feature 1..22: note = chemically synthesized
  source 1..22: mol_type = other DNA
cagaagatcaaactactccaag

SEQ ID NO: 149879 - DNA, 22 bp, synthetic construct
  misc_feature 1..22: note = chemically synthesized
  source 1..22: mol_type = other DNA
agaagatcaaactactccaagc

SEQ ID NO: 149880 - DNA, 22 bp, synthetic construct
  misc_feature 1..22: note = chemically synthesized
  source 1..22: mol_type = other DNA
ctccaagctaaaggaggaagtt

SEQ ID NO: 149881 - DNA, 22 bp, synthetic construct
  misc_feature 1..22: note = chemically synthesized
  source 1..22: mol_type = other DNA
caagctaaaggaggaagttcga

SEQ ID NO: 149882 - DNA, 22 bp, synthetic construct
  misc_feature 1..22: note = chemically synthesized
  source 1..22: mol_type = other DNA
aaggaggaagttcgaacaaacg

SEQ ID NO: 149883 - DNA, 22 bp, synthetic construct
  misc_feature 1..22: note = chemically synthesized
  source 1..22: mol_type = other DNA
gaacaaacggcaaagaagtaaa

SEQ ID NO: 149884 - DNA, 22 bp, synthetic construct
  misc_feature 1..22: note = chemically synthesized
  source 1..22: mol_type = other DNA
tgaaaaaaaattagatgaatgg

SEQ ID NO: 149885 - DNA, 22 bp, synthetic construct
  misc_feature 1..22: note = chemically synthesized
  source 1..22: mol_type = other DNA
gaaaaaaaattagatgaatgga

SEQ ID NO: 149886 - DNA, 22 bp, synthetic construct
  misc_feature 1..22: note = chemically synthesized
  source 1..22: mol_type = other DNA
aaaaaaaattagatgaatggat

SEQ ID NO: 149887 - DNA, 22 bp, synthetic construct
  misc_feature 1..22: note = chemically synthesized
  source 1..22: mol_type = other DNA
gatgaatggataactagaataa

SEQ ID NO: 149888 - DNA, 22 bp, synthetic construct
  misc_feature 1..22: note = chemically synthesized
  source 1..22: mol_type = other DNA
gaataaccaatgcacagaagtc

SEQ ID NO: 149889 - DNA, 22 bp, synthetic construct
  misc_feature 1..22: note = chemically synthesized
  source 1..22: mol_type = other DNA
aaaggacctgatggagctgaaa

SEQ ID NO: 149890 - DNA, 22 bp, synthetic construct
  misc_feature 1..22: note = chemically synthesized
  source 1..22: mol_type = other DNA
aaggacctgatggagctgaaaa

SEQ ID NO: 149891 - DNA, 22 bp, synthetic construct
  misc_feature 1..22: note = chemically synthesized
  source 1..22: mol_type = other DNA
atggagctgaaaaccaaggcag

SEQ ID NO: 149892 - DNA, 22 bp, synthetic construct
  misc_feature 1..22: note = chemically synthesized
  source 1..22: mol_type = other DNA
aaaaccaaggcaggagaactac

SEQ ID NO: 149893 - DNA, 22 bp, synthetic construct
  misc_feature 1..22: note = chemically synthesized
  source 1..22: mol_type = other DNA
cgtgacaaatacacaagcctca

SEQ ID NO: 149894 - DNA, 22 bp, synthetic construct
  misc_feature 1..22: note = chemically synthesized
  source 1..22: mol_type = other DNA
agtaaccgatgagatcaactgg

SEQ ID NO: 149895 - DNA, 22 bp, synthetic construct
  misc_feature 1..22: note = chemically synthesized
  source 1..22: mol_type = other DNA
gaagaaagggtatcaatgacga

SEQ ID NO: 149896 - DNA, 22 bp, synthetic construct
  misc_feature 1..22: note = chemically synthesized
  source 1..22: mol_type = other DNA
agagaaaaaagaataaaaagaa

SEQ ID NO: 149897 - DNA, 22 bp, synthetic construct
  misc_feature 1..22: note = chemically synthesized
  source 1..22: mol_type = other DNA
gagaaaaaagaataaaaagaaa

SEQ ID NO: 149898 - DNA, 22 bp, synthetic construct
  misc_feature 1..22: note = chemically synthesized
  source 1..22: mol_type = other DNA
caagaaatatgggactatgtga

SEQ ID NO: 149899 - DNA, 22 bp, synthetic construct
  misc_feature 1..22: note = chemically synthesized
  source 1..22: mol_type = other DNA
tgtgaaaagaccaaatctacat

SEQ ID NO: 149900 - DNA, 22 bp, synthetic construct
  misc_feature 1..22: note = chemically synthesized
  source 1..22: mol_type = other DNA
catctaattggtgtagctgaaa

SEQ ID NO: 149901 - DNA, 22 bp, synthetic construct
  misc_feature 1..22: note = chemically synthesized
  source 1..22: mol_type = other DNA
attggtgtagctgaaagtgatg

SEQ ID NO: 149902 - DNA, 22 bp, synthetic construct
  misc_feature 1..22: note = chemically synthesized
  source 1..22: mol_type = other DNA
gtgtagctgaaagtgatgggga

SEQ ID NO: 149903 - DNA, 22 bp, synthetic construct
  misc_feature 1..22: note = chemically synthesized
  source 1..22: mol_type = other DNA
aaagtgatggggagaatggaac

SEQ ID NO: 149904 - DNA, 22 bp, synthetic construct
  misc_feature 1..22: note = chemically synthesized
  source 1..22: mol_type = other DNA
gaaaacactctgcaggatatta

SEQ ID NO: 149905 - DNA, 22 bp, synthetic construct
  misc_feature 1..22: note = chemically synthesized
  source 1..22: mol_type = other DNA
tgcaggatattatccaggagaa

SEQ ID NO: 149906 - DNA, 22 bp, synthetic construct
  misc_feature 1..22: note = chemically synthesized
  source 1..22: mol_type = other DNA
caggatattatccaggagaact

SEQ ID NO: 149907 - DNA, 22 bp, synthetic construct
  misc_feature 1..22: note = chemically synthesized
  source 1..22: mol_type = other DNA
tccaggagaacttccccaatct

SEQ ID NO: 149908 - DNA, 22 bp, synthetic construct
  misc_feature 1..22: note = chemically synthesized
  source 1..22: mol_type = other DNA
ccccaatctagcaaggcaagcc

SEQ ID NO: 149909 - DNA, 22 bp, synthetic construct
  misc_feature 1..22: note = chemically synthesized
  source 1..22: mol_type = other DNA
cccaatctagcaaggcaagccc

SEQ ID NO: 149910 - DNA, 22 bp, synthetic construct
  misc_feature 1..22: note = chemically synthesized
  source 1..22: mol_type = other DNA
gcaaggcaagcccaaattcaca

SEQ ID NO: 149911 - DNA, 22 bp, synthetic construct
  misc_feature 1..22: note = chemically synthesized
  source 1..22: mol_type = other DNA
acattcaggaaatacagagaac

SEQ ID NO: 149912 - DNA, 22 bp, synthetic construct
  misc_feature 1..22: note = chemically synthesized
  source 1..22: mol_type = other DNA
aggaaatacagagaacgccaca

SEQ ID NO: 149913 - DNA, 22 bp, synthetic construct
  misc_feature 1..22: note = chemically synthesized
  source 1..22: mol_type = other DNA
ctagagaaaagcaactccaaga

SEQ ID NO: 149914 - DNA, 22 bp, synthetic construct
  misc_feature 1..22: note = chemically synthesized
  source 1..22: mol_type = other DNA
gagaaaagcaactccaagacac

SEQ ID NO: 149915 - DNA, 22 bp, synthetic construct
  misc_feature 1..22: note = chemically synthesized
  source 1..22: mol_type = other DNA
caagacacataactgtcagatt

SEQ ID NO: 149916 - DNA, 22 bp, synthetic construct
  misc_feature 1..22: note = chemically synthesized
  source 1..22: mol_type = other DNA
tcagattcaccaaagttgaaat

SEQ ID NO: 149917 - DNA, 22 bp, synthetic construct
  misc_feature 1..22: note = chemically synthesized
  source 1..22: mol_type = other DNA
accaaagttgaaatgaaggaaa

SEQ ID NO: 149918 - DNA, 22 bp, synthetic construct
  misc_feature 1..22: note = chemically synthesized
  source 1..22: mol_type = other DNA
aaatgaaggaaaaaatgttaag

SEQ ID NO: 149919 - DNA, 22 bp, synthetic construct
  misc_feature 1..22: note = chemically synthesized
  source 1..22: mol_type = other DNA
agggcagccagagagaaaggtc

SEQ ID NO: 149920 - DNA, 22 bp, synthetic construct
  misc_feature 1..22: note = chemically synthesized
  source 1..22: mol_type = other DNA
cccacaaagggaagcccatcag

SEQ ID NO: 149921 - DNA, 22 bp, synthetic construct
  misc_feature 1..22: note = chemically synthesized
  source 1..22: mol_type = other DNA
acagctgatctatcggcagaaa

SEQ ID NO: 149922 - DNA, 22 bp, synthetic construct
  misc_feature 1..22: note = chemically synthesized
  source 1..22: mol_type = other DNA
atctatcggcagaaactctaca

SEQ ID NO: 149923 - DNA, 22 bp, synthetic construct
  misc_feature 1..22: note = chemically synthesized
  source 1..22: mol_type = other DNA
tcggcagaaactctacaagcca

SEQ ID NO: 149924 - DNA, 22 bp, synthetic construct
  misc_feature 1..22: note = chemically synthesized
  source 1..22: mol_type = other DNA
tacaagccagaagaaagtgggg

SEQ ID NO: 149925 - DNA, 22 bp, synthetic construct
  misc_feature 1..22: note = chemically synthesized
  source 1..22: mol_type = other DNA
caagccagaagaaagtgggggc

SEQ ID NO: 149926 - DNA, 22 bp, synthetic construct
  misc_feature 1..22: note = chemically synthesized
  source 1..22: mol_type = other DNA
aacattgttaaagaaaagaatt

SEQ ID NO: 149927 - DNA, 22 bp, synthetic construct
  misc_feature 1..22: note = chemically synthesized
  source 1..22: mol_type = other DNA
ttaaagaaaagaattttcaacc

SEQ ID NO: 149928 - DNA, 22 bp, synthetic construct
  misc_feature 1..22: note = chemically synthesized
  source 1..22: mol_type = other DNA
aagaaaagaattttcaacccag

SEQ ID NO: 149929 - DNA, 22 bp, synthetic construct
  misc_feature 1..22: note = chemically synthesized
  source 1..22: mol_type = other DNA
tcaacccagaatttcatatcca

SEQ ID NO: 149930 - DNA, 22 bp, synthetic construct
  misc_feature 1..22: note = chemically synthesized
  source 1..22: mol_type = other DNA
caacccagaatttcatatccag

SEQ ID NO: 149931 - DNA, 22 bp, synthetic construct
  misc_feature 1..22: note = chemically synthesized
  source 1..22: mol_type = other DNA
aacccagaatttcatatccagc

SEQ ID NO: 149932 - DNA, 22 bp, synthetic construct
  misc_feature 1..22: note = chemically synthesized
  source 1..22: mol_type = other DNA
catatccagccaaactaagctt

SEQ ID NO: 149933 - DNA, 22 bp, synthetic construct
  misc_feature 1..22: note = chemically synthesized
  source 1..22: mol_type = other DNA
atatccagccaaactaagcttc

SEQ ID NO: 149934 - DNA, 22 bp, synthetic construct
  misc_feature 1..22: note = chemically synthesized
  source 1..22: mol_type = other DNA
agcttcataagtgaaggagaaa

SEQ ID NO: 149935 - DNA, 22 bp, synthetic construct
  misc_feature 1..22: note = chemically synthesized
  source 1..22: mol_type = other DNA
cataagtgaaggagaaataaaa

SEQ ID NO: 149936 - DNA, 22 bp, synthetic construct
  misc_feature 1..22: note = chemically synthesized
  source 1..22: mol_type = other DNA
ataagtgaaggagaaataaaat

SEQ ID NO: 149937 - DNA, 22 bp, synthetic construct
  misc_feature 1..22: note = chemically synthesized
  source 1..22: mol_type = other DNA
tacagacaagcaaatgctgaga

SEQ ID NO: 149938 - DNA, 22 bp, synthetic construct
  misc_feature 1..22: note = chemically synthesized
  source 1..22: mol_type = other DNA
acagacaagcaaatgctgagag

SEQ ID NO: 149939 - DNA, 22 bp, synthetic construct
  misc_feature 1..22: note = chemically synthesized
  source 1..22: mol_type = other DNA
cagacaagcaaatgctgagaga

SEQ ID NO: 149940 - DNA, 22 bp, synthetic construct
  misc_feature 1..22: note = chemically synthesized
  source 1..22: mol_type = other DNA
agagattttgtcaccaccaggc

SEQ ID NO: 149941 - DNA, 22 bp, synthetic construct
  misc_feature 1..22: note = chemically synthesized
  source 1..22: mol_type = other DNA
tgtcaccaccaggcctgcccta

SEQ ID NO: 149942 - DNA, 22 bp, synthetic construct
  misc_feature 1..22: note = chemically synthesized
  source 1..22: mol_type = other DNA
gtcaccaccaggcctgccctac

SEQ ID NO: 149943 - DNA, 22 bp, synthetic construct
  misc_feature 1..22: note = chemically synthesized
  source 1..22: mol_type = other DNA
tcaccaccaggcctgccctaca

SEQ ID NO: 149944 - DNA, 22 bp, synthetic construct
  misc_feature 1..22: note = chemically synthesized
  source 1..22: mol_type = other DNA
ccctacaagagctcctgaagga

SEQ ID NO: 149945 - DNA, 22 bp, synthetic construct
  misc_feature 1..22: note = chemically synthesized
  source 1..22: mol_type = other DNA
caagagctcctgaaggaagcac

SEQ ID NO: 149946 - DNA, 22 bp, synthetic construct
  misc_feature 1..22: note = chemically synthesized
  source 1..22: mol_type = other DNA
ctgaaggaagcactaaacatgg

SEQ ID NO: 149947 - DNA, 22 bp, synthetic construct
  misc_feature 1..22: note = chemically synthesized
  source 1..22: mol_type = other DNA
aaggaagcactaaacatggaaa

SEQ ID NO: 149948 - DNA, 22 bp, synthetic construct
  misc_feature 1..22: note = chemically synthesized
  source 1..22: mol_type = other DNA
aacatggaaaggaacaactagt

SEQ ID NO: 149949 - DNA, 22 bp, synthetic construct
  misc_feature 1..22: note = chemically synthesized
  source 1..22: mol_type = other DNA
gtatcagccactgcaaaaacat

SEQ ID NO: 149950 - DNA, 22 bp, synthetic construct
  misc_feature 1..22: note = chemically synthesized
  source 1..22: mol_type = other DNA
caaaaacatgccaaattgtaaa

SEQ ID NO: 149951 - DNA, 22 bp, synthetic construct
  misc_feature 1..22: note = chemically synthesized
  source 1..22: mol_type = other DNA
taaagaccatcaaggctaggaa

SEQ ID NO: 149952 - DNA, 22 bp, synthetic construct
  misc_feature 1..22: note = chemically synthesized
  source 1..22: mol_type = other DNA
ggaagaaactgcatcaacgagc

SEQ ID NO: 149953 - DNA, 22 bp, synthetic construct
  misc_feature 1..22: note = chemically synthesized
  source 1..22: mol_type = other DNA
catcaacgagcaaaataaccag

SEQ ID NO: 149954 - DNA, 22 bp, synthetic construct
  misc_feature 1..22: note = chemically synthesized
  source 1..22: mol_type = other DNA
acatcataatgacaggatcaaa

SEQ ID NO: 149955 - DNA, 22 bp, synthetic construct
  misc_feature 1..22: note = chemically synthesized
  source 1..22: mol_type = other DNA
atacataacaatactcacctta

SEQ ID NO: 149956 - DNA, 22 bp, synthetic construct
  misc_feature 1..22: note = chemically synthesized
  source 1..22: mol_type = other DNA
accttaaatgtaaataggctaa

SEQ ID NO: 149957 - DNA, 22 bp, synthetic construct
  misc_feature 1..22: note = chemically synthesized
  source 1..22: mol_type = other DNA
aaatgtaaataggctaaatgct

SEQ ID NO: 149958 - DNA, 22 bp, synthetic construct
  misc_feature 1..22: note = chemically synthesized
  source 1..22: mol_type = other DNA
aatgtaaataggctaaatgctc

SEQ ID NO: 149959 - DNA, 22 bp, synthetic construct
  misc_feature 1..22: note = chemically synthesized
  source 1..22: mol_type = other DNA
aatgctccaattaaaagacaca

SEQ ID NO: 149960 - DNA, 22 bp, synthetic construct
  misc_feature 1..22: note = chemically synthesized
  source 1..22: mol_type = other DNA
caattaaaagacacagactggc

SEQ ID NO: 149961 - DNA, 22 bp, synthetic construct
  misc_feature 1..22: note = chemically synthesized
  source 1..22: mol_type = other DNA
aaagacacagactggcaaattg

SEQ ID NO: 149962 - DNA, 22 bp, synthetic construct
  misc_feature 1..22: note = chemically synthesized
  source 1..22: mol_type = other DNA
gcaaattggataaggagtcaag

SEQ ID NO: 149963 - DNA, 22 bp, synthetic construct
  misc_feature 1..22: note = chemically synthesized
  source 1..22: mol_type = other DNA
gataaggagtcaagacccatct

SEQ ID NO: 149964 - DNA, 22 bp, synthetic construct
  misc_feature 1..22: note = chemically synthesized
  source 1..22: mol_type = other DNA
tgttctgtattcaggaaaccca

SEQ ID NO: 149965 - DNA, 22 bp, synthetic construct
  misc_feature 1..22: note = chemically synthesized
  source 1..22: mol_type = other DNA
tgtattcaggaaacccatctca

SEQ ID NO: 149966 - DNA, 22 bp, synthetic construct
  misc_feature 1..22: note = chemically synthesized
  source 1..22: mol_type = other DNA
tattcaggaaacccatctcacg

SEQ ID NO: 149967 - DNA, 22 bp, synthetic construct
  misc_feature 1..22: note = chemically synthesized
  source 1..22: mol_type = other DNA
aggaaacccatctcacgtgcag

SEQ ID NO: 149968 - DNA, 22 bp, synthetic construct
  misc_feature 1..22: note = chemically synthesized
  source 1..22: mol_type = other DNA
acgtgcagagacacacataggc

SEQ ID NO: 149969 - DNA, 22 bp, synthetic construct
  misc_feature 1..22: note = chemically synthesized
  source 1..22: mol_type = other DNA
gaaataaaaggatggaggaata

SEQ ID NO: 149970 - DNA, 22 bp, synthetic construct
  misc_feature 1..22: note = chemically synthesized
  source 1..22: mol_type = other DNA
ccaagcaaatggaaaacaaaaa

SEQ ID NO: 149971 - DNA, 22 bp, synthetic construct
  misc_feature 1..22: note = chemically synthesized
  source 1..22: mol_type = other DNA
caatcctagtctctgataaaac

SEQ ID NO: 149972 - DNA, 22 bp, synthetic construct
  misc_feature 1..22: note = chemically synthesized
  source 1..22: mol_type = other DNA
gtctctgataaaacagatttta

SEQ ID NO: 149973 - DNA, 22 bp, synthetic construct
  misc_feature 1..22: note = chemically synthesized
  source 1..22: mol_type = other DNA
tgataaaacagattttaaacca

SEQ ID NO: 149974 - DNA, 22 bp, synthetic construct
  misc_feature 1..22: note = chemically synthesized
  source 1..22: mol_type = other DNA
ataaaacagattttaaaccaac

SEQ ID NO: 149975 - DNA, 22 bp, synthetic construct
  misc_feature 1..22: note = chemically synthesized
  source 1..22: mol_type = other DNA
taaaccaacaaagatcaaaaga

SEQ ID NO: 149976 - DNA, 22 bp, synthetic construct
  misc_feature 1..22: note = chemically synthesized
  source 1..22: mol_type = other DNA
aaaccaacaaagatcaaaagag

SEQ ID NO: 149977 - DNA, 22 bp, synthetic construct
  misc_feature 1..22: note = chemically synthesized
  source 1..22: mol_type = other DNA
aaccaacaaagatcaaaagaga

SEQ ID NO: 149978 - DNA, 22 bp, synthetic construct
  misc_feature 1..22: note = chemically synthesized
  source 1..22: mol_type = other DNA
cataatggcaaagggatctatt

SEQ ID NO: 149979 - DNA, 22 bp, synthetic construct
  misc_feature 1..22: note = chemically synthesized
  source 1..22: mol_type = other DNA
ttcaagaagaagaactaactat

SEQ ID NO: 149980 - DNA, 22 bp, synthetic construct
  misc_feature 1..22: note = chemically synthesized
  source 1..22: mol_type = other DNA
aagaagaagaactaactatact

SEQ ID NO: 149981 - DNA, 22 bp, synthetic construct
  misc_feature 1..22: note = chemically synthesized
  source 1..22: mol_type = other DNA
actatactaaatatatatgcac

SEQ ID NO: 149982 - DNA, 22 bp, synthetic construct
  misc_feature 1..22: note = chemically synthesized
  source 1..22: mol_type = other DNA
tactaaatatatatgcacccaa

SEQ ID NO: 149983 - DNA, 22 bp, synthetic construct
  misc_feature 1..22: note = chemically synthesized
  source 1..22: mol_type = other DNA
aatatatatgcacccaatacag

SEQ ID NO: 149984 - DNA, 22 bp, synthetic construct
  misc_feature 1..22: note = chemically synthesized
  source 1..22: mol_type = other DNA
ataaaacaagtcctgagtgacc

SEQ ID NO: 149985 - DNA, 22 bp, synthetic construct
  misc_feature 1..22: note = chemically synthesized
  source 1..22: mol_type = other DNA
agtgacctacaaagagacttag

SEQ ID NO: 149986 - DNA, 22 bp, synthetic construct
  misc_feature 1..22: note = chemically synthesized
  source 1..22: mol_type = other DNA
caaagagacttagatgcccaca

SEQ ID NO: 149987 - DNA, 22 bp, synthetic construct
  misc_feature 1..22: note = chemically synthesized
  source 1..22: mol_type = other DNA
agatgcccacacaataataatg

SEQ ID NO: 149988 - DNA, 22 bp, synthetic construct
  misc_feature 1..22: note = chemically synthesized
  source 1..22: mol_type = other DNA
gatgcccacacaataataatgg

SEQ ID NO: 149989 - DNA, 22 bp, synthetic construct
  misc_feature 1..22: note = chemically synthesized
  source 1..22: mol_type = other DNA
taacaccccactgtcaacatta

SEQ ID NO: 149990 - DNA, 22 bp, synthetic construct
  misc_feature 1..22: note = chemically synthesized
  source 1..22: mol_type = other DNA
aacaccccactgtcaacattag

SEQ ID NO: 149991 - DNA, 22 bp, synthetic construct
  misc_feature 1..22: note = chemically synthesized
  source 1..22: mol_type = other DNA
acaccccactgtcaacattaga

SEQ ID NO: 149992 - DNA, 22 bp, synthetic construct
  misc_feature 1..22: note = chemically synthesized
  source 1..22: mol_type = other DNA
tcaacattagacagatcaacga

SEQ ID NO: 149993 - DNA, 22 bp, synthetic construct
  misc_feature 1..22: note = chemically synthesized
  source 1..22: mol_type = other DNA
gacagatcaacgagacagaaag

SEQ ID NO: 149994 - DNA, 22 bp, synthetic construct
  misc_feature 1..22: note = chemically synthesized
  source 1..22: mol_type = other DNA
acaaggatatccaggaattgga

SEQ ID NO: 149995 - DNA, 22 bp, synthetic construct
  misc_feature 1..22: note = chemically synthesized
  source 1..22: mol_type = other DNA
gactcagctctgcaccaagcag

SEQ ID NO: 149996 - DNA, 22 bp, synthetic construct
  misc_feature 1..22: note = chemically synthesized
  source 1..22: mol_type = other DNA
agctctgcaccaagcagaccta

SEQ ID NO: 149997 - DNA, 22 bp, synthetic construct
  misc_feature 1..22: note = chemically synthesized
  source 1..22: mol_type = other DNA
tgcaccaagcagacctaataga

SEQ ID NO: 149998 - DNA, 22 bp, synthetic construct
  misc_feature 1..22: note = chemically synthesized
  source 1..22: mol_type = other DNA
caccaagcagacctaatagaca

SEQ ID NO: 149999 - DNA, 22 bp, synthetic construct
  misc_feature 1..22: note = chemically synthesized
  source 1..22: mol_type = other DNA
atagacatctacagaactctcc

SEQ ID NO: 150000 - DNA, 22 bp, synthetic construct
  misc_feature 1..22: note = chemically synthesized
  source 1..22: mol_type = other DNA
cagaactctccaccccaaatca

SEQ ID NO: 150001 - DNA, 22 bp, synthetic construct
  misc_feature 1..22: note = chemically synthesized
  source 1..22: mol_type = other DNA
tccaccccaaatcaacagaata

SEQ ID NO: 150002 - DNA, 22 bp, synthetic construct
  misc_feature 1..22: note = chemically synthesized
  source 1..22: mol_type = other DNA
caccccaaatcaacagaatata

SEQ ID NO: 150003 - DNA, 22 bp, synthetic construct
  misc_feature 1..22: note = chemically synthesized
  source 1..22: mol_type = other DNA
ttttcagcaccacaccacacct

SEQ ID NO: 150004 - DNA, 22 bp, synthetic construct
  misc_feature 1..22: note = chemically synthesized
  source 1..22: mol_type = other DNA
ttcagcaccacaccacacctat

SEQ ID NO: 150005 - DNA, 22 bp, synthetic construct
  misc_feature 1..22: note = chemically synthesized
  source 1..22: mol_type = other DNA
tcagcaccacaccacacctatt

SEQ ID NO: 150006 - DNA, 22 bp, synthetic construct
  misc_feature 1..22: note = chemically synthesized
  source 1..22: mol_type = other DNA
cagcaccacaccacacctattc

SEQ ID NO: 150007 - DNA, 22 bp, synthetic construct
  misc_feature 1..22: note = chemically synthesized
  source 1..22: mol_type = other DNA
agcaccacaccacacctattcc

SEQ ID NO: 150008 - DNA, 22 bp, synthetic construct
  misc_feature 1..22: note = chemically synthesized
  source 1..22: mol_type = other DNA
ttccaaaactgaccacatagtt

SEQ ID NO: 150009 - DNA, 22 bp, synthetic construct
  misc_feature 1..22: note = chemically synthesized
  source 1..22: mol_type = other DNA
caaaactgaccacatagttgga

SEQ ID NO: 150010 - DNA, 22 bp, synthetic construct
  misc_feature 1..22: note = chemically synthesized
  source 1..22: mol_type = other DNA
accacatagttggaagtaaagc

SEQ ID NO: 150011 - DNA, 22 bp, synthetic construct
  misc_feature 1..22: note = chemically synthesized
  source 1..22: mol_type = other DNA
gaagtaaagctctcctcagcaa

SEQ ID NO: 150012 - DNA, 22 bp, synthetic construct
  misc_feature 1..22: note = chemically synthesized
  source 1..22: mol_type = other DNA
tcctcagcaaatgtaaaagaac

SEQ ID NO: 150013 - DNA, 22 bp, synthetic construct
  misc_feature 1..22: note = chemically synthesized
  source 1..22: mol_type = other DNA
ctcagcaaatgtaaaagaacag

SEQ ID NO: 150014 - DNA, 22 bp, synthetic construct
  misc_feature 1..22: note = chemically synthesized
  source 1..22: mol_type = other DNA
agcaaatgtaaaagaacagaaa

SEQ ID NO: 150015 - DNA, 22 bp, synthetic construct
  misc_feature 1..22: note = chemically synthesized
  source 1..22: mol_type = other DNA
taacaaactgtctctcagacca

SEQ ID NO: 150016 - DNA, 22 bp, synthetic construct
  misc_feature 1..22: note = chemically synthesized
  source 1..22: mol_type = other DNA
tctctcagaccacagtgcaatc

SEQ ID NO: 150017 - DNA, 22 bp, synthetic construct
  misc_feature 1..22: note = chemically synthesized
  source 1..22: mol_type = other DNA
tcagaccacagtgcaatcaaac

SEQ ID NO: 150018 - DNA, 22 bp, synthetic construct
  misc_feature 1..22: note = chemically synthesized
  source 1..22: mol_type = other DNA
agaccacagtgcaatcaaacta

SEQ ID NO: 150019 - DNA, 22 bp, synthetic construct
  misc_feature 1..22: note = chemically synthesized
  source 1..22: mol_type = other DNA
gaactcaggattaagaaactca

SEQ ID NO: 150020 - DNA, 22 bp, synthetic construct
  misc_feature 1..22: note = chemically synthesized
  source 1..22: mol_type = other DNA
aggattaagaaactcactcaaa

SEQ ID NO: 150021 - DNA, 22 bp, synthetic construct
  misc_feature 1..22: note = chemically synthesized
  source 1..22: mol_type = other DNA
agaaactcactcaaaaccactc

SEQ ID NO: 150022 - DNA, 22 bp, synthetic construct
  misc_feature 1..22: note = chemically synthesized
  source 1..22: mol_type = other DNA
actcaaaaccactcagctacat

SEQ ID NO: 150023 - DNA, 22 bp, synthetic construct
  misc_feature 1..22: note = chemically synthesized
  source 1..22: mol_type = other DNA
aaaaccactcagctacatggaa

SEQ ID NO: 150024 - DNA, 22 bp, synthetic construct
  misc_feature 1..22: note = chemically synthesized
  source 1..22: mol_type = other DNA
agctacatggaaactgaacagc

SEQ ID NO: 150025 - DNA, 22 bp, synthetic construct
  misc_feature 1..22: note = chemically synthesized
  source 1..22: mol_type = other DNA
catggaaactgaacagcctgct

SEQ ID NO: 150026 - DNA, 22 bp, synthetic construct
  misc_feature 1..22: note = chemically synthesized
  source 1..22: mol_type = other DNA
aacagcctgctcctgaatgact

SEQ ID NO: 150027 - DNA, 22 bp, synthetic construct
  misc_feature 1..22: note = chemically synthesized
  source 1..22: mol_type = other DNA
ctcctgaatgactactgggtac

SEQ ID NO: 150028 - DNA, 22 bp, synthetic construct
  misc_feature 1..22: note = chemically synthesized
  source 1..22: mol_type = other DNA
ctgaatgactactgggtacata

SEQ ID NO: 150029 - DNA, 22 bp, synthetic construct
  misc_feature 1..22: note = chemically synthesized
  source 1..22: mol_type = other DNA
aatgactactgggtacataaca

SEQ ID NO: 150030 - DNA, 22 bp, synthetic construct
  misc_feature 1..22: note = chemically synthesized
  source 1..22: mol_type = other DNA
ctgggtacataacaaaatgaag

SEQ ID NO: 150031 - DNA, 22 bp, synthetic construct
  misc_feature 1..22: note = chemically synthesized
  source 1..22: mol_type = other DNA
ggtacataacaaaatgaaggca

SEQ ID NO: 150032 - DNA, 22 bp, synthetic construct
  misc_feature 1..22: note = chemically synthesized
  source 1..22: mol_type = other DNA
tttgaaaccaacgagaacaaag

SEQ ID NO: 150033 - DNA, 22 bp, synthetic construct
  misc_feature 1..22: note = chemically synthesized
  source 1..22: mol_type = other DNA
tgaaaccaacgagaacaaagac

SEQ ID NO: 150034 - DNA, 22 bp, synthetic construct
  misc_feature 1..22: note = chemically synthesized
  source 1..22: mol_type = other DNA
gaaaccaacgagaacaaagaca

SEQ ID NO: 150035 - DNA, 22 bp, synthetic construct
  misc_feature 1..22: note = chemically synthesized
  source 1..22: mol_type = other DNA
aaaccaacgagaacaaagacac

SEQ ID NO: 150036 - DNA, 22 bp, synthetic construct
  misc_feature 1..22: note = chemically synthesized
  source 1..22: mol_type = other DNA
tgagacacattcaaagcagtgt

SEQ ID NO: 150037 - DNA, 22 bp, synthetic construct
  misc_feature 1..22: note = chemically synthesized
  source 1..22: mol_type = other DNA
agacacattcaaagcagtgtgt

SEQ ID NO: 150038 - DNA, 22 bp, synthetic construct
  misc_feature 1..22: note = chemically synthesized
  source 1..22: mol_type = other DNA
aaagcagtgtgtagagggaaat

SEQ ID NO: 150039 - DNA, 22 bp, synthetic construct
  misc_feature 1..22: note = chemically synthesized
  source 1..22: mol_type = other DNA
atagcactaaatgcccacaagg

SEQ ID NO: 150040 - DNA, 22 bp, synthetic construct
  misc_feature 1..22: note = chemically synthesized
  source 1..22: mol_type = other DNA
tagcactaaatgcccacaaggg

SEQ ID NO: 150041 - DNA, 22 bp, synthetic construct
  misc_feature 1..22: note = chemically synthesized
  source 1..22: mol_type = other DNA
aatgcccacaagggaaagcagg

SEQ ID NO: 150042 - DNA, 22 bp, synthetic construct
  misc_feature 1..22: note = chemically synthesized
  source 1..22: mol_type = other DNA
aaattgacaccctaacatcaca

SEQ ID NO: 150043 - DNA, 22 bp, synthetic construct
  misc_feature 1..22: note = chemically synthesized
  source 1..22: mol_type = other DNA
acaccctaacatcacaattaaa

SEQ ID NO: 150044 - DNA, 22 bp, synthetic construct
  misc_feature 1..22: note = chemically synthesized
  source 1..22: mol_type = other DNA
acatcacaattaaaaaactaga

SEQ ID NO: 150045 - DNA, 22 bp, synthetic construct
  misc_feature 1..22: note = chemically synthesized
  source 1..22: mol_type = other DNA
aaaaactagagaagcaggagca

SEQ ID NO: 150046 - DNA, 22 bp, synthetic construct
  misc_feature 1..22: note = chemically synthesized
  source 1..22: mol_type = other DNA
gagaagcaggagcaaacacatt

SEQ ID NO: 150047 - DNA, 22 bp, synthetic construct
  misc_feature 1..22: note = chemically synthesized
  source 1..22: mol_type = other DNA
aaaagctaacagaagacaagaa

SEQ ID NO: 150048 - DNA, 22 bp, synthetic construct
  misc_feature 1..22: note = chemically synthesized
  source 1..22: mol_type = other DNA
acagaagacaagaaataactaa

SEQ ID NO: 150049 - DNA, 22 bp, synthetic construct
  misc_feature 1..22: note = chemically synthesized
  source 1..22: mol_type = other DNA
agatcagagcagaagtgaagga

SEQ ID NO: 150050 - DNA, 22 bp, synthetic construct
  misc_feature 1..22: note = chemically synthesized
  source 1..22: mol_type = other DNA
caaaaaaatcaatgaatccaga

SEQ ID NO: 150051 - DNA, 22 bp, synthetic construct
  misc_feature 1..22: note = chemically synthesized
  source 1..22: mol_type = other DNA
aaaaaaatcaatgaatccagaa

SEQ ID NO: 150052 - DNA, 22 bp, synthetic construct
  misc_feature 1..22: note = chemically synthesized
  source 1..22: mol_type = other DNA
tttttttgaaaagatcaacaaa

SEQ ID NO: 150053 - DNA, 22 bp, synthetic construct
  misc_feature 1..22: note = chemically synthesized
  source 1..22: mol_type = other DNA
ttttgaaaagatcaacaaaatt

SEQ ID NO: 150054 - DNA, 22 bp, synthetic construct
  misc_feature 1..22: note = chemically synthesized
  source 1..22: mol_type = other DNA
tttgaaaagatcaacaaaattg

SEQ ID NO: 150055 - DNA, 22 bp, synthetic construct
  misc_feature 1..22: note = chemically synthesized
  source 1..22: mol_type = other DNA
ttgaaaagatcaacaaaattga

SEQ ID NO: 150056 - DNA, 22 bp, synthetic construct
  misc_feature 1..22: note = chemically synthesized
  source 1..22: mol_type = other DNA
tgaaaagatcaacaaaattgat

SEQ ID NO: 150057 - DNA, 22 bp, synthetic construct
  misc_feature 1..22: note = chemically synthesized
  source 1..22: mol_type = other DNA
gaaaagatcaacaaaattgata

SEQ ID NO: 150058 - DNA, 22 bp, synthetic construct
  misc_feature 1..22: note = chemically synthesized
  source 1..22: mol_type = other DNA
aaaagatcaacaaaattgatag

SEQ ID NO: 150059 - DNA, 22 bp, synthetic construct
  misc_feature 1..22: note = chemically synthesized
  source 1..22: mol_type = other DNA
atagactgctagcaagactaat

SEQ ID NO: 150060 - DNA, 22 bp, synthetic construct
  misc_feature 1..22: note = chemically synthesized
  source 1..22: mol_type = other DNA
ctagcaagactaataaagaaga

SEQ ID NO: 150061 - DNA, 22 bp, synthetic construct
  misc_feature 1..22: note = chemically synthesized
  source 1..22: mol_type = other DNA
gcaagactaataaagaagaaaa

SEQ ID NO: 150062 - DNA, 22 bp, synthetic construct
  misc_feature 1..22: note = chemically synthesized
  source 1..22: mol_type = other DNA
ataaagaagaaaagagagaaga

SEQ ID NO: 150063 - DNA, 22 bp, synthetic construct
  misc_feature 1..22: note = chemically synthesized
  source 1..22: mol_type = other DNA
atcccacagaaatacaaactac

SEQ ID NO: 150064 - DNA, 22 bp, synthetic construct
  misc_feature 1..22: note = chemically synthesized
  source 1..22: mol_type = other DNA
ccgtcagagaatactataaaca

SEQ ID NO: 150065 - DNA, 22 bp, synthetic construct
  misc_feature 1..22: note = chemically synthesized
  source 1..22: mol_type = other DNA
taaacacctctacgcaaataaa

SEQ ID NO: 150066 - DNA, 22 bp, synthetic construct
  misc_feature 1..22: note = chemically synthesized
  source 1..22: mol_type = other DNA
tacgcaaataaactagaaaatc

SEQ ID NO: 150067 - DNA, 22 bp, synthetic construct
  misc_feature 1..22: note = chemically synthesized
  source 1..22: mol_type = other DNA
cgcaaataaactagaaaatcta

SEQ ID NO: 150068 - DNA, 22 bp, synthetic construct
  misc_feature 1..22: note = chemically synthesized
  source 1..22: mol_type = other DNA
gaaaatctagaagaaatggata

SEQ ID NO: 150069 - DNA, 22 bp, synthetic construct
  misc_feature 1..22: note = chemically synthesized
  source 1..22: mol_type = other DNA
gaagaaatggataaattcctcg

SEQ ID NO: 150070 - DNA, 22 bp, synthetic construct
  misc_feature 1..22: note = chemically synthesized
  source 1..22: mol_type = other DNA
ctcgacacatacactctgccaa

SEQ ID NO: 150071 - DNA, 22 bp, synthetic construct
  misc_feature 1..22: note = chemically synthesized
  source 1..22: mol_type = other DNA
gacacatacactctgccaagac

SEQ ID NO: 150072 - DNA, 22 bp, synthetic construct
  misc_feature 1..22: note = chemically synthesized
  source 1..22: mol_type = other DNA
tgccaagactaaaccaggaaga

SEQ ID NO: 150073 - DNA, 22 bp, synthetic construct
  misc_feature 1..22: note = chemically synthesized
  source 1..22: mol_type = other DNA
ccaagactaaaccaggaagaag

SEQ ID NO: 150074 - DNA, 22 bp, synthetic construct
  misc_feature 1..22: note = chemically synthesized
  source 1..22: mol_type = other DNA
aaccaggaagaagttgtatctc

SEQ ID NO: 150075 - DNA, 22 bp, synthetic construct
  misc_feature 1..22: note = chemically synthesized
  source 1..22: mol_type = other DNA
tatctctgaatagaccaataac

SEQ ID NO: 150076 - DNA, 22 bp, synthetic construct
  misc_feature 1..22: note = chemically synthesized
  source 1..22: mol_type = other DNA
tgaatagaccaataacaggctc

SEQ ID NO: 150077 - DNA, 22 bp, synthetic construct
  misc_feature 1..22: note = chemically synthesized
  source 1..22: mol_type = other DNA
aatagaccaataacaggctctg

SEQ ID NO: 150078 - DNA, 22 bp, synthetic construct
  misc_feature 1..22: note = chemically synthesized
  source 1..22: mol_type = other DNA
tgaaattgaggcaataattaat

SEQ ID NO: 150079 - DNA, 22 bp, synthetic construct
  misc_feature 1..22: note = chemically synthesized
  source 1..22: mol_type = other DNA
aaattgaggcaataattaatag

SEQ ID NO: 150080 - DNA, 22 bp, synthetic construct
  misc_feature 1..22: note = chemically synthesized
  source 1..22: mol_type = other DNA
aggcaataattaatagcttatc

SEQ ID NO: 150081 - DNA, 22 bp, synthetic construct
  misc_feature 1..22: note = chemically synthesized
  source 1..22: mol_type = other DNA
atagcttatcaaccaaaaaaag

SEQ ID NO: 150082 - DNA, 22 bp, synthetic construct
  misc_feature 1..22: note = chemically synthesized
  source 1..22: mol_type = other DNA
atcaaccaaaaaaagtccggga

SEQ ID NO: 150083 - DNA, 22 bp, synthetic construct
  misc_feature 1..22: note = chemically synthesized
  source 1..22: mol_type = other DNA
tcaaccaaaaaaagtccgggac

SEQ ID NO: 150084 - DNA, 22 bp, synthetic construct
  misc_feature 1..22: note = chemically synthesized
  source 1..22: mol_type = other DNA
atagccgaattctaccagaggt

SEQ ID NO: 150085 - DNA, 22 bp, synthetic construct
  misc_feature 1..22: note = chemically synthesized
  source 1..22: mol_type = other DNA
taccagaggtacaaggaggagc

SEQ ID NO: 150086 - DNA, 22 bp, synthetic construct
  misc_feature 1..22: note = chemically synthesized
  source 1..22: mol_type = other DNA
ccagaggtacaaggaggagctg

SEQ ID NO: 150087 - DNA, 22 bp, synthetic construct
  misc_feature 1..22: note = chemically synthesized
  source 1..22: mol_type = other DNA
gtaccattccttctgaaactat

SEQ ID NO: 150088 - DNA, 22 bp, synthetic construct
  misc_feature 1..22: note = chemically synthesized
  source 1..22: mol_type = other DNA
cttctgaaactattccaatcaa

SEQ ID NO: 150089 - DNA, 22 bp, synthetic construct
  misc_feature 1..22: note = chemically synthesized
  source 1..22: mol_type = other DNA
ctgaaactattccaatcaatag

SEQ ID NO: 150090 - DNA, 22 bp, synthetic construct
  misc_feature 1..22: note = chemically synthesized
  source 1..22: mol_type = other DNA
tgaaactattccaatcaataga

SEQ ID NO: 150091 - DNA, 22 bp, synthetic construct
  misc_feature 1..22: note = chemically synthesized
  source 1..22: mol_type = other DNA
aaactattccaatcaatagaaa

SEQ ID NO: 150092 - DNA, 22 bp, synthetic construct
  misc_feature 1..22: note = chemically synthesized
  source 1..22: mol_type = other DNA
ttccaatcaatagaaaaagagg

SEQ ID NO: 150093 - DNA, 22 bp, synthetic construct
  misc_feature 1..22: note = chemically synthesized
  source 1..22: mol_type = other DNA
caatcaatagaaaaagagggaa

SEQ ID NO: 150094 - DNA, 22 bp, synthetic construct
  misc_feature 1..22: note = chemically synthesized
  source 1..22: mol_type = other DNA
cctaactcattttatgaggcca

SEQ ID NO: 150095 - DNA, 22 bp, synthetic construct
  misc_feature 1..22: note = chemically synthesized
  source 1..22: mol_type = other DNA
actcattttatgaggccagcat

SEQ ID NO: 150096 - DNA, 22 bp, synthetic construct
  misc_feature 1..22: note = chemically synthesized
  source 1..22: mol_type = other DNA
attttatgaggccagcatcatc

SEQ ID NO: 150097 - DNA, 22 bp, synthetic construct
  misc_feature 1..22: note = chemically synthesized
  source 1..22: mol_type = other DNA
tatgaggccagcatcatcctga

SEQ ID NO: 150098 - DNA, 22 bp, synthetic construct
  misc_feature 1..22: note = chemically synthesized
  source 1..22: mol_type = other DNA
atgaggccagcatcatcctgat

SEQ ID NO: 150099 - DNA, 22 bp, synthetic construct
  misc_feature 1..22: note = chemically synthesized
  source 1..22: mol_type = other DNA
tgaggccagcatcatcctgata

SEQ ID NO: 150100 - DNA, 22 bp, synthetic construct
  misc_feature 1..22: note = chemically synthesized
  source 1..22: mol_type = other DNA
ataccaaagcctgacagagaca

SEQ ID NO: 150101 - DNA, 22 bp, synthetic construct
  misc_feature 1..22: note = chemically synthesized
  source 1..22: mol_type = other DNA
acagagacacaacaaaaaaaga

SEQ ID NO: 150102 - DNA, 22 bp, synthetic construct
  misc_feature 1..22: note = chemically synthesized
  source 1..22: mol_type = other DNA
caccaatatccttgatgaacat

SEQ ID NO: 150103 - DNA, 22 bp, synthetic construct
  misc_feature 1..22: note = chemically synthesized
  source 1..22: mol_type = other DNA
gatgaacattgatgcaaaaatc

SEQ ID NO: 150104 - DNA, 22 bp, synthetic construct
  misc_feature 1..22: note = chemically synthesized
  source 1..22: mol_type = other DNA
atgaacattgatgcaaaaatcc

SEQ ID NO: 150105 - DNA, 22 bp, synthetic construct
  misc_feature 1..22: note = chemically synthesized
  source 1..22: mol_type = other DNA
atgcaaaaatcctcaataaaat

SEQ ID NO: 150106 - DNA, 22 bp, synthetic construct
  misc_feature 1..22: note = chemically synthesized
  source 1..22: mol_type = other DNA
aataaaatactggcaaactgat

SEQ ID NO: 150107 - DNA, 22 bp, synthetic construct
  misc_feature 1..22: note = chemically synthesized
  source 1..22: mol_type = other DNA
gcaaactgatccaccatgatca

SEQ ID NO: 150108 - DNA, 22 bp, synthetic construct
  misc_feature 1..22: note = chemically synthesized
  source 1..22: mol_type = other DNA
atccaccatgatcaagtgggct

SEQ ID NO: 150109 - DNA, 22 bp, synthetic construct
  misc_feature 1..22: note = chemically synthesized
  source 1..22: mol_type = other DNA
catccctgccatgcaaggctgg

SEQ ID NO: 150110 - DNA, 22 bp, synthetic construct
  misc_feature 1..22: note = chemically synthesized
  source 1..22: mol_type = other DNA
atccctgccatgcaaggctggt

SEQ ID NO: 150111 - DNA, 22 bp, synthetic construct
  misc_feature 1..22: note = chemically synthesized
  source 1..22: mol_type = other DNA
ccatgcaaggctggttcaacat

SEQ ID NO: 150112 - DNA, 22 bp, synthetic construct
  misc_feature 1..22: note = chemically synthesized
  source 1..22: mol_type = other DNA
gttcaacatacgaaaatcaata

SEQ ID NO: 150113 - DNA, 22 bp, synthetic construct
  misc_feature 1..22: note = chemically synthesized
  source 1..22: mol_type = other DNA
aacatacgaaaatcaataaaca

SEQ ID NO: 150114 - DNA, 22 bp, synthetic construct
  misc_feature 1..22: note = chemically synthesized
  source 1..22: mol_type = other DNA
tctcaatagatgcagaaaaggc

SEQ ID NO: 150115 - DNA, 22 bp, synthetic construct
  misc_feature 1..22: note = chemically synthesized
  source 1..22: mol_type = other DNA
aatagatgcagaaaaggccttt

SEQ ID NO: 150116 - DNA, 22 bp, synthetic construct
  misc_feature 1..22: note = chemically synthesized
  source 1..22: mol_type = other DNA
tgacaaaattcaacaacgcttc

SEQ ID NO: 150117 - DNA, 22 bp, synthetic construct
  misc_feature 1..22: note = chemically synthesized
  source 1..22: mol_type = other DNA
gacaaaattcaacaacgcttca

SEQ ID NO: 150118 - DNA, 22 bp, synthetic construct
  misc_feature 1..22: note = chemically synthesized
  source 1..22: mol_type = other DNA
acaaaattcaacaacgcttcat

SEQ ID NO: 150119 - DNA, 22 bp, synthetic construct
  misc_feature 1..22: note = chemically synthesized
  source 1..22: mol_type = other DNA
aacaacgcttcatgctaaaaac

SEQ ID NO: 150120 - DNA, 22 bp, synthetic construct
  misc_feature 1..22: note = chemically synthesized
  source 1..22: mol_type = other DNA
catgctaaaaactctcaataaa

SEQ ID NO: 150121 - DNA, 22 bp, synthetic construct
  misc_feature 1..22: note = chemically synthesized
  source 1..22: mol_type = other DNA
atgctaaaaactctcaataaat

SEQ ID NO: 150122 - DNA, 22 bp, synthetic construct
  misc_feature 1..22: note = chemically synthesized
  source 1..22: mol_type = other DNA
aaaactctcaataaattaggta

SEQ ID NO: 150123 - DNA, 22 bp, synthetic construct
  misc_feature 1..22: note = chemically synthesized
  source 1..22: mol_type = other DNA
tcaataaattaggtattgatgg

SEQ ID NO: 150124 - DNA, 22 bp, synthetic construct
  misc_feature 1..22: note = chemically synthesized
  source 1..22: mol_type = other DNA
aataaattaggtattgatggga

SEQ ID NO: 150125 - DNA, 22 bp, synthetic construct
  misc_feature 1..22: note = chemically synthesized
  source 1..22: mol_type = other DNA
ggtattgatgggacatatctca

SEQ ID NO: 150126 - DNA, 22 bp, synthetic construct
  misc_feature 1..22: note = chemically synthesized
  source 1..22: mol_type = other DNA
atgggacatatctcaaaataat

SEQ ID NO: 150127 - DNA, 22 bp, synthetic construct
  misc_feature 1..22: note = chemically synthesized
  source 1..22: mol_type = other DNA
aaaataataagagctatctatg

SEQ ID NO: 150128 - DNA, 22 bp, synthetic construct
  misc_feature 1..22: note = chemically synthesized
  source 1..22: mol_type = other DNA
tctatgacaaacccacagccaa

SEQ ID NO: 150129 - DNA, 22 bp, synthetic construct
  misc_feature 1..22: note = chemically synthesized
  source 1..22: mol_type = other DNA
tgacaaacccacagccaatatc

SEQ ID NO: 150130 - DNA, 22 bp, synthetic construct
  misc_feature 1..22: note = chemically synthesized
  source 1..22: mol_type = other DNA
agtggacaaaaactggaagcat

SEQ ID NO: 150131 - DNA, 22 bp, synthetic construct
  misc_feature 1..22: note = chemically synthesized
  source 1..22: mol_type = other DNA
gaagcattccctttgaaaactg

SEQ ID NO: 150132 - DNA, 22 bp, synthetic construct
  misc_feature 1..22: note = chemically synthesized
  source 1..22: mol_type = other DNA
cctttgaaaactggcacaaggc

SEQ ID NO: 150133 - DNA, 22 bp, synthetic construct
  misc_feature 1..22: note = chemically synthesized
  source 1..22: mol_type = other DNA
tgaaaactggcacaaggcaggg

SEQ ID NO: 150134 - DNA, 22 bp, synthetic construct
  misc_feature 1..22: note = chemically synthesized
  source 1..22: mol_type = other DNA
gaaaactggcacaaggcaggga

SEQ ID NO: 150135 - DNA, 22 bp, synthetic construct
  misc_feature 1..22: note = chemically synthesized
  source 1..22: mol_type = other DNA
aaaactggcacaaggcagggat

SEQ ID NO: 150136 - DNA, 22 bp, synthetic construct
  misc_feature 1..22: note = chemically synthesized
  source 1..22: mol_type = other DNA
gcacaaggcagggatgccctct

SEQ ID NO: 150137 - DNA, 22 bp, synthetic construct
  misc_feature 1..22: note = chemically synthesized
  source 1..22: mol_type = other DNA
tctcaccactcctattcaacat

SEQ ID NO: 150138 - DNA, 22 bp, synthetic construct
  misc_feature 1..22: note = chemically synthesized
  source 1..22: mol_type = other DNA
tcaccactcctattcaacatag

SEQ ID NO: 150139 - DNA, 22 bp, synthetic construct
  misc_feature 1..22: note = chemically synthesized
  source 1..22: mol_type = other DNA
accactcctattcaacatagtg

SEQ ID NO: 150140 - DNA, 22 bp, synthetic construct
  misc_feature 1..22: note = chemically synthesized
  source 1..22: mol_type = other DNA
ctattcaacatagtgttgtaag

SEQ ID NO: 150141 - DNA, 22 bp, synthetic construct
  misc_feature 1..22: note = chemically synthesized
  source 1..22: mol_type = other DNA
ttcaacatagtgttgtaagttc

SEQ ID NO: 150142 - DNA, 22 bp, synthetic construct
  misc_feature 1..22: note = chemically synthesized
  source 1..22: mol_type = other DNA
aacatagtgttgtaagttctgg

SEQ ID NO: 150143 - DNA, 22 bp, synthetic construct
  misc_feature 1..22: note = chemically synthesized
  source 1..22: mol_type = other DNA
taagttctggccagggcaatca

SEQ ID NO: 150144 - DNA, 22 bp, synthetic construct
  misc_feature 1..22: note = chemically synthesized
  source 1..22: mol_type = other DNA
tggccagggcaatcaggcagga

SEQ ID NO: 150145 - DNA, 22 bp, synthetic construct
  misc_feature 1..22: note = chemically synthesized
  source 1..22: mol_type = other DNA
gccagggcaatcaggcaggaga

SEQ ID NO: 150146 - DNA, 22 bp, synthetic construct
  misc_feature 1..22: note = chemically synthesized
  source 1..22: mol_type = other DNA
aattaggaaaagaggaagtgaa

SEQ ID NO: 150147 - DNA, 22 bp, synthetic construct
  misc_feature 1..22: note = chemically synthesized
  source 1..22: mol_type = other DNA
ggaaaagaggaagtgaaattgt

SEQ ID NO: 150148 - DNA, 22 bp, synthetic construct
  misc_feature 1..22: note = chemically synthesized
  source 1..22: mol_type = other DNA
tccctgtttgcagatgacatga

SEQ ID NO: 150149 - DNA, 22 bp, synthetic construct
  misc_feature 1..22: note = chemically synthesized
  source 1..22: mol_type = other DNA
tttgcagatgacatgattgtat

SEQ ID NO: 150150 - DNA, 22 bp, synthetic construct
  misc_feature 1..22: note = chemically synthesized
  source 1..22: mol_type = other DNA
gcagatgacatgattgtatatc

SEQ ID NO: 150151 - DNA, 22 bp, synthetic construct
  misc_feature 1..22: note = chemically synthesized
  source 1..22: mol_type = other DNA
cagatgacatgattgtatatct

SEQ ID NO: 150152 - DNA, 22 bp, synthetic construct
  misc_feature 1..22: note = chemically synthesized
  source 1..22: mol_type = other DNA
tatatctagaaaaccccattgt

SEQ ID NO: 150153 - DNA, 22 bp, synthetic construct
  misc_feature 1..22: note = chemically synthesized
  source 1..22: mol_type = other DNA
gaaaaccccattgtctcagccc

SEQ ID NO: 150154 - DNA, 22 bp, synthetic construct
  misc_feature 1..22: note = chemically synthesized
  source 1..22: mol_type = other DNA
tctcagcccaaaatctccttaa

SEQ ID NO: 150155 - DNA, 22 bp, synthetic construct
  misc_feature 1..22: note = chemically synthesized
  source 1..22: mol_type = other DNA
agcccaaaatctccttaagctg

SEQ ID NO: 150156 - DNA, 22 bp, synthetic construct
  misc_feature 1..22: note = chemically synthesized
  source 1..22: mol_type = other DNA
cttaagctgataagcaacttca

SEQ ID NO: 150157 - DNA, 22 bp, synthetic construct
  misc_feature 1..22: note = chemically synthesized
  source 1..22: mol_type = other DNA
aagctgataagcaacttcagca

SEQ ID NO: 150158 - DNA, 22 bp, synthetic construct
  misc_feature 1..22: note = chemically synthesized
  source 1..22: mol_type = other DNA
agctgataagcaacttcagcaa

SEQ ID NO: 150159 - DNA, 22 bp, synthetic construct
  misc_feature 1..22: note = chemically synthesized
  source 1..22: mol_type = other DNA
ataagcaacttcagcaaagtct

SEQ ID NO: 150160 - DNA, 22 bp, synthetic construct
  misc_feature 1..22: note = chemically synthesized
  source 1..22: mol_type = other DNA
cagcaaagtctcaggatataaa

SEQ ID NO: 150161 - DNA, 22 bp, synthetic construct
  misc_feature 1..22: note = chemically synthesized
  source 1..22: mol_type = other DNA
agcaaagtctcaggatataaaa

SEQ ID NO: 150162 - DNA, 22 bp, synthetic construct
  misc_feature 1..22: note = chemically synthesized
  source 1..22: mol_type = other DNA
aggatataaaatcagtgtgcaa

SEQ ID NO: 150163 - DNA, 22 bp, synthetic construct
  misc_feature 1..22: note = chemically synthesized
  source 1..22: mol_type = other DNA
ctatgcaccaataacagacaaa

SEQ ID NO: 150164 - DNA, 22 bp, synthetic construct
  misc_feature 1..22: note = chemically synthesized
  source 1..22: mol_type = other DNA
tgcaccaataacagacaaacag

SEQ ID NO: 150165 - DNA, 22 bp, synthetic construct
  misc_feature 1..22: note = chemically synthesized
  source 1..22: mol_type = other DNA
ccattcacaattgcttcaaaga

SEQ ID NO: 150166 - DNA, 22 bp, synthetic construct
  misc_feature 1..22: note = chemically synthesized
  source 1..22: mol_type = other DNA
acaattgcttcaaagagaataa

SEQ ID NO: 150167 - DNA, 22 bp, synthetic construct
  misc_feature 1..22: note = chemically synthesized
  source 1..22: mol_type = other DNA
cttcaaagagaataaaatacct

SEQ ID NO: 150168 - DNA, 22 bp, synthetic construct
  misc_feature 1..22: note = chemically synthesized
  source 1..22: mol_type = other DNA
caaagagaataaaatacctagg

SEQ ID NO: 150169 - DNA, 22 bp, synthetic construct
  misc_feature 1..22: note = chemically synthesized
  source 1..22: mol_type = other DNA
aaagagaataaaatacctagga

SEQ ID NO: 150170 - DNA, 22 bp, synthetic construct
  misc_feature 1..22: note = chemically synthesized
  source 1..22: mol_type = other DNA
ggaatccaacttacaagggatg

SEQ ID NO: 150171 - DNA, 22 bp, synthetic construct
  misc_feature 1..22: note = chemically synthesized
  source 1..22: mol_type = other DNA
acaagggatgtgaaggacctct

SEQ ID NO: 150172 - DNA, 22 bp, synthetic construct
  misc_feature 1..22: note = chemically synthesized
  source 1..22: mol_type = other DNA
caagggatgtgaaggacctctt

SEQ ID NO: 150173 - DNA, 22 bp, synthetic construct
  misc_feature 1..22: note = chemically synthesized
  source 1..22: mol_type = other DNA
ttcaaggagaactacaaaccac

SEQ ID NO: 150174 - DNA, 22 bp, synthetic construct
  misc_feature 1..22: note = chemically synthesized
  source 1..22: mol_type = other DNA
caaggagaactacaaaccactg

SEQ ID NO: 150175 - DNA, 22 bp, synthetic construct
  misc_feature 1..22: note = chemically synthesized
  source 1..22: mol_type = other DNA
aaggagaactacaaaccactgc

SEQ ID NO: 150176 - DNA, 22 bp, synthetic construct
  misc_feature 1..22: note = chemically synthesized
  source 1..22: mol_type = other DNA
caaaccactgctcaatgaaata

SEQ ID NO: 150177 - DNA, 22 bp, synthetic construct
  misc_feature 1..22: note = chemically synthesized
  source 1..22: mol_type = other DNA
ctcaatgaaataaaagaggata

SEQ ID NO: 150178 - DNA, 22 bp, synthetic construct
  misc_feature 1..22: note = chemically synthesized
  source 1..22: mol_type = other DNA
aatgaaataaaagaggatacaa

SEQ ID NO: 150179 - DNA, 22 bp, synthetic construct
  misc_feature 1..22: note = chemically synthesized
  source 1..22: mol_type = other DNA
catgctcatgggtaggaagaat

SEQ ID NO: 150180 - DNA, 22 bp, synthetic construct
  misc_feature 1..22: note = chemically synthesized
  source 1..22: mol_type = other DNA
atgggtaggaagaatcaatatc

SEQ ID NO: 150181 - DNA, 22 bp, synthetic construct
  misc_feature 1..22: note = chemically synthesized
  source 1..22: mol_type = other DNA
cccaaggtaatttatagattca

SEQ ID NO: 150182 - DNA, 22 bp, synthetic construct
  misc_feature 1..22: note = chemically synthesized
  source 1..22: mol_type = other DNA
atagattcaatgccatccccat

SEQ ID NO: 150183 - DNA, 22 bp, synthetic construct
  misc_feature 1..22: note = chemically synthesized
  source 1..22: mol_type = other DNA
tagattcaatgccatccccatc

SEQ ID NO: 150184 - DNA, 22 bp, synthetic construct
  misc_feature 1..22: note = chemically synthesized
  source 1..22: mol_type = other DNA
aatgccatccccatcaagctac

SEQ ID NO: 150185 - DNA, 22 bp, synthetic construct
  misc_feature 1..22: note = chemically synthesized
  source 1..22: mol_type = other DNA
ccaatgactttcttcacagaac

SEQ ID NO: 150186 - DNA, 22 bp, synthetic construct
  misc_feature 1..22: note = chemically synthesized
  source 1..22: mol_type = other DNA
tcttcacagaactggaaaaaac

SEQ ID NO: 150187 - DNA, 22 bp, synthetic construct
  misc_feature 1..22: note = chemically synthesized
  source 1..22: mol_type = other DNA
cttcacagaactggaaaaaact

SEQ ID NO: 150188 - DNA, 22 bp, synthetic construct
  misc_feature 1..22: note = chemically synthesized
  source 1..22: mol_type = other DNA
ttcacagaactggaaaaaacta

SEQ ID NO: 150189 - DNA, 22 bp, synthetic construct
  misc_feature 1..22: note = chemically synthesized
  source 1..22: mol_type = other DNA
cacagaactggaaaaaactact

SEQ ID NO: 150190 - DNA, 22 bp, synthetic construct
  misc_feature 1..22: note = chemically synthesized
  source 1..22: mol_type = other DNA
acagaactggaaaaaactactt

SEQ ID NO: 150191 - DNA, 22 bp, synthetic construct
  misc_feature 1..22: note = chemically synthesized
  source 1..22: mol_type = other DNA
gaaaaaactactttaaagttca

SEQ ID NO: 150192 - DNA, 22 bp, synthetic construct
  misc_feature 1..22: note = chemically synthesized
  source 1..22: mol_type = other DNA
ctttaaagttcatatggaacca

SEQ ID NO: 150193 - DNA, 22 bp, synthetic construct
  misc_feature 1..22: note = chemically synthesized
  source 1..22: mol_type = other DNA
taaagttcatatggaaccaaaa

SEQ ID NO: 150194 - DNA, 22 bp, synthetic construct
  misc_feature 1..22: note = chemically synthesized
  source 1..22: mol_type = other DNA
aaagttcatatggaaccaaaaa

SEQ ID NO: 150195 - DNA, 22 bp, synthetic construct
  misc_feature 1..22: note = chemically synthesized
  source 1..22: mol_type = other DNA
aagttcatatggaaccaaaaaa

SEQ ID NO: 150196 - DNA, 22 bp, synthetic construct
  misc_feature 1..22: note = chemically synthesized
  source 1..22: mol_type = other DNA
atatggaaccaaaaaagagccc

SEQ ID NO: 150197 - DNA, 22 bp, synthetic construct
  misc_feature 1..22: note = chemically synthesized
  source 1..22: mol_type = other DNA
agccaaaagaacaaagctggag

SEQ ID NO: 150198 - DNA, 22 bp, synthetic construct
  misc_feature 1..22: note = chemically synthesized
  source 1..22: mol_type = other DNA
gaggcatcacgctacctgactt

SEQ ID NO: 150199 - DNA, 22 bp, synthetic construct
  misc_feature 1..22: note = chemically synthesized
  source 1..22: mol_type = other DNA
cctgacttcaaactatactaca

SEQ ID NO: 150200 - DNA, 22 bp, synthetic construct
  misc_feature 1..22: note = chemically synthesized
  source 1..22: mol_type = other DNA
acttcaaactatactacaatgc

SEQ ID NO: 150201 - DNA, 22 bp, synthetic construct
  misc_feature 1..22: note = chemically synthesized
  source 1..22: mol_type = other DNA
caaactatactacaatgctacg

SEQ ID NO: 150202 - DNA, 22 bp, synthetic construct
  misc_feature 1..22: note = chemically synthesized
  source 1..22: mol_type = other DNA
aaactatactacaatgctacgg

SEQ ID NO: 150203 - DNA, 22 bp, synthetic construct
  misc_feature 1..22: note = chemically synthesized
  source 1..22: mol_type = other DNA
tactacaatgctacggtaacca

SEQ ID NO: 150204 - DNA, 22 bp, synthetic construct
  misc_feature 1..22: note = chemically synthesized
  source 1..22: mol_type = other DNA
caatgctacggtaaccaaaaca

SEQ ID NO: 150205 - DNA, 22 bp, synthetic construct
  misc_feature 1..22: note = chemically synthesized
  source 1..22: mol_type = other DNA
cggtaaccaaaacagcatggta

SEQ ID NO: 150206 - DNA, 22 bp, synthetic construct
  misc_feature 1..22: note = chemically synthesized
  source 1..22: mol_type = other DNA
gtaccaaaacagagatctagac

SEQ ID NO: 150207 - DNA, 22 bp, synthetic construct
  misc_feature 1..22: note = chemically synthesized
  source 1..22: mol_type = other DNA
gaccaatggaacagaacagagc

SEQ ID NO: 150208 - DNA, 22 bp, synthetic construct
  misc_feature 1..22: note = chemically synthesized
  source 1..22: mol_type = other DNA
agaaataatgccgcatatctac

SEQ ID NO: 150209 - DNA, 22 bp, synthetic construct
  misc_feature 1..22: note = chemically synthesized
  source 1..22: mol_type = other DNA
caactatctgatctttgacaaa

SEQ ID NO: 150210 - DNA, 22 bp, synthetic construct
  misc_feature 1..22: note = chemically synthesized
  source 1..22: mol_type = other DNA
tctgatctttgacaaacctgag

SEQ ID NO: 150211 - DNA, 22 bp, synthetic construct
  misc_feature 1..22: note = chemically synthesized
  source 1..22: mol_type = other DNA
atctttgacaaacctgagagaa

SEQ ID NO: 150212 - DNA, 22 bp, synthetic construct
  misc_feature 1..22: note = chemically synthesized
  source 1..22: mol_type = other DNA
tgacaaacctgagagaaacaag

SEQ ID NO: 150213 - DNA, 22 bp, synthetic construct
  misc_feature 1..22: note = chemically synthesized
  source 1..22: mol_type = other DNA
gacaaacctgagagaaacaagc

SEQ ID NO: 150214 - DNA, 22 bp, synthetic construct
  misc_feature 1..22: note = chemically synthesized
  source 1..22: mol_type = other DNA
acaaacctgagagaaacaagca

SEQ ID NO: 150215 - DNA, 22 bp, synthetic construct
  misc_feature 1..22: note = chemically synthesized
  source 1..22: mol_type = other DNA
agagaaacaagcaatggggaaa

SEQ ID NO: 150216 - DNA, 22 bp, synthetic construct
  misc_feature 1..22: note = chemically synthesized
  source 1..22: mol_type = other DNA
cctatttaataaatggtgctgg

SEQ ID NO: 150217 - DNA, 22 bp, synthetic construct
  misc_feature 1..22: note = chemically synthesized
  source 1..22: mol_type = other DNA
tttaataaatggtgctgggaaa

SEQ ID NO: 150218 - DNA, 22 bp, synthetic construct
  misc_feature 1..22: note = chemically synthesized
  source 1..22: mol_type = other DNA
aataaatggtgctgggaaaact

SEQ ID NO: 150219 - DNA, 22 bp, synthetic construct
  misc_feature 1..22: note = chemically synthesized
  source 1..22: mol_type = other DNA
ataaatggtgctgggaaaactg

SEQ ID NO: 150220 - DNA, 22 bp, synthetic construct
  misc_feature 1..22: note = chemically synthesized
  source 1..22: mol_type = other DNA
ggaaaactggctagccatatgt

SEQ ID NO: 150221 - DNA, 22 bp, synthetic construct
  misc_feature 1..22: note = chemically synthesized
  source 1..22: mol_type = other DNA
gctagccatatgtagaaagctg

SEQ ID NO: 150222 - DNA, 22 bp, synthetic construct
  misc_feature 1..22: note = chemically synthesized
  source 1..22: mol_type = other DNA
gccatatgtagaaagctgaaac

SEQ ID NO: 150223 - DNA, 22 bp, synthetic construct
  misc_feature 1..22: note = chemically synthesized
  source 1..22: mol_type = other DNA
aaactggatcccttccttacac

SEQ ID NO: 150224 - DNA, 22 bp, synthetic construct
  misc_feature 1..22: note = chemically synthesized
  source 1..22: mol_type = other DNA
gatcccttccttacaccttata

SEQ ID NO: 150225 - DNA, 22 bp, synthetic construct
  misc_feature 1..22: note = chemically synthesized
  source 1..22: mol_type = other DNA
ccttacaccttatacaaaaatt

SEQ ID NO: 150226 - DNA, 22 bp, synthetic construct
  misc_feature 1..22: note = chemically synthesized
  source 1..22: mol_type = other DNA
cttacaccttatacaaaaatta

SEQ ID NO: 150227 - DNA, 22 bp, synthetic construct
  misc_feature 1..22: note = chemically synthesized
  source 1..22: mol_type = other DNA
acaccttatacaaaaattaatt

SEQ ID NO: 150228 - DNA, 22 bp, synthetic construct
  misc_feature 1..22: note = chemically synthesized
  source 1..22: mol_type = other DNA
caccttatacaaaaattaattc

SEQ ID NO: 150229 - DNA, 22 bp, synthetic construct
  misc_feature 1..22: note = chemically synthesized
  source 1..22: mol_type = other DNA
atacaaaaattaattcaagatg

SEQ ID NO: 150230 - DNA, 22 bp, synthetic construct
  misc_feature 1..22: note = chemically synthesized
  source 1..22: mol_type = other DNA
tacaaaaattaattcaagatgg

SEQ ID NO: 150231 - DNA, 22 bp, synthetic construct
  misc_feature 1..22: note = chemically synthesized
  source 1..22: mol_type = other DNA
attcaagatggattaaagactt

SEQ ID NO: 150232 - DNA, 22 bp, synthetic construct
  misc_feature 1..22: note = chemically synthesized
  source 1..22: mol_type = other DNA
aagatggattaaagacttacat

SEQ ID NO: 150233 - DNA, 22 bp, synthetic construct
  misc_feature 1..22: note = chemically synthesized
  source 1..22: mol_type = other DNA
aagacttacatgttagacctaa

SEQ ID NO: 150234 - DNA, 22 bp, synthetic construct
  misc_feature 1..22: note = chemically synthesized
  source 1..22: mol_type = other DNA
acatgttagacctaaaaccata

SEQ ID NO: 150235 - DNA, 22 bp, synthetic construct
  misc_feature 1..22: note = chemically synthesized
  source 1..22: mol_type = other DNA
catgttagacctaaaaccataa

SEQ ID NO: 150236 - DNA, 22 bp, synthetic construct
  misc_feature 1..22: note = chemically synthesized
  source 1..22: mol_type = other DNA
gacctaaaaccataaaaaccct

SEQ ID NO: 150237 - DNA, 22 bp, synthetic construct
  misc_feature 1..22: note = chemically synthesized
  source 1..22: mol_type = other DNA
aaaccataaaaaccctagaaaa

SEQ ID NO: 150238 - DNA, 22 bp, synthetic construct
  misc_feature 1..22: note = chemically synthesized
  source 1..22: mol_type = other DNA
gaaaaaaacctaggcaatacca

SEQ ID NO: 150239 - DNA, 22 bp, synthetic construct
  misc_feature 1..22: note = chemically synthesized
  source 1..22: mol_type = other DNA
ggcaataccattcaggacatag

SEQ ID NO: 150240 - DNA, 22 bp, synthetic construct
  misc_feature 1..22: note = chemically synthesized
  source 1..22: mol_type = other DNA
aggacataggcatgggcaagga

SEQ ID NO: 150241 - DNA, 22 bp, synthetic construct
  misc_feature 1..22: note = chemically synthesized
  source 1..22: mol_type = other DNA
catgtctaaaacaccaaaagca

SEQ ID NO: 150242 - DNA, 22 bp, synthetic construct
  misc_feature 1..22: note = chemically synthesized
  source 1..22: mol_type = other DNA
atgtctaaaacaccaaaagcaa

SEQ ID NO: 150243 - DNA, 22 bp, synthetic construct
  misc_feature 1..22: note = chemically synthesized
  source 1..22: mol_type = other DNA
aaacaccaaaagcaatggcaac

SEQ ID NO: 150244 - DNA, 22 bp, synthetic construct
  misc_feature 1..22: note = chemically synthesized
  source 1..22: mol_type = other DNA
attaaactaaagagcttctgca

SEQ ID NO: 150245 - DNA, 22 bp, synthetic construct
  misc_feature 1..22: note = chemically synthesized
  source 1..22: mol_type = other DNA
aactaaagagcttctgcacagc

SEQ ID NO: 150246 - DNA, 22 bp, synthetic construct
  misc_feature 1..22: note = chemically synthesized
  source 1..22: mol_type = other DNA
aagagcttctgcacagctaaag

SEQ ID NO: 150247 - DNA, 22 bp, synthetic construct
  misc_feature 1..22: note = chemically synthesized
  source 1..22: mol_type = other DNA
ctgcacagctaaagaaactacc

SEQ ID NO: 150248 - DNA, 22 bp, synthetic construct
  misc_feature 1..22: note = chemically synthesized
  source 1..22: mol_type = other DNA
tgcacagctaaagaaactacca

SEQ ID NO: 150249 - DNA, 22 bp, synthetic construct
  misc_feature 1..22: note = chemically synthesized
  source 1..22: mol_type = other DNA
cacagctaaagaaactaccatc

SEQ ID NO: 150250 - DNA, 22 bp, synthetic construct
  misc_feature 1..22: note = chemically synthesized
  source 1..22: mol_type = other DNA
aagaaactaccatcagagtgaa

SEQ ID NO: 150251 - DNA, 22 bp, synthetic construct
  misc_feature 1..22: note = chemically synthesized
  source 1..22: mol_type = other DNA
ccatcagagtgaacaggcaacc

SEQ ID NO: 150252 - DNA, 22 bp, synthetic construct
  misc_feature 1..22: note = chemically synthesized
  source 1..22: mol_type = other DNA
caaaatgggagaaaatttttgc

SEQ ID NO: 150253 - DNA, 22 bp, synthetic construct
  misc_feature 1..22: note = chemically synthesized
  source 1..22: mol_type = other DNA
ttgcaatctactcatctgacaa

SEQ ID NO: 150254 - DNA, 22 bp, synthetic construct
  misc_feature 1..22: note = chemically synthesized
  source 1..22: mol_type = other DNA
tgcaatctactcatctgacaaa

SEQ ID NO: 150255 - DNA, 22 bp, synthetic construct
  misc_feature 1..22: note = chemically synthesized
  source 1..22: mol_type = other DNA
gcaatctactcatctgacaaag

SEQ ID NO: 150256 - DNA, 22 bp, synthetic construct
  misc_feature 1..22: note = chemically synthesized
  source 1..22: mol_type = other DNA
caatctactcatctgacaaagg

SEQ ID NO: 150257 - DNA, 22 bp, synthetic construct
  misc_feature 1..22: note = chemically synthesized
  source 1..22: mol_type = other DNA
ctcatctgacaaagggctaata

SEQ ID NO: 150258 - DNA, 22 bp, synthetic construct
  misc_feature 1..22: note = chemically synthesized
  source 1..22: mol_type = other DNA
atctgacaaagggctaatatcc

SEQ ID NO: 150259 - DNA, 22 bp, synthetic construct
  misc_feature 1..22: note = chemically synthesized
  source 1..22: mol_type = other DNA
acaaagggctaatatccagaat

SEQ ID NO: 150260 - DNA, 22 bp, synthetic construct
  misc_feature 1..22: note = chemically synthesized
  source 1..22: mol_type = other DNA
atatccagaatctacaatgaac

SEQ ID NO: 150261 - DNA, 22 bp, synthetic construct
  misc_feature 1..22: note = chemically synthesized
  source 1..22: mol_type = other DNA
caatgaactcaaacaaatttac

SEQ ID NO: 150262 - DNA, 22 bp, synthetic construct
  misc_feature 1..22: note = chemically synthesized
  source 1..22: mol_type = other DNA
aaacaaatttacaagaaaaaac

SEQ ID NO: 150263 - DNA, 22 bp, synthetic construct
  misc_feature 1..22: note = chemically synthesized
  source 1..22: mol_type = other DNA
acaagaaaaaacaaacaacccc

SEQ ID NO: 150264 - DNA, 22 bp, synthetic construct
  misc_feature 1..22: note = chemically synthesized
  source 1..22: mol_type = other DNA
caagaaaaaacaaacaacccca

SEQ ID NO: 150265 - DNA, 22 bp, synthetic construct
  misc_feature 1..22: note = chemically synthesized
  source 1..22: mol_type = other DNA
cgcaaaagaagacatttatgta

SEQ ID NO: 150266 - DNA, 22 bp, synthetic construct
  misc_feature 1..22: note = chemically synthesized
  source 1..22: mol_type = other DNA
gcaaaagaagacatttatgtaa

SEQ ID NO: 150267 - DNA, 22 bp, synthetic construct
  misc_feature 1..22: note = chemically synthesized
  source 1..22: mol_type = other DNA
atgtaatcaaaaaacacatgaa

SEQ ID NO: 150268 - DNA, 22 bp, synthetic construct
  misc_feature 1..22: note = chemically synthesized
  source 1..22: mol_type = other DNA
tgtaatcaaaaaacacatgaaa

SEQ ID NO: 150269 - DNA, 22 bp, synthetic construct
  misc_feature 1..22: note = chemically synthesized
  source 1..22: mol_type = other DNA
atcatcactagccatcagagaa

SEQ ID NO: 150270 - DNA, 22 bp, synthetic construct
  misc_feature 1..22: note = chemically synthesized
  source 1..22: mol_type = other DNA
gccatcagagaaatgcaaatca

SEQ ID NO: 150271 - DNA, 22 bp, synthetic construct
  misc_feature 1..22: note = chemically synthesized
  source 1..22: mol_type = other DNA
acaccagttagaatggcgatca

SEQ ID NO: 150272 - DNA, 22 bp, synthetic construct
  misc_feature 1..22: note = chemically synthesized
  source 1..22: mol_type = other DNA
gaatggcgatcattaaaaagtc

SEQ ID NO: 150273 - DNA, 22 bp, synthetic construct
  misc_feature 1..22: note = chemically synthesized
  source 1..22: mol_type = other DNA
aaaagtcaggaaacaacaggtg

SEQ ID NO: 150274 - DNA, 22 bp, synthetic construct
  misc_feature 1..22: note = chemically synthesized
  source 1..22: mol_type = other DNA
gagaggatgtggagaaacagga

SEQ ID NO: 150275 - DNA, 22 bp, synthetic construct
  misc_feature 1..22: note = chemically synthesized
  source 1..22: mol_type = other DNA
ttacactgttggtgggactgta

SEQ ID NO: 150276 - DNA, 22 bp, synthetic construct
  misc_feature 1..22: note = chemically synthesized
  source 1..22: mol_type = other DNA
tacactgttggtgggactgtaa

SEQ ID NO: 150277 - DNA, 22 bp, synthetic construct
  misc_feature 1..22: note = chemically synthesized
  source 1..22: mol_type = other DNA
acactgttggtgggactgtaaa

SEQ ID NO: 150278 - DNA, 22 bp, synthetic construct
  misc_feature 1..22: note = chemically synthesized
  source 1..22: mol_type = other DNA
cactgttggtgggactgtaaac

SEQ ID NO: 150279 - DNA, 22 bp, synthetic construct
  misc_feature 1..22: note = chemically synthesized
  source 1..22: mol_type = other DNA
ttggtgggactgtaaactagtt

SEQ ID NO: 150280 - DNA, 22 bp, synthetic construct
  misc_feature 1..22: note = chemically synthesized
  source 1..22: mol_type = other DNA
gtgggactgtaaactagttcaa

SEQ ID NO: 150281 - DNA, 22 bp, synthetic construct
  misc_feature 1..22: note = chemically synthesized
  source 1..22: mol_type = other DNA
taaactagttcaaccattgcgg

SEQ ID NO: 150282 - DNA, 22 bp, synthetic construct
  misc_feature 1..22: note = chemically synthesized
  source 1..22: mol_type = other DNA
gttcaaccattgcggaagtcag

SEQ ID NO: 150283 - DNA, 22 bp, synthetic construct
  misc_feature 1..22: note = chemically synthesized
  source 1..22: mol_type = other DNA
aaccattgcggaagtcagtgtg

SEQ ID NO: 150284 - DNA, 22 bp, synthetic construct
  misc_feature 1..22: note = chemically synthesized
  source 1..22: mol_type = other DNA
cggaagtcagtgtggcaattcc

SEQ ID NO: 150285 - DNA, 22 bp, synthetic construct
  misc_feature 1..22: note = chemically synthesized
  source 1..22: mol_type = other DNA
ctcaggaatctagaactagaaa

SEQ ID NO: 150286 - DNA, 22 bp, synthetic construct
  misc_feature 1..22: note = chemically synthesized
  source 1..22: mol_type = other DNA
aggaatctagaactagaaatac

SEQ ID NO: 150287 - DNA, 22 bp, synthetic construct
  misc_feature 1..22: note = chemically synthesized
  source 1..22: mol_type = other DNA
gaactagaaataccatttgacc

SEQ ID NO: 150288 - DNA, 22 bp, synthetic construct
  misc_feature 1..22: note = chemically synthesized
  source 1..22: mol_type = other DNA
gaaataccatttgacccagcca

SEQ ID NO: 150289 - DNA, 22 bp, synthetic construct
  misc_feature 1..22: note = chemically synthesized
  source 1..22: mol_type = other DNA
gacccagccatcccattactgg

SEQ ID NO: 150290 - DNA, 22 bp, synthetic construct
  misc_feature 1..22: note = chemically synthesized
  source 1..22: mol_type = other DNA
acccagccatcccattactggg

SEQ ID NO: 150291 - DNA, 22 bp, synthetic construct
  misc_feature 1..22: note = chemically synthesized
  source 1..22: mol_type = other DNA
ctgggtacatacccaaaggatt

SEQ ID NO: 150292 - DNA, 22 bp, synthetic construct
  misc_feature 1..22: note = chemically synthesized
  source 1..22: mol_type = other DNA
ggtacatacccaaaggattata

SEQ ID NO: 150293 - DNA, 22 bp, synthetic construct
  misc_feature 1..22: note = chemically synthesized
  source 1..22: mol_type = other DNA
taaatcatgctgctataaagac

SEQ ID NO: 150294 - DNA, 22 bp, synthetic construct
  misc_feature 1..22: note = chemically synthesized
  source 1..22: mol_type = other DNA
ctataaagacacatgcacacgt

SEQ ID NO: 150295 - DNA, 22 bp, synthetic construct
  misc_feature 1..22: note = chemically synthesized
  source 1..22: mol_type = other DNA
taaagacacatgcacacgtatg

SEQ ID NO: 150296 - DNA, 22 bp, synthetic construct
  misc_feature 1..22: note = chemically synthesized
  source 1..22: mol_type = other DNA
attgcagcactattcacaatag

SEQ ID NO: 150297 - DNA, 22 bp, synthetic construct
  misc_feature 1..22: note = chemically synthesized
  source 1..22: mol_type = other DNA
ttgcagcactattcacaatagc

SEQ ID NO: 150298 - DNA, 22 bp, synthetic construct
  misc_feature 1..22: note = chemically synthesized
  source 1..22: mol_type = other DNA
cagcactattcacaatagcaaa

SEQ ID NO: 150299 - DNA, 22 bp, synthetic construct
  misc_feature 1..22: note = chemically synthesized
  source 1..22: mol_type = other DNA
ttcacaatagcaaagacttgga

SEQ ID NO: 150300 - DNA, 22 bp, synthetic construct
  misc_feature 1..22: note = chemically synthesized
  source 1..22: mol_type = other DNA
acaatagcaaagacttggaacc

SEQ ID NO: 150301 - DNA, 22 bp, synthetic construct
  misc_feature 1..22: note = chemically synthesized
  source 1..22: mol_type = other DNA
ggaaccaacccaaatgtccaac

SEQ ID NO: 150302 - DNA, 22 bp, synthetic construct
  misc_feature 1..22: note = chemically synthesized
  source 1..22: mol_type = other DNA
gaaccaacccaaatgtccaaca

SEQ ID NO: 150303 - DNA, 22 bp, synthetic construct
  misc_feature 1..22: note = chemically synthesized
  source 1..22: mol_type = other DNA
gattaagaaaatgtggcacata

SEQ ID NO: 150304 - DNA, 22 bp, synthetic construct
  misc_feature 1..22: note = chemically synthesized
  source 1..22: mol_type = other DNA
agaaaatgtggcacatatacac

SEQ ID NO: 150305 - DNA, 22 bp, synthetic construct
  misc_feature 1..22: note = chemically synthesized
  source 1..22: mol_type = other DNA
tgcagccataaaaaatgatgag

SEQ ID NO: 150306 - DNA, 22 bp, synthetic construct
  misc_feature 1..22: note = chemically synthesized
  source 1..22: mol_type = other DNA
atgtcctttgtagggacatgga

SEQ ID NO: 150307 - DNA, 22 bp, synthetic construct
  misc_feature 1..22: note = chemically synthesized
  source 1..22: mol_type = other DNA
tgtagggacatggatgaagctg

SEQ ID NO: 150308 - DNA, 22 bp, synthetic construct
  misc_feature 1..22: note = chemically synthesized
  source 1..22: mol_type = other DNA
gtagggacatggatgaagctgg

SEQ ID NO: 150309 - DNA, 22 bp, synthetic construct
  misc_feature 1..22: note = chemically synthesized
  source 1..22: mol_type = other DNA
tagggacatggatgaagctgga

SEQ ID NO: 150310 - DNA, 22 bp, synthetic construct
  misc_feature 1..22: note = chemically synthesized
  source 1..22: mol_type = other DNA
gaaactatcattctcagcaaac

SEQ ID NO: 150311 - DNA, 22 bp, synthetic construct
  misc_feature 1..22: note = chemically synthesized
  source 1..22: mol_type = other DNA
tcattctcagcaaactatcaca

SEQ ID NO: 150312 - DNA, 22 bp, synthetic construct
  misc_feature 1..22: note = chemically synthesized
  source 1..22: mol_type = other DNA
tcagcaaactatcacaaggaga

SEQ ID NO: 150313 - DNA, 22 bp, synthetic construct
  misc_feature 1..22: note = chemically synthesized
  source 1..22: mol_type = other DNA
agcaaactatcacaaggagaat

SEQ ID NO: 150314 - DNA, 22 bp, synthetic construct
  misc_feature 1..22: note = chemically synthesized
  source 1..22: mol_type = other DNA
tcacaaggagaataaaccaaac

SEQ ID NO: 150315 - DNA, 22 bp, synthetic construct
  misc_feature 1..22: note = chemically synthesized
  source 1..22: mol_type = other DNA
tcactcataggtgggaattgaa

SEQ ID NO: 150316 - DNA, 22 bp, synthetic construct
  misc_feature 1..22: note = chemically synthesized
  source 1..22: mol_type = other DNA
actcataggtgggaattgaaca

SEQ ID NO: 150317 - DNA, 22 bp, synthetic construct
  misc_feature 1..22: note = chemically synthesized
  source 1..22: mol_type = other DNA
ataggtgggaattgaacaatga

SEQ ID NO: 150318 - DNA, 22 bp, synthetic construct
  misc_feature 1..22: note = chemically synthesized
  source 1..22: mol_type = other DNA
aacaatgagaacacatggacac

SEQ ID NO: 150319 - DNA, 22 bp, synthetic construct
  misc_feature 1..22: note = chemically synthesized
  source 1..22: mol_type = other DNA
tggggactgttatggggtgggg

SEQ ID NO: 150320 - DNA, 22 bp, synthetic construct
  misc_feature 1..22: note = chemically synthesized
  source 1..22: mol_type = other DNA
gggactgttatggggtgggggg

SEQ ID NO: 150321 - DNA, 22 bp, synthetic construct
  misc_feature 1..22: note = chemically synthesized
  source 1..22: mol_type = other DNA
ttatggggtggggggcaggggc

SEQ ID NO: 150322 - DNA, 22 bp, synthetic construct
  misc_feature 1..22: note = chemically synthesized
  source 1..22: mol_type = other DNA
tggggtggggggcaggggcagg

SEQ ID NO: 150323 - DNA, 22 bp, synthetic construct
  misc_feature 1..22: note = chemically synthesized
  source 1..22: mol_type = other DNA
ggagatatacctaatgctaaat

SEQ ID NO: 150324 - DNA, 22 bp, synthetic construct
  misc_feature 1..22: note = chemically synthesized
  source 1..22: mol_type = other DNA
atgctaaatgacgagttaatgg

SEQ ID NO: 150325 - DNA, 22 bp, synthetic construct
  misc_feature 1..22: note = chemically synthesized
  source 1..22: mol_type = other DNA
aatgacgagttaatgggtgcag

SEQ ID NO: 150326 - DNA, 22 bp, synthetic construct
  misc_feature 1..22: note = chemically synthesized
  source 1..22: mol_type = other DNA
atgggtgcagcacaccaacatg

SEQ ID NO: 150327 - DNA, 22 bp, synthetic construct
  misc_feature 1..22: note = chemically synthesized
  source 1..22: mol_type = other DNA
catgttgtgcacatgtacccta

SEQ ID NO: 150328 - DNA, 22 bp, synthetic construct
  misc_feature 1..22: note = chemically synthesized
  source 1..22: mol_type = other DNA
tgcacatgtaccctaaaacttg

SEQ ID NO: 150329 - DNA, 22 bp, synthetic construct
  misc_feature 1..22: note = chemically synthesized
  source 1..22: mol_type = other DNA
aaacttgaagtataataataaa

SEQ ID NO: 150330 - DNA, 22 bp, synthetic construct
  misc_feature 1..22: note = chemically synthesized
  source 1..22: mol_type = other DNA
gaagtataataataaaaaaaag

SEQ ID NO: 150331 - DNA, 22 bp, synthetic construct
  misc_feature 1..22: note = chemically synthesized
  source 1..22: mol_type = other DNA
aagtataataataaaaaaaagt

SEQ ID NO: 150332 - DNA, 22 bp, synthetic construct
  misc_feature 1..22: note = chemically synthesized
  source 1..22: mol_type = other DNA
tcctattaaaactgatctcaca

SEQ ID NO: 150333 - DNA, 22 bp, synthetic construct
  misc_feature 1..22: note = chemically synthesized
  source 1..22: mol_type = other DNA
ttaaaactgatctcacacatcc

SEQ ID NO: 150334 - DNA, 22 bp, synthetic construct
  misc_feature 1..22: note = chemically synthesized
  source 1..22: mol_type = other DNA
aaactgatctcacacatccgta

SEQ ID NO: 150335 - DNA, 22 bp, synthetic construct
  misc_feature 1..22: note = chemically synthesized
  source 1..22: mol_type = other DNA
atctcacacatccgtagagcca

SEQ ID NO: 150336 - DNA, 22 bp, synthetic construct
  misc_feature 1..22: note = chemically synthesized
  source 1..22: mol_type = other DNA
acacatccgtagagccattatc

SEQ ID NO: 150337 - DNA, 22 bp, synthetic construct
  misc_feature 1..22: note = chemically synthesized
  source 1..22: mol_type = other DNA
tcaagtctttctctttgaaata

SEQ ID NO: 150338 - DNA, 22 bp, synthetic construct
  misc_feature 1..22: note = chemically synthesized
  source 1..22: mol_type = other DNA
tctctttgaaatagacagaaat

SEQ ID NO: 150339 - DNA, 22 bp, synthetic construct
  misc_feature 1..22: note = chemically synthesized
  source 1..22: mol_type = other DNA
ctctttgaaatagacagaaatt

SEQ ID NO: 150340 - DNA, 22 bp, synthetic construct
  misc_feature 1..22: note = chemically synthesized
  source 1..22: mol_type = other DNA
tctttgaaatagacagaaattt

SEQ ID NO: 150341 - DNA, 22 bp, synthetic construct
  misc_feature 1..22: note = chemically synthesized
  source 1..22: mol_type = other DNA
tttgaaatagacagaaatttag

SEQ ID NO: 150342 - DNA, 22 bp, synthetic construct
  misc_feature 1..22: note = chemically synthesized
  source 1..22: mol_type = other DNA
tgaaatagacagaaatttagtg

SEQ ID NO: 150343 - DNA, 22 bp, synthetic construct
  misc_feature 1..22: note = chemically synthesized
  source 1..22: mol_type = other DNA
gaaatagacagaaatttagtgt

SEQ ID NO: 150344 - DNA, 22 bp, synthetic construct
  misc_feature 1..22: note = chemically synthesized
  source 1..22: mol_type = other DNA
aaatagacagaaatttagtgtt

SEQ ID NO: 150345 - DNA, 22 bp, synthetic construct
  misc_feature 1..22: note = chemically synthesized
  source 1..22: mol_type = other DNA
agtgttttctcagtcagttaac

SEQ ID NO: 150346 - DNA, 22 bp, synthetic construct
  misc_feature 1..22: note = chemically synthesized
  source 1..22: mol_type = other DNA
gtgttttctcagtcagttaaca

SEQ ID NO: 150347 - DNA, 22 bp, synthetic construct
  misc_feature 1..22: note = chemically synthesized
  source 1..22: mol_type = other DNA
tctcagtcagttaacattcctt

SEQ ID NO: 150348 - DNA, 22 bp, synthetic construct
  misc_feature 1..22: note = chemically synthesized
  source 1..22: mol_type = other DNA
ctcagtcagttaacattccttc

SEQ ID NO: 150349 - DNA, 22 bp, synthetic construct
  misc_feature 1..22: note = chemically synthesized
  source 1..22: mol_type = other DNA
tcagtcagttaacattccttca

SEQ ID NO: 150350 - DNA, 22 bp, synthetic construct
  misc_feature 1..22: note = chemically synthesized
  source 1..22: mol_type = other DNA
agtcagttaacattccttcaac

SEQ ID NO: 150351 - DNA, 22 bp, synthetic construct
  misc_feature 1..22: note = chemically synthesized
  source 1..22: mol_type = other DNA
acattccttcaactagattagt

SEQ ID NO: 150352 - DNA, 22 bp, synthetic construct
  misc_feature 1..22: note = chemically synthesized
  source 1..22: mol_type = other DNA
cttcaactagattagttgtgac

SEQ ID NO: 150353 - DNA, 22 bp, synthetic construct
  misc_feature 1..22: note = chemically synthesized
  source 1..22: mol_type = other DNA
caactagattagttgtgacaaa

SEQ ID NO: 150354 - DNA, 22 bp, synthetic construct
  misc_feature 1..22: note = chemically synthesized
  source 1..22: mol_type = other DNA
aactagattagttgtgacaaaa

SEQ ID NO: 150355 - DNA, 22 bp, synthetic construct
  misc_feature 1..22: note = chemically synthesized
  source 1..22: mol_type = other DNA
gattagttgtgacaaaatttca

SEQ ID NO: 150356 - DNA, 22 bp, synthetic construct
  misc_feature 1..22: note = chemically synthesized
  source 1..22: mol_type = other DNA
gttgtgacaaaatttcaggcct

SEQ ID NO: 150357 - DNA, 22 bp, synthetic construct
  misc_feature 1..22: note = chemically synthesized
  source 1..22: mol_type = other DNA
tgacaaaatttcaggccttgct

SEQ ID NO: 150358 - DNA, 22 bp, synthetic construct
  misc_feature 1..22: note = chemically synthesized
  source 1..22: mol_type = other DNA
caggccttgctcaactctaacc

SEQ ID NO: 150359 - DNA, 22 bp, synthetic construct
  misc_feature 1..22: note = chemically synthesized
  source 1..22: mol_type = other DNA
aggccttgctcaactctaacct

SEQ ID NO: 150360 - DNA, 22 bp, synthetic construct
  misc_feature 1..22: note = chemically synthesized
  source 1..22: mol_type = other DNA
gctcaactctaacctcagtctc

SEQ ID NO: 150361 - DNA, 22 bp, synthetic construct
  misc_feature 1..22: note = chemically synthesized
  source 1..22: mol_type = other DNA
ctcaactctaacctcagtctct

SEQ ID NO: 150362 - DNA, 22 bp, synthetic construct
  misc_feature 1..22: note = chemically synthesized
  source 1..22: mol_type = other DNA
aactctaacctcagtctctcca

SEQ ID NO: 150363 - DNA, 22 bp, synthetic construct
  misc_feature 1..22: note = chemically synthesized
  source 1..22: mol_type = other DNA
taacctcagtctctccatatat

SEQ ID NO: 150364 - DNA, 22 bp, synthetic construct
  misc_feature 1..22: note = chemically synthesized
  source 1..22: mol_type = other DNA
acctcagtctctccatatattt

SEQ ID NO: 150365 - DNA, 22 bp, synthetic construct
  misc_feature 1..22: note = chemically synthesized
  source 1..22: mol_type = other DNA
agtctctccatatatttctgag

SEQ ID NO: 150366 - DNA, 22 bp, synthetic construct
  misc_feature 1..22: note = chemically synthesized
  source 1..22: mol_type = other DNA
tccatatatttctgagagtctt

SEQ ID NO: 150367 - DNA, 22 bp, synthetic construct
  misc_feature 1..22: note = chemically synthesized
  source 1..22: mol_type = other DNA
catatatttctgagagtcttcc

SEQ ID NO: 150368 - DNA, 22 bp, synthetic construct
  misc_feature 1..22: note = chemically synthesized
  source 1..22: mol_type = other DNA
ctgagagtcttccttcttattt

SEQ ID NO: 150369 - DNA, 22 bp, synthetic construct
  misc_feature 1..22: note = chemically synthesized
  source 1..22: mol_type = other DNA
tgagagtcttccttcttatttg

SEQ ID NO: 150370 - DNA, 22 bp, synthetic construct
  misc_feature 1..22: note = chemically synthesized
  source 1..22: mol_type = other DNA
agagtcttccttcttatttgtt

SEQ ID NO: 150371 - DNA, 22 bp, synthetic construct
  misc_feature 1..22: note = chemically synthesized
  source 1..22: mol_type = other DNA
ccttcttatttgtttataagaa

SEQ ID NO: 150372 - DNA, 22 bp, synthetic construct
  misc_feature 1..22: note = chemically synthesized
  source 1..22: mol_type = other DNA
cttcttatttgtttataagaat

SEQ ID NO: 150373 - DNA, 22 bp, synthetic construct
  misc_feature 1..22: note = chemically synthesized
  source 1..22: mol_type = other DNA
cttatttgtttataagaattta

SEQ ID NO: 150374 - DNA, 22 bp, synthetic construct
  misc_feature 1..22: note = chemically synthesized
  source 1..22: mol_type = other DNA
ttatttgtttataagaatttag

SEQ ID NO: 150375 - DNA, 22 bp, synthetic construct
  misc_feature 1..22: note = chemically synthesized
  source 1..22: mol_type = other DNA
atttgtttataagaatttagta

SEQ ID NO: 150376 - DNA, 22 bp, synthetic construct
  misc_feature 1..22: note = chemically synthesized
  source 1..22: mol_type = other DNA
tttgtttataagaatttagtaa

SEQ ID NO: 150377 - DNA, 22 bp, synthetic construct
  misc_feature 1..22: note = chemically synthesized
  source 1..22: mol_type = other DNA
gtttataagaatttagtaaatg

SEQ ID NO: 150378 - DNA, 22 bp, synthetic construct
  misc_feature 1..22: note = chemically synthesized
  source 1..22: mol_type = other DNA
tttataagaatttagtaaatgg

SEQ ID NO: 150379 - DNA, 22 bp, synthetic construct
  misc_feature 1..22: note = chemically synthesized
  source 1..22: mol_type = other DNA
ataagaatttagtaaatggcaa

SEQ ID NO: 150380 - DNA, 22 bp, synthetic construct
  misc_feature 1..22: note = chemically synthesized
  source 1..22: mol_type = other DNA
taagaatttagtaaatggcaat

SEQ ID NO: 150381 - DNA, 22 bp, synthetic construct
  misc_feature 1..22: note = chemically synthesized
  source 1..22: mol_type = other DNA
agtaaatggcaatattgagaag

SEQ ID NO: 150382 - DNA, 22 bp, synthetic construct
  misc_feature 1..22: note = chemically synthesized
  source 1..22: mol_type = other DNA
gtaaatggcaatattgagaagt

SEQ ID NO: 150383 - DNA, 22 bp, synthetic construct
  misc_feature 1..22: note = chemically synthesized
  source 1..22: mol_type = other DNA
agaagtagaaaattttggagac

SEQ ID NO: 150384 - DNA, 22 bp, synthetic construct
  misc_feature 1..22: note = chemically synthesized
  source 1..22: mol_type = other DNA
tggagacttgtttttcatgaac

SEQ ID NO: 150385 - DNA, 22 bp, synthetic construct
  misc_feature 1..22: note = chemically synthesized
  source 1..22: mol_type = other DNA
ggagacttgtttttcatgaacc

SEQ ID NO: 150386 - DNA, 22 bp, synthetic construct
  misc_feature 1..22: note = chemically synthesized
  source 1..22: mol_type = other DNA
gagacttgtttttcatgaacca

SEQ ID NO: 150387 - DNA, 22 bp, synthetic construct
  misc_feature 1..22: note = chemically synthesized
  source 1..22: mol_type = other DNA
gtttttcatgaaccagaacaat

SEQ ID NO: 150388 - DNA, 22 bp, synthetic construct
  misc_feature 1..22: note = chemically synthesized
  source 1..22: mol_type = other DNA
tttttcatgaaccagaacaatc

SEQ ID NO: 150389 - DNA, 22 bp, synthetic construct
  misc_feature 1..22: note = chemically synthesized
  source 1..22: mol_type = other DNA
ttcatgaaccagaacaatctca

SEQ ID NO: 150390 - DNA, 22 bp, synthetic construct
  misc_feature 1..22: note = chemically synthesized
  source 1..22: mol_type = other DNA
tcatgaaccagaacaatctcaa

SEQ ID NO: 150391 - DNA, 22 bp, synthetic construct
  misc_feature 1..22: note = chemically synthesized
  source 1..22: mol_type = other DNA
catgaaccagaacaatctcaaa

SEQ ID NO: 150392 - DNA, 22 bp, synthetic construct
  misc_feature 1..22: note = chemically synthesized
  source 1..22: mol_type = other DNA
atgaaccagaacaatctcaaag

SEQ ID NO: 150393 - DNA, 22 bp, synthetic construct
  misc_feature 1..22: note = chemically synthesized
  source 1..22: mol_type = other DNA
aaagcagcaatactaaacagga

SEQ ID NO: 150394 - DNA, 22 bp, synthetic construct
  misc_feature 1..22: note = chemically synthesized
  source 1..22: mol_type = other DNA
aacaggagccaagcctagaata

SEQ ID NO: 150395 - DNA, 22 bp, synthetic construct
  misc_feature 1..22: note = chemically synthesized
  source 1..22: mol_type = other DNA
gaataaagttgaatttctggaa

SEQ ID NO: 150396 - DNA, 22 bp, synthetic construct
  misc_feature 1..22: note = chemically synthesized
  source 1..22: mol_type = other DNA
aatttctggaatcaacaagcta

SEQ ID NO: 150397 - DNA, 22 bp, synthetic construct
  misc_feature 1..22: note = chemically synthesized
  source 1..22: mol_type = other DNA
ctggaatcaacaagctagggga

SEQ ID NO: 150398 - DNA, 22 bp, synthetic construct
  misc_feature 1..22: note = chemically synthesized
  source 1..22: mol_type = other DNA
tggaatcaacaagctaggggaa

SEQ ID NO: 150399 - DNA, 22 bp, synthetic construct
  misc_feature 1..22: note = chemically synthesized
  source 1..22: mol_type = other DNA
gaatcaacaagctaggggaaag

SEQ ID NO: 150400 - DNA, 22 bp, synthetic construct
  misc_feature 1..22: note = chemically synthesized
  source 1..22: mol_type = other DNA
ggggaaagtctcccattaagtc

SEQ ID NO: 150401 - DNA, 22 bp, synthetic construct
  misc_feature 1..22: note = chemically synthesized
  source 1..22: mol_type = other DNA
ccattaagtcaaatatttgaca

SEQ ID NO: 150402 - DNA, 22 bp, synthetic construct
  misc_feature 1..22: note = chemically synthesized
  source 1..22: mol_type = other DNA
agtcaaatatttgacaactggg

SEQ ID NO: 150403 - DNA, 22 bp, synthetic construct
  misc_feature 1..22: note = chemically synthesized
  source 1..22: mol_type = other DNA
gacaactgggaggtcaagtcag

SEQ ID NO: 150404 - DNA, 22 bp, synthetic construct
  misc_feature 1..22: note = chemically synthesized
  source 1..22: mol_type = other DNA
acaactgggaggtcaagtcaga

SEQ ID NO: 150405 - DNA, 22 bp, synthetic construct
  misc_feature 1..22: note = chemically synthesized
  source 1..22: mol_type = other DNA
ggaggtcaagtcagaggtgaaa

SEQ ID NO: 150406 - DNA, 22 bp, synthetic construct
  misc_feature 1..22: note = chemically synthesized
  source 1..22: mol_type = other DNA
aagataacaagaggtctgaaaa

SEQ ID NO: 150407 - DNA, 22 bp, synthetic construct
  misc_feature 1..22: note = chemically synthesized
  source 1..22: mol_type = other DNA
aaaacaaagtgaccaattaaaa

SEQ ID NO: 150408 - DNA, 22 bp, synthetic construct
  misc_feature 1..22: note = chemically synthesized
  source 1..22: mol_type = other DNA
aaataaaaagaaagagccaagc

SEQ ID NO: 150409 - DNA, 22 bp, synthetic construct
  misc_feature 1..22: note = chemically synthesized
  source 1..22: mol_type = other DNA
ggcacagtggcttgcatctgta

SEQ ID NO: 150410 - DNA, 22 bp, synthetic construct
  misc_feature 1..22: note = chemically synthesized
  source 1..22: mol_type = other DNA
gcatctgtagtcccagtaaccc

SEQ ID NO: 150411 - DNA, 22 bp, synthetic construct
  misc_feature 1..22: note = chemically synthesized
  source 1..22: mol_type = other DNA
catctgtagtcccagtaaccca

SEQ ID NO: 150412 - DNA, 22 bp, synthetic construct
  misc_feature 1..22: note = chemically synthesized
  source 1..22: mol_type = other DNA
tagtcccagtaacccaggaggc

SEQ ID NO: 150413 - DNA, 22 bp, synthetic construct
  misc_feature 1..22: note = chemically synthesized
  source 1..22: mol_type = other DNA
aagtgataggatcacttgagcc

SEQ ID NO: 150414 - DNA, 22 bp, synthetic construct
  misc_feature 1..22: note = chemically synthesized
  source 1..22: mol_type = other DNA
gagcccaggatttcagggttgc

SEQ ID NO: 150415 - DNA, 22 bp, synthetic construct
  misc_feature 1..22: note = chemically synthesized
  source 1..22: mol_type = other DNA
agcccaggatttcagggttgca

SEQ ID NO: 150416 - DNA, 22 bp, synthetic construct
  misc_feature 1..22: note = chemically synthesized
  source 1..22: mol_type = other DNA
cagggttgcagtgagcaataat

SEQ ID NO: 150417 - DNA, 22 bp, synthetic construct
  misc_feature 1..22: note = chemically synthesized
  source 1..22: mol_type = other DNA
agggttgcagtgagcaataatg

SEQ ID NO: 150418 - DNA, 22 bp, synthetic construct
  misc_feature 1..22: note = chemically synthesized
  source 1..22: mol_type = other DNA
cagtgagcaataatgacaccac

SEQ ID NO: 150419 - DNA, 22 bp, synthetic construct
  misc_feature 1..22: note = chemically synthesized
  source 1..22: mol_type = other DNA
ctctctagccttggtgactgag

SEQ ID NO: 150420 - DNA, 22 bp, synthetic construct
  misc_feature 1..22: note = chemically synthesized
  source 1..22: mol_type = other DNA
tctagccttggtgactgagatc

SEQ ID NO: 150421 - DNA, 22 bp, synthetic construct
  misc_feature 1..22: note = chemically synthesized
  source 1..22: mol_type = other DNA
tagccttggtgactgagatcct

SEQ ID NO: 150422 - DNA, 22 bp, synthetic construct
  misc_feature 1..22: note = chemically synthesized
  source 1..22: mol_type = other DNA
gccttggtgactgagatcctgt

SEQ ID NO: 150423 - DNA, 22 bp, synthetic construct
  misc_feature 1..22: note = chemically synthesized
  source 1..22: mol_type = other DNA
ggtgactgagatcctgtctctg

SEQ ID NO: 150424 - DNA, 22 bp, synthetic construct
  misc_feature 1..22: note = chemically synthesized
  source 1..22: mol_type = other DNA
gtgactgagatcctgtctctga

SEQ ID NO: 150425 - DNA, 22 bp, synthetic construct
  misc_feature 1..22: note = chemically synthesized
  source 1..22: mol_type = other DNA
agatcctgtctctgaggaaaaa

SEQ ID NO: 150426 - DNA, 22 bp, synthetic construct
  misc_feature 1..22: note = chemically synthesized
  source 1..22: mol_type = other DNA
tctctgaggaaaaacaaacaaa

SEQ ID NO: 150427 - DNA, 22 bp, synthetic construct
  misc_feature 1..22: note = chemically synthesized
  source 1..22: mol_type = other DNA
tgaggaaaaacaaacaaacaag

SEQ ID NO: 150428 - DNA, 22 bp, synthetic construct
  misc_feature 1..22: note = chemically synthesized
  source 1..22: mol_type = other DNA
aggaaaaacaaacaaacaagca

SEQ ID NO: 150429 - DNA, 22 bp, synthetic construct
  misc_feature 1..22: note = chemically synthesized
  source 1..22: mol_type = other DNA
agaacatagaagttttgttacg

SEQ ID NO: 150430 - DNA, 22 bp, synthetic construct
  misc_feature 1..22: note = chemically synthesized
  source 1..22: mol_type = other DNA
tgttacggtgatgatattctcc

SEQ ID NO: 150431 - DNA, 22 bp, synthetic construct
  misc_feature 1..22: note = chemically synthesized
  source 1..22: mol_type = other DNA
gttacggtgatgatattctcca

SEQ ID NO: 150432 - DNA, 22 bp, synthetic construct
  misc_feature 1..22: note = chemically synthesized
  source 1..22: mol_type = other DNA
ttacggtgatgatattctccaa

SEQ ID NO: 150433 - DNA, 22 bp, synthetic construct
  misc_feature 1..22: note = chemically synthesized
  source 1..22: mol_type = other DNA
cggtgatgatattctccaacac

SEQ ID NO: 150434 - DNA, 22 bp, synthetic construct
  misc_feature 1..22: note = chemically synthesized
  source 1..22: mol_type = other DNA
tccaacacaggtctgaacccct

SEQ ID NO: 150435 - DNA, 22 bp, synthetic construct
  misc_feature 1..22: note = chemically synthesized
  source 1..22: mol_type = other DNA
caacacaggtctgaaccccttg

SEQ ID NO: 150436 - DNA, 22 bp, synthetic construct
  misc_feature 1..22: note = chemically synthesized
  source 1..22: mol_type = other DNA
aaccccttgcagtgcctcgggg

SEQ ID NO: 150437 - DNA, 22 bp, synthetic construct
  misc_feature 1..22: note = chemically synthesized
  source 1..22: mol_type = other DNA
gcagtgcctcggggctgtttct

SEQ ID NO: 150438 - DNA, 22 bp, synthetic construct
  misc_feature 1..22: note = chemically synthesized
  source 1..22: mol_type = other DNA
cagtgcctcggggctgtttctc

SEQ ID NO: 150439 - DNA, 22 bp, synthetic construct
  misc_feature 1..22: note = chemically synthesized
  source 1..22: mol_type = other DNA
ggggctgtttctccagtggatt

SEQ ID NO: 150440 - DNA, 22 bp, synthetic construct
  misc_feature 1..22: note = chemically synthesized
  source 1..22: mol_type = other DNA
tttctccagtggattcttgggt

SEQ ID NO: 150441 - DNA, 22 bp, synthetic construct
  misc_feature 1..22: note = chemically synthesized
  source 1..22: mol_type = other DNA
ctccagtggattcttgggttct

SEQ ID NO: 150442 - DNA, 22 bp, synthetic construct
  misc_feature 1..22: note = chemically synthesized
  source 1..22: mol_type = other DNA
tccagtggattcttgggttctt

SEQ ID NO: 150443 - DNA, 22 bp, synthetic construct
  misc_feature 1..22: note = chemically synthesized
  source 1..22: mol_type = other DNA
cagtggattcttgggttcttca

SEQ ID NO: 150444 - DNA, 22 bp, synthetic construct
  misc_feature 1..22: note = chemically synthesized
  source 1..22: mol_type = other DNA
ttgggttcttcacatcttctca

SEQ ID NO: 150445 - DNA, 22 bp, synthetic construct
  misc_feature 1..22: note = chemically synthesized
  source 1..22: mol_type = other DNA
gggttcttcacatcttctcaac

SEQ ID NO: 150446 - DNA, 22 bp, synthetic construct
  misc_feature 1..22: note = chemically synthesized
  source 1..22: mol_type = other DNA
ggttcttcacatcttctcaact

SEQ ID NO: 150447 - DNA, 22 bp, synthetic construct
  misc_feature 1..22: note = chemically synthesized
  source 1..22: mol_type = other DNA
ttcacatcttctcaactttgtg

SEQ ID NO: 150448 - DNA, 22 bp, synthetic construct
  misc_feature 1..22: note = chemically synthesized
  source 1..22: mol_type = other DNA
cacatcttctcaactttgtgaa

SEQ ID NO: 150449 - DNA, 22 bp, synthetic construct
  misc_feature 1..22: note = chemically synthesized
  source 1..22: mol_type = other DNA
acatcttctcaactttgtgaaa

SEQ ID NO: 150450 - DNA, 22 bp, synthetic construct
  misc_feature 1..22: note = chemically synthesized
  source 1..22: mol_type = other DNA
ctcaactttgtgaaaagatatt

SEQ ID NO: 150451 - DNA, 22 bp, synthetic construct
  misc_feature 1..22: note = chemically synthesized
  source 1..22: mol_type = other DNA
tcaactttgtgaaaagatattc

SEQ ID NO: 150452 - DNA, 22 bp, synthetic construct
  misc_feature 1..22: note = chemically synthesized
  source 1..22: mol_type = other DNA
aactttgtgaaaagatattcat

SEQ ID NO: 150453 - DNA, 22 bp, synthetic construct
  misc_feature 1..22: note = chemically synthesized
  source 1..22: mol_type = other DNA
tgtgaaaagatattcatccaaa

SEQ ID NO: 150454 - DNA, 22 bp, synthetic construct
  misc_feature 1..22: note = chemically synthesized
  source 1..22: mol_type = other DNA
gtgaaaagatattcatccaaag

SEQ ID NO: 150455 - DNA, 22 bp, synthetic construct
  misc_feature 1..22: note = chemically synthesized
  source 1..22: mol_type = other DNA
tgaaaagatattcatccaaagg

SEQ ID NO: 150456 - DNA, 22 bp, synthetic construct
  misc_feature 1..22: note = chemically synthesized
  source 1..22: mol_type = other DNA
atccaaaggtctcacctgtctt

SEQ ID NO: 150457 - DNA, 22 bp, synthetic construct
  misc_feature 1..22: note = chemically synthesized
  source 1..22: mol_type = other DNA
acctgtcttattcagagcttgg

SEQ ID NO: 150458 - DNA, 22 bp, synthetic construct
  misc_feature 1..22: note = chemically synthesized
  source 1..22: mol_type = other DNA
tcttattcagagcttggatttt

SEQ ID NO: 150459 - DNA, 22 bp, synthetic construct
  misc_feature 1..22: note = chemically synthesized
  source 1..22: mol_type = other DNA
attcagagcttggattttggac

SEQ ID NO: 150460 - DNA, 22 bp, synthetic construct
  misc_feature 1..22: note = chemically synthesized
  source 1..22: mol_type = other DNA
ttcagagcttggattttggact

SEQ ID NO: 150461 - DNA, 22 bp, synthetic construct
  misc_feature 1..22: note = chemically synthesized
  source 1..22: mol_type = other DNA
agagcttggattttggactagc

SEQ ID NO: 150462 - DNA, 22 bp, synthetic construct
  misc_feature 1..22: note = chemically synthesized
  source 1..22: mol_type = other DNA
ggattttggactagctttttct

SEQ ID NO: 150463 - DNA, 22 bp, synthetic construct
  misc_feature 1..22: note = chemically synthesized
  source 1..22: mol_type = other DNA
gattttggactagctttttcta

SEQ ID NO: 150464 - DNA, 22 bp, synthetic construct
  misc_feature 1..22: note = chemically synthesized
  source 1..22: mol_type = other DNA
tggactagctttttctatttct

SEQ ID NO: 150465 - DNA, 22 bp, synthetic construct
  misc_feature 1..22: note = chemically synthesized
  source 1..22: mol_type = other DNA
ggactagctttttctatttctt

SEQ ID NO: 150466 - DNA, 22 bp, synthetic construct
  misc_feature 1..22: note = chemically synthesized
  source 1..22: mol_type = other DNA
gactagctttttctatttcttg

SEQ ID NO: 150467 - DNA, 22 bp, synthetic construct
  misc_feature 1..22: note = chemically synthesized
  source 1..22: mol_type = other DNA
gctttttctatttcttgggatt

SEQ ID NO: 150468 - DNA, 22 bp, synthetic construct
  misc_feature 1..22: note = chemically synthesized
  source 1..22: mol_type = other DNA
tttctatttcttgggattctct

SEQ ID NO: 150469 - DNA, 22 bp, synthetic construct
  misc_feature 1..22: note = chemically synthesized
  source 1..22: mol_type = other DNA
ttctatttcttgggattctcta

SEQ ID NO: 150470 - DNA, 22 bp, synthetic construct
  misc_feature 1..22: note = chemically synthesized
  source 1..22: mol_type = other DNA
tctatttcttgggattctctag

SEQ ID NO: 150471 - DNA, 22 bp, synthetic construct
  misc_feature 1..22: note = chemically synthesized
  source 1..22: mol_type = other DNA
ctatttcttgggattctctaga

SEQ ID NO: 150472 - DNA, 22 bp, synthetic construct
  misc_feature 1..22: note = chemically synthesized
  source 1..22: mol_type = other DNA
tatttcttgggattctctagag

SEQ ID NO: 150473 - DNA, 22 bp, synthetic construct
  misc_feature 1..22: note = chemically synthesized
  source 1..22: mol_type = other DNA
tttcttgggattctctagagcc

SEQ ID NO: 150474 - DNA, 22 bp, synthetic construct
  misc_feature 1..22: note = chemically synthesized
  source 1..22: mol_type = other DNA
cttgggattctctagagccata

SEQ ID NO: 150475 - DNA, 22 bp, synthetic construct
  misc_feature 1..22: note = chemically synthesized
  source 1..22: mol_type = other DNA
ttgggattctctagagccatat

SEQ ID NO: 150476 - DNA, 22 bp, synthetic construct
  misc_feature 1..22: note = chemically synthesized
  source 1..22: mol_type = other DNA
gggattctctagagccatatat

SEQ ID NO: 150477 - DNA, 22 bp, synthetic construct
  misc_feature 1..22: note = chemically synthesized
  source 1..22: mol_type = other DNA
ggattctctagagccatatatt

SEQ ID NO: 150478 - DNA, 22 bp, synthetic construct
  misc_feature 1..22: note = chemically synthesized
  source 1..22: mol_type = other DNA
tctagagccatatattcagata

SEQ ID NO: 150479 - DNA, 22 bp, synthetic construct
  misc_feature 1..22: note = chemically synthesized
  source 1..22: mol_type = other DNA
tagagccatatattcagatata

SEQ ID NO: 150480 - DNA, 22 bp, synthetic construct
  misc_feature 1..22: note = chemically synthesized
  source 1..22: mol_type = other DNA
gagccatatattcagatataac

SEQ ID NO: 150481 - DNA, 22 bp, synthetic construct
  misc_feature 1..22: note = chemically synthesized
  source 1..22: mol_type = other DNA
agatataacacagatataacca

SEQ ID NO: 150482 - DNA, 22 bp, synthetic construct
  misc_feature 1..22: note = chemically synthesized
  source 1..22: mol_type = other DNA
tgtattctggggagggggacat

SEQ ID NO: 150483 - DNA, 22 bp, synthetic construct
  misc_feature 1..22: note = chemically synthesized
  source 1..22: mol_type = other DNA
gtattctggggagggggacata

SEQ ID NO: 150484 - DNA, 22 bp, synthetic construct
  misc_feature 1..22: note = chemically synthesized
  source 1..22: mol_type = other DNA
tattctggggagggggacatag

SEQ ID NO: 150485 - DNA, 22 bp, synthetic construct
  misc_feature 1..22: note = chemically synthesized
  source 1..22: mol_type = other DNA
tggggagggggacatagagttg

SEQ ID NO: 150486 - DNA, 22 bp, synthetic construct
  misc_feature 1..22: note = chemically synthesized
  source 1..22: mol_type = other DNA
gggagggggacatagagttgag

SEQ ID NO: 150487 - DNA, 22 bp, synthetic construct
  misc_feature 1..22: note = chemically synthesized
  source 1..22: mol_type = other DNA
agagaaatacaggaatttatag

SEQ ID NO: 150488 - DNA, 22 bp, synthetic construct
  misc_feature 1..22: note = chemically synthesized
  source 1..22: mol_type = other DNA
ataggactctactcaaagagcc

SEQ ID NO: 150489 - DNA, 22 bp, synthetic construct
  misc_feature 1..22: note = chemically synthesized
  source 1..22: mol_type = other DNA
taggactctactcaaagagccc

SEQ ID NO: 150490 - DNA, 22 bp, synthetic construct
  misc_feature 1..22: note = chemically synthesized
  source 1..22: mol_type = other DNA
tactcaaagagccctcaaataa

SEQ ID NO: 150491 - DNA, 22 bp, synthetic construct
  misc_feature 1..22: note = chemically synthesized
  source 1..22: mol_type = other DNA
ctcaaagagccctcaaataaag

SEQ ID NO: 150492 - DNA, 22 bp, synthetic construct
  misc_feature 1..22: note = chemically synthesized
  source 1..22: mol_type = other DNA
aaagagccctcaaataaagtac

SEQ ID NO: 150493 - DNA, 22 bp, synthetic construct
  misc_feature 1..22: note = chemically synthesized
  source 1..22: mol_type = other DNA
aaataaagtacggctagtcttc

SEQ ID NO: 150494 - DNA, 22 bp, synthetic construct
  misc_feature 1..22: note = chemically synthesized
  source 1..22: mol_type = other DNA
gtcttctttgcctaagacaatg

SEQ ID NO: 150495 - DNA, 22 bp, synthetic construct
  misc_feature 1..22: note = chemically synthesized
  source 1..22: mol_type = other DNA
ctttgcctaagacaatgagcag

SEQ ID NO: 150496 - DNA, 22 bp, synthetic construct
  misc_feature 1..22: note = chemically synthesized
  source 1..22: mol_type = other DNA
tttgcctaagacaatgagcagt

SEQ ID NO: 150497 - DNA, 22 bp, synthetic construct
  misc_feature 1..22: note = chemically synthesized
  source 1..22: mol_type = other DNA
tgcctaagacaatgagcagtcc

SEQ ID NO: 150498 - DNA, 22 bp, synthetic construct
  misc_feature 1..22: note = chemically synthesized
  source 1..22: mol_type = other DNA
gcctaagacaatgagcagtcca

SEQ ID NO: 150499 - DNA, 22 bp, synthetic construct
  misc_feature 1..22: note = chemically synthesized
  source 1..22: mol_type = other DNA
cctaagacaatgagcagtccag

SEQ ID NO: 150500 - DNA, 22 bp, synthetic construct
  misc_feature 1..22: note = chemically synthesized
  source 1..22: mol_type = other DNA
agacaatgagcagtccaggaag

SEQ ID NO: 150501 - DNA, 22 bp, synthetic construct
  misc_feature 1..22: note = chemically synthesized
  source 1..22: mol_type = other DNA
tccatttcttttagattttcta

SEQ ID NO: 150502 - DNA, 22 bp, synthetic construct
  misc_feature 1..22: note = chemically synthesized
  source 1..22: mol_type = other DNA
cttttagattttctagtttatg

SEQ ID NO: 150503 - DNA, 22 bp, synthetic construct
  misc_feature 1..22: note = chemically synthesized
  source 1..22: mol_type = other DNA
ttttagattttctagtttatgt

SEQ ID NO: 150504 - DNA, 22 bp, synthetic construct
  misc_feature 1..22: note = chemically synthesized
  source 1..22: mol_type = other DNA
ttagattttctagtttatgtac

SEQ ID NO: 150505 - DNA, 22 bp, synthetic construct
  misc_feature 1..22: note = chemically synthesized
  source 1..22: mol_type = other DNA
tagattttctagtttatgtaca

SEQ ID NO: 150506 - DNA, 22 bp, synthetic construct
  misc_feature 1..22: note = chemically synthesized
  source 1..22: mol_type = other DNA
agattttctagtttatgtacat

SEQ ID NO: 150507 - DNA, 22 bp, synthetic construct
  misc_feature 1..22: note = chemically synthesized
  source 1..22: mol_type = other DNA
gattttctagtttatgtacata

SEQ ID NO: 150508 - DNA, 22 bp, synthetic construct
  misc_feature 1..22: note = chemically synthesized
  source 1..22: mol_type = other DNA
tctagtttatgtacatagagat

SEQ ID NO: 150509 - DNA, 22 bp, synthetic construct
  misc_feature 1..22: note = chemically synthesized
  source 1..22: mol_type = other DNA
ctagtttatgtacatagagatg

SEQ ID NO: 150510 - DNA, 22 bp, synthetic construct
  misc_feature 1..22: note = chemically synthesized
  source 1..22: mol_type = other DNA
tagtttatgtacatagagatgt

SEQ ID NO: 150511 - DNA, 22 bp, synthetic construct
  misc_feature 1..22: note = chemically synthesized
  source 1..22: mol_type = other DNA
gtttatgtacatagagatgttc

SEQ ID NO: 150512 - DNA, 22 bp, synthetic construct
  misc_feature 1..22: note = chemically synthesized
  source 1..22: mol_type = other DNA
atgtacatagagatgttcatag

SEQ ID NO: 150513 - DNA, 22 bp, synthetic construct
  misc_feature 1..22: note = chemically synthesized
  source 1..22: mol_type = other DNA
tgtacatagagatgttcatagt

SEQ ID NO: 150514 - DNA, 22 bp, synthetic construct
  misc_feature 1..22: note = chemically synthesized
  source 1..22: mol_type = other DNA
atagtagtttttgatgattatt

SEQ ID NO: 150515 - DNA, 22 bp, synthetic construct
  misc_feature 1..22: note = chemically synthesized
  source 1..22: mol_type = other DNA
ttgatgattatttgtatttctg

SEQ ID NO: 150516 - DNA, 22 bp, synthetic construct
  misc_feature 1..22: note = chemically synthesized
  source 1..22: mol_type = other DNA
tgatgattatttgtatttctgt

SEQ ID NO: 150517 - DNA, 22 bp, synthetic construct
  misc_feature 1..22: note = chemically synthesized
  source 1..22: mol_type = other DNA
gatgattatttgtatttctgtg

SEQ ID NO: 150518 - DNA, 22 bp, synthetic construct
  misc_feature 1..22: note = chemically synthesized
  source 1..22: mol_type = other DNA
atgattatttgtatttctgtgg

SEQ ID NO: 150519 - DNA, 22 bp, synthetic construct
  misc_feature 1..22: note = chemically synthesized
  source 1..22: mol_type = other DNA
tttgtatttctgtggggtgagt

SEQ ID NO: 150520 - DNA, 22 bp, synthetic construct
  misc_feature 1..22: note = chemically synthesized
  source 1..22: mol_type = other DNA
gtatttctgtggggtgagtgat

SEQ ID NO: 150521 - DNA, 22 bp, synthetic construct
  misc_feature 1..22: note = chemically synthesized
  source 1..22: mol_type = other DNA
tatttctgtggggtgagtgata

SEQ ID NO: 150522 - DNA, 22 bp, synthetic construct
  misc_feature 1..22: note = chemically synthesized
  source 1..22: mol_type = other DNA
ctgtggggtgagtgataatatt

SEQ ID NO: 150523 - DNA, 22 bp, synthetic construct
  misc_feature 1..22: note = chemically synthesized
  source 1..22: mol_type = other DNA
tgtggggtgagtgataatattc

SEQ ID NO: 150524 - DNA, 22 bp, synthetic construct
  misc_feature 1..22: note = chemically synthesized
  source 1..22: mol_type = other DNA
tggggtgagtgataatattccc

SEQ ID NO: 150525 - DNA, 22 bp, synthetic construct
  misc_feature 1..22: note = chemically synthesized
  source 1..22: mol_type = other DNA
cctttttcatttctaactgtgc

SEQ ID NO: 150526 - DNA, 22 bp, synthetic construct
  misc_feature 1..22: note = chemically synthesized
  source 1..22: mol_type = other DNA
tttcatttctaactgtgcttat

SEQ ID NO: 150527 - DNA, 22 bp, synthetic construct
  misc_feature 1..22: note = chemically synthesized
  source 1..22: mol_type = other DNA
ttcatttctaactgtgcttatt

SEQ ID NO: 150528 - DNA, 22 bp, synthetic construct
  misc_feature 1..22: note = chemically synthesized
  source 1..22: mol_type = other DNA
tcatttctaactgtgcttattt

SEQ ID NO: 150529 - DNA, 22 bp, synthetic construct
  misc_feature 1..22: note = chemically synthesized
  source 1..22: mol_type = other DNA
catttctaactgtgcttatttg

SEQ ID NO: 150530 - DNA, 22 bp, synthetic construct
  misc_feature 1..22: note = chemically synthesized
  source 1..22: mol_type = other DNA
atttctaactgtgcttatttgg

SEQ ID NO: 150531 - DNA, 22 bp, synthetic construct
  misc_feature 1..22: note = chemically synthesized
  source 1..22: mol_type = other DNA
ctaactgtgcttatttggatct

SEQ ID NO: 150532 - DNA, 22 bp, synthetic construct
  misc_feature 1..22: note = chemically synthesized
  source 1..22: mol_type = other DNA
taactgtgcttatttggatctt

SEQ ID NO: 150533 - DNA, 22 bp, synthetic construct
  misc_feature 1..22: note = chemically synthesized
  source 1..22: mol_type = other DNA
actgtgcttatttggatcttct

SEQ ID NO: 150534 - DNA, 22 bp, synthetic construct
  misc_feature 1..22: note = chemically synthesized
  source 1..22: mol_type = other DNA
tgcttatttggatcttctctct

SEQ ID NO: 150535 - DNA, 22 bp, synthetic construct
  misc_feature 1..22: note = chemically synthesized
  source 1..22: mol_type = other DNA
atttggatcttctctcttgtct

SEQ ID NO: 150536 - DNA, 22 bp, synthetic construct
  misc_feature 1..22: note = chemically synthesized
  source 1..22: mol_type = other DNA
tttggatcttctctcttgtctt

SEQ ID NO: 150537 - DNA, 22 bp, synthetic construct
  misc_feature 1..22: note = chemically synthesized
  source 1..22: mol_type = other DNA
ggatcttctctcttgtcttctt

SEQ ID NO: 150538 - DNA, 22 bp, synthetic construct
  misc_feature 1..22: note = chemically synthesized
  source 1..22: mol_type = other DNA
gatcttctctcttgtcttcttt

SEQ ID NO: 150539 - DNA, 22 bp, synthetic construct
  misc_feature 1..22: note = chemically synthesized
  source 1..22: mol_type = other DNA
ctctcttgtcttctttattagt

SEQ ID NO: 150540 - DNA, 22 bp, synthetic construct
  misc_feature 1..22: note = chemically synthesized
  source 1..22: mol_type = other DNA
tctcttgtcttctttattagtc

SEQ ID NO: 150541 - DNA, 22 bp, synthetic construct
  misc_feature 1..22: note = chemically synthesized
  source 1..22: mol_type = other DNA
tcttgtcttctttattagtcta

SEQ ID NO: 150542 - DNA, 22 bp, synthetic construct
  misc_feature 1..22: note = chemically synthesized
  source 1..22: mol_type = other DNA
ttgtcttctttattagtctagc

SEQ ID NO: 150543 - DNA, 22 bp, synthetic construct
  misc_feature 1..22: note = chemically synthesized
  source 1..22: mol_type = other DNA
gtcttctttattagtctagcta

SEQ ID NO: 150544 - DNA, 22 bp, synthetic construct
  misc_feature 1..22: note = chemically synthesized
  source 1..22: mol_type = other DNA
tcttctttattagtctagctag

SEQ ID NO: 150545 - DNA, 22 bp, synthetic construct
  misc_feature 1..22: note = chemically synthesized
  source 1..22: mol_type = other DNA
ctttattagtctagctagtgat

SEQ ID NO: 150546 - DNA, 22 bp, synthetic construct
  misc_feature 1..22: note = chemically synthesized
  source 1..22: mol_type = other DNA
tttattagtctagctagtgatc

SEQ ID NO: 150547 - DNA, 22 bp, synthetic construct
  misc_feature 1..22: note = chemically synthesized
  source 1..22: mol_type = other DNA
tattagtctagctagtgatcta

SEQ ID NO: 150548 - DNA, 22 bp, synthetic construct
  misc_feature 1..22: note = chemically synthesized
  source 1..22: mol_type = other DNA
attagtctagctagtgatctac

SEQ ID NO: 150549 - DNA, 22 bp, synthetic construct
  misc_feature 1..22: note = chemically synthesized
  source 1..22: mol_type = other DNA
ttagtctagctagtgatctacc

SEQ ID NO: 150550 - DNA, 22 bp, synthetic construct
  misc_feature 1..22: note = chemically synthesized
  source 1..22: mol_type = other DNA
gtctagctagtgatctacctta

SEQ ID NO: 150551 - DNA, 22 bp, synthetic construct
  misc_feature 1..22: note = chemically synthesized
  source 1..22: mol_type = other DNA
gctagtgatctaccttattaat

SEQ ID NO: 150552 - DNA, 22 bp, synthetic construct
  misc_feature 1..22: note = chemically synthesized
  source 1..22: mol_type = other DNA
gtgatctaccttattaattttt

SEQ ID NO: 150553 - DNA, 22 bp, synthetic construct
  misc_feature 1..22: note = chemically synthesized
  source 1..22: mol_type = other DNA
ccttattaattttttcacaaaa

SEQ ID NO: 150554 - DNA, 22 bp, synthetic construct
  misc_feature 1..22: note = chemically synthesized
  source 1..22: mol_type = other DNA
attaattttttcacaaaaccag

SEQ ID NO: 150555 - DNA, 22 bp, synthetic construct
  misc_feature 1..22: note = chemically synthesized
  source 1..22: mol_type = other DNA
ttaattttttcacaaaaccagc

SEQ ID NO: 150556 - DNA, 22 bp, synthetic construct
  misc_feature 1..22: note = chemically synthesized
  source 1..22: mol_type = other DNA
attttttcacaaaaccagctct

SEQ ID NO: 150557 - DNA, 22 bp, synthetic construct
  misc_feature 1..22: note = chemically synthesized
  source 1..22: mol_type = other DNA
tttcacaaaaccagctcttgga

SEQ ID NO: 150558 - DNA, 22 bp, synthetic construct
  misc_feature 1..22: note = chemically synthesized
  source 1..22: mol_type = other DNA
ttcacaaaaccagctcttggac

SEQ ID NO: 150559 - DNA, 22 bp, synthetic construct
  misc_feature 1..22: note = chemically synthesized
  source 1..22: mol_type = other DNA
tcacaaaaccagctcttggact

SEQ ID NO: 150560 - DNA, 22 bp, synthetic construct
  misc_feature 1..22: note = chemically synthesized
  source 1..22: mol_type = other DNA
cacaaaaccagctcttggactc

SEQ ID NO: 150561 - DNA, 22 bp, synthetic construct
  misc_feature 1..22: note = chemically synthesized
  source 1..22: mol_type = other DNA
acaaaaccagctcttggactca

SEQ ID NO: 150562 - DNA, 22 bp, synthetic construct
  misc_feature 1..22: note = chemically synthesized
  source 1..22: mol_type = other DNA
ttggactcattaatcttttgaa

SEQ ID NO: 150563 - DNA, 22 bp, synthetic construct
  misc_feature 1..22: note = chemically synthesized
  source 1..22: mol_type = other DNA
ggactcattaatcttttgaatg

SEQ ID NO: 150564 - DNA, 22 bp, synthetic construct
  misc_feature 1..22: note = chemically synthesized
  source 1..22: mol_type = other DNA
gactcattaatcttttgaatgg

SEQ ID NO: 150565 - DNA, 22 bp, synthetic construct
  misc_feature 1..22: note = chemically synthesized
  source 1..22: mol_type = other DNA
attaatcttttgaatggtattt

SEQ ID NO: 150566 - DNA, 22 bp, synthetic construct
  misc_feature 1..22: note = chemically synthesized
  source 1..22: mol_type = other DNA
atcttttgaatggtattttgtg

SEQ ID NO: 150567 - DNA, 22 bp, synthetic construct
  misc_feature 1..22: note = chemically synthesized
  source 1..22: mol_type = other DNA
ttgaatggtattttgtgtttta

SEQ ID NO: 150568 - DNA, 22 bp, synthetic construct
  misc_feature 1..22: note = chemically synthesized
  source 1..22: mol_type = other DNA
tgaatggtattttgtgttttaa

SEQ ID NO: 150569 - DNA, 22 bp, synthetic construct
  misc_feature 1..22: note = chemically synthesized
  source 1..22: mol_type = other DNA
gaatggtattttgtgttttaat

SEQ ID NO: 150570 - DNA, 22 bp, synthetic construct
  misc_feature 1..22: note = chemically synthesized
  source 1..22: mol_type = other DNA
aatggtattttgtgttttaata

SEQ ID NO: 150571 - DNA, 22 bp, synthetic construct
  misc_feature 1..22: note = chemically synthesized
  source 1..22: mol_type = other DNA
tgtgttttaatatccttcagtt

SEQ ID NO: 150572 - DNA, 22 bp, synthetic construct
  misc_feature 1..22: note = chemically synthesized
  source 1..22: mol_type = other DNA
gtgttttaatatccttcagtta

SEQ ID NO: 150573 - DNA, 22 bp, synthetic construct
  misc_feature 1..22: note = chemically synthesized
  source 1..22: mol_type = other DNA
tgttttaatatccttcagttag

SEQ ID NO: 150574 - DNA, 22 bp, synthetic construct
  misc_feature 1..22: note = chemically synthesized
  source 1..22: mol_type = other DNA
taatatccttcagttagctttg

SEQ ID NO: 150575 - DNA, 22 bp, synthetic construct
  misc_feature 1..22: note = chemically synthesized
  source 1..22: mol_type = other DNA
aatatccttcagttagctttga

SEQ ID NO: 150576 - DNA, 22 bp, synthetic construct
  misc_feature 1..22: note = chemically synthesized
  source 1..22: mol_type = other DNA
atatccttcagttagctttgat

SEQ ID NO: 150577 - DNA, 22 bp, synthetic construct
  misc_feature 1..22: note = chemically synthesized
  source 1..22: mol_type = other DNA
cagttagctttgatcttgttta

SEQ ID NO: 150578 - DNA, 22 bp, synthetic construct
  misc_feature 1..22: note = chemically synthesized
  source 1..22: mol_type = other DNA
agttagctttgatcttgtttat

SEQ ID NO: 150579 - DNA, 22 bp, synthetic construct
  misc_feature 1..22: note = chemically synthesized
  source 1..22: mol_type = other DNA
gctttgatcttgtttatttctt

SEQ ID NO: 150580 - DNA, 22 bp, synthetic construct
  misc_feature 1..22: note = chemically synthesized
  source 1..22: mol_type = other DNA
tgatcttgtttatttcttgtct

SEQ ID NO: 150581 - DNA, 22 bp, synthetic construct
  misc_feature 1..22: note = chemically synthesized
  source 1..22: mol_type = other DNA
gatcttgtttatttcttgtctt

SEQ ID NO: 150582 - DNA, 22 bp, synthetic construct
  misc_feature 1..22: note = chemically synthesized
  source 1..22: mol_type = other DNA
atcttgtttatttcttgtcttc

SEQ ID NO: 150583 - DNA, 22 bp, synthetic construct
  misc_feature 1..22: note = chemically synthesized
  source 1..22: mol_type = other DNA
gtttatttcttgtcttctgcta

SEQ ID NO: 150584 - DNA, 22 bp, synthetic construct
  misc_feature 1..22: note = chemically synthesized
  source 1..22: mol_type = other DNA
tttatttcttgtcttctgctag

SEQ ID NO: 150585 - DNA, 22 bp, synthetic construct
  misc_feature 1..22: note = chemically synthesized
  source 1..22: mol_type = other DNA
atttcttgtcttctgctagatt

SEQ ID NO: 150586 - DNA, 22 bp, synthetic construct
  misc_feature 1..22: note = chemically synthesized
  source 1..22: mol_type = other DNA
tttcttgtcttctgctagattt

SEQ ID NO: 150587 - DNA, 22 bp, synthetic construct
  misc_feature 1..22: note = chemically synthesized
  source 1..22: mol_type = other DNA
cttgtcttctgctagatttagg

SEQ ID NO: 150588 - DNA, 22 bp, synthetic construct
  misc_feature 1..22: note = chemically synthesized
  source 1..22: mol_type = other DNA
ttgtcttctgctagatttaggg

SEQ ID NO: 150589 - DNA, 22 bp, synthetic construct
  misc_feature 1..22: note = chemically synthesized
  source 1..22: mol_type = other DNA
gtcttctgctagatttagggtt

SEQ ID NO: 150590 - DNA, 22 bp, synthetic construct
  misc_feature 1..22: note = chemically synthesized
  source 1..22: mol_type = other DNA
tcttctgctagatttagggttg

SEQ ID NO: 150591 - DNA, 22 bp, synthetic construct
  misc_feature 1..22: note = chemically synthesized
  source 1..22: mol_type = other DNA
ctgctagatttagggttggttt

SEQ ID NO: 150592 - DNA, 22 bp, synthetic construct
  misc_feature 1..22: note = chemically synthesized
  source 1..22: mol_type = other DNA
tgctagatttagggttggtttg

SEQ ID NO: 150593 - DNA, 22 bp, synthetic construct
  misc_feature 1..22: note = chemically synthesized
  source 1..22: mol_type = other DNA
ctagatttagggttggtttgct

SEQ ID NO: 150594 - DNA, 22 bp, synthetic construct
  misc_feature 1..22: note = chemically synthesized
  source 1..22: mol_type = other DNA
gatttagggttggtttgctctt

SEQ ID NO: 150595 - DNA, 22 bp, synthetic construct
  misc_feature 1..22: note = chemically synthesized
  source 1..22: mol_type = other DNA
agggttggtttgctcttggttc

SEQ ID NO: 150596 - DNA, 22 bp, synthetic construct
  misc_feature 1..22: note = chemically synthesized
  source 1..22: mol_type = other DNA
gggttggtttgctcttggttct

SEQ ID NO: 150597 - DNA, 22 bp, synthetic construct
  misc_feature 1..22: note = chemically synthesized
  source 1..22: mol_type = other DNA
gtttgctcttggttctctggtt

SEQ ID NO: 150598 - DNA, 22 bp, synthetic construct
  misc_feature 1..22: note = chemically synthesized
  source 1..22: mol_type = other DNA
gctcttggttctctggttcttt

SEQ ID NO: 150599 - DNA, 22 bp, synthetic construct
  misc_feature 1..22: note = chemically synthesized
  source 1..22: mol_type = other DNA
ctcttggttctctggttctttt

SEQ ID NO: 150600 - DNA, 22 bp, synthetic construct
  misc_feature 1..22: note = chemically synthesized
  source 1..22: mol_type = other DNA
ttggttctctggttcttttagt

SEQ ID NO: 150601 - DNA, 22 bp, synthetic construct
  misc_feature 1..22: note = chemically synthesized
  source 1..22: mol_type = other DNA
ggttctctggttcttttagttg

SEQ ID NO: 150602 - DNA, 22 bp, synthetic construct
  misc_feature 1..22: note = chemically synthesized
  source 1..22: mol_type = other DNA
gttctctggttcttttagttgt

SEQ ID NO: 150603 - DNA, 22 bp, synthetic construct
  misc_feature 1..22: note = chemically synthesized
  source 1..22: mol_type = other DNA
tctggttcttttagttgtgaca

SEQ ID NO: 150604 - DNA, 22 bp, synthetic construct
  misc_feature 1..22: note = chemically synthesized
  source 1..22: mol_type = other DNA
tggttcttttagttgtgacatt

SEQ ID NO: 150605 - DNA, 22 bp, synthetic construct
  misc_feature 1..22: note = chemically synthesized
  source 1..22: mol_type = other DNA
gttcttttagttgtgacattag

SEQ ID NO: 150606 - DNA, 22 bp, synthetic construct
  misc_feature 1..22: note = chemically synthesized
  source 1..22: mol_type = other DNA
ttttagttgtgacattaggttg

SEQ ID NO: 150607 - DNA, 22 bp, synthetic construct
  misc_feature 1..22: note = chemically synthesized
  source 1..22: mol_type = other DNA
ttagttgtgacattaggttgtt

SEQ ID NO: 150608 - DNA, 22 bp, synthetic construct
  misc_feature 1..22: note = chemically synthesized
  source 1..22: mol_type = other DNA
tagttgtgacattaggttgtta

SEQ ID NO: 150609 - DNA, 22 bp, synthetic construct
  misc_feature 1..22: note = chemically synthesized
  source 1..22: mol_type = other DNA
agttgtgacattaggttgttaa

SEQ ID NO: 150610 - DNA, 22 bp, synthetic construct
  misc_feature 1..22: note = chemically synthesized
  source 1..22: mol_type = other DNA
gttgtgacattaggttgttaat

SEQ ID NO: 150611 - DNA, 22 bp, synthetic construct
  misc_feature 1..22: note = chemically synthesized
  source 1..22: mol_type = other DNA
tgacattaggttgttaatttga

SEQ ID NO: 150612 - DNA, 22 bp, synthetic construct
  misc_feature 1..22: note = chemically synthesized
  source 1..22: mol_type = other DNA
ggttgttaatttgagggcttta

SEQ ID NO: 150613 - DNA, 22 bp, synthetic construct
  misc_feature 1..22: note = chemically synthesized
  source 1..22: mol_type = other DNA
ttaatttgagggctttaagact

SEQ ID NO: 150614 - DNA, 22 bp, synthetic construct
  misc_feature 1..22: note = chemically synthesized
  source 1..22: mol_type = other DNA
atttgagggctttaagactttt

SEQ ID NO: 150615 - DNA, 22 bp, synthetic construct
  misc_feature 1..22: note = chemically synthesized
  source 1..22: mol_type = other DNA
gagggctttaagactttttgat

SEQ ID NO: 150616 - DNA, 22 bp, synthetic construct
  misc_feature 1..22: note = chemically synthesized
  source 1..22: mol_type = other DNA
agggctttaagactttttgatg

SEQ ID NO: 150617 - DNA, 22 bp, synthetic construct
  misc_feature 1..22: note = chemically synthesized
  source 1..22: mol_type = other DNA
taagactttttgatgtgggcat

SEQ ID NO: 150618 - DNA, 22 bp, synthetic construct
  misc_feature 1..22: note = chemically synthesized
  source 1..22: mol_type = other DNA
aagactttttgatgtgggcatt

SEQ ID NO: 150619 - DNA, 22 bp, synthetic construct
  misc_feature 1..22: note = chemically synthesized
  source 1..22: mol_type = other DNA
agactttttgatgtgggcattt

SEQ ID NO: 150620 - DNA, 22 bp, synthetic construct
  misc_feature 1..22: note = chemically synthesized
  source 1..22: mol_type = other DNA
tttgatgtgggcatttagtgta

SEQ ID NO: 150621 - DNA, 22 bp, synthetic construct
  misc_feature 1..22: note = chemically synthesized
  source 1..22: mol_type = other DNA
ttgatgtgggcatttagtgtat

SEQ ID NO: 150622 - DNA, 22 bp, synthetic construct
  misc_feature 1..22: note = chemically synthesized
  source 1..22: mol_type = other DNA
tgatgtgggcatttagtgtata

SEQ ID NO: 150623 - DNA, 22 bp, synthetic construct
  misc_feature 1..22: note = chemically synthesized
  source 1..22: mol_type = other DNA
gatgtgggcatttagtgtataa

SEQ ID NO: 150624 - DNA, 22 bp, synthetic construct
  misc_feature 1..22: note = chemically synthesized
  source 1..22: mol_type = other DNA
atgtgggcatttagtgtataaa

SEQ ID NO: 150625 - DNA, 22 bp, synthetic construct
  misc_feature 1..22: note = chemically synthesized
  source 1..22: mol_type = other DNA
agtgtataaatttctctcttaa

SEQ ID NO: 150626 - DNA, 22 bp, synthetic construct
  misc_feature 1..22: note = chemically synthesized
  source 1..22: mol_type = other DNA
gtgtataaatttctctcttaac

SEQ ID NO: 150627 - DNA, 22 bp, synthetic construct
  misc_feature 1..22: note = chemically synthesized
  source 1..22: mol_type = other DNA
ctctcttaacactgtctaagct

SEQ ID NO: 150628 - DNA, 22 bp, synthetic construct
  misc_feature 1..22: note = chemically synthesized
  source 1..22: mol_type = other DNA
tctcttaacactgtctaagctg

SEQ ID NO: 150629 - DNA, 22 bp, synthetic construct
  misc_feature 1..22: note = chemically synthesized
  source 1..22: mol_type = other DNA
tcttaacactgtctaagctgtg

SEQ ID NO: 150630 - DNA, 22 bp, synthetic construct
  misc_feature 1..22: note = chemically synthesized
  source 1..22: mol_type = other DNA
ttaacactgtctaagctgtgtc

SEQ ID NO: 150631 - DNA, 22 bp, synthetic construct
  misc_feature 1..22: note = chemically synthesized
  source 1..22: mol_type = other DNA
aacactgtctaagctgtgtccc

SEQ ID NO: 150632 - DNA, 22 bp, synthetic construct
  misc_feature 1..22: note = chemically synthesized
  source 1..22: mol_type = other DNA
acactgtctaagctgtgtccca

SEQ ID NO: 150633 - DNA, 22 bp, synthetic construct
  misc_feature 1..22: note = chemically synthesized
  source 1..22: mol_type = other DNA
tctaagctgtgtcccagagatt

SEQ ID NO: 150634 - DNA, 22 bp, synthetic construct
  misc_feature 1..22: note = chemically synthesized
  source 1..22: mol_type = other DNA
agctgtgtcccagagattccgg

SEQ ID NO: 150635 - DNA, 22 bp, synthetic construct
  misc_feature 1..22: note = chemically synthesized
  source 1..22: mol_type = other DNA
tgtcccagagattccggtatat

SEQ ID NO: 150636 - DNA, 22 bp, synthetic construct
  misc_feature 1..22: note = chemically synthesized
  source 1..22: mol_type = other DNA
cggtatattgtatctttgttct

SEQ ID NO: 150637 - DNA, 22 bp, synthetic construct
  misc_feature 1..22: note = chemically synthesized
  source 1..22: mol_type = other DNA
tatctttgttctcattagtttc

SEQ ID NO: 150638 - DNA, 22 bp, synthetic construct
  misc_feature 1..22: note = chemically synthesized
  source 1..22: mol_type = other DNA
tgttctcattagtttcaaagaa

SEQ ID NO: 150639 - DNA, 22 bp, synthetic construct
  misc_feature 1..22: note = chemically synthesized
  source 1..22: mol_type = other DNA
gttctcattagtttcaaagaac

SEQ ID NO: 150640 - DNA, 22 bp, synthetic construct
  misc_feature 1..22: note = chemically synthesized
  source 1..22: mol_type = other DNA
ttctcattagtttcaaagaact

SEQ ID NO: 150641 - DNA, 22 bp, synthetic construct
  misc_feature 1..22: note = chemically synthesized
  source 1..22: mol_type = other DNA
tcattagtttcaaagaactatt

SEQ ID NO: 150642 - DNA, 22 bp, synthetic construct
  misc_feature 1..22: note = chemically synthesized
  source 1..22: mol_type = other DNA
attagtttcaaagaactatttt

SEQ ID NO: 150643 - DNA, 22 bp, synthetic construct
  misc_feature 1..22: note = chemically synthesized
  source 1..22: mol_type = other DNA
gtttcaaagaactattttattt

SEQ ID NO: 150644 - DNA, 22 bp, synthetic construct
  misc_feature 1..22: note = chemically synthesized
  source 1..22: mol_type = other DNA
caaagaactattttatttttgc

SEQ ID NO: 150645 - DNA, 22 bp, synthetic construct
  misc_feature 1..22: note = chemically synthesized
  source 1..22: mol_type = other DNA
aaagaactattttatttttgcc

SEQ ID NO: 150646 - DNA, 22 bp, synthetic construct
  misc_feature 1..22: note = chemically synthesized
  source 1..22: mol_type = other DNA
ttttatttttgccttagttttc

SEQ ID NO: 150647 - DNA, 22 bp, synthetic construct
  misc_feature 1..22: note = chemically synthesized
  source 1..22: mol_type = other DNA
tatttttgccttagttttcatt

SEQ ID NO: 150648 - DNA, 22 bp, synthetic construct
  misc_feature 1..22: note = chemically synthesized
  source 1..22: mol_type = other DNA
atttttgccttagttttcatta

SEQ ID NO: 150649 - DNA, 22 bp, synthetic construct
  misc_feature 1..22: note = chemically synthesized
  source 1..22: mol_type = other DNA
tttttgccttagttttcattat

SEQ ID NO: 150650 - DNA, 22 bp, synthetic construct
  misc_feature 1..22: note = chemically synthesized
  source 1..22: mol_type = other DNA
ttgccttagttttcattattta

SEQ ID NO: 150651 - DNA, 22 bp, synthetic construct
  misc_feature 1..22: note = chemically synthesized
  source 1..22: mol_type = other DNA
tgccttagttttcattatttac

SEQ ID NO: 150652 - DNA, 22 bp, synthetic construct
  misc_feature 1..22: note = chemically synthesized
  source 1..22: mol_type = other DNA
gccttagttttcattatttacc

SEQ ID NO: 150653 - DNA, 22 bp, synthetic construct
  misc_feature 1..22: note = chemically synthesized
  source 1..22: mol_type = other DNA
ccttagttttcattatttaccc

SEQ ID NO: 150654 - DNA, 22 bp, synthetic construct
  misc_feature 1..22: note = chemically synthesized
  source 1..22: mol_type = other DNA
agttttcattatttacccaaaa

SEQ ID NO: 150655 - DNA, 22 bp, synthetic construct
  misc_feature 1..22: note = chemically synthesized
  source 1..22: mol_type = other DNA
gttttcattatttacccaaaat

SEQ ID NO: 150656 - DNA, 22 bp, synthetic construct
  misc_feature 1..22: note = chemically synthesized
  source 1..22: mol_type = other DNA
tcattatttacccaaaattcat

SEQ ID NO: 150657 - DNA, 22 bp, synthetic construct
  misc_feature 1..22: note = chemically synthesized
  source 1..22: mol_type = other DNA
cattatttacccaaaattcatt

SEQ ID NO: 150658 - DNA, 22 bp, synthetic construct
  misc_feature 1..22: note = chemically synthesized
  source 1..22: mol_type = other DNA
attatttacccaaaattcattc

SEQ ID NO: 150659 - DNA, 22 bp, synthetic construct
  misc_feature 1..22: note = chemically synthesized
  source 1..22: mol_type = other DNA
tttacccaaaattcattcagga

SEQ ID NO: 150660 - DNA, 22 bp, synthetic construct
  misc_feature 1..22: note = chemically synthesized
  source 1..22: mol_type = other DNA
acccaaaattcattcaggagca

SEQ ID NO: 150661 - DNA, 22 bp, synthetic construct
  misc_feature 1..22: note = chemically synthesized
  source 1..22: mol_type = other DNA
cccaaaattcattcaggagcag

SEQ ID NO: 150662 - DNA, 22 bp, synthetic construct
  misc_feature 1..22: note = chemically synthesized
  source 1..22: mol_type = other DNA
attcaggagcaggttgtttaat

SEQ ID NO: 150663 - DNA, 22 bp, synthetic construct
  misc_feature 1..22: note = chemically synthesized
  source 1..22: mol_type = other DNA
aggagcaggttgtttaatttcc

SEQ ID NO: 150664 - DNA, 22 bp, synthetic construct
  misc_feature 1..22: note = chemically synthesized
  source 1..22: mol_type = other DNA
tttaatttccatgtaattgcat

SEQ ID NO: 150665 - DNA, 22 bp, synthetic construct
  misc_feature 1..22: note = chemically synthesized
  source 1..22: mol_type = other DNA
aatttccatgtaattgcatagt

SEQ ID NO: 150666 - DNA, 22 bp, synthetic construct
  misc_feature 1..22: note = chemically synthesized
  source 1..22: mol_type = other DNA
atttccatgtaattgcatagtt

SEQ ID NO: 150667 - DNA, 22 bp, synthetic construct
  misc_feature 1..22: note = chemically synthesized
  source 1..22: mol_type = other DNA
ccatgtaattgcatagttttca

SEQ ID NO: 150668 - DNA, 22 bp, synthetic construct
  misc_feature 1..22: note = chemically synthesized
  source 1..22: mol_type = other DNA
catgtaattgcatagttttcag

SEQ ID NO: 150669 - DNA, 22 bp, synthetic construct
  misc_feature 1..22: note = chemically synthesized
  source 1..22: mol_type = other DNA
catagttttcagctattcatta

SEQ ID NO: 150670 - DNA, 22 bp, synthetic construct
  misc_feature 1..22: note = chemically synthesized
  source 1..22: mol_type = other DNA
tcagctattcattagtcttgaa

SEQ ID NO: 150671 - DNA, 22 bp, synthetic construct
  misc_feature 1..22: note = chemically synthesized
  source 1..22: mol_type = other DNA
cagctattcattagtcttgaaa

SEQ ID NO: 150672 - DNA, 22 bp, synthetic construct
  misc_feature 1..22: note = chemically synthesized
  source 1..22: mol_type = other DNA
agctattcattagtcttgaaat

SEQ ID NO: 150673 - DNA, 22 bp, synthetic construct
  misc_feature 1..22: note = chemically synthesized
  source 1..22: mol_type = other DNA
ttcattagtcttgaaatctatt

SEQ ID NO: 150674 - DNA, 22 bp, synthetic construct
  misc_feature 1..22: note = chemically synthesized
  source 1..22: mol_type = other DNA
attagtcttgaaatctattttt

SEQ ID NO: 150675 - DNA, 22 bp, synthetic construct
  misc_feature 1..22: note = chemically synthesized
  source 1..22: mol_type = other DNA
gtcttgaaatctatttttattc

SEQ ID NO: 150676 - DNA, 22 bp, synthetic construct
  misc_feature 1..22: note = chemically synthesized
  source 1..22: mol_type = other DNA
gaaatctatttttattcctctg

SEQ ID NO: 150677 - DNA, 22 bp, synthetic construct
  misc_feature 1..22: note = chemically synthesized
  source 1..22: mol_type = other DNA
aaatctatttttattcctctgt

SEQ ID NO: 150678 - DNA, 22 bp, synthetic construct
  misc_feature 1..22: note = chemically synthesized
  source 1..22: mol_type = other DNA
tttttattcctctgtggtctga

SEQ ID NO: 150679 - DNA, 22 bp, synthetic construct
  misc_feature 1..22: note = chemically synthesized
  source 1..22: mol_type = other DNA
ttattcctctgtggtctgagag

SEQ ID NO: 150680 - DNA, 22 bp, synthetic construct
  misc_feature 1..22: note = chemically synthesized
  source 1..22: mol_type = other DNA
tattcctctgtggtctgagagt

SEQ ID NO: 150681 - DNA, 22 bp, synthetic construct
  misc_feature 1..22: note = chemically synthesized
  source 1..22: mol_type = other DNA
attcctctgtggtctgagagtg

SEQ ID NO: 150682 - DNA, 22 bp, synthetic construct
  misc_feature 1..22: note = chemically synthesized
  source 1..22: mol_type = other DNA
ttcctctgtggtctgagagtga

SEQ ID NO: 150683 - DNA, 22 bp, synthetic construct
  misc_feature 1..22: note = chemically synthesized
  source 1..22: mol_type = other DNA
ctctgtggtctgagagtgattg

SEQ ID NO: 150684 - DNA, 22 bp, synthetic construct
  misc_feature 1..22: note = chemically synthesized
  source 1..22: mol_type = other DNA
tgtggtctgagagtgattgata

SEQ ID NO: 150685 - DNA, 22 bp, synthetic construct
  misc_feature 1..22: note = chemically synthesized
  source 1..22: mol_type = other DNA
tggtctgagagtgattgatatg

SEQ ID NO: 150686 - DNA, 22 bp, synthetic construct
  misc_feature 1..22: note = chemically synthesized
  source 1..22: mol_type = other DNA
agagtgattgatatgatttttt

SEQ ID NO: 150687 - DNA, 22 bp, synthetic construct
  misc_feature 1..22: note = chemically synthesized
  source 1..22: mol_type = other DNA
atatgattttttttttgcattt

SEQ ID NO: 150688 - DNA, 22 bp, synthetic construct
  misc_feature 1..22: note = chemically synthesized
  source 1..22: mol_type = other DNA
tttttttgcatttgctgaggat

SEQ ID NO: 150689 - DNA, 22 bp, synthetic construct
  misc_feature 1..22: note = chemically synthesized
  source 1..22: mol_type = other DNA
ttttttgcatttgctgaggatt

SEQ ID NO: 150690 - DNA, 22 bp, synthetic construct
  misc_feature 1..22: note = chemically synthesized
  source 1..22: mol_type = other DNA
tttttgcatttgctgaggattg

SEQ ID NO: 150691 - DNA, 22 bp, synthetic construct
  misc_feature 1..22: note = chemically synthesized
  source 1..22: mol_type = other DNA
ttttgcatttgctgaggattgt

SEQ ID NO: 150692 - DNA, 22 bp, synthetic construct
  misc_feature 1..22: note = chemically synthesized
  source 1..22: mol_type = other DNA
tttgcatttgctgaggattgtt

SEQ ID NO: 150693 - DNA, 22 bp, synthetic construct
  misc_feature 1..22: note = chemically synthesized
  source 1..22: mol_type = other DNA
ttgcatttgctgaggattgttt

SEQ ID NO: 150694 - DNA, 22 bp, synthetic construct
  misc_feature 1..22: note = chemically synthesized
  source 1..22: mol_type = other DNA
tgcatttgctgaggattgtttt

SEQ ID NO: 150695 - DNA, 22 bp, synthetic construct
  misc_feature 1..22: note = chemically synthesized
  source 1..22: mol_type = other DNA
gcatttgctgaggattgtttta

SEQ ID NO: 150696 - DNA, 22 bp, synthetic construct
  misc_feature 1..22: note = chemically synthesized
  source 1..22: mol_type = other DNA
catttgctgaggattgttttag

SEQ ID NO: 150697 - DNA, 22 bp, synthetic construct
  misc_feature 1..22: note = chemically synthesized
  source 1..22: mol_type = other DNA
gctgaggattgttttaggtcct

SEQ ID NO: 150698 - DNA, 22 bp, synthetic construct
  misc_feature 1..22: note = chemically synthesized
  source 1..22: mol_type = other DNA
ctgaggattgttttaggtcctc

SEQ ID NO: 150699 - DNA, 22 bp, synthetic construct
  misc_feature 1..22: note = chemically synthesized
  source 1..22: mol_type = other DNA
aggattgttttaggtcctccca

SEQ ID NO: 150700 - DNA, 22 bp, synthetic construct
  misc_feature 1..22: note = chemically synthesized
  source 1..22: mol_type = other DNA
ttttaggtcctcccaaggctga

SEQ ID NO: 150701 - DNA, 22 bp, synthetic construct
  misc_feature 1..22: note = chemically synthesized
  source 1..22: mol_type = other DNA
taggtcctcccaaggctgaacc

SEQ ID NO: 150702 - DNA, 22 bp, synthetic construct
  misc_feature 1..22: note = chemically synthesized
  source 1..22: mol_type = other DNA
aggtcctcccaaggctgaacca

SEQ ID NO: 150703 - DNA, 22 bp, synthetic construct
  misc_feature 1..22: note = chemically synthesized
  source 1..22: mol_type = other DNA
ggtcctcccaaggctgaaccag

SEQ ID NO: 150704 - DNA, 22 bp, synthetic construct
  misc_feature 1..22: note = chemically synthesized
  source 1..22: mol_type = other DNA
ccaaggctgaaccaggaagaaa

SEQ ID NO: 150705 - DNA, 22 bp, synthetic construct
  misc_feature 1..22: note = chemically synthesized
  source 1..22: mol_type = other DNA
aaccaggaagaaatcaatttcc

SEQ ID NO: 150706 - DNA, 22 bp, synthetic construct
  misc_feature 1..22: note = chemically synthesized
  source 1..22: mol_type = other DNA
cctgaagagatccatgatgagc

SEQ ID NO: 150707 - DNA, 22 bp, synthetic construct
  misc_feature 1..22: note = chemically synthesized
  source 1..22: mol_type = other DNA
ctgaagagatccatgatgagct

SEQ ID NO: 150708 - DNA, 22 bp, synthetic construct
  misc_feature 1..22: note = chemically synthesized
  source 1..22: mol_type = other DNA
aagagatccatgatgagctctg

SEQ ID NO: 150709 - DNA, 22 bp, synthetic construct
  misc_feature 1..22: note = chemically synthesized
  source 1..22: mol_type = other DNA
tgaaaatgattcagtaataaat

SEQ ID NO: 150710 - DNA, 22 bp, synthetic construct
  misc_feature 1..22: note = chemically synthesized
  source 1..22: mol_type = other DNA
aaaatgattcagtaataaatag

SEQ ID NO: 150711 - DNA, 22 bp, synthetic construct
  misc_feature 1..22: note = chemically synthesized
  source 1..22: mol_type = other DNA
agtaataaatagcctatcaaac

SEQ ID NO: 150712 - DNA, 22 bp, synthetic construct
  misc_feature 1..22: note = chemically synthesized
  source 1..22: mol_type = other DNA
tcaaacaaaaaaagccctggac

SEQ ID NO: 150713 - DNA, 22 bp, synthetic construct
  misc_feature 1..22: note = chemically synthesized
  source 1..22: mol_type = other DNA
gacaatatgattcacaaccaaa

SEQ ID NO: 150714 - DNA, 22 bp, synthetic construct
  misc_feature 1..22: note = chemically synthesized
  source 1..22: mol_type = other DNA
acaaccaaattctatcagatgc

SEQ ID NO: 150715 - DNA, 22 bp, synthetic construct
  misc_feature 1..22: note = chemically synthesized
  source 1..22: mol_type = other DNA
tatcagatgcacaaagaagagt

SEQ ID NO: 150716 - DNA, 22 bp, synthetic construct
  misc_feature 1..22: note = chemically synthesized
  source 1..22: mol_type = other DNA
tcagatgcacaaagaagagttg

SEQ ID NO: 150717 - DNA, 22 bp, synthetic construct
  misc_feature 1..22: note = chemically synthesized
  source 1..22: mol_type = other DNA
gaaaaattcctactgaagctac

SEQ ID NO: 150718 - DNA, 22 bp, synthetic construct
  misc_feature 1..22: note = chemically synthesized
  source 1..22: mol_type = other DNA
ctactgaagctactccaaaaaa

SEQ ID NO: 150719 - DNA, 22 bp, synthetic construct
  misc_feature 1..22: note = chemically synthesized
  source 1..22: mol_type = other DNA
ctgaagctactccaaaaaattg

SEQ ID NO: 150720 - DNA, 22 bp, synthetic construct
  misc_feature 1..22: note = chemically synthesized
  source 1..22: mol_type = other DNA
aagctactccaaaaaattgagg

SEQ ID NO: 150721 - DNA, 22 bp, synthetic construct
  misc_feature 1..22: note = chemically synthesized
  source 1..22: mol_type = other DNA
ctccaaaaaattgagggggagg

SEQ ID NO: 150722 - DNA, 22 bp, synthetic construct
  misc_feature 1..22: note = chemically synthesized
  source 1..22: mol_type = other DNA
caaaaaattgagggggagggat

SEQ ID NO: 150723 - DNA, 22 bp, synthetic construct
  misc_feature 1..22: note = chemically synthesized
  source 1..22: mol_type = other DNA
agggggagggattcaacctcag

SEQ ID NO: 150724 - DNA, 22 bp, synthetic construct
  misc_feature 1..22: note = chemically synthesized
  source 1..22: mol_type = other DNA
aacctcagctcattttatgagg

SEQ ID NO: 150725 - DNA, 22 bp, synthetic construct
  misc_feature 1..22: note = chemically synthesized
  source 1..22: mol_type = other DNA
agctcattttatgaggccagca

SEQ ID NO: 150726 - DNA, 22 bp, synthetic construct
  misc_feature 1..22: note = chemically synthesized
  source 1..22: mol_type = other DNA
attttatgaggccagcatcatc

SEQ ID NO: 150727 - DNA, 22 bp, synthetic construct
  misc_feature 1..22: note = chemically synthesized
  source 1..22: mol_type = other DNA
tatgaggccagcatcatcctga

SEQ ID NO: 150728 - DNA, 22 bp, synthetic construct
  misc_feature 1..22: note = chemically synthesized
  source 1..22: mol_type = other DNA
atgaggccagcatcatcctgat

SEQ ID NO: 150729 - DNA, 22 bp, synthetic construct
  misc_feature 1..22: note = chemically synthesized
  source 1..22: mol_type = other DNA
tgaggccagcatcatcctgata

SEQ ID NO: 150730 - DNA, 22 bp, synthetic construct
  misc_feature 1..22: note = chemically synthesized
  source 1..22: mol_type = other DNA
ataccaaaacctgatagacaca

SEQ ID NO: 150731 - DNA, 22 bp, synthetic construct
  misc_feature 1..22: note = chemically synthesized
  source 1..22: mol_type = other DNA
atagacacacaacaacaaaaaa

SEQ ID NO: 150732 - DNA, 22 bp, synthetic construct
  misc_feature 1..22: note = chemically synthesized
  source 1..22: mol_type = other DNA
caggccaatatccttgaacatt

SEQ ID NO: 150733 - DNA, 22 bp, synthetic construct
  misc_feature 1..22: note = chemically synthesized
  source 1..22: mol_type = other DNA
aggccaatatccttgaacattg

SEQ ID NO: 150734 - DNA, 22 bp, synthetic construct
  misc_feature 1..22: note = chemically synthesized
  source 1..22: mol_type = other DNA
gaacattgatgcaaaaatacta

SEQ ID NO: 150735 - DNA, 22 bp, synthetic construct
  misc_feature 1..22: note = chemically synthesized
  source 1..22: mol_type = other DNA
aacattgatgcaaaaatactag

SEQ ID NO: 150736 - DNA, 22 bp, synthetic construct
  misc_feature 1..22: note = chemically synthesized
  source 1..22: mol_type = other DNA
atgcaaaaatactagcaagcca

SEQ ID NO: 150737 - DNA, 22 bp, synthetic construct
  misc_feature 1..22: note = chemically synthesized
  source 1..22: mol_type = other DNA
gcaagccaaatccagcaacaca

SEQ ID NO: 150738 - DNA, 22 bp, synthetic construct
  misc_feature 1..22: note = chemically synthesized
  source 1..22: mol_type = other DNA
atccacctcaatcaagtaggct

SEQ ID NO: 150739 - DNA, 22 bp, synthetic construct
  misc_feature 1..22: note = chemically synthesized
  source 1..22: mol_type = other DNA
aatcaagtaggctttatccctg

SEQ ID NO: 150740 - DNA, 22 bp, synthetic construct
  misc_feature 1..22: note = chemically synthesized
  source 1..22: mol_type = other DNA
tatccctgagaagcaagattgg

SEQ ID NO: 150741 - DNA, 22 bp, synthetic construct
  misc_feature 1..22: note = chemically synthesized
  source 1..22: mol_type = other DNA
atccctgagaagcaagattggt

SEQ ID NO: 150742 - DNA, 22 bp, synthetic construct
  misc_feature 1..22: note = chemically synthesized
  source 1..22: mol_type = other DNA
tccctgagaagcaagattggtt

SEQ ID NO: 150743 - DNA, 22 bp, synthetic construct
  misc_feature 1..22: note = chemically synthesized
  source 1..22: mol_type = other DNA
agaagcaagattggttcagcat

SEQ ID NO: 150744 - DNA, 22 bp, synthetic construct
  misc_feature 1..22: note = chemically synthesized
  source 1..22: mol_type = other DNA
gttcagcatatacaaattgata

SEQ ID NO: 150745 - DNA, 22 bp, synthetic construct
  misc_feature 1..22: note = chemically synthesized
  source 1..22: mol_type = other DNA
agcatatacaaattgataaatg

SEQ ID NO: 150746 - DNA, 22 bp, synthetic construct
  misc_feature 1..22: note = chemically synthesized
  source 1..22: mol_type = other DNA
ataaatgtgattcatcatatat

SEQ ID NO: 150747 - DNA, 22 bp, synthetic construct
  misc_feature 1..22: note = chemically synthesized
  source 1..22: mol_type = other DNA
atcatatatacagcactaaaaa

SEQ ID NO: 150748 - DNA, 22 bp, synthetic construct
  misc_feature 1..22: note = chemically synthesized
  source 1..22: mol_type = other DNA
aaaacagaaaccacatgatcat

SEQ ID NO: 150749 - DNA, 22 bp, synthetic construct
  misc_feature 1..22: note = chemically synthesized
  source 1..22: mol_type = other DNA
caatatgtgcaaaaaaagattt

SEQ ID NO: 150750 - DNA, 22 bp, synthetic construct
  misc_feature 1..22: note = chemically synthesized
  source 1..22: mol_type = other DNA
aatatgtgcaaaaaaagatttt

SEQ ID NO: 150751 - DNA, 22 bp, synthetic construct
  misc_feature 1..22: note = chemically synthesized
  source 1..22: mol_type = other DNA
tgataaaattcaacttcacttc

SEQ ID NO: 150752 - DNA, 22 bp, synthetic construct
  misc_feature 1..22: note = chemically synthesized
  source 1..22: mol_type = other DNA
gataaaattcaacttcacttca

SEQ ID NO: 150753 - DNA, 22 bp, synthetic construct
  misc_feature 1..22: note = chemically synthesized
  source 1..22: mol_type = other DNA
ataaaattcaacttcacttcat

SEQ ID NO: 150754 - DNA, 22 bp, synthetic construct
  misc_feature 1..22: note = chemically synthesized
  source 1..22: mol_type = other DNA
aacttcacttcatgttaaaacc

SEQ ID NO: 150755 - DNA, 22 bp, synthetic construct
  misc_feature 1..22: note = chemically synthesized
  source 1..22: mol_type = other DNA
cacttcatgttaaaacctctca

SEQ ID NO: 150756 - DNA, 22 bp, synthetic construct
  misc_feature 1..22: note = chemically synthesized
  source 1..22: mol_type = other DNA
acttcatgttaaaacctctcaa

SEQ ID NO: 150757 - DNA, 22 bp, synthetic construct
  misc_feature 1..22: note = chemically synthesized
  source 1..22: mol_type = other DNA
catgttaaaacctctcaacaaa

SEQ ID NO: 150758 - DNA, 22 bp, synthetic construct
  misc_feature 1..22: note = chemically synthesized
  source 1..22: mol_type = other DNA
atgttaaaacctctcaacaaac

SEQ ID NO: 150759 - DNA, 22 bp, synthetic construct
  misc_feature 1..22: note = chemically synthesized
  source 1..22: mol_type = other DNA
aaacctctcaacaaactagcta

SEQ ID NO: 150760 - DNA, 22 bp, synthetic construct
  misc_feature 1..22: note = chemically synthesized
  source 1..22: mol_type = other DNA
tcaacaaactagctatttaagg

SEQ ID NO: 150761 - DNA, 22 bp, synthetic construct
  misc_feature 1..22: note = chemically synthesized
  source 1..22: mol_type = other DNA
aacaaactagctatttaaggac

SEQ ID NO: 150762 - DNA, 22 bp, synthetic construct
  misc_feature 1..22: note = chemically synthesized
  source 1..22: mol_type = other DNA
gctatttaaggacatgacctca

SEQ ID NO: 150763 - DNA, 22 bp, synthetic construct
  misc_feature 1..22: note = chemically synthesized
  source 1..22: mol_type = other DNA
tttaaggacatgacctcaaaat

SEQ ID NO: 150764 - DNA, 22 bp, synthetic construct
  misc_feature 1..22: note = chemically synthesized
  source 1..22: mol_type = other DNA
aaggacatgacctcaaaataat

SEQ ID NO: 150765 - DNA, 22 bp, synthetic construct
  misc_feature 1..22: note = chemically synthesized
  source 1..22: mol_type = other DNA
aggacatgacctcaaaataata

SEQ ID NO: 150766 - DNA, 22 bp, synthetic construct
  misc_feature 1..22: note = chemically synthesized
  source 1..22: mol_type = other DNA
aaaataatatgagccatctatg

SEQ ID NO: 150767 - DNA, 22 bp, synthetic construct
  misc_feature 1..22: note = chemically synthesized
  source 1..22: mol_type = other DNA
tgacaaacccacagccaacatc

SEQ ID NO: 150768 - DNA, 22 bp, synthetic construct
  misc_feature 1..22: note = chemically synthesized
  source 1..22: mol_type = other DNA
gaagcattcttcttgaaaactg

SEQ ID NO: 150769 - DNA, 22 bp, synthetic construct
  misc_feature 1..22: note = chemically synthesized
  source 1..22: mol_type = other DNA
ttcttgaaaactggcacaagac

SEQ ID NO: 150770 - DNA, 22 bp, synthetic construct
  misc_feature 1..22: note = chemically synthesized
  source 1..22: mol_type = other DNA
cttgaaaactggcacaagacaa

SEQ ID NO: 150771 - DNA, 22 bp, synthetic construct
  misc_feature 1..22: note = chemically synthesized
  source 1..22: mol_type = other DNA
ttgaaaactggcacaagacaag

SEQ ID NO: 150772 - DNA, 22 bp, synthetic construct
  misc_feature 1..22: note = chemically synthesized
  source 1..22: mol_type = other DNA
gaaaactggcacaagacaagga

SEQ ID NO: 150773 - DNA, 22 bp, synthetic construct
  misc_feature 1..22: note = chemically synthesized
  source 1..22: mol_type = other DNA
aaaactggcacaagacaaggat

SEQ ID NO: 150774 - DNA, 22 bp, synthetic construct
  misc_feature 1..22: note = chemically synthesized
  source 1..22: mol_type = other DNA
gcacaagacaaggatgccctct

SEQ ID NO: 150775 - DNA, 22 bp, synthetic construct
  misc_feature 1..22: note = chemically synthesized
  source 1..22: mol_type = other DNA
tctcaccactgctattcagtat

SEQ ID NO: 150776 - DNA, 22 bp, synthetic construct
  misc_feature 1..22: note = chemically synthesized
  source 1..22: mol_type = other DNA
tcaccactgctattcagtatag

SEQ ID NO: 150777 - DNA, 22 bp, synthetic construct
  misc_feature 1..22: note = chemically synthesized
  source 1..22: mol_type = other DNA
accactgctattcagtatagta

SEQ ID NO: 150778 - DNA, 22 bp, synthetic construct
  misc_feature 1..22: note = chemically synthesized
  source 1..22: mol_type = other DNA
ctattcagtatagtactggcag

SEQ ID NO: 150779 - DNA, 22 bp, synthetic construct
  misc_feature 1..22: note = chemically synthesized
  source 1..22: mol_type = other DNA
ttcagtatagtactggcagtcc

SEQ ID NO: 150780 - DNA, 22 bp, synthetic construct
  misc_feature 1..22: note = chemically synthesized
  source 1..22: mol_type = other DNA
agtatagtactggcagtcctgg

SEQ ID NO: 150781 - DNA, 22 bp, synthetic construct
  misc_feature 1..22: note = chemically synthesized
  source 1..22: mol_type = other DNA
gcagtcctggccagagcaatca

SEQ ID NO: 150782 - DNA, 22 bp, synthetic construct
  misc_feature 1..22: note = chemically synthesized
  source 1..22: mol_type = other DNA
gccagagcaatcaggcaagaga

SEQ ID NO: 150783 - DNA, 22 bp, synthetic construct
  misc_feature 1..22: note = chemically synthesized
  source 1..22: mol_type = other DNA
ttttctgtatctagaaaacacc

SEQ ID NO: 150784 - DNA, 22 bp, synthetic construct
  misc_feature 1..22: note = chemically synthesized
  source 1..22: mol_type = other DNA
tctgtatctagaaaacaccata

SEQ ID NO: 150785 - DNA, 22 bp, synthetic construct
  misc_feature 1..22: note = chemically synthesized
  source 1..22: mol_type = other DNA
ctgtatctagaaaacaccatag

SEQ ID NO: 150786 - DNA, 22 bp, synthetic construct
  misc_feature 1..22: note = chemically synthesized
  source 1..22: mol_type = other DNA
tgtatctagaaaacaccatagt

SEQ ID NO: 150787 - DNA, 22 bp, synthetic construct
  misc_feature 1..22: note = chemically synthesized
  source 1..22: mol_type = other DNA
tatctagaaaacaccatagtca

SEQ ID NO: 150788 - DNA, 22 bp, synthetic construct
  misc_feature 1..22: note = chemically synthesized
  source 1..22: mol_type = other DNA
gaaaacaccatagtcaaggccc

SEQ ID NO: 150789 - DNA, 22 bp, synthetic construct
  misc_feature 1..22: note = chemically synthesized
  source 1..22: mol_type = other DNA
cttcagctgataacttcagcaa

SEQ ID NO: 150790 - DNA, 22 bp, synthetic construct
  misc_feature 1..22: note = chemically synthesized
  source 1..22: mol_type = other DNA
cagctgataacttcagcaaagt

SEQ ID NO: 150791 - DNA, 22 bp, synthetic construct
  misc_feature 1..22: note = chemically synthesized
  source 1..22: mol_type = other DNA
agctgataacttcagcaaagtt

SEQ ID NO: 150792 - DNA, 22 bp, synthetic construct
  misc_feature 1..22: note = chemically synthesized
  source 1..22: mol_type = other DNA
ataacttcagcaaagtttcagg

SEQ ID NO: 150793 - DNA, 22 bp, synthetic construct
  misc_feature 1..22: note = chemically synthesized
  source 1..22: mol_type = other DNA
cagcaaagtttcaggatataaa

SEQ ID NO: 150794 - DNA, 22 bp, synthetic construct
  misc_feature 1..22: note = chemically synthesized
  source 1..22: mol_type = other DNA
agcaaagtttcaggatataaaa

SEQ ID NO: 150795 - DNA, 22 bp, synthetic construct
  misc_feature 1..22: note = chemically synthesized
  source 1..22: mol_type = other DNA
caggatataaaatcaatgtaca

SEQ ID NO: 150796 - DNA, 22 bp, synthetic construct
  misc_feature 1..22: note = chemically synthesized
  source 1..22: mol_type = other DNA
aggatataaaatcaatgtacaa

SEQ ID NO: 150797 - DNA, 22 bp, synthetic construct
  misc_feature 1..22: note = chemically synthesized
  source 1..22: mol_type = other DNA
gcattcccatacatcaacaata

SEQ ID NO: 150798 - DNA, 22 bp, synthetic construct
  misc_feature 1..22: note = chemically synthesized
  source 1..22: mol_type = other DNA
ccatacatcaacaatagccaag

SEQ ID NO: 150799 - DNA, 22 bp, synthetic construct
  misc_feature 1..22: note = chemically synthesized
  source 1..22: mol_type = other DNA
gagccaaatcaggaagtcaatc

SEQ ID NO: 150800 - DNA, 22 bp, synthetic construct
  misc_feature 1..22: note = chemically synthesized
  source 1..22: mol_type = other DNA
accgttgccacaaaaagaataa

SEQ ID NO: 150801 - DNA, 22 bp, synthetic construct
  misc_feature 1..22: note = chemically synthesized
  source 1..22: mol_type = other DNA
ccgttgccacaaaaagaataaa

SEQ ID NO: 150802 - DNA, 22 bp, synthetic construct
  misc_feature 1..22: note = chemically synthesized
  source 1..22: mol_type = other DNA
ccacaaaaagaataaaatacct

SEQ ID NO: 150803 - DNA, 22 bp, synthetic construct
  misc_feature 1..22: note = chemically synthesized
  source 1..22: mol_type = other DNA
aggatatatctaaccaagcagt

SEQ ID NO: 150804 - DNA, 22 bp, synthetic construct
  misc_feature 1..22: note = chemically synthesized
  source 1..22: mol_type = other DNA
accaagcagttgaaagatctct

SEQ ID NO: 150805 - DNA, 22 bp, synthetic construct
  misc_feature 1..22: note = chemically synthesized
  source 1..22: mol_type = other DNA
aaagatctctacaatgagattt

SEQ ID NO: 150806 - DNA, 22 bp, synthetic construct
  misc_feature 1..22: note = chemically synthesized
  source 1..22: mol_type = other DNA
tacaatgagatttacaaaacac

SEQ ID NO: 150807 - DNA, 22 bp, synthetic construct
  misc_feature 1..22: note = chemically synthesized
  source 1..22: mol_type = other DNA
caatgagatttacaaaacactg

SEQ ID NO: 150808 - DNA, 22 bp, synthetic construct
  misc_feature 1..22: note = chemically synthesized
  source 1..22: mol_type = other DNA
acaaaacactgctcaaagaaat

SEQ ID NO: 150809 - DNA, 22 bp, synthetic construct
  misc_feature 1..22: note = chemically synthesized
  source 1..22: mol_type = other DNA
caaaacactgctcaaagaaatc

SEQ ID NO: 150810 - DNA, 22 bp, synthetic construct
  misc_feature 1..22: note = chemically synthesized
  source 1..22: mol_type = other DNA
ctcaaagaaatcagagctgata

SEQ ID NO: 150811 - DNA, 22 bp, synthetic construct
  misc_feature 1..22: note = chemically synthesized
  source 1..22: mol_type = other DNA
aaagaaatcagagctgatagaa

SEQ ID NO: 150812 - DNA, 22 bp, synthetic construct
  misc_feature 1..22: note = chemically synthesized
  source 1..22: mol_type = other DNA
atagaaacaaatggaaaaactt

SEQ ID NO: 150813 - DNA, 22 bp, synthetic construct
  misc_feature 1..22: note = chemically synthesized
  source 1..22: mol_type = other DNA
tccatgctcatggataaaaaga

SEQ ID NO: 150814 - DNA, 22 bp, synthetic construct
  misc_feature 1..22: note = chemically synthesized
  source 1..22: mol_type = other DNA
ccatgctcatggataaaaagaa

SEQ ID NO: 150815 - DNA, 22 bp, synthetic construct
  misc_feature 1..22: note = chemically synthesized
  source 1..22: mol_type = other DNA
catgctcatggataaaaagaat

SEQ ID NO: 150816 - DNA, 22 bp, synthetic construct
  misc_feature 1..22: note = chemically synthesized
  source 1..22: mol_type = other DNA
atggataaaaagaatcaatatt

SEQ ID NO: 150817 - DNA, 22 bp, synthetic construct
  misc_feature 1..22: note = chemically synthesized
  source 1..22: mol_type = other DNA
ttaaaatgtccatactgcctag

SEQ ID NO: 150818 - DNA, 22 bp, synthetic construct
  misc_feature 1..22: note = chemically synthesized
  source 1..22: mol_type = other DNA
aaatgtccatactgcctagagc

SEQ ID NO: 150819 - DNA, 22 bp, synthetic construct
  misc_feature 1..22: note = chemically synthesized
  source 1..22: mol_type = other DNA
cctagagcaatttacagtttca

SEQ ID NO: 150820 - DNA, 22 bp, synthetic construct
  misc_feature 1..22: note = chemically synthesized
  source 1..22: mol_type = other DNA
gagcaatttacagtttcaaagc

SEQ ID NO: 150821 - DNA, 22 bp, synthetic construct
  misc_feature 1..22: note = chemically synthesized
  source 1..22: mol_type = other DNA
acagtttcaaagctattcctat

SEQ ID NO: 150822 - DNA, 22 bp, synthetic construct
  misc_feature 1..22: note = chemically synthesized
  source 1..22: mol_type = other DNA
cagtttcaaagctattcctatc

SEQ ID NO: 150823 - DNA, 22 bp, synthetic construct
  misc_feature 1..22: note = chemically synthesized
  source 1..22: mol_type = other DNA
caaagctattcctatcaaacta

SEQ ID NO: 150824 - DNA, 22 bp, synthetic construct
  misc_feature 1..22: note = chemically synthesized
  source 1..22: mol_type = other DNA
aaagctattcctatcaaactac

SEQ ID NO: 150825 - DNA, 22 bp, synthetic construct
  misc_feature 1..22: note = chemically synthesized
  source 1..22: mol_type = other DNA
ttcctatcaaactaccaatgac

SEQ ID NO: 150826 - DNA, 22 bp, synthetic construct
  misc_feature 1..22: note = chemically synthesized
  source 1..22: mol_type = other DNA
ctatcaaactaccaatgacatt

SEQ ID NO: 150827 - DNA, 22 bp, synthetic construct
  misc_feature 1..22: note = chemically synthesized
  source 1..22: mol_type = other DNA
tcaaactaccaatgacattctt

SEQ ID NO: 150828 - DNA, 22 bp, synthetic construct
  misc_feature 1..22: note = chemically synthesized
  source 1..22: mol_type = other DNA
ccaatgacattcttcacagaac

SEQ ID NO: 150829 - DNA, 22 bp, synthetic construct
  misc_feature 1..22: note = chemically synthesized
  source 1..22: mol_type = other DNA
ttcacagaactagaaaaataca

SEQ ID NO: 150830 - DNA, 22 bp, synthetic construct
  misc_feature 1..22: note = chemically synthesized
  source 1..22: mol_type = other DNA
cacagaactagaaaaatacact

SEQ ID NO: 150831 - DNA, 22 bp, synthetic construct
  misc_feature 1..22: note = chemically synthesized
  source 1..22: mol_type = other DNA
acagaactagaaaaatacactt

SEQ ID NO: 150832 - DNA, 22 bp, synthetic construct
  misc_feature 1..22: note = chemically synthesized
  source 1..22: mol_type = other DNA
gaaaaatacactttaaagttca

SEQ ID NO: 150833 - DNA, 22 bp, synthetic construct
  misc_feature 1..22: note = chemically synthesized
  source 1..22: mol_type = other DNA
taaagttcatatggaacaacaa

SEQ ID NO: 150834 - DNA, 22 bp, synthetic construct
  misc_feature 1..22: note = chemically synthesized
  source 1..22: mol_type = other DNA
aaagttcatatggaacaacaac

SEQ ID NO: 150835 - DNA, 22 bp, synthetic construct
  misc_feature 1..22: note = chemically synthesized
  source 1..22: mol_type = other DNA
aagttcatatggaacaacaaca

SEQ ID NO: 150836 - DNA, 22 bp, synthetic construct
  misc_feature 1..22: note = chemically synthesized
  source 1..22: mol_type = other DNA
atatggaacaacaacaaaaaaa

SEQ ID NO: 150837 - DNA, 22 bp, synthetic construct
  misc_feature 1..22: note = chemically synthesized
  source 1..22: mol_type = other DNA
ggaaatcctaatactcacaggt

SEQ ID NO: 150838 - DNA, 22 bp, synthetic construct
  misc_feature 1..22: note = chemically synthesized
  source 1..22: mol_type = other DNA
atactcacaggtgggaattgaa

SEQ ID NO: 150839 - DNA, 22 bp, synthetic construct
  misc_feature 1..22: note = chemically synthesized
  source 1..22: mol_type = other DNA
acaggtgggaattgaaaaatga

SEQ ID NO: 150840 - DNA, 22 bp, synthetic construct
  misc_feature 1..22: note = chemically synthesized
  source 1..22: mol_type = other DNA
aaaaatgagaacacttggacac

SEQ ID NO: 150841 - DNA, 22 bp, synthetic construct
  misc_feature 1..22: note = chemically synthesized
  source 1..22: mol_type = other DNA
ggacacagggtggggaacatca

SEQ ID NO: 150842 - DNA, 22 bp, synthetic construct
  misc_feature 1..22: note = chemically synthesized
  source 1..22: mol_type = other DNA
gacacagggtggggaacatcac

SEQ ID NO: 150843 - DNA, 22 bp, synthetic construct
  misc_feature 1..22: note = chemically synthesized
  source 1..22: mol_type = other DNA
tcgtggggtggtaggagagagg

SEQ ID NO: 150844 - DNA, 22 bp, synthetic construct
  misc_feature 1..22: note = chemically synthesized
  source 1..22: mol_type = other DNA
ggagatatatctaatgtaaatg

SEQ ID NO: 150845 - DNA, 22 bp, synthetic construct
  misc_feature 1..22: note = chemically synthesized
  source 1..22: mol_type = other DNA
atgtaaatgacgagttaacggg

SEQ ID NO: 150846 - DNA, 22 bp, synthetic construct
  misc_feature 1..22: note = chemically synthesized
  source 1..22: mol_type = other DNA
acgggtgcagcacaccaatatg

SEQ ID NO: 150847 - DNA, 22 bp, synthetic construct
  misc_feature 1..22: note = chemically synthesized
  source 1..22: mol_type = other DNA
cacaggtaccgtagaacttaga

SEQ ID NO: 150848 - DNA, 22 bp, synthetic construct
  misc_feature 1..22: note = chemically synthesized
  source 1..22: mol_type = other DNA
agagtacaaaaaaaaaaaaaga

SEQ ID NO: 150849 - DNA, 22 bp, synthetic construct
  misc_feature 1..22: note = chemically synthesized
  source 1..22: mol_type = other DNA
gagtacaaaaaaaaaaaaagag

SEQ ID NO: 150850 - DNA, 22 bp, synthetic construct
  misc_feature 1..22: note = chemically synthesized
  source 1..22: mol_type = other DNA
gagataatacattgcctaactt

SEQ ID NO: 150851 - DNA, 22 bp, synthetic construct
  misc_feature 1..22: note = chemically synthesized
  source 1..22: mol_type = other DNA
cctaacttcaaaccataccaca

SEQ ID NO: 150852 - DNA, 22 bp, synthetic construct
  misc_feature 1..22: note = chemically synthesized
  source 1..22: mol_type = other DNA
acttcaaaccataccacagggc

SEQ ID NO: 150853 - DNA, 22 bp, synthetic construct
  misc_feature 1..22: note = chemically synthesized
  source 1..22: mol_type = other DNA
caaaccataccacagggctaca

SEQ ID NO: 150854 - DNA, 22 bp, synthetic construct
  misc_feature 1..22: note = chemically synthesized
  source 1..22: mol_type = other DNA
aaaccataccacagggctacag

SEQ ID NO: 150855 - DNA, 22 bp, synthetic construct
  misc_feature 1..22: note = chemically synthesized
  source 1..22: mol_type = other DNA
cagtaaccaaaacagtgtggta

SEQ ID NO: 150856 - DNA, 22 bp, synthetic construct
  misc_feature 1..22: note = chemically synthesized
  source 1..22: mol_type = other DNA
ttacagaaaagacacacagaca

SEQ ID NO: 150857 - DNA, 22 bp, synthetic construct
  misc_feature 1..22: note = chemically synthesized
  source 1..22: mol_type = other DNA
cagaaaagacacacagacaaat

SEQ ID NO: 150858 - DNA, 22 bp, synthetic construct
  misc_feature 1..22: note = chemically synthesized
  source 1..22: mol_type = other DNA
caaccatctgatctttgacaaa

SEQ ID NO: 150859 - DNA, 22 bp, synthetic construct
  misc_feature 1..22: note = chemically synthesized
  source 1..22: mol_type = other DNA
atctttgacaaagctgataaaa

SEQ ID NO: 150860 - DNA, 22 bp, synthetic construct
  misc_feature 1..22: note = chemically synthesized
  source 1..22: mol_type = other DNA
tgacaaagctgataaaaacaag

SEQ ID NO: 150861 - DNA, 22 bp, synthetic construct
  misc_feature 1..22: note = chemically synthesized
  source 1..22: mol_type = other DNA
gacaaagctgataaaaacaagc

SEQ ID NO: 150862 - DNA, 22 bp, synthetic construct
  misc_feature 1..22: note = chemically synthesized
  source 1..22: mol_type = other DNA
acaaagctgataaaaacaagca

SEQ ID NO: 150863 - DNA, 22 bp, synthetic construct
  misc_feature 1..22: note = chemically synthesized
  source 1..22: mol_type = other DNA
ataaaaacaagcaatgaggaaa

SEQ ID NO: 150864 - DNA, 22 bp, synthetic construct
  misc_feature 1..22: note = chemically synthesized
  source 1..22: mol_type = other DNA
ttcaacaagtggtgttgggata

SEQ ID NO: 150865 - DNA, 22 bp, synthetic construct
  misc_feature 1..22: note = chemically synthesized
  source 1..22: mol_type = other DNA
aacaagtggtgttgggataact

SEQ ID NO: 150866 - DNA, 22 bp, synthetic construct
  misc_feature 1..22: note = chemically synthesized
  source 1..22: mol_type = other DNA
ggataactgactaaccgtatgt

SEQ ID NO: 150867 - DNA, 22 bp, synthetic construct
  misc_feature 1..22: note = chemically synthesized
  source 1..22: mol_type = other DNA
actaaccgtatgtagaagattg

SEQ ID NO: 150868 - DNA, 22 bp, synthetic construct
  misc_feature 1..22: note = chemically synthesized
  source 1..22: mol_type = other DNA
accgtatgtagaagattgaaac

SEQ ID NO: 150869 - DNA, 22 bp, synthetic construct
  misc_feature 1..22: note = chemically synthesized
  source 1..22: mol_type = other DNA
aaaccagaccccgttctatatc

SEQ ID NO: 150870 - DNA, 22 bp, synthetic construct
  misc_feature 1..22: note = chemically synthesized
  source 1..22: mol_type = other DNA
tatatcatatacacaaataaac

SEQ ID NO: 150871 - DNA, 22 bp, synthetic construct
  misc_feature 1..22: note = chemically synthesized
  source 1..22: mol_type = other DNA
tatcatatacacaaataaactc

SEQ ID NO: 150872 - DNA, 22 bp, synthetic construct
  misc_feature 1..22: note = chemically synthesized
  source 1..22: mol_type = other DNA
aagatggattagagacttaaat

SEQ ID NO: 150873 - DNA, 22 bp, synthetic construct
  misc_feature 1..22: note = chemically synthesized
  source 1..22: mol_type = other DNA
gagacttaaatgcaaaacccaa

SEQ ID NO: 150874 - DNA, 22 bp, synthetic construct
  misc_feature 1..22: note = chemically synthesized
  source 1..22: mol_type = other DNA
aaatgcaaaacccaaactataa

SEQ ID NO: 150875 - DNA, 22 bp, synthetic construct
  misc_feature 1..22: note = chemically synthesized
  source 1..22: mol_type = other DNA
aatgcaaaacccaaactataaa

SEQ ID NO: 150876 - DNA, 22 bp, synthetic construct
  misc_feature 1..22: note = chemically synthesized
  source 1..22: mol_type = other DNA
taaaaatgcttgaaagcaacct

SEQ ID NO: 150877 - DNA, 22 bp, synthetic construct
  misc_feature 1..22: note = chemically synthesized
  source 1..22: mol_type = other DNA
gaaagcaacctaggcaatacca

SEQ ID NO: 150878 - DNA, 22 bp, synthetic construct
  misc_feature 1..22: note = chemically synthesized
  source 1..22: mol_type = other DNA
aaagcaacctaggcaataccat

SEQ ID NO: 150879 - DNA, 22 bp, synthetic construct
  misc_feature 1..22: note = chemically synthesized
  source 1..22: mol_type = other DNA
ggcaataccattccggacataa

SEQ ID NO: 150880 - DNA, 22 bp, synthetic construct
  misc_feature 1..22: note = chemically synthesized
  source 1..22: mol_type = other DNA
cggacataagcaggggcaaaga

SEQ ID NO: 150881 - DNA, 22 bp, synthetic construct
  misc_feature 1..22: note = chemically synthesized
  source 1..22: mol_type = other DNA
catgacaaagatgccaacagtc

SEQ ID NO: 150882 - DNA, 22 bp, synthetic construct
  misc_feature 1..22: note = chemically synthesized
  source 1..22: mol_type = other DNA
atgacaaagatgccaacagtca

SEQ ID NO: 150883 - DNA, 22 bp, synthetic construct
  misc_feature 1..22: note = chemically synthesized
  source 1..22: mol_type = other DNA
cagcaaaagcaaaaattgacaa

SEQ ID NO: 150884 - DNA, 22 bp, synthetic construct
  misc_feature 1..22: note = chemically synthesized
  source 1..22: mol_type = other DNA
acaaataggatctaattaaaat

SEQ ID NO: 150885 - DNA, 22 bp, synthetic construct
  misc_feature 1..22: note = chemically synthesized
  source 1..22: mol_type = other DNA
attaaaataaagtttctgcaca

SEQ ID NO: 150886 - DNA, 22 bp, synthetic construct
  misc_feature 1..22: note = chemically synthesized
  source 1..22: mol_type = other DNA
aaataaagtttctgcacagcaa

SEQ ID NO: 150887 - DNA, 22 bp, synthetic construct
  misc_feature 1..22: note = chemically synthesized
  source 1..22: mol_type = other DNA
ctgcacagcaaaagaaactatc

SEQ ID NO: 150888 - DNA, 22 bp, synthetic construct
  misc_feature 1..22: note = chemically synthesized
  source 1..22: mol_type = other DNA
tgcacagcaaaagaaactatca

SEQ ID NO: 150889 - DNA, 22 bp, synthetic construct
  misc_feature 1..22: note = chemically synthesized
  source 1..22: mol_type = other DNA
cacagcaaaagaaactatcaac

SEQ ID NO: 150890 - DNA, 22 bp, synthetic construct
  misc_feature 1..22: note = chemically synthesized
  source 1..22: mol_type = other DNA
tcaactgagtaaacaacctata

SEQ ID NO: 150891 - DNA, 22 bp, synthetic construct
  misc_feature 1..22: note = chemically synthesized
  source 1..22: mol_type = other DNA
agtaaacaacctatagaatggg

SEQ ID NO: 150892 - DNA, 22 bp, synthetic construct
  misc_feature 1..22: note = chemically synthesized
  source 1..22: mol_type = other DNA
tagaatgggagaaaatttttgc

SEQ ID NO: 150893 - DNA, 22 bp, synthetic construct
  misc_feature 1..22: note = chemically synthesized
  source 1..22: mol_type = other DNA
ttgcaaactatgcatccaacaa

SEQ ID NO: 150894 - DNA, 22 bp, synthetic construct
  misc_feature 1..22: note = chemically synthesized
  source 1..22: mol_type = other DNA
tgcaaactatgcatccaacaaa

SEQ ID NO: 150895 - DNA, 22 bp, synthetic construct
  misc_feature 1..22: note = chemically synthesized
  source 1..22: mol_type = other DNA
gcaaactatgcatccaacaaag

SEQ ID NO: 150896 - DNA, 22 bp, synthetic construct
  misc_feature 1..22: note = chemically synthesized
  source 1..22: mol_type = other DNA
caaactatgcatccaacaaagg

SEQ ID NO: 150897 - DNA, 22 bp, synthetic construct
  misc_feature 1..22: note = chemically synthesized
  source 1..22: mol_type = other DNA
tgcatccaacaaaggcctaata

SEQ ID NO: 150898 - DNA, 22 bp, synthetic construct
  misc_feature 1..22: note = chemically synthesized
  source 1..22: mol_type = other DNA
atattcagaatctataaggaac

SEQ ID NO: 150899 - DNA, 22 bp, synthetic construct
  misc_feature 1..22: note = chemically synthesized
  source 1..22: mol_type = other DNA
agaatctataaggaacttaaat

SEQ ID NO: 150900 - DNA, 22 bp, synthetic construct
  misc_feature 1..22: note = chemically synthesized
  source 1..22: mol_type = other DNA
taaggaacttaaatgaatctac

SEQ ID NO: 150901 - DNA, 22 bp, synthetic construct
  misc_feature 1..22: note = chemically synthesized
  source 1..22: mol_type = other DNA
aaatgaatctacaagaacaaaa

SEQ ID NO: 150902 - DNA, 22 bp, synthetic construct
  misc_feature 1..22: note = chemically synthesized
  source 1..22: mol_type = other DNA
aatgaatctacaagaacaaaac

SEQ ID NO: 150903 - DNA, 22 bp, synthetic construct
  misc_feature 1..22: note = chemically synthesized
  source 1..22: mol_type = other DNA
caagaacaaaacaaacaatgcc

SEQ ID NO: 150904 - DNA, 22 bp, synthetic construct
  misc_feature 1..22: note = chemically synthesized
  source 1..22: mol_type = other DNA
aaaagaagacatacatgtggcc

SEQ ID NO: 150905 - DNA, 22 bp, synthetic construct
  misc_feature 1..22: note = chemically synthesized
  source 1..22: mol_type = other DNA
agtgtcactgatcattagagaa

SEQ ID NO: 150906 - DNA, 22 bp, synthetic construct
  misc_feature 1..22: note = chemically synthesized
  source 1..22: mol_type = other DNA
atcattagagaaatgccaatca

SEQ ID NO: 150907 - DNA, 22 bp, synthetic construct
  misc_feature 1..22: note = chemically synthesized
  source 1..22: mol_type = other DNA
gagaaatgccaatcaaacccaa

SEQ ID NO: 150908 - DNA, 22 bp, synthetic construct
  misc_feature 1..22: note = chemically synthesized
  source 1..22: mol_type = other DNA
tctcacatcacttaaaatatct

SEQ ID NO: 150909 - DNA, 22 bp, synthetic construct
  misc_feature 1..22: note = chemically synthesized
  source 1..22: mol_type = other DNA
acatcacttaaaatatctataa

SEQ ID NO: 150910 - DNA, 22 bp, synthetic construct
  misc_feature 1..22: note = chemically synthesized
  source 1..22: mol_type = other DNA
aaaatatctataattaaatagt

SEQ ID NO: 150911 - DNA, 22 bp, synthetic construct
  misc_feature 1..22: note = chemically synthesized
  source 1..22: mol_type = other DNA
aaatatctataattaaatagtc

SEQ ID NO: 150912 - DNA, 22 bp, synthetic construct
  misc_feature 1..22: note = chemically synthesized
  source 1..22: mol_type = other DNA
taattaaatagtcaaaaaataa

SEQ ID NO: 150913 - DNA, 22 bp, synthetic construct
  misc_feature 1..22: note = chemically synthesized
  source 1..22: mol_type = other DNA
aatagtcaaaaaataacagatg

SEQ ID NO: 150914 - DNA, 22 bp, synthetic construct
  misc_feature 1..22: note = chemically synthesized
  source 1..22: mol_type = other DNA
tggagaaaagggaatgtttata

SEQ ID NO: 150915 - DNA, 22 bp, synthetic construct
  misc_feature 1..22: note = chemically synthesized
  source 1..22: mol_type = other DNA
atacaccattggtggcaatata

SEQ ID NO: 150916 - DNA, 22 bp, synthetic construct
  misc_feature 1..22: note = chemically synthesized
  source 1..22: mol_type = other DNA
tacaccattggtggcaatataa

SEQ ID NO: 150917 - DNA, 22 bp, synthetic construct
  misc_feature 1..22: note = chemically synthesized
  source 1..22: mol_type = other DNA
gtggcaatataaattagttcga

SEQ ID NO: 150918 - DNA, 22 bp, synthetic construct
  misc_feature 1..22: note = chemically synthesized
  source 1..22: mol_type = other DNA
gttcgaccattgtagacagcag

SEQ ID NO: 150919 - DNA, 22 bp, synthetic construct
  misc_feature 1..22: note = chemically synthesized
  source 1..22: mol_type = other DNA
gaccattgtagacagcagtgtg

SEQ ID NO: 150920 - DNA, 22 bp, synthetic construct
  misc_feature 1..22: note = chemically synthesized
  source 1..22: mol_type = other DNA
tagacagcagtgtggcaattcc

SEQ ID NO: 150921 - DNA, 22 bp, synthetic construct
  misc_feature 1..22: note = chemically synthesized
  source 1..22: mol_type = other DNA
cctaaagacctaaaaacagaaa

SEQ ID NO: 150922 - DNA, 22 bp, synthetic construct
  misc_feature 1..22: note = chemically synthesized
  source 1..22: mol_type = other DNA
aagacctaaaaacagaaatacc

SEQ ID NO: 150923 - DNA, 22 bp, synthetic construct
  misc_feature 1..22: note = chemically synthesized
  source 1..22: mol_type = other DNA
aaaacagaaataccatttaacc

SEQ ID NO: 150924 - DNA, 22 bp, synthetic construct
  misc_feature 1..22: note = chemically synthesized
  source 1..22: mol_type = other DNA
aacccaacaatcctattattga

SEQ ID NO: 150925 - DNA, 22 bp, synthetic construct
  misc_feature 1..22: note = chemically synthesized
  source 1..22: mol_type = other DNA
acccaacaatcctattattgag

SEQ ID NO: 150926 - DNA, 22 bp, synthetic construct
  misc_feature 1..22: note = chemically synthesized
  source 1..22: mol_type = other DNA
ttattgagtatatacctaaagg

SEQ ID NO: 150927 - DNA, 22 bp, synthetic construct
  misc_feature 1..22: note = chemically synthesized
  source 1..22: mol_type = other DNA
ttgagtatatacctaaaggaaa

SEQ ID NO: 150928 - DNA, 22 bp, synthetic construct
  misc_feature 1..22: note = chemically synthesized
  source 1..22: mol_type = other DNA
agtatatacctaaaggaaaata

SEQ ID NO: 150929 - DNA, 22 bp, synthetic construct
  misc_feature 1..22: note = chemically synthesized
  source 1..22: mol_type = other DNA
aaggaaaataaaccattctatc

SEQ ID NO: 150930 - DNA, 22 bp, synthetic construct
  misc_feature 1..22: note = chemically synthesized
  source 1..22: mol_type = other DNA
tatcacaaagacacatgcacac

SEQ ID NO: 150931 - DNA, 22 bp, synthetic construct
  misc_feature 1..22: note = chemically synthesized
  source 1..22: mol_type = other DNA
tcacaaagacacatgcacacct

SEQ ID NO: 150932 - DNA, 22 bp, synthetic construct
  misc_feature 1..22: note = chemically synthesized
  source 1..22: mol_type = other DNA
tgtccattgcagcataatcaca

SEQ ID NO: 150933 - DNA, 22 bp, synthetic construct
  misc_feature 1..22: note = chemically synthesized
  source 1..22: mol_type = other DNA
cagcataatcacaatagcaaag

SEQ ID NO: 150934 - DNA, 22 bp, synthetic construct
  misc_feature 1..22: note = chemically synthesized
  source 1..22: mol_type = other DNA
aaggcccattagtggtataccg

SEQ ID NO: 150935 - DNA, 22 bp, synthetic construct
  misc_feature 1..22: note = chemically synthesized
  source 1..22: mol_type = other DNA
gtggtataccgataaagaacat

SEQ ID NO: 150936 - DNA, 22 bp, synthetic construct
  misc_feature 1..22: note = chemically synthesized
  source 1..22: mol_type = other DNA
tgtggccataaaaaagaatgag

SEQ ID NO: 150937 - DNA, 22 bp, synthetic construct
  misc_feature 1..22: note = chemically synthesized
  source 1..22: mol_type = other DNA
tgcaggaacatggatggagccg

SEQ ID NO: 150938 - DNA, 22 bp, synthetic construct
  misc_feature 1..22: note = chemically synthesized
  source 1..22: mol_type = other DNA
gcaggaacatggatggagccgg

SEQ ID NO: 150939 - DNA, 22 bp, synthetic construct
  misc_feature 1..22: note = chemically synthesized
  source 1..22: mol_type = other DNA
caggaacatggatggagccgga

SEQ ID NO: 150940 - DNA, 22 bp, synthetic construct
  misc_feature 1..22: note = chemically synthesized
  source 1..22: mol_type = other DNA
tccttaacaaactaatgtaaga

SEQ ID NO: 150941 - DNA, 22 bp, synthetic construct
  misc_feature 1..22: note = chemically synthesized
  source 1..22: mol_type = other DNA
aacaaactaatgtaagaacaga

SEQ ID NO: 150942 - DNA, 22 bp, synthetic construct
  misc_feature 1..22: note = chemically synthesized
  source 1..22: mol_type = other DNA
acaaactaatgtaagaacagaa

SEQ ID NO: 150943 - DNA, 22 bp, synthetic construct
  misc_feature 1..22: note = chemically synthesized
  source 1..22: mol_type = other DNA
atgtaagaacagaaaaccaaat

SEQ ID NO: 150944 - DNA, 22 bp, synthetic construct
  misc_feature 1..22: note = chemically synthesized
  source 1..22: mol_type = other DNA
catattatcacttacaagtagg

SEQ ID NO: 150945 - DNA, 22 bp, synthetic construct
  misc_feature 1..22: note = chemically synthesized
  source 1..22: mol_type = other DNA
tcacttacaagtaggaactaaa

SEQ ID NO: 150946 - DNA, 22 bp, synthetic construct
  misc_feature 1..22: note = chemically synthesized
  source 1..22: mol_type = other DNA
acaagtaggaactaaatgatga

SEQ ID NO: 150947 - DNA, 22 bp, synthetic construct
  misc_feature 1..22: note = chemically synthesized
  source 1..22: mol_type = other DNA
caagtaggaactaaatgatgag

SEQ ID NO: 150948 - DNA, 22 bp, synthetic construct
  misc_feature 1..22: note = chemically synthesized
  source 1..22: mol_type = other DNA
aatgatgagaaaacatgcacac

SEQ ID NO: 150949 - DNA, 22 bp, synthetic construct
  misc_feature 1..22: note = chemically synthesized
  source 1..22: mol_type = other DNA
cagcctaattgagtttggaggg

SEQ ID NO: 150950 - DNA, 22 bp, synthetic construct
  misc_feature 1..22: note = chemically synthesized
  source 1..22: mol_type = other DNA
attgagtttggagggtgggaac

SEQ ID NO: 150951 - DNA, 22 bp, synthetic construct
  misc_feature 1..22: note = chemically synthesized
  source 1..22: mol_type = other DNA
agtttggagggtgggaacgggg

SEQ ID NO: 150952 - DNA, 22 bp, synthetic construct
  misc_feature 1..22: note = chemically synthesized
  source 1..22: mol_type = other DNA
ggagggtgggaacggggagaag

SEQ ID NO: 150953 - DNA, 22 bp, synthetic construct
  misc_feature 1..22: note = chemically synthesized
  source 1..22: mol_type = other DNA
gagggtgggaacggggagaaga

SEQ ID NO: 150954 - DNA, 22 bp, synthetic construct
  misc_feature 1..22: note = chemically synthesized
  source 1..22: mol_type = other DNA
ttgagtactgggagatgaaata

SEQ ID NO: 150955 - DNA, 22 bp, synthetic construct
  misc_feature 1..22: note = chemically synthesized
  source 1..22: mol_type = other DNA
agtactgggagatgaaataatc

SEQ ID NO: 150956 - DNA, 22 bp, synthetic construct
  misc_feature 1..22: note = chemically synthesized
  source 1..22: mol_type = other DNA
ggagatgaaataatctgtacga

SEQ ID NO: 150957 - DNA, 22 bp, synthetic construct
  misc_feature 1..22: note = chemically synthesized
  source 1..22: mol_type = other DNA
tacgacaaacccatgacatgtg

SEQ ID NO: 150958 - DNA, 22 bp, synthetic construct
  misc_feature 1..22: note = chemically synthesized
  source 1..22: mol_type = other DNA
agctatgtaacaaaccatcgtg

SEQ ID NO: 150959 - DNA, 22 bp, synthetic construct
  misc_feature 1..22: note = chemically synthesized
  source 1..22: mol_type = other DNA
gctatgtaacaaaccatcgtga

SEQ ID NO: 150960 - DNA, 22 bp, synthetic construct
  misc_feature 1..22: note = chemically synthesized
  source 1..22: mol_type = other DNA
tgtaacaaaccatcgtgagtct

SEQ ID NO: 150961 - DNA, 22 bp, synthetic construct
  misc_feature 1..22: note = chemically synthesized
  source 1..22: mol_type = other DNA
tagcagttctttcctcccattt

SEQ ID NO: 150962 - DNA, 22 bp, synthetic construct
  misc_feature 1..22: note = chemically synthesized
  source 1..22: mol_type = other DNA
agcagttctttcctcccatttt

SEQ ID NO: 150963 - DNA, 22 bp, synthetic construct
  misc_feature 1..22: note = chemically synthesized
  source 1..22: mol_type = other DNA
gcagttctttcctcccatttta

SEQ ID NO: 150964 - DNA, 22 bp, synthetic construct
  misc_feature 1..22: note = chemically synthesized
  source 1..22: mol_type = other DNA
tttcctcccattttattcttcc

SEQ ID NO: 150965 - DNA, 22 bp, synthetic construct
  misc_feature 1..22: note = chemically synthesized
  source 1..22: mol_type = other DNA
tcctcccattttattcttcctt

SEQ ID NO: 150966 - DNA, 22 bp, synthetic construct
  misc_feature 1..22: note = chemically synthesized
  source 1..22: mol_type = other DNA
cctcccattttattcttccttg

SEQ ID NO: 150967 - DNA, 22 bp, synthetic construct
  misc_feature 1..22: note = chemically synthesized
  source 1..22: mol_type = other DNA
ctcccattttattcttccttgc

SEQ ID NO: 150968 - DNA, 22 bp, synthetic construct
  misc_feature 1..22: note = chemically synthesized
  source 1..22: mol_type = other DNA
ccattttattcttccttgctcc

SEQ ID NO: 150969 - DNA, 22 bp, synthetic construct
  misc_feature 1..22: note = chemically synthesized
  source 1..22: mol_type = other DNA
tattcttccttgctcctctttc

SEQ ID NO: 150970 - DNA, 22 bp, synthetic construct
  misc_feature 1..22: note = chemically synthesized
  source 1..22: mol_type = other DNA
attcttccttgctcctctttcc

SEQ ID NO: 150971 - DNA, 22 bp, synthetic construct
  misc_feature 1..22: note = chemically synthesized
  source 1..22: mol_type = other DNA
ttcttccttgctcctctttcca

SEQ ID NO: 150972 - DNA, 22 bp, synthetic construct
  misc_feature 1..22: note = chemically synthesized
  source 1..22: mol_type = other DNA
ttccttgctcctctttccacct

SEQ ID NO: 150973 - DNA, 22 bp, synthetic construct
  misc_feature 1..22: note = chemically synthesized
  source 1..22: mol_type = other DNA
ccttgctcctctttccacctat

SEQ ID NO: 150974 - DNA, 22 bp, synthetic construct
  misc_feature 1..22: note = chemically synthesized
  source 1..22: mol_type = other DNA
cttgctcctctttccacctatt

SEQ ID NO: 150975 - DNA, 22 bp, synthetic construct
  misc_feature 1..22: note = chemically synthesized
  source 1..22: mol_type = other DNA
gctcctctttccacctattagt

SEQ ID NO: 150976 - DNA, 22 bp, synthetic construct
  misc_feature 1..22: note = chemically synthesized
  source 1..22: mol_type = other DNA
ctcctctttccacctattagtc

SEQ ID NO: 150977 - DNA, 22 bp, synthetic construct
  misc_feature 1..22: note = chemically synthesized
  source 1..22: mol_type = other DNA
ctctttccacctattagtcaca

SEQ ID NO: 150978 - DNA, 22 bp, synthetic construct
  misc_feature 1..22: note = chemically synthesized
  source 1..22: mol_type = other DNA
tttccacctattagtcacatat

SEQ ID NO: 150979 - DNA, 22 bp, synthetic construct
  misc_feature 1..22: note = chemically synthesized
  source 1..22: mol_type = other DNA
tccacctattagtcacatatct

SEQ ID NO: 150980 - DNA, 22 bp, synthetic construct
  misc_feature 1..22: note = chemically synthesized
  source 1..22: mol_type = other DNA
ccacctattagtcacatatctt

SEQ ID NO: 150981 - DNA, 22 bp, synthetic construct
  misc_feature 1..22: note = chemically synthesized
  source 1..22: mol_type = other DNA
cacctattagtcacatatcttt

SEQ ID NO: 150982 - DNA, 22 bp, synthetic construct
  misc_feature 1..22: note = chemically synthesized
  source 1..22: mol_type = other DNA
ttagtcacatatctttttatag

SEQ ID NO: 150983 - DNA, 22 bp, synthetic construct
  misc_feature 1..22: note = chemically synthesized
  source 1..22: mol_type = other DNA
gtcacatatctttttatagtta

SEQ ID NO: 150984 - DNA, 22 bp, synthetic construct
  misc_feature 1..22: note = chemically synthesized
  source 1..22: mol_type = other DNA
tttatagttataatcagcttgt

SEQ ID NO: 150985 - DNA, 22 bp, synthetic construct
  misc_feature 1..22: note = chemically synthesized
  source 1..22: mol_type = other DNA
ttatagttataatcagcttgtt

SEQ ID NO: 150986 - DNA, 22 bp, synthetic construct
  misc_feature 1..22: note = chemically synthesized
  source 1..22: mol_type = other DNA
tatagttataatcagcttgttt

SEQ ID NO: 150987 - DNA, 22 bp, synthetic construct
  misc_feature 1..22: note = chemically synthesized
  source 1..22: mol_type = other DNA
atagttataatcagcttgtttt

SEQ ID NO: 150988 - DNA, 22 bp, synthetic construct
  misc_feature 1..22: note = chemically synthesized
  source 1..22: mol_type = other DNA
tagttataatcagcttgttttt

SEQ ID NO: 150989 - DNA, 22 bp, synthetic construct
  misc_feature 1..22: note = chemically synthesized
  source 1..22: mol_type = other DNA
taatcagcttgtttttaagtct

SEQ ID NO: 150990 - DNA, 22 bp, synthetic construct
  misc_feature 1..22: note = chemically synthesized
  source 1..22: mol_type = other DNA
gtttttaagtctaacaaaatgt

SEQ ID NO: 150991 - DNA, 22 bp, synthetic construct
  misc_feature 1..22: note = chemically synthesized
  source 1..22: mol_type = other DNA
tttttaagtctaacaaaatgtt

SEQ ID NO: 150992 - DNA, 22 bp, synthetic construct
  misc_feature 1..22: note = chemically synthesized
  source 1..22: mol_type = other DNA
ttaagtctaacaaaatgttgtt

SEQ ID NO: 150993 - DNA, 22 bp, synthetic construct
  misc_feature 1..22: note = chemically synthesized
  source 1..22: mol_type = other DNA
taagtctaacaaaatgttgttt

SEQ ID NO: 150994 - DNA, 22 bp, synthetic construct
  misc_feature 1..22: note = chemically synthesized
  source 1..22: mol_type = other DNA
aagtctaacaaaatgttgtttt

SEQ ID NO: 150995 - DNA, 22 bp, synthetic construct
  misc_feature 1..22: note = chemically synthesized
  source 1..22: mol_type = other DNA
agtctaacaaaatgttgtttta

SEQ ID NO: 150996 - DNA, 22 bp, synthetic construct
  misc_feature 1..22: note = chemically synthesized
  source 1..22: mol_type = other DNA
acaaaatgttgttttatgcgca

SEQ ID NO: 150997 - DNA, 22 bp, synthetic construct
  misc_feature 1..22: note = chemically synthesized
  source 1..22: mol_type = other DNA
ttttatgcgcattatgaaagta

SEQ ID NO: 150998 - DNA, 22 bp, synthetic construct
  misc_feature 1..22: note = chemically synthesized
  source 1..22: mol_type = other DNA
tatgcgcattatgaaagtaatt

SEQ ID NO: 150999 - DNA, 22 bp, synthetic construct
  misc_feature 1..22: note = chemically synthesized
  source 1..22: mol_type = other DNA
atgcgcattatgaaagtaattt

SEQ ID NO: 151000 - DNA, 22 bp, synthetic construct
  misc_feature 1..22: note = chemically synthesized
  source 1..22: mol_type = other DNA
tgcgcattatgaaagtaattta

SEQ ID NO: 151001 - DNA, 22 bp, synthetic construct
  misc_feature 1..22: note = chemically synthesized
  source 1..22: mol_type = other DNA
tgaaagtaatttaatgattctc

SEQ ID NO: 151002 - DNA, 22 bp, synthetic construct
  misc_feature 1..22: note = chemically synthesized
  source 1..22: mol_type = other DNA
aatgattctctgtccttctttg

SEQ ID NO: 151003 - DNA, 22 bp, synthetic construct
  misc_feature 1..22: note = chemically synthesized
  source 1..22: mol_type = other DNA
atgattctctgtccttctttgt

SEQ ID NO: 151004 - DNA, 22 bp, synthetic construct
  misc_feature 1..22: note = chemically synthesized
  source 1..22: mol_type = other DNA
tctgtccttctttgtaatttga

SEQ ID NO: 151005 - DNA, 22 bp, synthetic construct
  misc_feature 1..22: note = chemically synthesized
  source 1..22: mol_type = other DNA
tgtccttctttgtaatttgatt

SEQ ID NO: 151006 - DNA, 22 bp, synthetic construct
  misc_feature 1..22: note = chemically synthesized
  source 1..22: mol_type = other DNA
tccttctttgtaatttgatttt

SEQ ID NO: 151007 - DNA, 22 bp, synthetic construct
  misc_feature 1..22: note = chemically synthesized
  source 1..22: mol_type = other DNA
ctttgtaatttgattttatgca

SEQ ID NO: 151008 - DNA, 22 bp, synthetic construct
  misc_feature 1..22: note = chemically synthesized
  source 1..22: mol_type = other DNA
tttgtaatttgattttatgcaa

SEQ ID NO: 151009 - DNA, 22 bp, synthetic construct
  misc_feature 1..22: note = chemically synthesized
  source 1..22: mol_type = other DNA
tgtaatttgattttatgcaaca

SEQ ID NO: 151010 - DNA, 22 bp, synthetic construct
  misc_feature 1..22: note = chemically synthesized
  source 1..22: mol_type = other DNA
gtaatttgattttatgcaacaa

SEQ ID NO: 151011 - DNA, 22 bp, synthetic construct
  misc_feature 1..22: note = chemically synthesized
  source 1..22: mol_type = other DNA
taatttgattttatgcaacaag

SEQ ID NO: 151012 - DNA, 22 bp, synthetic construct
  misc_feature 1..22: note = chemically synthesized
  source 1..22: mol_type = other DNA
gattttatgcaacaagcattta

SEQ ID NO: 151013 - DNA, 22 bp, synthetic construct
  misc_feature 1..22: note = chemically synthesized
  source 1..22: mol_type = other DNA
attttatgcaacaagcatttat

SEQ ID NO: 151014 - DNA, 22 bp, synthetic construct
  misc_feature 1..22: note = chemically synthesized
  source 1..22: mol_type = other DNA
tatgcaacaagcatttattgtg

SEQ ID NO: 151015 - DNA, 22 bp, synthetic construct
  misc_feature 1..22: note = chemically synthesized
  source 1..22: mol_type = other DNA
atgcaacaagcatttattgtgt

SEQ ID NO: 151016 - DNA, 22 bp, synthetic construct
  misc_feature 1..22: note = chemically synthesized
  source 1..22: mol_type = other DNA
tgcaacaagcatttattgtgtt

SEQ ID NO: 151017 - DNA, 22 bp, synthetic construct
  misc_feature 1..22: note = chemically synthesized
  source 1..22: mol_type = other DNA
attgtgttcctatatagtaaat

SEQ ID NO: 151018 - DNA, 22 bp, synthetic construct
  misc_feature 1..22: note = chemically synthesized
  source 1..22: mol_type = other DNA
ttgtgttcctatatagtaaata

SEQ ID NO: 151019 - DNA, 22 bp, synthetic construct
  misc_feature 1..22: note = chemically synthesized
  source 1..22: mol_type = other DNA
tgttcctatatagtaaatataa

SEQ ID NO: 151020 - DNA, 22 bp, synthetic construct
  misc_feature 1..22: note = chemically synthesized
  source 1..22: mol_type = other DNA
ctatatagtaaatataaaaact

SEQ ID NO: 151021 - DNA, 22 bp, synthetic construct
  misc_feature 1..22: note = chemically synthesized
  source 1..22: mol_type = other DNA
tatagtaaatataaaaactgta

SEQ ID NO: 151022 - DNA, 22 bp, synthetic construct
  misc_feature 1..22: note = chemically synthesized
  source 1..22: mol_type = other DNA
tatatatgttggaggtaaaaaa

SEQ ID NO: 151023 - DNA, 22 bp, synthetic construct
  misc_feature 1..22: note = chemically synthesized
  source 1..22: mol_type = other DNA
gaggtaaaaaataatgacaatg

SEQ ID NO: 151024 - DNA, 22 bp, synthetic construct
  misc_feature 1..22: note = chemically synthesized
  source 1..22: mol_type = other DNA
ttgccctcaaaataatgtgagc

SEQ ID NO: 151025 - DNA, 22 bp, synthetic construct
  misc_feature 1..22: note = chemically synthesized
  source 1..22: mol_type = other DNA
tgccctcaaaataatgtgagca

SEQ ID NO: 151026 - DNA, 22 bp, synthetic construct
  misc_feature 1..22: note = chemically synthesized
  source 1..22: mol_type = other DNA
gccctcaaaataatgtgagcaa

SEQ ID NO: 151027 - DNA, 22 bp, synthetic construct
  misc_feature 1..22: note = chemically synthesized
  source 1..22: mol_type = other DNA
ccctcaaaataatgtgagcaat

SEQ ID NO: 151028 - DNA, 22 bp, synthetic construct
  misc_feature 1..22: note = chemically synthesized
  source 1..22: mol_type = other DNA
aaaataatgtgagcaatttagt

SEQ ID NO: 151029 - DNA, 22 bp, synthetic construct
  misc_feature 1..22: note = chemically synthesized
  source 1..22: mol_type = other DNA
agtcctatggctcctatttgtt

SEQ ID NO: 151030 - DNA, 22 bp, synthetic construct
  misc_feature 1..22: note = chemically synthesized
  source 1..22: mol_type = other DNA
gtcctatggctcctatttgtta

SEQ ID NO: 151031 - DNA, 22 bp, synthetic construct
  misc_feature 1..22: note = chemically synthesized
  source 1..22: mol_type = other DNA
tggctcctatttgttaaagaca

SEQ ID NO: 151032 - DNA, 22 bp, synthetic construct
  misc_feature 1..22: note = chemically synthesized
  source 1..22: mol_type = other DNA
ctatttgttaaagacattcagt

SEQ ID NO: 151033 - DNA, 22 bp, synthetic construct
  misc_feature 1..22: note = chemically synthesized
  source 1..22: mol_type = other DNA
tttgttaaagacattcagttac

SEQ ID NO: 151034 - DNA, 22 bp, synthetic construct
  misc_feature 1..22: note = chemically synthesized
  source 1..22: mol_type = other DNA
gttaaagacattcagttacttc

SEQ ID NO: 151035 - DNA, 22 bp, synthetic construct
  misc_feature 1..22: note = chemically synthesized
  source 1..22: mol_type = other DNA
ttaaagacattcagttacttct

SEQ ID NO: 151036 - DNA, 22 bp, synthetic construct
  misc_feature 1..22: note = chemically synthesized
  source 1..22: mol_type = other DNA
aagacattcagttacttctgac

SEQ ID NO: 151037 - DNA, 22 bp, synthetic construct
  misc_feature 1..22: note = chemically synthesized
  source 1..22: mol_type = other DNA
agttacttctgacaacctgaat

SEQ ID NO: 151038 - DNA, 22 bp, synthetic construct
  misc_feature 1..22: note = chemically synthesized
  source 1..22: mol_type = other DNA
cttctgacaacctgaattgtta

SEQ ID NO: 151039 - DNA, 22 bp, synthetic construct
  misc_feature 1..22: note = chemically synthesized
  source 1..22: mol_type = other DNA
ctgacaacctgaattgttaatt

SEQ ID NO: 151040 - DNA, 22 bp, synthetic construct
  misc_feature 1..22: note = chemically synthesized
  source 1..22: mol_type = other DNA
tgacaacctgaattgttaattt

SEQ ID NO: 151041 - DNA, 22 bp, synthetic construct
  misc_feature 1..22: note = chemically synthesized
  source 1..22: mol_type = other DNA
acaacctgaattgttaatttct

SEQ ID NO: 151042 - DNA, 22 bp, synthetic construct
  misc_feature 1..22: note = chemically synthesized
  source 1..22: mol_type = other DNA
aattgttaatttctttctttct

SEQ ID NO: 151043 - DNA, 22 bp, synthetic construct
  misc_feature 1..22: note = chemically synthesized
  source 1..22: mol_type = other DNA
ttaatttctttctttctagctc

SEQ ID NO: 151044 - DNA, 22 bp, synthetic construct
  misc_feature 1..22: note = chemically synthesized
  source 1..22: mol_type = other DNA
atttctttctttctagctctct

SEQ ID NO: 151045 - DNA, 22 bp, synthetic construct
  misc_feature 1..22: note = chemically synthesized
  source 1..22: mol_type = other DNA
ctttctttctagctctcttttt

SEQ ID NO: 151046 - DNA, 22 bp, synthetic construct
  misc_feature 1..22: note = chemically synthesized
  source 1..22: mol_type = other DNA
tttctttctagctctctttttt

SEQ ID NO: 151047 - DNA, 22 bp, synthetic construct
  misc_feature 1..22: note = chemically synthesized
  source 1..22: mol_type = other DNA
tctttctagctctctttttttt

SEQ ID NO: 151048 - DNA, 22 bp, synthetic construct
  misc_feature 1..22: note = chemically synthesized
  source 1..22: mol_type = other DNA
ctttctagctctcttttttttt

SEQ ID NO: 151049 - DNA, 22 bp, synthetic construct
  misc_feature 1..22: note = chemically synthesized
  source 1..22: mol_type = other DNA
tttctagctctctttttttttt

SEQ ID NO: 151050 - DNA, 22 bp, synthetic construct
  misc_feature 1..22: note = chemically synthesized
  source 1..22: mol_type = other DNA
tctagctctctttttttttttt

SEQ ID NO: 151051 - DNA, 22 bp, synthetic construct
  misc_feature 1..22: note = chemically synthesized
  source 1..22: mol_type = other DNA
ctagctctcttttttttttttt

SEQ ID NO: 151052 - DNA, 22 bp, synthetic construct
  misc_feature 1..22: note = chemically synthesized
  source 1..22: mol_type = other DNA
tagctctctttttttttttttt

SEQ ID NO: 151053 - DNA, 22 bp, synthetic construct
  misc_feature 1..22: note = chemically synthesized
  source 1..22: mol_type = other DNA
gctctcttttttttttttttga

SEQ ID NO: 151054 - DNA, 22 bp, synthetic construct
  misc_feature 1..22: note = chemically synthesized
  source 1..22: mol_type = other DNA
tcttttttttttttttgacagg

SEQ ID NO: 151055 - DNA, 22 bp, synthetic construct
  misc_feature 1..22: note = chemically synthesized
  source 1..22: mol_type = other DNA
ttttttttttttttgacagggt

SEQ ID NO: 151056 - DNA, 22 bp, synthetic construct
  misc_feature 1..22: note = chemically synthesized
  source 1..22: mol_type = other DNA
ttttttttttttgacagggtct

SEQ ID NO: 151057 - DNA, 22 bp, synthetic construct
  misc_feature 1..22: note = chemically synthesized
  source 1..22: mol_type = other DNA
tttttttttttgacagggtctc

SEQ ID NO: 151058 - DNA, 22 bp, synthetic construct
  misc_feature 1..22: note = chemically synthesized
  source 1..22: mol_type = other DNA
ttttttttttgacagggtctcg

SEQ ID NO: 151059 - DNA, 22 bp, synthetic construct
  misc_feature 1..22: note = chemically synthesized
  source 1..22: mol_type = other DNA
tttttttttgacagggtctcgc

SEQ ID NO: 151060 - DNA, 22 bp, synthetic construct
  misc_feature 1..22: note = chemically synthesized
  source 1..22: mol_type = other DNA
ttttttttgacagggtctcgct

SEQ ID NO: 151061 - DNA, 22 bp, synthetic construct
  misc_feature 1..22: note = chemically synthesized
  source 1..22: mol_type = other DNA
tttttttgacagggtctcgctg

SEQ ID NO: 151062 - DNA, 22 bp, synthetic construct
  misc_feature 1..22: note = chemically synthesized
  source 1..22: mol_type = other DNA
ttttttgacagggtctcgctgt

SEQ ID NO: 151063 - DNA, 22 bp, synthetic construct
  misc_feature 1..22: note = chemically synthesized
  source 1..22: mol_type = other DNA
tttttgacagggtctcgctgtg

SEQ ID NO: 151064 - DNA, 22 bp, synthetic construct
  misc_feature 1..22: note = chemically synthesized
  source 1..22: mol_type = other DNA
ttttgacagggtctcgctgtgt

SEQ ID NO: 151065 - DNA, 22 bp, synthetic construct
  misc_feature 1..22: note = chemically synthesized
  source 1..22: mol_type = other DNA
tttgacagggtctcgctgtgtt

SEQ ID NO: 151066 - DNA, 22 bp, synthetic construct
  misc_feature 1..22: note = chemically synthesized
  source 1..22: mol_type = other DNA
ttgacagggtctcgctgtgttg

SEQ ID NO: 151067 - DNA, 22 bp, synthetic construct
  misc_feature 1..22: note = chemically synthesized
  source 1..22: mol_type = other DNA
tgacagggtctcgctgtgttgc

SEQ ID NO: 151068 - DNA, 22 bp, synthetic construct
  misc_feature 1..22: note = chemically synthesized
  source 1..22: mol_type = other DNA
gacagggtctcgctgtgttgcc

SEQ ID NO: 151069 - DNA, 22 bp, synthetic construct
  misc_feature 1..22: note = chemically synthesized
  source 1..22: mol_type = other DNA
acagggtctcgctgtgttgccc

SEQ ID NO: 151070 - DNA, 22 bp, synthetic construct
  misc_feature 1..22: note = chemically synthesized
  source 1..22: mol_type = other DNA
gctgtgttgcccaggttggagt

SEQ ID NO: 151071 - DNA, 22 bp, synthetic construct
  misc_feature 1..22: note = chemically synthesized
  source 1..22: mol_type = other DNA
tgttgcccaggttggagtgcag

SEQ ID NO: 151072 - DNA, 22 bp, synthetic construct
  misc_feature 1..22: note = chemically synthesized
  source 1..22: mol_type = other DNA
cccaggttggagtgcagtggta

SEQ ID NO: 151073 - DNA, 22 bp, synthetic construct
  misc_feature 1..22: note = chemically synthesized
  source 1..22: mol_type = other DNA
gagtgcagtggtacaatctttg

SEQ ID NO: 151074 - DNA, 22 bp, synthetic construct
  misc_feature 1..22: note = chemically synthesized
  source 1..22: mol_type = other DNA
tgctcactgcaatctccccctc

SEQ ID NO: 151075 - DNA, 22 bp, synthetic construct
  misc_feature 1..22: note = chemically synthesized
  source 1..22: mol_type = other DNA
gctcactgcaatctccccctcc

SEQ ID NO: 151076 - DNA, 22 bp, synthetic construct
  misc_feature 1..22: note = chemically synthesized
  source 1..22: mol_type = other DNA
ctcactgcaatctccccctcct

SEQ ID NO: 151077 - DNA, 22 bp, synthetic construct
  misc_feature 1..22: note = chemically synthesized
  source 1..22: mol_type = other DNA
actgcaatctccccctccttgg

SEQ ID NO: 151078 - DNA, 22 bp, synthetic construct
  misc_feature 1..22: note = chemically synthesized
  source 1..22: mol_type = other DNA
caatctccccctccttggctca

SEQ ID NO: 151079 - DNA, 22 bp, synthetic construct
  misc_feature 1..22: note = chemically synthesized
  source 1..22: mol_type = other DNA
cccctccttggctcaagatatc

SEQ ID NO: 151080 - DNA, 22 bp, synthetic construct
  misc_feature 1..22: note = chemically synthesized
  source 1..22: mol_type = other DNA
cttggctcaagatatccttcca

SEQ ID NO: 151081 - DNA, 22 bp, synthetic construct
  misc_feature 1..22: note = chemically synthesized
  source 1..22: mol_type = other DNA
ggctcaagatatccttccacct

SEQ ID NO: 151082 - DNA, 22 bp, synthetic construct
  misc_feature 1..22: note = chemically synthesized
  source 1..22: mol_type = other DNA
gctcaagatatccttccacctc

SEQ ID NO: 151083 - DNA, 22 bp, synthetic construct
  misc_feature 1..22: note = chemically synthesized
  source 1..22: mol_type = other DNA
aagatatccttccacctcagcc

SEQ ID NO: 151084 - DNA, 22 bp, synthetic construct
  misc_feature 1..22: note = chemically synthesized
  source 1..22: mol_type = other DNA
ccacctcagcctcccaagtagc

SEQ ID NO: 151085 - DNA, 22 bp, synthetic construct
  misc_feature 1..22: note = chemically synthesized
  source 1..22: mol_type = other DNA
cacctcagcctcccaagtagct

SEQ ID NO: 151086 - DNA, 22 bp, synthetic construct
  misc_feature 1..22: note = chemically synthesized
  source 1..22: mol_type = other DNA
agcctcccaagtagctgggact

SEQ ID NO: 151087 - DNA, 22 bp, synthetic construct
  misc_feature 1..22: note = chemically synthesized
  source 1..22: mol_type = other DNA
ccaagtagctgggactacaggc

SEQ ID NO: 151088 - DNA, 22 bp, synthetic construct
  misc_feature 1..22: note = chemically synthesized
  source 1..22: mol_type = other DNA
ggactacaggcacgtaacacca

SEQ ID NO: 151089 - DNA, 22 bp, synthetic construct
  misc_feature 1..22: note = chemically synthesized
  source 1..22: mol_type = other DNA
caggcacgtaacaccatattcg

SEQ ID NO: 151090 - DNA, 22 bp, synthetic construct
  misc_feature 1..22: note = chemically synthesized
  source 1..22: mol_type = other DNA
ggctactttttaaaattttttg

SEQ ID NO: 151091 - DNA, 22 bp, synthetic construct
  misc_feature 1..22: note = chemically synthesized
  source 1..22: mol_type = other DNA
ctttttaaaattttttgtagag

SEQ ID NO: 151092 - DNA, 22 bp, synthetic construct
  misc_feature 1..22: note = chemically synthesized
  source 1..22: mol_type = other DNA
tttaaaattttttgtagagagg

SEQ ID NO: 151093 - DNA, 22 bp, synthetic construct
  misc_feature 1..22: note = chemically synthesized
  source 1..22: mol_type = other DNA
ttaaaattttttgtagagaggg

SEQ ID NO: 151094 - DNA, 22 bp, synthetic construct
  misc_feature 1..22: note = chemically synthesized
  source 1..22: mol_type = other DNA
taaaattttttgtagagagggg

SEQ ID NO: 151095 - DNA, 22 bp, synthetic construct
  misc_feature 1..22: note = chemically synthesized
  source 1..22: mol_type = other DNA
aaaattttttgtagagaggggt

SEQ ID NO: 151096 - DNA, 22 bp, synthetic construct
  misc_feature 1..22: note = chemically synthesized
  source 1..22: mol_type = other DNA
aaattttttgtagagaggggtt

SEQ ID NO: 151097 - DNA, 22 bp, synthetic construct
  misc_feature 1..22: note = chemically synthesized
  source 1..22: mol_type = other DNA
tttgtagagaggggtttctcca

SEQ ID NO: 151098 - DNA, 22 bp, synthetic construct
  misc_feature 1..22: note = chemically synthesized
  source 1..22: mol_type = other DNA
ttgtagagaggggtttctccat

SEQ ID NO: 151099 - DNA, 22 bp, synthetic construct
  misc_feature 1..22: note = chemically synthesized
  source 1..22: mol_type = other DNA
tgtagagaggggtttctccatg

SEQ ID NO: 151100 - DNA, 22 bp, synthetic construct
  misc_feature 1..22: note = chemically synthesized
  source 1..22: mol_type = other DNA
gtagagaggggtttctccatgt

SEQ ID NO: 151101 - DNA, 22 bp, synthetic construct
  misc_feature 1..22: note = chemically synthesized
  source 1..22: mol_type = other DNA
tagagaggggtttctccatgtt

SEQ ID NO: 151102 - DNA, 22 bp, synthetic construct
  misc_feature 1..22: note = chemically synthesized
  source 1..22: mol_type = other DNA
ctccatgttgcccaagctggtc

SEQ ID NO: 151103 - DNA, 22 bp, synthetic construct
  misc_feature 1..22: note = chemically synthesized
  source 1..22: mol_type = other DNA
tccatgttgcccaagctggtct

SEQ ID NO: 151104 - DNA, 22 bp, synthetic construct
  misc_feature 1..22: note = chemically synthesized
  source 1..22: mol_type = other DNA
catgttgcccaagctggtctcc

SEQ ID NO: 151105 - DNA, 22 bp, synthetic construct
  misc_feature 1..22: note = chemically synthesized
  source 1..22: mol_type = other DNA
cccaagctggtctccaactcct

SEQ ID NO: 151106 - DNA, 22 bp, synthetic construct
  misc_feature 1..22: note = chemically synthesized
  source 1..22: mol_type = other DNA
gtctccaactcctgagctcaaa

SEQ ID NO: 151107 - DNA, 22 bp, synthetic construct
  misc_feature 1..22: note = chemically synthesized
  source 1..22: mol_type = other DNA
caactcctgagctcaaatcgtt

SEQ ID NO: 151108 - DNA, 22 bp, synthetic construct
  misc_feature 1..22: note = chemically synthesized
  source 1..22: mol_type = other DNA
ctgagctcaaatcgttctccct

SEQ ID NO: 151109 - DNA, 22 bp, synthetic construct
  misc_feature 1..22: note = chemically synthesized
  source 1..22: mol_type = other DNA
agctcaaatcgttctccctccg

SEQ ID NO: 151110 - DNA, 22 bp, synthetic construct
  misc_feature 1..22: note = chemically synthesized
  source 1..22: mol_type = other DNA
aaatcgttctccctccggcctc

SEQ ID NO: 151111 - DNA, 22 bp, synthetic construct
  misc_feature 1..22: note = chemically synthesized
  source 1..22: mol_type = other DNA
tccctccggcctcggctgtgat

SEQ ID NO: 151112 - DNA, 22 bp, synthetic construct
  misc_feature 1..22: note = chemically synthesized
  source 1..22: mol_type = other DNA
cctccggcctcggctgtgatta

SEQ ID NO: 151113 - DNA, 22 bp, synthetic construct
  misc_feature 1..22: note = chemically synthesized
  source 1..22: mol_type = other DNA
cggcctcggctgtgattacagg

SEQ ID NO: 151114 - DNA, 22 bp, synthetic construct
  misc_feature 1..22: note = chemically synthesized
  source 1..22: mol_type = other DNA
ggctgtgattacaggtgtgagc

SEQ ID NO: 151115 - DNA, 22 bp, synthetic construct
  misc_feature 1..22: note = chemically synthesized
  source 1..22: mol_type = other DNA
tgattacaggtgtgagccactg

SEQ ID NO: 151116 - DNA, 22 bp, synthetic construct
  misc_feature 1..22: note = chemically synthesized
  source 1..22: mol_type = other DNA
caggtgtgagccactgtgcttg

SEQ ID NO: 151117 - DNA, 22 bp, synthetic construct
  misc_feature 1..22: note = chemically synthesized
  source 1..22: mol_type = other DNA
tgcttggcccagacaacatgaa

SEQ ID NO: 151118 - DNA, 22 bp, synthetic construct
  misc_feature 1..22: note = chemically synthesized
  source 1..22: mol_type = other DNA
ggcccagacaacatgaactgtt

SEQ ID NO: 151119 - DNA, 22 bp, synthetic construct
  misc_feature 1..22: note = chemically synthesized
  source 1..22: mol_type = other DNA
gcccagacaacatgaactgtta

SEQ ID NO: 151120 - DNA, 22 bp, synthetic construct
  misc_feature 1..22: note = chemically synthesized
  source 1..22: mol_type = other DNA
ttactgttattttctaatcctt

SEQ ID NO: 151121 - DNA, 22 bp, synthetic construct
  misc_feature 1..22: note = chemically synthesized
  source 1..22: mol_type = other DNA
ctgttattttctaatccttcga

SEQ ID NO: 151122 - DNA, 22 bp, synthetic construct
  misc_feature 1..22: note = chemically synthesized
  source 1..22: mol_type = other DNA
ttattttctaatccttcgagga

SEQ ID NO: 151123 - DNA, 22 bp, synthetic construct
  misc_feature 1..22: note = chemically synthesized
  source 1..22: mol_type = other DNA
ttttctaatccttcgaggaact

SEQ ID NO: 151124 - DNA, 22 bp, synthetic construct
  misc_feature 1..22: note = chemically synthesized
  source 1..22: mol_type = other DNA
tctaatccttcgaggaactcaa

SEQ ID NO: 151125 - DNA, 22 bp, synthetic construct
  misc_feature 1..22: note = chemically synthesized
  source 1..22: mol_type = other DNA
ctaatccttcgaggaactcaag

SEQ ID NO: 151126 - DNA, 22 bp, synthetic construct
  misc_feature 1..22: note = chemically synthesized
  source 1..22: mol_type = other DNA
taatccttcgaggaactcaagt

SEQ ID NO: 151127 - DNA, 22 bp, synthetic construct
  misc_feature 1..22: note = chemically synthesized
  source 1..22: mol_type = other DNA
atccttcgaggaactcaagtcc

SEQ ID NO: 151128 - DNA, 22 bp, synthetic construct
  misc_feature 1..22: note = chemically synthesized
  source 1..22: mol_type = other DNA
cgaggaactcaagtcctatctt

SEQ ID NO: 151129 - DNA, 22 bp, synthetic construct
  misc_feature 1..22: note = chemically synthesized
  source 1..22: mol_type = other DNA
gaggaactcaagtcctatcttg

SEQ ID NO: 151130 - DNA, 22 bp, synthetic construct
  misc_feature 1..22: note = chemically synthesized
  source 1..22: mol_type = other DNA
aagtcctatcttgaaaactaat

SEQ ID NO: 151131 - DNA, 22 bp, synthetic construct
  misc_feature 1..22: note = chemically synthesized
  source 1..22: mol_type = other DNA
tcttgaaaactaattcaaaagg

SEQ ID NO: 151132 - DNA, 22 bp, synthetic construct
  misc_feature 1..22: note = chemically synthesized
  source 1..22: mol_type = other DNA
gaaaactaattcaaaaggtact

SEQ ID NO: 151133 - DNA, 22 bp, synthetic construct
  misc_feature 1..22: note = chemically synthesized
  source 1..22: mol_type = other DNA
aaaactaattcaaaaggtacta

SEQ ID NO: 151134 - DNA, 22 bp, synthetic construct
  misc_feature 1..22: note = chemically synthesized
  source 1..22: mol_type = other DNA
attcaaaaggtactaacgagat

SEQ ID NO: 151135 - DNA, 22 bp, synthetic construct
  misc_feature 1..22: note = chemically synthesized
  source 1..22: mol_type = other DNA
aaaaggtactaacgagattagg

SEQ ID NO: 151136 - DNA, 22 bp, synthetic construct
  misc_feature 1..22: note = chemically synthesized
  source 1..22: mol_type = other DNA
acgagattaggaagtgccccga

SEQ ID NO: 151137 - DNA, 22 bp, synthetic construct
  misc_feature 1..22: note = chemically synthesized
  source 1..22: mol_type = other DNA
ggaagtgccccgagagagtgca

SEQ ID NO: 151138 - DNA, 22 bp, synthetic construct
  misc_feature 1..22: note = chemically synthesized
  source 1..22: mol_type = other DNA
ggtttgctttgttagtgaagga

SEQ ID NO: 151139 - DNA, 22 bp, synthetic construct
  misc_feature 1..22: note = chemically synthesized
  source 1..22: mol_type = other DNA
gctttgttagtgaaggaataaa

SEQ ID NO: 151140 - DNA, 22 bp, synthetic construct
  misc_feature 1..22: note = chemically synthesized
  source 1..22: mol_type = other DNA
ctttgttagtgaaggaataaaa

SEQ ID NO: 151141 - DNA, 22 bp, synthetic construct
  misc_feature 1..22: note = chemically synthesized
  source 1..22: mol_type = other DNA
tgttagtgaaggaataaaatgc

SEQ ID NO: 151142 - DNA, 22 bp, synthetic construct
  misc_feature 1..22: note = chemically synthesized
  source 1..22: mol_type = other DNA
gttagtgaaggaataaaatgca

SEQ ID NO: 151143 - DNA, 22 bp, synthetic construct
  misc_feature 1..22: note = chemically synthesized
  source 1..22: mol_type = other DNA
ttagtgaaggaataaaatgcat

SEQ ID NO: 151144 - DNA, 22 bp, synthetic construct
  misc_feature 1..22: note = chemically synthesized
  source 1..22: mol_type = other DNA
gtgaaggaataaaatgcatcag

SEQ ID NO: 151145 - DNA, 22 bp, synthetic construct
  misc_feature 1..22: note = chemically synthesized
  source 1..22: mol_type = other DNA
ctcagcctctgataggccctga

SEQ ID NO: 151146 - DNA, 22 bp, synthetic construct
  misc_feature 1..22: note = chemically synthesized
  source 1..22: mol_type = other DNA
tcagcctctgataggccctgag

SEQ ID NO: 151147 - DNA, 22 bp, synthetic construct
  misc_feature 1..22: note = chemically synthesized
  source 1..22: mol_type = other DNA
agcctctgataggccctgagct

SEQ ID NO: 151148 - DNA, 22 bp, synthetic construct
  misc_feature 1..22: note = chemically synthesized
  source 1..22: mol_type = other DNA
tgataggccctgagctgggagc

SEQ ID NO: 151149 - DNA, 22 bp, synthetic construct
  misc_feature 1..22: note = chemically synthesized
  source 1..22: mol_type = other DNA
ataggccctgagctgggagctg

SEQ ID NO: 151150 - DNA, 22 bp, synthetic construct
  misc_feature 1..22: note = chemically synthesized
  source 1..22: mol_type = other DNA
agctgggagctgctaagccatc

SEQ ID NO: 151151 - DNA, 22 bp, synthetic construct
  misc_feature 1..22: note = chemically synthesized
  source 1..22: mol_type = other DNA
ggagctgctaagccatcctgca

SEQ ID NO: 151152 - DNA, 22 bp, synthetic construct
  misc_feature 1..22: note = chemically synthesized
  source 1..22: mol_type = other DNA
ctaagccatcctgcagagcaag

SEQ ID NO: 151153 - DNA, 22 bp, synthetic construct
  misc_feature 1..22: note = chemically synthesized
  source 1..22: mol_type = other DNA
agccatcctgcagagcaagtgg

SEQ ID NO: 151154 - DNA, 22 bp, synthetic construct
  misc_feature 1..22: note = chemically synthesized
  source 1..22: mol_type = other DNA
cagagcaagtgggagaaacaga

SEQ ID NO: 151155 - DNA, 22 bp, synthetic construct
  misc_feature 1..22: note = chemically synthesized
  source 1..22: mol_type = other DNA
ggtcagacttggcagattctgc

SEQ ID NO: 151156 - DNA, 22 bp, synthetic construct
  misc_feature 1..22: note = chemically synthesized
  source 1..22: mol_type = other DNA
ggcagattctgctcctttttcc

SEQ ID NO: 151157 - DNA, 22 bp, synthetic construct
  misc_feature 1..22: note = chemically synthesized
  source 1..22: mol_type = other DNA
gcagattctgctcctttttccc

SEQ ID NO: 151158 - DNA, 22 bp, synthetic construct
  misc_feature 1..22: note = chemically synthesized
  source 1..22: mol_type = other DNA
tgctcctttttcccttcccttt

SEQ ID NO: 151159 - DNA, 22 bp, synthetic construct
  misc_feature 1..22: note = chemically synthesized
  source 1..22: mol_type = other DNA
ctcctttttcccttcccttttc

SEQ ID NO: 151160 - DNA, 22 bp, synthetic construct
  misc_feature 1..22: note = chemically synthesized
  source 1..22: mol_type = other DNA
ctttttcccttcccttttcccc

SEQ ID NO: 151161 - DNA, 22 bp, synthetic construct
  misc_feature 1..22: note = chemically synthesized
  source 1..22: mol_type = other DNA
tttcccttcccttttccccatc

SEQ ID NO: 151162 - DNA, 22 bp, synthetic construct
  misc_feature 1..22: note = chemically synthesized
  source 1..22: mol_type = other DNA
ttcccttcccttttccccatcc

SEQ ID NO: 151163 - DNA, 22 bp, synthetic construct
  misc_feature 1..22: note = chemically synthesized
  source 1..22: mol_type = other DNA
tcccttcccttttccccatcca

SEQ ID NO: 151164 - DNA, 22 bp, synthetic construct
  misc_feature 1..22: note = chemically synthesized
  source 1..22: mol_type = other DNA
cccttcccttttccccatccac

SEQ ID NO: 151165 - DNA, 22 bp, synthetic construct
  misc_feature 1..22: note = chemically synthesized
  source 1..22: mol_type = other DNA
ccttcccttttccccatccact

SEQ ID NO: 151166 - DNA, 22 bp, synthetic construct
  misc_feature 1..22: note = chemically synthesized
  source 1..22: mol_type = other DNA
cccttttccccatccacttgct

SEQ ID NO: 151167 - DNA, 22 bp, synthetic construct
  misc_feature 1..22: note = chemically synthesized
  source 1..22: mol_type = other DNA
ccttttccccatccacttgctc

SEQ ID NO: 151168 - DNA, 22 bp, synthetic construct
  misc_feature 1..22: note = chemically synthesized
  source 1..22: mol_type = other DNA
ttccccatccacttgctcattc

SEQ ID NO: 151169 - DNA, 22 bp, synthetic construct
  misc_feature 1..22: note = chemically synthesized
  source 1..22: mol_type = other DNA
tccccatccacttgctcattct

SEQ ID NO: 151170 - DNA, 22 bp, synthetic construct
  misc_feature 1..22: note = chemically synthesized
  source 1..22: mol_type = other DNA
ccccatccacttgctcattctg

SEQ ID NO: 151171 - DNA, 22 bp, synthetic construct
  misc_feature 1..22: note = chemically synthesized
  source 1..22: mol_type = other DNA
cccatccacttgctcattctgg

SEQ ID NO: 151172 - DNA, 22 bp, synthetic construct
  misc_feature 1..22: note = chemically synthesized
  source 1..22: mol_type = other DNA
gctcattctggatggcaggatt

SEQ ID NO: 151173 - DNA, 22 bp, synthetic construct
  misc_feature 1..22: note = chemically synthesized
  source 1..22: mol_type = other DNA
ctcattctggatggcaggatta

SEQ ID NO: 151174 - DNA, 22 bp, synthetic construct
  misc_feature 1..22: note = chemically synthesized
  source 1..22: mol_type = other DNA
attctggatggcaggattaggc

SEQ ID NO: 151175 - DNA, 22 bp, synthetic construct
  misc_feature 1..22: note = chemically synthesized
  source 1..22: mol_type = other DNA
tggatggcaggattaggcttta

SEQ ID NO: 151176 - DNA, 22 bp, synthetic construct
  misc_feature 1..22: note = chemically synthesized
  source 1..22: mol_type = other DNA
gatggcaggattaggctttata

SEQ ID NO: 151177 - DNA, 22 bp, synthetic construct
  misc_feature 1..22: note = chemically synthesized
  source 1..22: mol_type = other DNA
ggctttatatttccctaccata

SEQ ID NO: 151178 - DNA, 22 bp, synthetic construct
  misc_feature 1..22: note = chemically synthesized
  source 1..22: mol_type = other DNA
tatatttccctaccatattagc

SEQ ID NO: 151179 - DNA, 22 bp, synthetic construct
  misc_feature 1..22: note = chemically synthesized
  source 1..22: mol_type = other DNA
atatttccctaccatattagct

SEQ ID NO: 151180 - DNA, 22 bp, synthetic construct
  misc_feature 1..22: note = chemically synthesized
  source 1..22: mol_type = other DNA
tatttccctaccatattagctt

SEQ ID NO: 151181 - DNA, 22 bp, synthetic construct
  misc_feature 1..22: note = chemically synthesized
  source 1..22: mol_type = other DNA
ccctaccatattagcttgtgca

SEQ ID NO: 151182 - DNA, 22 bp, synthetic construct
  misc_feature 1..22: note = chemically synthesized
  source 1..22: mol_type = other DNA
cctaccatattagcttgtgcac

SEQ ID NO: 151183 - DNA, 22 bp, synthetic construct
  misc_feature 1..22: note = chemically synthesized
  source 1..22: mol_type = other DNA
ccatattagcttgtgcacttaa

SEQ ID NO: 151184 - DNA, 22 bp, synthetic construct
  misc_feature 1..22: note = chemically synthesized
  source 1..22: mol_type = other DNA
gcttgtgcacttaaaggaagtt

SEQ ID NO: 151185 - DNA, 22 bp, synthetic construct
  misc_feature 1..22: note = chemically synthesized
  source 1..22: mol_type = other DNA
gtgcacttaaaggaagtttaga

SEQ ID NO: 151186 - DNA, 22 bp, synthetic construct
  misc_feature 1..22: note = chemically synthesized
  source 1..22: mol_type = other DNA
tgcacttaaaggaagtttagat

SEQ ID NO: 151187 - DNA, 22 bp, synthetic construct
  misc_feature 1..22: note = chemically synthesized
  source 1..22: mol_type = other DNA
aaaggaagtttagatagccttg

SEQ ID NO: 151188 - DNA, 22 bp, synthetic construct
  misc_feature 1..22: note = chemically synthesized
  source 1..22: mol_type = other DNA
aaggaagtttagatagccttga

SEQ ID NO: 151189 - DNA, 22 bp, synthetic construct
  misc_feature 1..22: note = chemically synthesized
  source 1..22: mol_type = other DNA
agatagccttgactccatgggg

SEQ ID NO: 151190 - DNA, 22 bp, synthetic construct
  misc_feature 1..22: note = chemically synthesized
  source 1..22: mol_type = other DNA
gatagccttgactccatgggga

SEQ ID NO: 151191 - DNA, 22 bp, synthetic construct
  misc_feature 1..22: note = chemically synthesized
  source 1..22: mol_type = other DNA
gactccatggggaaaaggaaaa

SEQ ID NO: 151192 - DNA, 22 bp, synthetic construct
  misc_feature 1..22: note = chemically synthesized
  source 1..22: mol_type = other DNA
actccatggggaaaaggaaaaa

SEQ ID NO: 151193 - DNA, 22 bp, synthetic construct
  misc_feature 1..22: note = chemically synthesized
  source 1..22: mol_type = other DNA
catggggaaaaggaaaaagtac

SEQ ID NO: 151194 - DNA, 22 bp, synthetic construct
  misc_feature 1..22: note = chemically synthesized
  source 1..22: mol_type = other DNA
agtggggtgtgggactgttgga

SEQ ID NO: 151195 - DNA, 22 bp, synthetic construct
  misc_feature 1..22: note = chemically synthesized
  source 1..22: mol_type = other DNA
gtggggtgtgggactgttggat

SEQ ID NO: 151196 - DNA, 22 bp, synthetic construct
  misc_feature 1..22: note = chemically synthesized
  source 1..22: mol_type = other DNA
ttggattattagatgtcttgca

SEQ ID NO: 151197 - DNA, 22 bp, synthetic construct
  misc_feature 1..22: note = chemically synthesized
  source 1..22: mol_type = other DNA
gattattagatgtcttgcattt

SEQ ID NO: 151198 - DNA, 22 bp, synthetic construct
  misc_feature 1..22: note = chemically synthesized
  source 1..22: mol_type = other DNA
ttagatgtcttgcatttctctc

SEQ ID NO: 151199 - DNA, 22 bp, synthetic construct
  misc_feature 1..22: note = chemically synthesized
  source 1..22: mol_type = other DNA
gatgtcttgcatttctctcatt

SEQ ID NO: 151200 - DNA, 22 bp, synthetic construct
  misc_feature 1..22: note = chemically synthesized
  source 1..22: mol_type = other DNA
gcatttctctcattctgttcca

SEQ ID NO: 151201 - DNA, 22 bp, synthetic construct
  misc_feature 1..22: note = chemically synthesized
  source 1..22: mol_type = other DNA
catttctctcattctgttccag

SEQ ID NO: 151202 - DNA, 22 bp, synthetic construct
  misc_feature 1..22: note = chemically synthesized
  source 1..22: mol_type = other DNA
ctctcattctgttccagttgag

SEQ ID NO: 151203 - DNA, 22 bp, synthetic construct
  misc_feature 1..22: note = chemically synthesized
  source 1..22: mol_type = other DNA
tctcattctgttccagttgagg

SEQ ID NO: 151204 - DNA, 22 bp, synthetic construct
  misc_feature 1..22: note = chemically synthesized
  source 1..22: mol_type = other DNA
tcattctgttccagttgaggcc

SEQ ID NO: 151205 - DNA, 22 bp, synthetic construct
  misc_feature 1..22: note = chemically synthesized
  source 1..22: mol_type = other DNA
attctgttccagttgaggccag

SEQ ID NO: 151206 - DNA, 22 bp, synthetic construct
  misc_feature 1..22: note = chemically synthesized
  source 1..22: mol_type = other DNA
tgttccagttgaggccagcttg

SEQ ID NO: 151207 - DNA, 22 bp, synthetic construct
  misc_feature 1..22: note = chemically synthesized
  source 1..22: mol_type = other DNA
ttccagttgaggccagcttgct

SEQ ID NO: 151208 - DNA, 22 bp, synthetic construct
  misc_feature 1..22: note = chemically synthesized
  source 1..22: mol_type = other DNA
cagttgaggccagcttgcttcc

SEQ ID NO: 151209 - DNA, 22 bp, synthetic construct
  misc_feature 1..22: note = chemically synthesized
  source 1..22: mol_type = other DNA
aggccagcttgcttcccactag

SEQ ID NO: 151210 - DNA, 22 bp, synthetic construct
  misc_feature 1..22: note = chemically synthesized
  source 1..22: mol_type = other DNA
gcttcccactagaagaataact

SEQ ID NO: 151211 - DNA, 22 bp, synthetic construct
  misc_feature 1..22: note = chemically synthesized
  source 1..22: mol_type = other DNA
cttcccactagaagaataactg

SEQ ID NO: 151212 - DNA, 22 bp, synthetic construct
  misc_feature 1..22: note = chemically synthesized
  source 1..22: mol_type = other DNA
cccactagaagaataactgttc

SEQ ID NO: 151213 - DNA, 22 bp, synthetic construct
  misc_feature 1..22: note = chemically synthesized
  source 1..22: mol_type = other DNA
ccactagaagaataactgttct

SEQ ID NO: 151214 - DNA, 22 bp, synthetic construct
  misc_feature 1..22: note = chemically synthesized
  source 1..22: mol_type = other DNA
gaagaataactgttctctttat

SEQ ID NO: 151215 - DNA, 22 bp, synthetic construct
  misc_feature 1..22: note = chemically synthesized
  source 1..22: mol_type = other DNA
ttctctttatacaattcctagt

SEQ ID NO: 151216 - DNA, 22 bp, synthetic construct
  misc_feature 1..22: note = chemically synthesized
  source 1..22: mol_type = other DNA
tctttatacaattcctagtcaa

SEQ ID NO: 151217 - DNA, 22 bp, synthetic construct
  misc_feature 1..22: note = chemically synthesized
  source 1..22: mol_type = other DNA
tttatacaattcctagtcaagt

SEQ ID NO: 151218 - DNA, 22 bp, synthetic construct
  misc_feature 1..22: note = chemically synthesized
  source 1..22: mol_type = other DNA
tatacaattcctagtcaagtag

SEQ ID NO: 151219 - DNA, 22 bp, synthetic construct
  misc_feature 1..22: note = chemically synthesized
  source 1..22: mol_type = other DNA
atacaattcctagtcaagtagg

SEQ ID NO: 151220 - DNA, 22 bp, synthetic construct
  misc_feature 1..22: note = chemically synthesized
  source 1..22: mol_type = other DNA
tacaattcctagtcaagtaggg

SEQ ID NO: 151221 - DNA, 22 bp, synthetic construct
  misc_feature 1..22: note = chemically synthesized
  source 1..22: mol_type = other DNA
ctagtcaagtaggggcaaaaag

SEQ ID NO: 151222 - DNA, 22 bp, synthetic construct
  misc_feature 1..22: note = chemically synthesized
  source 1..22: mol_type = other DNA
gtcaagtaggggcaaaaagtat

SEQ ID NO: 151223 - DNA, 22 bp, synthetic construct
  misc_feature 1..22: note = chemically synthesized
  source 1..22: mol_type = other DNA
tcatttattattgtttttctgg

SEQ ID NO: 151224 - DNA, 22 bp, synthetic construct
  misc_feature 1..22: note = chemically synthesized
  source 1..22: mol_type = other DNA
catttattattgtttttctggg

SEQ ID NO: 151225 - DNA, 22 bp, synthetic construct
  misc_feature 1..22: note = chemically synthesized
  source 1..22: mol_type = other DNA
atttattattgtttttctggga

SEQ ID NO: 151226 - DNA, 22 bp, synthetic construct
  misc_feature 1..22: note = chemically synthesized
  source 1..22: mol_type = other DNA
attattgtttttctgggatgta

SEQ ID NO: 151227 - DNA, 22 bp, synthetic construct
  misc_feature 1..22: note = chemically synthesized
  source 1..22: mol_type = other DNA
ttattgtttttctgggatgtag

SEQ ID NO: 151228 - DNA, 22 bp, synthetic construct
  misc_feature 1..22: note = chemically synthesized
  source 1..22: mol_type = other DNA
ttgtttttctgggatgtagcca

SEQ ID NO: 151229 - DNA, 22 bp, synthetic construct
  misc_feature 1..22: note = chemically synthesized
  source 1..22: mol_type = other DNA
tttttctgggatgtagccagga

SEQ ID NO: 151230 - DNA, 22 bp, synthetic construct
  misc_feature 1..22: note = chemically synthesized
  source 1..22: mol_type = other DNA
ttctgggatgtagccaggagca

SEQ ID NO: 151231 - DNA, 22 bp, synthetic construct
  misc_feature 1..22: note = chemically synthesized
  source 1..22: mol_type = other DNA
tctgggatgtagccaggagcaa

SEQ ID NO: 151232 - DNA, 22 bp, synthetic construct
  misc_feature 1..22: note = chemically synthesized
  source 1..22: mol_type = other DNA
ctgggatgtagccaggagcaat

SEQ ID NO: 151233 - DNA, 22 bp, synthetic construct
  misc_feature 1..22: note = chemically synthesized
  source 1..22: mol_type = other DNA
tgggatgtagccaggagcaatt

SEQ ID NO: 151234 - DNA, 22 bp, synthetic construct
  misc_feature 1..22: note = chemically synthesized
  source 1..22: mol_type = other DNA
ggatgtagccaggagcaattta

SEQ ID NO: 151235 - DNA, 22 bp, synthetic construct
  misc_feature 1..22: note = chemically synthesized
  source 1..22: mol_type = other DNA
aaacttgctggagtgcaatttc

SEQ ID NO: 151236 - DNA, 22 bp, synthetic construct
  misc_feature 1..22: note = chemically synthesized
  source 1..22: mol_type = other DNA
aacttgctggagtgcaatttct

SEQ ID NO: 151237 - DNA, 22 bp, synthetic construct
  misc_feature 1..22: note = chemically synthesized
  source 1..22: mol_type = other DNA
gctggagtgcaatttcttcaac

SEQ ID NO: 151238 - DNA, 22 bp, synthetic construct
  misc_feature 1..22: note = chemically synthesized
  source 1..22: mol_type = other DNA
ctggagtgcaatttcttcaact

SEQ ID NO: 151239 - DNA, 22 bp, synthetic construct
  misc_feature 1..22: note = chemically synthesized
  source 1..22: mol_type = other DNA
gagtgcaatttcttcaactaca

SEQ ID NO: 151240 - DNA, 22 bp, synthetic construct
  misc_feature 1..22: note = chemically synthesized
  source 1..22: mol_type = other DNA
cttcaactacaaatgagaataa

SEQ ID NO: 151241 - DNA, 22 bp, synthetic construct
  misc_feature 1..22: note = chemically synthesized
  source 1..22: mol_type = other DNA
ttcaactacaaatgagaataat

SEQ ID NO: 151242 - DNA, 22 bp, synthetic construct
  misc_feature 1..22: note = chemically synthesized
  source 1..22: mol_type = other DNA
caactacaaatgagaataataa

SEQ ID NO: 151243 - DNA, 22 bp, synthetic construct
  misc_feature 1..22: note = chemically synthesized
  source 1..22: mol_type = other DNA
aactacaaatgagaataataat

SEQ ID NO: 151244 - DNA, 22 bp, synthetic construct
  misc_feature 1..22: note = chemically synthesized
  source 1..22: mol_type = other DNA
caaatgagaataataataacag

SEQ ID NO: 151245 - DNA, 22 bp, synthetic construct
  misc_feature 1..22: note = chemically synthesized
  source 1..22: mol_type = other DNA
cgaactaattgtaataatacag

SEQ ID NO: 151246 - DNA, 22 bp, synthetic construct
  misc_feature 1..22: note = chemically synthesized
  source 1..22: mol_type = other DNA
attgtaataatacagaactaaa

SEQ ID NO: 151247 - DNA, 22 bp, synthetic construct
  misc_feature 1..22: note = chemically synthesized
  source 1..22: mol_type = other DNA
taataatacagaactaaatgta

SEQ ID NO: 151248 - DNA, 22 bp, synthetic construct
  misc_feature 1..22: note = chemically synthesized
  source 1..22: mol_type = other DNA
aatgtaaatatacaaaggataa

SEQ ID NO: 151249 - DNA, 22 bp, synthetic construct
  misc_feature 1..22: note = chemically synthesized
  source 1..22: mol_type = other DNA
aaaatctgggcacatgcaggct

SEQ ID NO: 151250 - DNA, 22 bp, synthetic construct
  misc_feature 1..22: note = chemically synthesized
  source 1..22: mol_type = other DNA
ggcacatgcaggctgctataag

SEQ ID NO: 151251 - DNA, 22 bp, synthetic construct
  misc_feature 1..22: note = chemically synthesized
  source 1..22: mol_type = other DNA
ctataagagaaaacatctatga

SEQ ID NO: 151252 - DNA, 22 bp, synthetic construct
  misc_feature 1..22: note = chemically synthesized
  source 1..22: mol_type = other DNA
taagagaaaacatctatgatat

SEQ ID NO: 151253 - DNA, 22 bp, synthetic construct
  misc_feature 1..22: note = chemically synthesized
  source 1..22: mol_type = other DNA
tgatattataggttgaccaaat

SEQ ID NO: 151254 - DNA, 22 bp, synthetic construct
  misc_feature 1..22: note = chemically synthesized
  source 1..22: mol_type = other DNA
taggttgaccaaatgacattaa

SEQ ID NO: 151255 - DNA, 22 bp, synthetic construct
  misc_feature 1..22: note = chemically synthesized
  source 1..22: mol_type = other DNA
accaaatgacattaaattatag

SEQ ID NO: 151256 - DNA, 22 bp, synthetic construct
  misc_feature 1..22: note = chemically synthesized
  source 1..22: mol_type = other DNA
aattatagtggggaggtaaaca

SEQ ID NO: 151257 - DNA, 22 bp, synthetic construct
  misc_feature 1..22: note = chemically synthesized
  source 1..22: mol_type = other DNA
tagtggggaggtaaacaggttg

SEQ ID NO: 151258 - DNA, 22 bp, synthetic construct
  misc_feature 1..22: note = chemically synthesized
  source 1..22: mol_type = other DNA
gcagtgtattttaaagttgaac

SEQ ID NO: 151259 - DNA, 22 bp, synthetic construct
  misc_feature 1..22: note = chemically synthesized
  source 1..22: mol_type = other DNA
taaagttgaacatatgcatatt

SEQ ID NO: 151260 - DNA, 22 bp, synthetic construct
  misc_feature 1..22: note = chemically synthesized
  source 1..22: mol_type = other DNA
aaagttgaacatatgcatattt

SEQ ID NO: 151261 - DNA, 22 bp, synthetic construct
  misc_feature 1..22: note = chemically synthesized
  source 1..22: mol_type = other DNA
aagttgaacatatgcatatttt

SEQ ID NO: 151262 - DNA, 22 bp, synthetic construct
  misc_feature 1..22: note = chemically synthesized
  source 1..22: mol_type = other DNA
aacatatgcatattttatgacc

SEQ ID NO: 151263 - DNA, 22 bp, synthetic construct
  misc_feature 1..22: note = chemically synthesized
  source 1..22: mol_type = other DNA
tatgacctagcaatttacagaa

SEQ ID NO: 151264 - DNA, 22 bp, synthetic construct
  misc_feature 1..22: note = chemically synthesized
  source 1..22: mol_type = other DNA
atgacctagcaatttacagaat

SEQ ID NO: 151265 - DNA, 22 bp, synthetic construct
  misc_feature 1..22: note = chemically synthesized
  source 1..22: mol_type = other DNA
tgacctagcaatttacagaata

SEQ ID NO: 151266 - DNA, 22 bp, synthetic construct
  misc_feature 1..22: note = chemically synthesized
  source 1..22: mol_type = other DNA
gcaatttacagaatatatatac

SEQ ID NO: 151267 - DNA, 22 bp, synthetic construct
  misc_feature 1..22: note = chemically synthesized
  source 1..22: mol_type = other DNA
acagaatatatatacaaaaata

SEQ ID NO: 151268 - DNA, 22 bp, synthetic construct
  misc_feature 1..22: note = chemically synthesized
  source 1..22: mol_type = other DNA
cagaatatatatacaaaaatat

SEQ ID NO: 151269 - DNA, 22 bp, synthetic construct
  misc_feature 1..22: note = chemically synthesized
  source 1..22: mol_type = other DNA
catagcagcaatttatattata

SEQ ID NO: 151270 - DNA, 22 bp, synthetic construct
  misc_feature 1..22: note = chemically synthesized
  source 1..22: mol_type = other DNA
atagcagcaatttatattatag

SEQ ID NO: 151271 - DNA, 22 bp, synthetic construct
  misc_feature 1..22: note = chemically synthesized
  source 1..22: mol_type = other DNA
atattatagccaaaagctagaa

SEQ ID NO: 151272 - DNA, 22 bp, synthetic construct
  misc_feature 1..22: note = chemically synthesized
  source 1..22: mol_type = other DNA
tattatagccaaaagctagaag

SEQ ID NO: 151273 - DNA, 22 bp, synthetic construct
  misc_feature 1..22: note = chemically synthesized
  source 1..22: mol_type = other DNA
tagccaaaagctagaaggtact

SEQ ID NO: 151274 - DNA, 22 bp, synthetic construct
  misc_feature 1..22: note = chemically synthesized
  source 1..22: mol_type = other DNA
gaaggtactcaaatatctatca

SEQ ID NO: 151275 - DNA, 22 bp, synthetic construct
  misc_feature 1..22: note = chemically synthesized
  source 1..22: mol_type = other DNA
aaatatctatcaactgtggagt

SEQ ID NO: 151276 - DNA, 22 bp, synthetic construct
  misc_feature 1..22: note = chemically synthesized
  source 1..22: mol_type = other DNA
tcaactgtggagtcaataaata

SEQ ID NO: 151277 - DNA, 22 bp, synthetic construct
  misc_feature 1..22: note = chemically synthesized
  source 1..22: mol_type = other DNA
tggagtcaataaatatattgtg

SEQ ID NO: 151278 - DNA, 22 bp, synthetic construct
  misc_feature 1..22: note = chemically synthesized
  source 1..22: mol_type = other DNA
tggtatatacataaaatagaat

SEQ ID NO: 151279 - DNA, 22 bp, synthetic construct
  misc_feature 1..22: note = chemically synthesized
  source 1..22: mol_type = other DNA
agaaatgaaaaatcaactacag

SEQ ID NO: 151280 - DNA, 22 bp, synthetic construct
  misc_feature 1..22: note = chemically synthesized
  source 1..22: mol_type = other DNA
cagtcatacactagtatgaatg

SEQ ID NO: 151281 - DNA, 22 bp, synthetic construct
  misc_feature 1..22: note = chemically synthesized
  source 1..22: mol_type = other DNA
gtatgaatgcaattcacaaaca

SEQ ID NO: 151282 - DNA, 22 bp, synthetic construct
  misc_feature 1..22: note = chemically synthesized
  source 1..22: mol_type = other DNA
acaaacataatattgaataaag

SEQ ID NO: 151283 - DNA, 22 bp, synthetic construct
  misc_feature 1..22: note = chemically synthesized
  source 1..22: mol_type = other DNA
aataaagtcagacataagcaac

SEQ ID NO: 151284 - DNA, 22 bp, synthetic construct
  misc_feature 1..22: note = chemically synthesized
  source 1..22: mol_type = other DNA
aatgtatacacacttttaaaaa

SEQ ID NO: 151285 - DNA, 22 bp, synthetic construct
  misc_feature 1..22: note = chemically synthesized
  source 1..22: mol_type = other DNA
ttaaaaaaagggacatgagtca

SEQ ID NO: 151286 - DNA, 22 bp, synthetic construct
  misc_feature 1..22: note = chemically synthesized
  source 1..22: mol_type = other DNA
taaaaaaagggacatgagtcaa

SEQ ID NO: 151287 - DNA, 22 bp, synthetic construct
  misc_feature 1..22: note = chemically synthesized
  source 1..22: mol_type = other DNA
aaaaaaagggacatgagtcaat

SEQ ID NO: 151288 - DNA, 22 bp, synthetic construct
  misc_feature 1..22: note = chemically synthesized
  source 1..22: mol_type = other DNA
aaaaaagggacatgagtcaatc

SEQ ID NO: 151289 - DNA, 22 bp, synthetic construct
  misc_feature 1..22: note = chemically synthesized
  source 1..22: mol_type = other DNA
tatcaggataattattaacttt

SEQ ID NO: 151290 - DNA, 22 bp, synthetic construct
  misc_feature 1..22: note = chemically synthesized
  source 1..22: mol_type = other DNA
ttaactttggagacaattagtg

SEQ ID NO: 151291 - DNA, 22 bp, synthetic construct
  misc_feature 1..22: note = chemically synthesized
  source 1..22: mol_type = other DNA
actttggagacaattagtggaa

SEQ ID NO: 151292 - DNA, 22 bp, synthetic construct
  misc_feature 1..22: note = chemically synthesized
  source 1..22: mol_type = other DNA
tggagacaattagtggaatgat

SEQ ID NO: 151293 - DNA, 22 bp, synthetic construct
  misc_feature 1..22: note = chemically synthesized
  source 1..22: mol_type = other DNA
ggagacaattagtggaatgata

SEQ ID NO: 151294 - DNA, 22 bp, synthetic construct
  misc_feature 1..22: note = chemically synthesized
  source 1..22: mol_type = other DNA
gagacaattagtggaatgataa

SEQ ID NO: 151295 - DNA, 22 bp, synthetic construct
  misc_feature 1..22: note = chemically synthesized
  source 1..22: mol_type = other DNA
gtggaatgataaagagtgagca

SEQ ID NO: 151296 - DNA, 22 bp, synthetic construct
  misc_feature 1..22: note = chemically synthesized
  source 1..22: mol_type = other DNA
actctttaatttcctatcttat

SEQ ID NO: 151297 - DNA, 22 bp, synthetic construct
  misc_feature 1..22: note = chemically synthesized
  source 1..22: mol_type = other DNA
ctctttaatttcctatcttatt

SEQ ID NO: 151298 - DNA, 22 bp, synthetic construct
  misc_feature 1..22: note = chemically synthesized
  source 1..22: mol_type = other DNA
tttaatttcctatcttattagt

SEQ ID NO: 151299 - DNA, 22 bp, synthetic construct
  misc_feature 1..22: note = chemically synthesized
  source 1..22: mol_type = other DNA
taatttcctatcttattagttg

SEQ ID NO: 151300 - DNA, 22 bp, synthetic construct
  misc_feature 1..22: note = chemically synthesized
  source 1..22: mol_type = other DNA
aatttcctatcttattagttgt

SEQ ID NO: 151301 - DNA, 22 bp, synthetic construct
  misc_feature 1..22: note = chemically synthesized
  source 1..22: mol_type = other DNA
atttcctatcttattagttgtt

SEQ ID NO: 151302 - DNA, 22 bp, synthetic construct
  misc_feature 1..22: note = chemically synthesized
  source 1..22: mol_type = other DNA
cctatcttattagttgttacat

SEQ ID NO: 151303 - DNA, 22 bp, synthetic construct
  misc_feature 1..22: note = chemically synthesized
  source 1..22: mol_type = other DNA
ctatcttattagttgttacatg

SEQ ID NO: 151304 - DNA, 22 bp, synthetic construct
  misc_feature 1..22: note = chemically synthesized
  source 1..22: mol_type = other DNA
tcttattagttgttacatgggt

SEQ ID NO: 151305 - DNA, 22 bp, synthetic construct
  misc_feature 1..22: note = chemically synthesized
  source 1..22: mol_type = other DNA
attagttgttacatgggtgtgt

SEQ ID NO: 151306 - DNA, 22 bp, synthetic construct
  misc_feature 1..22: note = chemically synthesized
  source 1..22: mol_type = other DNA
ttagttgttacatgggtgtgtt

SEQ ID NO: 151307 - DNA, 22 bp, synthetic construct
  misc_feature 1..22: note = chemically synthesized
  source 1..22: mol_type = other DNA
gttgttacatgggtgtgttcac

SEQ ID NO: 151308 - DNA, 22 bp, synthetic construct
  misc_feature 1..22: note = chemically synthesized
  source 1..22: mol_type = other DNA
ttacatgggtgtgttcaccttc

SEQ ID NO: 151309 - DNA, 22 bp, synthetic construct
  misc_feature 1..22: note = chemically synthesized
  source 1..22: mol_type = other DNA
catgggtgtgttcaccttccaa

SEQ ID NO: 151310 - DNA, 22 bp, synthetic construct
  misc_feature 1..22: note = chemically synthesized
  source 1..22: mol_type = other DNA
accttccaaaagttaattcagc

SEQ ID NO: 151311 - DNA, 22 bp, synthetic construct
  misc_feature 1..22: note = chemically synthesized
  source 1..22: mol_type = other DNA
ccaaaagttaattcagctgtgc

SEQ ID NO: 151312 - DNA, 22 bp, synthetic construct
  misc_feature 1..22: note = chemically synthesized
  source 1..22: mol_type = other DNA
caaaagttaattcagctgtgca

SEQ ID NO: 151313 - DNA, 22 bp, synthetic construct
  misc_feature 1..22: note = chemically synthesized
  source 1..22: mol_type = other DNA
attcagctgtgcatgtataatt

SEQ ID NO: 151314 - DNA, 22 bp, synthetic construct
  misc_feature 1..22: note = chemically synthesized
  source 1..22: mol_type = other DNA
agctgtgcatgtataatttgtg

SEQ ID NO: 151315 - DNA, 22 bp, synthetic construct
  misc_feature 1..22: note = chemically synthesized
  source 1..22: mol_type = other DNA
tgcatgtataatttgtgtactt

SEQ ID NO: 151316 - DNA, 22 bp, synthetic construct
  misc_feature 1..22: note = chemically synthesized
  source 1..22: mol_type = other DNA
gtgtacttttatatatgcatgc

SEQ ID NO: 151317 - DNA, 22 bp, synthetic construct
  misc_feature 1..22: note = chemically synthesized
  source 1..22: mol_type = other DNA
tgtacttttatatatgcatgct

SEQ ID NO: 151318 - DNA, 22 bp, synthetic construct
  misc_feature 1..22: note = chemically synthesized
  source 1..22: mol_type = other DNA
ttatatatgcatgctgtactta

SEQ ID NO: 151319 - DNA, 22 bp, synthetic construct
  misc_feature 1..22: note = chemically synthesized
  source 1..22: mol_type = other DNA
tatatatgcatgctgtacttaa

SEQ ID NO: 151320 - DNA, 22 bp, synthetic construct
  misc_feature 1..22: note = chemically synthesized
  source 1..22: mol_type = other DNA
atatatgcatgctgtacttaaa

SEQ ID NO: 151321 - DNA, 22 bp, synthetic construct
  misc_feature 1..22: note = chemically synthesized
  source 1..22: mol_type = other DNA
tatatgcatgctgtacttaaaa

SEQ ID NO: 151322 - DNA, 22 bp, synthetic construct
  misc_feature 1..22: note = chemically synthesized
  source 1..22: mol_type = other DNA
tacttaaaatattaaaataaaa

SEQ ID NO: 151323 - DNA, 22 bp, synthetic construct
  misc_feature 1..22: note = chemically synthesized
  source 1..22: mol_type = other DNA
aaaatattaaaataaaaactaa

SEQ ID NO: 151324 - DNA, 22 bp, synthetic construct
  misc_feature 1..22: note = chemically synthesized
  source 1..22: mol_type = other DNA
aaatattaaaataaaaactaaa

SEQ ID NO: 151325 - DNA, 22 bp, synthetic construct
  misc_feature 1..22: note = chemically synthesized
  source 1..22: mol_type = other DNA
aaataaaaactaaatttagaaa

SEQ ID NO: 151326 - DNA, 22 bp, synthetic construct
  misc_feature 1..22: note = chemically synthesized
  source 1..22: mol_type = other DNA
aatttagaaactaaacaatgga

SEQ ID NO: 151327 - DNA, 22 bp, synthetic construct
  misc_feature 1..22: note = chemically synthesized
  source 1..22: mol_type = other DNA
agaaactaaacaatggaaaaaa

SEQ ID NO: 151328 - DNA, 22 bp, synthetic construct
  misc_feature 1..22: note = chemically synthesized
  source 1..22: mol_type = other DNA
gaaactaaacaatggaaaaaag

SEQ ID NO: 151329 - DNA, 22 bp, synthetic construct
  misc_feature 1..22: note = chemically synthesized
  source 1..22: mol_type = other DNA
aacaatggaaaaaagtcagacc

SEQ ID NO: 151330 - DNA, 22 bp, synthetic construct
  misc_feature 1..22: note = chemically synthesized
  source 1..22: mol_type = other DNA
ctttgcatttcaagaagtgcat

SEQ ID NO: 151331 - DNA, 22 bp, synthetic construct
  misc_feature 1..22: note = chemically synthesized
  source 1..22: mol_type = other DNA
tttgcatttcaagaagtgcata

SEQ ID NO: 151332 - DNA, 22 bp, synthetic construct
  misc_feature 1..22: note = chemically synthesized
  source 1..22: mol_type = other DNA
tgcatttcaagaagtgcatact

SEQ ID NO: 151333 - DNA, 22 bp, synthetic construct
  misc_feature 1..22: note = chemically synthesized
  source 1..22: mol_type = other DNA
gcatttcaagaagtgcatacta

SEQ ID NO: 151334 - DNA, 22 bp, synthetic construct
  misc_feature 1..22: note = chemically synthesized
  source 1..22: mol_type = other DNA
catttcaagaagtgcatactaa

SEQ ID NO: 151335 - DNA, 22 bp, synthetic construct
  misc_feature 1..22: note = chemically synthesized
  source 1..22: mol_type = other DNA
caagaagtgcatactaactgag

SEQ ID NO: 151336 - DNA, 22 bp, synthetic construct
  misc_feature 1..22: note = chemically synthesized
  source 1..22: mol_type = other DNA
aagaagtgcatactaactgaga

SEQ ID NO: 151337 - DNA, 22 bp, synthetic construct
  misc_feature 1..22: note = chemically synthesized
  source 1..22: mol_type = other DNA
actgagatattacattcttaaa

SEQ ID NO: 151338 - DNA, 22 bp, synthetic construct
  misc_feature 1..22: note = chemically synthesized
  source 1..22: mol_type = other DNA
agatattacattcttaaatggc

SEQ ID NO: 151339 - DNA, 22 bp, synthetic construct
  misc_feature 1..22: note = chemically synthesized
  source 1..22: mol_type = other DNA
cattcttaaatggctttagtca

SEQ ID NO: 151340 - DNA, 22 bp, synthetic construct
  misc_feature 1..22: note = chemically synthesized
  source 1..22: mol_type = other DNA
ttaaatggctttagtcaattag

SEQ ID NO: 151341 - DNA, 22 bp, synthetic construct
  misc_feature 1..22: note = chemically synthesized
  source 1..22: mol_type = other DNA
aaatggctttagtcaattaggc

SEQ ID NO: 151342 - DNA, 22 bp, synthetic construct
  misc_feature 1..22: note = chemically synthesized
  source 1..22: mol_type = other DNA
aatggctttagtcaattaggct

SEQ ID NO: 151343 - DNA, 22 bp, synthetic construct
  misc_feature 1..22: note = chemically synthesized
  source 1..22: mol_type = other DNA
tagtcaattaggctttaaattt

SEQ ID NO: 151344 - DNA, 22 bp, synthetic construct
  misc_feature 1..22: note = chemically synthesized
  source 1..22: mol_type = other DNA
agtcaattaggctttaaatttc

SEQ ID NO: 151345 - DNA, 22 bp, synthetic construct
  misc_feature 1..22: note = chemically synthesized
  source 1..22: mol_type = other DNA
gtcaattaggctttaaatttca

SEQ ID NO: 151346 - DNA, 22 bp, synthetic construct
  misc_feature 1..22: note = chemically synthesized
  source 1..22: mol_type = other DNA
ggctttaaatttcaccactata

SEQ ID NO: 151347 - DNA, 22 bp, synthetic construct
  misc_feature 1..22: note = chemically synthesized
  source 1..22: mol_type = other DNA
taaatttcaccactatataaac

SEQ ID NO: 151348 - DNA, 22 bp, synthetic construct
  misc_feature 1..22: note = chemically synthesized
  source 1..22: mol_type = other DNA
aaatttcaccactatataaaca

SEQ ID NO: 151349 - DNA, 22 bp, synthetic construct
  misc_feature 1..22: note = chemically synthesized
  source 1..22: mol_type = other DNA
aatttcaccactatataaacat

SEQ ID NO: 151350 - DNA, 22 bp, synthetic construct
  misc_feature 1..22: note = chemically synthesized
  source 1..22: mol_type = other DNA
caccactatataaacatttgct

SEQ ID NO: 151351 - DNA, 22 bp, synthetic construct
  misc_feature 1..22: note = chemically synthesized
  source 1..22: mol_type = other DNA
accactatataaacatttgctt

SEQ ID NO: 151352 - DNA, 22 bp, synthetic construct
  misc_feature 1..22: note = chemically synthesized
  source 1..22: mol_type = other DNA
tataaacatttgcttctaaatc

SEQ ID NO: 151353 - DNA, 22 bp, synthetic construct
  misc_feature 1..22: note = chemically synthesized
  source 1..22: mol_type = other DNA
gcttctaaatctaggtagactg

SEQ ID NO: 151354 - DNA, 22 bp, synthetic construct
  misc_feature 1..22: note = chemically synthesized
  source 1..22: mol_type = other DNA
cttctaaatctaggtagactgt

SEQ ID NO: 151355 - DNA, 22 bp, synthetic construct
  misc_feature 1..22: note = chemically synthesized
  source 1..22: mol_type = other DNA
ctaaatctaggtagactgtctt

SEQ ID NO: 151356 - DNA, 22 bp, synthetic construct
  misc_feature 1..22: note = chemically synthesized
  source 1..22: mol_type = other DNA
taaatctaggtagactgtctta

SEQ ID NO: 151357 - DNA, 22 bp, synthetic construct
  misc_feature 1..22: note = chemically synthesized
  source 1..22: mol_type = other DNA
aatctaggtagactgtcttaac

SEQ ID NO: 151358 - DNA, 22 bp, synthetic construct
  misc_feature 1..22: note = chemically synthesized
  source 1..22: mol_type = other DNA
ggtagactgtcttaacttcctg

SEQ ID NO: 151359 - DNA, 22 bp, synthetic construct
  misc_feature 1..22: note = chemically synthesized
  source 1..22: mol_type = other DNA
tcttaacttcctgaagaagagg

SEQ ID NO: 151360 - DNA, 22 bp, synthetic construct
  misc_feature 1..22: note = chemically synthesized
  source 1..22: mol_type = other DNA
aacttcctgaagaagagggaag

SEQ ID NO: 151361 - DNA, 22 bp, synthetic construct
  misc_feature 1..22: note = chemically synthesized
  source 1..22: mol_type = other DNA
acttcctgaagaagagggaaga

SEQ ID NO: 151362 - DNA, 22 bp, synthetic construct
  misc_feature 1..22: note = chemically synthesized
  source 1..22: mol_type = other DNA
cctgaagaagagggaagaaata

SEQ ID NO: 151363 - DNA, 22 bp, synthetic construct
  misc_feature 1..22: note = chemically synthesized
  source 1..22: mol_type = other DNA
ctgaagaagagggaagaaataa

SEQ ID NO: 151364 - DNA, 22 bp, synthetic construct
  misc_feature 1..22: note = chemically synthesized
  source 1..22: mol_type = other DNA
aagaagagggaagaaataatga

SEQ ID NO: 151365 - DNA, 22 bp, synthetic construct
  misc_feature 1..22: note = chemically synthesized
  source 1..22: mol_type = other DNA
gaggagggaaataaaaagccta

SEQ ID NO: 151366 - DNA, 22 bp, synthetic construct
  misc_feature 1..22: note = chemically synthesized
  source 1..22: mol_type = other DNA
ggaaagcaacatgaaaagatgg

SEQ ID NO: 151367 - DNA, 22 bp, synthetic construct
  misc_feature 1..22: note = chemically synthesized
  source 1..22: mol_type = other DNA
tctggtacatcctgtgcttcct

SEQ ID NO: 151368 - DNA, 22 bp, synthetic construct
  misc_feature 1..22: note = chemically synthesized
  source 1..22: mol_type = other DNA
tggtacatcctgtgcttcctga

SEQ ID NO: 151369 - DNA, 22 bp, synthetic construct
  misc_feature 1..22: note = chemically synthesized
  source 1..22: mol_type = other DNA
gtacatcctgtgcttcctgaga

SEQ ID NO: 151370 - DNA, 22 bp, synthetic construct
  misc_feature 1..22: note = chemically synthesized
  source 1..22: mol_type = other DNA
tgcttcctgagatgttgttatt

SEQ ID NO: 151371 - DNA, 22 bp, synthetic construct
  misc_feature 1..22: note = chemically synthesized
  source 1..22: mol_type = other DNA
cctgagatgttgttattcgtct

SEQ ID NO: 151372 - DNA, 22 bp, synthetic construct
  misc_feature 1..22: note = chemically synthesized
  source 1..22: mol_type = other DNA
ctgagatgttgttattcgtctt

SEQ ID NO: 151373 - DNA, 22 bp, synthetic construct
  misc_feature 1..22: note = chemically synthesized
  source 1..22: mol_type = other DNA
agatgttgttattcgtctttta

SEQ ID NO: 151374 - DNA, 22 bp, synthetic construct
  misc_feature 1..22: note = chemically synthesized
  source 1..22: mol_type = other DNA
ttattcgtcttttacacacact

SEQ ID NO: 151375 - DNA, 22 bp, synthetic construct
  misc_feature 1..22: note = chemically synthesized
  source 1..22: mol_type = other DNA
ttcgtcttttacacacactgtc

SEQ ID NO: 151376 - DNA, 22 bp, synthetic construct
  misc_feature 1..22: note = chemically synthesized
  source 1..22: mol_type = other DNA
gtcttttacacacactgtcttg

SEQ ID NO: 151377 - DNA, 22 bp, synthetic construct
  misc_feature 1..22: note = chemically synthesized
  source 1..22: mol_type = other DNA
ttacacacactgtcttgggatg

SEQ ID NO: 151378 - DNA, 22 bp, synthetic construct
  misc_feature 1..22: note = chemically synthesized
  source 1..22: mol_type = other DNA
tacacacactgtcttgggatgg

SEQ ID NO: 151379 - DNA, 22 bp, synthetic construct
  misc_feature 1..22: note = chemically synthesized
  source 1..22: mol_type = other DNA
acacacactgtcttgggatggg

SEQ ID NO: 151380 - DNA, 22 bp, synthetic construct
  misc_feature 1..22: note = chemically synthesized
  source 1..22: mol_type = other DNA
cacacactgtcttgggatgggc

SEQ ID NO: 151381 - DNA, 22 bp, synthetic construct
  misc_feature 1..22: note = chemically synthesized
  source 1..22: mol_type = other DNA
tcttgggatgggcattaaggtg

SEQ ID NO: 151382 - DNA, 22 bp, synthetic construct
  misc_feature 1..22: note = chemically synthesized
  source 1..22: mol_type = other DNA
gggatgggcattaaggtgttgt

SEQ ID NO: 151383 - DNA, 22 bp, synthetic construct
  misc_feature 1..22: note = chemically synthesized
  source 1..22: mol_type = other DNA
ggatgggcattaaggtgttgta

SEQ ID NO: 151384 - DNA, 22 bp, synthetic construct
  misc_feature 1..22: note = chemically synthesized
  source 1..22: mol_type = other DNA
aggtgttgtagctactcagcta

SEQ ID NO: 151385 - DNA, 22 bp, synthetic construct
  misc_feature 1..22: note = chemically synthesized
  source 1..22: mol_type = other DNA
tagctactcagctagtaagtag

SEQ ID NO: 151386 - DNA, 22 bp, synthetic construct
  misc_feature 1..22: note = chemically synthesized
  source 1..22: mol_type = other DNA
ctcagctagtaagtagctgagc

SEQ ID NO: 151387 - DNA, 22 bp, synthetic construct
  misc_feature 1..22: note = chemically synthesized
  source 1..22: mol_type = other DNA
agctagtaagtagctgagctaa

SEQ ID NO: 151388 - DNA, 22 bp, synthetic construct
  misc_feature 1..22: note = chemically synthesized
  source 1..22: mol_type = other DNA
gtaagtagctgagctaagattc

SEQ ID NO: 151389 - DNA, 22 bp, synthetic construct
  misc_feature 1..22: note = chemically synthesized
  source 1..22: mol_type = other DNA
agctaagattctttcaattcca

SEQ ID NO: 151390 - DNA, 22 bp, synthetic construct
  misc_feature 1..22: note = chemically synthesized
  source 1..22: mol_type = other DNA
agattctttcaattccaaagtc

SEQ ID NO: 151391 - DNA, 22 bp, synthetic construct
  misc_feature 1..22: note = chemically synthesized
  source 1..22: mol_type = other DNA
tttcaattccaaagtcagcagt

SEQ ID NO: 151392 - DNA, 22 bp, synthetic construct
  misc_feature 1..22: note = chemically synthesized
  source 1..22: mol_type = other DNA
tcaattccaaagtcagcagtgt

SEQ ID NO: 151393 - DNA, 22 bp, synthetic construct
  misc_feature 1..22: note = chemically synthesized
  source 1..22: mol_type = other DNA
caattccaaagtcagcagtgtc

SEQ ID NO: 151394 - DNA, 22 bp, synthetic construct
  misc_feature 1..22: note = chemically synthesized
  source 1..22: mol_type = other DNA
aattccaaagtcagcagtgtct

SEQ ID NO: 151395 - DNA, 22 bp, synthetic construct
  misc_feature 1..22: note = chemically synthesized
  source 1..22: mol_type = other DNA
caaagtcagcagtgtcttcact

SEQ ID NO: 151396 - DNA, 22 bp, synthetic construct
  misc_feature 1..22: note = chemically synthesized
  source 1..22: mol_type = other DNA
cactacatggtactatgtcaag

SEQ ID NO: 151397 - DNA, 22 bp, synthetic construct
  misc_feature 1..22: note = chemically synthesized
  source 1..22: mol_type = other DNA
actacatggtactatgtcaaga

SEQ ID NO: 151398 - DNA, 22 bp, synthetic construct
  misc_feature 1..22: note = chemically synthesized
  source 1..22: mol_type = other DNA
catggtactatgtcaagaaaga

SEQ ID NO: 151399 - DNA, 22 bp, synthetic construct
  misc_feature 1..22: note = chemically synthesized
  source 1..22: mol_type = other DNA
tgtcaagaaagagaaactccac

SEQ ID NO: 151400 - DNA, 22 bp, synthetic construct
  misc_feature 1..22: note = chemically synthesized
  source 1..22: mol_type = other DNA
cactaaaaagaacttcattgct

SEQ ID NO: 151401 - DNA, 22 bp, synthetic construct
  misc_feature 1..22: note = chemically synthesized
  source 1..22: mol_type = other DNA
aaaagaacttcattgctctctg

SEQ ID NO: 151402 - DNA, 22 bp, synthetic construct
  misc_feature 1..22: note = chemically synthesized
  source 1..22: mol_type = other DNA
cattgctctctgttagggatac

SEQ ID NO: 151403 - DNA, 22 bp, synthetic construct
  misc_feature 1..22: note = chemically synthesized
  source 1..22: mol_type = other DNA
attgctctctgttagggataca

SEQ ID NO: 151404 - DNA, 22 bp, synthetic construct
  misc_feature 1..22: note = chemically synthesized
  source 1..22: mol_type = other DNA
ctctctgttagggatacattaa

SEQ ID NO: 151405 - DNA, 22 bp, synthetic construct
  misc_feature 1..22: note = chemically synthesized
  source 1..22: mol_type = other DNA
tctgttagggatacattaacat

SEQ ID NO: 151406 - DNA, 22 bp, synthetic construct
  misc_feature 1..22: note = chemically synthesized
  source 1..22: mol_type = other DNA
tgttagggatacattaacattt

SEQ ID NO: 151407 - DNA, 22 bp, synthetic construct
  misc_feature 1..22: note = chemically synthesized
  source 1..22: mol_type = other DNA
ttagggatacattaacattttg

SEQ ID NO: 151408 - DNA, 22 bp, synthetic construct
  misc_feature 1..22: note = chemically synthesized
  source 1..22: mol_type = other DNA
gggatacattaacattttggga

SEQ ID NO: 151409 - DNA, 22 bp, synthetic construct
  misc_feature 1..22: note = chemically synthesized
  source 1..22: mol_type = other DNA
acattttgggacatgaaaaaaa

SEQ ID NO: 151410 - DNA, 22 bp, synthetic construct
  misc_feature 1..22: note = chemically synthesized
  source 1..22: mol_type = other DNA
tgggacatgaaaaaaaaatgtt

SEQ ID NO: 151411 - DNA, 22 bp, synthetic construct
  misc_feature 1..22: note = chemically synthesized
  source 1..22: mol_type = other DNA
gggacatgaaaaaaaaatgtta

SEQ ID NO: 151412 - DNA, 22 bp, synthetic construct
  misc_feature 1..22: note = chemically synthesized
  source 1..22: mol_type = other DNA
ggacatgaaaaaaaaatgttac

SEQ ID NO: 151413 - DNA, 22 bp, synthetic construct
  misc_feature 1..22: note = chemically synthesized
  source 1..22: mol_type = other DNA
caatagcttacaggtcacctcc

SEQ ID NO: 151414 - DNA, 22 bp, synthetic construct
  misc_feature 1..22: note = chemically synthesized
  source 1..22: mol_type = other DNA
acaggtcacctccacttatatg

SEQ ID NO: 151415 - DNA, 22 bp, synthetic construct
  misc_feature 1..22: note = chemically synthesized
  source 1..22: mol_type = other DNA
caggtcacctccacttatatga

SEQ ID NO: 151416 - DNA, 22 bp, synthetic construct
  misc_feature 1..22: note = chemically synthesized
  source 1..22: mol_type = other DNA
cacttatatgacctatggacct

SEQ ID NO: 151417 - DNA, 22 bp, synthetic construct
  misc_feature 1..22: note = chemically synthesized
  source 1..22: mol_type = other DNA
atatgacctatggacctcttaa

SEQ ID NO: 151418 - DNA, 22 bp, synthetic construct
  misc_feature 1..22: note = chemically synthesized
  source 1..22: mol_type = other DNA
tatgacctatggacctcttaaa

SEQ ID NO: 151419 - DNA, 22 bp, synthetic construct
  misc_feature 1..22: note = chemically synthesized
  source 1..22: mol_type = other DNA
tggacctcttaaactcagcgag

SEQ ID NO: 151420 - DNA, 22 bp, synthetic construct
  misc_feature 1..22: note = chemically synthesized
  source 1..22: mol_type = other DNA
ttaaactcagcgagttgaaaag

SEQ ID NO: 151421 - DNA, 22 bp, synthetic construct
  misc_feature 1..22: note = chemically synthesized
  source 1..22: mol_type = other DNA
aaactcagcgagttgaaaagat

SEQ ID NO: 151422 - DNA, 22 bp, synthetic construct
  misc_feature 1..22: note = chemically synthesized
  source 1..22: mol_type = other DNA
aactcagcgagttgaaaagata

SEQ ID NO: 151423 - DNA, 22 bp, synthetic construct
  misc_feature 1..22: note = chemically synthesized
  source 1..22: mol_type = other DNA
agcgagttgaaaagatagtaaa

SEQ ID NO: 151424 - DNA, 22 bp, synthetic construct
  misc_feature 1..22: note = chemically synthesized
  source 1..22: mol_type = other DNA
aaaagatagtaaattatcctcc

SEQ ID NO: 151425 - DNA, 22 bp, synthetic construct
  misc_feature 1..22: note = chemically synthesized
  source 1..22: mol_type = other DNA
tcctccacttctttcagtttcc

SEQ ID NO: 151426 - DNA, 22 bp, synthetic construct
  misc_feature 1..22: note = chemically synthesized
  source 1..22: mol_type = other DNA
cacttctttcagtttcctctaa

SEQ ID NO: 151427 - DNA, 22 bp, synthetic construct
  misc_feature 1..22: note = chemically synthesized
  source 1..22: mol_type = other DNA
ctttcagtttcctctaatgctt

SEQ ID NO: 151428 - DNA, 22 bp, synthetic construct
  misc_feature 1..22: note = chemically synthesized
  source 1..22: mol_type = other DNA
tttcagtttcctctaatgcttc

SEQ ID NO: 151429 - DNA, 22 bp, synthetic construct
  misc_feature 1..22: note = chemically synthesized
  source 1..22: mol_type = other DNA
tcagtttcctctaatgcttcca

SEQ ID NO: 151430 - DNA, 22 bp, synthetic construct
  misc_feature 1..22: note = chemically synthesized
  source 1..22: mol_type = other DNA
cagtttcctctaatgcttccaa

SEQ ID NO: 151431 - DNA, 22 bp, synthetic construct
  misc_feature 1..22: note = chemically synthesized
  source 1..22: mol_type = other DNA
agtttcctctaatgcttccaaa

SEQ ID NO: 151432 - DNA, 22 bp, synthetic construct
  misc_feature 1..22: note = chemically synthesized
  source 1..22: mol_type = other DNA
cctctaatgcttccaaacttga

SEQ ID NO: 151433 - DNA, 22 bp, synthetic construct
  misc_feature 1..22: note = chemically synthesized
  source 1..22: mol_type = other DNA
ctctaatgcttccaaacttgat

SEQ ID NO: 151434 - DNA, 22 bp, synthetic construct
  misc_feature 1..22: note = chemically synthesized
  source 1..22: mol_type = other DNA
taatgcttccaaacttgatgaa

SEQ ID NO: 151435 - DNA, 22 bp, synthetic construct
  misc_feature 1..22: note = chemically synthesized
  source 1..22: mol_type = other DNA
atgcttccaaacttgatgaatg

SEQ ID NO: 151436 - DNA, 22 bp, synthetic construct
  misc_feature 1..22: note = chemically synthesized
  source 1..22: mol_type = other DNA
ccaaacttgatgaatggttcac

SEQ ID NO: 151437 - DNA, 22 bp, synthetic construct
  misc_feature 1..22: note = chemically synthesized
  source 1..22: mol_type = other DNA
caaacttgatgaatggttcact

SEQ ID NO: 151438 - DNA, 22 bp, synthetic construct
  misc_feature 1..22: note = chemically synthesized
  source 1..22: mol_type = other DNA
gatgaatggttcactcagattt

SEQ ID NO: 151439 - DNA, 22 bp, synthetic construct
  misc_feature 1..22: note = chemically synthesized
  source 1..22: mol_type = other DNA
atgaatggttcactcagatttc

SEQ ID NO: 151440 - DNA, 22 bp, synthetic construct
  misc_feature 1..22: note = chemically synthesized
  source 1..22: mol_type = other DNA
actcagatttccaagacaaaat

SEQ ID NO: 151441 - DNA, 22 bp, synthetic construct
  misc_feature 1..22: note = chemically synthesized
  source 1..22: mol_type = other DNA
agatttccaagacaaaattttg

SEQ ID NO: 151442 - DNA, 22 bp, synthetic construct
  misc_feature 1..22: note = chemically synthesized
  source 1..22: mol_type = other DNA
ccaagacaaaattttgtcaatc

SEQ ID NO: 151443 - DNA, 22 bp, synthetic construct
  misc_feature 1..22: note = chemically synthesized
  source 1..22: mol_type = other DNA
caagacaaaattttgtcaatca

SEQ ID NO: 151444 - DNA, 22 bp, synthetic construct
  misc_feature 1..22: note = chemically synthesized
  source 1..22: mol_type = other DNA
tgtcaatcatttttgcctttac

SEQ ID NO: 151445 - DNA, 22 bp, synthetic construct
  misc_feature 1..22: note = chemically synthesized
  source 1..22: mol_type = other DNA
gtcaatcatttttgcctttact

SEQ ID NO: 151446 - DNA, 22 bp, synthetic construct
  misc_feature 1..22: note = chemically synthesized
  source 1..22: mol_type = other DNA
tcaatcatttttgcctttactc

SEQ ID NO: 151447 - DNA, 22 bp, synthetic construct
  misc_feature 1..22: note = chemically synthesized
  source 1..22: mol_type = other DNA
ttgcctttactctccactctct

SEQ ID NO: 151448 - DNA, 22 bp, synthetic construct
  misc_feature 1..22: note = chemically synthesized
  source 1..22: mol_type = other DNA
tgcctttactctccactctctt

SEQ ID NO: 151449 - DNA, 22 bp, synthetic construct
  misc_feature 1..22: note = chemically synthesized
  source 1..22: mol_type = other DNA
gcctttactctccactctcttc

SEQ ID NO: 151450 - DNA, 22 bp, synthetic construct
  misc_feature 1..22: note = chemically synthesized
  source 1..22: mol_type = other DNA
cctttactctccactctcttct

SEQ ID NO: 151451 - DNA, 22 bp, synthetic construct
  misc_feature 1..22: note = chemically synthesized
  source 1..22: mol_type = other DNA
tactctccactctcttctatcc

SEQ ID NO: 151452 - DNA, 22 bp, synthetic construct
  misc_feature 1..22: note = chemically synthesized
  source 1..22: mol_type = other DNA
actctccactctcttctatccc

SEQ ID NO: 151453 - DNA, 22 bp, synthetic construct
  misc_feature 1..22: note = chemically synthesized
  source 1..22: mol_type = other DNA
ctctccactctcttctatccct

SEQ ID NO: 151454 - DNA, 22 bp, synthetic construct
  misc_feature 1..22: note = chemically synthesized
  source 1..22: mol_type = other DNA
tccactctcttctatcccttat

SEQ ID NO: 151455 - DNA, 22 bp, synthetic construct
  misc_feature 1..22: note = chemically synthesized
  source 1..22: mol_type = other DNA
cactctcttctatcccttatat

SEQ ID NO: 151456 - DNA, 22 bp, synthetic construct
  misc_feature 1..22: note = chemically synthesized
  source 1..22: mol_type = other DNA
tcttctatcccttatatatatt

SEQ ID NO: 151457 - DNA, 22 bp, synthetic construct
  misc_feature 1..22: note = chemically synthesized
  source 1..22: mol_type = other DNA
ttctatcccttatatatattta

SEQ ID NO: 151458 - DNA, 22 bp, synthetic construct
  misc_feature 1..22: note = chemically synthesized
  source 1..22: mol_type = other DNA
ctatcccttatatatatttaat

SEQ ID NO: 151459 - DNA, 22 bp, synthetic construct
  misc_feature 1..22: note = chemically synthesized
  source 1..22: mol_type = other DNA
tatcccttatatatatttaata

SEQ ID NO: 151460 - DNA, 22 bp, synthetic construct
  misc_feature 1..22: note = chemically synthesized
  source 1..22: mol_type = other DNA
tcccttatatatatttaataat

SEQ ID NO: 151461 - DNA, 22 bp, synthetic construct
  misc_feature 1..22: note = chemically synthesized
  source 1..22: mol_type = other DNA
atatatatttaataatcaattt

SEQ ID NO: 151462 - DNA, 22 bp, synthetic construct
  misc_feature 1..22: note = chemically synthesized
  source 1..22: mol_type = other DNA
tatatatttaataatcaatttc

SEQ ID NO: 151463 - DNA, 22 bp, synthetic construct
  misc_feature 1..22: note = chemically synthesized
  source 1..22: mol_type = other DNA
aataatcaatttctcacaacta

SEQ ID NO: 151464 - DNA, 22 bp, synthetic construct
  misc_feature 1..22: note = chemically synthesized
  source 1..22: mol_type = other DNA
ataatcaatttctcacaactag

SEQ ID NO: 151465 - DNA, 22 bp, synthetic construct
  misc_feature 1..22: note = chemically synthesized
  source 1..22: mol_type = other DNA
ctcacaactagaattattatca

SEQ ID NO: 151466 - DNA, 22 bp, synthetic construct
  misc_feature 1..22: note = chemically synthesized
  source 1..22: mol_type = other DNA
tcacaactagaattattatcat

SEQ ID NO: 151467 - DNA, 22 bp, synthetic construct
  misc_feature 1..22: note = chemically synthesized
  source 1..22: mol_type = other DNA
acaactagaattattatcataa

SEQ ID NO: 151468 - DNA, 22 bp, synthetic construct
  misc_feature 1..22: note = chemically synthesized
  source 1..22: mol_type = other DNA
gaattattatcataaatactga

SEQ ID NO: 151469 - DNA, 22 bp, synthetic construct
  misc_feature 1..22: note = chemically synthesized
  source 1..22: mol_type = other DNA
ttatcataaatactgatagctt

SEQ ID NO: 151470 - DNA, 22 bp, synthetic construct
  misc_feature 1..22: note = chemically synthesized
  source 1..22: mol_type = other DNA
tcataaatactgatagcttttg

SEQ ID NO: 151471 - DNA, 22 bp, synthetic construct
  misc_feature 1..22: note = chemically synthesized
  source 1..22: mol_type = other DNA
atagcttttgagtggcagataa

SEQ ID NO: 151472 - DNA, 22 bp, synthetic construct
  misc_feature 1..22: note = chemically synthesized
  source 1..22: mol_type = other DNA
ttgagtggcagataatgagccg

SEQ ID NO: 151473 - DNA, 22 bp, synthetic construct
  misc_feature 1..22: note = chemically synthesized
  source 1..22: mol_type = other DNA
tgagtggcagataatgagccgt

SEQ ID NO: 151474 - DNA, 22 bp, synthetic construct
  misc_feature 1..22: note = chemically synthesized
  source 1..22: mol_type = other DNA
gagtggcagataatgagccgtt

SEQ ID NO: 151475 - DNA, 22 bp, synthetic construct
  misc_feature 1..22: note = chemically synthesized
  source 1..22: mol_type = other DNA
agtggcagataatgagccgttt

SEQ ID NO: 151476 - DNA, 22 bp, synthetic construct
  misc_feature 1..22: note = chemically synthesized
  source 1..22: mol_type = other DNA
ttatatattatcatcataccaa

SEQ ID NO: 151477 - DNA, 22 bp, synthetic construct
  misc_feature 1..22: note = chemically synthesized
  source 1..22: mol_type = other DNA
tatatattatcatcataccaac

SEQ ID NO: 151478 - DNA, 22 bp, synthetic construct
  misc_feature 1..22: note = chemically synthesized
  source 1..22: mol_type = other DNA
atatattatcatcataccaaca

SEQ ID NO: 151479 - DNA, 22 bp, synthetic construct
  misc_feature 1..22: note = chemically synthesized
  source 1..22: mol_type = other DNA
tatattatcatcataccaacaa

SEQ ID NO: 151480 - DNA, 22 bp, synthetic construct
  misc_feature 1..22: note = chemically synthesized
  source 1..22: mol_type = other DNA
tcatcataccaacaatattttt

SEQ ID NO: 151481 - DNA, 22 bp, synthetic construct
  misc_feature 1..22: note = chemically synthesized
  source 1..22: mol_type = other DNA
ttaaaaattgtgcagctaagtg

SEQ ID NO: 151482 - DNA, 22 bp, synthetic construct
  misc_feature 1..22: note = chemically synthesized
  source 1..22: mol_type = other DNA
taaaaattgtgcagctaagtgt

SEQ ID NO: 151483 - DNA, 22 bp, synthetic construct
  misc_feature 1..22: note = chemically synthesized
  source 1..22: mol_type = other DNA
aaaaattgtgcagctaagtgtt

SEQ ID NO: 151484 - DNA, 22 bp, synthetic construct
  misc_feature 1..22: note = chemically synthesized
  source 1..22: mol_type = other DNA
aaaattgtgcagctaagtgttg

SEQ ID NO: 151485 - DNA, 22 bp, synthetic construct
  misc_feature 1..22: note = chemically synthesized
  source 1..22: mol_type = other DNA
tgcagctaagtgttgagctaaa

SEQ ID NO: 151486 - DNA, 22 bp, synthetic construct
  misc_feature 1..22: note = chemically synthesized
  source 1..22: mol_type = other DNA
agtgttgagctaaaaattatat

SEQ ID NO: 151487 - DNA, 22 bp, synthetic construct
  misc_feature 1..22: note = chemically synthesized
  source 1..22: mol_type = other DNA
agctaaaaattatatacctaag

SEQ ID NO: 151488 - DNA, 22 bp, synthetic construct
  misc_feature 1..22: note = chemically synthesized
  source 1..22: mol_type = other DNA
aaaattatatacctaagaaatg

SEQ ID NO: 151489 - DNA, 22 bp, synthetic construct
  misc_feature 1..22: note = chemically synthesized
  source 1..22: mol_type = other DNA
tatacctaagaaatgacaaaac

SEQ ID NO: 151490 - DNA, 22 bp, synthetic construct
  misc_feature 1..22: note = chemically synthesized
  source 1..22: mol_type = other DNA
agaaatgacaaaaccaagattt

SEQ ID NO: 151491 - DNA, 22 bp, synthetic construct
  misc_feature 1..22: note = chemically synthesized
  source 1..22: mol_type = other DNA
gaaaccagttctcactgaccag

SEQ ID NO: 151492 - DNA, 22 bp, synthetic construct
  misc_feature 1..22: note = chemically synthesized
  source 1..22: mol_type = other DNA
aaaccagttctcactgaccaga

SEQ ID NO: 151493 - DNA, 22 bp, synthetic construct
  misc_feature 1..22: note = chemically synthesized
  source 1..22: mol_type = other DNA
tcactgaccagaagatcattct

SEQ ID NO: 151494 - DNA, 22 bp, synthetic construct
  misc_feature 1..22: note = chemically synthesized
  source 1..22: mol_type = other DNA
actgaccagaagatcattcttt

SEQ ID NO: 151495 - DNA, 22 bp, synthetic construct
  misc_feature 1..22: note = chemically synthesized
  source 1..22: mol_type = other DNA
accagaagatcattctttcagc

SEQ ID NO: 151496 - DNA, 22 bp, synthetic construct
  misc_feature 1..22: note = chemically synthesized
  source 1..22: mol_type = other DNA
tttcagctaaggagctaattac

SEQ ID NO: 151497 - DNA, 22 bp, synthetic construct
  misc_feature 1..22: note = chemically synthesized
  source 1..22: mol_type = other DNA
tcagctaaggagctaattactg

SEQ ID NO: 151498 - DNA, 22 bp, synthetic construct
  misc_feature 1..22: note = chemically synthesized
  source 1..22: mol_type = other DNA
cagctaaggagctaattactgc

SEQ ID NO: 151499 - DNA, 22 bp, synthetic construct
  misc_feature 1..22: note = chemically synthesized
  source 1..22: mol_type = other DNA
agctaaggagctaattactgcg

SEQ ID NO: 151500 - DNA, 22 bp, synthetic construct
  misc_feature 1..22: note = chemically synthesized
  source 1..22: mol_type = other DNA
aggagctaattactgcgttcct

SEQ ID NO: 151501 - DNA, 22 bp, synthetic construct
  misc_feature 1..22: note = chemically synthesized
  source 1..22: mol_type = other DNA
attactgcgttccttcatagtt

SEQ ID NO: 151502 - DNA, 22 bp, synthetic construct
  misc_feature 1..22: note = chemically synthesized
  source 1..22: mol_type = other DNA
ctgcgttccttcatagtttttt

SEQ ID NO: 151503 - DNA, 22 bp, synthetic construct
  misc_feature 1..22: note = chemically synthesized
  source 1..22: mol_type = other DNA
cgttccttcatagttttttttt

SEQ ID NO: 151504 - DNA, 22 bp, synthetic construct
  misc_feature 1..22: note = chemically synthesized
  source 1..22: mol_type = other DNA
cttcatagtttttttttttcct

SEQ ID NO: 151505 - DNA, 22 bp, synthetic construct
  misc_feature 1..22: note = chemically synthesized
  source 1..22: mol_type = other DNA
catagtttttttttttcctctc

SEQ ID NO: 151506 - DNA, 22 bp, synthetic construct
  misc_feature 1..22: note = chemically synthesized
  source 1..22: mol_type = other DNA
atagtttttttttttcctctca

SEQ ID NO: 151507 - DNA, 22 bp, synthetic construct
  misc_feature 1..22: note = chemically synthesized
  source 1..22: mol_type = other DNA
ttttttttcctctcaggtattc

SEQ ID NO: 151508 - DNA, 22 bp, synthetic construct
  misc_feature 1..22: note = chemically synthesized
  source 1..22: mol_type = other DNA
tttttttcctctcaggtattcc

SEQ ID NO: 151509 - DNA, 22 bp, synthetic construct
  misc_feature 1..22: note = chemically synthesized
  source 1..22: mol_type = other DNA
ttttttcctctcaggtattccc

SEQ ID NO: 151510 - DNA, 22 bp, synthetic construct
  misc_feature 1..22: note = chemically synthesized
  source 1..22: mol_type = other DNA
tttttcctctcaggtattccct

SEQ ID NO: 151511 - DNA, 22 bp, synthetic construct
  misc_feature 1..22: note = chemically synthesized
  source 1..22: mol_type = other DNA
ttttcctctcaggtattccctg

SEQ ID NO: 151512 - DNA, 22 bp, synthetic construct
  misc_feature 1..22: note = chemically synthesized
  source 1..22: mol_type = other DNA
tttcctctcaggtattccctga

SEQ ID NO: 151513 - DNA, 22 bp, synthetic construct
  misc_feature 1..22: note = chemically synthesized
  source 1..22: mol_type = other DNA
ttcctctcaggtattccctgaa

SEQ ID NO: 151514 - DNA, 22 bp, synthetic construct
  misc_feature 1..22: note = chemically synthesized
  source 1..22: mol_type = other DNA
tcctctcaggtattccctgaaa

SEQ ID NO: 151515 - DNA, 22 bp, synthetic construct
  misc_feature 1..22: note = chemically synthesized
  source 1..22: mol_type = other DNA
cctctcaggtattccctgaaat

SEQ ID NO: 151516 - DNA, 22 bp, synthetic construct
  misc_feature 1..22: note = chemically synthesized
  source 1..22: mol_type = other DNA
ctctcaggtattccctgaaata

SEQ ID NO: 151517 - DNA, 22 bp, synthetic construct
  misc_feature 1..22: note = chemically synthesized
  source 1..22: mol_type = other DNA
tcaggtattccctgaaatatgc

SEQ ID NO: 151518 - DNA, 22 bp, synthetic construct
  misc_feature 1..22: note = chemically synthesized
  source 1..22: mol_type = other DNA
aggtattccctgaaatatgcat

SEQ ID NO: 151519 - DNA, 22 bp, synthetic construct
  misc_feature 1..22: note = chemically synthesized
  source 1..22: mol_type = other DNA
cctgaaatatgcattttcttgg

SEQ ID NO: 151520 - DNA, 22 bp, synthetic construct
  misc_feature 1..22: note = chemically synthesized
  source 1..22: mol_type = other DNA
aaatatgcattttcttggtcct

SEQ ID NO: 151521 - DNA, 22 bp, synthetic construct
  misc_feature 1..22: note = chemically synthesized
  source 1..22: mol_type = other DNA
tcttggtcctactctactcaaa

SEQ ID NO: 151522 - DNA, 22 bp, synthetic construct
  misc_feature 1..22: note = chemically synthesized
  source 1..22: mol_type = other DNA
cttggtcctactctactcaaat

SEQ ID NO: 151523 - DNA, 22 bp, synthetic construct
  misc_feature 1..22: note = chemically synthesized
  source 1..22: mol_type = other DNA
ttggtcctactctactcaaatt

SEQ ID NO: 151524 - DNA, 22 bp, synthetic construct
  misc_feature 1..22: note = chemically synthesized
  source 1..22: mol_type = other DNA
ggtcctactctactcaaatttc

SEQ ID NO: 151525 - DNA, 22 bp, synthetic construct
  misc_feature 1..22: note = chemically synthesized
  source 1..22: mol_type = other DNA
gtcctactctactcaaatttca

SEQ ID NO: 151526 - DNA, 22 bp, synthetic construct
  misc_feature 1..22: note = chemically synthesized
  source 1..22: mol_type = other DNA
ctctactcaaatttcaaaccac

SEQ ID NO: 151527 - DNA, 22 bp, synthetic construct
  misc_feature 1..22: note = chemically synthesized
  source 1..22: mol_type = other DNA
tactcaaatttcaaaccactat

SEQ ID NO: 151528 - DNA, 22 bp, synthetic construct
  misc_feature 1..22: note = chemically synthesized
  source 1..22: mol_type = other DNA
ctcaaatttcaaaccactatta

SEQ ID NO: 151529 - DNA, 22 bp, synthetic construct
  misc_feature 1..22: note = chemically synthesized
  source 1..22: mol_type = other DNA
aaatttcaaaccactattattt

SEQ ID NO: 151530 - DNA, 22 bp, synthetic construct
  misc_feature 1..22: note = chemically synthesized
  source 1..22: mol_type = other DNA
caaaccactattatttcatgcc

SEQ ID NO: 151531 - DNA, 22 bp, synthetic construct
  misc_feature 1..22: note = chemically synthesized
  source 1..22: mol_type = other DNA
aaaccactattatttcatgccc

SEQ ID NO: 151532 - DNA, 22 bp, synthetic construct
  misc_feature 1..22: note = chemically synthesized
  source 1..22: mol_type = other DNA
ttatttcatgcccttcaataac

SEQ ID NO: 151533 - DNA, 22 bp, synthetic construct
  misc_feature 1..22: note = chemically synthesized
  source 1..22: mol_type = other DNA
tttcatgcccttcaataacttc

SEQ ID NO: 151534 - DNA, 22 bp, synthetic construct
  misc_feature 1..22: note = chemically synthesized
  source 1..22: mol_type = other DNA
catgcccttcaataacttctaa

SEQ ID NO: 151535 - DNA, 22 bp, synthetic construct
  misc_feature 1..22: note = chemically synthesized
  source 1..22: mol_type = other DNA
atgcccttcaataacttctaac

SEQ ID NO: 151536 - DNA, 22 bp, synthetic construct
  misc_feature 1..22: note = chemically synthesized
  source 1..22: mol_type = other DNA
caataacttctaaccggttcta

SEQ ID NO: 151537 - DNA, 22 bp, synthetic construct
  misc_feature 1..22: note = chemically synthesized
  source 1..22: mol_type = other DNA
aataacttctaaccggttctat

SEQ ID NO: 151538 - DNA, 22 bp, synthetic construct
  misc_feature 1..22: note = chemically synthesized
  source 1..22: mol_type = other DNA
ctaaccggttctattttcctat

SEQ ID NO: 151539 - DNA, 22 bp, synthetic construct
  misc_feature 1..22: note = chemically synthesized
  source 1..22: mol_type = other DNA
taaccggttctattttcctatt

SEQ ID NO: 151540 - DNA, 22 bp, synthetic construct
  misc_feature 1..22: note = chemically synthesized
  source 1..22: mol_type = other DNA
accggttctattttcctatttg

SEQ ID NO: 151541 - DNA, 22 bp, synthetic construct
  misc_feature 1..22: note = chemically synthesized
  source 1..22: mol_type = other DNA
tattttcctatttgtgtcttgc

SEQ ID NO: 151542 - DNA, 22 bp, synthetic construct
  misc_feature 1..22: note = chemically synthesized
  source 1..22: mol_type = other DNA
ttttcctatttgtgtcttgcaa

SEQ ID NO: 151543 - DNA, 22 bp, synthetic construct
  misc_feature 1..22: note = chemically synthesized
  source 1..22: mol_type = other DNA
tcctatttgtgtcttgcaacat

SEQ ID NO: 151544 - DNA, 22 bp, synthetic construct
  misc_feature 1..22: note = chemically synthesized
  source 1..22: mol_type = other DNA
cctatttgtgtcttgcaacatg

SEQ ID NO: 151545 - DNA, 22 bp, synthetic construct
  misc_feature 1..22: note = chemically synthesized
  source 1..22: mol_type = other DNA
ctatttgtgtcttgcaacatgg

SEQ ID NO: 151546 - DNA, 22 bp, synthetic construct
  misc_feature 1..22: note = chemically synthesized
  source 1..22: mol_type = other DNA
tttgtgtcttgcaacatgggat

SEQ ID NO: 151547 - DNA, 22 bp, synthetic construct
  misc_feature 1..22: note = chemically synthesized
  source 1..22: mol_type = other DNA
gtgtcttgcaacatgggataat

SEQ ID NO: 151548 - DNA, 22 bp, synthetic construct
  misc_feature 1..22: note = chemically synthesized
  source 1..22: mol_type = other DNA
tgtcttgcaacatgggataata

SEQ ID NO: 151549 - DNA, 22 bp, synthetic construct
  misc_feature 1..22: note = chemically synthesized
  source 1..22: mol_type = other DNA
gcaacatgggataataggttct

SEQ ID NO: 151550 - DNA, 22 bp, synthetic construct
  misc_feature 1..22: note = chemically synthesized
  source 1..22: mol_type = other DNA
caacatgggataataggttctg

SEQ ID NO: 151551 - DNA, 22 bp, synthetic construct
  misc_feature 1..22: note = chemically synthesized
  source 1..22: mol_type = other DNA
tggcatgagacagcccgggctc

SEQ ID NO: 151552 - DNA, 22 bp, synthetic construct
  misc_feature 1..22: note = chemically synthesized
  source 1..22: mol_type = other DNA
gcatgagacagcccgggctcta

SEQ ID NO: 151553 - DNA, 22 bp, synthetic construct
  misc_feature 1..22: note = chemically synthesized
  source 1..22: mol_type = other DNA
tactctcaggtccataagttaa

SEQ ID NO: 151554 - DNA, 22 bp, synthetic construct
  misc_feature 1..22: note = chemically synthesized
  source 1..22: mol_type = other DNA
ctctcaggtccataagttaata

SEQ ID NO: 151555 - DNA, 22 bp, synthetic construct
  misc_feature 1..22: note = chemically synthesized
  source 1..22: mol_type = other DNA
tcaggtccataagttaatagct

SEQ ID NO: 151556 - DNA, 22 bp, synthetic construct
  misc_feature 1..22: note = chemically synthesized
  source 1..22: mol_type = other DNA
aggtccataagttaatagcttt

SEQ ID NO: 151557 - DNA, 22 bp, synthetic construct
  misc_feature 1..22: note = chemically synthesized
  source 1..22: mol_type = other DNA
atagctttgttttgaggataag

SEQ ID NO: 151558 - DNA, 22 bp, synthetic construct
  misc_feature 1..22: note = chemically synthesized
  source 1..22: mol_type = other DNA
tgttttgaggataagttacttc

SEQ ID NO: 151559 - DNA, 22 bp, synthetic construct
  misc_feature 1..22: note = chemically synthesized
  source 1..22: mol_type = other DNA
gttttgaggataagttacttct

SEQ ID NO: 151560 - DNA, 22 bp, synthetic construct
  misc_feature 1..22: note = chemically synthesized
  source 1..22: mol_type = other DNA
ttttgaggataagttacttctc

SEQ ID NO: 151561 - DNA, 22 bp, synthetic construct
  misc_feature 1..22: note = chemically synthesized
  source 1..22: mol_type = other DNA
tgaggataagttacttctctat

SEQ ID NO: 151562 - DNA, 22 bp, synthetic construct
  misc_feature 1..22: note = chemically synthesized
  source 1..22: mol_type = other DNA
gaggataagttacttctctatg

SEQ ID NO: 151563 - DNA, 22 bp, synthetic construct
  misc_feature 1..22: note = chemically synthesized
  source 1..22: mol_type = other DNA
aggataagttacttctctatgc

SEQ ID NO: 151564 - DNA, 22 bp, synthetic construct
  misc_feature 1..22: note = chemically synthesized
  source 1..22: mol_type = other DNA
cttctctatgccttacattcct

SEQ ID NO: 151565 - DNA, 22 bp, synthetic construct
  misc_feature 1..22: note = chemically synthesized
  source 1..22: mol_type = other DNA
ctctatgccttacattcctcaa

SEQ ID NO: 151566 - DNA, 22 bp, synthetic construct
  misc_feature 1..22: note = chemically synthesized
  source 1..22: mol_type = other DNA
tctatgccttacattcctcaat

SEQ ID NO: 151567 - DNA, 22 bp, synthetic construct
  misc_feature 1..22: note = chemically synthesized
  source 1..22: mol_type = other DNA
tatgccttacattcctcaataa

SEQ ID NO: 151568 - DNA, 22 bp, synthetic construct
  misc_feature 1..22: note = chemically synthesized
  source 1..22: mol_type = other DNA
tgccttacattcctcaataata

SEQ ID NO: 151569 - DNA, 22 bp, synthetic construct
  misc_feature 1..22: note = chemically synthesized
  source 1..22: mol_type = other DNA
acattcctcaataataaattaa

SEQ ID NO: 151570 - DNA, 22 bp, synthetic construct
  misc_feature 1..22: note = chemically synthesized
  source 1..22: mol_type = other DNA
cattcctcaataataaattaag

SEQ ID NO: 151571 - DNA, 22 bp, synthetic construct
  misc_feature 1..22: note = chemically synthesized
  source 1..22: mol_type = other DNA
ctcaataataaattaagagcta

SEQ ID NO: 151572 - DNA, 22 bp, synthetic construct
  misc_feature 1..22: note = chemically synthesized
  source 1..22: mol_type = other DNA
aataataaattaagagctataa

SEQ ID NO: 151573 - DNA, 22 bp, synthetic construct
  misc_feature 1..22: note = chemically synthesized
  source 1..22: mol_type = other DNA
agagctataatggaatctactt

SEQ ID NO: 151574 - DNA, 22 bp, synthetic construct
  misc_feature 1..22: note = chemically synthesized
  source 1..22: mol_type = other DNA
taatggaatctactttataaat

SEQ ID NO: 151575 - DNA, 22 bp, synthetic construct
  misc_feature 1..22: note = chemically synthesized
  source 1..22: mol_type = other DNA
ctttataaatttcttatagtga

SEQ ID NO: 151576 - DNA, 22 bp, synthetic construct
  misc_feature 1..22: note = chemically synthesized
  source 1..22: mol_type = other DNA
tataaatttcttatagtgagta

SEQ ID NO: 151577 - DNA, 22 bp, synthetic construct
  misc_feature 1..22: note = chemically synthesized
  source 1..22: mol_type = other DNA
ataaatttcttatagtgagtaa

SEQ ID NO: 151578 - DNA, 22 bp, synthetic construct
  misc_feature 1..22: note = chemically synthesized
  source 1..22: mol_type = other DNA
taaatttcttatagtgagtaaa

SEQ ID NO: 151579 - DNA, 22 bp, synthetic construct
  misc_feature 1..22: note = chemically synthesized
  source 1..22: mol_type = other DNA
cttatagtgagtaaattaacat

SEQ ID NO: 151580 - DNA, 22 bp, synthetic construct
  misc_feature 1..22: note = chemically synthesized
  source 1..22: mol_type = other DNA
ttatagtgagtaaattaacata

SEQ ID NO: 151581 - DNA, 22 bp, synthetic construct
  misc_feature 1..22: note = chemically synthesized
  source 1..22: mol_type = other DNA
atagtgagtaaattaacataaa

SEQ ID NO: 151582 - DNA, 22 bp, synthetic construct
  misc_feature 1..22: note = chemically synthesized
  source 1..22: mol_type = other DNA
tagtgagtaaattaacataaat

SEQ ID NO: 151583 - DNA, 22 bp, synthetic construct
  misc_feature 1..22: note = chemically synthesized
  source 1..22: mol_type = other DNA
acataaattccttcgaaaaatg

SEQ ID NO: 151584 - DNA, 22 bp, synthetic construct
  misc_feature 1..22: note = chemically synthesized
  source 1..22: mol_type = other DNA
cttcgaaaaatgacaaaccaaa

SEQ ID NO: 151585 - DNA, 22 bp, synthetic construct
  misc_feature 1..22: note = chemically synthesized
  source 1..22: mol_type = other DNA
cgaaaaatgacaaaccaaataa

SEQ ID NO: 151586 - DNA, 22 bp, synthetic construct
  misc_feature 1..22: note = chemically synthesized
  source 1..22: mol_type = other DNA
gaaaaatgacaaaccaaataag

SEQ ID NO: 151587 - DNA, 22 bp, synthetic construct
  misc_feature 1..22: note = chemically synthesized
  source 1..22: mol_type = other DNA
ccagtaaatattaactttttat

SEQ ID NO: 151588 - DNA, 22 bp, synthetic construct
  misc_feature 1..22: note = chemically synthesized
  source 1..22: mol_type = other DNA
actttttatcatgatgatcatg

SEQ ID NO: 151589 - DNA, 22 bp, synthetic construct
  misc_feature 1..22: note = chemically synthesized
  source 1..22: mol_type = other DNA
tttatcatgatgatcatggtga

SEQ ID NO: 151590 - DNA, 22 bp, synthetic construct
  misc_feature 1..22: note = chemically synthesized
  source 1..22: mol_type = other DNA
ttatcatgatgatcatggtgat

SEQ ID NO: 151591 - DNA, 22 bp, synthetic construct
  misc_feature 1..22: note = chemically synthesized
  source 1..22: mol_type = other DNA
tatcatgatgatcatggtgata

SEQ ID NO: 151592 - DNA, 22 bp, synthetic construct
  misc_feature 1..22: note = chemically synthesized
  source 1..22: mol_type = other DNA
atcatgatgatcatggtgatat

SEQ ID NO: 151593 - DNA, 22 bp, synthetic construct
  misc_feature 1..22: note = chemically synthesized
  source 1..22: mol_type = other DNA
tcatgatgatcatggtgatatt

SEQ ID NO: 151594 - DNA, 22 bp, synthetic construct
  misc_feature 1..22: note = chemically synthesized
  source 1..22: mol_type = other DNA
ataataaaactaaaattataat

SEQ ID NO: 151595 - DNA, 22 bp, synthetic construct
  misc_feature 1..22: note = chemically synthesized
  source 1..22: mol_type = other DNA
aaattataatttttttcttcac

SEQ ID NO: 151596 - DNA, 22 bp, synthetic construct
  misc_feature 1..22: note = chemically synthesized
  source 1..22: mol_type = other DNA
taatttttttcttcacctatag

SEQ ID NO: 151597 - DNA, 22 bp, synthetic construct
  misc_feature 1..22: note = chemically synthesized
  source 1..22: mol_type = other DNA
ttttcttcacctatagccacag

SEQ ID NO: 151598 - DNA, 22 bp, synthetic construct
  misc_feature 1..22: note = chemically synthesized
  source 1..22: mol_type = other DNA
tttcttcacctatagccacagt

SEQ ID NO: 151599 - DNA, 22 bp, synthetic construct
  misc_feature 1..22: note = chemically synthesized
  source 1..22: mol_type = other DNA
ttcttcacctatagccacagtc

SEQ ID NO: 151600 - DNA, 22 bp, synthetic construct
  misc_feature 1..22: note = chemically synthesized
  source 1..22: mol_type = other DNA
tcttcacctatagccacagtca

SEQ ID NO: 151601 - DNA, 22 bp, synthetic construct
  misc_feature 1..22: note = chemically synthesized
  source 1..22: mol_type = other DNA
cttcacctatagccacagtcag

SEQ ID NO: 151602 - DNA, 22 bp, synthetic construct
  misc_feature 1..22: note = chemically synthesized
  source 1..22: mol_type = other DNA
ttcacctatagccacagtcagc

SEQ ID NO: 151603 - DNA, 22 bp, synthetic construct
  misc_feature 1..22: note = chemically synthesized
  source 1..22: mol_type = other DNA
cacctatagccacagtcagctt

SEQ ID NO: 151604 - DNA, 22 bp, synthetic construct
  misc_feature 1..22: note = chemically synthesized
  source 1..22: mol_type = other DNA
acctatagccacagtcagcttc

SEQ ID NO: 151605 - DNA, 22 bp, synthetic construct
  misc_feature 1..22: note = chemically synthesized
  source 1..22: mol_type = other DNA
tagccacagtcagcttctcaaa

SEQ ID NO: 151606 - DNA, 22 bp, synthetic construct
  misc_feature 1..22: note = chemically synthesized
  source 1..22: mol_type = other DNA
ctcaaagacaaatatgattatg

SEQ ID NO: 151607 - DNA, 22 bp, synthetic construct
  misc_feature 1..22: note = chemically synthesized
  source 1..22: mol_type = other DNA
tcaaagacaaatatgattatgc

SEQ ID NO: 151608 - DNA, 22 bp, synthetic construct
  misc_feature 1..22: note = chemically synthesized
  source 1..22: mol_type = other DNA
aaagacaaatatgattatgcct

SEQ ID NO: 151609 - DNA, 22 bp, synthetic construct
  misc_feature 1..22: note = chemically synthesized
  source 1..22: mol_type = other DNA
tgcctcacctttttatgatcta

SEQ ID NO: 151610 - DNA, 22 bp, synthetic construct
  misc_feature 1..22: note = chemically synthesized
  source 1..22: mol_type = other DNA
acctttttatgatctaatagct

SEQ ID NO: 151611 - DNA, 22 bp, synthetic construct
  misc_feature 1..22: note = chemically synthesized
  source 1..22: mol_type = other DNA
tttatgatctaatagctactaa

SEQ ID NO: 151612 - DNA, 22 bp, synthetic construct
  misc_feature 1..22: note = chemically synthesized
  source 1..22: mol_type = other DNA
ttatgatctaatagctactaat

SEQ ID NO: 151613 - DNA, 22 bp, synthetic construct
  misc_feature 1..22: note = chemically synthesized
  source 1..22: mol_type = other DNA
tatgatctaatagctactaatt

SEQ ID NO: 151614 - DNA, 22 bp, synthetic construct
  misc_feature 1..22: note = chemically synthesized
  source 1..22: mol_type = other DNA
atgatctaatagctactaattt

SEQ ID NO: 151615 - DNA, 22 bp, synthetic construct
  misc_feature 1..22: note = chemically synthesized
  source 1..22: mol_type = other DNA
tgatctaatagctactaatttc

SEQ ID NO: 151616 - DNA, 22 bp, synthetic construct
  misc_feature 1..22: note = chemically synthesized
  source 1..22: mol_type = other DNA
atagctactaatttctccacgc

SEQ ID NO: 151617 - DNA, 22 bp, synthetic construct
  misc_feature 1..22: note = chemically synthesized
  source 1..22: mol_type = other DNA
ctaatttctccacgctgacgtt

SEQ ID NO: 151618 - DNA, 22 bp, synthetic construct
  misc_feature 1..22: note = chemically synthesized
  source 1..22: mol_type = other DNA
atttctccacgctgacgtttac

SEQ ID NO: 151619 - DNA, 22 bp, synthetic construct
  misc_feature 1..22: note = chemically synthesized
  source 1..22: mol_type = other DNA
ctccacgctgacgtttaccaca

SEQ ID NO: 151620 - DNA, 22 bp, synthetic construct
  misc_feature 1..22: note = chemically synthesized
  source 1..22: mol_type = other DNA
tccacgctgacgtttaccacag

SEQ ID NO: 151621 - DNA, 22 bp, synthetic construct
  misc_feature 1..22: note = chemically synthesized
  source 1..22: mol_type = other DNA
cacgctgacgtttaccacagaa

SEQ ID NO: 151622 - DNA, 22 bp, synthetic construct
  misc_feature 1..22: note = chemically synthesized
  source 1..22: mol_type = other DNA
acgtttaccacagaacctggac

SEQ ID NO: 151623 - DNA, 22 bp, synthetic construct
  misc_feature 1..22: note = chemically synthesized
  source 1..22: mol_type = other DNA
accacagaacctggacataggt

SEQ ID NO: 151624 - DNA, 22 bp, synthetic construct
  misc_feature 1..22: note = chemically synthesized
  source 1..22: mol_type = other DNA
ccacagaacctggacataggtg

SEQ ID NO: 151625 - DNA, 22 bp, synthetic construct
  misc_feature 1..22: note = chemically synthesized
  source 1..22: mol_type = other DNA
gacataggtgttgcacacacta

SEQ ID NO: 151626 - DNA, 22 bp, synthetic construct
  misc_feature 1..22: note = chemically synthesized
  source 1..22: mol_type = other DNA
cacacactatgatctctaataa

SEQ ID NO: 151627 - DNA, 22 bp, synthetic construct
  misc_feature 1..22: note = chemically synthesized
  source 1..22: mol_type = other DNA
tgatctctaataaataaataaa

SEQ ID NO: 151628 - DNA, 22 bp, synthetic construct
  misc_feature 1..22: note = chemically synthesized
  source 1..22: mol_type = other DNA
taataaataaataaaataaata

SEQ ID NO: 151629 - DNA, 22 bp, synthetic construct
  misc_feature 1..22: note = chemically synthesized
  source 1..22: mol_type = other DNA
ataaataaataaaataaataaa

SEQ ID NO: 151630 - DNA, 22 bp, synthetic construct
  misc_feature 1..22: note = chemically synthesized
  source 1..22: mol_type = other DNA
agtgaatatgttatatgctacg

SEQ ID NO: 151631 - DNA, 22 bp, synthetic construct
  misc_feature 1..22: note = chemically synthesized
  source 1..22: mol_type = other DNA
tatgctacggcaccagtggtct

SEQ ID NO: 151632 - DNA, 22 bp, synthetic construct
  misc_feature 1..22: note = chemically synthesized
  source 1..22: mol_type = other DNA
cggcaccagtggtctttctggg

SEQ ID NO: 151633 - DNA, 22 bp, synthetic construct
  misc_feature 1..22: note = chemically synthesized
  source 1..22: mol_type = other DNA
tctgggtattgtacacttgccc

SEQ ID NO: 151634 - DNA, 22 bp, synthetic construct
  misc_feature 1..22: note = chemically synthesized
  source 1..22: mol_type = other DNA
ctgggtattgtacacttgcccc

SEQ ID NO: 151635 - DNA, 22 bp, synthetic construct
  misc_feature 1..22: note = chemically synthesized
  source 1..22: mol_type = other DNA
tgggtattgtacacttgcccca

SEQ ID NO: 151636 - DNA, 22 bp, synthetic construct
  misc_feature 1..22: note = chemically synthesized
  source 1..22: mol_type = other DNA
ggtattgtacacttgccccatt

SEQ ID NO: 151637 - DNA, 22 bp, synthetic construct
  misc_feature 1..22: note = chemically synthesized
  source 1..22: mol_type = other DNA
tacacttgccccattctaggac

SEQ ID NO: 151638 - DNA, 22 bp, synthetic construct
  misc_feature 1..22: note = chemically synthesized
  source 1..22: mol_type = other DNA
gccccattctaggacaatggtt

SEQ ID NO: 151639 - DNA, 22 bp, synthetic construct
  misc_feature 1..22: note = chemically synthesized
  source 1..22: mol_type = other DNA
ccccattctaggacaatggttc

SEQ ID NO: 151640 - DNA, 22 bp, synthetic construct
  misc_feature 1..22: note = chemically synthesized
  source 1..22: mol_type = other DNA
taggacaatggttccttctgat

SEQ ID NO: 151641 - DNA, 22 bp, synthetic construct
  misc_feature 1..22: note = chemically synthesized
  source 1..22: mol_type = other DNA
ggacaatggttccttctgatta

SEQ ID NO: 151642 - DNA, 22 bp, synthetic construct
  misc_feature 1..22: note = chemically synthesized
  source 1..22: mol_type = other DNA
cttctgattagttaccttttcc

SEQ ID NO: 151643 - DNA, 22 bp, synthetic construct
  misc_feature 1..22: note = chemically synthesized
  source 1..22: mol_type = other DNA
ctgattagttaccttttccagt

SEQ ID NO: 151644 - DNA, 22 bp, synthetic construct
  misc_feature 1..22: note = chemically synthesized
  source 1..22: mol_type = other DNA
tgattagttaccttttccagtc

SEQ ID NO: 151645 - DNA, 22 bp, synthetic construct
  misc_feature 1..22: note = chemically synthesized
  source 1..22: mol_type = other DNA
attagttaccttttccagtctg

SEQ ID NO: 151646 - DNA, 22 bp, synthetic construct
  misc_feature 1..22: note = chemically synthesized
  source 1..22: mol_type = other DNA
gttaccttttccagtctgagag

SEQ ID NO: 151647 - DNA, 22 bp, synthetic construct
  misc_feature 1..22: note = chemically synthesized
  source 1..22: mol_type = other DNA
ccttttccagtctgagagacat

SEQ ID NO: 151648 - DNA, 22 bp, synthetic construct
  misc_feature 1..22: note = chemically synthesized
  source 1..22: mol_type = other DNA
ttccagtctgagagacatgcct

SEQ ID NO: 151649 - DNA, 22 bp, synthetic construct
  misc_feature 1..22: note = chemically synthesized
  source 1..22: mol_type = other DNA
tccagtctgagagacatgcctg

SEQ ID NO: 151650 - DNA, 22 bp, synthetic construct
  misc_feature 1..22: note = chemically synthesized
  source 1..22: mol_type = other DNA
ccagtctgagagacatgcctgg

SEQ ID NO: 151651 - DNA, 22 bp, synthetic construct
  misc_feature 1..22: note = chemically synthesized
  source 1..22: mol_type = other DNA
cagtctgagagacatgcctggc

SEQ ID NO: 151652 - DNA, 22 bp, synthetic construct
  misc_feature 1..22: note = chemically synthesized
  source 1..22: mol_type = other DNA
agagacatgcctggctcacacc

SEQ ID NO: 151653 - DNA, 22 bp, synthetic construct
  misc_feature 1..22: note = chemically synthesized
  source 1..22: mol_type = other DNA
gctcacacctgatttgtaaggc

SEQ ID NO: 151654 - DNA, 22 bp, synthetic construct
  misc_feature 1..22: note = chemically synthesized
  source 1..22: mol_type = other DNA
acacctgatttgtaaggcaatg

SEQ ID NO: 151655 - DNA, 22 bp, synthetic construct
  misc_feature 1..22: note = chemically synthesized
  source 1..22: mol_type = other DNA
atttgtaaggcaatggagatgg

SEQ ID NO: 151656 - DNA, 22 bp, synthetic construct
  misc_feature 1..22: note = chemically synthesized
  source 1..22: mol_type = other DNA
gtaaggcaatggagatggagac

SEQ ID NO: 151657 - DNA, 22 bp, synthetic construct
  misc_feature 1..22: note = chemically synthesized
  source 1..22: mol_type = other DNA
taaggcaatggagatggagaca

SEQ ID NO: 151658 - DNA, 22 bp, synthetic construct
  misc_feature 1..22: note = chemically synthesized
  source 1..22: mol_type = other DNA
ttatatccaaaagtacatagct

SEQ ID NO: 151659 - DNA, 22 bp, synthetic construct
  misc_feature 1..22: note = chemically synthesized
  source 1..22: mol_type = other DNA
atatccaaaagtacatagctcc

SEQ ID NO: 151660 - DNA, 22 bp, synthetic construct
  misc_feature 1..22: note = chemically synthesized
  source 1..22: mol_type = other DNA
tatccaaaagtacatagctccg

SEQ ID NO: 151661 - DNA, 22 bp, synthetic construct
  misc_feature 1..22: note = chemically synthesized
  source 1..22: mol_type = other DNA
cggtagcttagataataaacct

SEQ ID NO: 151662 - DNA, 22 bp, synthetic construct
  misc_feature 1..22: note = chemically synthesized
  source 1..22: mol_type = other DNA
agataataaacctttgtcacct

SEQ ID NO: 151663 - DNA, 22 bp, synthetic construct
  misc_feature 1..22: note = chemically synthesized
  source 1..22: mol_type = other DNA
gataataaacctttgtcacctc

SEQ ID NO: 151664 - DNA, 22 bp, synthetic construct
  misc_feature 1..22: note = chemically synthesized
  source 1..22: mol_type = other DNA
tgtcacctctagagaattctaa

SEQ ID NO: 151665 - DNA, 22 bp, synthetic construct
  misc_feature 1..22: note = chemically synthesized
  source 1..22: mol_type = other DNA
gtcacctctagagaattctaaa

SEQ ID NO: 151666 - DNA, 22 bp, synthetic construct
  misc_feature 1..22: note = chemically synthesized
  source 1..22: mol_type = other DNA
tcacctctagagaattctaaaa

SEQ ID NO: 151667 - DNA, 22 bp, synthetic construct
  misc_feature 1..22: note = chemically synthesized
  source 1..22: mol_type = other DNA
tagagaattctaaaaatccaca

SEQ ID NO: 151668 - DNA, 22 bp, synthetic construct
  misc_feature 1..22: note = chemically synthesized
  source 1..22: mol_type = other DNA
gagaattctaaaaatccacaga

SEQ ID NO: 151669 - DNA, 22 bp, synthetic construct
  misc_feature 1..22: note = chemically synthesized
  source 1..22: mol_type = other DNA
taaaaatccacagatttagaaa

SEQ ID NO: 151670 - DNA, 22 bp, synthetic construct
  misc_feature 1..22: note = chemically synthesized
  source 1..22: mol_type = other DNA
aaaatccacagatttagaaatt

SEQ ID NO: 151671 - DNA, 22 bp, synthetic construct
  misc_feature 1..22: note = chemically synthesized
  source 1..22: mol_type = other DNA
agaaattctaggaatccaagaa

SEQ ID NO: 151672 - DNA, 22 bp, synthetic construct
  misc_feature 1..22: note = chemically synthesized
  source 1..22: mol_type = other DNA
gaaattctaggaatccaagaaa

SEQ ID NO: 151673 - DNA, 22 bp, synthetic construct
  misc_feature 1..22: note = chemically synthesized
  source 1..22: mol_type = other DNA
taggaatccaagaaattacaat

SEQ ID NO: 151674 - DNA, 22 bp, synthetic construct
  misc_feature 1..22: note = chemically synthesized
  source 1..22: mol_type = other DNA
ggaatccaagaaattacaattt

SEQ ID NO: 151675 - DNA, 22 bp, synthetic construct
  misc_feature 1..22: note = chemically synthesized
  source 1..22: mol_type = other DNA
caattttagatctactacaatt

SEQ ID NO: 151676 - DNA, 22 bp, synthetic construct
  misc_feature 1..22: note = chemically synthesized
  source 1..22: mol_type = other DNA
tagatctactacaatttcacaa

SEQ ID NO: 151677 - DNA, 22 bp, synthetic construct
  misc_feature 1..22: note = chemically synthesized
  source 1..22: mol_type = other DNA
agatctactacaatttcacaat

SEQ ID NO: 151678 - DNA, 22 bp, synthetic construct
  misc_feature 1..22: note = chemically synthesized
  source 1..22: mol_type = other DNA
gatctactacaatttcacaata

SEQ ID NO: 151679 - DNA, 22 bp, synthetic construct
  misc_feature 1..22: note = chemically synthesized
  source 1..22: mol_type = other DNA
ctacaatttcacaatataacaa

SEQ ID NO: 151680 - DNA, 22 bp, synthetic construct
  misc_feature 1..22: note = chemically synthesized
  source 1..22: mol_type = other DNA
caatttcacaatataacaataa

SEQ ID NO: 151681 - DNA, 22 bp, synthetic construct
  misc_feature 1..22: note = chemically synthesized
  source 1..22: mol_type = other DNA
cacaatataacaataaccaata

SEQ ID NO: 151682 - DNA, 22 bp, synthetic construct
  misc_feature 1..22: note = chemically synthesized
  source 1..22: mol_type = other DNA
acaatataacaataaccaataa

SEQ ID NO: 151683 - DNA, 22 bp, synthetic construct
  misc_feature 1..22: note = chemically synthesized
  source 1..22: mol_type = other DNA
tatttacataaataaaagatgg

SEQ ID NO: 151684 - DNA, 22 bp, synthetic construct
  misc_feature 1..22: note = chemically synthesized
  source 1..22: mol_type = other DNA
atttacataaataaaagatggg

SEQ ID NO: 151685 - DNA, 22 bp, synthetic construct
  misc_feature 1..22: note = chemically synthesized
  source 1..22: mol_type = other DNA
tttacataaataaaagatgggt

SEQ ID NO: 151686 - DNA, 22 bp, synthetic construct
  misc_feature 1..22: note = chemically synthesized
  source 1..22: mol_type = other DNA
acataaataaaagatgggtttg

SEQ ID NO: 151687 - DNA, 22 bp, synthetic construct
  misc_feature 1..22: note = chemically synthesized
  source 1..22: mol_type = other DNA
cataaataaaagatgggtttgt

SEQ ID NO: 151688 - DNA, 22 bp, synthetic construct
  misc_feature 1..22: note = chemically synthesized
  source 1..22: mol_type = other DNA
gtcacacaatttaaaaatctag

SEQ ID NO: 151689 - DNA, 22 bp, synthetic construct
  misc_feature 1..22: note = chemically synthesized
  source 1..22: mol_type = other DNA
tcacacaatttaaaaatctagg

SEQ ID NO: 151690 - DNA, 22 bp, synthetic construct
  misc_feature 1..22: note = chemically synthesized
  source 1..22: mol_type = other DNA
aaaaatctagggtcgaaagcca

SEQ ID NO: 151691 - DNA, 22 bp, synthetic construct
  misc_feature 1..22: note = chemically synthesized
  source 1..22: mol_type = other DNA
aaaatctagggtcgaaagccac

SEQ ID NO: 151692 - DNA, 22 bp, synthetic construct
  misc_feature 1..22: note = chemically synthesized
  source 1..22: mol_type = other DNA
gggtcgaaagccacagcaaagg

SEQ ID NO: 151693 - DNA, 22 bp, synthetic construct
  misc_feature 1..22: note = chemically synthesized
  source 1..22: mol_type = other DNA
ctggcactatatcacaatagat

SEQ ID NO: 151694 - DNA, 22 bp, synthetic construct
  misc_feature 1..22: note = chemically synthesized
  source 1..22: mol_type = other DNA
gcactatatcacaatagatgac

SEQ ID NO: 151695 - DNA, 22 bp, synthetic construct
  misc_feature 1..22: note = chemically synthesized
  source 1..22: mol_type = other DNA
tatcacaatagatgacacctgc

SEQ ID NO: 151696 - DNA, 22 bp, synthetic construct
  misc_feature 1..22: note = chemically synthesized
  source 1..22: mol_type = other DNA
catagagaaagcaaagtggtca

SEQ ID NO: 151697 - DNA, 22 bp, synthetic construct
  misc_feature 1..22: note = chemically synthesized
  source 1..22: mol_type = other DNA
gtcactgattgcctcaaataat

SEQ ID NO: 151698 - DNA, 22 bp, synthetic construct
  misc_feature 1..22: note = chemically synthesized
  source 1..22: mol_type = other DNA
attgcctcaaataatccctgtg

SEQ ID NO: 151699 - DNA, 22 bp, synthetic construct
  misc_feature 1..22: note = chemically synthesized
  source 1..22: mol_type = other DNA
cctcaaataatccctgtgggga

SEQ ID NO: 151700 - DNA, 22 bp, synthetic construct
  misc_feature 1..22: note = chemically synthesized
  source 1..22: mol_type = other DNA
aaataatccctgtggggatgtc

SEQ ID NO: 151701 - DNA, 22 bp, synthetic construct
  misc_feature 1..22: note = chemically synthesized
  source 1..22: mol_type = other DNA
tggggatgtctactcttttgta

SEQ ID NO: 151702 - DNA, 22 bp, synthetic construct
  misc_feature 1..22: note = chemically synthesized
  source 1..22: mol_type = other DNA
ctcttttgtattccatcagctt

SEQ ID NO: 151703 - DNA, 22 bp, synthetic construct
  misc_feature 1..22: note = chemically synthesized
  source 1..22: mol_type = other DNA
ttttgtattccatcagcttttt

SEQ ID NO: 151704 - DNA, 22 bp, synthetic construct
  misc_feature 1..22: note = chemically synthesized
  source 1..22: mol_type = other DNA
ttgtattccatcagcttttttc

SEQ ID NO: 151705 - DNA, 22 bp, synthetic construct
  misc_feature 1..22: note = chemically synthesized
  source 1..22: mol_type = other DNA
tgtattccatcagcttttttcc

SEQ ID NO: 151706 - DNA, 22 bp, synthetic construct
  misc_feature 1..22: note = chemically synthesized
  source 1..22: mol_type = other DNA
gtattccatcagcttttttccc

SEQ ID NO: 151707 - DNA, 22 bp, synthetic construct
  misc_feature 1..22: note = chemically synthesized
  source 1..22: mol_type = other DNA
tattccatcagcttttttccca

SEQ ID NO: 151708 - DNA, 22 bp, synthetic construct
  misc_feature 1..22: note = chemically synthesized
  source 1..22: mol_type = other DNA
catcagcttttttcccagtaac

SEQ ID NO: 151709 - DNA, 22 bp, synthetic construct
  misc_feature 1..22: note = chemically synthesized
  source 1..22: mol_type = other DNA
ttttcccagtaacaacacatcc

SEQ ID NO: 151710 - DNA, 22 bp, synthetic construct
  misc_feature 1..22: note = chemically synthesized
  source 1..22: mol_type = other DNA
tttcccagtaacaacacatcct

SEQ ID NO: 151711 - DNA, 22 bp, synthetic construct
  misc_feature 1..22: note = chemically synthesized
  source 1..22: mol_type = other DNA
ttcccagtaacaacacatccta

SEQ ID NO: 151712 - DNA, 22 bp, synthetic construct
  misc_feature 1..22: note = chemically synthesized
  source 1..22: mol_type = other DNA
tcccagtaacaacacatcctag

SEQ ID NO: 151713 - DNA, 22 bp, synthetic construct
  misc_feature 1..22: note = chemically synthesized
  source 1..22: mol_type = other DNA
cccagtaacaacacatcctagc

SEQ ID NO: 151714 - DNA, 22 bp, synthetic construct
  misc_feature 1..22: note = chemically synthesized
  source 1..22: mol_type = other DNA
ccagtaacaacacatcctagca

SEQ ID NO: 151715 - DNA, 22 bp, synthetic construct
  misc_feature 1..22: note = chemically synthesized
  source 1..22: mol_type = other DNA
gcaataatatcctgacgagttt

SEQ ID NO: 151716 - DNA, 22 bp, synthetic construct
  misc_feature 1..22: note = chemically synthesized
  source 1..22: mol_type = other DNA
acgagtttctataaaaaaaaaa

SEQ ID NO: 151717 - DNA, 22 bp, synthetic construct
  misc_feature 1..22: note = chemically synthesized
  source 1..22: mol_type = other DNA
ctataaaaaaaaaaaactcccc

SEQ ID NO: 151718 - DNA, 22 bp, synthetic construct
  misc_feature 1..22: note = chemically synthesized
  source 1..22: mol_type = other DNA
tataaaaaaaaaaaactcccct

SEQ ID NO: 151719 - DNA, 22 bp, synthetic construct
  misc_feature 1..22: note = chemically synthesized
  source 1..22: mol_type = other DNA
taaaaaaaaaaaactcccctcc

SEQ ID NO: 151720 - DNA, 22 bp, synthetic construct
  misc_feature 1..22: note = chemically synthesized
  source 1..22: mol_type = other DNA
ccctcctaagatacagtatctt

SEQ ID NO: 151721 - DNA, 22 bp, synthetic construct
  misc_feature 1..22: note = chemically synthesized
  source 1..22: mol_type = other DNA
ctaagatacagtatctttgtgg

SEQ ID NO: 151722 - DNA, 22 bp, synthetic construct
  misc_feature 1..22: note = chemically synthesized
  source 1..22: mol_type = other DNA
agatacagtatctttgtggttg

SEQ ID NO: 151723 - DNA, 22 bp, synthetic construct
  misc_feature 1..22: note = chemically synthesized
  source 1..22: mol_type = other DNA
tgtggttgcatccccagccatc

SEQ ID NO: 151724 - DNA, 22 bp, synthetic construct
  misc_feature 1..22: note = chemically synthesized
  source 1..22: mol_type = other DNA
gtggttgcatccccagccatcc

SEQ ID NO: 151725 - DNA, 22 bp, synthetic construct
  misc_feature 1..22: note = chemically synthesized
  source 1..22: mol_type = other DNA
tggttgcatccccagccatccc

SEQ ID NO: 151726 - DNA, 22 bp, synthetic construct
  misc_feature 1..22: note = chemically synthesized
  source 1..22: mol_type = other DNA
catccccagccatccctcattt

SEQ ID NO: 151727 - DNA, 22 bp, synthetic construct
  misc_feature 1..22: note = chemically synthesized
  source 1..22: mol_type = other DNA
atttggttgaggttggaatttc

SEQ ID NO: 151728 - DNA, 22 bp, synthetic construct
  misc_feature 1..22: note = chemically synthesized
  source 1..22: mol_type = other DNA
ggttgaggttggaatttcaatg

SEQ ID NO: 151729 - DNA, 22 bp, synthetic construct
  misc_feature 1..22: note = chemically synthesized
  source 1..22: mol_type = other DNA
gttgaggttggaatttcaatgg

SEQ ID NO: 151730 - DNA, 22 bp, synthetic construct
  misc_feature 1..22: note = chemically synthesized
  source 1..22: mol_type = other DNA
aggttggaatttcaatgggtgg

SEQ ID NO: 151731 - DNA, 22 bp, synthetic construct
  misc_feature 1..22: note = chemically synthesized
  source 1..22: mol_type = other DNA
gaatttcaatgggtgggttgaa

SEQ ID NO: 151732 - DNA, 22 bp, synthetic construct
  misc_feature 1..22: note = chemically synthesized
  source 1..22: mol_type = other DNA
caatgggtgggttgaatttttc

SEQ ID NO: 151733 - DNA, 22 bp, synthetic construct
  misc_feature 1..22: note = chemically synthesized
  source 1..22: mol_type = other DNA
aatgggtgggttgaatttttcc

SEQ ID NO: 151734 - DNA, 22 bp, synthetic construct
  misc_feature 1..22: note = chemically synthesized
  source 1..22: mol_type = other DNA
aatttttccctaaacaaacttg

SEQ ID NO: 151735 - DNA, 22 bp, synthetic construct
  misc_feature 1..22: note = chemically synthesized
  source 1..22: mol_type = other DNA
ttccctaaacaaacttgccatg

SEQ ID NO: 151736 - DNA, 22 bp, synthetic construct
  misc_feature 1..22: note = chemically synthesized
  source 1..22: mol_type = other DNA
tccctaaacaaacttgccatgg

SEQ ID NO: 151737 - DNA, 22 bp, synthetic construct
  misc_feature 1..22: note = chemically synthesized
  source 1..22: mol_type = other DNA
ccctaaacaaacttgccatggt

SEQ ID NO: 151738 - DNA, 22 bp, synthetic construct
  misc_feature 1..22: note = chemically synthesized
  source 1..22: mol_type = other DNA
cctaaacaaacttgccatggta

SEQ ID NO: 151739 - DNA, 22 bp, synthetic construct
  misc_feature 1..22: note = chemically synthesized
  source 1..22: mol_type = other DNA
aacaaacttgccatggtaaaat

SEQ ID NO: 151740 - DNA, 22 bp, synthetic construct
  misc_feature 1..22: note = chemically synthesized
  source 1..22: mol_type = other DNA
gccatggtaaaatcaaggctag

SEQ ID NO: 151741 - DNA, 22 bp, synthetic construct
  misc_feature 1..22: note = chemically synthesized
  source 1..22: mol_type = other DNA
ccatggtaaaatcaaggctagc

SEQ ID NO: 151742 - DNA, 22 bp, synthetic construct
  misc_feature 1..22: note = chemically synthesized
  source 1..22: mol_type = other DNA
gcattactgttcacacaaggca

SEQ ID NO: 151743 - DNA, 22 bp, synthetic construct
  misc_feature 1..22: note = chemically synthesized
  source 1..22: mol_type = other DNA
ctgttcacacaaggcactgtgc

SEQ ID NO: 151744 - DNA, 22 bp, synthetic construct
  misc_feature 1..22: note = chemically synthesized
  source 1..22: mol_type = other DNA
ttcacacaaggcactgtgctaa

SEQ ID NO: 151745 - DNA, 22 bp, synthetic construct
  misc_feature 1..22: note = chemically synthesized
  source 1..22: mol_type = other DNA
acacaaggcactgtgctaagat

SEQ ID NO: 151746 - DNA, 22 bp, synthetic construct
  misc_feature 1..22: note = chemically synthesized
  source 1..22: mol_type = other DNA
tgctaagatccccatccttata

SEQ ID NO: 151747 - DNA, 22 bp, synthetic construct
  misc_feature 1..22: note = chemically synthesized
  source 1..22: mol_type = other DNA
agatccccatccttatagcaat

SEQ ID NO: 151748 - DNA, 22 bp, synthetic construct
  misc_feature 1..22: note = chemically synthesized
  source 1..22: mol_type = other DNA
atagcaatgggagggctcatag

SEQ ID NO: 151749 - DNA, 22 bp, synthetic construct
  misc_feature 1..22: note = chemically synthesized
  source 1..22: mol_type = other DNA
tagcaatgggagggctcatagg

SEQ ID NO: 151750 - DNA, 22 bp, synthetic construct
  misc_feature 1..22: note = chemically synthesized
  source 1..22: mol_type = other DNA
ataggcaagtcatgtcatgcag

SEQ ID NO: 151751 - DNA, 22 bp, synthetic construct
  misc_feature 1..22: note = chemically synthesized
  source 1..22: mol_type = other DNA
catcatcccttcttgtctttgg

SEQ ID NO: 151752 - DNA, 22 bp, synthetic construct
  misc_feature 1..22: note = chemically synthesized
  source 1..22: mol_type = other DNA
atcatcccttcttgtctttggg

SEQ ID NO: 151753 - DNA, 22 bp, synthetic construct
  misc_feature 1..22: note = chemically synthesized
  source 1..22: mol_type = other DNA
cttgtctttggggacttgggtc

SEQ ID NO: 151754 - DNA, 22 bp, synthetic construct
  misc_feature 1..22: note = chemically synthesized
  source 1..22: mol_type = other DNA
ttgtctttggggacttgggtct

SEQ ID NO: 151755 - DNA, 22 bp, synthetic construct
  misc_feature 1..22: note = chemically synthesized
  source 1..22: mol_type = other DNA
gtctttggggacttgggtctct

SEQ ID NO: 151756 - DNA, 22 bp, synthetic construct
  misc_feature 1..22: note = chemically synthesized
  source 1..22: mol_type = other DNA
tctttggggacttgggtctctc

SEQ ID NO: 151757 - DNA, 22 bp, synthetic construct
  misc_feature 1..22: note = chemically synthesized
  source 1..22: mol_type = other DNA
tggggacttgggtctctccggt

SEQ ID NO: 151758 - DNA, 22 bp, synthetic construct
  misc_feature 1..22: note = chemically synthesized
  source 1..22: mol_type = other DNA
ggggacttgggtctctccggtt

SEQ ID NO: 151759 - DNA, 22 bp, synthetic construct
  misc_feature 1..22: note = chemically synthesized
  source 1..22: mol_type = other DNA
gggacttgggtctctccggttg

SEQ ID NO: 151760 - DNA, 22 bp, synthetic construct
  misc_feature 1..22: note = chemically synthesized
  source 1..22: mol_type = other DNA
gggtctctccggttgtatagga

SEQ ID NO: 151761 - DNA, 22 bp, synthetic construct
  misc_feature 1..22: note = chemically synthesized
  source 1..22: mol_type = other DNA
ggtctctccggttgtataggag

SEQ ID NO: 151762 - DNA, 22 bp, synthetic construct
  misc_feature 1..22: note = chemically synthesized
  source 1..22: mol_type = other DNA
tccggttgtataggagatttcg

SEQ ID NO: 151763 - DNA, 22 bp, synthetic construct
  misc_feature 1..22: note = chemically synthesized
  source 1..22: mol_type = other DNA
cggttgtataggagatttcgcc

SEQ ID NO: 151764 - DNA, 22 bp, synthetic construct
  misc_feature 1..22: note = chemically synthesized
  source 1..22: mol_type = other DNA
tataggagatttcgccaggcat

SEQ ID NO: 151765 - DNA, 22 bp, synthetic construct
  misc_feature 1..22: note = chemically synthesized
  source 1..22: mol_type = other DNA
cgccaggcatttgaatccttca

SEQ ID NO: 151766 - DNA, 22 bp, synthetic construct
  misc_feature 1..22: note = chemically synthesized
  source 1..22: mol_type = other DNA
gccaggcatttgaatccttcac

SEQ ID NO: 151767 - DNA, 22 bp, synthetic construct
  misc_feature 1..22: note = chemically synthesized
  source 1..22: mol_type = other DNA
gaatccttcactgctagtcatc

SEQ ID NO: 151768 - DNA, 22 bp, synthetic construct
  misc_feature 1..22: note = chemically synthesized
  source 1..22: mol_type = other DNA
aatccttcactgctagtcatcc

SEQ ID NO: 151769 - DNA, 22 bp, synthetic construct
  misc_feature 1..22: note = chemically synthesized
  source 1..22: mol_type = other DNA
cactgctagtcatcctggactc

SEQ ID NO: 151770 - DNA, 22 bp, synthetic construct
  misc_feature 1..22: note = chemically synthesized
  source 1..22: mol_type = other DNA
actgctagtcatcctggactct

SEQ ID NO: 151771 - DNA, 22 bp, synthetic construct
  misc_feature 1..22: note = chemically synthesized
  source 1..22: mol_type = other DNA
ctagtcatcctggactctgtgg

SEQ ID NO: 151772 - DNA, 22 bp, synthetic construct
  misc_feature 1..22: note = chemically synthesized
  source 1..22: mol_type = other DNA
gtcatcctggactctgtggtgt

SEQ ID NO: 151773 - DNA, 22 bp, synthetic construct
  misc_feature 1..22: note = chemically synthesized
  source 1..22: mol_type = other DNA
gactctgtggtgtacaatatcc

SEQ ID NO: 151774 - DNA, 22 bp, synthetic construct
  misc_feature 1..22: note = chemically synthesized
  source 1..22: mol_type = other DNA
tgtggtgtacaatatccatctc

SEQ ID NO: 151775 - DNA, 22 bp, synthetic construct
  misc_feature 1..22: note = chemically synthesized
  source 1..22: mol_type = other DNA
tggtgtacaatatccatctctc

SEQ ID NO: 151776 - DNA, 22 bp, synthetic construct
  misc_feature 1..22: note = chemically synthesized
  source 1..22: mol_type = other DNA
tcctatgttctgaggtcagaat

SEQ ID NO: 151777 - DNA, 22 bp, synthetic construct
  misc_feature 1..22: note = chemically synthesized
  source 1..22: mol_type = other DNA
ctatgttctgaggtcagaatga

SEQ ID NO: 151778 - DNA, 22 bp, synthetic construct
  misc_feature 1..22: note = chemically synthesized
  source 1..22: mol_type = other DNA
tgttctgaggtcagaatgacct

SEQ ID NO: 151779 - DNA, 22 bp, synthetic construct
  misc_feature 1..22: note = chemically synthesized
  source 1..22: mol_type = other DNA
tgaggtcagaatgacctctctc

SEQ ID NO: 151780 - DNA, 22 bp, synthetic construct
  misc_feature 1..22: note = chemically synthesized
  source 1..22: mol_type = other DNA
aggtcagaatgacctctctctt

SEQ ID NO: 151781 - DNA, 22 bp, synthetic construct
  misc_feature 1..22: note = chemically synthesized
  source 1..22: mol_type = other DNA
tctcttaaccagttgtctgggc

SEQ ID NO: 151782 - DNA, 22 bp, synthetic construct
  misc_feature 1..22: note = chemically synthesized
  source 1..22: mol_type = other DNA
tcttaaccagttgtctgggccc

SEQ ID NO: 151783 - DNA, 22 bp, synthetic construct
  misc_feature 1..22: note = chemically synthesized
  source 1..22: mol_type = other DNA
ttaaccagttgtctgggcccag

SEQ ID NO: 151784 - DNA, 22 bp, synthetic construct
  misc_feature 1..22: note = chemically synthesized
  source 1..22: mol_type = other DNA
aaccagttgtctgggcccaggc

SEQ ID NO: 151785 - DNA, 22 bp, synthetic construct
  misc_feature 1..22: note = chemically synthesized
  source 1..22: mol_type = other DNA
accagttgtctgggcccaggct

SEQ ID NO: 151786 - DNA, 22 bp, synthetic construct
  misc_feature 1..22: note = chemically synthesized
  source 1..22: mol_type = other DNA
tctgggcccaggctccattatt

SEQ ID NO: 151787 - DNA, 22 bp, synthetic construct
  misc_feature 1..22: note = chemically synthesized
  source 1..22: mol_type = other DNA
ggcccaggctccattattgata

SEQ ID NO: 151788 - DNA, 22 bp, synthetic construct
  misc_feature 1..22: note = chemically synthesized
  source 1..22: mol_type = other DNA
cattattgatatagtcatgatc

SEQ ID NO: 151789 - DNA, 22 bp, synthetic construct
  misc_feature 1..22: note = chemically synthesized
  source 1..22: mol_type = other DNA
ttgatatagtcatgatctcctc

SEQ ID NO: 151790 - DNA, 22 bp, synthetic construct
  misc_feature 1..22: note = chemically synthesized
  source 1..22: mol_type = other DNA
atatagtcatgatctcctctgt

SEQ ID NO: 151791 - DNA, 22 bp, synthetic construct
  misc_feature 1..22: note = chemically synthesized
  source 1..22: mol_type = other DNA
ctctgttggggatgaagtaggc

SEQ ID NO: 151792 - DNA, 22 bp, synthetic construct
  misc_feature 1..22: note = chemically synthesized
  source 1..22: mol_type = other DNA
tgttggggatgaagtaggcaaa

SEQ ID NO: 151793 - DNA, 22 bp, synthetic construct
  misc_feature 1..22: note = chemically synthesized
  source 1..22: mol_type = other DNA
ttggggatgaagtaggcaaatt

SEQ ID NO: 151794 - DNA, 22 bp, synthetic construct
  misc_feature 1..22: note = chemically synthesized
  source 1..22: mol_type = other DNA
gggatgaagtaggcaaatttga

SEQ ID NO: 151795 - DNA, 22 bp, synthetic construct
  misc_feature 1..22: note = chemically synthesized
  source 1..22: mol_type = other DNA
gaggcactaatttacttctcac

SEQ ID NO: 151796 - DNA, 22 bp, synthetic construct
  misc_feature 1..22: note = chemically synthesized
  source 1..22: mol_type = other DNA
aggcactaatttacttctcaca

SEQ ID NO: 151797 - DNA, 22 bp, synthetic construct
  misc_feature 1..22: note = chemically synthesized
  source 1..22: mol_type = other DNA
atttacttctcacattcttttc

SEQ ID NO: 151798 - DNA, 22 bp, synthetic construct
  misc_feature 1..22: note = chemically synthesized
  source 1..22: mol_type = other DNA
acttctcacattcttttcttga

SEQ ID NO: 151799 - DNA, 22 bp, synthetic construct
  misc_feature 1..22: note = chemically synthesized
  source 1..22: mol_type = other DNA
cttctcacattcttttcttgaa

SEQ ID NO: 151800 - DNA, 22 bp, synthetic construct
  misc_feature 1..22: note = chemically synthesized
  source 1..22: mol_type = other DNA
ctcacattcttttcttgaacag

SEQ ID NO: 151801 - DNA, 22 bp, synthetic construct
  misc_feature 1..22: note = chemically synthesized
  source 1..22: mol_type = other DNA
tcacattcttttcttgaacaga

SEQ ID NO: 151802 - DNA, 22 bp, synthetic construct
  misc_feature 1..22: note = chemically synthesized
  source 1..22: mol_type = other DNA
acattcttttcttgaacagaaa

SEQ ID NO: 151803 - DNA, 22 bp, synthetic construct
  misc_feature 1..22: note = chemically synthesized
  source 1..22: mol_type = other DNA
ttttcttgaacagaaagataga

SEQ ID NO: 151804 - DNA, 22 bp, synthetic construct
  misc_feature 1..22: note = chemically synthesized
  source 1..22: mol_type = other DNA
ttcttgaacagaaagatagaac

SEQ ID NO: 151805 - DNA, 22 bp, synthetic construct
  misc_feature 1..22: note = chemically synthesized
  source 1..22: mol_type = other DNA
tcttgaacagaaagatagaact

SEQ ID NO: 151806 - DNA, 22 bp, synthetic construct
  misc_feature 1..22: note = chemically synthesized
  source 1..22: mol_type = other DNA
cttgaacagaaagatagaactg

SEQ ID NO: 151807 - DNA, 22 bp, synthetic construct
  misc_feature 1..22: note = chemically synthesized
  source 1..22: mol_type = other DNA
ttgaacagaaagatagaactgg

SEQ ID NO: 151808 - DNA, 22 bp, synthetic construct
  misc_feature 1..22: note = chemically synthesized
  source 1..22: mol_type = other DNA
gaacagaaagatagaactggaa

SEQ ID NO: 151809 - DNA, 22 bp, synthetic construct
  misc_feature 1..22: note = chemically synthesized
  source 1..22: mol_type = other DNA
aacagaaagatagaactggaaa

SEQ ID NO: 151810 - DNA, 22 bp, synthetic construct
  misc_feature 1..22: note = chemically synthesized
  source 1..22: mol_type = other DNA
gaaattaatagtagtatataaa

SEQ ID NO: 151811 - DNA, 22 bp, synthetic construct
  misc_feature 1..22: note = chemically synthesized
  source 1..22: mol_type = other DNA
atagtagtatataaattcaaaa

SEQ ID NO: 151812 - DNA, 22 bp, synthetic construct
  misc_feature 1..22: note = chemically synthesized
  source 1..22: mol_type = other DNA
aaaattttagctttaataacat

SEQ ID NO: 151813 - DNA, 22 bp, synthetic construct
  misc_feature 1..22: note = chemically synthesized
  source 1..22: mol_type = other DNA
tagctttaataacatttaatca

SEQ ID NO: 151814 - DNA, 22 bp, synthetic construct
  misc_feature 1..22: note = chemically synthesized
  source 1..22: mol_type = other DNA
agctttaataacatttaatcag

SEQ ID NO: 151815 - DNA, 22 bp, synthetic construct
  misc_feature 1..22: note = chemically synthesized
  source 1..22: mol_type = other DNA
gctttaataacatttaatcaga

SEQ ID NO: 151816 - DNA, 22 bp, synthetic construct
  misc_feature 1..22: note = chemically synthesized
  source 1..22: mol_type = other DNA
taataacatttaatcagacata

SEQ ID NO: 151817 - DNA, 22 bp, synthetic construct
  misc_feature 1..22: note = chemically synthesized
  source 1..22: mol_type = other DNA
aataacatttaatcagacataa

SEQ ID NO: 151818 - DNA, 22 bp, synthetic construct
  misc_feature 1..22: note = chemically synthesized
  source 1..22: mol_type = other DNA
ataacatttaatcagacataaa

SEQ ID NO: 151819 - DNA, 22 bp, synthetic construct
  misc_feature 1..22: note = chemically synthesized
  source 1..22: mol_type = other DNA
aatcagacataaataattatgg

SEQ ID NO: 151820 - DNA, 22 bp, synthetic construct
  misc_feature 1..22: note = chemically synthesized
  source 1..22: mol_type = other DNA
atcagacataaataattatggt

SEQ ID NO: 151821 - DNA, 22 bp, synthetic construct
  misc_feature 1..22: note = chemically synthesized
  source 1..22: mol_type = other DNA
tggtaatgtgaatttcaataaa

SEQ ID NO: 151822 - DNA, 22 bp, synthetic construct
  misc_feature 1..22: note = chemically synthesized
  source 1..22: mol_type = other DNA
caataaataaattttagttcta

SEQ ID NO: 151823 - DNA, 22 bp, synthetic construct
  misc_feature 1..22: note = chemically synthesized
  source 1..22: mol_type = other DNA
aataaataaattttagttctaa

SEQ ID NO: 151824 - DNA, 22 bp, synthetic construct
  misc_feature 1..22: note = chemically synthesized
  source 1..22: mol_type = other DNA
tagttctaatataagtgtaact

SEQ ID NO: 151825 - DNA, 22 bp, synthetic construct
  misc_feature 1..22: note = chemically synthesized
  source 1..22: mol_type = other DNA
agttctaatataagtgtaactg

SEQ ID NO: 151826 - DNA, 22 bp, synthetic construct
  misc_feature 1..22: note = chemically synthesized
  source 1..22: mol_type = other DNA
gttctaatataagtgtaactgt

SEQ ID NO: 151827 - DNA, 22 bp, synthetic construct
  misc_feature 1..22: note = chemically synthesized
  source 1..22: mol_type = other DNA
taatataagtgtaactgtgtaa

SEQ ID NO: 151828 - DNA, 22 bp, synthetic construct
  misc_feature 1..22: note = chemically synthesized
  source 1..22: mol_type = other DNA
atataagtgtaactgtgtaata

SEQ ID NO: 151829 - DNA, 22 bp, synthetic construct
  misc_feature 1..22: note = chemically synthesized
  source 1..22: mol_type = other DNA
tgtaatattcatactttttctg

SEQ ID NO: 151830 - DNA, 22 bp, synthetic construct
  misc_feature 1..22: note = chemically synthesized
  source 1..22: mol_type = other DNA
atactttttctgaaggctttac

SEQ ID NO: 151831 - DNA, 22 bp, synthetic construct
  misc_feature 1..22: note = chemically synthesized
  source 1..22: mol_type = other DNA
tttctgaaggctttactaattt

SEQ ID NO: 151832 - DNA, 22 bp, synthetic construct
  misc_feature 1..22: note = chemically synthesized
  source 1..22: mol_type = other DNA
ttctgaaggctttactaatttg

SEQ ID NO: 151833 - DNA, 22 bp, synthetic construct
  misc_feature 1..22: note = chemically synthesized
  source 1..22: mol_type = other DNA
tctgaaggctttactaatttga

SEQ ID NO: 151834 - DNA, 22 bp, synthetic construct
  misc_feature 1..22: note = chemically synthesized
  source 1..22: mol_type = other DNA
ctgaaggctttactaatttgat

SEQ ID NO: 151835 - DNA, 22 bp, synthetic construct
  misc_feature 1..22: note = chemically synthesized
  source 1..22: mol_type = other DNA
tgaaggctttactaatttgata

SEQ ID NO: 151836 - DNA, 22 bp, synthetic construct
  misc_feature 1..22: note = chemically synthesized
  source 1..22: mol_type = other DNA
aaggctttactaatttgatatg

SEQ ID NO: 151837 - DNA, 22 bp, synthetic construct
  misc_feature 1..22: note = chemically synthesized
  source 1..22: mol_type = other DNA
tactaatttgatatggcattac

SEQ ID NO: 151838 - DNA, 22 bp, synthetic construct
  misc_feature 1..22: note = chemically synthesized
  source 1..22: mol_type = other DNA
actaatttgatatggcattact

SEQ ID NO: 151839 - DNA, 22 bp, synthetic construct
  misc_feature 1..22: note = chemically synthesized
  source 1..22: mol_type = other DNA
ctaatttgatatggcattactt

SEQ ID NO: 151840 - DNA, 22 bp, synthetic construct
  misc_feature 1..22: note = chemically synthesized
  source 1..22: mol_type = other DNA
atttgatatggcattacttttt

SEQ ID NO: 151841 - DNA, 22 bp, synthetic construct
  misc_feature 1..22: note = chemically synthesized
  source 1..22: mol_type = other DNA
gatatggcattacttttttatt

SEQ ID NO: 151842 - DNA, 22 bp, synthetic construct
  misc_feature 1..22: note = chemically synthesized
  source 1..22: mol_type = other DNA
atatggcattacttttttattg

SEQ ID NO: 151843 - DNA, 22 bp, synthetic construct
  misc_feature 1..22: note = chemically synthesized
  source 1..22: mol_type = other DNA
cttttttattgctgccaaaact

SEQ ID NO: 151844 - DNA, 22 bp, synthetic construct
  misc_feature 1..22: note = chemically synthesized
  source 1..22: mol_type = other DNA
ttttattgctgccaaaactatt

SEQ ID NO: 151845 - DNA, 22 bp, synthetic construct
  misc_feature 1..22: note = chemically synthesized
  source 1..22: mol_type = other DNA
tttattgctgccaaaactattc

SEQ ID NO: 151846 - DNA, 22 bp, synthetic construct
  misc_feature 1..22: note = chemically synthesized
  source 1..22: mol_type = other DNA
ttattgctgccaaaactattct

SEQ ID NO: 151847 - DNA, 22 bp, synthetic construct
  misc_feature 1..22: note = chemically synthesized
  source 1..22: mol_type = other DNA
tattgctgccaaaactattctt

SEQ ID NO: 151848 - DNA, 22 bp, synthetic construct
  misc_feature 1..22: note = chemically synthesized
  source 1..22: mol_type = other DNA
attgctgccaaaactattctta

SEQ ID NO: 151849 - DNA, 22 bp, synthetic construct
  misc_feature 1..22: note = chemically synthesized
  source 1..22: mol_type = other DNA
ttgctgccaaaactattcttat

SEQ ID NO: 151850 - DNA, 22 bp, synthetic construct
  misc_feature 1..22: note = chemically synthesized
  source 1..22: mol_type = other DNA
ctgccaaaactattcttattcc

SEQ ID NO: 151851 - DNA, 22 bp, synthetic construct
  misc_feature 1..22: note = chemically synthesized
  source 1..22: mol_type = other DNA
ccaaaactattcttattccact

SEQ ID NO: 151852 - DNA, 22 bp, synthetic construct
  misc_feature 1..22: note = chemically synthesized
  source 1..22: mol_type = other DNA
ttcttattccactgtgtggtga

SEQ ID NO: 151853 - DNA, 22 bp, synthetic construct
  misc_feature 1..22: note = chemically synthesized
  source 1..22: mol_type = other DNA
ttattccactgtgtggtgatga

SEQ ID NO: 151854 - DNA, 22 bp, synthetic construct
  misc_feature 1..22: note = chemically synthesized
  source 1..22: mol_type = other DNA
attccactgtgtggtgatgaga

SEQ ID NO: 151855 - DNA, 22 bp, synthetic construct
  misc_feature 1..22: note = chemically synthesized
  source 1..22: mol_type = other DNA
ttccactgtgtggtgatgagaa

SEQ ID NO: 151856 - DNA, 22 bp, synthetic construct
  misc_feature 1..22: note = chemically synthesized
  source 1..22: mol_type = other DNA
cactgtgtggtgatgagaaagt

SEQ ID NO: 151857 - DNA, 22 bp, synthetic construct
  misc_feature 1..22: note = chemically synthesized
  source 1..22: mol_type = other DNA
tgtggtgatgagaaagtgagag

SEQ ID NO: 151858 - DNA, 22 bp, synthetic construct
  misc_feature 1..22: note = chemically synthesized
  source 1..22: mol_type = other DNA
tggagatggtgattatagatag

SEQ ID NO: 151859 - DNA, 22 bp, synthetic construct
  misc_feature 1..22: note = chemically synthesized
  source 1..22: mol_type = other DNA
gagatggtgattatagatagct

SEQ ID NO: 151860 - DNA, 22 bp, synthetic construct
  misc_feature 1..22: note = chemically synthesized
  source 1..22: mol_type = other DNA
tagatagcttccctgaagccat

SEQ ID NO: 151861 - DNA, 22 bp, synthetic construct
  misc_feature 1..22: note = chemically synthesized
  source 1..22: mol_type = other DNA
ccctgaagccatagtaaccccc

SEQ ID NO: 151862 - DNA, 22 bp, synthetic construct
  misc_feature 1..22: note = chemically synthesized
  source 1..22: mol_type = other DNA
cctgaagccatagtaaccccct

SEQ ID NO: 151863 - DNA, 22 bp, synthetic construct
  misc_feature 1..22: note = chemically synthesized
  source 1..22: mol_type = other DNA
aagccatagtaaccccctggag

SEQ ID NO: 151864 - DNA, 22 bp, synthetic construct
  misc_feature 1..22: note = chemically synthesized
  source 1..22: mol_type = other DNA
gagaaaaattggacctggagtc

SEQ ID NO: 151865 - DNA, 22 bp, synthetic construct
  misc_feature 1..22: note = chemically synthesized
  source 1..22: mol_type = other DNA
gacctggagtctagcagcctag

SEQ ID NO: 151866 - DNA, 22 bp, synthetic construct
  misc_feature 1..22: note = chemically synthesized
  source 1..22: mol_type = other DNA
gagtctagcagcctaggtatgg

SEQ ID NO: 151867 - DNA, 22 bp, synthetic construct
  misc_feature 1..22: note = chemically synthesized
  source 1..22: mol_type = other DNA
gcagcctaggtatgggtactcg

SEQ ID NO: 151868 - DNA, 22 bp, synthetic construct
  misc_feature 1..22: note = chemically synthesized
  source 1..22: mol_type = other DNA
ggtatgggtactcgatttctta

SEQ ID NO: 151869 - DNA, 22 bp, synthetic construct
  misc_feature 1..22: note = chemically synthesized
  source 1..22: mol_type = other DNA
gatttcttagaaagcctttaca

SEQ ID NO: 151870 - DNA, 22 bp, synthetic construct
  misc_feature 1..22: note = chemically synthesized
  source 1..22: mol_type = other DNA
cttagaaagcctttacaatttc

SEQ ID NO: 151871 - DNA, 22 bp, synthetic construct
  misc_feature 1..22: note = chemically synthesized
  source 1..22: mol_type = other DNA
ttagaaagcctttacaatttcc

SEQ ID NO: 151872 - DNA, 22 bp, synthetic construct
  misc_feature 1..22: note = chemically synthesized
  source 1..22: mol_type = other DNA
agaaagcctttacaatttcctt

SEQ ID NO: 151873 - DNA, 22 bp, synthetic construct
  misc_feature 1..22: note = chemically synthesized
  source 1..22: mol_type = other DNA
gaaagcctttacaatttccttt

SEQ ID NO: 151874 - DNA, 22 bp, synthetic construct
  misc_feature 1..22: note = chemically synthesized
  source 1..22: mol_type = other DNA
tacaatttcctttatcttaaaa

SEQ ID NO: 151875 - DNA, 22 bp, synthetic construct
  misc_feature 1..22: note = chemically synthesized
  source 1..22: mol_type = other DNA
acaatttcctttatcttaaaaa

SEQ ID NO: 151876 - DNA, 22 bp, synthetic construct
  misc_feature 1..22: note = chemically synthesized
  source 1..22: mol_type = other DNA
caatttcctttatcttaaaaat

SEQ ID NO: 151877 - DNA, 22 bp, synthetic construct
  misc_feature 1..22: note = chemically synthesized
  source 1..22: mol_type = other DNA
cctttatcttaaaaataagggt

SEQ ID NO: 151878 - DNA, 22 bp, synthetic construct
  misc_feature 1..22: note = chemically synthesized
  source 1..22: mol_type = other DNA
ctttatcttaaaaataagggta

SEQ ID NO: 151879 - DNA, 22 bp, synthetic construct
  misc_feature 1..22: note = chemically synthesized
  source 1..22: mol_type = other DNA
tatcttaaaaataagggtattg

SEQ ID NO: 151880 - DNA, 22 bp, synthetic construct
  misc_feature 1..22: note = chemically synthesized
  source 1..22: mol_type = other DNA
atcttaaaaataagggtattga

SEQ ID NO: 151881 - DNA, 22 bp, synthetic construct
  misc_feature 1..22: note = chemically synthesized
  source 1..22: mol_type = other DNA
tcttaaaaataagggtattgaa

SEQ ID NO: 151882 - DNA, 22 bp, synthetic construct
  misc_feature 1..22: note = chemically synthesized
  source 1..22: mol_type = other DNA
aaaaataagggtattgaagtag

SEQ ID NO: 151883 - DNA, 22 bp, synthetic construct
  misc_feature 1..22: note = chemically synthesized
  source 1..22: mol_type = other DNA
aaaataagggtattgaagtaga

SEQ ID NO: 151884 - DNA, 22 bp, synthetic construct
  misc_feature 1..22: note = chemically synthesized
  source 1..22: mol_type = other DNA
aagtagaattctagaattttca

SEQ ID NO: 151885 - DNA, 22 bp, synthetic construct
  misc_feature 1..22: note = chemically synthesized
  source 1..22: mol_type = other DNA
tagaattttcagaggacaactt

SEQ ID NO: 151886 - DNA, 22 bp, synthetic construct
  misc_feature 1..22: note = chemically synthesized
  source 1..22: mol_type = other DNA
gaattttcagaggacaacttaa

SEQ ID NO: 151887 - DNA, 22 bp, synthetic construct
  misc_feature 1..22: note = chemically synthesized
  source 1..22: mol_type = other DNA
tcagaggacaacttaaaatatg

SEQ ID NO: 151888 - DNA, 22 bp, synthetic construct
  misc_feature 1..22: note = chemically synthesized
  source 1..22: mol_type = other DNA
cagaggacaacttaaaatatgt

SEQ ID NO: 151889 - DNA, 22 bp, synthetic construct
  misc_feature 1..22: note = chemically synthesized
  source 1..22: mol_type = other DNA
agaggacaacttaaaatatgtg

SEQ ID NO: 151890 - DNA, 22 bp, synthetic construct
  misc_feature 1..22: note = chemically synthesized
  source 1..22: mol_type = other DNA
aaaatatgtgtaatagttttaa

SEQ ID NO: 151891 - DNA, 22 bp, synthetic construct
  misc_feature 1..22: note = chemically synthesized
  source 1..22: mol_type = other DNA
aaatatgtgtaatagttttaat

SEQ ID NO: 151892 - DNA, 22 bp, synthetic construct
  misc_feature 1..22: note = chemically synthesized
  source 1..22: mol_type = other DNA
taattatttatcctcataaatt

SEQ ID NO: 151893 - DNA, 22 bp, synthetic construct
  misc_feature 1..22: note = chemically synthesized
  source 1..22: mol_type = other DNA
aattatttatcctcataaattt

SEQ ID NO: 151894 - DNA, 22 bp, synthetic construct
  misc_feature 1..22: note = chemically synthesized
  source 1..22: mol_type = other DNA
attatttatcctcataaattta

SEQ ID NO: 151895 - DNA, 22 bp, synthetic construct
  misc_feature 1..22: note = chemically synthesized
  source 1..22: mol_type = other DNA
tttatcctcataaatttaactg

SEQ ID NO: 151896 - DNA, 22 bp, synthetic construct
  misc_feature 1..22: note = chemically synthesized
  source 1..22: mol_type = other DNA
atcctcataaatttaactgttc

SEQ ID NO: 151897 - DNA, 22 bp, synthetic construct
  misc_feature 1..22: note = chemically synthesized
  source 1..22: mol_type = other DNA
tcctcataaatttaactgttca

SEQ ID NO: 151898 - DNA, 22 bp, synthetic construct
  misc_feature 1..22: note = chemically synthesized
  source 1..22: mol_type = other DNA
ataaatttaactgttcatttta

SEQ ID NO: 151899 - DNA, 22 bp, synthetic construct
  misc_feature 1..22: note = chemically synthesized
  source 1..22: mol_type = other DNA
aactgttcattttaatatattt

SEQ ID NO: 151900 - DNA, 22 bp, synthetic construct
  misc_feature 1..22: note = chemically synthesized
  source 1..22: mol_type = other DNA
actgttcattttaatatattta

SEQ ID NO: 151901 - DNA, 22 bp, synthetic construct
  misc_feature 1..22: note = chemically synthesized
  source 1..22: mol_type = other DNA
ttcattttaatatatttaagga

SEQ ID NO: 151902 - DNA, 22 bp, synthetic construct
  misc_feature 1..22: note = chemically synthesized
  source 1..22: mol_type = other DNA
attttaatatatttaaggatga

SEQ ID NO: 151903 - DNA, 22 bp, synthetic construct
  misc_feature 1..22: note = chemically synthesized
  source 1..22: mol_type = other DNA
taatatatttaaggatgaattt

SEQ ID NO: 151904 - DNA, 22 bp, synthetic construct
  misc_feature 1..22: note = chemically synthesized
  source 1..22: mol_type = other DNA
aatatatttaaggatgaatttt

SEQ ID NO: 151905 - DNA, 22 bp, synthetic construct
  misc_feature 1..22: note = chemically synthesized
  source 1..22: mol_type = other DNA
atatatttaaggatgaattttt

SEQ ID NO: 151906 - DNA, 22 bp, synthetic construct
  misc_feature 1..22: note = chemically synthesized
  source 1..22: mol_type = other DNA
aaggatgaattttttaaaaagt

SEQ ID NO: 151907 - DNA, 22 bp, synthetic construct
  misc_feature 1..22: note = chemically synthesized
  source 1..22: mol_type = other DNA
aggatgaattttttaaaaagtt

SEQ ID NO: 151908 - DNA, 22 bp, synthetic construct
  misc_feature 1..22: note = chemically synthesized
  source 1..22: mol_type = other DNA
tttaaaaagttgatttcataaa

SEQ ID NO: 151909 - DNA, 22 bp, synthetic construct
  misc_feature 1..22: note = chemically synthesized
  source 1..22: mol_type = other DNA
ttaaaaagttgatttcataaaa

SEQ ID NO: 151910 - DNA, 22 bp, synthetic construct
  misc_feature 1..22: note = chemically synthesized
  source 1..22: mol_type = other DNA
taaaaagttgatttcataaaaa

SEQ ID NO: 151911 - DNA, 22 bp, synthetic construct
  misc_feature 1..22: note = chemically synthesized
  source 1..22: mol_type = other DNA
aaaaagttgatttcataaaaac

SEQ ID NO: 151912 - DNA, 22 bp, synthetic construct
  misc_feature 1..22: note = chemically synthesized
  source 1..22: mol_type = other DNA
aaaagttgatttcataaaaacg

SEQ ID NO: 151913 - DNA, 22 bp, synthetic construct
  misc_feature 1..22: note = chemically synthesized
  source 1..22: mol_type = other DNA
atttcataaaaacgggaataga

SEQ ID NO: 151914 - DNA, 22 bp, synthetic construct
  misc_feature 1..22: note = chemically synthesized
  source 1..22: mol_type = other DNA
cataaaaacgggaatagaaaga

SEQ ID NO: 151915 - DNA, 22 bp, synthetic construct
  misc_feature 1..22: note = chemically synthesized
  source 1..22: mol_type = other DNA
ataaaaacgggaatagaaagat

SEQ ID NO: 151916 - DNA, 22 bp, synthetic construct
  misc_feature 1..22: note = chemically synthesized
  source 1..22: mol_type = other DNA
cataggctgactgagagtgtag

SEQ ID NO: 151917 - DNA, 22 bp, synthetic construct
  misc_feature 1..22: note = chemically synthesized
  source 1..22: mol_type = other DNA
actgagagtgtagaggagggat

SEQ ID NO: 151918 - DNA, 22 bp, synthetic construct
  misc_feature 1..22: note = chemically synthesized
  source 1..22: mol_type = other DNA
agagtgtagaggagggatggga

SEQ ID NO: 151919 - DNA, 22 bp, synthetic construct
  misc_feature 1..22: note = chemically synthesized
  source 1..22: mol_type = other DNA
atcttcagttagactagaggaa

SEQ ID NO: 151920 - DNA, 22 bp, synthetic construct
  misc_feature 1..22: note = chemically synthesized
  source 1..22: mol_type = other DNA
cagttagactagaggaataagt

SEQ ID NO: 151921 - DNA, 22 bp, synthetic construct
  misc_feature 1..22: note = chemically synthesized
  source 1..22: mol_type = other DNA
agttagactagaggaataagtt

SEQ ID NO: 151922 - DNA, 22 bp, synthetic construct
  misc_feature 1..22: note = chemically synthesized
  source 1..22: mol_type = other DNA
gactagaggaataagttttagt

SEQ ID NO: 151923 - DNA, 22 bp, synthetic construct
  misc_feature 1..22: note = chemically synthesized
  source 1..22: mol_type = other DNA
gaggaataagttttagtgatct

SEQ ID NO: 151924 - DNA, 22 bp, synthetic construct
  misc_feature 1..22: note = chemically synthesized
  source 1..22: mol_type = other DNA
tagtgatctctcacactgcata

SEQ ID NO: 151925 - DNA, 22 bp, synthetic construct
  misc_feature 1..22: note = chemically synthesized
  source 1..22: mol_type = other DNA
agtgatctctcacactgcatag

SEQ ID NO: 151926 - DNA, 22 bp, synthetic construct
  misc_feature 1..22: note = chemically synthesized
  source 1..22: mol_type = other DNA
gtgatctctcacactgcatagt

SEQ ID NO: 151927 - DNA, 22 bp, synthetic construct
  misc_feature 1..22: note = chemically synthesized
  source 1..22: mol_type = other DNA
tcacactgcatagtgaacacag

SEQ ID NO: 151928 - DNA, 22 bp, synthetic construct
  misc_feature 1..22: note = chemically synthesized
  source 1..22: mol_type = other DNA
acactgcatagtgaacacagtt

SEQ ID NO: 151929 - DNA, 22 bp, synthetic construct
  misc_feature 1..22: note = chemically synthesized
  source 1..22: mol_type = other DNA
catagtgaacacagttaataat

SEQ ID NO: 151930 - DNA, 22 bp, synthetic construct
  misc_feature 1..22: note = chemically synthesized
  source 1..22: mol_type = other DNA
ataatatattatgtatttaaat

SEQ ID NO: 151931 - DNA, 22 bp, synthetic construct
  misc_feature 1..22: note = chemically synthesized
  source 1..22: mol_type = other DNA
tgtatttaaattaaaaattgct

SEQ ID NO: 151932 - DNA, 22 bp, synthetic construct
  misc_feature 1..22: note = chemically synthesized
  source 1..22: mol_type = other DNA
aaattaaaaattgctaaaaaat

SEQ ID NO: 151933 - DNA, 22 bp, synthetic construct
  misc_feature 1..22: note = chemically synthesized
  source 1..22: mol_type = other DNA
aattaaaaattgctaaaaaata

SEQ ID NO: 151934 - DNA, 22 bp, synthetic construct
  misc_feature 1..22: note = chemically synthesized
  source 1..22: mol_type = other DNA
aaaattgctaaaaaataaatat

SEQ ID NO: 151935 - DNA, 22 bp, synthetic construct
  misc_feature 1..22: note = chemically synthesized
  source 1..22: mol_type = other DNA
ctaaaaaataaatattttatgt

SEQ ID NO: 151936 - DNA, 22 bp, synthetic construct
  misc_feature 1..22: note = chemically synthesized
  source 1..22: mol_type = other DNA
aaaaataaatattttatgttct

SEQ ID NO: 151937 - DNA, 22 bp, synthetic construct
  misc_feature 1..22: note = chemically synthesized
  source 1..22: mol_type = other DNA
tatgttctcaccacaaaaaaag

SEQ ID NO: 151938 - DNA, 22 bp, synthetic construct
  misc_feature 1..22: note = chemically synthesized
  source 1..22: mol_type = other DNA
atgttctcaccacaaaaaaagt

SEQ ID NO: 151939 - DNA, 22 bp, synthetic construct
  misc_feature 1..22: note = chemically synthesized
  source 1..22: mol_type = other DNA
tgttctcaccacaaaaaaagtt

SEQ ID NO: 151940 - DNA, 22 bp, synthetic construct
  misc_feature 1..22: note = chemically synthesized
  source 1..22: mol_type = other DNA
tcaccacaaaaaaagttggaag

SEQ ID NO: 151941 - DNA, 22 bp, synthetic construct
  misc_feature 1..22: note = chemically synthesized
  source 1..22: mol_type = other DNA
accacaaaaaaagttggaaggt

SEQ ID NO: 151942 - DNA, 22 bp, synthetic construct
  misc_feature 1..22: note = chemically synthesized
  source 1..22: mol_type = other DNA
gaaggtgattcatatgctaatt

SEQ ID NO: 151943 - DNA, 22 bp, synthetic construct
  misc_feature 1..22: note = chemically synthesized
  source 1..22: mol_type = other DNA
atatgctaattagcttgataga

SEQ ID NO: 151944 - DNA, 22 bp, synthetic construct
  misc_feature 1..22: note = chemically synthesized
  source 1..22: mol_type = other DNA
attagcttgatagactctctct

SEQ ID NO: 151945 - DNA, 22 bp, synthetic construct
  misc_feature 1..22: note = chemically synthesized
  source 1..22: mol_type = other DNA
gcttgatagactctctctacaa

SEQ ID NO: 151946 - DNA, 22 bp, synthetic construct
  misc_feature 1..22: note = chemically synthesized
  source 1..22: mol_type = other DNA
gatagactctctctacaatgta

SEQ ID NO: 151947 - DNA, 22 bp, synthetic construct
  misc_feature 1..22: note = chemically synthesized
  source 1..22: mol_type = other DNA
atagactctctctacaatgtat

SEQ ID NO: 151948 - DNA, 22 bp, synthetic construct
  misc_feature 1..22: note = chemically synthesized
  source 1..22: mol_type = other DNA
tctctacaatgtatatatagat

SEQ ID NO: 151949 - DNA, 22 bp, synthetic construct
  misc_feature 1..22: note = chemically synthesized
  source 1..22: mol_type = other DNA
tctacaatgtatatatagatca

SEQ ID NO: 151950 - DNA, 22 bp, synthetic construct
  misc_feature 1..22: note = chemically synthesized
  source 1..22: mol_type = other DNA
tacaatgtatatatagatcaaa

SEQ ID NO: 151951 - DNA, 22 bp, synthetic construct
  misc_feature 1..22: note = chemically synthesized
  source 1..22: mol_type = other DNA
caatgtatatatagatcaaaca

SEQ ID NO: 151952 - DNA, 22 bp, synthetic construct
  misc_feature 1..22: note = chemically synthesized
  source 1..22: mol_type = other DNA
tatcccataacatattatatat

SEQ ID NO: 151953 - DNA, 22 bp, synthetic construct
  misc_feature 1..22: note = chemically synthesized
  source 1..22: mol_type = other DNA
tatatattatatatttatatta

SEQ ID NO: 151954 - DNA, 22 bp, synthetic construct
  misc_feature 1..22: note = chemically synthesized
  source 1..22: mol_type = other DNA
tatatttatattatatattatt

SEQ ID NO: 151955 - DNA, 22 bp, synthetic construct
  misc_feature 1..22: note = chemically synthesized
  source 1..22: mol_type = other DNA
atattatatattattattgtat

SEQ ID NO: 151956 - DNA, 22 bp, synthetic construct
  misc_feature 1..22: note = chemically synthesized
  source 1..22: mol_type = other DNA
tattatatattattattgtatc

SEQ ID NO: 151957 - DNA, 22 bp, synthetic construct
  misc_feature 1..22: note = chemically synthesized
  source 1..22: mol_type = other DNA
tatattattattgtatccatta

SEQ ID NO: 151958 - DNA, 22 bp, synthetic construct
  misc_feature 1..22: note = chemically synthesized
  source 1..22: mol_type = other DNA
ttattgtatccattaatatatg

SEQ ID NO: 151959 - DNA, 22 bp, synthetic construct
  misc_feature 1..22: note = chemically synthesized
  source 1..22: mol_type = other DNA
ttgtatccattaatatatgcac

SEQ ID NO: 151960 - DNA, 22 bp, synthetic construct
  misc_feature 1..22: note = chemically synthesized
  source 1..22: mol_type = other DNA
tatccattaatatatgcactta

SEQ ID NO: 151961 - DNA, 22 bp, synthetic construct
  misc_feature 1..22: note = chemically synthesized
  source 1..22: mol_type = other DNA
atatatgcacttattatttgcc

SEQ ID NO: 151962 - DNA, 22 bp, synthetic construct
  misc_feature 1..22: note = chemically synthesized
  source 1..22: mol_type = other DNA
attatttgccaggcaaataaaa

SEQ ID NO: 151963 - DNA, 22 bp, synthetic construct
  misc_feature 1..22: note = chemically synthesized
  source 1..22: mol_type = other DNA
ttatttgccaggcaaataaaaa

SEQ ID NO: 151964 - DNA, 22 bp, synthetic construct
  misc_feature 1..22: note = chemically synthesized
  source 1..22: mol_type = other DNA
tttgccaggcaaataaaaaatg

SEQ ID NO: 151965 - DNA, 22 bp, synthetic construct
  misc_feature 1..22: note = chemically synthesized
  source 1..22: mol_type = other DNA
gccaggcaaataaaaaatgttt

SEQ ID NO: 151966 - DNA, 22 bp, synthetic construct
  misc_feature 1..22: note = chemically synthesized
  source 1..22: mol_type = other DNA
ccaggcaaataaaaaatgtttt

SEQ ID NO: 151967 - DNA, 22 bp, synthetic construct
  misc_feature 1..22: note = chemically synthesized
  source 1..22: mol_type = other DNA
ttaaaatataaatttatttgta

SEQ ID NO: 151968 - DNA, 22 bp, synthetic construct
  misc_feature 1..22: note = chemically synthesized
  source 1..22: mol_type = other DNA
taaaatataaatttatttgtaa

SEQ ID NO: 151969 - DNA, 22 bp, synthetic construct
  misc_feature 1..22: note = chemically synthesized
  source 1..22: mol_type = other DNA
aaaatataaatttatttgtaac

SEQ ID NO: 151970 - DNA, 22 bp, synthetic construct
  misc_feature 1..22: note = chemically synthesized
  source 1..22: mol_type = other DNA
aaatataaatttatttgtaacc

SEQ ID NO: 151971 - DNA, 22 bp, synthetic construct
  misc_feature 1..22: note = chemically synthesized
  source 1..22: mol_type = other DNA
atttgtaacctccttttacttt

SEQ ID NO: 151972 - DNA, 22 bp, synthetic construct
  misc_feature 1..22: note = chemically synthesized
  source 1..22: mol_type = other DNA
tttgtaacctccttttactttt

SEQ ID NO: 151973 - DNA, 22 bp, synthetic construct
  misc_feature 1..22: note = chemically synthesized
  source 1..22: mol_type = other DNA
gtaacctccttttacttttctg

SEQ ID NO: 151974 - DNA, 22 bp, synthetic construct
  misc_feature 1..22: note = chemically synthesized
  source 1..22: mol_type = other DNA
taacctccttttacttttctgc

SEQ ID NO: 151975 - DNA, 22 bp, synthetic construct
  misc_feature 1..22: note = chemically synthesized
  source 1..22: mol_type = other DNA
cttttacttttctgcttggttt

SEQ ID NO: 151976 - DNA, 22 bp, synthetic construct
  misc_feature 1..22: note = chemically synthesized
  source 1..22: mol_type = other DNA
ttacttttctgcttggttttct

SEQ ID NO: 151977 - DNA, 22 bp, synthetic construct
  misc_feature 1..22: note = chemically synthesized
  source 1..22: mol_type = other DNA
tacttttctgcttggttttctt

SEQ ID NO: 151978 - DNA, 22 bp, synthetic construct
  misc_feature 1..22: note = chemically synthesized
  source 1..22: mol_type = other DNA
acttttctgcttggttttcttc

SEQ ID NO: 151979 - DNA, 22 bp, synthetic construct
  misc_feature 1..22: note = chemically synthesized
  source 1..22: mol_type = other DNA
cttttctgcttggttttcttct

SEQ ID NO: 151980 - DNA, 22 bp, synthetic construct
  misc_feature 1..22: note = chemically synthesized
  source 1..22: mol_type = other DNA
ttctgcttggttttcttctttc

SEQ ID NO: 151981 - DNA, 22 bp, synthetic construct
  misc_feature 1..22: note = chemically synthesized
  source 1..22: mol_type = other DNA
tctgcttggttttcttctttca

SEQ ID NO: 151982 - DNA, 22 bp, synthetic construct
  misc_feature 1..22: note = chemically synthesized
  source 1..22: mol_type = other DNA
ctgcttggttttcttctttcat

SEQ ID NO: 151983 - DNA, 22 bp, synthetic construct
  misc_feature 1..22: note = chemically synthesized
  source 1..22: mol_type = other DNA
tgcttggttttcttctttcatt

SEQ ID NO: 151984 - DNA, 22 bp, synthetic construct
  misc_feature 1..22: note = chemically synthesized
  source 1..22: mol_type = other DNA
cttggttttcttctttcattca

SEQ ID NO: 151985 - DNA, 22 bp, synthetic construct
  misc_feature 1..22: note = chemically synthesized
  source 1..22: mol_type = other DNA
ggttttcttctttcattcagtg

SEQ ID NO: 151986 - DNA, 22 bp, synthetic construct
  misc_feature 1..22: note = chemically synthesized
  source 1..22: mol_type = other DNA
gttttcttctttcattcagtgt

SEQ ID NO: 151987 - DNA, 22 bp, synthetic construct
  misc_feature 1..22: note = chemically synthesized
  source 1..22: mol_type = other DNA
tcttctttcattcagtgtttac

SEQ ID NO: 151988 - DNA, 22 bp, synthetic construct
  misc_feature 1..22: note = chemically synthesized
  source 1..22: mol_type = other DNA
cttctttcattcagtgtttacc

SEQ ID NO: 151989 - DNA, 22 bp, synthetic construct
  misc_feature 1..22: note = chemically synthesized
  source 1..22: mol_type = other DNA
ttctttcattcagtgtttacca

SEQ ID NO: 151990 - DNA, 22 bp, synthetic construct
  misc_feature 1..22: note = chemically synthesized
  source 1..22: mol_type = other DNA
ctttcattcagtgtttaccagt

SEQ ID NO: 151991 - DNA, 22 bp, synthetic construct
  misc_feature 1..22: note = chemically synthesized
  source 1..22: mol_type = other DNA
tttcattcagtgtttaccagtt

SEQ ID NO: 151992 - DNA, 22 bp, synthetic construct
  misc_feature 1..22: note = chemically synthesized
  source 1..22: mol_type = other DNA
tcattcagtgtttaccagtttc

SEQ ID NO: 151993 - DNA, 22 bp, synthetic construct
  misc_feature 1..22: note = chemically synthesized
  source 1..22: mol_type = other DNA
cattcagtgtttaccagtttct

SEQ ID NO: 151994 - DNA, 22 bp, synthetic construct
  misc_feature 1..22: note = chemically synthesized
  source 1..22: mol_type = other DNA
attcagtgtttaccagtttctt

SEQ ID NO: 151995 - DNA, 22 bp, synthetic construct
  misc_feature 1..22: note = chemically synthesized
  source 1..22: mol_type = other DNA
agtgtttaccagtttcttatag

SEQ ID NO: 151996 - DNA, 22 bp, synthetic construct
  misc_feature 1..22: note = chemically synthesized
  source 1..22: mol_type = other DNA
accagtttcttatagttaattt

SEQ ID NO: 151997 - DNA, 22 bp, synthetic construct
  misc_feature 1..22: note = chemically synthesized
  source 1..22: mol_type = other DNA
ccagtttcttatagttaatttt

SEQ ID NO: 151998 - DNA, 22 bp, synthetic construct
  misc_feature 1..22: note = chemically synthesized
  source 1..22: mol_type = other DNA
cttatagttaattttattttaa

SEQ ID NO: 151999 - DNA, 22 bp, synthetic construct
  misc_feature 1..22: note = chemically synthesized
  source 1..22: mol_type = other DNA
ttatagttaattttattttaag

SEQ ID NO: 152000 - DNA, 22 bp, synthetic construct
  misc_feature 1..22: note = chemically synthesized
  source 1..22: mol_type = other DNA
atagttaattttattttaagct

SEQ ID NO: 152001 - DNA, 22 bp, synthetic construct
  misc_feature 1..22: note = chemically synthesized
  source 1..22: mol_type = other DNA
tagttaattttattttaagctg

SEQ ID NO: 152002 - DNA, 22 bp, synthetic construct
  misc_feature 1..22: note = chemically synthesized
  source 1..22: mol_type = other DNA
attttattttaagctgtctcac

SEQ ID NO: 152003 - DNA, 22 bp, synthetic construct
  misc_feature 1..22: note = chemically synthesized
  source 1..22: mol_type = other DNA
tattttaagctgtctcacattt

SEQ ID NO: 152004 - DNA, 22 bp, synthetic construct
  misc_feature 1..22: note = chemically synthesized
  source 1..22: mol_type = other DNA
attttaagctgtctcacatttt

SEQ ID NO: 152005 - DNA, 22 bp, synthetic construct
  misc_feature 1..22: note = chemically synthesized
  source 1..22: mol_type = other DNA
ttttaagctgtctcacattttc

SEQ ID NO: 152006 - DNA, 22 bp, synthetic construct
  misc_feature 1..22: note = chemically synthesized
  source 1..22: mol_type = other DNA
taagctgtctcacattttctga

SEQ ID NO: 152007 - DNA, 22 bp, synthetic construct
  misc_feature 1..22: note = chemically synthesized
  source 1..22: mol_type = other DNA
aagctgtctcacattttctgaa

SEQ ID NO: 152008 - DNA, 22 bp, synthetic construct
  misc_feature 1..22: note = chemically synthesized
  source 1..22: mol_type = other DNA
agctgtctcacattttctgaag

SEQ ID NO: 152009 - DNA, 22 bp, synthetic construct
  misc_feature 1..22: note = chemically synthesized
  source 1..22: mol_type = other DNA
tctcacattttctgaagaaaag

SEQ ID NO: 152010 - DNA, 22 bp, synthetic construct
  misc_feature 1..22: note = chemically synthesized
  source 1..22: mol_type = other DNA
acattttctgaagaaaagggaa

SEQ ID NO: 152011 - DNA, 22 bp, synthetic construct
  misc_feature 1..22: note = chemically synthesized
  source 1..22: mol_type = other DNA
tctgaagaaaagggaacatatt

SEQ ID NO: 152012 - DNA, 22 bp, synthetic construct
  misc_feature 1..22: note = chemically synthesized
  source 1..22: mol_type = other DNA
ctgaagaaaagggaacatatta

SEQ ID NO: 152013 - DNA, 22 bp, synthetic construct
  misc_feature 1..22: note = chemically synthesized
  source 1..22: mol_type = other DNA
tgaagaaaagggaacatattaa

SEQ ID NO: 152014 - DNA, 22 bp, synthetic construct
  misc_feature 1..22: note = chemically synthesized
  source 1..22: mol_type = other DNA
aagaaaagggaacatattaaag

SEQ ID NO: 152015 - DNA, 22 bp, synthetic construct
  misc_feature 1..22: note = chemically synthesized
  source 1..22: mol_type = other DNA
aagccaacaaaacaaatacact

SEQ ID NO: 152016 - DNA, 22 bp, synthetic construct
  misc_feature 1..22: note = chemically synthesized
  source 1..22: mol_type = other DNA
tcttgcatgagatgatttatgt

SEQ ID NO: 152017 - DNA, 22 bp, synthetic construct
  misc_feature 1..22: note = chemically synthesized
  source 1..22: mol_type = other DNA
gcatgagatgatttatgtcatg

SEQ ID NO: 152018 - DNA, 22 bp, synthetic construct
  misc_feature 1..22: note = chemically synthesized
  source 1..22: mol_type = other DNA
catgagatgatttatgtcatgg

SEQ ID NO: 152019 - DNA, 22 bp, synthetic construct
  misc_feature 1..22: note = chemically synthesized
  source 1..22: mol_type = other DNA
atgtcatggtacaatcaaatgc

SEQ ID NO: 152020 - DNA, 22 bp, synthetic construct
  misc_feature 1..22: note = chemically synthesized
  source 1..22: mol_type = other DNA
tgtcatggtacaatcaaatgct

SEQ ID NO: 152021 - DNA, 22 bp, synthetic construct
  misc_feature 1..22: note = chemically synthesized
  source 1..22: mol_type = other DNA
taaatcttataaaaacttctca

SEQ ID NO: 152022 - DNA, 22 bp, synthetic construct
  misc_feature 1..22: note = chemically synthesized
  source 1..22: mol_type = other DNA
ataaaaacttctcaaatggtta

SEQ ID NO: 152023 - DNA, 22 bp, synthetic construct
  misc_feature 1..22: note = chemically synthesized
  source 1..22: mol_type = other DNA
taaaaacttctcaaatggttag

SEQ ID NO: 152024 - DNA, 22 bp, synthetic construct
  misc_feature 1..22: note = chemically synthesized
  source 1..22: mol_type = other DNA
ctcaaatggttagatggctaca

SEQ ID NO: 152025 - DNA, 22 bp, synthetic construct
  misc_feature 1..22: note = chemically synthesized
  source 1..22: mol_type = other DNA
tcaaatggttagatggctacag

SEQ ID NO: 152026 - DNA, 22 bp, synthetic construct
  misc_feature 1..22: note = chemically synthesized
  source 1..22: mol_type = other DNA
aaatggttagatggctacagtt

SEQ ID NO: 152027 - DNA, 22 bp, synthetic construct
  misc_feature 1..22: note = chemically synthesized
  source 1..22: mol_type = other DNA
gatggctacagttgaacagatg

SEQ ID NO: 152028 - DNA, 22 bp, synthetic construct
  misc_feature 1..22: note = chemically synthesized
  source 1..22: mol_type = other DNA
cagttgaacagatggaccatgt

SEQ ID NO: 152029 - DNA, 22 bp, synthetic construct
  misc_feature 1..22: note = chemically synthesized
  source 1..22: mol_type = other DNA
aacagatggaccatgtcatata

SEQ ID NO: 152030 - DNA, 22 bp, synthetic construct
  misc_feature 1..22: note = chemically synthesized
  source 1..22: mol_type = other DNA
tttataatgcttctaaggtatg

SEQ ID NO: 152031 - DNA, 22 bp, synthetic construct
  misc_feature 1..22: note = chemically synthesized
  source 1..22: mol_type = other DNA
ttataatgcttctaaggtatgg

SEQ ID NO: 152032 - DNA, 22 bp, synthetic construct
  misc_feature 1..22: note = chemically synthesized
  source 1..22: mol_type = other DNA
tataatgcttctaaggtatggc

SEQ ID NO: 152033 - DNA, 22 bp, synthetic construct
  misc_feature 1..22: note = chemically synthesized
  source 1..22: mol_type = other DNA
ataatgcttctaaggtatggct

SEQ ID NO: 152034 - DNA, 22 bp, synthetic construct
  misc_feature 1..22: note = chemically synthesized
  source 1..22: mol_type = other DNA
taatgcttctaaggtatggcta

SEQ ID NO: 152035 - DNA, 22 bp, synthetic construct
  misc_feature 1..22: note = chemically synthesized
  source 1..22: mol_type = other DNA
ctaaggtatggctaatttttaa

SEQ ID NO: 152036 - DNA, 22 bp, synthetic construct
  misc_feature 1..22: note = chemically synthesized
  source 1..22: mol_type = other DNA
taaggtatggctaatttttaaa

SEQ ID NO: 152037 - DNA, 22 bp, synthetic construct
  misc_feature 1..22: note = chemically synthesized
  source 1..22: mol_type = other DNA
aggtatggctaatttttaaaaa

SEQ ID NO: 152038 - DNA, 22 bp, synthetic construct
  misc_feature 1..22: note = chemically synthesized
  source 1..22: mol_type = other DNA
atttttaaaaaatattttagta

SEQ ID NO: 152039 - DNA, 22 bp, synthetic construct
  misc_feature 1..22: note = chemically synthesized
  source 1..22: mol_type = other DNA
ttaaaaaatattttagtaatga

SEQ ID NO: 152040 - DNA, 22 bp, synthetic construct
  misc_feature 1..22: note = chemically synthesized
  source 1..22: mol_type = other DNA
taaaaaatattttagtaatgat

SEQ ID NO: 152041 - DNA, 22 bp, synthetic construct
  misc_feature 1..22: note = chemically synthesized
  source 1..22: mol_type = other DNA
aaaaaatattttagtaatgatg

SEQ ID NO: 152042 - DNA, 22 bp, synthetic construct
  misc_feature 1..22: note = chemically synthesized
  source 1..22: mol_type = other DNA
aaaaatattttagtaatgatgg

SEQ ID NO: 152043 - DNA, 22 bp, synthetic construct
  misc_feature 1..22: note = chemically synthesized
  source 1..22: mol_type = other DNA
tagtaatgatgggaatattatt

SEQ ID NO: 152044 - DNA, 22 bp, synthetic construct
  misc_feature 1..22: note = chemically synthesized
  source 1..22: mol_type = other DNA
agtaatgatgggaatattattt

SEQ ID NO: 152045 - DNA, 22 bp, synthetic construct
  misc_feature 1..22: note = chemically synthesized
  source 1..22: mol_type = other DNA
gtaatgatgggaatattattta

SEQ ID NO: 152046 - DNA, 22 bp, synthetic construct
  misc_feature 1..22: note = chemically synthesized
  source 1..22: mol_type = other DNA
tttatagaaatcttataaaata

SEQ ID NO: 152047 - DNA, 22 bp, synthetic construct
  misc_feature 1..22: note = chemically synthesized
  source 1..22: mol_type = other DNA
atagaaatcttataaaatatat

SEQ ID NO: 152048 - DNA, 22 bp, synthetic construct
  misc_feature 1..22: note = chemically synthesized
  source 1..22: mol_type = other DNA
tagaaatcttataaaatatata

SEQ ID NO: 152049 - DNA, 22 bp, synthetic construct
  misc_feature 1..22: note = chemically synthesized
  source 1..22: mol_type = other DNA
ataaaatatataatgaaatatg

SEQ ID NO: 152050 - DNA, 22 bp, synthetic construct
  misc_feature 1..22: note = chemically synthesized
  source 1..22: mol_type = other DNA
taaaatatataatgaaatatgt

SEQ ID NO: 152051 - DNA, 22 bp, synthetic construct
  misc_feature 1..22: note = chemically synthesized
  source 1..22: mol_type = other DNA
gataaatgtgtatatacataat

SEQ ID NO: 152052 - DNA, 22 bp, synthetic construct
  misc_feature 1..22: note = chemically synthesized
  source 1..22: mol_type = other DNA
attacataatatataatatata

SEQ ID NO: 152053 - DNA, 22 bp, synthetic construct
  misc_feature 1..22: note = chemically synthesized
  source 1..22: mol_type = other DNA
ttacataatatataatatataa

SEQ ID NO: 152054 - DNA, 22 bp, synthetic construct
  misc_feature 1..22: note = chemically synthesized
  source 1..22: mol_type = other DNA
cataatatataatatataatgt

SEQ ID NO: 152055 - DNA, 22 bp, synthetic construct
  misc_feature 1..22: note = chemically synthesized
  source 1..22: mol_type = other DNA
atatattacatgcattatatat

SEQ ID NO: 152056 - DNA, 22 bp, synthetic construct
  misc_feature 1..22: note = chemically synthesized
  source 1..22: mol_type = other DNA
tatattacatgcattatatatt

SEQ ID NO: 152057 - DNA, 22 bp, synthetic construct
  misc_feature 1..22: note = chemically synthesized
  source 1..22: mol_type = other DNA
catgcattatatattaaatata

SEQ ID NO: 152058 - DNA, 22 bp, synthetic construct
  misc_feature 1..22: note = chemically synthesized
  source 1..22: mol_type = other DNA
tatattaaatataatacatttt

SEQ ID NO: 152059 - DNA, 22 bp, synthetic construct
  misc_feature 1..22: note = chemically synthesized
  source 1..22: mol_type = other DNA
aatataatacattttatatatt

SEQ ID NO: 152060 - DNA, 22 bp, synthetic construct
  misc_feature 1..22: note = chemically synthesized
  source 1..22: mol_type = other DNA
tatatattatatattaaaatat

SEQ ID NO: 152061 - DNA, 22 bp, synthetic construct
  misc_feature 1..22: note = chemically synthesized
  source 1..22: mol_type = other DNA
atatattatatattaaaatatg

SEQ ID NO: 152062 - DNA, 22 bp, synthetic construct
  misc_feature 1..22: note = chemically synthesized
  source 1..22: mol_type = other DNA
tatattatatattaaaatatgt

SEQ ID NO: 152063 - DNA, 22 bp, synthetic construct
  misc_feature 1..22: note = chemically synthesized
  source 1..22: mol_type = other DNA
tatattaaaatatgtaataata

SEQ ID NO: 152064 - DNA, 22 bp, synthetic construct
  misc_feature 1..22: note = chemically synthesized
  source 1..22: mol_type = other DNA
aaatatgtaataatatgttatt

SEQ ID NO: 152065 - DNA, 22 bp, synthetic construct
  misc_feature 1..22: note = chemically synthesized
  source 1..22: mol_type = other DNA
ttaaatatatacaataatctat

SEQ ID NO: 152066 - DNA, 22 bp, synthetic construct
  misc_feature 1..22: note = chemically synthesized
  source 1..22: mol_type = other DNA
aatatatacaataatctattac

SEQ ID NO: 152067 - DNA, 22 bp, synthetic construct
  misc_feature 1..22: note = chemically synthesized
  source 1..22: mol_type = other DNA
ttacattttatgcttatataat

SEQ ID NO: 152068 - DNA, 22 bp, synthetic construct
  misc_feature 1..22: note = chemically synthesized
  source 1..22: mol_type = other DNA
cattttatgcttatataatata

SEQ ID NO: 152069 - DNA, 22 bp, synthetic construct
  misc_feature 1..22: note = chemically synthesized
  source 1..22: mol_type = other DNA
tatgcttatataatatataata

SEQ ID NO: 152070 - DNA, 22 bp, synthetic construct
  misc_feature 1..22: note = chemically synthesized
  source 1..22: mol_type = other DNA
atgcttatataatatataataa

SEQ ID NO: 152071 - DNA, 22 bp, synthetic construct
  misc_feature 1..22: note = chemically synthesized
  source 1..22: mol_type = other DNA
tgcttatataatatataataaa

SEQ ID NO: 152072 - DNA, 22 bp, synthetic construct
  misc_feature 1..22: note = chemically synthesized
  source 1..22: mol_type = other DNA
atataatatataataaatatat

SEQ ID NO: 152073 - DNA, 22 bp, synthetic construct
  misc_feature 1..22: note = chemically synthesized
  source 1..22: mol_type = other DNA
tataatatataataaatatata

SEQ ID NO: 152074 - DNA, 22 bp, synthetic construct
  misc_feature 1..22: note = chemically synthesized
  source 1..22: mol_type = other DNA
tatatttgtatctatatatgtt

SEQ ID NO: 152075 - DNA, 22 bp, synthetic construct
  misc_feature 1..22: note = chemically synthesized
  source 1..22: mol_type = other DNA
gtatctatatatgtttataaag

SEQ ID NO: 152076 - DNA, 22 bp, synthetic construct
  misc_feature 1..22: note = chemically synthesized
  source 1..22: mol_type = other DNA
tatctatatatgtttataaagt

SEQ ID NO: 152077 - DNA, 22 bp, synthetic construct
  misc_feature 1..22: note = chemically synthesized
  source 1..22: mol_type = other DNA
tatatgtttataaagtcattcc

SEQ ID NO: 152078 - DNA, 22 bp, synthetic construct
  misc_feature 1..22: note = chemically synthesized
  source 1..22: mol_type = other DNA
ataaagtcattcctctaattag

SEQ ID NO: 152079 - DNA, 22 bp, synthetic construct
  misc_feature 1..22: note = chemically synthesized
  source 1..22: mol_type = other DNA
taaagtcattcctctaattagg

SEQ ID NO: 152080 - DNA, 22 bp, synthetic construct
  misc_feature 1..22: note = chemically synthesized
  source 1..22: mol_type = other DNA
ctctaattaggtcataaccatt

SEQ ID NO: 152081 - DNA, 22 bp, synthetic construct
  misc_feature 1..22: note = chemically synthesized
  source 1..22: mol_type = other DNA
taattaggtcataaccattcag

SEQ ID NO: 152082 - DNA, 22 bp, synthetic construct
  misc_feature 1..22: note = chemically synthesized
  source 1..22: mol_type = other DNA
attaggtcataaccattcaggt

SEQ ID NO: 152083 - DNA, 22 bp, synthetic construct
  misc_feature 1..22: note = chemically synthesized
  source 1..22: mol_type = other DNA
ggtcataaccattcaggtaaac

SEQ ID NO: 152084 - DNA, 22 bp, synthetic construct
  misc_feature 1..22: note = chemically synthesized
  source 1..22: mol_type = other DNA
aggtaaactggaaatttaagcc

SEQ ID NO: 152085 - DNA, 22 bp, synthetic construct
  misc_feature 1..22: note = chemically synthesized
  source 1..22: mol_type = other DNA
gaaatttaagcctacttcaggt

SEQ ID NO: 152086 - DNA, 22 bp, synthetic construct
  misc_feature 1..22: note = chemically synthesized
  source 1..22: mol_type = other DNA
aagcctacttcaggtttgtggt

SEQ ID NO: 152087 - DNA, 22 bp, synthetic construct
  misc_feature 1..22: note = chemically synthesized
  source 1..22: mol_type = other DNA
agcctacttcaggtttgtggta

SEQ ID NO: 152088 - DNA, 22 bp, synthetic construct
  misc_feature 1..22: note = chemically synthesized
  source 1..22: mol_type = other DNA
cttcaggtttgtggtaaataga

SEQ ID NO: 152089 - DNA, 22 bp, synthetic construct
  misc_feature 1..22: note = chemically synthesized
  source 1..22: mol_type = other DNA
caggtttgtggtaaatagattc

SEQ ID NO: 152090 - DNA, 22 bp, synthetic construct
  misc_feature 1..22: note = chemically synthesized
  source 1..22: mol_type = other DNA
aggtttgtggtaaatagattct

SEQ ID NO: 152091 - DNA, 22 bp, synthetic construct
  misc_feature 1..22: note = chemically synthesized
  source 1..22: mol_type = other DNA
gtggtaaatagattctctctga

SEQ ID NO: 152092 - DNA, 22 bp, synthetic construct
  misc_feature 1..22: note = chemically synthesized
  source 1..22: mol_type = other DNA
tggtaaatagattctctctgaa

SEQ ID NO: 152093 - DNA, 22 bp, synthetic construct
  misc_feature 1..22: note = chemically synthesized
  source 1..22: mol_type = other DNA
tctctgaactagcatattcaga

SEQ ID NO: 152094 - DNA, 22 bp, synthetic construct
  misc_feature 1..22: note = chemically synthesized
  source 1..22: mol_type = other DNA
tctgaactagcatattcagaat

SEQ ID NO: 152095 - DNA, 22 bp, synthetic construct
  misc_feature 1..22: note = chemically synthesized
  source 1..22: mol_type = other DNA
tgaactagcatattcagaatca

SEQ ID NO: 152096 - DNA, 22 bp, synthetic construct
  misc_feature 1..22: note = chemically synthesized
  source 1..22: mol_type = other DNA
aactagcatattcagaatcatt

SEQ ID NO: 152097 - DNA, 22 bp, synthetic construct
  misc_feature 1..22: note = chemically synthesized
  source 1..22: mol_type = other DNA
gcatattcagaatcattaaaca

SEQ ID NO: 152098 - DNA, 22 bp, synthetic construct
  misc_feature 1..22: note = chemically synthesized
  source 1..22: mol_type = other DNA
agaatcattaaacagtcagttc

SEQ ID NO: 152099 - DNA, 22 bp, synthetic construct
  misc_feature 1..22: note = chemically synthesized
  source 1..22: mol_type = other DNA
aacagtcagttctttggacaag

SEQ ID NO: 152100 - DNA, 22 bp, synthetic construct
  misc_feature 1..22: note = chemically synthesized
  source 1..22: mol_type = other DNA
tttggacaagtcttatagaatg

SEQ ID NO: 152101 - DNA, 22 bp, synthetic construct
  misc_feature 1..22: note = chemically synthesized
  source 1..22: mol_type = other DNA
tggacaagtcttatagaatgtt

SEQ ID NO: 152102 - DNA, 22 bp, synthetic construct
  misc_feature 1..22: note = chemically synthesized
  source 1..22: mol_type = other DNA
ggacaagtcttatagaatgttc

SEQ ID NO: 152103 - DNA, 22 bp, synthetic construct
  misc_feature 1..22: note = chemically synthesized
  source 1..22: mol_type = other DNA
gacaagtcttatagaatgttct

SEQ ID NO: 152104 - DNA, 22 bp, synthetic construct
  misc_feature 1..22: note = chemically synthesized
  source 1..22: mol_type = other DNA
atagaatgttcttacctcttca

SEQ ID NO: 152105 - DNA, 22 bp, synthetic construct
  misc_feature 1..22: note = chemically synthesized
  source 1..22: mol_type = other DNA
tagaatgttcttacctcttcag

SEQ ID NO: 152106 - DNA, 22 bp, synthetic construct
  misc_feature 1..22: note = chemically synthesized
  source 1..22: mol_type = other DNA
ttacctcttcagccatcccaag

SEQ ID NO: 152107 - DNA, 22 bp, synthetic construct
  misc_feature 1..22: note = chemically synthesized
  source 1..22: mol_type = other DNA
acctcttcagccatcccaagac

SEQ ID NO: 152108 - DNA, 22 bp, synthetic construct
  misc_feature 1..22: note = chemically synthesized
  source 1..22: mol_type = other DNA
cctcttcagccatcccaagact

SEQ ID NO: 152109 - DNA, 22 bp, synthetic construct
  misc_feature 1..22: note = chemically synthesized
  source 1..22: mol_type = other DNA
ttcagccatcccaagactcttg

SEQ ID NO: 152110 - DNA, 22 bp, synthetic construct
  misc_feature 1..22: note = chemically synthesized
  source 1..22: mol_type = other DNA
cagccatcccaagactcttgag

SEQ ID NO: 152111 - DNA, 22 bp, synthetic construct
  misc_feature 1..22: note = chemically synthesized
  source 1..22: mol_type = other DNA
agccatcccaagactcttgagg

SEQ ID NO: 152112 - DNA, 22 bp, synthetic construct
  misc_feature 1..22: note = chemically synthesized
  source 1..22: mol_type = other DNA
ttgagggcctgacctcgcttac

SEQ ID NO: 152113 - DNA, 22 bp, synthetic construct
  misc_feature 1..22: note = chemically synthesized
  source 1..22: mol_type = other DNA
gagggcctgacctcgcttacac

SEQ ID NO: 152114 - DNA, 22 bp, synthetic construct
  misc_feature 1..22: note = chemically synthesized
  source 1..22: mol_type = other DNA
agggcctgacctcgcttacact

SEQ ID NO: 152115 - DNA, 22 bp, synthetic construct
  misc_feature 1..22: note = chemically synthesized
  source 1..22: mol_type = other DNA
acctcgcttacactaaagcaga

SEQ ID NO: 152116 - DNA, 22 bp, synthetic construct
  misc_feature 1..22: note = chemically synthesized
  source 1..22: mol_type = other DNA
gcttacactaaagcagatctgc

SEQ ID NO: 152117 - DNA, 22 bp, synthetic construct
  misc_feature 1..22: note = chemically synthesized
  source 1..22: mol_type = other DNA
acactaaagcagatctgcctta

SEQ ID NO: 152118 - DNA, 22 bp, synthetic construct
  misc_feature 1..22: note = chemically synthesized
  source 1..22: mol_type = other DNA
cactaaagcagatctgccttat

SEQ ID NO: 152119 - DNA, 22 bp, synthetic construct
  misc_feature 1..22: note = chemically synthesized
  source 1..22: mol_type = other DNA
aagcagatctgccttatgcatc

SEQ ID NO: 152120 - DNA, 22 bp, synthetic construct
  misc_feature 1..22: note = chemically synthesized
  source 1..22: mol_type = other DNA
ccttatgcatcactgaagtagg

SEQ ID NO: 152121 - DNA, 22 bp, synthetic construct
  misc_feature 1..22: note = chemically synthesized
  source 1..22: mol_type = other DNA
atgcatcactgaagtagggagg

SEQ ID NO: 152122 - DNA, 22 bp, synthetic construct
  misc_feature 1..22: note = chemically synthesized
  source 1..22: mol_type = other DNA
tgcatcactgaagtagggaggg

SEQ ID NO: 152123 - DNA, 22 bp, synthetic construct
  misc_feature 1..22: note = chemically synthesized
  source 1..22: mol_type = other DNA
aagtagggagggaagaaagttt

SEQ ID NO: 152124 - DNA, 22 bp, synthetic construct
  misc_feature 1..22: note = chemically synthesized
  source 1..22: mol_type = other DNA
gatgaactacttctgaccccta

SEQ ID NO: 152125 - DNA, 22 bp, synthetic construct
  misc_feature 1..22: note = chemically synthesized
  source 1..22: mol_type = other DNA
atgaactacttctgacccctag

SEQ ID NO: 152126 - DNA, 22 bp, synthetic construct
  misc_feature 1..22: note = chemically synthesized
  source 1..22: mol_type = other DNA
cttctgacccctagtggtgtcc

SEQ ID NO: 152127 - DNA, 22 bp, synthetic construct
  misc_feature 1..22: note = chemically synthesized
  source 1..22: mol_type = other DNA
ctgacccctagtggtgtccaga

SEQ ID NO: 152128 - DNA, 22 bp, synthetic construct
  misc_feature 1..22: note = chemically synthesized
  source 1..22: mol_type = other DNA
tgacccctagtggtgtccagaa

SEQ ID NO: 152129 - DNA, 22 bp, synthetic construct
  misc_feature 1..22: note = chemically synthesized
  source 1..22: mol_type = other DNA
acccctagtggtgtccagaaaa

SEQ ID NO: 152130 - DNA, 22 bp, synthetic construct
  misc_feature 1..22: note = chemically synthesized
  source 1..22: mol_type = other DNA
gtggtgtccagaaaagaccatt

SEQ ID NO: 152131 - DNA, 22 bp, synthetic construct
  misc_feature 1..22: note = chemically synthesized
  source 1..22: mol_type = other DNA
aaggaatgacctttaaaggatg

SEQ ID NO: 152132 - DNA, 22 bp, synthetic construct
  misc_feature 1..22: note = chemically synthesized
  source 1..22: mol_type = other DNA
taaaggatggacatacaatttt

SEQ ID NO: 152133 - DNA, 22 bp, synthetic construct
  misc_feature 1..22: note = chemically synthesized
  source 1..22: mol_type = other DNA
aaaggatggacatacaattttt

SEQ ID NO: 152134 - DNA, 22 bp, synthetic construct
  misc_feature 1..22: note = chemically synthesized
  source 1..22: mol_type = other DNA
aaggatggacatacaatttttt

SEQ ID NO: 152135 - DNA, 22 bp, synthetic construct
  misc_feature 1..22: note = chemically synthesized
  source 1..22: mol_type = other DNA
tttgtccaaggcaggacatgtg

SEQ ID NO: 152136 - DNA, 22 bp, synthetic construct
  misc_feature 1..22: note = chemically synthesized
  source 1..22: mol_type = other DNA
ttgtccaaggcaggacatgtgt

SEQ ID NO: 152137 - DNA, 22 bp, synthetic construct
  misc_feature 1..22: note = chemically synthesized
  source 1..22: mol_type = other DNA
tgtccaaggcaggacatgtgtg

SEQ ID NO: 152138 - DNA, 22 bp, synthetic construct
  misc_feature 1..22: note = chemically synthesized
  source 1..22: mol_type = other DNA
gtccaaggcaggacatgtgtgg

SEQ ID NO: 152139 - DNA, 22 bp, synthetic construct
  misc_feature 1..22: note = chemically synthesized
  source 1..22: mol_type = other DNA
tccaaggcaggacatgtgtggg

SEQ ID NO: 152140 - DNA, 22 bp, synthetic construct
  misc_feature 1..22: note = chemically synthesized
  source 1..22: mol_type = other DNA
tcagtaattatgttctaagaac

SEQ ID NO: 152141 - DNA, 22 bp, synthetic construct
  misc_feature 1..22: note = chemically synthesized
  source 1..22: mol_type = other DNA
cagtaattatgttctaagaaca

SEQ ID NO: 152142 - DNA, 22 bp, synthetic construct
  misc_feature 1..22: note = chemically synthesized
  source 1..22: mol_type = other DNA
agtaattatgttctaagaacag

SEQ ID NO: 152143 - DNA, 22 bp, synthetic construct
  misc_feature 1..22: note = chemically synthesized
  source 1..22: mol_type = other DNA
tgttctaagaacagcaaaaact

SEQ ID NO: 152144 - DNA, 22 bp, synthetic construct
  misc_feature 1..22: note = chemically synthesized
  source 1..22: mol_type = other DNA
taagaacagcaaaaactccact

SEQ ID NO: 152145 - DNA, 22 bp, synthetic construct
  misc_feature 1..22: note = chemically synthesized
  source 1..22: mol_type = other DNA
agaacagcaaaaactccactgc

SEQ ID NO: 152146 - DNA, 22 bp, synthetic construct
  misc_feature 1..22: note = chemically synthesized
  source 1..22: mol_type = other DNA
cactgccttggcaaataggaat

SEQ ID NO: 152147 - DNA, 22 bp, synthetic construct
  misc_feature 1..22: note = chemically synthesized
  source 1..22: mol_type = other DNA
ccttggcaaataggaatgtttt

SEQ ID NO: 152148 - DNA, 22 bp, synthetic construct
  misc_feature 1..22: note = chemically synthesized
  source 1..22: mol_type = other DNA
ggcaaataggaatgttttagtt

SEQ ID NO: 152149 - DNA, 22 bp, synthetic construct
  misc_feature 1..22: note = chemically synthesized
  source 1..22: mol_type = other DNA
gcaaataggaatgttttagttc

SEQ ID NO: 152150 - DNA, 22 bp, synthetic construct
  misc_feature 1..22: note = chemically synthesized
  source 1..22: mol_type = other DNA
tagttctatagaattataaaga

SEQ ID NO: 152151 - DNA, 22 bp, synthetic construct
  misc_feature 1..22: note = chemically synthesized
  source 1..22: mol_type = other DNA
agttctatagaattataaagaa

SEQ ID NO: 152152 - DNA, 22 bp, synthetic construct
  misc_feature 1..22: note = chemically synthesized
  source 1..22: mol_type = other DNA
gttctatagaattataaagaag

SEQ ID NO: 152153 - DNA, 22 bp, synthetic construct
  misc_feature 1..22: note = chemically synthesized
  source 1..22: mol_type = other DNA
tatagaattataaagaagctgt

SEQ ID NO: 152154 - DNA, 22 bp, synthetic construct
  misc_feature 1..22: note = chemically synthesized
  source 1..22: mol_type = other DNA
tagaattataaagaagctgtct

SEQ ID NO: 152155 - DNA, 22 bp, synthetic construct
  misc_feature 1..22: note = chemically synthesized
  source 1..22: mol_type = other DNA
taaagaagctgtcttttaaaca

SEQ ID NO: 152156 - DNA, 22 bp, synthetic construct
  misc_feature 1..22: note = chemically synthesized
  source 1..22: mol_type = other DNA
tcttttaaacacaatatacttt

SEQ ID NO: 152157 - DNA, 22 bp, synthetic construct
  misc_feature 1..22: note = chemically synthesized
  source 1..22: mol_type = other DNA
ttaaacacaatatactttctct

SEQ ID NO: 152158 - DNA, 22 bp, synthetic construct
  misc_feature 1..22: note = chemically synthesized
  source 1..22: mol_type = other DNA
taaacacaatatactttctcta

SEQ ID NO: 152159 - DNA, 22 bp, synthetic construct
  misc_feature 1..22: note = chemically synthesized
  source 1..22: mol_type = other DNA
aaacacaatatactttctctat

SEQ ID NO: 152160 - DNA, 22 bp, synthetic construct
  misc_feature 1..22: note = chemically synthesized
  source 1..22: mol_type = other DNA
aacacaatatactttctctatg

SEQ ID NO: 152161 - DNA, 22 bp, synthetic construct
  misc_feature 1..22: note = chemically synthesized
  source 1..22: mol_type = other DNA
tctctatgtctttggaacaatg

SEQ ID NO: 152162 - DNA, 22 bp, synthetic construct
  misc_feature 1..22: note = chemically synthesized
  source 1..22: mol_type = other DNA
ctctatgtctttggaacaatga

SEQ ID NO: 152163 - DNA, 22 bp, synthetic construct
  misc_feature 1..22: note = chemically synthesized
  source 1..22: mol_type = other DNA
tctatgtctttggaacaatgac

SEQ ID NO: 152164 - DNA, 22 bp, synthetic construct
  misc_feature 1..22: note = chemically synthesized
  source 1..22: mol_type = other DNA
tatgtctttggaacaatgacta

SEQ ID NO: 152165 - DNA, 22 bp, synthetic construct
  misc_feature 1..22: note = chemically synthesized
  source 1..22: mol_type = other DNA
tgtctttggaacaatgactatt

SEQ ID NO: 152166 - DNA, 22 bp, synthetic construct
  misc_feature 1..22: note = chemically synthesized
  source 1..22: mol_type = other DNA
tggaacaatgactattggtcat

SEQ ID NO: 152167 - DNA, 22 bp, synthetic construct
  misc_feature 1..22: note = chemically synthesized
  source 1..22: mol_type = other DNA
ggaacaatgactattggtcatt

SEQ ID NO: 152168 - DNA, 22 bp, synthetic construct
  misc_feature 1..22: note = chemically synthesized
  source 1..22: mol_type = other DNA
gaacaatgactattggtcatta

SEQ ID NO: 152169 - DNA, 22 bp, synthetic construct
  misc_feature 1..22: note = chemically synthesized
  source 1..22: mol_type = other DNA
ttggtcattaccctattttaaa

SEQ ID NO: 152170 - DNA, 22 bp, synthetic construct
  misc_feature 1..22: note = chemically synthesized
  source 1..22: mol_type = other DNA
gtcattaccctattttaaagta

SEQ ID NO: 152171 - DNA, 22 bp, synthetic construct
  misc_feature 1..22: note = chemically synthesized
  source 1..22: mol_type = other DNA
ccctattttaaagtaagcaagt

SEQ ID NO: 152172 - DNA, 22 bp, synthetic construct
  misc_feature 1..22: note = chemically synthesized
  source 1..22: mol_type = other DNA
ttttaaagtaagcaagtaatca

SEQ ID NO: 152173 - DNA, 22 bp, synthetic construct
  misc_feature 1..22: note = chemically synthesized
  source 1..22: mol_type = other DNA
taaagtaagcaagtaatcacac

SEQ ID NO: 152174 - DNA, 22 bp, synthetic construct
  misc_feature 1..22: note = chemically synthesized
  source 1..22: mol_type = other DNA
aaagtaagcaagtaatcacaca

SEQ ID NO: 152175 - DNA, 22 bp, synthetic construct
  misc_feature 1..22: note = chemically synthesized
  source 1..22: mol_type = other DNA
aagtaagcaagtaatcacacag

SEQ ID NO: 152176 - DNA, 22 bp, synthetic construct
  misc_feature 1..22: note = chemically synthesized
  source 1..22: mol_type = other DNA
ttctgaaaagacagaaaaaaaa

SEQ ID NO: 152177 - DNA, 22 bp, synthetic construct
  misc_feature 1..22: note = chemically synthesized
  source 1..22: mol_type = other DNA
tgaaaagacagaaaaaaaaaaa

SEQ ID NO: 152178 - DNA, 22 bp, synthetic construct
  misc_feature 1..22: note = chemically synthesized
  source 1..22: mol_type = other DNA
aaaagacagaaaaaaaaaaaaa

SEQ ID NO: 152179 - DNA, 22 bp, synthetic construct
  misc_feature 1..22: note = chemically synthesized
  source 1..22: mol_type = other DNA
ctgcatatgtaggtcagtttta

SEQ ID NO: 152180 - DNA, 22 bp, synthetic construct
  misc_feature 1..22: note = chemically synthesized
  source 1..22: mol_type = other DNA
tgcatatgtaggtcagttttaa

SEQ ID NO: 152181 - DNA, 22 bp, synthetic construct
  misc_feature 1..22: note = chemically synthesized
  source 1..22: mol_type = other DNA
catatgtaggtcagttttaatc

SEQ ID NO: 152182 - DNA, 22 bp, synthetic construct
  misc_feature 1..22: note = chemically synthesized
  source 1..22: mol_type = other DNA
taatcagagggcatcagaaaag

SEQ ID NO: 152183 - DNA, 22 bp, synthetic construct
  misc_feature 1..22: note = chemically synthesized
  source 1..22: mol_type = other DNA
aatcagagggcatcagaaaaga

SEQ ID NO: 152184 - DNA, 22 bp, synthetic construct
  misc_feature 1..22: note = chemically synthesized
  source 1..22: mol_type = other DNA
atcagagggcatcagaaaagac

SEQ ID NO: 152185 - DNA, 22 bp, synthetic construct
  misc_feature 1..22: note = chemically synthesized
  source 1..22: mol_type = other DNA
ctgaaagaatgacctggttatt

SEQ ID NO: 152186 - DNA, 22 bp, synthetic construct
  misc_feature 1..22: note = chemically synthesized
  source 1..22: mol_type = other DNA
aaagaatgacctggttattata

SEQ ID NO: 152187 - DNA, 22 bp, synthetic construct
  misc_feature 1..22: note = chemically synthesized
  source 1..22: mol_type = other DNA
gttattataatcacagatttgc

SEQ ID NO: 152188 - DNA, 22 bp, synthetic construct
  misc_feature 1..22: note = chemically synthesized
  source 1..22: mol_type = other DNA
ttataatcacagatttgctttc

SEQ ID NO: 152189 - DNA, 22 bp, synthetic construct
  misc_feature 1..22: note = chemically synthesized
  source 1..22: mol_type = other DNA
taatcacagatttgctttccaa

SEQ ID NO: 152190 - DNA, 22 bp, synthetic construct
  misc_feature 1..22: note = chemically synthesized
  source 1..22: mol_type = other DNA
gctttccaagtcaacattccag

SEQ ID NO: 152191 - DNA, 22 bp, synthetic construct
  misc_feature 1..22: note = chemically synthesized
  source 1..22: mol_type = other DNA
ctttccaagtcaacattccaga

SEQ ID NO: 152192 - DNA, 22 bp, synthetic construct
  misc_feature 1..22: note = chemically synthesized
  source 1..22: mol_type = other DNA
tccaagtcaacattccagacag

SEQ ID NO: 152193 - DNA, 22 bp, synthetic construct
  misc_feature 1..22: note = chemically synthesized
  source 1..22: mol_type = other DNA
ccaagtcaacattccagacagt

SEQ ID NO: 152194 - DNA, 22 bp, synthetic construct
  misc_feature 1..22: note = chemically synthesized
  source 1..22: mol_type = other DNA
caagtcaacattccagacagtg

SEQ ID NO: 152195 - DNA, 22 bp, synthetic construct
  misc_feature 1..22: note = chemically synthesized
  source 1..22: mol_type = other DNA
cagacagtgctcagaggggata

SEQ ID NO: 152196 - DNA, 22 bp, synthetic construct
  misc_feature 1..22: note = chemically synthesized
  source 1..22: mol_type = other DNA
agaggggatacgaaaacccttt

SEQ ID NO: 152197 - DNA, 22 bp, synthetic construct
  misc_feature 1..22: note = chemically synthesized
  source 1..22: mol_type = other DNA
ttatttctccagactcaaattc

SEQ ID NO: 152198 - DNA, 22 bp, synthetic construct
  misc_feature 1..22: note = chemically synthesized
  source 1..22: mol_type = other DNA
tatttctccagactcaaattca

SEQ ID NO: 152199 - DNA, 22 bp, synthetic construct
  misc_feature 1..22: note = chemically synthesized
  source 1..22: mol_type = other DNA
atttctccagactcaaattcac

SEQ ID NO: 152200 - DNA, 22 bp, synthetic construct
  misc_feature 1..22: note = chemically synthesized
  source 1..22: mol_type = other DNA
tttctccagactcaaattcact

SEQ ID NO: 152201 - DNA, 22 bp, synthetic construct
  misc_feature 1..22: note = chemically synthesized
  source 1..22: mol_type = other DNA
ctccagactcaaattcactgct

SEQ ID NO: 152202 - DNA, 22 bp, synthetic construct
  misc_feature 1..22: note = chemically synthesized
  source 1..22: mol_type = other DNA
tccagactcaaattcactgcta

SEQ ID NO: 152203 - DNA, 22 bp, synthetic construct
  misc_feature 1..22: note = chemically synthesized
  source 1..22: mol_type = other DNA
cagactcaaattcactgctatt

SEQ ID NO: 152204 - DNA, 22 bp, synthetic construct
  misc_feature 1..22: note = chemically synthesized
  source 1..22: mol_type = other DNA
aaattcactgctatttgtcttc

SEQ ID NO: 152205 - DNA, 22 bp, synthetic construct
  misc_feature 1..22: note = chemically synthesized
  source 1..22: mol_type = other DNA
actgctatttgtcttctctatt

SEQ ID NO: 152206 - DNA, 22 bp, synthetic construct
  misc_feature 1..22: note = chemically synthesized
  source 1..22: mol_type = other DNA
ctatttgtcttctctatttatt

SEQ ID NO: 152207 - DNA, 22 bp, synthetic construct
  misc_feature 1..22: note = chemically synthesized
  source 1..22: mol_type = other DNA
tttgtcttctctatttatttta

SEQ ID NO: 152208 - DNA, 22 bp, synthetic construct
  misc_feature 1..22: note = chemically synthesized
  source 1..22: mol_type = other DNA
gtcttctctatttattttatta

SEQ ID NO: 152209 - DNA, 22 bp, synthetic construct
  misc_feature 1..22: note = chemically synthesized
  source 1..22: mol_type = other DNA
tcttctctatttattttattat

SEQ ID NO: 152210 - DNA, 22 bp, synthetic construct
  misc_feature 1..22: note = chemically synthesized
  source 1..22: mol_type = other DNA
ctctatttattttattataggc

SEQ ID NO: 152211 - DNA, 22 bp, synthetic construct
  misc_feature 1..22: note = chemically synthesized
  source 1..22: mol_type = other DNA
tctatttattttattataggca

SEQ ID NO: 152212 - DNA, 22 bp, synthetic construct
  misc_feature 1..22: note = chemically synthesized
  source 1..22: mol_type = other DNA
tatttattttattataggcatt

SEQ ID NO: 152213 - DNA, 22 bp, synthetic construct
  misc_feature 1..22: note = chemically synthesized
  source 1..22: mol_type = other DNA
tttattttattataggcattgt

SEQ ID NO: 152214 - DNA, 22 bp, synthetic construct
  misc_feature 1..22: note = chemically synthesized
  source 1..22: mol_type = other DNA
attttattataggcattgttct

SEQ ID NO: 152215 - DNA, 22 bp, synthetic construct
  misc_feature 1..22: note = chemically synthesized
  source 1..22: mol_type = other DNA
ttttattataggcattgttctg

SEQ ID NO: 152216 - DNA, 22 bp, synthetic construct
  misc_feature 1..22: note = chemically synthesized
  source 1..22: mol_type = other DNA
tattataggcattgttctggtt

SEQ ID NO: 152217 - DNA, 22 bp, synthetic construct
  misc_feature 1..22: note = chemically synthesized
  source 1..22: mol_type = other DNA
attataggcattgttctggttg

SEQ ID NO: 152218 - DNA, 22 bp, synthetic construct
  misc_feature 1..22: note = chemically synthesized
  source 1..22: mol_type = other DNA
ttataggcattgttctggttgc

SEQ ID NO: 152219 - DNA, 22 bp, synthetic construct
  misc_feature 1..22: note = chemically synthesized
  source 1..22: mol_type = other DNA
taggcattgttctggttgctgg

SEQ ID NO: 152220 - DNA, 22 bp, synthetic construct
  misc_feature 1..22: note = chemically synthesized
  source 1..22: mol_type = other DNA
ttctggttgctgggaactcaga

SEQ ID NO: 152221 - DNA, 22 bp, synthetic construct
  misc_feature 1..22: note = chemically synthesized
  source 1..22: mol_type = other DNA
tggttgctgggaactcagactg

SEQ ID NO: 152222 - DNA, 22 bp, synthetic construct
  misc_feature 1..22: note = chemically synthesized
  source 1..22: mol_type = other DNA
gttgctgggaactcagactgag

SEQ ID NO: 152223 - DNA, 22 bp, synthetic construct
  misc_feature 1..22: note = chemically synthesized
  source 1..22: mol_type = other DNA
ctgggaactcagactgagatac

SEQ ID NO: 152224 - DNA, 22 bp, synthetic construct
  misc_feature 1..22: note = chemically synthesized
  source 1..22: mol_type = other DNA
ggaactcagactgagataccat

SEQ ID NO: 152225 - DNA, 22 bp, synthetic construct
  misc_feature 1..22: note = chemically synthesized
  source 1..22: mol_type = other DNA
agactgagataccatacactga

SEQ ID NO: 152226 - DNA, 22 bp, synthetic construct
  misc_feature 1..22: note = chemically synthesized
  source 1..22: mol_type = other DNA
agataccatacactgactctca

SEQ ID NO: 152227 - DNA, 22 bp, synthetic construct
  misc_feature 1..22: note = chemically synthesized
  source 1..22: mol_type = other DNA
actctcagatagcataacacaa

SEQ ID NO: 152228 - DNA, 22 bp, synthetic construct
  misc_feature 1..22: note = chemically synthesized
  source 1..22: mol_type = other DNA
tcagatagcataacacaacatg

SEQ ID NO: 152229 - DNA, 22 bp, synthetic construct
  misc_feature 1..22: note = chemically synthesized
  source 1..22: mol_type = other DNA
agatagcataacacaacatgat

SEQ ID NO: 152230 - DNA, 22 bp, synthetic construct
  misc_feature 1..22: note = chemically synthesized
  source 1..22: mol_type = other DNA
ggaaaactgtaaatctttttgt

SEQ ID NO: 152231 - DNA, 22 bp, synthetic construct
  misc_feature 1..22: note = chemically synthesized
  source 1..22: mol_type = other DNA
gaaaactgtaaatctttttgtt

SEQ ID NO: 152232 - DNA, 22 bp, synthetic construct
  misc_feature 1..22: note = chemically synthesized
  source 1..22: mol_type = other DNA
taaatctttttgttttttaaat

SEQ ID NO: 152233 - DNA, 22 bp, synthetic construct
  misc_feature 1..22: note = chemically synthesized
  source 1..22: mol_type = other DNA
tttgttttttaaatacaggtgg

SEQ ID NO: 152234 - DNA, 22 bp, synthetic construct
  misc_feature 1..22: note = chemically synthesized
  source 1..22: mol_type = other DNA
ttgttttttaaatacaggtgga

SEQ ID NO: 152235 - DNA, 22 bp, synthetic construct
  misc_feature 1..22: note = chemically synthesized
  source 1..22: mol_type = other DNA
tgttttttaaatacaggtggag

SEQ ID NO: 152236 - DNA, 22 bp, synthetic construct
  misc_feature 1..22: note = chemically synthesized
  source 1..22: mol_type = other DNA
gttttttaaatacaggtggagc

SEQ ID NO: 152237 - DNA, 22 bp, synthetic construct
  misc_feature 1..22: note = chemically synthesized
  source 1..22: mol_type = other DNA
ttttttaaatacaggtggagca

SEQ ID NO: 152238 - DNA, 22 bp, synthetic construct
  misc_feature 1..22: note = chemically synthesized
  source 1..22: mol_type = other DNA
tttaaatacaggtggagcatct

SEQ ID NO: 152239 - DNA, 22 bp, synthetic construct
  misc_feature 1..22: note = chemically synthesized
  source 1..22: mol_type = other DNA
ttaaatacaggtggagcatctg

SEQ ID NO: 152240 - DNA, 22 bp, synthetic construct
  misc_feature 1..22: note = chemically synthesized
  source 1..22: mol_type = other DNA
taaatacaggtggagcatctgg

SEQ ID NO: 152241 - DNA, 22 bp, synthetic construct
  misc_feature 1..22: note = chemically synthesized
  source 1..22: mol_type = other DNA
aaatacaggtggagcatctggc

SEQ ID NO: 152242 - DNA, 22 bp, synthetic construct
  misc_feature 1..22: note = chemically synthesized
  source 1..22: mol_type = other DNA
aatacaggtggagcatctggca

SEQ ID NO: 152243 - DNA, 22 bp, synthetic construct
  misc_feature 1..22: note = chemically synthesized
  source 1..22: mol_type = other DNA
gcacacctgacatattgatctt

SEQ ID NO: 152244 - DNA, 22 bp, synthetic construct
  misc_feature 1..22: note = chemically synthesized
  source 1..22: mol_type = other DNA
acatattgatcttgtttttctt

SEQ ID NO: 152245 - DNA, 22 bp, synthetic construct
  misc_feature 1..22: note = chemically synthesized
  source 1..22: mol_type = other DNA
atcttgtttttctttaaatctt

SEQ ID NO: 152246 - DNA, 22 bp, synthetic construct
  misc_feature 1..22: note = chemically synthesized
  source 1..22: mol_type = other DNA
gtttttctttaaatcttcattt

SEQ ID NO: 152247 - DNA, 22 bp, synthetic construct
  misc_feature 1..22: note = chemically synthesized
  source 1..22: mol_type = other DNA
tttttctttaaatcttcattta

SEQ ID NO: 152248 - DNA, 22 bp, synthetic construct
  misc_feature 1..22: note = chemically synthesized
  source 1..22: mol_type = other DNA
ttctttaaatcttcatttattt

SEQ ID NO: 152249 - DNA, 22 bp, synthetic construct
  misc_feature 1..22: note = chemically synthesized
  source 1..22: mol_type = other DNA
tctttaaatcttcatttattta

SEQ ID NO: 152250 - DNA, 22 bp, synthetic construct
  misc_feature 1..22: note = chemically synthesized
  source 1..22: mol_type = other DNA
ctttaaatcttcatttatttac

SEQ ID NO: 152251 - DNA, 22 bp, synthetic construct
  misc_feature 1..22: note = chemically synthesized
  source 1..22: mol_type = other DNA
tttaaatcttcatttatttacc

SEQ ID NO: 152252 - DNA, 22 bp, synthetic construct
  misc_feature 1..22: note = chemically synthesized
  source 1..22: mol_type = other DNA
taaatcttcatttatttacctt

SEQ ID NO: 152253 - DNA, 22 bp, synthetic construct
  misc_feature 1..22: note = chemically synthesized
  source 1..22: mol_type = other DNA
aaatcttcatttatttacctta

SEQ ID NO: 152254 - DNA, 22 bp, synthetic construct
  misc_feature 1..22: note = chemically synthesized
  source 1..22: mol_type = other DNA
aatcttcatttatttaccttat

SEQ ID NO: 152255 - DNA, 22 bp, synthetic construct
  misc_feature 1..22: note = chemically synthesized
  source 1..22: mol_type = other DNA
catttatttaccttatcaaaac

SEQ ID NO: 152256 - DNA, 22 bp, synthetic construct
  misc_feature 1..22: note = chemically synthesized
  source 1..22: mol_type = other DNA
atttatttaccttatcaaaact

SEQ ID NO: 152257 - DNA, 22 bp, synthetic construct
  misc_feature 1..22: note = chemically synthesized
  source 1..22: mol_type = other DNA
atttaccttatcaaaactatgc

SEQ ID NO: 152258 - DNA, 22 bp, synthetic construct
  misc_feature 1..22: note = chemically synthesized
  source 1..22: mol_type = other DNA
tttaccttatcaaaactatgct

SEQ ID NO: 152259 - DNA, 22 bp, synthetic construct
  misc_feature 1..22: note = chemically synthesized
  source 1..22: mol_type = other DNA
accttatcaaaactatgctctt

SEQ ID NO: 152260 - DNA, 22 bp, synthetic construct
  misc_feature 1..22: note = chemically synthesized
  source 1..22: mol_type = other DNA
ccttatcaaaactatgctcttt

SEQ ID NO: 152261 - DNA, 22 bp, synthetic construct
  misc_feature 1..22: note = chemically synthesized
  source 1..22: mol_type = other DNA
atcaaaactatgctctttcatc

SEQ ID NO: 152262 - DNA, 22 bp, synthetic construct
  misc_feature 1..22: note = chemically synthesized
  source 1..22: mol_type = other DNA
tcaaaactatgctctttcatcc

SEQ ID NO: 152263 - DNA, 22 bp, synthetic construct
  misc_feature 1..22: note = chemically synthesized
  source 1..22: mol_type = other DNA
tgctctttcatcctacctttca

SEQ ID NO: 152264 - DNA, 22 bp, synthetic construct
  misc_feature 1..22: note = chemically synthesized
  source 1..22: mol_type = other DNA
tttcatcctacctttcaaaaca

SEQ ID NO: 152265 - DNA, 22 bp, synthetic construct
  misc_feature 1..22: note = chemically synthesized
  source 1..22: mol_type = other DNA
tcatcctacctttcaaaacata

SEQ ID NO: 152266 - DNA, 22 bp, synthetic construct
  misc_feature 1..22: note = chemically synthesized
  source 1..22: mol_type = other DNA
catcctacctttcaaaacatat

SEQ ID NO: 152267 - DNA, 22 bp, synthetic construct
  misc_feature 1..22: note = chemically synthesized
  source 1..22: mol_type = other DNA
atcctacctttcaaaacatatt

SEQ ID NO: 152268 - DNA, 22 bp, synthetic construct
  misc_feature 1..22: note = chemically synthesized
  source 1..22: mol_type = other DNA
cctttcaaaacatattttaaaa

SEQ ID NO: 152269 - DNA, 22 bp, synthetic construct
  misc_feature 1..22: note = chemically synthesized
  source 1..22: mol_type = other DNA
tcaaaacatattttaaaaaatc

SEQ ID NO: 152270 - DNA, 22 bp, synthetic construct
  misc_feature 1..22: note = chemically synthesized
  source 1..22: mol_type = other DNA
caaaacatattttaaaaaatcc

SEQ ID NO: 152271 - DNA, 22 bp, synthetic construct
  misc_feature 1..22: note = chemically synthesized
  source 1..22: mol_type = other DNA
aaaacatattttaaaaaatcct

SEQ ID NO: 152272 - DNA, 22 bp, synthetic construct
  misc_feature 1..22: note = chemically synthesized
  source 1..22: mol_type = other DNA
taaaaaatcctccaacatgtat

SEQ ID NO: 152273 - DNA, 22 bp, synthetic construct
  misc_feature 1..22: note = chemically synthesized
  source 1..22: mol_type = other DNA
aaaaaatcctccaacatgtatt

SEQ ID NO: 152274 - DNA, 22 bp, synthetic construct
  misc_feature 1..22: note = chemically synthesized
  source 1..22: mol_type = other DNA
aaaaatcctccaacatgtattt

SEQ ID NO: 152275 - DNA, 22 bp, synthetic construct
  misc_feature 1..22: note = chemically synthesized
  source 1..22: mol_type = other DNA
caacatgtattttgctctggta

SEQ ID NO: 152276 - DNA, 22 bp, synthetic construct
  misc_feature 1..22: note = chemically synthesized
  source 1..22: mol_type = other DNA
tgctctggtaatcccaaaaggc

SEQ ID NO: 152277 - DNA, 22 bp, synthetic construct
  misc_feature 1..22: note = chemically synthesized
  source 1..22: mol_type = other DNA
gctctggtaatcccaaaaggct

SEQ ID NO: 152278 - DNA, 22 bp, synthetic construct
  misc_feature 1..22: note = chemically synthesized
  source 1..22: mol_type = other DNA
ctctggtaatcccaaaaggctg

SEQ ID NO: 152279 - DNA, 22 bp, synthetic construct
  misc_feature 1..22: note = chemically synthesized
  source 1..22: mol_type = other DNA
tggtaatcccaaaaggctgata

SEQ ID NO: 152280 - DNA, 22 bp, synthetic construct
  misc_feature 1..22: note = chemically synthesized
  source 1..22: mol_type = other DNA
gtaatcccaaaaggctgatagt

SEQ ID NO: 152281 - DNA, 22 bp, synthetic construct
  misc_feature 1..22: note = chemically synthesized
  source 1..22: mol_type = other DNA
atagtctctatggtggcaacat

SEQ ID NO: 152282 - DNA, 22 bp, synthetic construct
  misc_feature 1..22: note = chemically synthesized
  source 1..22: mol_type = other DNA
tatggtggcaacatggataata

SEQ ID NO: 152283 - DNA, 22 bp, synthetic construct
  misc_feature 1..22: note = chemically synthesized
  source 1..22: mol_type = other DNA
tggtggcaacatggataatact

SEQ ID NO: 152284 - DNA, 22 bp, synthetic construct
  misc_feature 1..22: note = chemically synthesized
  source 1..22: mol_type = other DNA
ttccccatctagatggtctcat

SEQ ID NO: 152285 - DNA, 22 bp, synthetic construct
  misc_feature 1..22: note = chemically synthesized
  source 1..22: mol_type = other DNA
cccatctagatggtctcatttc

SEQ ID NO: 152286 - DNA, 22 bp, synthetic construct
  misc_feature 1..22: note = chemically synthesized
  source 1..22: mol_type = other DNA
gatggtctcatttcttctgtat

SEQ ID NO: 152287 - DNA, 22 bp, synthetic construct
  misc_feature 1..22: note = chemically synthesized
  source 1..22: mol_type = other DNA
atttcttctgtatctagtctga

SEQ ID NO: 152288 - DNA, 22 bp, synthetic construct
  misc_feature 1..22: note = chemically synthesized
  source 1..22: mol_type = other DNA
cttctgtatctagtctgaagaa

SEQ ID NO: 152289 - DNA, 22 bp, synthetic construct
  misc_feature 1..22: note = chemically synthesized
  source 1..22: mol_type = other DNA
ttctgtatctagtctgaagaag

SEQ ID NO: 152290 - DNA, 22 bp, synthetic construct
  misc_feature 1..22: note = chemically synthesized
  source 1..22: mol_type = other DNA
ctgtatctagtctgaagaagcc

SEQ ID NO: 152291 - DNA, 22 bp, synthetic construct
  misc_feature 1..22: note = chemically synthesized
  source 1..22: mol_type = other DNA
tgtatctagtctgaagaagcct

SEQ ID NO: 152292 - DNA, 22 bp, synthetic construct
  misc_feature 1..22: note = chemically synthesized
  source 1..22: mol_type = other DNA
tatctagtctgaagaagcctga

SEQ ID NO: 152293 - DNA, 22 bp, synthetic construct
  misc_feature 1..22: note = chemically synthesized
  source 1..22: mol_type = other DNA
gtctgaagaagcctgaatgaaa

SEQ ID NO: 152294 - DNA, 22 bp, synthetic construct
  misc_feature 1..22: note = chemically synthesized
  source 1..22: mol_type = other DNA
aagaagcctgaatgaaagtaga

SEQ ID NO: 152295 - DNA, 22 bp, synthetic construct
  misc_feature 1..22: note = chemically synthesized
  source 1..22: mol_type = other DNA
aatgaaagtagatttttaagct

SEQ ID NO: 152296 - DNA, 22 bp, synthetic construct
  misc_feature 1..22: note = chemically synthesized
  source 1..22: mol_type = other DNA
ttaagctttgtagctagtctga

SEQ ID NO: 152297 - DNA, 22 bp, synthetic construct
  misc_feature 1..22: note = chemically synthesized
  source 1..22: mol_type = other DNA
taagctttgtagctagtctgaa

SEQ ID NO: 152298 - DNA, 22 bp, synthetic construct
  misc_feature 1..22: note = chemically synthesized
  source 1..22: mol_type = other DNA
aagctttgtagctagtctgaag

SEQ ID NO: 152299 - DNA, 22 bp, synthetic construct
  misc_feature 1..22: note = chemically synthesized
  source 1..22: mol_type = other DNA
agctttgtagctagtctgaagc

SEQ ID NO: 152300 - DNA, 22 bp, synthetic construct
  misc_feature 1..22: note = chemically synthesized
  source 1..22: mol_type = other DNA
tgtagctagtctgaagcctttg

SEQ ID NO: 152301 - DNA, 22 bp, synthetic construct
  misc_feature 1..22: note = chemically synthesized
  source 1..22: mol_type = other DNA
gtagctagtctgaagcctttgt

SEQ ID NO: 152302 - DNA, 22 bp, synthetic construct
  misc_feature 1..22: note = chemically synthesized
  source 1..22: mol_type = other DNA
tagctagtctgaagcctttgta

SEQ ID NO: 152303 - DNA, 22 bp, synthetic construct
  misc_feature 1..22: note = chemically synthesized
  source 1..22: mol_type = other DNA
gtctgaagcctttgtagtcagt

SEQ ID NO: 152304 - DNA, 22 bp, synthetic construct
  misc_feature 1..22: note = chemically synthesized
  source 1..22: mol_type = other DNA
aagcctttgtagtcagtctgaa

SEQ ID NO: 152305 - DNA, 22 bp, synthetic construct
  misc_feature 1..22: note = chemically synthesized
  source 1..22: mol_type = other DNA
tgtagtcagtctgaagaaacct

SEQ ID NO: 152306 - DNA, 22 bp, synthetic construct
  misc_feature 1..22: note = chemically synthesized
  source 1..22: mol_type = other DNA
gtagtcagtctgaagaaacctg

SEQ ID NO: 152307 - DNA, 22 bp, synthetic construct
  misc_feature 1..22: note = chemically synthesized
  source 1..22: mol_type = other DNA
tagtcagtctgaagaaacctgc

SEQ ID NO: 152308 - DNA, 22 bp, synthetic construct
  misc_feature 1..22: note = chemically synthesized
  source 1..22: mol_type = other DNA
aagaaacctgcatgaaaataga

SEQ ID NO: 152309 - DNA, 22 bp, synthetic construct
  misc_feature 1..22: note = chemically synthesized
  source 1..22: mol_type = other DNA
catgaaaatagatttttttttt

SEQ ID NO: 152310 - DNA, 22 bp, synthetic construct
  misc_feature 1..22: note = chemically synthesized
  source 1..22: mol_type = other DNA
tttttttcctttgggacagagt

SEQ ID NO: 152311 - DNA, 22 bp, synthetic construct
  misc_feature 1..22: note = chemically synthesized
  source 1..22: mol_type = other DNA
ttttttcctttgggacagagtc

SEQ ID NO: 152312 - DNA, 22 bp, synthetic construct
  misc_feature 1..22: note = chemically synthesized
  source 1..22: mol_type = other DNA
tttttcctttgggacagagtct

SEQ ID NO: 152313 - DNA, 22 bp, synthetic construct
  misc_feature 1..22: note = chemically synthesized
  source 1..22: mol_type = other DNA
ttttcctttgggacagagtctt

SEQ ID NO: 152314 - DNA, 22 bp, synthetic construct
  misc_feature 1..22: note = chemically synthesized
  source 1..22: mol_type = other DNA
tttcctttgggacagagtcttg

SEQ ID NO: 152315 - DNA, 22 bp, synthetic construct
  misc_feature 1..22: note = chemically synthesized
  source 1..22: mol_type = other DNA
ttcctttgggacagagtcttgc

SEQ ID NO: 152316 - DNA, 22 bp, synthetic construct
  misc_feature 1..22: note = chemically synthesized
  source 1..22: mol_type = other DNA
tcctttgggacagagtcttgct

SEQ ID NO: 152317 - DNA, 22 bp, synthetic construct
  misc_feature 1..22: note = chemically synthesized
  source 1..22: mol_type = other DNA
cctttgggacagagtcttgctc

SEQ ID NO: 152318 - DNA, 22 bp, synthetic construct
  misc_feature 1..22: note = chemically synthesized
  source 1..22: mol_type = other DNA
ctttgggacagagtcttgctct

SEQ ID NO: 152319 - DNA, 22 bp, synthetic construct
  misc_feature 1..22: note = chemically synthesized
  source 1..22: mol_type = other DNA
tgggacagagtcttgctctgtc

SEQ ID NO: 152320 - DNA, 22 bp, synthetic construct
  misc_feature 1..22: note = chemically synthesized
  source 1..22: mol_type = other DNA
gggacagagtcttgctctgtcg

SEQ ID NO: 152321 - DNA, 22 bp, synthetic construct
  misc_feature 1..22: note = chemically synthesized
  source 1..22: mol_type = other DNA
ggacagagtcttgctctgtcgc

SEQ ID NO: 152322 - DNA, 22 bp, synthetic construct
  misc_feature 1..22: note = chemically synthesized
  source 1..22: mol_type = other DNA
gctctgtcgcccagactggagt

SEQ ID NO: 152323 - DNA, 22 bp, synthetic construct
  misc_feature 1..22: note = chemically synthesized
  source 1..22: mol_type = other DNA
ctctgtcgcccagactggagtg

SEQ ID NO: 152324 - DNA, 22 bp, synthetic construct
  misc_feature 1..22: note = chemically synthesized
  source 1..22: mol_type = other DNA
tgtcgcccagactggagtgcaa

SEQ ID NO: 152325 - DNA, 22 bp, synthetic construct
  misc_feature 1..22: note = chemically synthesized
  source 1..22: mol_type = other DNA
tcgcccagactggagtgcaatg

SEQ ID NO: 152326 - DNA, 22 bp, synthetic construct
  misc_feature 1..22: note = chemically synthesized
  source 1..22: mol_type = other DNA
gagtgcaatggcgcgatctcgg

SEQ ID NO: 152327 - DNA, 22 bp, synthetic construct
  misc_feature 1..22: note = chemically synthesized
  source 1..22: mol_type = other DNA
ggctcactgcaacttccacctc

SEQ ID NO: 152328 - DNA, 22 bp, synthetic construct
  misc_feature 1..22: note = chemically synthesized
  source 1..22: mol_type = other DNA
actgcaacttccacctcccagg

SEQ ID NO: 152329 - DNA, 22 bp, synthetic construct
  misc_feature 1..22: note = chemically synthesized
  source 1..22: mol_type = other DNA
caacttccacctcccaggatca

SEQ ID NO: 152330 - DNA, 22 bp, synthetic construct
  misc_feature 1..22: note = chemically synthesized
  source 1..22: mol_type = other DNA
ccacctcccaggatcaagcaat

SEQ ID NO: 152331 - DNA, 22 bp, synthetic construct
  misc_feature 1..22: note = chemically synthesized
  source 1..22: mol_type = other DNA
cacctcccaggatcaagcaatt

SEQ ID NO: 152332 - DNA, 22 bp, synthetic construct
  misc_feature 1..22: note = chemically synthesized
  source 1..22: mol_type = other DNA
ccaggatcaagcaattctcctg

SEQ ID NO: 152333 - DNA, 22 bp, synthetic construct
  misc_feature 1..22: note = chemically synthesized
  source 1..22: mol_type = other DNA
tcctgcctcagtctcccaagta

SEQ ID NO: 152334 - DNA, 22 bp, synthetic construct
  misc_feature 1..22: note = chemically synthesized
  source 1..22: mol_type = other DNA
ctgcctcagtctcccaagtaac

SEQ ID NO: 152335 - DNA, 22 bp, synthetic construct
  misc_feature 1..22: note = chemically synthesized
  source 1..22: mol_type = other DNA
cctcagtctcccaagtaactgg

SEQ ID NO: 152336 - DNA, 22 bp, synthetic construct
  misc_feature 1..22: note = chemically synthesized
  source 1..22: mol_type = other DNA
agtctcccaagtaactgggatt

SEQ ID NO: 152337 - DNA, 22 bp, synthetic construct
  misc_feature 1..22: note = chemically synthesized
  source 1..22: mol_type = other DNA
ccaagtaactgggattacagga

SEQ ID NO: 152338 - DNA, 22 bp, synthetic construct
  misc_feature 1..22: note = chemically synthesized
  source 1..22: mol_type = other DNA
ggattacaggagcacactgcca

SEQ ID NO: 152339 - DNA, 22 bp, synthetic construct
  misc_feature 1..22: note = chemically synthesized
  source 1..22: mol_type = other DNA
caggagcacactgccatgccca

SEQ ID NO: 152340 - DNA, 22 bp, synthetic construct
  misc_feature 1..22: note = chemically synthesized
  source 1..22: mol_type = other DNA
ccatgcccagctaattattttt

SEQ ID NO: 152341 - DNA, 22 bp, synthetic construct
  misc_feature 1..22: note = chemically synthesized
  source 1..22: mol_type = other DNA
attatttttgtgttttagtaga

SEQ ID NO: 152342 - DNA, 22 bp, synthetic construct
  misc_feature 1..22: note = chemically synthesized
  source 1..22: mol_type = other DNA
tttttgtgttttagtagagaca

SEQ ID NO: 152343 - DNA, 22 bp, synthetic construct
  misc_feature 1..22: note = chemically synthesized
  source 1..22: mol_type = other DNA
ttgtgttttagtagagacaggg

SEQ ID NO: 152344 - DNA, 22 bp, synthetic construct
  misc_feature 1..22: note = chemically synthesized
  source 1..22: mol_type = other DNA
tgtgttttagtagagacagggt

SEQ ID NO: 152345 - DNA, 22 bp, synthetic construct
  misc_feature 1..22: note = chemically synthesized
  source 1..22: mol_type = other DNA
gtgttttagtagagacagggtt

SEQ ID NO: 152346 - DNA, 22 bp, synthetic construct
  misc_feature 1..22: note = chemically synthesized
  source 1..22: mol_type = other DNA
tgttttagtagagacagggttt

SEQ ID NO: 152347 - DNA, 22 bp, synthetic construct
  misc_feature 1..22: note = chemically synthesized
  source 1..22: mol_type = other DNA
tagtagagacagggtttcacca

SEQ ID NO: 152348 - DNA, 22 bp, synthetic construct
  misc_feature 1..22: note = chemically synthesized
  source 1..22: mol_type = other DNA
agtagagacagggtttcaccat

SEQ ID NO: 152349 - DNA, 22 bp, synthetic construct
  misc_feature 1..22: note = chemically synthesized
  source 1..22: mol_type = other DNA
gtagagacagggtttcaccatt

SEQ ID NO: 152350 - DNA, 22 bp, synthetic construct
  misc_feature 1..22: note = chemically synthesized
  source 1..22: mol_type = other DNA
caccattttgcccaggttggtc

SEQ ID NO: 152351 - DNA, 22 bp, synthetic construct
  misc_feature 1..22: note = chemically synthesized
  source 1..22: mol_type = other DNA
accattttgcccaggttggtct

SEQ ID NO: 152352 - DNA, 22 bp, synthetic construct
  misc_feature 1..22: note = chemically synthesized
  source 1..22: mol_type = other DNA
tgcccaggttggtctccaactc

SEQ ID NO: 152353 - DNA, 22 bp, synthetic construct
  misc_feature 1..22: note = chemically synthesized
  source 1..22: mol_type = other DNA
gcccaggttggtctccaactcc

SEQ ID NO: 152354 - DNA, 22 bp, synthetic construct
  misc_feature 1..22: note = chemically synthesized
  source 1..22: mol_type = other DNA
cccaggttggtctccaactcct

SEQ ID NO: 152355 - DNA, 22 bp, synthetic construct
  misc_feature 1..22: note = chemically synthesized
  source 1..22: mol_type = other DNA
gtctccaactcctgagctcagc

SEQ ID NO: 152356 - DNA, 22 bp, synthetic construct
  misc_feature 1..22: note = chemically synthesized
  source 1..22: mol_type = other DNA
caactcctgagctcagccaatc

SEQ ID NO: 152357 - DNA, 22 bp, synthetic construct
  misc_feature 1..22: note = chemically synthesized
  source 1..22: mol_type = other DNA
ctgagctcagccaatccacctg

SEQ ID NO: 152358 - DNA, 22 bp, synthetic construct
  misc_feature 1..22: note = chemically synthesized
  source 1..22: mol_type = other DNA
agctcagccaatccacctgcct

SEQ ID NO: 152359 - DNA, 22 bp, synthetic construct
  misc_feature 1..22: note = chemically synthesized
  source 1..22: mol_type = other DNA
agccaatccacctgcctcggcc

SEQ ID NO: 152360 - DNA, 22 bp, synthetic construct
  misc_feature 1..22: note = chemically synthesized
  source 1..22: mol_type = other DNA
cctcggcctcccaaagtgctag

SEQ ID NO: 152361 - DNA, 22 bp, synthetic construct
  misc_feature 1..22: note = chemically synthesized
  source 1..22: mol_type = other DNA
ggcctcccaaagtgctaggatt

SEQ ID NO: 152362 - DNA, 22 bp, synthetic construct
  misc_feature 1..22: note = chemically synthesized
  source 1..22: mol_type = other DNA
ccaaagtgctaggattacaggc

SEQ ID NO: 152363 - DNA, 22 bp, synthetic construct
  misc_feature 1..22: note = chemically synthesized
  source 1..22: mol_type = other DNA
ggattacaggcgtgagccacca

SEQ ID NO: 152364 - DNA, 22 bp, synthetic construct
  misc_feature 1..22: note = chemically synthesized
  source 1..22: mol_type = other DNA
caggcgtgagccaccaagcctg

SEQ ID NO: 152365 - DNA, 22 bp, synthetic construct
  misc_feature 1..22: note = chemically synthesized
  source 1..22: mol_type = other DNA
gctgaaagtagatacttttaac

SEQ ID NO: 152366 - DNA, 22 bp, synthetic construct
  misc_feature 1..22: note = chemically synthesized
  source 1..22: mol_type = other DNA
aaagtagatacttttaacacat

SEQ ID NO: 152367 - DNA, 22 bp, synthetic construct
  misc_feature 1..22: note = chemically synthesized
  source 1..22: mol_type = other DNA
ttaacacatacctacattcaca

SEQ ID NO: 152368 - DNA, 22 bp, synthetic construct
  misc_feature 1..22: note = chemically synthesized
  source 1..22: mol_type = other DNA
taacacatacctacattcacag

SEQ ID NO: 152369 - DNA, 22 bp, synthetic construct
  misc_feature 1..22: note = chemically synthesized
  source 1..22: mol_type = other DNA
aacacatacctacattcacaga

SEQ ID NO: 152370 - DNA, 22 bp, synthetic construct
  misc_feature 1..22: note = chemically synthesized
  source 1..22: mol_type = other DNA
acacatacctacattcacagaa

SEQ ID NO: 152371 - DNA, 22 bp, synthetic construct
  misc_feature 1..22: note = chemically synthesized
  source 1..22: mol_type = other DNA
cattcacagaatattaaatctt

SEQ ID NO: 152372 - DNA, 22 bp, synthetic construct
  misc_feature 1..22: note = chemically synthesized
  source 1..22: mol_type = other DNA
acagaatattaaatcttttgtg

SEQ ID NO: 152373 - DNA, 22 bp, synthetic construct
  misc_feature 1..22: note = chemically synthesized
  source 1..22: mol_type = other DNA
aatcttttgtgatcaatcccag

SEQ ID NO: 152374 - DNA, 22 bp, synthetic construct
  misc_feature 1..22: note = chemically synthesized
  source 1..22: mol_type = other DNA
ttgtgatcaatcccagatcctt

SEQ ID NO: 152375 - DNA, 22 bp, synthetic construct
  misc_feature 1..22: note = chemically synthesized
  source 1..22: mol_type = other DNA
tgtgatcaatcccagatccttg

SEQ ID NO: 152376 - DNA, 22 bp, synthetic construct
  misc_feature 1..22: note = chemically synthesized
  source 1..22: mol_type = other DNA
gtgatcaatcccagatccttga

SEQ ID NO: 152377 - DNA, 22 bp, synthetic construct
  misc_feature 1..22: note = chemically synthesized
  source 1..22: mol_type = other DNA
tgatcaatcccagatccttgac

SEQ ID NO: 152378 - DNA, 22 bp, synthetic construct
  misc_feature 1..22: note = chemically synthesized
  source 1..22: mol_type = other DNA
gacgatatgtctgagtcaggct

SEQ ID NO: 152379 - DNA, 22 bp, synthetic construct
  misc_feature 1..22: note = chemically synthesized
  source 1..22: mol_type = other DNA
acgatatgtctgagtcaggctg

SEQ ID NO: 152380 - DNA, 22 bp, synthetic construct
  misc_feature 1..22: note = chemically synthesized
  source 1..22: mol_type = other DNA
agtcaggctggaaatgagagaa

SEQ ID NO: 152381 - DNA, 22 bp, synthetic construct
  misc_feature 1..22: note = chemically synthesized
  source 1..22: mol_type = other DNA
gaaatgagagaaatcatgtttg

SEQ ID NO: 152382 - DNA, 22 bp, synthetic construct
  misc_feature 1..22: note = chemically synthesized
  source 1..22: mol_type = other DNA
gaaattggagtgttgtattcaa

SEQ ID NO: 152383 - DNA, 22 bp, synthetic construct
  misc_feature 1..22: note = chemically synthesized
  source 1..22: mol_type = other DNA
aaattggagtgttgtattcaag

SEQ ID NO: 152384 - DNA, 22 bp, synthetic construct
  misc_feature 1..22: note = chemically synthesized
  source 1..22: mol_type = other DNA
gagtgttgtattcaaggtcagc

SEQ ID NO: 152385 - DNA, 22 bp, synthetic construct
  misc_feature 1..22: note = chemically synthesized
  source 1..22: mol_type = other DNA
tattcaaggtcagcaagatccc

SEQ ID NO: 152386 - DNA, 22 bp, synthetic construct
  misc_feature 1..22: note = chemically synthesized
  source 1..22: mol_type = other DNA
aaggtcagcaagatccctggag

SEQ ID NO: 152387 - DNA, 22 bp, synthetic construct
  misc_feature 1..22: note = chemically synthesized
  source 1..22: mol_type = other DNA
gagcagcatctgttttataaac

SEQ ID NO: 152388 - DNA, 22 bp, synthetic construct
  misc_feature 1..22: note = chemically synthesized
  source 1..22: mol_type = other DNA
ttttataaaccattcaaacttg

SEQ ID NO: 152389 - DNA, 22 bp, synthetic construct
  misc_feature 1..22: note = chemically synthesized
  source 1..22: mol_type = other DNA
tataaaccattcaaacttggta

SEQ ID NO: 152390 - DNA, 22 bp, synthetic construct
  misc_feature 1..22: note = chemically synthesized
  source 1..22: mol_type = other DNA
ataaaccattcaaacttggtat

SEQ ID NO: 152391 - DNA, 22 bp, synthetic construct
  misc_feature 1..22: note = chemically synthesized
  source 1..22: mol_type = other DNA
taaaccattcaaacttggtata

SEQ ID NO: 152392 - DNA, 22 bp, synthetic construct
  misc_feature 1..22: note = chemically synthesized
  source 1..22: mol_type = other DNA
aaacttggtatatgatgactca

SEQ ID NO: 152393 - DNA, 22 bp, synthetic construct
  misc_feature 1..22: note = chemically synthesized
  source 1..22: mol_type = other DNA
ggtatatgatgactcaattggt

SEQ ID NO: 152394 - DNA, 22 bp, synthetic construct
  misc_feature 1..22: note = chemically synthesized
  source 1..22: mol_type = other DNA
gtatatgatgactcaattggtg

SEQ ID NO: 152395 - DNA, 22 bp, synthetic construct
  misc_feature 1..22: note = chemically synthesized
  source 1..22: mol_type = other DNA
aattggtggccaaaggtcagaa

SEQ ID NO: 152396 - DNA, 22 bp, synthetic construct
  misc_feature 1..22: note = chemically synthesized
  source 1..22: mol_type = other DNA
gtggccaaaggtcagaaaagac

SEQ ID NO: 152397 - DNA, 22 bp, synthetic construct
  misc_feature 1..22: note = chemically synthesized
  source 1..22: mol_type = other DNA
agtgtacacagatgattttaca

SEQ ID NO: 152398 - DNA, 22 bp, synthetic construct
  misc_feature 1..22: note = chemically synthesized
  source 1..22: mol_type = other DNA
tacacacactttgataggagtg

SEQ ID NO: 152399 - DNA, 22 bp, synthetic construct
  misc_feature 1..22: note = chemically synthesized
  source 1..22: mol_type = other DNA
acacacactttgataggagtgt

SEQ ID NO: 152400 - DNA, 22 bp, synthetic construct
  misc_feature 1..22: note = chemically synthesized
  source 1..22: mol_type = other DNA
cacacactttgataggagtgtt

SEQ ID NO: 152401 - DNA, 22 bp, synthetic construct
  misc_feature 1..22: note = chemically synthesized
  source 1..22: mol_type = other DNA
tgataggagtgttcacattcat

SEQ ID NO: 152402 - DNA, 22 bp, synthetic construct
  misc_feature 1..22: note = chemically synthesized
  source 1..22: mol_type = other DNA
gataggagtgttcacattcata

SEQ ID NO: 152403 - DNA, 22 bp, synthetic construct
  misc_feature 1..22: note = chemically synthesized
  source 1..22: mol_type = other DNA
ataggagtgttcacattcatat

SEQ ID NO: 152404 - DNA, 22 bp, synthetic construct
  misc_feature 1..22: note = chemically synthesized
  source 1..22: mol_type = other DNA
acattcatattatctttatatc

SEQ ID NO: 152405 - DNA, 22 bp, synthetic construct
  misc_feature 1..22: note = chemically synthesized
  source 1..22: mol_type = other DNA
atattatctttatatctctgtg

SEQ ID NO: 152406 - DNA, 22 bp, synthetic construct
  misc_feature 1..22: note = chemically synthesized
  source 1..22: mol_type = other DNA
tctttatatctctgtgattgtc

SEQ ID NO: 152407 - DNA, 22 bp, synthetic construct
  misc_feature 1..22: note = chemically synthesized
  source 1..22: mol_type = other DNA
tatatctctgtgattgtctagc

SEQ ID NO: 152408 - DNA, 22 bp, synthetic construct
  misc_feature 1..22: note = chemically synthesized
  source 1..22: mol_type = other DNA
atatctctgtgattgtctagct

SEQ ID NO: 152409 - DNA, 22 bp, synthetic construct
  misc_feature 1..22: note = chemically synthesized
  source 1..22: mol_type = other DNA
tatctctgtgattgtctagctc

SEQ ID NO: 152410 - DNA, 22 bp, synthetic construct
  misc_feature 1..22: note = chemically synthesized
  source 1..22: mol_type = other DNA
tgtgattgtctagctcttattt

SEQ ID NO: 152411 - DNA, 22 bp, synthetic construct
  misc_feature 1..22: note = chemically synthesized
  source 1..22: mol_type = other DNA
tgattgtctagctcttatttca

SEQ ID NO: 152412 - DNA, 22 bp, synthetic construct
  misc_feature 1..22: note = chemically synthesized
  source 1..22: mol_type = other DNA
tctagctcttatttcatagaat

SEQ ID NO: 152413 - DNA, 22 bp, synthetic construct
  misc_feature 1..22: note = chemically synthesized
  source 1..22: mol_type = other DNA
gctcttatttcatagaataatt

SEQ ID NO: 152414 - DNA, 22 bp, synthetic construct
  misc_feature 1..22: note = chemically synthesized
  source 1..22: mol_type = other DNA
ttatttcatagaataattaatt

SEQ ID NO: 152415 - DNA, 22 bp, synthetic construct
  misc_feature 1..22: note = chemically synthesized
  source 1..22: mol_type = other DNA
atttcatagaataattaattaa

SEQ ID NO: 152416 - DNA, 22 bp, synthetic construct
  misc_feature 1..22: note = chemically synthesized
  source 1..22: mol_type = other DNA
tttcatagaataattaattaaa

SEQ ID NO: 152417 - DNA, 22 bp, synthetic construct
  misc_feature 1..22: note = chemically synthesized
  source 1..22: mol_type = other DNA
catagaataattaattaaaaat

SEQ ID NO: 152418 - DNA, 22 bp, synthetic construct
  misc_feature 1..22: note = chemically synthesized
  source 1..22: mol_type = other DNA
atagaataattaattaaaaatt

SEQ ID NO: 152419 - DNA, 22 bp, synthetic construct
  misc_feature 1..22: note = chemically synthesized
  source 1..22: mol_type = other DNA
attaaaaattatttgataagtg

SEQ ID NO: 152420 - DNA, 22 bp, synthetic construct
  misc_feature 1..22: note = chemically synthesized
  source 1..22: mol_type = other DNA
aaaattatttgataagtgccca

SEQ ID NO: 152421 - DNA, 22 bp, synthetic construct
  misc_feature 1..22: note = chemically synthesized
  source 1..22: mol_type = other DNA
tttgataagtgcccattctatg

SEQ ID NO: 152422 - DNA, 22 bp, synthetic construct
  misc_feature 1..22: note = chemically synthesized
  source 1..22: mol_type = other DNA
gataagtgcccattctatgcta

SEQ ID NO: 152423 - DNA, 22 bp, synthetic construct
  misc_feature 1..22: note = chemically synthesized
  source 1..22: mol_type = other DNA
ataagtgcccattctatgctaa

SEQ ID NO: 152424 - DNA, 22 bp, synthetic construct
  misc_feature 1..22: note = chemically synthesized
  source 1..22: mol_type = other DNA
tatgctaacccttatttttcat

SEQ ID NO: 152425 - DNA, 22 bp, synthetic construct
  misc_feature 1..22: note = chemically synthesized
  source 1..22: mol_type = other DNA
tgctaacccttatttttcatat

SEQ ID NO: 152426 - DNA, 22 bp, synthetic construct
  misc_feature 1..22: note = chemically synthesized
  source 1..22: mol_type = other DNA
acccttatttttcatattcttg

SEQ ID NO: 152427 - DNA, 22 bp, synthetic construct
  misc_feature 1..22: note = chemically synthesized
  source 1..22: mol_type = other DNA
atttttcatattcttgagcaaa

SEQ ID NO: 152428 - DNA, 22 bp, synthetic construct
  misc_feature 1..22: note = chemically synthesized
  source 1..22: mol_type = other DNA
tttttcatattcttgagcaaaa

SEQ ID NO: 152429 - DNA, 22 bp, synthetic construct
  misc_feature 1..22: note = chemically synthesized
  source 1..22: mol_type = other DNA
ttcatattcttgagcaaaaaac

SEQ ID NO: 152430 - DNA, 22 bp, synthetic construct
  misc_feature 1..22: note = chemically synthesized
  source 1..22: mol_type = other DNA
tcatattcttgagcaaaaaaca

SEQ ID NO: 152431 - DNA, 22 bp, synthetic construct
  misc_feature 1..22: note = chemically synthesized
  source 1..22: mol_type = other DNA
catattcttgagcaaaaaacag

SEQ ID NO: 152432 - DNA, 22 bp, synthetic construct
  misc_feature 1..22: note = chemically synthesized
  source 1..22: mol_type = other DNA
atattcttgagcaaaaaacaga

SEQ ID NO: 152433 - DNA, 22 bp, synthetic construct
  misc_feature 1..22: note = chemically synthesized
  source 1..22: mol_type = other DNA
ttgagcaaaaaacagatatggt

SEQ ID NO: 152434 - DNA, 22 bp, synthetic construct
  misc_feature 1..22: note = chemically synthesized
  source 1..22: mol_type = other DNA
gagcaaaaaacagatatggttc

SEQ ID NO: 152435 - DNA, 22 bp, synthetic construct
  misc_feature 1..22: note = chemically synthesized
  source 1..22: mol_type = other DNA
agcaaaaaacagatatggttcc

SEQ ID NO: 152436 - DNA, 22 bp, synthetic construct
  misc_feature 1..22: note = chemically synthesized
  source 1..22: mol_type = other DNA
ctaatcttctacagcctctaat

SEQ ID NO: 152437 - DNA, 22 bp, synthetic construct
  misc_feature 1..22: note = chemically synthesized
  source 1..22: mol_type = other DNA
atcttctacagcctctaatgaa

SEQ ID NO: 152438 - DNA, 22 bp, synthetic construct
  misc_feature 1..22: note = chemically synthesized
  source 1..22: mol_type = other DNA
ctacagcctctaatgaatctaa

SEQ ID NO: 152439 - DNA, 22 bp, synthetic construct
  misc_feature 1..22: note = chemically synthesized
  source 1..22: mol_type = other DNA
tacagcctctaatgaatctaat

SEQ ID NO: 152440 - DNA, 22 bp, synthetic construct
  misc_feature 1..22: note = chemically synthesized
  source 1..22: mol_type = other DNA
cagcctctaatgaatctaatgg

SEQ ID NO: 152441 - DNA, 22 bp, synthetic construct
  misc_feature 1..22: note = chemically synthesized
  source 1..22: mol_type = other DNA
taatgaatctaatggaaattca

SEQ ID NO: 152442 - DNA, 22 bp, synthetic construct
  misc_feature 1..22: note = chemically synthesized
  source 1..22: mol_type = other DNA
atgaatctaatggaaattcagt

SEQ ID NO: 152443 - DNA, 22 bp, synthetic construct
  misc_feature 1..22: note = chemically synthesized
  source 1..22: mol_type = other DNA
atggaaattcagtgtataataa

SEQ ID NO: 152444 - DNA, 22 bp, synthetic construct
  misc_feature 1..22: note = chemically synthesized
  source 1..22: mol_type = other DNA
agtgtataataagtggtataaa

SEQ ID NO: 152445 - DNA, 22 bp, synthetic construct
  misc_feature 1..22: note = chemically synthesized
  source 1..22: mol_type = other DNA
gtatactgtgatgagagtaagt

SEQ ID NO: 152446 - DNA, 22 bp, synthetic construct
  misc_feature 1..22: note = chemically synthesized
  source 1..22: mol_type = other DNA
tgatgagagtaagttagttaag

SEQ ID NO: 152447 - DNA, 22 bp, synthetic construct
  misc_feature 1..22: note = chemically synthesized
  source 1..22: mol_type = other DNA
gttaagggggttgaagaaatga

SEQ ID NO: 152448 - DNA, 22 bp, synthetic construct
  misc_feature 1..22: note = chemically synthesized
  source 1..22: mol_type = other DNA
agggggttgaagaaatgagata

SEQ ID NO: 152449 - DNA, 22 bp, synthetic construct
  misc_feature 1..22: note = chemically synthesized
  source 1..22: mol_type = other DNA
aagaaatgagataatctaggtg

SEQ ID NO: 152450 - DNA, 22 bp, synthetic construct
  misc_feature 1..22: note = chemically synthesized
  source 1..22: mol_type = other DNA
ggtggggagcagtattagaaaa

SEQ ID NO: 152451 - DNA, 22 bp, synthetic construct
  misc_feature 1..22: note = chemically synthesized
  source 1..22: mol_type = other DNA
gaaaaatccccctgaggaagta

SEQ ID NO: 152452 - DNA, 22 bp, synthetic construct
  misc_feature 1..22: note = chemically synthesized
  source 1..22: mol_type = other DNA
aggaagtaatcattttaactca

SEQ ID NO: 152453 - DNA, 22 bp, synthetic construct
  misc_feature 1..22: note = chemically synthesized
  source 1..22: mol_type = other DNA
taactcaaaagttaatggtgaa

SEQ ID NO: 152454 - DNA, 22 bp, synthetic construct
  misc_feature 1..22: note = chemically synthesized
  source 1..22: mol_type = other DNA
aactcaaaagttaatggtgaaa

SEQ ID NO: 152455 - DNA, 22 bp, synthetic construct
  misc_feature 1..22: note = chemically synthesized
  source 1..22: mol_type = other DNA
actcaaaagttaatggtgaaag

SEQ ID NO: 152456 - DNA, 22 bp, synthetic construct
  misc_feature 1..22: note = chemically synthesized
  source 1..22: mol_type = other DNA
aaaagttaatggtgaaaggaat

SEQ ID NO: 152457 - DNA, 22 bp, synthetic construct
  misc_feature 1..22: note = chemically synthesized
  source 1..22: mol_type = other DNA
atggtgaaaggaattgctgtgc

SEQ ID NO: 152458 - DNA, 22 bp, synthetic construct
  misc_feature 1..22: note = chemically synthesized
  source 1..22: mol_type = other DNA
ctgtgcaaatacttggggtaga

SEQ ID NO: 152459 - DNA, 22 bp, synthetic construct
  misc_feature 1..22: note = chemically synthesized
  source 1..22: mol_type = other DNA
tgcaaatacttggggtagataa

SEQ ID NO: 152460 - DNA, 22 bp, synthetic construct
  misc_feature 1..22: note = chemically synthesized
  source 1..22: mol_type = other DNA
ggggtagataattcggagcaca

SEQ ID NO: 152461 - DNA, 22 bp, synthetic construct
  misc_feature 1..22: note = chemically synthesized
  source 1..22: mol_type = other DNA
gggtagataattcggagcacag

SEQ ID NO: 152462 - DNA, 22 bp, synthetic construct
  misc_feature 1..22: note = chemically synthesized
  source 1..22: mol_type = other DNA
ggagcacagagaagaccatggg

SEQ ID NO: 152463 - DNA, 22 bp, synthetic construct
  misc_feature 1..22: note = chemically synthesized
  source 1..22: mol_type = other DNA
agacatgcatgtacttagcttg

SEQ ID NO: 152464 - DNA, 22 bp, synthetic construct
  misc_feature 1..22: note = chemically synthesized
  source 1..22: mol_type = other DNA
agcttgttttgaggaagataaa

SEQ ID NO: 152465 - DNA, 22 bp, synthetic construct
  misc_feature 1..22: note = chemically synthesized
  source 1..22: mol_type = other DNA
gcttgttttgaggaagataaag

SEQ ID NO: 152466 - DNA, 22 bp, synthetic construct
  misc_feature 1..22: note = chemically synthesized
  source 1..22: mol_type = other DNA
gttttgaggaagataaagatac

SEQ ID NO: 152467 - DNA, 22 bp, synthetic construct
  misc_feature 1..22: note = chemically synthesized
  source 1..22: mol_type = other DNA
ttttgaggaagataaagatacc

SEQ ID NO: 152468 - DNA, 22 bp, synthetic construct
  misc_feature 1..22: note = chemically synthesized
  source 1..22: mol_type = other DNA
tgaggaagataaagatacctaa

SEQ ID NO: 152469 - DNA, 22 bp, synthetic construct
  misc_feature 1..22: note = chemically synthesized
  source 1..22: mol_type = other DNA
gaggaagataaagatacctaaa

SEQ ID NO: 152470 - DNA, 22 bp, synthetic construct
  misc_feature 1..22: note = chemically synthesized
  source 1..22: mol_type = other DNA
aggaagataaagatacctaaat

SEQ ID NO: 152471 - DNA, 22 bp, synthetic construct
  misc_feature 1..22: note = chemically synthesized
  source 1..22: mol_type = other DNA
aatattaaggagtgtaggcagt

SEQ ID NO: 152472 - DNA, 22 bp, synthetic construct
  misc_feature 1..22: note = chemically synthesized
  source 1..22: mol_type = other DNA
aggagtgtaggcagtagtggtc

SEQ ID NO: 152473 - DNA, 22 bp, synthetic construct
  misc_feature 1..22: note = chemically synthesized
  source 1..22: mol_type = other DNA
aagatgtaatagaagaggcagg

SEQ ID NO: 152474 - DNA, 22 bp, synthetic construct
  misc_feature 1..22: note = chemically synthesized
  source 1..22: mol_type = other DNA
tacaaggctttttgactatgat

SEQ ID NO: 152475 - DNA, 22 bp, synthetic construct
  misc_feature 1..22: note = chemically synthesized
  source 1..22: mol_type = other DNA
tttgactatgataaagaatttg

SEQ ID NO: 152476 - DNA, 22 bp, synthetic construct
  misc_feature 1..22: note = chemically synthesized
  source 1..22: mol_type = other DNA
ttgactatgataaagaatttgt

SEQ ID NO: 152477 - DNA, 22 bp, synthetic construct
  misc_feature 1..22: note = chemically synthesized
  source 1..22: mol_type = other DNA
tgactatgataaagaatttgta

SEQ ID NO: 152478 - DNA, 22 bp, synthetic construct
  misc_feature 1..22: note = chemically synthesized
  source 1..22: mol_type = other DNA
gactatgataaagaatttgtat

SEQ ID NO: 152479 - DNA, 22 bp, synthetic construct
  misc_feature 1..22: note = chemically synthesized
  source 1..22: mol_type = other DNA
actatgataaagaatttgtatt

SEQ ID NO: 152480 - DNA, 22 bp, synthetic construct
  misc_feature 1..22: note = chemically synthesized
  source 1..22: mol_type = other DNA
tgataaagaatttgtattttac

SEQ ID NO: 152481 - DNA, 22 bp, synthetic construct
  misc_feature 1..22: note = chemically synthesized
  source 1..22: mol_type = other DNA
gtattttacattacgagcaatg

SEQ ID NO: 152482 - DNA, 22 bp, synthetic construct
  misc_feature 1..22: note = chemically synthesized
  source 1..22: mol_type = other DNA
tattttacattacgagcaatgg

SEQ ID NO: 152483 - DNA, 22 bp, synthetic construct
  misc_feature 1..22: note = chemically synthesized
  source 1..22: mol_type = other DNA
tacattacgagcaatgggtaag

SEQ ID NO: 152484 - DNA, 22 bp, synthetic construct
  misc_feature 1..22: note = chemically synthesized
  source 1..22: mol_type = other DNA
acattacgagcaatgggtaagt

SEQ ID NO: 152485 - DNA, 22 bp, synthetic construct
  misc_feature 1..22: note = chemically synthesized
  source 1..22: mol_type = other DNA
cattacgagcaatgggtaagtg

SEQ ID NO: 152486 - DNA, 22 bp, synthetic construct
  misc_feature 1..22: note = chemically synthesized
  source 1..22: mol_type = other DNA
cgagcaatgggtaagtgaccat

SEQ ID NO: 152487 - DNA, 22 bp, synthetic construct
  misc_feature 1..22: note = chemically synthesized
  source 1..22: mol_type = other DNA
tttcaacaaaggtttgtgtgat

SEQ ID NO: 152488 - DNA, 22 bp, synthetic construct
  misc_feature 1..22: note = chemically synthesized
  source 1..22: mol_type = other DNA
ttcaacaaaggtttgtgtgatt

SEQ ID NO: 152489 - DNA, 22 bp, synthetic construct
  misc_feature 1..22: note = chemically synthesized
  source 1..22: mol_type = other DNA
tcaacaaaggtttgtgtgattt

SEQ ID NO: 152490 - DNA, 22 bp, synthetic construct
  misc_feature 1..22: note = chemically synthesized
  source 1..22: mol_type = other DNA
caacaaaggtttgtgtgattta

SEQ ID NO: 152491 - DNA, 22 bp, synthetic construct
  misc_feature 1..22: note = chemically synthesized
  source 1..22: mol_type = other DNA
aacaaaggtttgtgtgatttag

SEQ ID NO: 152492 - DNA, 22 bp, synthetic construct
  misc_feature 1..22: note = chemically synthesized
  source 1..22: mol_type = other DNA
gtgtgatttagtagatgtttgt

SEQ ID NO: 152493 - DNA, 22 bp, synthetic construct
  misc_feature 1..22: note = chemically synthesized
  source 1..22: mol_type = other DNA
tgtgatttagtagatgtttgta

SEQ ID NO: 152494 - DNA, 22 bp, synthetic construct
  misc_feature 1..22: note = chemically synthesized
  source 1..22: mol_type = other DNA
agtagatgtttgtagaaaagca

SEQ ID NO: 152495 - DNA, 22 bp, synthetic construct
  misc_feature 1..22: note = chemically synthesized
  source 1..22: mol_type = other DNA
gtagatgtttgtagaaaagcaa

SEQ ID NO: 152496 - DNA, 22 bp, synthetic construct
  misc_feature 1..22: note = chemically synthesized
  source 1..22: mol_type = other DNA
gtagaaaagcaatttggtttcc

SEQ ID NO: 152497 - DNA, 22 bp, synthetic construct
  misc_feature 1..22: note = chemically synthesized
  source 1..22: mol_type = other DNA
tagaaaagcaatttggtttccc

SEQ ID NO: 152498 - DNA, 22 bp, synthetic construct
  misc_feature 1..22: note = chemically synthesized
  source 1..22: mol_type = other DNA
ggtttccctggagataatacat

SEQ ID NO: 152499 - DNA, 22 bp, synthetic construct
  misc_feature 1..22: note = chemically synthesized
  source 1..22: mol_type = other DNA
gtttccctggagataatacatt

SEQ ID NO: 152500 - DNA, 22 bp, synthetic construct
  misc_feature 1..22: note = chemically synthesized
  source 1..22: mol_type = other DNA
ccctggagataatacatttttt

SEQ ID NO: 152501 - DNA, 22 bp, synthetic construct
  misc_feature 1..22: note = chemically synthesized
  source 1..22: mol_type = other DNA
cctggagataatacatttttta

SEQ ID NO: 152502 - DNA, 22 bp, synthetic construct
  misc_feature 1..22: note = chemically synthesized
  source 1..22: mol_type = other DNA
gagataatacattttttagagg

SEQ ID NO: 152503 - DNA, 22 bp, synthetic construct
  misc_feature 1..22: note = chemically synthesized
  source 1..22: mol_type = other DNA
tttagaggacaaacagataaat

SEQ ID NO: 152504 - DNA, 22 bp, synthetic construct
  misc_feature 1..22: note = chemically synthesized
  source 1..22: mol_type = other DNA
ttagaggacaaacagataaatc

SEQ ID NO: 152505 - DNA, 22 bp, synthetic construct
  misc_feature 1..22: note = chemically synthesized
  source 1..22: mol_type = other DNA
tagaggacaaacagataaatca

SEQ ID NO: 152506 - DNA, 22 bp, synthetic construct
  misc_feature 1..22: note = chemically synthesized
  source 1..22: mol_type = other DNA
agaggacaaacagataaatcat

SEQ ID NO: 152507 - DNA, 22 bp, synthetic construct
  misc_feature 1..22: note = chemically synthesized
  source 1..22: mol_type = other DNA
gaggacaaacagataaatcatg

SEQ ID NO: 152508 - DNA, 22 bp, synthetic construct
  misc_feature 1..22: note = chemically synthesized
  source 1..22: mol_type = other DNA
gctagtaataatattaaattat

SEQ ID NO: 152509 - DNA, 22 bp, synthetic construct
  misc_feature 1..22: note = chemically synthesized
  source 1..22: mol_type = other DNA
gtaataatattaaattattatt

SEQ ID NO: 152510 - DNA, 22 bp, synthetic construct
  misc_feature 1..22: note = chemically synthesized
  source 1..22: mol_type = other DNA
aattattattaatttaataaat

SEQ ID NO: 152511 - DNA, 22 bp, synthetic construct
  misc_feature 1..22: note = chemically synthesized
  source 1..22: mol_type = other DNA
ttattaatttaataaattatca

SEQ ID NO: 152512 - DNA, 22 bp, synthetic construct
  misc_feature 1..22: note = chemically synthesized
  source 1..22: mol_type = other DNA
ttaatttaataaattatcatag

SEQ ID NO: 152513 - DNA, 22 bp, synthetic construct
  misc_feature 1..22: note = chemically synthesized
  source 1..22: mol_type = other DNA
atttaataaattatcatagtag

SEQ ID NO: 152514 - DNA, 22 bp, synthetic construct
  misc_feature 1..22: note = chemically synthesized
  source 1..22: mol_type = other DNA
aataaattatcatagtagccag

SEQ ID NO: 152515 - DNA, 22 bp, synthetic construct
  misc_feature 1..22: note = chemically synthesized
  source 1..22: mol_type = other DNA
ataaattatcatagtagccagg

SEQ ID NO: 152516 - DNA, 22 bp, synthetic construct
  misc_feature 1..22: note = chemically synthesized
  source 1..22: mol_type = other DNA
tcatagtagccagggaaacaat

SEQ ID NO: 152517 - DNA, 22 bp, synthetic construct
  misc_feature 1..22: note = chemically synthesized
  source 1..22: mol_type = other DNA
taaaccaagacgggcaatgtgt

SEQ ID NO: 152518 - DNA, 22 bp, synthetic construct
  misc_feature 1..22: note = chemically synthesized
  source 1..22: mol_type = other DNA
tctgggatgtgtttctggtaga

SEQ ID NO: 152519 - DNA, 22 bp, synthetic construct
  misc_feature 1..22: note = chemically synthesized
  source 1..22: mol_type = other DNA
ggatgtgtttctggtagaaatg

SEQ ID NO: 152520 - DNA, 22 bp, synthetic construct
  misc_feature 1..22: note = chemically synthesized
  source 1..22: mol_type = other DNA
ctggtagaaatggtagaaattg

SEQ ID NO: 152521 - DNA, 22 bp, synthetic construct
  misc_feature 1..22: note = chemically synthesized
  source 1..22: mol_type = other DNA
tggtagaaatggtagaaattga

SEQ ID NO: 152522 - DNA, 22 bp, synthetic construct
  misc_feature 1..22: note = chemically synthesized
  source 1..22: mol_type = other DNA
gtagaaatggtagaaattgatg

SEQ ID NO: 152523 - DNA, 22 bp, synthetic construct
  misc_feature 1..22: note = chemically synthesized
  source 1..22: mol_type = other DNA
atgaaagatttgatggagagag

SEQ ID NO: 152524 - DNA, 22 bp, synthetic construct
  misc_feature 1..22: note = chemically synthesized
  source 1..22: mol_type = other DNA
gatggagagaggaaagggaagg

SEQ ID NO: 152525 - DNA, 22 bp, synthetic construct
  misc_feature 1..22: note = chemically synthesized
  source 1..22: mol_type = other DNA
atggagagaggaaagggaagga

SEQ ID NO: 152526 - DNA, 22 bp, synthetic construct
  misc_feature 1..22: note = chemically synthesized
  source 1..22: mol_type = other DNA
taaaaatgactcaagacttgtc

SEQ ID NO: 152527 - DNA, 22 bp, synthetic construct
  misc_feature 1..22: note = chemically synthesized
  source 1..22: mol_type = other DNA
aaaaatgactcaagacttgtct

SEQ ID NO: 152528 - DNA, 22 bp, synthetic construct
  misc_feature 1..22: note = chemically synthesized
  source 1..22: mol_type = other DNA
aaaatgactcaagacttgtctt

SEQ ID NO: 152529 - DNA, 22 bp, synthetic construct
  misc_feature 1..22: note = chemically synthesized
  source 1..22: mol_type = other DNA
aagacttgtcttatgcaattgt

SEQ ID NO: 152530 - DNA, 22 bp, synthetic construct
  misc_feature 1..22: note = chemically synthesized
  source 1..22: mol_type = other DNA
gtcttatgcaattgtgttattg

SEQ ID NO: 152531 - DNA, 22 bp, synthetic construct
  misc_feature 1..22: note = chemically synthesized
  source 1..22: mol_type = other DNA
tcttatgcaattgtgttattgg

SEQ ID NO: 152532 - DNA, 22 bp, synthetic construct
  misc_feature 1..22: note = chemically synthesized
  source 1..22: mol_type = other DNA
atgcaattgtgttattggtgga

SEQ ID NO: 152533 - DNA, 22 bp, synthetic construct
  misc_feature 1..22: note = chemically synthesized
  source 1..22: mol_type = other DNA
tgcaattgtgttattggtggag

SEQ ID NO: 152534 - DNA, 22 bp, synthetic construct
  misc_feature 1..22: note = chemically synthesized
  source 1..22: mol_type = other DNA
tgttattggtggagtcacttta

SEQ ID NO: 152535 - DNA, 22 bp, synthetic construct
  misc_feature 1..22: note = chemically synthesized
  source 1..22: mol_type = other DNA
ttggtggagtcactttataata

SEQ ID NO: 152536 - DNA, 22 bp, synthetic construct
  misc_feature 1..22: note = chemically synthesized
  source 1..22: mol_type = other DNA
gtggagtcactttataatatta

SEQ ID NO: 152537 - DNA, 22 bp, synthetic construct
  misc_feature 1..22: note = chemically synthesized
  source 1..22: mol_type = other DNA
tataatattaggagaaaaggga

SEQ ID NO: 152538 - DNA, 22 bp, synthetic construct
  misc_feature 1..22: note = chemically synthesized
  source 1..22: mol_type = other DNA
ataatattaggagaaaagggac

SEQ ID NO: 152539 - DNA, 22 bp, synthetic construct
  misc_feature 1..22: note = chemically synthesized
  source 1..22: mol_type = other DNA
taatattaggagaaaagggaca

SEQ ID NO: 152540 - DNA, 22 bp, synthetic construct
  misc_feature 1..22: note = chemically synthesized
  source 1..22: mol_type = other DNA
ggagaaaagggacagaaaatag

SEQ ID NO: 152541 - DNA, 22 bp, synthetic construct
  misc_feature 1..22: note = chemically synthesized
  source 1..22: mol_type = other DNA
tggggggaaaatcaagtacttt

SEQ ID NO: 152542 - DNA, 22 bp, synthetic construct
  misc_feature 1..22: note = chemically synthesized
  source 1..22: mol_type = other DNA
ggggggaaaatcaagtacttta

SEQ ID NO: 152543 - DNA, 22 bp, synthetic construct
  misc_feature 1..22: note = chemically synthesized
  source 1..22: mol_type = other DNA
gggggaaaatcaagtactttat

SEQ ID NO: 152544 - DNA, 22 bp, synthetic construct
  misc_feature 1..22: note = chemically synthesized
  source 1..22: mol_type = other DNA
tattggcatcattcttatttta

SEQ ID NO: 152545 - DNA, 22 bp, synthetic construct
  misc_feature 1..22: note = chemically synthesized
  source 1..22: mol_type = other DNA
attggcatcattcttattttaa

SEQ ID NO: 152546 - DNA, 22 bp, synthetic construct
  misc_feature 1..22: note = chemically synthesized
  source 1..22: mol_type = other DNA
ttggcatcattcttattttaag

SEQ ID NO: 152547 - DNA, 22 bp, synthetic construct
  misc_feature 1..22: note = chemically synthesized
  source 1..22: mol_type = other DNA
gcatcattcttattttaagatt

SEQ ID NO: 152548 - DNA, 22 bp, synthetic construct
  misc_feature 1..22: note = chemically synthesized
  source 1..22: mol_type = other DNA
ttattttaagattaaacactca

SEQ ID NO: 152549 - DNA, 22 bp, synthetic construct
  misc_feature 1..22: note = chemically synthesized
  source 1..22: mol_type = other DNA
attttaagattaaacactcaga

SEQ ID NO: 152550 - DNA, 22 bp, synthetic construct
  misc_feature 1..22: note = chemically synthesized
  source 1..22: mol_type = other DNA
ttttaagattaaacactcagat

SEQ ID NO: 152551 - DNA, 22 bp, synthetic construct
  misc_feature 1..22: note = chemically synthesized
  source 1..22: mol_type = other DNA
taagattaaacactcagatgaa

SEQ ID NO: 152552 - DNA, 22 bp, synthetic construct
  misc_feature 1..22: note = chemically synthesized
  source 1..22: mol_type = other DNA
aagattaaacactcagatgaat

SEQ ID NO: 152553 - DNA, 22 bp, synthetic construct
  misc_feature 1..22: note = chemically synthesized
  source 1..22: mol_type = other DNA
agattaaacactcagatgaata

SEQ ID NO: 152554 - DNA, 22 bp, synthetic construct
  misc_feature 1..22: note = chemically synthesized
  source 1..22: mol_type = other DNA
aacactcagatgaatatattaa

SEQ ID NO: 152555 - DNA, 22 bp, synthetic construct
  misc_feature 1..22: note = chemically synthesized
  source 1..22: mol_type = other DNA
agatgaatatattaaatagcca

SEQ ID NO: 152556 - DNA, 22 bp, synthetic construct
  misc_feature 1..22: note = chemically synthesized
  source 1..22: mol_type = other DNA
aatagccagttgtattcatgaa

SEQ ID NO: 152557 - DNA, 22 bp, synthetic construct
  misc_feature 1..22: note = chemically synthesized
  source 1..22: mol_type = other DNA
tattcatgaatttgagctctca

SEQ ID NO: 152558 - DNA, 22 bp, synthetic construct
  misc_feature 1..22: note = chemically synthesized
  source 1..22: mol_type = other DNA
atgaatttgagctctcaggagt

SEQ ID NO: 152559 - DNA, 22 bp, synthetic construct
  misc_feature 1..22: note = chemically synthesized
  source 1..22: mol_type = other DNA
gagctctcaggagtggtcagga

SEQ ID NO: 152560 - DNA, 22 bp, synthetic construct
  misc_feature 1..22: note = chemically synthesized
  source 1..22: mol_type = other DNA
agctctcaggagtggtcaggaa

SEQ ID NO: 152561 - DNA, 22 bp, synthetic construct
  misc_feature 1..22: note = chemically synthesized
  source 1..22: mol_type = other DNA
tcaggagtggtcaggaatcaga

SEQ ID NO: 152562 - DNA, 22 bp, synthetic construct
  misc_feature 1..22: note = chemically synthesized
  source 1..22: mol_type = other DNA
aggagtggtcaggaatcagagg

SEQ ID NO: 152563 - DNA, 22 bp, synthetic construct
  misc_feature 1..22: note = chemically synthesized
  source 1..22: mol_type = other DNA
gtttcaaataataagaaaaagt

SEQ ID NO: 152564 - DNA, 22 bp, synthetic construct
  misc_feature 1..22: note = chemically synthesized
  source 1..22: mol_type = other DNA
caaataataagaaaaagttgac

SEQ ID NO: 152565 - DNA, 22 bp, synthetic construct
  misc_feature 1..22: note = chemically synthesized
  source 1..22: mol_type = other DNA
aaataataagaaaaagttgaca

SEQ ID NO: 152566 - DNA, 22 bp, synthetic construct
  misc_feature 1..22: note = chemically synthesized
  source 1..22: mol_type = other DNA
acatagtctgcacattaaggaa

SEQ ID NO: 152567 - DNA, 22 bp, synthetic construct
  misc_feature 1..22: note = chemically synthesized
  source 1..22: mol_type = other DNA
cacattaaggaactgagaattt

SEQ ID NO: 152568 - DNA, 22 bp, synthetic construct
  misc_feature 1..22: note = chemically synthesized
  source 1..22: mol_type = other DNA
aggaactgagaatttagtttgt

SEQ ID NO: 152569 - DNA, 22 bp, synthetic construct
  misc_feature 1..22: note = chemically synthesized
  source 1..22: mol_type = other DNA
agaatttagtttgtaacagaga

SEQ ID NO: 152570 - DNA, 22 bp, synthetic construct
  misc_feature 1..22: note = chemically synthesized
  source 1..22: mol_type = other DNA
agtttgtaacagagatattagt

SEQ ID NO: 152571 - DNA, 22 bp, synthetic construct
  misc_feature 1..22: note = chemically synthesized
  source 1..22: mol_type = other DNA
gtttgtaacagagatattagtt

SEQ ID NO: 152572 - DNA, 22 bp, synthetic construct
  misc_feature 1..22: note = chemically synthesized
  source 1..22: mol_type = other DNA
gtaacagagatattagttaaat

SEQ ID NO: 152573 - DNA, 22 bp, synthetic construct
  misc_feature 1..22: note = chemically synthesized
  source 1..22: mol_type = other DNA
taacagagatattagttaaata

SEQ ID NO: 152574 - DNA, 22 bp, synthetic construct
  misc_feature 1..22: note = chemically synthesized
  source 1..22: mol_type = other DNA
gttaaatatttagtttaaatat

SEQ ID NO: 152575 - DNA, 22 bp, synthetic construct
  misc_feature 1..22: note = chemically synthesized
  source 1..22: mol_type = other DNA
aatatttagtttaaatattagt

SEQ ID NO: 152576 - DNA, 22 bp, synthetic construct
  misc_feature 1..22: note = chemically synthesized
  source 1..22: mol_type = other DNA
agtttaaatattagttaaatat

SEQ ID NO: 152577 - DNA, 22 bp, synthetic construct
  misc_feature 1..22: note = chemically synthesized
  source 1..22: mol_type = other DNA
gtttaaatattagttaaatatt

SEQ ID NO: 152578 - DNA, 22 bp, synthetic construct
  misc_feature 1..22: note = chemically synthesized
  source 1..22: mol_type = other DNA
aaatattagttaaatatttagc

SEQ ID NO: 152579 - DNA, 22 bp, synthetic construct
  misc_feature 1..22: note = chemically synthesized
  source 1..22: mol_type = other DNA
aatattagttaaatatttagct

SEQ ID NO: 152580 - DNA, 22 bp, synthetic construct
  misc_feature 1..22: note = chemically synthesized
  source 1..22: mol_type = other DNA
gttaaatatttagctaataaat

SEQ ID NO: 152581 - DNA, 22 bp, synthetic construct
  misc_feature 1..22: note = chemically synthesized
  source 1..22: mol_type = other DNA
aatatttagctaataaatacaa

SEQ ID NO: 152582 - DNA, 22 bp, synthetic construct
  misc_feature 1..22: note = chemically synthesized
  source 1..22: mol_type = other DNA
agctaataaatacaaaattata

SEQ ID NO: 152583 - DNA, 22 bp, synthetic construct
  misc_feature 1..22: note = chemically synthesized
  source 1..22: mol_type = other DNA
gctaataaatacaaaattataa

SEQ ID NO: 152584 - DNA, 22 bp, synthetic construct
  misc_feature 1..22: note = chemically synthesized
  source 1..22: mol_type = other DNA
ataaatacaaaattataagttt

SEQ ID NO: 152585 - DNA, 22 bp, synthetic construct
  misc_feature 1..22: note = chemically synthesized
  source 1..22: mol_type = other DNA
taagttttatttaaaattgaaa

SEQ ID NO: 152586 - DNA, 22 bp, synthetic construct
  misc_feature 1..22: note = chemically synthesized
  source 1..22: mol_type = other DNA
tatttaaaattgaaacatgata

SEQ ID NO: 152587 - DNA, 22 bp, synthetic construct
  misc_feature 1..22: note = chemically synthesized
  source 1..22: mol_type = other DNA
atttaaaattgaaacatgatac

SEQ ID NO: 152588 - DNA, 22 bp, synthetic construct
  misc_feature 1..22: note = chemically synthesized
  source 1..22: mol_type = other DNA
tttaaaattgaaacatgatacc

SEQ ID NO: 152589 - DNA, 22 bp, synthetic construct
  misc_feature 1..22: note = chemically synthesized
  source 1..22: mol_type = other DNA
aaaattgaaacatgataccaaa

SEQ ID NO: 152590 - DNA, 22 bp, synthetic construct
  misc_feature 1..22: note = chemically synthesized
  source 1..22: mol_type = other DNA
aaattgaaacatgataccaaaa

SEQ ID NO: 152591 - DNA, 22 bp, synthetic construct
  misc_feature 1..22: note = chemically synthesized
  source 1..22: mol_type = other DNA
aaacatgataccaaaataatag

SEQ ID NO: 152592 - DNA, 22 bp, synthetic construct
  misc_feature 1..22: note = chemically synthesized
  source 1..22: mol_type = other DNA
gtcttaagaaacttcttgaaaa

SEQ ID NO: 152593 - DNA, 22 bp, synthetic construct
  misc_feature 1..22: note = chemically synthesized
  source 1..22: mol_type = other DNA
tcttaagaaacttcttgaaaag

SEQ ID NO: 152594 - DNA, 22 bp, synthetic construct
  misc_feature 1..22: note = chemically synthesized
  source 1..22: mol_type = other DNA
aagaaacttcttgaaaagtgat

SEQ ID NO: 152595 - DNA, 22 bp, synthetic construct
  misc_feature 1..22: note = chemically synthesized
  source 1..22: mol_type = other DNA
agaaacttcttgaaaagtgatt

SEQ ID NO: 152596 - DNA, 22 bp, synthetic construct
  misc_feature 1..22: note = chemically synthesized
  source 1..22: mol_type = other DNA
cttgaaaagtgattgttgagtt

SEQ ID NO: 152597 - DNA, 22 bp, synthetic construct
  misc_feature 1..22: note = chemically synthesized
  source 1..22: mol_type = other DNA
ttgaaaagtgattgttgagttg

SEQ ID NO: 152598 - DNA, 22 bp, synthetic construct
  misc_feature 1..22: note = chemically synthesized
  source 1..22: mol_type = other DNA
gaaaagtgattgttgagttgca

SEQ ID NO: 152599 - DNA, 22 bp, synthetic construct
  misc_feature 1..22: note = chemically synthesized
  source 1..22: mol_type = other DNA
aaaagtgattgttgagttgcaa

SEQ ID NO: 152600 - DNA, 22 bp, synthetic construct
  misc_feature 1..22: note = chemically synthesized
  source 1..22: mol_type = other DNA
ttgagttgcaagatcgttttaa

SEQ ID NO: 152601 - DNA, 22 bp, synthetic construct
  misc_feature 1..22: note = chemically synthesized
  source 1..22: mol_type = other DNA
agttgcaagatcgttttaaaaa

SEQ ID NO: 152602 - DNA, 22 bp, synthetic construct
  misc_feature 1..22: note = chemically synthesized
  source 1..22: mol_type = other DNA
caagatcgttttaaaaagggta

SEQ ID NO: 152603 - DNA, 22 bp, synthetic construct
  misc_feature 1..22: note = chemically synthesized
  source 1..22: mol_type = other DNA
taaaaagggtaggaagaaattg

SEQ ID NO: 152604 - DNA, 22 bp, synthetic construct
  misc_feature 1..22: note = chemically synthesized
  source 1..22: mol_type = other DNA
aaaaagggtaggaagaaattga

SEQ ID NO: 152605 - DNA, 22 bp, synthetic construct
  misc_feature 1..22: note = chemically synthesized
  source 1..22: mol_type = other DNA
aaaagggtaggaagaaattgag

SEQ ID NO: 152606 - DNA, 22 bp, synthetic construct
  misc_feature 1..22: note = chemically synthesized
  source 1..22: mol_type = other DNA
aggaaaagatgatgaataattt

SEQ ID NO: 152607 - DNA, 22 bp, synthetic construct
  misc_feature 1..22: note = chemically synthesized
  source 1..22: mol_type = other DNA
aggcagatagaacatttcgaga

SEQ ID NO: 152608 - DNA, 22 bp, synthetic construct
  misc_feature 1..22: note = chemically synthesized
  source 1..22: mol_type = other DNA
ggcagatagaacatttcgagaa

SEQ ID NO: 152609 - DNA, 22 bp, synthetic construct
  misc_feature 1..22: note = chemically synthesized
  source 1..22: mol_type = other DNA
cgagaaaaattttacgaaagaa

SEQ ID NO: 152610 - DNA, 22 bp, synthetic construct
  misc_feature 1..22: note = chemically synthesized
  source 1..22: mol_type = other DNA
gagaaaaattttacgaaagaag

SEQ ID NO: 152611 - DNA, 22 bp, synthetic construct
  misc_feature 1..22: note = chemically synthesized
  source 1..22: mol_type = other DNA
tacgaaagaagagaaattcgat

SEQ ID NO: 152612 - DNA, 22 bp, synthetic construct
  misc_feature 1..22: note = chemically synthesized
  source 1..22: mol_type = other DNA
acgaaagaagagaaattcgatt

SEQ ID NO: 152613 - DNA, 22 bp, synthetic construct
  misc_feature 1..22: note = chemically synthesized
  source 1..22: mol_type = other DNA
cgaaagaagagaaattcgattt

SEQ ID NO: 152614 - DNA, 22 bp, synthetic construct
  misc_feature 1..22: note = chemically synthesized
  source 1..22: mol_type = other DNA
gatttagagaaatgaaagaaga

SEQ ID NO: 152615 - DNA, 22 bp, synthetic construct
  misc_feature 1..22: note = chemically synthesized
  source 1..22: mol_type = other DNA
agagaaatgaaagaagatacgt

SEQ ID NO: 152616 - DNA, 22 bp, synthetic construct
  misc_feature 1..22: note = chemically synthesized
  source 1..22: mol_type = other DNA
gagaaatgaaagaagatacgta

SEQ ID NO: 152617 - DNA, 22 bp, synthetic construct
  misc_feature 1..22: note = chemically synthesized
  source 1..22: mol_type = other DNA
aaaagactgaaaaatcctctgc

SEQ ID NO: 152618 - DNA, 22 bp, synthetic construct
  misc_feature 1..22: note = chemically synthesized
  source 1..22: mol_type = other DNA
aaaaatcctctgcaagaaacga

SEQ ID NO: 152619 - DNA, 22 bp, synthetic construct
  misc_feature 1..22: note = chemically synthesized
  source 1..22: mol_type = other DNA
tgcaagaaacgaagaaacttca

SEQ ID NO: 152620 - DNA, 22 bp, synthetic construct
  misc_feature 1..22: note = chemically synthesized
  source 1..22: mol_type = other DNA
caagaaacgaagaaacttcaag

SEQ ID NO: 152621 - DNA, 22 bp, synthetic construct
  misc_feature 1..22: note = chemically synthesized
  source 1..22: mol_type = other DNA
caagcattctatggagaaaaaa

SEQ ID NO: 152622 - DNA, 22 bp, synthetic construct
  misc_feature 1..22: note = chemically synthesized
  source 1..22: mol_type = other DNA
aagcattctatggagaaaaaag

SEQ ID NO: 152623 - DNA, 22 bp, synthetic construct
  misc_feature 1..22: note = chemically synthesized
  source 1..22: mol_type = other DNA
tatggagaaaaaagtattaaaa

SEQ ID NO: 152624 - DNA, 22 bp, synthetic construct
  misc_feature 1..22: note = chemically synthesized
  source 1..22: mol_type = other DNA
tggagaaaaaagtattaaaaat

SEQ ID NO: 152625 - DNA, 22 bp, synthetic construct
  misc_feature 1..22: note = chemically synthesized
  source 1..22: mol_type = other DNA
aaaatagtgagctaagttattc

SEQ ID NO: 152626 - DNA, 22 bp, synthetic construct
  misc_feature 1..22: note = chemically synthesized
  source 1..22: mol_type = other DNA
agttattcaatgctgagaagga

SEQ ID NO: 152627 - DNA, 22 bp, synthetic construct
  misc_feature 1..22: note = chemically synthesized
  source 1..22: mol_type = other DNA
ttcaatgctgagaaggagtcag

SEQ ID NO: 152628 - DNA, 22 bp, synthetic construct
  misc_feature 1..22: note = chemically synthesized
  source 1..22: mol_type = other DNA
aatgctgagaaggagtcagggc

SEQ ID NO: 152629 - DNA, 22 bp, synthetic construct
  misc_feature 1..22: note = chemically synthesized
  source 1..22: mol_type = other DNA
agaaggagtcagggcaagaaaa

SEQ ID NO: 152630 - DNA, 22 bp, synthetic construct
  misc_feature 1..22: note = chemically synthesized
  source 1..22: mol_type = other DNA
gactgctagaagacgtcagtgt

SEQ ID NO: 152631 - DNA, 22 bp, synthetic construct
  misc_feature 1..22: note = chemically synthesized
  source 1..22: mol_type = other DNA
ctagaagacgtcagtgtagtat

SEQ ID NO: 152632 - DNA, 22 bp, synthetic construct
  misc_feature 1..22: note = chemically synthesized
  source 1..22: mol_type = other DNA
gaagacgtcagtgtagtataga

SEQ ID NO: 152633 - DNA, 22 bp, synthetic construct
  misc_feature 1..22: note = chemically synthesized
  source 1..22: mol_type = other DNA
agaagaaagtctgtggaactgt

SEQ ID NO: 152634 - DNA, 22 bp, synthetic construct
  misc_feature 1..22: note = chemically synthesized
  source 1..22: mol_type = other DNA
tggaactgtgttgtgaggctaa

SEQ ID NO: 152635 - DNA, 22 bp, synthetic construct
  misc_feature 1..22: note = chemically synthesized
  source 1..22: mol_type = other DNA
tgttgtgaggctaataagacaa

SEQ ID NO: 152636 - DNA, 22 bp, synthetic construct
  misc_feature 1..22: note = chemically synthesized
  source 1..22: mol_type = other DNA
tgaggctaataagacaaagctg

SEQ ID NO: 152637 - DNA, 22 bp, synthetic construct
  misc_feature 1..22: note = chemically synthesized
  source 1..22: mol_type = other DNA
ataagacaaagctgaaaagtag

SEQ ID NO: 152638 - DNA, 22 bp, synthetic construct
  misc_feature 1..22: note = chemically synthesized
  source 1..22: mol_type = other DNA
aaaagtaggacataaagggcag

SEQ ID NO: 152639 - DNA, 22 bp, synthetic construct
  misc_feature 1..22: note = chemically synthesized
  source 1..22: mol_type = other DNA
aagttactttaacatctcgaag

SEQ ID NO: 152640 - DNA, 22 bp, synthetic construct
  misc_feature 1..22: note = chemically synthesized
  source 1..22: mol_type = other DNA
ctttaacatctcgaagttactc

SEQ ID NO: 152641 - DNA, 22 bp, synthetic construct
  misc_feature 1..22: note = chemically synthesized
  source 1..22: mol_type = other DNA
taacatctcgaagttactcaat

SEQ ID NO: 152642 - DNA, 22 bp, synthetic construct
  misc_feature 1..22: note = chemically synthesized
  source 1..22: mol_type = other DNA
aacatctcgaagttactcaatc

SEQ ID NO: 152643 - DNA, 22 bp, synthetic construct
  misc_feature 1..22: note = chemically synthesized
  source 1..22: mol_type = other DNA
acatctcgaagttactcaatca

SEQ ID NO: 152644 - DNA, 22 bp, synthetic construct
  misc_feature 1..22: note = chemically synthesized
  source 1..22: mol_type = other DNA
gaagttactcaatcaaacatga

SEQ ID NO: 152645 - DNA, 22 bp, synthetic construct
  misc_feature 1..22: note = chemically synthesized
  source 1..22: mol_type = other DNA
ctcaatcaaacatgaaagtatg

SEQ ID NO: 152646 - DNA, 22 bp, synthetic construct
  misc_feature 1..22: note = chemically synthesized
  source 1..22: mol_type = other DNA
aatcaaacatgaaagtatggac

SEQ ID NO: 152647 - DNA, 22 bp, synthetic construct
  misc_feature 1..22: note = chemically synthesized
  source 1..22: mol_type = other DNA
ttgaacatctgtttacattatt

SEQ ID NO: 152648 - DNA, 22 bp, synthetic construct
  misc_feature 1..22: note = chemically synthesized
  source 1..22: mol_type = other DNA
tgaacatctgtttacattatta

SEQ ID NO: 152649 - DNA, 22 bp, synthetic construct
  misc_feature 1..22: note = chemically synthesized
  source 1..22: mol_type = other DNA
gaacatctgtttacattattag

SEQ ID NO: 152650 - DNA, 22 bp, synthetic construct
  misc_feature 1..22: note = chemically synthesized
  source 1..22: mol_type = other DNA
aacatctgtttacattattaga

SEQ ID NO: 152651 - DNA, 22 bp, synthetic construct
  misc_feature 1..22: note = chemically synthesized
  source 1..22: mol_type = other DNA
tttacattattagagctttaaa

SEQ ID NO: 152652 - DNA, 22 bp, synthetic construct
  misc_feature 1..22: note = chemically synthesized
  source 1..22: mol_type = other DNA
acattattagagctttaaaaaa

SEQ ID NO: 152653 - DNA, 22 bp, synthetic construct
  misc_feature 1..22: note = chemically synthesized
  source 1..22: mol_type = other DNA
cattattagagctttaaaaaaa

SEQ ID NO: 152654 - DNA, 22 bp, synthetic construct
  misc_feature 1..22: note = chemically synthesized
  source 1..22: mol_type = other DNA
ttagagctttaaaaaaacttat

SEQ ID NO: 152655 - DNA, 22 bp, synthetic construct
  misc_feature 1..22: note = chemically synthesized
  source 1..22: mol_type = other DNA
gagctttaaaaaaacttatgat

SEQ ID NO: 152656 - DNA, 22 bp, synthetic construct
  misc_feature 1..22: note = chemically synthesized
  source 1..22: mol_type = other DNA
taaaaaaacttatgatgattct

SEQ ID NO: 152657 - DNA, 22 bp, synthetic construct
  misc_feature 1..22: note = chemically synthesized
  source 1..22: mol_type = other DNA
aaaaaaacttatgatgattctc

SEQ ID NO: 152658 - DNA, 22 bp, synthetic construct
  misc_feature 1..22: note = chemically synthesized
  source 1..22: mol_type = other DNA
aaaaaacttatgatgattctca

SEQ ID NO: 152659 - DNA, 22 bp, synthetic construct
  misc_feature 1..22: note = chemically synthesized
  source 1..22: mol_type = other DNA
atgatgattctcaggtctggaa

SEQ ID NO: 152660 - DNA, 22 bp, synthetic construct
  misc_feature 1..22: note = chemically synthesized
  source 1..22: mol_type = other DNA
tgatgattctcaggtctggaac

SEQ ID NO: 152661 - DNA, 22 bp, synthetic construct
  misc_feature 1..22: note = chemically synthesized
  source 1..22: mol_type = other DNA
tcaggtctggaacttaaagcag

SEQ ID NO: 152662 - DNA, 22 bp, synthetic construct
  misc_feature 1..22: note = chemically synthesized
  source 1..22: mol_type = other DNA
aggtctggaacttaaagcaggc

SEQ ID NO: 152663 - DNA, 22 bp, synthetic construct
  misc_feature 1..22: note = chemically synthesized
  source 1..22: mol_type = other DNA
gaacttaaagcaggcaaacaat

SEQ ID NO: 152664 - DNA, 22 bp, synthetic construct
  misc_feature 1..22: note = chemically synthesized
  source 1..22: mol_type = other DNA
aaagcaggcaaacaatgtaaag

SEQ ID NO: 152665 - DNA, 22 bp, synthetic construct
  misc_feature 1..22: note = chemically synthesized
  source 1..22: mol_type = other DNA
aagcaggcaaacaatgtaaaga

SEQ ID NO: 152666 - DNA, 22 bp, synthetic construct
  misc_feature 1..22: note = chemically synthesized
  source 1..22: mol_type = other DNA
attctgctaccatgaggctttt

SEQ ID NO: 152667 - DNA, 22 bp, synthetic construct
  misc_feature 1..22: note = chemically synthesized
  source 1..22: mol_type = other DNA
tgctaccatgaggcttttgaaa

SEQ ID NO: 152668 - DNA, 22 bp, synthetic construct
  misc_feature 1..22: note = chemically synthesized
  source 1..22: mol_type = other DNA
ctaccatgaggcttttgaaatt

SEQ ID NO: 152669 - DNA, 22 bp, synthetic construct
  misc_feature 1..22: note = chemically synthesized
  source 1..22: mol_type = other DNA
ccatgaggcttttgaaattata

SEQ ID NO: 152670 - DNA, 22 bp, synthetic construct
  misc_feature 1..22: note = chemically synthesized
  source 1..22: mol_type = other DNA
ttgaaattataagcttgcttgt

SEQ ID NO: 152671 - DNA, 22 bp, synthetic construct
  misc_feature 1..22: note = chemically synthesized
  source 1..22: mol_type = other DNA
tgaaattataagcttgcttgtt

SEQ ID NO: 152672 - DNA, 22 bp, synthetic construct
  misc_feature 1..22: note = chemically synthesized
  source 1..22: mol_type = other DNA
gaaattataagcttgcttgttt

SEQ ID NO: 152673 - DNA, 22 bp, synthetic construct
  misc_feature 1..22: note = chemically synthesized
  source 1..22: mol_type = other DNA
aaattataagcttgcttgtttg

SEQ ID NO: 152674 - DNA, 22 bp, synthetic construct
  misc_feature 1..22: note = chemically synthesized
  source 1..22: mol_type = other DNA
taagcttgcttgtttgagcctg

SEQ ID NO: 152675 - DNA, 22 bp, synthetic construct
  misc_feature 1..22: note = chemically synthesized
  source 1..22: mol_type = other DNA
gcttgtttgagcctggctttgt

SEQ ID NO: 152676 - DNA, 22 bp, synthetic construct
  misc_feature 1..22: note = chemically synthesized
  source 1..22: mol_type = other DNA
cttgtttgagcctggctttgtg

SEQ ID NO: 152677 - DNA, 22 bp, synthetic construct
  misc_feature 1..22: note = chemically synthesized
  source 1..22: mol_type = other DNA
gtttgagcctggctttgtgatc

SEQ ID NO: 152678 - DNA, 22 bp, synthetic construct
  misc_feature 1..22: note = chemically synthesized
  source 1..22: mol_type = other DNA
tttgagcctggctttgtgatct

SEQ ID NO: 152679 - DNA, 22 bp, synthetic construct
  misc_feature 1..22: note = chemically synthesized
  source 1..22: mol_type = other DNA
gagcctggctttgtgatctgta

SEQ ID NO: 152680 - DNA, 22 bp, synthetic construct
  misc_feature 1..22: note = chemically synthesized
  source 1..22: mol_type = other DNA
agcctggctttgtgatctgtag

SEQ ID NO: 152681 - DNA, 22 bp, synthetic construct
  misc_feature 1..22: note = chemically synthesized
  source 1..22: mol_type = other DNA
gctttgtgatctgtagaactgc

SEQ ID NO: 152682 - DNA, 22 bp, synthetic construct
  misc_feature 1..22: note = chemically synthesized
  source 1..22: mol_type = other DNA
tgtgatctgtagaactgcaggt

SEQ ID NO: 152683 - DNA, 22 bp, synthetic construct
  misc_feature 1..22: note = chemically synthesized
  source 1..22: mol_type = other DNA
gtgatctgtagaactgcaggtt

SEQ ID NO: 152684 - DNA, 22 bp, synthetic construct
  misc_feature 1..22: note = chemically synthesized
  source 1..22: mol_type = other DNA
tgatctgtagaactgcaggttc

SEQ ID NO: 152685 - DNA, 22 bp, synthetic construct
  misc_feature 1..22: note = chemically synthesized
  source 1..22: mol_type = other DNA
tagaactgcaggttctaagaaa

SEQ ID NO: 152686 - DNA, 22 bp, synthetic construct
  misc_feature 1..22: note = chemically synthesized
  source 1..22: mol_type = other DNA
caggttctaagaaagaaaacac

SEQ ID NO: 152687 - DNA, 22 bp, synthetic construct
  misc_feature 1..22: note = chemically synthesized
  source 1..22: mol_type = other DNA
taagaaagaaaacacaattggc

SEQ ID NO: 152688 - DNA, 22 bp, synthetic construct
  misc_feature 1..22: note = chemically synthesized
  source 1..22: mol_type = other DNA
agaaagaaaacacaattggcca

SEQ ID NO: 152689 - DNA, 22 bp, synthetic construct
  misc_feature 1..22: note = chemically synthesized
  source 1..22: mol_type = other DNA
gccaatacattgaataaatgta

SEQ ID NO: 152690 - DNA, 22 bp, synthetic construct
  misc_feature 1..22: note = chemically synthesized
  source 1..22: mol_type = other DNA
aataaatgtatattgaataaat

SEQ ID NO: 152691 - DNA, 22 bp, synthetic construct
  misc_feature 1..22: note = chemically synthesized
  source 1..22: mol_type = other DNA
aataaatagttaatcagctcat

SEQ ID NO: 152692 - DNA, 22 bp, synthetic construct
  misc_feature 1..22: note = chemically synthesized
  source 1..22: mol_type = other DNA
atcagctcattaactgaataaa

SEQ ID NO: 152693 - DNA, 22 bp, synthetic construct
  misc_feature 1..22: note = chemically synthesized
  source 1..22: mol_type = other DNA
attaactgaataaataaaggaa

SEQ ID NO: 152694 - DNA, 22 bp, synthetic construct
  misc_feature 1..22: note = chemically synthesized
  source 1..22: mol_type = other DNA
actgaataaataaaggaatggg

SEQ ID NO: 152695 - DNA, 22 bp, synthetic construct
  misc_feature 1..22: note = chemically synthesized
  source 1..22: mol_type = other DNA
aataaataaaggaatgggaagc

SEQ ID NO: 152696 - DNA, 22 bp, synthetic construct
  misc_feature 1..22: note = chemically synthesized
  source 1..22: mol_type = other DNA
agctgctatcaaaggctcagtg

SEQ ID NO: 152697 - DNA, 22 bp, synthetic construct
  misc_feature 1..22: note = chemically synthesized
  source 1..22: mol_type = other DNA
ctatcaaaggctcagtgtcttc

SEQ ID NO: 152698 - DNA, 22 bp, synthetic construct
  misc_feature 1..22: note = chemically synthesized
  source 1..22: mol_type = other DNA
tcaaaggctcagtgtcttcaat

SEQ ID NO: 152699 - DNA, 22 bp, synthetic construct
  misc_feature 1..22: note = chemically synthesized
  source 1..22: mol_type = other DNA
agtgtcttcaatctaattctct

SEQ ID NO: 152700 - DNA, 22 bp, synthetic construct
  misc_feature 1..22: note = chemically synthesized
  source 1..22: mol_type = other DNA
caatctaattctctacatcaca

SEQ ID NO: 152701 - DNA, 22 bp, synthetic construct
  misc_feature 1..22: note = chemically synthesized
  source 1..22: mol_type = other DNA
aatctaattctctacatcacaa

SEQ ID NO: 152702 - DNA, 22 bp, synthetic construct
  misc_feature 1..22: note = chemically synthesized
  source 1..22: mol_type = other DNA
attctctacatcacaaaggcac

SEQ ID NO: 152703 - DNA, 22 bp, synthetic construct
  misc_feature 1..22: note = chemically synthesized
  source 1..22: mol_type = other DNA
tctacatcacaaaggcacaaat

SEQ ID NO: 152704 - DNA, 22 bp, synthetic construct
  misc_feature 1..22: note = chemically synthesized
  source 1..22: mol_type = other DNA
tacatcacaaaggcacaaatga

SEQ ID NO: 152705 - DNA, 22 bp, synthetic construct
  misc_feature 1..22: note = chemically synthesized
  source 1..22: mol_type = other DNA
catcacaaaggcacaaatgagt

SEQ ID NO: 152706 - DNA, 22 bp, synthetic construct
  misc_feature 1..22: note = chemically synthesized
  source 1..22: mol_type = other DNA
aacatctcaagaggccagagct

SEQ ID NO: 152707 - DNA, 22 bp, synthetic construct
  misc_feature 1..22: note = chemically synthesized
  source 1..22: mol_type = other DNA
aagaggccagagctccagtgag

SEQ ID NO: 152708 - DNA, 22 bp, synthetic construct
  misc_feature 1..22: note = chemically synthesized
  source 1..22: mol_type = other DNA
cagtgagaaatcatttacccaa

SEQ ID NO: 152709 - DNA, 22 bp, synthetic construct
  misc_feature 1..22: note = chemically synthesized
  source 1..22: mol_type = other DNA
acccaaggtctcatgcataaat

SEQ ID NO: 152710 - DNA, 22 bp, synthetic construct
  misc_feature 1..22: note = chemically synthesized
  source 1..22: mol_type = other DNA
cccaaggtctcatgcataaata

SEQ ID NO: 152711 - DNA, 22 bp, synthetic construct
  misc_feature 1..22: note = chemically synthesized
  source 1..22: mol_type = other DNA
atgcataaatattcctgtctgc

SEQ ID NO: 152712 - DNA, 22 bp, synthetic construct
  misc_feature 1..22: note = chemically synthesized
  source 1..22: mol_type = other DNA
ctgtctgcttatcaccaatgaa

SEQ ID NO: 152713 - DNA, 22 bp, synthetic construct
  misc_feature 1..22: note = chemically synthesized
  source 1..22: mol_type = other DNA
tctgcttatcaccaatgaagaa

SEQ ID NO: 152714 - DNA, 22 bp, synthetic construct
  misc_feature 1..22: note = chemically synthesized
  source 1..22: mol_type = other DNA
cttatcaccaatgaagaaaaag

SEQ ID NO: 152715 - DNA, 22 bp, synthetic construct
  misc_feature 1..22: note = chemically synthesized
  source 1..22: mol_type = other DNA
atcaccaatgaagaaaaagtaa

SEQ ID NO: 152716 - DNA, 22 bp, synthetic construct
  misc_feature 1..22: note = chemically synthesized
  source 1..22: mol_type = other DNA
tcaccaatgaagaaaaagtaat

SEQ ID NO: 152717 - DNA, 22 bp, synthetic construct
  misc_feature 1..22: note = chemically synthesized
  source 1..22: mol_type = other DNA
ctggctacgtcatctggagggg

SEQ ID NO: 152718 - DNA, 22 bp, synthetic construct
  misc_feature 1..22: note = chemically synthesized
  source 1..22: mol_type = other DNA
gctacgtcatctggagggggag

SEQ ID NO: 152719 - DNA, 22 bp, synthetic construct
  misc_feature 1..22: note = chemically synthesized
  source 1..22: mol_type = other DNA
cgtcatctggagggggagaaaa

SEQ ID NO: 152720 - DNA, 22 bp, synthetic construct
  misc_feature 1..22: note = chemically synthesized
  source 1..22: mol_type = other DNA
gagggggagaaaacaggagtat

SEQ ID NO: 152721 - DNA, 22 bp, synthetic construct
  misc_feature 1..22: note = chemically synthesized
  source 1..22: mol_type = other DNA
cattaaatagtatttggagaaa

SEQ ID NO: 152722 - DNA, 22 bp, synthetic construct
  misc_feature 1..22: note = chemically synthesized
  source 1..22: mol_type = other DNA
attaaatagtatttggagaaaa

SEQ ID NO: 152723 - DNA, 22 bp, synthetic construct
  misc_feature 1..22: note = chemically synthesized
  source 1..22: mol_type = other DNA
aatagtatttggagaaaaaata

SEQ ID NO: 152724 - DNA, 22 bp, synthetic construct
  misc_feature 1..22: note = chemically synthesized
  source 1..22: mol_type = other DNA
ggagaaaaaatatacttggaga

SEQ ID NO: 152725 - DNA, 22 bp, synthetic construct
  misc_feature 1..22: note = chemically synthesized
  source 1..22: mol_type = other DNA
gagaaaaaatatacttggagac

SEQ ID NO: 152726 - DNA, 22 bp, synthetic construct
  misc_feature 1..22: note = chemically synthesized
  source 1..22: mol_type = other DNA
ggagacggcacaaaatggaaaa

SEQ ID NO: 152727 - DNA, 22 bp, synthetic construct
  misc_feature 1..22: note = chemically synthesized
  source 1..22: mol_type = other DNA
gagacggcacaaaatggaaaat

SEQ ID NO: 152728 - DNA, 22 bp, synthetic construct
  misc_feature 1..22: note = chemically synthesized
  source 1..22: mol_type = other DNA
tttaatagacttatgatattta

SEQ ID NO: 152729 - DNA, 22 bp, synthetic construct
  misc_feature 1..22: note = chemically synthesized
  source 1..22: mol_type = other DNA
aatagacttatgatatttaaag

SEQ ID NO: 152730 - DNA, 22 bp, synthetic construct
  misc_feature 1..22: note = chemically synthesized
  source 1..22: mol_type = other DNA
atagacttatgatatttaaagc

SEQ ID NO: 152731 - DNA, 22 bp, synthetic construct
  misc_feature 1..22: note = chemically synthesized
  source 1..22: mol_type = other DNA
atgatatttaaagcccaaagat

SEQ ID NO: 152732 - DNA, 22 bp, synthetic construct
  misc_feature 1..22: note = chemically synthesized
  source 1..22: mol_type = other DNA
tgatatttaaagcccaaagatt

SEQ ID NO: 152733 - DNA, 22 bp, synthetic construct
  misc_feature 1..22: note = chemically synthesized
  source 1..22: mol_type = other DNA
aaagcccaaagattactcttca

SEQ ID NO: 152734 - DNA, 22 bp, synthetic construct
  misc_feature 1..22: note = chemically synthesized
  source 1..22: mol_type = other DNA
aagcccaaagattactcttcac

SEQ ID NO: 152735 - DNA, 22 bp, synthetic construct
  misc_feature 1..22: note = chemically synthesized
  source 1..22: mol_type = other DNA
ctcttcacttcgaatgtttaat

SEQ ID NO: 152736 - DNA, 22 bp, synthetic construct
  misc_feature 1..22: note = chemically synthesized
  source 1..22: mol_type = other DNA
ttcacttcgaatgtttaatgaa

SEQ ID NO: 152737 - DNA, 22 bp, synthetic construct
  misc_feature 1..22: note = chemically synthesized
  source 1..22: mol_type = other DNA
cacttcgaatgtttaatgaatt

SEQ ID NO: 152738 - DNA, 22 bp, synthetic construct
  misc_feature 1..22: note = chemically synthesized
  source 1..22: mol_type = other DNA
acttcgaatgtttaatgaattg

SEQ ID NO: 152739 - DNA, 22 bp, synthetic construct
  misc_feature 1..22: note = chemically synthesized
  source 1..22: mol_type = other DNA
cgaatgtttaatgaattggaga

SEQ ID NO: 152740 - DNA, 22 bp, synthetic construct
  misc_feature 1..22: note = chemically synthesized
  source 1..22: mol_type = other DNA
gaatgtttaatgaattggagag

SEQ ID NO: 152741 - DNA, 22 bp, synthetic construct
  misc_feature 1..22: note = chemically synthesized
  source 1..22: mol_type = other DNA
aatgaattggagagaagaaaat

SEQ ID NO: 152742 - DNA, 22 bp, synthetic construct
  misc_feature 1..22: note = chemically synthesized
  source 1..22: mol_type = other DNA
atgaattggagagaagaaaata

SEQ ID NO: 152743 - DNA, 22 bp, synthetic construct
  misc_feature 1..22: note = chemically synthesized
  source 1..22: mol_type = other DNA
gagagaagaaaataatttttca

SEQ ID NO: 152744 - DNA, 22 bp, synthetic construct
  misc_feature 1..22: note = chemically synthesized
  source 1..22: mol_type = other DNA
ttcaagaacctcggctctttac

SEQ ID NO: 152745 - DNA, 22 bp, synthetic construct
  misc_feature 1..22: note = chemically synthesized
  source 1..22: mol_type = other DNA
tcaagaacctcggctctttact

SEQ ID NO: 152746 - DNA, 22 bp, synthetic construct
  misc_feature 1..22: note = chemically synthesized
  source 1..22: mol_type = other DNA
caagaacctcggctctttactg

SEQ ID NO: 152747 - DNA, 22 bp, synthetic construct
  misc_feature 1..22: note = chemically synthesized
  source 1..22: mol_type = other DNA
aagaacctcggctctttactgg

SEQ ID NO: 152748 - DNA, 22 bp, synthetic construct
  misc_feature 1..22: note = chemically synthesized
  source 1..22: mol_type = other DNA
ggctctttactggtataaaatt

SEQ ID NO: 152749 - DNA, 22 bp, synthetic construct
  misc_feature 1..22: note = chemically synthesized
  source 1..22: mol_type = other DNA
tttactggtataaaatttttac

SEQ ID NO: 152750 - DNA, 22 bp, synthetic construct
  misc_feature 1..22: note = chemically synthesized
  source 1..22: mol_type = other DNA
tactggtataaaatttttacca

SEQ ID NO: 152751 - DNA, 22 bp, synthetic construct
  misc_feature 1..22: note = chemically synthesized
  source 1..22: mol_type = other DNA
actggtataaaatttttaccac

SEQ ID NO: 152752 - DNA, 22 bp, synthetic construct
  misc_feature 1..22: note = chemically synthesized
  source 1..22: mol_type = other DNA
ctggtataaaatttttaccact

SEQ ID NO: 152753 - DNA, 22 bp, synthetic construct
  misc_feature 1..22: note = chemically synthesized
  source 1..22: mol_type = other DNA
gtataaaatttttaccactatc

SEQ ID NO: 152754 - DNA, 22 bp, synthetic construct
  misc_feature 1..22: note = chemically synthesized
  source 1..22: mol_type = other DNA
ttaccactatccttgggaaaat

SEQ ID NO: 152755 - DNA, 22 bp, synthetic construct
  misc_feature 1..22: note = chemically synthesized
  source 1..22: mol_type = other DNA
taccactatccttgggaaaatg

SEQ ID NO: 152756 - DNA, 22 bp, synthetic construct
  misc_feature 1..22: note = chemically synthesized
  source 1..22: mol_type = other DNA
accactatccttgggaaaatgt

SEQ ID NO: 152757 - DNA, 22 bp, synthetic construct
  misc_feature 1..22: note = chemically synthesized
  source 1..22: mol_type = other DNA
ccactatccttgggaaaatgtc

SEQ ID NO: 152758 - DNA, 22 bp, synthetic construct
  misc_feature 1..22: note = chemically synthesized
  source 1..22: mol_type = other DNA
tccttgggaaaatgtctaagca

SEQ ID NO: 152759 - DNA, 22 bp, synthetic construct
  misc_feature 1..22: note = chemically synthesized
  source 1..22: mol_type = other DNA
gggaaaatgtctaagcaacgta

SEQ ID NO: 152760 - DNA, 22 bp, synthetic construct
  misc_feature 1..22: note = chemically synthesized
  source 1..22: mol_type = other DNA
ggaaaatgtctaagcaacgtat

SEQ ID NO: 152761 - DNA, 22 bp, synthetic construct
  misc_feature 1..22: note = chemically synthesized
  source 1..22: mol_type = other DNA
agcaacgtatttttttaaaact

SEQ ID NO: 152762 - DNA, 22 bp, synthetic construct
  misc_feature 1..22: note = chemically synthesized
  source 1..22: mol_type = other DNA
ttttaaaactagccttctcctt

SEQ ID NO: 152763 - DNA, 22 bp, synthetic construct
  misc_feature 1..22: note = chemically synthesized
  source 1..22: mol_type = other DNA
tttaaaactagccttctccttt

SEQ ID NO: 152764 - DNA, 22 bp, synthetic construct
  misc_feature 1..22: note = chemically synthesized
  source 1..22: mol_type = other DNA
ttaaaactagccttctcctttt

SEQ ID NO: 152765 - DNA, 22 bp, synthetic construct
  misc_feature 1..22: note = chemically synthesized
  source 1..22: mol_type = other DNA
taaaactagccttctcctttta

SEQ ID NO: 152766 - DNA, 22 bp, synthetic construct
  misc_feature 1..22: note = chemically synthesized
  source 1..22: mol_type = other DNA
aaaactagccttctccttttac

SEQ ID NO: 152767 - DNA, 22 bp, synthetic construct
  misc_feature 1..22: note = chemically synthesized
  source 1..22: mol_type = other DNA
aaactagccttctccttttact

SEQ ID NO: 152768 - DNA, 22 bp, synthetic construct
  misc_feature 1..22: note = chemically synthesized
  source 1..22: mol_type = other DNA
gccttctccttttactaatctc

SEQ ID NO: 152769 - DNA, 22 bp, synthetic construct
  misc_feature 1..22: note = chemically synthesized
  source 1..22: mol_type = other DNA
ctccttttactaatctcttcct

SEQ ID NO: 152770 - DNA, 22 bp, synthetic construct
  misc_feature 1..22: note = chemically synthesized
  source 1..22: mol_type = other DNA
tccttttactaatctcttcctt

SEQ ID NO: 152771 - DNA, 22 bp, synthetic construct
  misc_feature 1..22: note = chemically synthesized
  source 1..22: mol_type = other DNA
cttttactaatctcttccttat

SEQ ID NO: 152772 - DNA, 22 bp, synthetic construct
  misc_feature 1..22: note = chemically synthesized
  source 1..22: mol_type = other DNA
ttactaatctcttccttatttg

SEQ ID NO: 152773 - DNA, 22 bp, synthetic construct
  misc_feature 1..22: note = chemically synthesized
  source 1..22: mol_type = other DNA
tactaatctcttccttatttgt

SEQ ID NO: 152774 - DNA, 22 bp, synthetic construct
  misc_feature 1..22: note = chemically synthesized
  source 1..22: mol_type = other DNA
actaatctcttccttatttgtt

SEQ ID NO: 152775 - DNA, 22 bp, synthetic construct
  misc_feature 1..22: note = chemically synthesized
  source 1..22: mol_type = other DNA
ctaatctcttccttatttgttt

SEQ ID NO: 152776 - DNA, 22 bp, synthetic construct
  misc_feature 1..22: note = chemically synthesized
  source 1..22: mol_type = other DNA
atctcttccttatttgtttttg

SEQ ID NO: 152777 - DNA, 22 bp, synthetic construct
  misc_feature 1..22: note = chemically synthesized
  source 1..22: mol_type = other DNA
ttccttatttgtttttgcttat

SEQ ID NO: 152778 - DNA, 22 bp, synthetic construct
  misc_feature 1..22: note = chemically synthesized
  source 1..22: mol_type = other DNA
ccttatttgtttttgcttatgg

SEQ ID NO: 152779 - DNA, 22 bp, synthetic construct
  misc_feature 1..22: note = chemically synthesized
  source 1..22: mol_type = other DNA
cttatttgtttttgcttatggc

SEQ ID NO: 152780 - DNA, 22 bp, synthetic construct
  misc_feature 1..22: note = chemically synthesized
  source 1..22: mol_type = other DNA
atttgtttttgcttatggcttc

SEQ ID NO: 152781 - DNA, 22 bp, synthetic construct
  misc_feature 1..22: note = chemically synthesized
  source 1..22: mol_type = other DNA
tttgtttttgcttatggcttct

SEQ ID NO: 152782 - DNA, 22 bp, synthetic construct
  misc_feature 1..22: note = chemically synthesized
  source 1..22: mol_type = other DNA
gtttttgcttatggcttctaag

SEQ ID NO: 152783 - DNA, 22 bp, synthetic construct
  misc_feature 1..22: note = chemically synthesized
  source 1..22: mol_type = other DNA
tttttgcttatggcttctaagg

SEQ ID NO: 152784 - DNA, 22 bp, synthetic construct
  misc_feature 1..22: note = chemically synthesized
  source 1..22: mol_type = other DNA
ttgcttatggcttctaaggata

SEQ ID NO: 152785 - DNA, 22 bp, synthetic construct
  misc_feature 1..22: note = chemically synthesized
  source 1..22: mol_type = other DNA
tgcttatggcttctaaggatat

SEQ ID NO: 152786 - DNA, 22 bp, synthetic construct
  misc_feature 1..22: note = chemically synthesized
  source 1..22: mol_type = other DNA
gcttatggcttctaaggatatg

SEQ ID NO: 152787 - DNA, 22 bp, synthetic construct
  misc_feature 1..22: note = chemically synthesized
  source 1..22: mol_type = other DNA
cttatggcttctaaggatatgt

SEQ ID NO: 152788 - DNA, 22 bp, synthetic construct
  misc_feature 1..22: note = chemically synthesized
  source 1..22: mol_type = other DNA
atggcttctaaggatatgttca

SEQ ID NO: 152789 - DNA, 22 bp, synthetic construct
  misc_feature 1..22: note = chemically synthesized
  source 1..22: mol_type = other DNA
tggcttctaaggatatgttcac

SEQ ID NO: 152790 - DNA, 22 bp, synthetic construct
  misc_feature 1..22: note = chemically synthesized
  source 1..22: mol_type = other DNA
ctaaggatatgttcacatccag

SEQ ID NO: 152791 - DNA, 22 bp, synthetic construct
  misc_feature 1..22: note = chemically synthesized
  source 1..22: mol_type = other DNA
taaggatatgttcacatccaga

SEQ ID NO: 152792 - DNA, 22 bp, synthetic construct
  misc_feature 1..22: note = chemically synthesized
  source 1..22: mol_type = other DNA
aggatatgttcacatccagaca

SEQ ID NO: 152793 - DNA, 22 bp, synthetic construct
  misc_feature 1..22: note = chemically synthesized
  source 1..22: mol_type = other DNA
acatccagacagtgaaaaaata

SEQ ID NO: 152794 - DNA, 22 bp, synthetic construct
  misc_feature 1..22: note = chemically synthesized
  source 1..22: mol_type = other DNA
ttaaatgacatcaaaagaagac

SEQ ID NO: 152795 - DNA, 22 bp, synthetic construct
  misc_feature 1..22: note = chemically synthesized
  source 1..22: mol_type = other DNA
taaatgacatcaaaagaagacc

SEQ ID NO: 152796 - DNA, 22 bp, synthetic construct
  misc_feature 1..22: note = chemically synthesized
  source 1..22: mol_type = other DNA
aaatgacatcaaaagaagacca

SEQ ID NO: 152797 - DNA, 22 bp, synthetic construct
  misc_feature 1..22: note = chemically synthesized
  source 1..22: mol_type = other DNA
aatgacatcaaaagaagaccat

SEQ ID NO: 152798 - DNA, 22 bp, synthetic construct
  misc_feature 1..22: note = chemically synthesized
  source 1..22: mol_type = other DNA
tctcaaaggcaatggatactat

SEQ ID NO: 152799 - DNA, 22 bp, synthetic construct
  misc_feature 1..22: note = chemically synthesized
  source 1..22: mol_type = other DNA
ctcaaaggcaatggatactatg

SEQ ID NO: 152800 - DNA, 22 bp, synthetic construct
  misc_feature 1..22: note = chemically synthesized
  source 1..22: mol_type = other DNA
tcaaaggcaatggatactatgt

SEQ ID NO: 152801 - DNA, 22 bp, synthetic construct
  misc_feature 1..22: note = chemically synthesized
  source 1..22: mol_type = other DNA
aaaggcaatggatactatgtct

SEQ ID NO: 152802 - DNA, 22 bp, synthetic construct
  misc_feature 1..22: note = chemically synthesized
  source 1..22: mol_type = other DNA
tgtctcaaagaaacagaatttc

SEQ ID NO: 152803 - DNA, 22 bp, synthetic construct
  misc_feature 1..22: note = chemically synthesized
  source 1..22: mol_type = other DNA
aaagaaacagaatttctcagct

SEQ ID NO: 152804 - DNA, 22 bp, synthetic construct
  misc_feature 1..22: note = chemically synthesized
  source 1..22: mol_type = other DNA
ctcagctgttttttttaagtca

SEQ ID NO: 152805 - DNA, 22 bp, synthetic construct
  misc_feature 1..22: note = chemically synthesized
  source 1..22: mol_type = other DNA
tcagctgttttttttaagtcag

SEQ ID NO: 152806 - DNA, 22 bp, synthetic construct
  misc_feature 1..22: note = chemically synthesized
  source 1..22: mol_type = other DNA
agctgttttttttaagtcagta

SEQ ID NO: 152807 - DNA, 22 bp, synthetic construct
  misc_feature 1..22: note = chemically synthesized
  source 1..22: mol_type = other DNA
ttttttttaagtcagtaagttt

SEQ ID NO: 152808 - DNA, 22 bp, synthetic construct
  misc_feature 1..22: note = chemically synthesized
  source 1..22: mol_type = other DNA
tttttaagtcagtaagttttag

SEQ ID NO: 152809 - DNA, 22 bp, synthetic construct
  misc_feature 1..22: note = chemically synthesized
  source 1..22: mol_type = other DNA
ttttaagtcagtaagttttagg

SEQ ID NO: 152810 - DNA, 22 bp, synthetic construct
  misc_feature 1..22: note = chemically synthesized
  source 1..22: mol_type = other DNA
tttaagtcagtaagttttaggg

SEQ ID NO: 152811 - DNA, 22 bp, synthetic construct
  misc_feature 1..22: note = chemically synthesized
  source 1..22: mol_type = other DNA
ttaagtcagtaagttttagggt

SEQ ID NO: 152812 - DNA, 22 bp, synthetic construct
  misc_feature 1..22: note = chemically synthesized
  source 1..22: mol_type = other DNA
taagtcagtaagttttagggta

SEQ ID NO: 152813 - DNA, 22 bp, synthetic construct
  misc_feature 1..22: note = chemically synthesized
  source 1..22: mol_type = other DNA
aagtcagtaagttttagggtat

SEQ ID NO: 152814 - DNA, 22 bp, synthetic construct
  misc_feature 1..22: note = chemically synthesized
  source 1..22: mol_type = other DNA
agtcagtaagttttagggtatt

SEQ ID NO: 152815 - DNA, 22 bp, synthetic construct
  misc_feature 1..22: note = chemically synthesized
  source 1..22: mol_type = other DNA
tagggtatttcatttacttaga

SEQ ID NO: 152816 - DNA, 22 bp, synthetic construct
  misc_feature 1..22: note = chemically synthesized
  source 1..22: mol_type = other DNA
agggtatttcatttacttagaa

SEQ ID NO: 152817 - DNA, 22 bp, synthetic construct
  misc_feature 1..22: note = chemically synthesized
  source 1..22: mol_type = other DNA
gggtatttcatttacttagaaa

SEQ ID NO: 152818 - DNA, 22 bp, synthetic construct
  misc_feature 1..22: note = chemically synthesized
  source 1..22: mol_type = other DNA
catttacttagaaatttcattg

SEQ ID NO: 152819 - DNA, 22 bp, synthetic construct
  misc_feature 1..22: note = chemically synthesized
  source 1..22: mol_type = other DNA
atttacttagaaatttcattgt

SEQ ID NO: 152820 - DNA, 22 bp, synthetic construct
  misc_feature 1..22: note = chemically synthesized
  source 1..22: mol_type = other DNA
acttagaaatttcattgtattc

SEQ ID NO: 152821 - DNA, 22 bp, synthetic construct
  misc_feature 1..22: note = chemically synthesized
  source 1..22: mol_type = other DNA
cttagaaatttcattgtattca

SEQ ID NO: 152822 - DNA, 22 bp, synthetic construct
  misc_feature 1..22: note = chemically synthesized
  source 1..22: mol_type = other DNA
agaaatttcattgtattcaggt

SEQ ID NO: 152823 - DNA, 22 bp, synthetic construct
  misc_feature 1..22: note = chemically synthesized
  source 1..22: mol_type = other DNA
gaaatttcattgtattcaggtg

SEQ ID NO: 152824 - DNA, 22 bp, synthetic construct
  misc_feature 1..22: note = chemically synthesized
  source 1..22: mol_type = other DNA
cattgtattcaggtgaaattga

SEQ ID NO: 152825 - DNA, 22 bp, synthetic construct
  misc_feature 1..22: note = chemically synthesized
  source 1..22: mol_type = other DNA
attgtattcaggtgaaattgaa

SEQ ID NO: 152826 - DNA, 22 bp, synthetic construct
  misc_feature 1..22: note = chemically synthesized
  source 1..22: mol_type = other DNA
tattcaggtgaaattgaaacat

SEQ ID NO: 152827 - DNA, 22 bp, synthetic construct
  misc_feature 1..22: note = chemically synthesized
  source 1..22: mol_type = other DNA
aggtgaaattgaaacatttcct

SEQ ID NO: 152828 - DNA, 22 bp, synthetic construct
  misc_feature 1..22: note = chemically synthesized
  source 1..22: mol_type = other DNA
aaacatttcctttgaaaaaata

SEQ ID NO: 152829 - DNA, 22 bp, synthetic construct
  misc_feature 1..22: note = chemically synthesized
  source 1..22: mol_type = other DNA
cctttgaaaaaatactctcaca

SEQ ID NO: 152830 - DNA, 22 bp, synthetic construct
  misc_feature 1..22: note = chemically synthesized
  source 1..22: mol_type = other DNA
ctttgaaaaaatactctcacat

SEQ ID NO: 152831 - DNA, 22 bp, synthetic construct
  misc_feature 1..22: note = chemically synthesized
  source 1..22: mol_type = other DNA
tgaaaaaatactctcacatgtt

SEQ ID NO: 152832 - DNA, 22 bp, synthetic construct
  misc_feature 1..22: note = chemically synthesized
  source 1..22: mol_type = other DNA
gaaaaaatactctcacatgttt

SEQ ID NO: 152833 - DNA, 22 bp, synthetic construct
  misc_feature 1..22: note = chemically synthesized
  source 1..22: mol_type = other DNA
aaaaaatactctcacatgtttc

SEQ ID NO: 152834 - DNA, 22 bp, synthetic construct
  misc_feature 1..22: note = chemically synthesized
  source 1..22: mol_type = other DNA
tcacatgtttctcagttccaga

SEQ ID NO: 152835 - DNA, 22 bp, synthetic construct
  misc_feature 1..22: note = chemically synthesized
  source 1..22: mol_type = other DNA
acatgtttctcagttccagaat

SEQ ID NO: 152836 - DNA, 22 bp, synthetic construct
  misc_feature 1..22: note = chemically synthesized
  source 1..22: mol_type = other DNA
ctcagttccagaatgattactt

SEQ ID NO: 152837 - DNA, 22 bp, synthetic construct
  misc_feature 1..22: note = chemically synthesized
  source 1..22: mol_type = other DNA
tcagttccagaatgattacttc

SEQ ID NO: 152838 - DNA, 22 bp, synthetic construct
  misc_feature 1..22: note = chemically synthesized
  source 1..22: mol_type = other DNA
agttccagaatgattacttcag

SEQ ID NO: 152839 - DNA, 22 bp, synthetic construct
  misc_feature 1..22: note = chemically synthesized
  source 1..22: mol_type = other DNA
cagaatgattacttcagtaagc

SEQ ID NO: 152840 - DNA, 22 bp, synthetic construct
  misc_feature 1..22: note = chemically synthesized
  source 1..22: mol_type = other DNA
cttcagtaagccctagcaccag

SEQ ID NO: 152841 - DNA, 22 bp, synthetic construct
  misc_feature 1..22: note = chemically synthesized
  source 1..22: mol_type = other DNA
cagtaagccctagcaccagcac

SEQ ID NO: 152842 - DNA, 22 bp, synthetic construct
  misc_feature 1..22: note = chemically synthesized
  source 1..22: mol_type = other DNA
agtaagccctagcaccagcacg

SEQ ID NO: 152843 - DNA, 22 bp, synthetic construct
  misc_feature 1..22: note = chemically synthesized
  source 1..22: mol_type = other DNA
gcaccagcacgaattcttcctt

SEQ ID NO: 152844 - DNA, 22 bp, synthetic construct
  misc_feature 1..22: note = chemically synthesized
  source 1..22: mol_type = other DNA
ttcctttcttctcactggattt

SEQ ID NO: 152845 - DNA, 22 bp, synthetic construct
  misc_feature 1..22: note = chemically synthesized
  source 1..22: mol_type = other DNA
cctttcttctcactggattttc

SEQ ID NO: 152846 - DNA, 22 bp, synthetic construct
  misc_feature 1..22: note = chemically synthesized
  source 1..22: mol_type = other DNA
ctttcttctcactggattttct

SEQ ID NO: 152847 - DNA, 22 bp, synthetic construct
  misc_feature 1..22: note = chemically synthesized
  source 1..22: mol_type = other DNA
tcttctcactggattttctggc

SEQ ID NO: 152848 - DNA, 22 bp, synthetic construct
  misc_feature 1..22: note = chemically synthesized
  source 1..22: mol_type = other DNA
cttctcactggattttctggca

SEQ ID NO: 152849 - DNA, 22 bp, synthetic construct
  misc_feature 1..22: note = chemically synthesized
  source 1..22: mol_type = other DNA
ttctcactggattttctggcat

SEQ ID NO: 152850 - DNA, 22 bp, synthetic construct
  misc_feature 1..22: note = chemically synthesized
  source 1..22: mol_type = other DNA
ctcactggattttctggcatgg

SEQ ID NO: 152851 - DNA, 22 bp, synthetic construct
  misc_feature 1..22: note = chemically synthesized
  source 1..22: mol_type = other DNA
tcactggattttctggcatgga

SEQ ID NO: 152852 - DNA, 22 bp, synthetic construct
  misc_feature 1..22: note = chemically synthesized
  source 1..22: mol_type = other DNA
actggattttctggcatggagc

SEQ ID NO: 152853 - DNA, 22 bp, synthetic construct
  misc_feature 1..22: note = chemically synthesized
  source 1..22: mol_type = other DNA
gattttctggcatggagcagca

SEQ ID NO: 152854 - DNA, 22 bp, synthetic construct
  misc_feature 1..22: note = chemically synthesized
  source 1..22: mol_type = other DNA
tctggcatggagcagcaatacc

SEQ ID NO: 152855 - DNA, 22 bp, synthetic construct
  misc_feature 1..22: note = chemically synthesized
  source 1..22: mol_type = other DNA
ctggcatggagcagcaataccc

SEQ ID NO: 152856 - DNA, 22 bp, synthetic construct
  misc_feature 1..22: note = chemically synthesized
  source 1..22: mol_type = other DNA
tggcatggagcagcaatacccc

SEQ ID NO: 152857 - DNA, 22 bp, synthetic construct
  misc_feature 1..22: note = chemically synthesized
  source 1..22: mol_type = other DNA
gcatggagcagcaatacccctg

SEQ ID NO: 152858 - DNA, 22 bp, synthetic construct
  misc_feature 1..22: note = chemically synthesized
  source 1..22: mol_type = other DNA
gctttccatccccttctcctca

SEQ ID NO: 152859 - DNA, 22 bp, synthetic construct
  misc_feature 1..22: note = chemically synthesized
  source 1..22: mol_type = other DNA
tccatccccttctcctcaatct

SEQ ID NO: 152860 - DNA, 22 bp, synthetic construct
  misc_feature 1..22: note = chemically synthesized
  source 1..22: mol_type = other DNA
ccatccccttctcctcaatcta

SEQ ID NO: 152861 - DNA, 22 bp, synthetic construct
  misc_feature 1..22: note = chemically synthesized
  source 1..22: mol_type = other DNA
catccccttctcctcaatctat

SEQ ID NO: 152862 - DNA, 22 bp, synthetic construct
  misc_feature 1..22: note = chemically synthesized
  source 1..22: mol_type = other DNA
ctcctcaatctatgccatggtg

SEQ ID NO: 152863 - DNA, 22 bp, synthetic construct
  misc_feature 1..22: note = chemically synthesized
  source 1..22: mol_type = other DNA
tcctcaatctatgccatggtgc

SEQ ID NO: 152864 - DNA, 22 bp, synthetic construct
  misc_feature 1..22: note = chemically synthesized
  source 1..22: mol_type = other DNA
ctcaatctatgccatggtgctt

SEQ ID NO: 152865 - DNA, 22 bp, synthetic construct
  misc_feature 1..22: note = chemically synthesized
  source 1..22: mol_type = other DNA
aatctatgccatggtgcttttg

SEQ ID NO: 152866 - DNA, 22 bp, synthetic construct
  misc_feature 1..22: note = chemically synthesized
  source 1..22: mol_type = other DNA
tgccatggtgcttttgggcaat

SEQ ID NO: 152867 - DNA, 22 bp, synthetic construct
  misc_feature 1..22: note = chemically synthesized
  source 1..22: mol_type = other DNA
ttgggcaattgcatggttctcc

SEQ ID NO: 152868 - DNA, 22 bp, synthetic construct
  misc_feature 1..22: note = chemically synthesized
  source 1..22: mol_type = other DNA
tgggcaattgcatggttctcca

SEQ ID NO: 152869 - DNA, 22 bp, synthetic construct
  misc_feature 1..22: note = chemically synthesized
  source 1..22: mol_type = other DNA
gggcaattgcatggttctccat

SEQ ID NO: 152870 - DNA, 22 bp, synthetic construct
  misc_feature 1..22: note = chemically synthesized
  source 1..22: mol_type = other DNA
ggcaattgcatggttctccatg

SEQ ID NO: 152871 - DNA, 22 bp, synthetic construct
  misc_feature 1..22: note = chemically synthesized
  source 1..22: mol_type = other DNA
catggttctccatgtgatatgg

SEQ ID NO: 152872 - DNA, 22 bp, synthetic construct
  misc_feature 1..22: note = chemically synthesized
  source 1..22: mol_type = other DNA
tccatgtgatatggactgagcc

SEQ ID NO: 152873 - DNA, 22 bp, synthetic construct
  misc_feature 1..22: note = chemically synthesized
  source 1..22: mol_type = other DNA
catgtgatatggactgagccaa

SEQ ID NO: 152874 - DNA, 22 bp, synthetic construct
  misc_feature 1..22: note = chemically synthesized
  source 1..22: mol_type = other DNA
agccaagcctgcaccagcctat

SEQ ID NO: 152875 - DNA, 22 bp, synthetic construct
  misc_feature 1..22: note = chemically synthesized
  source 1..22: mol_type = other DNA
caccagcctatgttttacttcc

SEQ ID NO: 152876 - DNA, 22 bp, synthetic construct
  misc_feature 1..22: note = chemically synthesized
  source 1..22: mol_type = other DNA
tgttttacttcctgtccatgct

SEQ ID NO: 152877 - DNA, 22 bp, synthetic construct
  misc_feature 1..22: note = chemically synthesized
  source 1..22: mol_type = other DNA
tacttcctgtccatgctggccc

SEQ ID NO: 152878 - DNA, 22 bp, synthetic construct
  misc_feature 1..22: note = chemically synthesized
  source 1..22: mol_type = other DNA
acttcctgtccatgctggccct

SEQ ID NO: 152879 - DNA, 22 bp, synthetic construct
  misc_feature 1..22: note = chemically synthesized
  source 1..22: mol_type = other DNA
cttcctgtccatgctggccctc

SEQ ID NO: 152880 - DNA, 22 bp, synthetic construct
  misc_feature 1..22: note = chemically synthesized
  source 1..22: mol_type = other DNA
cctgtccatgctggccctcact

SEQ ID NO: 152881 - DNA, 22 bp, synthetic construct
  misc_feature 1..22: note = chemically synthesized
  source 1..22: mol_type = other DNA
ctgtccatgctggccctcactg

SEQ ID NO: 152882 - DNA, 22 bp, synthetic construct
  misc_feature 1..22: note = chemically synthesized
  source 1..22: mol_type = other DNA
tccatgctggccctcactgacc

SEQ ID NO: 152883 - DNA, 22 bp, synthetic construct
  misc_feature 1..22: note = chemically synthesized
  source 1..22: mol_type = other DNA
gccctcactgacctgtgcatgg

SEQ ID NO: 152884 - DNA, 22 bp, synthetic construct
  misc_feature 1..22: note = chemically synthesized
  source 1..22: mol_type = other DNA
actgacctgtgcatggggctgt

SEQ ID NO: 152885 - DNA, 22 bp, synthetic construct
  misc_feature 1..22: note = chemically synthesized
  source 1..22: mol_type = other DNA
acctgtgcatggggctgtccac

SEQ ID NO: 152886 - DNA, 22 bp, synthetic construct
  misc_feature 1..22: note = chemically synthesized
  source 1..22: mol_type = other DNA
tgcatggggctgtccactgtgt

SEQ ID NO: 152887 - DNA, 22 bp, synthetic construct
  misc_feature 1..22: note = chemically synthesized
  source 1..22: mol_type = other DNA
tccactgtgtacacagtgctgg

SEQ ID NO: 152888 - DNA, 22 bp, synthetic construct
  misc_feature 1..22: note = chemically synthesized
  source 1..22: mol_type = other DNA
tgtacacagtgctggggatcct

SEQ ID NO: 152889 - DNA, 22 bp, synthetic construct
  misc_feature 1..22: note = chemically synthesized
  source 1..22: mol_type = other DNA
gggatcctgtgggggatcattc

SEQ ID NO: 152890 - DNA, 22 bp, synthetic construct
  misc_feature 1..22: note = chemically synthesized
  source 1..22: mol_type = other DNA
tgggggatcattcgagagatca

SEQ ID NO: 152891 - DNA, 22 bp, synthetic construct
  misc_feature 1..22: note = chemically synthesized
  source 1..22: mol_type = other DNA
gagagatcagcttggattcctg

SEQ ID NO: 152892 - DNA, 22 bp, synthetic construct
  misc_feature 1..22: note = chemically synthesized
  source 1..22: mol_type = other DNA
ggattcctgcattgcccagtcc

SEQ ID NO: 152893 - DNA, 22 bp, synthetic construct
  misc_feature 1..22: note = chemically synthesized
  source 1..22: mol_type = other DNA
gattcctgcattgcccagtcct

SEQ ID NO: 152894 - DNA, 22 bp, synthetic construct
  misc_feature 1..22: note = chemically synthesized
  source 1..22: mol_type = other DNA
ctgcattgcccagtcctatttc

SEQ ID NO: 152895 - DNA, 22 bp, synthetic construct
  misc_feature 1..22: note = chemically synthesized
  source 1..22: mol_type = other DNA
cattgcccagtcctatttcatc

SEQ ID NO: 152896 - DNA, 22 bp, synthetic construct
  misc_feature 1..22: note = chemically synthesized
  source 1..22: mol_type = other DNA
cccagtcctatttcatccatgg

SEQ ID NO: 152897 - DNA, 22 bp, synthetic construct
  misc_feature 1..22: note = chemically synthesized
  source 1..22: mol_type = other DNA
tttcatccatggtctgtccttc

SEQ ID NO: 152898 - DNA, 22 bp, synthetic construct
  misc_feature 1..22: note = chemically synthesized
  source 1..22: mol_type = other DNA
catccatggtctgtccttcatg

SEQ ID NO: 152899 - DNA, 22 bp, synthetic construct
  misc_feature 1..22: note = chemically synthesized
  source 1..22: mol_type = other DNA
atccatggtctgtccttcatgg

SEQ ID NO: 152900 - DNA, 22 bp, synthetic construct
  misc_feature 1..22: note = chemically synthesized
  source 1..22: mol_type = other DNA
tccttcatggagtcctctgtcc

SEQ ID NO: 152901 - DNA, 22 bp, synthetic construct
  misc_feature 1..22: note = chemically synthesized
  source 1..22: mol_type = other DNA
catggagtcctctgtcctcctc

SEQ ID NO: 152902 - DNA, 22 bp, synthetic construct
  misc_feature 1..22: note = chemically synthesized
  source 1..22: mol_type = other DNA
atggagtcctctgtcctcctca

SEQ ID NO: 152903 - DNA, 22 bp, synthetic construct
  misc_feature 1..22: note = chemically synthesized
  source 1..22: mol_type = other DNA
tgtcctcctcactatggccttt

SEQ ID NO: 152904 - DNA, 22 bp, synthetic construct
  misc_feature 1..22: note = chemically synthesized
  source 1..22: mol_type = other DNA
tcctcctcactatggcctttga

SEQ ID NO: 152905 - DNA, 22 bp, synthetic construct
  misc_feature 1..22: note = chemically synthesized
  source 1..22: mol_type = other DNA
ctcactatggcctttgaccggt

SEQ ID NO: 152906 - DNA, 22 bp, synthetic construct
  misc_feature 1..22: note = chemically synthesized
  source 1..22: mol_type = other DNA
actatggcctttgaccggtaca

SEQ ID NO: 152907 - DNA, 22 bp, synthetic construct
  misc_feature 1..22: note = chemically synthesized
  source 1..22: mol_type = other DNA
tggcctttgaccggtacattgc

SEQ ID NO: 152908 - DNA, 22 bp, synthetic construct
  misc_feature 1..22: note = chemically synthesized
  source 1..22: mol_type = other DNA
tgaccggtacattgcaatttgc

SEQ ID NO: 152909 - DNA, 22 bp, synthetic construct
  misc_feature 1..22: note = chemically synthesized
  source 1..22: mol_type = other DNA
gaccggtacattgcaatttgca

SEQ ID NO: 152910 - DNA, 22 bp, synthetic construct
  misc_feature 1..22: note = chemically synthesized
  source 1..22: mol_type = other DNA
accggtacattgcaatttgcaa

SEQ ID NO: 152911 - DNA, 22 bp, synthetic construct
  misc_feature 1..22: note = chemically synthesized
  source 1..22: mol_type = other DNA
caatttgcaatccactacgtta

SEQ ID NO: 152912 - DNA, 22 bp, synthetic construct
  misc_feature 1..22: note = chemically synthesized
  source 1..22: mol_type = other DNA
gcaatccactacgttattcctc

SEQ ID NO: 152913 - DNA, 22 bp, synthetic construct
  misc_feature 1..22: note = chemically synthesized
  source 1..22: mol_type = other DNA
caatccactacgttattcctcc

SEQ ID NO: 152914 - DNA, 22 bp, synthetic construct
  misc_feature 1..22: note = chemically synthesized
  source 1..22: mol_type = other DNA
cgttattcctccatcctgacta

SEQ ID NO: 152915 - DNA, 22 bp, synthetic construct
  misc_feature 1..22: note = chemically synthesized
  source 1..22: mol_type = other DNA
ttcctccatcctgactaattcc

SEQ ID NO: 152916 - DNA, 22 bp, synthetic construct
  misc_feature 1..22: note = chemically synthesized
  source 1..22: mol_type = other DNA
ctccatcctgactaattccaga

SEQ ID NO: 152917 - DNA, 22 bp, synthetic construct
  misc_feature 1..22: note = chemically synthesized
  source 1..22: mol_type = other DNA
catcctgactaattccagaatt

SEQ ID NO: 152918 - DNA, 22 bp, synthetic construct
  misc_feature 1..22: note = chemically synthesized
  source 1..22: mol_type = other DNA
actaattccagaattatcaaaa

SEQ ID NO: 152919 - DNA, 22 bp, synthetic construct
  misc_feature 1..22: note = chemically synthesized
  source 1..22: mol_type = other DNA
attccagaattatcaaaattgg

SEQ ID NO: 152920 - DNA, 22 bp, synthetic construct
  misc_feature 1..22: note = chemically synthesized
  source 1..22: mol_type = other DNA
cagaattatcaaaattgggctc

SEQ ID NO: 152921 - DNA, 22 bp, synthetic construct
  misc_feature 1..22: note = chemically synthesized
  source 1..22: mol_type = other DNA
tcaaaattgggctcactataat

SEQ ID NO: 152922 - DNA, 22 bp, synthetic construct
  misc_feature 1..22: note = chemically synthesized
  source 1..22: mol_type = other DNA
ggctcactataataggtaggag

SEQ ID NO: 152923 - DNA, 22 bp, synthetic construct
  misc_feature 1..22: note = chemically synthesized
  source 1..22: mol_type = other DNA
actataataggtaggagttttt

SEQ ID NO: 152924 - DNA, 22 bp, synthetic construct
  misc_feature 1..22: note = chemically synthesized
  source 1..22: mol_type = other DNA
taataggtaggagttttttctt

SEQ ID NO: 152925 - DNA, 22 bp, synthetic construct
  misc_feature 1..22: note = chemically synthesized
  source 1..22: mol_type = other DNA
tttctttattacaccccccatc

SEQ ID NO: 152926 - DNA, 22 bp, synthetic construct
  misc_feature 1..22: note = chemically synthesized
  source 1..22: mol_type = other DNA
ttctttattacaccccccatca

SEQ ID NO: 152927 - DNA, 22 bp, synthetic construct
  misc_feature 1..22: note = chemically synthesized
  source 1..22: mol_type = other DNA
tctttattacaccccccatcat

SEQ ID NO: 152928 - DNA, 22 bp, synthetic construct
  misc_feature 1..22: note = chemically synthesized
  source 1..22: mol_type = other DNA
ctttattacaccccccatcatc

SEQ ID NO: 152929 - DNA, 22 bp, synthetic construct
  misc_feature 1..22: note = chemically synthesized
  source 1..22: mol_type = other DNA
tttattacaccccccatcatct

SEQ ID NO: 152930 - DNA, 22 bp, synthetic construct
  misc_feature 1..22: note = chemically synthesized
  source 1..22: mol_type = other DNA
tattacaccccccatcatctgt

SEQ ID NO: 152931 - DNA, 22 bp, synthetic construct
  misc_feature 1..22: note = chemically synthesized
  source 1..22: mol_type = other DNA
attacaccccccatcatctgtc

SEQ ID NO: 152932 - DNA, 22 bp, synthetic construct
  misc_feature 1..22: note = chemically synthesized
  source 1..22: mol_type = other DNA
ttacaccccccatcatctgtct

SEQ ID NO: 152933 - DNA, 22 bp, synthetic construct
  misc_feature 1..22: note = chemically synthesized
  source 1..22: mol_type = other DNA
caccccccatcatctgtctgaa

SEQ ID NO: 152934 - DNA, 22 bp, synthetic construct
  misc_feature 1..22: note = chemically synthesized
  source 1..22: mol_type = other DNA
tctgaaattttttaattactgt

SEQ ID NO: 152935 - DNA, 22 bp, synthetic construct
  misc_feature 1..22: note = chemically synthesized
  source 1..22: mol_type = other DNA
aaattttttaattactgtcatt

SEQ ID NO: 152936 - DNA, 22 bp, synthetic construct
  misc_feature 1..22: note = chemically synthesized
  source 1..22: mol_type = other DNA
tttaattactgtcatttccaca

SEQ ID NO: 152937 - DNA, 22 bp, synthetic construct
  misc_feature 1..22: note = chemically synthesized
  source 1..22: mol_type = other DNA
ttaattactgtcatttccacat

SEQ ID NO: 152938 - DNA, 22 bp, synthetic construct
  misc_feature 1..22: note = chemically synthesized
  source 1..22: mol_type = other DNA
taattactgtcatttccacatc

SEQ ID NO: 152939 - DNA, 22 bp, synthetic construct
  misc_feature 1..22: note = chemically synthesized
  source 1..22: mol_type = other DNA
aattactgtcatttccacatcc

SEQ ID NO: 152940 - DNA, 22 bp, synthetic construct
  misc_feature 1..22: note = chemically synthesized
  source 1..22: mol_type = other DNA
attactgtcatttccacatcct

SEQ ID NO: 152941 - DNA, 22 bp, synthetic construct
  misc_feature 1..22: note = chemically synthesized
  source 1..22: mol_type = other DNA
ctgtcatttccacatcctttct

SEQ ID NO: 152942 - DNA, 22 bp, synthetic construct
  misc_feature 1..22: note = chemically synthesized
  source 1..22: mol_type = other DNA
tcatttccacatcctttctcac

SEQ ID NO: 152943 - DNA, 22 bp, synthetic construct
  misc_feature 1..22: note = chemically synthesized
  source 1..22: mol_type = other DNA
ccacatcctttctcactctttc

SEQ ID NO: 152944 - DNA, 22 bp, synthetic construct
  misc_feature 1..22: note = chemically synthesized
  source 1..22: mol_type = other DNA
cacatcctttctcactctttct

SEQ ID NO: 152945 - DNA, 22 bp, synthetic construct
  misc_feature 1..22: note = chemically synthesized
  source 1..22: mol_type = other DNA
tctcactctttctgcctgcacc

SEQ ID NO: 152946 - DNA, 22 bp, synthetic construct
  misc_feature 1..22: note = chemically synthesized
  source 1..22: mol_type = other DNA
ctcactctttctgcctgcacca

SEQ ID NO: 152947 - DNA, 22 bp, synthetic construct
  misc_feature 1..22: note = chemically synthesized
  source 1..22: mol_type = other DNA
tcactctttctgcctgcaccag

SEQ ID NO: 152948 - DNA, 22 bp, synthetic construct
  misc_feature 1..22: note = chemically synthesized
  source 1..22: mol_type = other DNA
actctttctgcctgcaccagga

SEQ ID NO: 152949 - DNA, 22 bp, synthetic construct
  misc_feature 1..22: note = chemically synthesized
  source 1..22: mol_type = other DNA
tttctgcctgcaccaggatctt

SEQ ID NO: 152950 - DNA, 22 bp, synthetic construct
  misc_feature 1..22: note = chemically synthesized
  source 1..22: mol_type = other DNA
tctgcctgcaccaggatcttct

SEQ ID NO: 152951 - DNA, 22 bp, synthetic construct
  misc_feature 1..22: note = chemically synthesized
  source 1..22: mol_type = other DNA
ctgcctgcaccaggatcttctc

SEQ ID NO: 152952 - DNA, 22 bp, synthetic construct
  misc_feature 1..22: note = chemically synthesized
  source 1..22: mol_type = other DNA
tgcctgcaccaggatcttctcc

SEQ ID NO: 152953 - DNA, 22 bp, synthetic construct
  misc_feature 1..22: note = chemically synthesized
  source 1..22: mol_type = other DNA
cctgcaccaggatcttctccgc

SEQ ID NO: 152954 - DNA, 22 bp, synthetic construct
  misc_feature 1..22: note = chemically synthesized
  source 1..22: mol_type = other DNA
caccaggatcttctccgcttag

SEQ ID NO: 152955 - DNA, 22 bp, synthetic construct
  misc_feature 1..22: note = chemically synthesized
  source 1..22: mol_type = other DNA
ctccgcttagcctgttcagaca

SEQ ID NO: 152956 - DNA, 22 bp, synthetic construct
  misc_feature 1..22: note = chemically synthesized
  source 1..22: mol_type = other DNA
tccgcttagcctgttcagacat

SEQ ID NO: 152957 - DNA, 22 bp, synthetic construct
  misc_feature 1..22: note = chemically synthesized
  source 1..22: mol_type = other DNA
cgcttagcctgttcagacatcc

SEQ ID NO: 152958 - DNA, 22 bp, synthetic construct
  misc_feature 1..22: note = chemically synthesized
  source 1..22: mol_type = other DNA
agcctgttcagacatccgattc

SEQ ID NO: 152959 - DNA, 22 bp, synthetic construct
  misc_feature 1..22: note = chemically synthesized
  source 1..22: mol_type = other DNA
gcctgttcagacatccgattca

SEQ ID NO: 152960 - DNA, 22 bp, synthetic construct
  misc_feature 1..22: note = chemically synthesized
  source 1..22: mol_type = other DNA
ttcagacatccgattcaatagt

SEQ ID NO: 152961 - DNA, 22 bp, synthetic construct
  misc_feature 1..22: note = chemically synthesized
  source 1..22: mol_type = other DNA
agacatccgattcaatagttac

SEQ ID NO: 152962 - DNA, 22 bp, synthetic construct
  misc_feature 1..22: note = chemically synthesized
  source 1..22: mol_type = other DNA
aatagttactatgccctgatgc

SEQ ID NO: 152963 - DNA, 22 bp, synthetic construct
  misc_feature 1..22: note = chemically synthesized
  source 1..22: mol_type = other DNA
ctatgccctgatgctggttatt

SEQ ID NO: 152964 - DNA, 22 bp, synthetic construct
  misc_feature 1..22: note = chemically synthesized
  source 1..22: mol_type = other DNA
tgccctgatgctggttatttgc

SEQ ID NO: 152965 - DNA, 22 bp, synthetic construct
  misc_feature 1..22: note = chemically synthesized
  source 1..22: mol_type = other DNA
atgctggttatttgcatactgt

SEQ ID NO: 152966 - DNA, 22 bp, synthetic construct
  misc_feature 1..22: note = chemically synthesized
  source 1..22: mol_type = other DNA
gttatttgcatactgttgttgg

SEQ ID NO: 152967 - DNA, 22 bp, synthetic construct
  misc_feature 1..22: note = chemically synthesized
  source 1..22: mol_type = other DNA
tttgcatactgttgttggatgc

SEQ ID NO: 152968 - DNA, 22 bp, synthetic construct
  misc_feature 1..22: note = chemically synthesized
  source 1..22: mol_type = other DNA
gcatactgttgttggatgctat

SEQ ID NO: 152969 - DNA, 22 bp, synthetic construct
  misc_feature 1..22: note = chemically synthesized
  source 1..22: mol_type = other DNA
catactgttgttggatgctata

SEQ ID NO: 152970 - DNA, 22 bp, synthetic construct
  misc_feature 1..22: note = chemically synthesized
  source 1..22: mol_type = other DNA
ttgttggatgctatactcatcc

SEQ ID NO: 152971 - DNA, 22 bp, synthetic construct
  misc_feature 1..22: note = chemically synthesized
  source 1..22: mol_type = other DNA
ttggatgctatactcatccttt

SEQ ID NO: 152972 - DNA, 22 bp, synthetic construct
  misc_feature 1..22: note = chemically synthesized
  source 1..22: mol_type = other DNA
gatgctatactcatccttttct

SEQ ID NO: 152973 - DNA, 22 bp, synthetic construct
  misc_feature 1..22: note = chemically synthesized
  source 1..22: mol_type = other DNA
tactcatccttttctcctacat

SEQ ID NO: 152974 - DNA, 22 bp, synthetic construct
  misc_feature 1..22: note = chemically synthesized
  source 1..22: mol_type = other DNA
atccttttctcctacatcctga

SEQ ID NO: 152975 - DNA, 22 bp, synthetic construct
  misc_feature 1..22: note = chemically synthesized
  source 1..22: mol_type = other DNA
ttctcctacatcctgattctta

SEQ ID NO: 152976 - DNA, 22 bp, synthetic construct
  misc_feature 1..22: note = chemically synthesized
  source 1..22: mol_type = other DNA
tctcctacatcctgattcttaa

SEQ ID NO: 152977 - DNA, 22 bp, synthetic construct
  misc_feature 1..22: note = chemically synthesized
  source 1..22: mol_type = other DNA
ctcctacatcctgattcttaag

SEQ ID NO: 152978 - DNA, 22 bp, synthetic construct
  misc_feature 1..22: note = chemically synthesized
  source 1..22: mol_type = other DNA
tcctacatcctgattcttaagt

SEQ ID NO: 152979 - DNA, 22 bp, synthetic construct
  misc_feature 1..22: note = chemically synthesized
  source 1..22: mol_type = other DNA
ctacatcctgattcttaagtca

SEQ ID NO: 152980 - DNA, 22 bp, synthetic construct
  misc_feature 1..22: note = chemically synthesized
  source 1..22: mol_type = other DNA
catcctgattcttaagtcagtc

SEQ ID NO: 152981 - DNA, 22 bp, synthetic construct
  misc_feature 1..22: note = chemically synthesized
  source 1..22: mol_type = other DNA
attcttaagtcagtcctggcag

SEQ ID NO: 152982 - DNA, 22 bp, synthetic construct
  misc_feature 1..22: note = chemically synthesized
  source 1..22: mol_type = other DNA
ttaagtcagtcctggcagttgc

SEQ ID NO: 152983 - DNA, 22 bp, synthetic construct
  misc_feature 1..22: note = chemically synthesized
  source 1..22: mol_type = other DNA
aagtcagtcctggcagttgcct

SEQ ID NO: 152984 - DNA, 22 bp, synthetic construct
  misc_feature 1..22: note = chemically synthesized
  source 1..22: mol_type = other DNA
agtcagtcctggcagttgcctc

SEQ ID NO: 152985 - DNA, 22 bp, synthetic construct
  misc_feature 1..22: note = chemically synthesized
  source 1..22: mol_type = other DNA
gcagttgcctctcaggaagaga

SEQ ID NO: 152986 - DNA, 22 bp, synthetic construct
  misc_feature 1..22: note = chemically synthesized
  source 1..22: mol_type = other DNA
cctctcaggaagagaggcataa

SEQ ID NO: 152987 - DNA, 22 bp, synthetic construct
  misc_feature 1..22: note = chemically synthesized
  source 1..22: mol_type = other DNA
tcaggaagagaggcataaatta

SEQ ID NO: 152988 - DNA, 22 bp, synthetic construct
  misc_feature 1..22: note = chemically synthesized
  source 1..22: mol_type = other DNA
aggaagagaggcataaattatt

SEQ ID NO: 152989 - DNA, 22 bp, synthetic construct
  misc_feature 1..22: note = chemically synthesized
  source 1..22: mol_type = other DNA
tttcagacctgcatctcccaca

SEQ ID NO: 152990 - DNA, 22 bp, synthetic construct
  misc_feature 1..22: note = chemically synthesized
  source 1..22: mol_type = other DNA
cagacctgcatctcccacatct

SEQ ID NO: 152991 - DNA, 22 bp, synthetic construct
  misc_feature 1..22: note = chemically synthesized
  source 1..22: mol_type = other DNA
agacctgcatctcccacatctg

SEQ ID NO: 152992 - DNA, 22 bp, synthetic construct
  misc_feature 1..22: note = chemically synthesized
  source 1..22: mol_type = other DNA
catctcccacatctgtgctgtc

SEQ ID NO: 152993 - DNA, 22 bp, synthetic construct
  misc_feature 1..22: note = chemically synthesized
  source 1..22: mol_type = other DNA
ccacatctgtgctgtccttgtg

SEQ ID NO: 152994 - DNA, 22 bp, synthetic construct
  misc_feature 1..22: note = chemically synthesized
  source 1..22: mol_type = other DNA
tgctgtccttgtgttctacatc

SEQ ID NO: 152995 - DNA, 22 bp, synthetic construct
  misc_feature 1..22: note = chemically synthesized
  source 1..22: mol_type = other DNA
tccttgtgttctacatccctat

SEQ ID NO: 152996 - DNA, 22 bp, synthetic construct
  misc_feature 1..22: note = chemically synthesized
  source 1..22: mol_type = other DNA
gtgttctacatccctatcatta

SEQ ID NO: 152997 - DNA, 22 bp, synthetic construct
  misc_feature 1..22: note = chemically synthesized
  source 1..22: mol_type = other DNA
tgttctacatccctatcattag

SEQ ID NO: 152998 - DNA, 22 bp, synthetic construct
  misc_feature 1..22: note = chemically synthesized
  source 1..22: mol_type = other DNA
tacatccctatcattagcctca

SEQ ID NO: 152999 - DNA, 22 bp, synthetic construct
  misc_feature 1..22: note = chemically synthesized
  source 1..22: mol_type = other DNA
catccctatcattagcctcaca

SEQ ID NO: 153000 - DNA, 22 bp, synthetic construct
  misc_feature 1..22: note = chemically synthesized
  source 1..22: mol_type = other DNA
tcattagcctcacaatggtgca

SEQ ID NO: 153001 - DNA, 22 bp, synthetic construct
  misc_feature 1..22: note = chemically synthesized
  source 1..22: mol_type = other DNA
gcctcacaatggtgcaccgttt

SEQ ID NO: 153002 - DNA, 22 bp, synthetic construct
  misc_feature 1..22: note = chemically synthesized
  source 1..22: mol_type = other DNA
acaatggtgcaccgttttggca

SEQ ID NO: 153003 - DNA, 22 bp, synthetic construct
  misc_feature 1..22: note = chemically synthesized
  source 1..22: mol_type = other DNA
tggcaagcacctttcccccgtg

SEQ ID NO: 153004 - DNA, 22 bp, synthetic construct
  misc_feature 1..22: note = chemically synthesized
  source 1..22: mol_type = other DNA
ggcaagcacctttcccccgtgg

SEQ ID NO: 153005 - DNA, 22 bp, synthetic construct
  misc_feature 1..22: note = chemically synthesized
  source 1..22: mol_type = other DNA
gcaagcacctttcccccgtggc

SEQ ID NO: 153006 - DNA, 22 bp, synthetic construct
  misc_feature 1..22: note = chemically synthesized
  source 1..22: mol_type = other DNA
tcccccgtggcccacgttctca

SEQ ID NO: 153007 - DNA, 22 bp, synthetic construct
  misc_feature 1..22: note = chemically synthesized
  source 1..22: mol_type = other DNA
cccccgtggcccacgttctcat

SEQ ID NO: 153008 - DNA, 22 bp, synthetic construct
  misc_feature 1..22: note = chemically synthesized
  source 1..22: mol_type = other DNA
ccccgtggcccacgttctcatt

SEQ ID NO: 153009 - DNA, 22 bp, synthetic construct
  misc_feature 1..22: note = chemically synthesized
  source 1..22: mol_type = other DNA
tcattggcaacatctacatcct

SEQ ID NO: 153010 - DNA, 22 bp, synthetic construct
  misc_feature 1..22: note = chemically synthesized
  source 1..22: mol_type = other DNA
attggcaacatctacatccttt

SEQ ID NO: 153011 - DNA, 22 bp, synthetic construct
  misc_feature 1..22: note = chemically synthesized
  source 1..22: mol_type = other DNA
gcaacatctacatccttttccc

SEQ ID NO: 153012 - DNA, 22 bp, synthetic construct
  misc_feature 1..22: note = chemically synthesized
  source 1..22: mol_type = other DNA
catccttttcccacctttaatg

SEQ ID NO: 153013 - DNA, 22 bp, synthetic construct
  misc_feature 1..22: note = chemically synthesized
  source 1..22: mol_type = other DNA
ttcccacctttaatgaatccca

SEQ ID NO: 153014 - DNA, 22 bp, synthetic construct
  misc_feature 1..22: note = chemically synthesized
  source 1..22: mol_type = other DNA
tcccacctttaatgaatcccat

SEQ ID NO: 153015 - DNA, 22 bp, synthetic construct
  misc_feature 1..22: note = chemically synthesized
  source 1..22: mol_type = other DNA
cccacctttaatgaatcccatc

SEQ ID NO: 153016 - DNA, 22 bp, synthetic construct
  misc_feature 1..22: note = chemically synthesized
  source 1..22: mol_type = other DNA
ccacctttaatgaatcccatca

SEQ ID NO: 153017 - DNA, 22 bp, synthetic construct
  misc_feature 1..22: note = chemically synthesized
  source 1..22: mol_type = other DNA
taatgaatcccatcatctacag

SEQ ID NO: 153018 - DNA, 22 bp, synthetic construct
  misc_feature 1..22: note = chemically synthesized
  source 1..22: mol_type = other DNA
aatgaatcccatcatctacagt

SEQ ID NO: 153019 - DNA, 22 bp, synthetic construct
  misc_feature 1..22: note = chemically synthesized
  source 1..22: mol_type = other DNA
atgaatcccatcatctacagtg

SEQ ID NO: 153020 - DNA, 22 bp, synthetic construct
  misc_feature 1..22: note = chemically synthesized
  source 1..22: mol_type = other DNA
cagtgtcaagacccaacagatt

SEQ ID NO: 153021 - DNA, 22 bp, synthetic construct
  misc_feature 1..22: note = chemically synthesized
  source 1..22: mol_type = other DNA
ataccagaatgcttagactctt

SEQ ID NO: 153022 - DNA, 22 bp, synthetic construct
  misc_feature 1..22: note = chemically synthesized
  source 1..22: mol_type = other DNA
agactcttttctctgaaaagat

SEQ ID NO: 153023 - DNA, 22 bp, synthetic construct
  misc_feature 1..22: note = chemically synthesized
  source 1..22: mol_type = other DNA
gactcttttctctgaaaagata

SEQ ID NO: 153024 - DNA, 22 bp, synthetic construct
  misc_feature 1..22: note = chemically synthesized
  source 1..22: mol_type = other DNA
ttttctctgaaaagatattgag

SEQ ID NO: 153025 - DNA, 22 bp, synthetic construct
  misc_feature 1..22: note = chemically synthesized
  source 1..22: mol_type = other DNA
ttctctgaaaagatattgagag

SEQ ID NO: 153026 - DNA, 22 bp, synthetic construct
  misc_feature 1..22: note = chemically synthesized
  source 1..22: mol_type = other DNA
tctctgaaaagatattgagaga

SEQ ID NO: 153027 - DNA, 22 bp, synthetic construct
  misc_feature 1..22: note = chemically synthesized
  source 1..22: mol_type = other DNA
ctctgaaaagatattgagagat

SEQ ID NO: 153028 - DNA, 22 bp, synthetic construct
  misc_feature 1..22: note = chemically synthesized
  source 1..22: mol_type = other DNA
tctgaaaagatattgagagata

SEQ ID NO: 153029 - DNA, 22 bp, synthetic construct
  misc_feature 1..22: note = chemically synthesized
  source 1..22: mol_type = other DNA
tgaaaagatattgagagatatt

SEQ ID NO: 153030 - DNA, 22 bp, synthetic construct
  misc_feature 1..22: note = chemically synthesized
  source 1..22: mol_type = other DNA
aaaagatattgagagatattga

SEQ ID NO: 153031 - DNA, 22 bp, synthetic construct
  misc_feature 1..22: note = chemically synthesized
  source 1..22: mol_type = other DNA
agagatattgagatgtattgcc

SEQ ID NO: 153032 - DNA, 22 bp, synthetic construct
  misc_feature 1..22: note = chemically synthesized
  source 1..22: mol_type = other DNA
agatgtattgcctaaaaaaaag

SEQ ID NO: 153033 - DNA, 22 bp, synthetic construct
  misc_feature 1..22: note = chemically synthesized
  source 1..22: mol_type = other DNA
cctaaaaaaaagaaagaaaagc

SEQ ID NO: 153034 - DNA, 22 bp, synthetic construct
  misc_feature 1..22: note = chemically synthesized
  source 1..22: mol_type = other DNA
aaaaaaagaaagaaaagcagca

SEQ ID NO: 153035 - DNA, 22 bp, synthetic construct
  misc_feature 1..22: note = chemically synthesized
  source 1..22: mol_type = other DNA
ttaaaattgtagatttactctg

SEQ ID NO: 153036 - DNA, 22 bp, synthetic construct
  misc_feature 1..22: note = chemically synthesized
  source 1..22: mol_type = other DNA
aaattgtagatttactctgagt

SEQ ID NO: 153037 - DNA, 22 bp, synthetic construct
  misc_feature 1..22: note = chemically synthesized
  source 1..22: mol_type = other DNA
tagatttactctgagtccatga

SEQ ID NO: 153038 - DNA, 22 bp, synthetic construct
  misc_feature 1..22: note = chemically synthesized
  source 1..22: mol_type = other DNA
actctgagtccatgacaaatga

SEQ ID NO: 153039 - DNA, 22 bp, synthetic construct
  misc_feature 1..22: note = chemically synthesized
  source 1..22: mol_type = other DNA
ctctgagtccatgacaaatgac

SEQ ID NO: 153040 - DNA, 22 bp, synthetic construct
  misc_feature 1..22: note = chemically synthesized
  source 1..22: mol_type = other DNA
tgagtccatgacaaatgacctt

SEQ ID NO: 153041 - DNA, 22 bp, synthetic construct
  misc_feature 1..22: note = chemically synthesized
  source 1..22: mol_type = other DNA
agtccatgacaaatgaccttaa

SEQ ID NO: 153042 - DNA, 22 bp, synthetic construct
  misc_feature 1..22: note = chemically synthesized
  source 1..22: mol_type = other DNA
aaaaaatatttaaatatagtca

SEQ ID NO: 153043 - DNA, 22 bp, synthetic construct
  misc_feature 1..22: note = chemically synthesized
  source 1..22: mol_type = other DNA
aaaaatatttaaatatagtcag

SEQ ID NO: 153044 - DNA, 22 bp, synthetic construct
  misc_feature 1..22: note = chemically synthesized
  source 1..22: mol_type = other DNA
aaatatagtcagagaatcaaca

SEQ ID NO: 153045 - DNA, 22 bp, synthetic construct
  misc_feature 1..22: note = chemically synthesized
  source 1..22: mol_type = other DNA
aatatagtcagagaatcaacaa

SEQ ID NO: 153046 - DNA, 22 bp, synthetic construct
  misc_feature 1..22: note = chemically synthesized
  source 1..22: mol_type = other DNA
cattgtgtcagcctggacacat

SEQ ID NO: 153047 - DNA, 22 bp, synthetic construct
  misc_feature 1..22: note = chemically synthesized
  source 1..22: mol_type = other DNA
tgtcagcctggacacatgtagg

SEQ ID NO: 153048 - DNA, 22 bp, synthetic construct
  misc_feature 1..22: note = chemically synthesized
  source 1..22: mol_type = other DNA
gacacatgtaggtcactctatc

SEQ ID NO: 153049 - DNA, 22 bp, synthetic construct
  misc_feature 1..22: note = chemically synthesized
  source 1..22: mol_type = other DNA
tatcagtctgaccatatttaag

SEQ ID NO: 153050 - DNA, 22 bp, synthetic construct
  misc_feature 1..22: note = chemically synthesized
  source 1..22: mol_type = other DNA
tcagtctgaccatatttaagaa

SEQ ID NO: 153051 - DNA, 22 bp, synthetic construct
  misc_feature 1..22: note = chemically synthesized
  source 1..22: mol_type = other DNA
accatatttaagaaagaggaaa

SEQ ID NO: 153052 - DNA, 22 bp, synthetic construct
  misc_feature 1..22: note = chemically synthesized
  source 1..22: mol_type = other DNA
aagaaagaggaaaaaattgttt

SEQ ID NO: 153053 - DNA, 22 bp, synthetic construct
  misc_feature 1..22: note = chemically synthesized
  source 1..22: mol_type = other DNA
agaaagaggaaaaaattgttta

SEQ ID NO: 153054 - DNA, 22 bp, synthetic construct
  misc_feature 1..22: note = chemically synthesized
  source 1..22: mol_type = other DNA
tttatttgcctgaaatgtactt

SEQ ID NO: 153055 - DNA, 22 bp, synthetic construct
  misc_feature 1..22: note = chemically synthesized
  source 1..22: mol_type = other DNA
atttgcctgaaatgtacttttg

SEQ ID NO: 153056 - DNA, 22 bp, synthetic construct
  misc_feature 1..22: note = chemically synthesized
  source 1..22: mol_type = other DNA
tttgcctgaaatgtacttttga

SEQ ID NO: 153057 - DNA, 22 bp, synthetic construct
  misc_feature 1..22: note = chemically synthesized
  source 1..22: mol_type = other DNA
gcctgaaatgtacttttgagca

SEQ ID NO: 153058 - DNA, 22 bp, synthetic construct
  misc_feature 1..22: note = chemically synthesized
  source 1..22: mol_type = other DNA
cctgaaatgtacttttgagcat

SEQ ID NO: 153059 - DNA, 22 bp, synthetic construct
  misc_feature 1..22: note = chemically synthesized
  source 1..22: mol_type = other DNA
aaatgtacttttgagcatttcc

SEQ ID NO: 153060 - DNA, 22 bp, synthetic construct
  misc_feature 1..22: note = chemically synthesized
  source 1..22: mol_type = other DNA
ttgagcatttcctttgctgtaa

SEQ ID NO: 153061 - DNA, 22 bp, synthetic construct
  misc_feature 1..22: note = chemically synthesized
  source 1..22: mol_type = other DNA
tgagcatttcctttgctgtaaa

SEQ ID NO: 153062 - DNA, 22 bp, synthetic construct
  misc_feature 1..22: note = chemically synthesized
  source 1..22: mol_type = other DNA
gagcatttcctttgctgtaaaa

SEQ ID NO: 153063 - DNA, 22 bp, synthetic construct
  misc_feature 1..22: note = chemically synthesized
  source 1..22: mol_type = other DNA
agcatttcctttgctgtaaaac

SEQ ID NO: 153064 - DNA, 22 bp, synthetic construct
  misc_feature 1..22: note = chemically synthesized
  source 1..22: mol_type = other DNA
cctttgctgtaaaacaaagctg

SEQ ID NO: 153065 - DNA, 22 bp, synthetic construct
  misc_feature 1..22: note = chemically synthesized
  source 1..22: mol_type = other DNA
ctttgctgtaaaacaaagctgg

SEQ ID NO: 153066 - DNA, 22 bp, synthetic construct
  misc_feature 1..22: note = chemically synthesized
  source 1..22: mol_type = other DNA
tgctgtaaaacaaagctggatt

SEQ ID NO: 153067 - DNA, 22 bp, synthetic construct
  misc_feature 1..22: note = chemically synthesized
  source 1..22: mol_type = other DNA
gctgtaaaacaaagctggatta

SEQ ID NO: 153068 - DNA, 22 bp, synthetic construct
  misc_feature 1..22: note = chemically synthesized
  source 1..22: mol_type = other DNA
ctgtaaaacaaagctggattaa

SEQ ID NO: 153069 - DNA, 22 bp, synthetic construct
  misc_feature 1..22: note = chemically synthesized
  source 1..22: mol_type = other DNA
taaaacaaagctggattaaaaa

SEQ ID NO: 153070 - DNA, 22 bp, synthetic construct
  misc_feature 1..22: note = chemically synthesized
  source 1..22: mol_type = other DNA
gattaaaaacctaggttttcaa

SEQ ID NO: 153071 - DNA, 22 bp, synthetic construct
  misc_feature 1..22: note = chemically synthesized
  source 1..22: mol_type = other DNA
aaaacctaggttttcaagtttc

SEQ ID NO: 153072 - DNA, 22 bp, synthetic construct
  misc_feature 1..22: note = chemically synthesized
  source 1..22: mol_type = other DNA
ggttttcaagtttcaaagtaga

SEQ ID NO: 153073 - DNA, 22 bp, synthetic construct
  misc_feature 1..22: note = chemically synthesized
  source 1..22: mol_type = other DNA
tcaagtttcaaagtagaaaact

SEQ ID NO: 153074 - DNA, 22 bp, synthetic construct
  misc_feature 1..22: note = chemically synthesized
  source 1..22: mol_type = other DNA
caagtttcaaagtagaaaactt

SEQ ID NO: 153075 - DNA, 22 bp, synthetic construct
  misc_feature 1..22: note = chemically synthesized
  source 1..22: mol_type = other DNA
aagtttcaaagtagaaaacttg

SEQ ID NO: 153076 - DNA, 22 bp, synthetic construct
  misc_feature 1..22: note = chemically synthesized
  source 1..22: mol_type = other DNA
caaagtagaaaacttgaagttt

SEQ ID NO: 153077 - DNA, 22 bp, synthetic construct
  misc_feature 1..22: note = chemically synthesized
  source 1..22: mol_type = other DNA
aaagtagaaaacttgaagtttc

SEQ ID NO: 153078 - DNA, 22 bp, synthetic construct
  misc_feature 1..22: note = chemically synthesized
  source 1..22: mol_type = other DNA
gaagtttctttcattctctgag

SEQ ID NO: 153079 - DNA, 22 bp, synthetic construct
  misc_feature 1..22: note = chemically synthesized
  source 1..22: mol_type = other DNA
aagtttctttcattctctgagg

SEQ ID NO: 153080 - DNA, 22 bp, synthetic construct
  misc_feature 1..22: note = chemically synthesized
  source 1..22: mol_type = other DNA
ctttcattctctgaggtttact

SEQ ID NO: 153081 - DNA, 22 bp, synthetic construct
  misc_feature 1..22: note = chemically synthesized
  source 1..22: mol_type = other DNA
tttcattctctgaggtttactt

SEQ ID NO: 153082 - DNA, 22 bp, synthetic construct
  misc_feature 1..22: note = chemically synthesized
  source 1..22: mol_type = other DNA
tcattctctgaggtttacttaa

SEQ ID NO: 153083 - DNA, 22 bp, synthetic construct
  misc_feature 1..22: note = chemically synthesized
  source 1..22: mol_type = other DNA
cattctctgaggtttacttaat

SEQ ID NO: 153084 - DNA, 22 bp, synthetic construct
  misc_feature 1..22: note = chemically synthesized
  source 1..22: mol_type = other DNA
attctctgaggtttacttaatt

SEQ ID NO: 153085 - DNA, 22 bp, synthetic construct
  misc_feature 1..22: note = chemically synthesized
  source 1..22: mol_type = other DNA
tctgaggtttacttaattaacc

SEQ ID NO: 153086 - DNA, 22 bp, synthetic construct
  misc_feature 1..22: note = chemically synthesized
  source 1..22: mol_type = other DNA
tgaggtttacttaattaacctt

SEQ ID NO: 153087 - DNA, 22 bp, synthetic construct
  misc_feature 1..22: note = chemically synthesized
  source 1..22: mol_type = other DNA
aggtttacttaattaaccttca

SEQ ID NO: 153088 - DNA, 22 bp, synthetic construct
  misc_feature 1..22: note = chemically synthesized
  source 1..22: mol_type = other DNA
acttaattaaccttcaaaatgg

SEQ ID NO: 153089 - DNA, 22 bp, synthetic construct
  misc_feature 1..22: note = chemically synthesized
  source 1..22: mol_type = other DNA
cttaattaaccttcaaaatgga

SEQ ID NO: 153090 - DNA, 22 bp, synthetic construct
  misc_feature 1..22: note = chemically synthesized
  source 1..22: mol_type = other DNA
aattaaccttcaaaatggagac

SEQ ID NO: 153091 - DNA, 22 bp, synthetic construct
  misc_feature 1..22: note = chemically synthesized
  source 1..22: mol_type = other DNA
attaaccttcaaaatggagact

SEQ ID NO: 153092 - DNA, 22 bp, synthetic construct
  misc_feature 1..22: note = chemically synthesized
  source 1..22: mol_type = other DNA
accttcaaaatggagactatag

SEQ ID NO: 153093 - DNA, 22 bp, synthetic construct
  misc_feature 1..22: note = chemically synthesized
  source 1..22: mol_type = other DNA
caaaatggagactatagccaac

SEQ ID NO: 153094 - DNA, 22 bp, synthetic construct
  misc_feature 1..22: note = chemically synthesized
  source 1..22: mol_type = other DNA
aaaatggagactatagccaact

SEQ ID NO: 153095 - DNA, 22 bp, synthetic construct
  misc_feature 1..22: note = chemically synthesized
  source 1..22: mol_type = other DNA
tagccaactcacaggaatgttg

SEQ ID NO: 153096 - DNA, 22 bp, synthetic construct
  misc_feature 1..22: note = chemically synthesized
  source 1..22: mol_type = other DNA
acaggaatgttgtgatatctgt

SEQ ID NO: 153097 - DNA, 22 bp, synthetic construct
  misc_feature 1..22: note = chemically synthesized
  source 1..22: mol_type = other DNA
tgatatctgtatggaccagaat

SEQ ID NO: 153098 - DNA, 22 bp, synthetic construct
  misc_feature 1..22: note = chemically synthesized
  source 1..22: mol_type = other DNA
tatggaccagaattgtccaagg

SEQ ID NO: 153099 - DNA, 22 bp, synthetic construct
  misc_feature 1..22: note = chemically synthesized
  source 1..22: mol_type = other DNA
tccaagggaacttttctaaact

SEQ ID NO: 153100 - DNA, 22 bp, synthetic construct
  misc_feature 1..22: note = chemically synthesized
  source 1..22: mol_type = other DNA
ttctaaactgatggcgatgttc

SEQ ID NO: 153101 - DNA, 22 bp, synthetic construct
  misc_feature 1..22: note = chemically synthesized
  source 1..22: mol_type = other DNA
tctaaactgatggcgatgttct

SEQ ID NO: 153102 - DNA, 22 bp, synthetic construct
  misc_feature 1..22: note = chemically synthesized
  source 1..22: mol_type = other DNA
ctaaactgatggcgatgttcta

SEQ ID NO: 153103 - DNA, 22 bp, synthetic construct
  misc_feature 1..22: note = chemically synthesized
  source 1..22: mol_type = other DNA
taaactgatggcgatgttctat

SEQ ID NO: 153104 - DNA, 22 bp, synthetic construct
  misc_feature 1..22: note = chemically synthesized
  source 1..22: mol_type = other DNA
aactgatggcgatgttctataa

SEQ ID NO: 153105 - DNA, 22 bp, synthetic construct
  misc_feature 1..22: note = chemically synthesized
  source 1..22: mol_type = other DNA
atggcgatgttctataaaatac

SEQ ID NO: 153106 - DNA, 22 bp, synthetic construct
  misc_feature 1..22: note = chemically synthesized
  source 1..22: mol_type = other DNA
tataaaataccataaaatggct

SEQ ID NO: 153107 - DNA, 22 bp, synthetic construct
  misc_feature 1..22: note = chemically synthesized
  source 1..22: mol_type = other DNA
taaaataccataaaatggctaa

SEQ ID NO: 153108 - DNA, 22 bp, synthetic construct
  misc_feature 1..22: note = chemically synthesized
  source 1..22: mol_type = other DNA
aagtggaatatatggctcctgt

SEQ ID NO: 153109 - DNA, 22 bp, synthetic construct
  misc_feature 1..22: note = chemically synthesized
  source 1..22: mol_type = other DNA
ctgtgcgcttgaaatgatggta

SEQ ID NO: 153110 - DNA, 22 bp, synthetic construct
  misc_feature 1..22: note = chemically synthesized
  source 1..22: mol_type = other DNA
tgcgcttgaaatgatggtagtg

SEQ ID NO: 153111 - DNA, 22 bp, synthetic construct
  misc_feature 1..22: note = chemically synthesized
  source 1..22: mol_type = other DNA
gaaatgatggtagtgtaattga

SEQ ID NO: 153112 - DNA, 22 bp, synthetic construct
  misc_feature 1..22: note = chemically synthesized
  source 1..22: mol_type = other DNA
aaatgatggtagtgtaattgaa

SEQ ID NO: 153113 - DNA, 22 bp, synthetic construct
  misc_feature 1..22: note = chemically synthesized
  source 1..22: mol_type = other DNA
aacaactgcatttacaatttca

SEQ ID NO: 153114 - DNA, 22 bp, synthetic construct
  misc_feature 1..22: note = chemically synthesized
  source 1..22: mol_type = other DNA
catttacaatttcagttacttt

SEQ ID NO: 153115 - DNA, 22 bp, synthetic construct
  misc_feature 1..22: note = chemically synthesized
  source 1..22: mol_type = other DNA
acaatttcagttactttaagtt

SEQ ID NO: 153116 - DNA, 22 bp, synthetic construct
  misc_feature 1..22: note = chemically synthesized
  source 1..22: mol_type = other DNA
caatttcagttactttaagtta

SEQ ID NO: 153117 - DNA, 22 bp, synthetic construct
  misc_feature 1..22: note = chemically synthesized
  source 1..22: mol_type = other DNA
cagttactttaagttaatttat

SEQ ID NO: 153118 - DNA, 22 bp, synthetic construct
  misc_feature 1..22: note = chemically synthesized
  source 1..22: mol_type = other DNA
agttactttaagttaatttata

SEQ ID NO: 153119 - DNA, 22 bp, synthetic construct
  misc_feature 1..22: note = chemically synthesized
  source 1..22: mol_type = other DNA
ctttaagttaatttatatttaa

SEQ ID NO: 153120 - DNA, 22 bp, synthetic construct
  misc_feature 1..22: note = chemically synthesized
  source 1..22: mol_type = other DNA
taagttaatttatatttaaatg

SEQ ID NO: 153121 - DNA, 22 bp, synthetic construct
  misc_feature 1..22: note = chemically synthesized
  source 1..22: mol_type = other DNA
aagttaatttatatttaaatgt

SEQ ID NO: 153122 - DNA, 22 bp, synthetic construct
  misc_feature 1..22: note = chemically synthesized
  source 1..22: mol_type = other DNA
agttaatttatatttaaatgtt

SEQ ID NO: 153123 - DNA, 22 bp, synthetic construct
  misc_feature 1..22: note = chemically synthesized
  source 1..22: mol_type = other DNA
atttatatttaaatgtttaatg

SEQ ID NO: 153124 - DNA, 22 bp, synthetic construct
  misc_feature 1..22: note = chemically synthesized
  source 1..22: mol_type = other DNA
atatttaaatgtttaatgtcct

SEQ ID NO: 153125 - DNA, 22 bp, synthetic construct
  misc_feature 1..22: note = chemically synthesized
  source 1..22: mol_type = other DNA
tatttaaatgtttaatgtcctt

SEQ ID NO: 153126 - DNA, 22 bp, synthetic construct
  misc_feature 1..22: note = chemically synthesized
  source 1..22: mol_type = other DNA
aaatgtttaatgtccttgtatt

SEQ ID NO: 153127 - DNA, 22 bp, synthetic construct
  misc_feature 1..22: note = chemically synthesized
  source 1..22: mol_type = other DNA
aatgtttaatgtccttgtattg

SEQ ID NO: 153128 - DNA, 22 bp, synthetic construct
  misc_feature 1..22: note = chemically synthesized
  source 1..22: mol_type = other DNA
aatgtccttgtattggacagtt

SEQ ID NO: 153129 - DNA, 22 bp, synthetic construct
  misc_feature 1..22: note = chemically synthesized
  source 1..22: mol_type = other DNA
atgtccttgtattggacagttc

SEQ ID NO: 153130 - DNA, 22 bp, synthetic construct
  misc_feature 1..22: note = chemically synthesized
  source 1..22: mol_type = other DNA
gtattggacagttcagttcagc

SEQ ID NO: 153131 - DNA, 22 bp, synthetic construct
  misc_feature 1..22: note = chemically synthesized
  source 1..22: mol_type = other DNA
tattggacagttcagttcagca

SEQ ID NO: 153132 - DNA, 22 bp, synthetic construct
  misc_feature 1..22: note = chemically synthesized
  source 1..22: mol_type = other DNA
gacagttcagttcagcagccac

SEQ ID NO: 153133 - DNA, 22 bp, synthetic construct
  misc_feature 1..22: note = chemically synthesized
  source 1..22: mol_type = other DNA
agttcagcagccactatattgg

SEQ ID NO: 153134 - DNA, 22 bp, synthetic construct
  misc_feature 1..22: note = chemically synthesized
  source 1..22: mol_type = other DNA
agcagccactatattggacagg

SEQ ID NO: 153135 - DNA, 22 bp, synthetic construct
  misc_feature 1..22: note = chemically synthesized
  source 1..22: mol_type = other DNA
tattggacagggaagctacagt

SEQ ID NO: 153136 - DNA, 22 bp, synthetic construct
  misc_feature 1..22: note = chemically synthesized
  source 1..22: mol_type = other DNA
gacagggaagctacagttcata

SEQ ID NO: 153137 - DNA, 22 bp, synthetic construct
  misc_feature 1..22: note = chemically synthesized
  source 1..22: mol_type = other DNA
cagttcataaagaggacacaaa

SEQ ID NO: 153138 - DNA, 22 bp, synthetic construct
  misc_feature 1..22: note = chemically synthesized
  source 1..22: mol_type = other DNA
ataaagaggacacaaagaaata

SEQ ID NO: 153139 - DNA, 22 bp, synthetic construct
  misc_feature 1..22: note = chemically synthesized
  source 1..22: mol_type = other DNA
tggattcaacttctaccatgtc

SEQ ID NO: 153140 - DNA, 22 bp, synthetic construct
  misc_feature 1..22: note = chemically synthesized
  source 1..22: mol_type = other DNA
ggattcaacttctaccatgtct

SEQ ID NO: 153141 - DNA, 22 bp, synthetic construct
  misc_feature 1..22: note = chemically synthesized
  source 1..22: mol_type = other DNA
gattcaacttctaccatgtcta

SEQ ID NO: 153142 - DNA, 22 bp, synthetic construct
  misc_feature 1..22: note = chemically synthesized
  source 1..22: mol_type = other DNA
aacttctaccatgtctaattta

SEQ ID NO: 153143 - DNA, 22 bp, synthetic construct
  misc_feature 1..22: note = chemically synthesized
  source 1..22: mol_type = other DNA
ctaccatgtctaatttaaatta

SEQ ID NO: 153144 - DNA, 22 bp, synthetic construct
  misc_feature 1..22: note = chemically synthesized
  source 1..22: mol_type = other DNA
taccatgtctaatttaaattag

SEQ ID NO: 153145 - DNA, 22 bp, synthetic construct
  misc_feature 1..22: note = chemically synthesized
  source 1..22: mol_type = other DNA
ccatgtctaatttaaattagaa

SEQ ID NO: 153146 - DNA, 22 bp, synthetic construct
  misc_feature 1..22: note = chemically synthesized
  source 1..22: mol_type = other DNA
atttaaattagaatccttattt

SEQ ID NO: 153147 - DNA, 22 bp, synthetic construct
  misc_feature 1..22: note = chemically synthesized
  source 1..22: mol_type = other DNA
aaattagaatccttatttttta

SEQ ID NO: 153148 - DNA, 22 bp, synthetic construct
  misc_feature 1..22: note = chemically synthesized
  source 1..22: mol_type = other DNA
aattagaatccttattttttag

SEQ ID NO: 153149 - DNA, 22 bp, synthetic construct
  misc_feature 1..22: note = chemically synthesized
  source 1..22: mol_type = other DNA
gaatccttattttttagatttt

SEQ ID NO: 153150 - DNA, 22 bp, synthetic construct
  misc_feature 1..22: note = chemically synthesized
  source 1..22: mol_type = other DNA
attttttagattttatatgtgg

SEQ ID NO: 153151 - DNA, 22 bp, synthetic construct
  misc_feature 1..22: note = chemically synthesized
  source 1..22: mol_type = other DNA
ttttttagattttatatgtgga

SEQ ID NO: 153152 - DNA, 22 bp, synthetic construct
  misc_feature 1..22: note = chemically synthesized
  source 1..22: mol_type = other DNA
tttagattttatatgtggactc

SEQ ID NO: 153153 - DNA, 22 bp, synthetic construct
  misc_feature 1..22: note = chemically synthesized
  source 1..22: mol_type = other DNA
ttagattttatatgtggactcc

SEQ ID NO: 153154 - DNA, 22 bp, synthetic construct
  misc_feature 1..22: note = chemically synthesized
  source 1..22: mol_type = other DNA
tagattttatatgtggactcca

SEQ ID NO: 153155 - DNA, 22 bp, synthetic construct
  misc_feature 1..22: note = chemically synthesized
  source 1..22: mol_type = other DNA
agattttatatgtggactccac

SEQ ID NO: 153156 - DNA, 22 bp, synthetic construct
  misc_feature 1..22: note = chemically synthesized
  source 1..22: mol_type = other DNA
gattttatatgtggactccact

SEQ ID NO: 153157 - DNA, 22 bp, synthetic construct
  misc_feature 1..22: note = chemically synthesized
  source 1..22: mol_type = other DNA
tatatgtggactccactgctac

SEQ ID NO: 153158 - DNA, 22 bp, synthetic construct
  misc_feature 1..22: note = chemically synthesized
  source 1..22: mol_type = other DNA
atatgtggactccactgctaca

SEQ ID NO: 153159 - DNA, 22 bp, synthetic construct
  misc_feature 1..22: note = chemically synthesized
  source 1..22: mol_type = other DNA
tatgtggactccactgctacaa

SEQ ID NO: 153160 - DNA, 22 bp, synthetic construct
  misc_feature 1..22: note = chemically synthesized
  source 1..22: mol_type = other DNA
cactgctacaaggctggaagca

SEQ ID NO: 153161 - DNA, 22 bp, synthetic construct
  misc_feature 1..22: note = chemically synthesized
  source 1..22: mol_type = other DNA
ctacaaggctggaagcagattt

SEQ ID NO: 153162 - DNA, 22 bp, synthetic construct
  misc_feature 1..22: note = chemically synthesized
  source 1..22: mol_type = other DNA
caaggctggaagcagattttgc

SEQ ID NO: 153163 - DNA, 22 bp, synthetic construct
  misc_feature 1..22: note = chemically synthesized
  source 1..22: mol_type = other DNA
gaagcagattttgctctagatc

SEQ ID NO: 153164 - DNA, 22 bp, synthetic construct
  misc_feature 1..22: note = chemically synthesized
  source 1..22: mol_type = other DNA
tgctctagatcttttgctttta

SEQ ID NO: 153165 - DNA, 22 bp, synthetic construct
  misc_feature 1..22: note = chemically synthesized
  source 1..22: mol_type = other DNA
gctctagatcttttgcttttat

SEQ ID NO: 153166 - DNA, 22 bp, synthetic construct
  misc_feature 1..22: note = chemically synthesized
  source 1..22: mol_type = other DNA
ctctagatcttttgcttttata

SEQ ID NO: 153167 - DNA, 22 bp, synthetic construct
  misc_feature 1..22: note = chemically synthesized
  source 1..22: mol_type = other DNA
tagatcttttgcttttatatct

SEQ ID NO: 153168 - DNA, 22 bp, synthetic construct
  misc_feature 1..22: note = chemically synthesized
  source 1..22: mol_type = other DNA
gatcttttgcttttatatctaa

SEQ ID NO: 153169 - DNA, 22 bp, synthetic construct
  misc_feature 1..22: note = chemically synthesized
  source 1..22: mol_type = other DNA
ttgcttttatatctaagtgggg

SEQ ID NO: 153170 - DNA, 22 bp, synthetic construct
  misc_feature 1..22: note = chemically synthesized
  source 1..22: mol_type = other DNA
tgcttttatatctaagtggggg

SEQ ID NO: 153171 - DNA, 22 bp, synthetic construct
  misc_feature 1..22: note = chemically synthesized
  source 1..22: mol_type = other DNA
gcttttatatctaagtggggga

SEQ ID NO: 153172 - DNA, 22 bp, synthetic construct
  misc_feature 1..22: note = chemically synthesized
  source 1..22: mol_type = other DNA
cttttatatctaagtgggggat

SEQ ID NO: 153173 - DNA, 22 bp, synthetic construct
  misc_feature 1..22: note = chemically synthesized
  source 1..22: mol_type = other DNA
ttatatctaagtgggggatctt

SEQ ID NO: 153174 - DNA, 22 bp, synthetic construct
  misc_feature 1..22: note = chemically synthesized
  source 1..22: mol_type = other DNA
tatatctaagtgggggatcttc

SEQ ID NO: 153175 - DNA, 22 bp, synthetic construct
  misc_feature 1..22: note = chemically synthesized
  source 1..22: mol_type = other DNA
atatctaagtgggggatcttct

SEQ ID NO: 153176 - DNA, 22 bp, synthetic construct
  misc_feature 1..22: note = chemically synthesized
  source 1..22: mol_type = other DNA
tatctaagtgggggatcttctg

SEQ ID NO: 153177 - DNA, 22 bp, synthetic construct
  misc_feature 1..22: note = chemically synthesized
  source 1..22: mol_type = other DNA
agtgggggatcttctgaacaga

SEQ ID NO: 153178 - DNA, 22 bp, synthetic construct
  misc_feature 1..22: note = chemically synthesized
  source 1..22: mol_type = other DNA
ctgaacagatgagactgtccgc

SEQ ID NO: 153179 - DNA, 22 bp, synthetic construct
  misc_feature 1..22: note = chemically synthesized
  source 1..22: mol_type = other DNA
tgaacagatgagactgtccgct

SEQ ID NO: 153180 - DNA, 22 bp, synthetic construct
  misc_feature 1..22: note = chemically synthesized
  source 1..22: mol_type = other DNA
aacagatgagactgtccgctac

SEQ ID NO: 153181 - DNA, 22 bp, synthetic construct
  misc_feature 1..22: note = chemically synthesized
  source 1..22: mol_type = other DNA
tccgctaccgacttattctgag

SEQ ID NO: 153182 - DNA, 22 bp, synthetic construct
  misc_feature 1..22: note = chemically synthesized
  source 1..22: mol_type = other DNA
ccgacttattctgagtttaaaa

SEQ ID NO: 153183 - DNA, 22 bp, synthetic construct
  misc_feature 1..22: note = chemically synthesized
  source 1..22: mol_type = other DNA
attctgagtttaaaagaaaaaa

SEQ ID NO: 153184 - DNA, 22 bp, synthetic construct
  misc_feature 1..22: note = chemically synthesized
  source 1..22: mol_type = other DNA
ttctgagtttaaaagaaaaaag

SEQ ID NO: 153185 - DNA, 22 bp, synthetic construct
  misc_feature 1..22: note = chemically synthesized
  source 1..22: mol_type = other DNA
tgagtttaaaagaaaaaagata

SEQ ID NO: 153186 - DNA, 22 bp, synthetic construct
  misc_feature 1..22: note = chemically synthesized
  source 1..22: mol_type = other DNA
agtttaaaagaaaaaagataaa

SEQ ID NO: 153187 - DNA, 22 bp, synthetic construct
  misc_feature 1..22: note = chemically synthesized
  source 1..22: mol_type = other DNA
aaaagaaaaaagataaaagaac

SEQ ID NO: 153188 - DNA, 22 bp, synthetic construct
  misc_feature 1..22: note = chemically synthesized
  source 1..22: mol_type = other DNA
aaagaaaaaagataaaagaaca

SEQ ID NO: 153189 - DNA, 22 bp, synthetic construct
  misc_feature 1..22: note = chemically synthesized
  source 1..22: mol_type = other DNA
ttttctaagtaagctagtgcag

SEQ ID NO: 153190 - DNA, 22 bp, synthetic construct
  misc_feature 1..22: note = chemically synthesized
  source 1..22: mol_type = other DNA
ttctaagtaagctagtgcagct

SEQ ID NO: 153191 - DNA, 22 bp, synthetic construct
  misc_feature 1..22: note = chemically synthesized
  source 1..22: mol_type = other DNA
tctaagtaagctagtgcagctt

SEQ ID NO: 153192 - DNA, 22 bp, synthetic construct
  misc_feature 1..22: note = chemically synthesized
  source 1..22: mol_type = other DNA
ctaagtaagctagtgcagcttt

SEQ ID NO: 153193 - DNA, 22 bp, synthetic construct
  misc_feature 1..22: note = chemically synthesized
  source 1..22: mol_type = other DNA
taagtaagctagtgcagctttc

SEQ ID NO: 153194 - DNA, 22 bp, synthetic construct
  misc_feature 1..22: note = chemically synthesized
  source 1..22: mol_type = other DNA
agtaagctagtgcagctttcca

SEQ ID NO: 153195 - DNA, 22 bp, synthetic construct
  misc_feature 1..22: note = chemically synthesized
  source 1..22: mol_type = other DNA
gtgcagctttccaaagaaggaa

SEQ ID NO: 153196 - DNA, 22 bp, synthetic construct
  misc_feature 1..22: note = chemically synthesized
  source 1..22: mol_type = other DNA
tccaaagaaggaaagaaaggaa

SEQ ID NO: 153197 - DNA, 22 bp, synthetic construct
  misc_feature 1..22: note = chemically synthesized
  source 1..22: mol_type = other DNA
ccaaagaaggaaagaaaggaag

SEQ ID NO: 153198 - DNA, 22 bp, synthetic construct
  misc_feature 1..22: note = chemically synthesized
  source 1..22: mol_type = other DNA
caaagaaggaaagaaaggaagg

SEQ ID NO: 153199 - DNA, 22 bp, synthetic construct
  misc_feature 1..22: note = chemically synthesized
  source 1..22: mol_type = other DNA
tgcatggataacaagaaaataa

SEQ ID NO: 153200 - DNA, 22 bp, synthetic construct
  misc_feature 1..22: note = chemically synthesized
  source 1..22: mol_type = other DNA
ttttaatcttcctatattctat

SEQ ID NO: 153201 - DNA, 22 bp, synthetic construct
  misc_feature 1..22: note = chemically synthesized
  source 1..22: mol_type = other DNA
taatcttcctatattctattag

SEQ ID NO: 153202 - DNA, 22 bp, synthetic construct
  misc_feature 1..22: note = chemically synthesized
  source 1..22: mol_type = other DNA
aatcttcctatattctattagg

SEQ ID NO: 153203 - DNA, 22 bp, synthetic construct
  misc_feature 1..22: note = chemically synthesized
  source 1..22: mol_type = other DNA
atcttcctatattctattaggt

SEQ ID NO: 153204 - DNA, 22 bp, synthetic construct
  misc_feature 1..22: note = chemically synthesized
  source 1..22: mol_type = other DNA
cctatattctattaggtatcta

SEQ ID NO: 153205 - DNA, 22 bp, synthetic construct
  misc_feature 1..22: note = chemically synthesized
  source 1..22: mol_type = other DNA
ctatattctattaggtatctaa

SEQ ID NO: 153206 - DNA, 22 bp, synthetic construct
  misc_feature 1..22: note = chemically synthesized
  source 1..22: mol_type = other DNA
tattctattaggtatctaagaa

SEQ ID NO: 153207 - DNA, 22 bp, synthetic construct
  misc_feature 1..22: note = chemically synthesized
  source 1..22: mol_type = other DNA
tattaggtatctaagaaggtaa

SEQ ID NO: 153208 - DNA, 22 bp, synthetic construct
  misc_feature 1..22: note = chemically synthesized
  source 1..22: mol_type = other DNA
ttaggtatctaagaaggtaagt

SEQ ID NO: 153209 - DNA, 22 bp, synthetic construct
  misc_feature 1..22: note = chemically synthesized
  source 1..22: mol_type = other DNA
ggtatctaagaaggtaagtgtt

SEQ ID NO: 153210 - DNA, 22 bp, synthetic construct
  misc_feature 1..22: note = chemically synthesized
  source 1..22: mol_type = other DNA
agaaggtaagtgttaaaattgg

SEQ ID NO: 153211 - DNA, 22 bp, synthetic construct
  misc_feature 1..22: note = chemically synthesized
  source 1..22: mol_type = other DNA
aaattggacaaattaatgcata

SEQ ID NO: 153212 - DNA, 22 bp, synthetic construct
  misc_feature 1..22: note = chemically synthesized
  source 1..22: mol_type = other DNA
gacaaattaatgcataagagtc

SEQ ID NO: 153213 - DNA, 22 bp, synthetic construct
  misc_feature 1..22: note = chemically synthesized
  source 1..22: mol_type = other DNA
atgcataagagtcattttacac

SEQ ID NO: 153214 - DNA, 22 bp, synthetic construct
  misc_feature 1..22: note = chemically synthesized
  source 1..22: mol_type = other DNA
tacaccaaaaagcaaatattta

SEQ ID NO: 153215 - DNA, 22 bp, synthetic construct
  misc_feature 1..22: note = chemically synthesized
  source 1..22: mol_type = other DNA
acaccaaaaagcaaatatttat

SEQ ID NO: 153216 - DNA, 22 bp, synthetic construct
  misc_feature 1..22: note = chemically synthesized
  source 1..22: mol_type = other DNA
caccaaaaagcaaatatttatt

SEQ ID NO: 153217 - DNA, 22 bp, synthetic construct
  misc_feature 1..22: note = chemically synthesized
  source 1..22: mol_type = other DNA
atttttatttttagatatcaac

SEQ ID NO: 153218 - DNA, 22 bp, synthetic construct
  misc_feature 1..22: note = chemically synthesized
  source 1..22: mol_type = other DNA
tttttatttttagatatcaact

SEQ ID NO: 153219 - DNA, 22 bp, synthetic construct
  misc_feature 1..22: note = chemically synthesized
  source 1..22: mol_type = other DNA
ttatttttagatatcaactaaa

SEQ ID NO: 153220 - DNA, 22 bp, synthetic construct
  misc_feature 1..22: note = chemically synthesized
  source 1..22: mol_type = other DNA
tatttttagatatcaactaaaa

SEQ ID NO: 153221 - DNA, 22 bp, synthetic construct
  misc_feature 1..22: note = chemically synthesized
  source 1..22: mol_type = other DNA
atttttagatatcaactaaaac

SEQ ID NO: 153222 - DNA, 22 bp, synthetic construct
  misc_feature 1..22: note = chemically synthesized
  source 1..22: mol_type = other DNA
tttttagatatcaactaaaaca

SEQ ID NO: 153223 - DNA, 22 bp, synthetic construct
  misc_feature 1..22: note = chemically synthesized
  source 1..22: mol_type = other DNA
ttagatatcaactaaaacaacc

SEQ ID NO: 153224 - DNA, 22 bp, synthetic construct
  misc_feature 1..22: note = chemically synthesized
  source 1..22: mol_type = other DNA
tagatatcaactaaaacaacca

SEQ ID NO: 153225 - DNA, 22 bp, synthetic construct
  misc_feature 1..22: note = chemically synthesized
  source 1..22: mol_type = other DNA
agatatcaactaaaacaaccag

SEQ ID NO: 153226 - DNA, 22 bp, synthetic construct
  misc_feature 1..22: note = chemically synthesized
  source 1..22: mol_type = other DNA
gatatcaactaaaacaaccaga

SEQ ID NO: 153227 - DNA, 22 bp, synthetic construct
  misc_feature 1..22: note = chemically synthesized
  source 1..22: mol_type = other DNA
aaacaaccagatttgtcttcct

SEQ ID NO: 153228 - DNA, 22 bp, synthetic construct
  misc_feature 1..22: note = chemically synthesized
  source 1..22: mol_type = other DNA
gtcttcctgtaattatgccttc

SEQ ID NO: 153229 - DNA, 22 bp, synthetic construct
  misc_feature 1..22: note = chemically synthesized
  source 1..22: mol_type = other DNA
tcttcctgtaattatgccttcc

SEQ ID NO: 153230 - DNA, 22 bp, synthetic construct
  misc_feature 1..22: note = chemically synthesized
  source 1..22: mol_type = other DNA
cctgtaattatgccttcctttc

SEQ ID NO: 153231 - DNA, 22 bp, synthetic construct
  misc_feature 1..22: note = chemically synthesized
  source 1..22: mol_type = other DNA
ctgtaattatgccttcctttcc

SEQ ID NO: 153232 - DNA, 22 bp, synthetic construct
  misc_feature 1..22: note = chemically synthesized
  source 1..22: mol_type = other DNA
taattatgccttcctttccttt

SEQ ID NO: 153233 - DNA, 22 bp, synthetic construct
  misc_feature 1..22: note = chemically synthesized
  source 1..22: mol_type = other DNA
tgccttcctttcctttcacttt

SEQ ID NO: 153234 - DNA, 22 bp, synthetic construct
  misc_feature 1..22: note = chemically synthesized
  source 1..22: mol_type = other DNA
cctttcctttcactttggactt

SEQ ID NO: 153235 - DNA, 22 bp, synthetic construct
  misc_feature 1..22: note = chemically synthesized
  source 1..22: mol_type = other DNA
ctttcctttcactttggacttc

SEQ ID NO: 153236 - DNA, 22 bp, synthetic construct
  misc_feature 1..22: note = chemically synthesized
  source 1..22: mol_type = other DNA
tcctttcactttggacttcatt

SEQ ID NO: 153237 - DNA, 22 bp, synthetic construct
  misc_feature 1..22: note = chemically synthesized
  source 1..22: mol_type = other DNA
cctttcactttggacttcattc

SEQ ID NO: 153238 - DNA, 22 bp, synthetic construct
  misc_feature 1..22: note = chemically synthesized
  source 1..22: mol_type = other DNA
ctttcactttggacttcattca

SEQ ID NO: 153239 - DNA, 22 bp, synthetic construct
  misc_feature 1..22: note = chemically synthesized
  source 1..22: mol_type = other DNA
tcactttggacttcattcaata

SEQ ID NO: 153240 - DNA, 22 bp, synthetic construct
  misc_feature 1..22: note = chemically synthesized
  source 1..22: mol_type = other DNA
cactttggacttcattcaataa

SEQ ID NO: 153241 - DNA, 22 bp, synthetic construct
  misc_feature 1..22: note = chemically synthesized
  source 1..22: mol_type = other DNA
actttggacttcattcaataac

SEQ ID NO: 153242 - DNA, 22 bp, synthetic construct
  misc_feature 1..22: note = chemically synthesized
  source 1..22: mol_type = other DNA
tggacttcattcaataacatag

SEQ ID NO: 153243 - DNA, 22 bp, synthetic construct
  misc_feature 1..22: note = chemically synthesized
  source 1..22: mol_type = other DNA
ggacttcattcaataacatagc

SEQ ID NO: 153244 - DNA, 22 bp, synthetic construct
  misc_feature 1..22: note = chemically synthesized
  source 1..22: mol_type = other DNA
gacttcattcaataacatagcc

SEQ ID NO: 153245 - DNA, 22 bp, synthetic construct
  misc_feature 1..22: note = chemically synthesized
  source 1..22: mol_type = other DNA
cattcaataacatagcctctgt

SEQ ID NO: 153246 - DNA, 22 bp, synthetic construct
  misc_feature 1..22: note = chemically synthesized
  source 1..22: mol_type = other DNA
attcaataacatagcctctgtc

SEQ ID NO: 153247 - DNA, 22 bp, synthetic construct
  misc_feature 1..22: note = chemically synthesized
  source 1..22: mol_type = other DNA
aataacatagcctctgtctact

SEQ ID NO: 153248 - DNA, 22 bp, synthetic construct
  misc_feature 1..22: note = chemically synthesized
  source 1..22: mol_type = other DNA
tgtctacttatttgactcagag

SEQ ID NO: 153249 - DNA, 22 bp, synthetic construct
  misc_feature 1..22: note = chemically synthesized
  source 1..22: mol_type = other DNA
tctacttatttgactcagaggg

SEQ ID NO: 153250 - DNA, 22 bp, synthetic construct
  misc_feature 1..22: note = chemically synthesized
  source 1..22: mol_type = other DNA
cttatttgactcagagggaaac

SEQ ID NO: 153251 - DNA, 22 bp, synthetic construct
  misc_feature 1..22: note = chemically synthesized
  source 1..22: mol_type = other DNA
atttgactcagagggaaacaaa

SEQ ID NO: 153252 - DNA, 22 bp, synthetic construct
  misc_feature 1..22: note = chemically synthesized
  source 1..22: mol_type = other DNA
tttgactcagagggaaacaaaa

SEQ ID NO: 153253 - DNA, 22 bp, synthetic construct
  misc_feature 1..22: note = chemically synthesized
  source 1..22: mol_type = other DNA
gactcagagggaaacaaaaata

SEQ ID NO: 153254 - DNA, 22 bp, synthetic construct
  misc_feature 1..22: note = chemically synthesized
  source 1..22: mol_type = other DNA
actcagagggaaacaaaaatac

SEQ ID NO: 153255 - DNA, 22 bp, synthetic construct
  misc_feature 1..22: note = chemically synthesized
  source 1..22: mol_type = other DNA
agagggaaacaaaaatacaggc

SEQ ID NO: 153256 - DNA, 22 bp, synthetic construct
  misc_feature 1..22: note = chemically synthesized
  source 1..22: mol_type = other DNA
tggtttctaatagcttaagcct

SEQ ID NO: 153257 - DNA, 22 bp, synthetic construct
  misc_feature 1..22: note = chemically synthesized
  source 1..22: mol_type = other DNA
ggtttctaatagcttaagcctc

SEQ ID NO: 153258 - DNA, 22 bp, synthetic construct
  misc_feature 1..22: note = chemically synthesized
  source 1..22: mol_type = other DNA
gtttctaatagcttaagcctca

SEQ ID NO: 153259 - DNA, 22 bp, synthetic construct
  misc_feature 1..22: note = chemically synthesized
  source 1..22: mol_type = other DNA
ctaatagcttaagcctcaaagt

SEQ ID NO: 153260 - DNA, 22 bp, synthetic construct
  misc_feature 1..22: note = chemically synthesized
  source 1..22: mol_type = other DNA
taatagcttaagcctcaaagtg

SEQ ID NO: 153261 - DNA, 22 bp, synthetic construct
  misc_feature 1..22: note = chemically synthesized
  source 1..22: mol_type = other DNA
atagcttaagcctcaaagtgag

SEQ ID NO: 153262 - DNA, 22 bp, synthetic construct
  misc_feature 1..22: note = chemically synthesized
  source 1..22: mol_type = other DNA
aagcctcaaagtgaggaaattg

SEQ ID NO: 153263 - DNA, 22 bp, synthetic construct
  misc_feature 1..22: note = chemically synthesized
  source 1..22: mol_type = other DNA
agcctcaaagtgaggaaattgt

SEQ ID NO: 153264 - DNA, 22 bp, synthetic construct
  misc_feature 1..22: note = chemically synthesized
  source 1..22: mol_type = other DNA
aaagtgaggaaattgtttctgg

SEQ ID NO: 153265 - DNA, 22 bp, synthetic construct
  misc_feature 1..22: note = chemically synthesized
  source 1..22: mol_type = other DNA
tttctggacagagtaaagtatc

SEQ ID NO: 153266 - DNA, 22 bp, synthetic construct
  misc_feature 1..22: note = chemically synthesized
  source 1..22: mol_type = other DNA
ctggacagagtaaagtatctgg

SEQ ID NO: 153267 - DNA, 22 bp, synthetic construct
  misc_feature 1..22: note = chemically synthesized
  source 1..22: mol_type = other DNA
tggacagagtaaagtatctggt

SEQ ID NO: 153268 - DNA, 22 bp, synthetic construct
  misc_feature 1..22: note = chemically synthesized
  source 1..22: mol_type = other DNA
gacagagtaaagtatctggtta

SEQ ID NO: 153269 - DNA, 22 bp, synthetic construct
  misc_feature 1..22: note = chemically synthesized
  source 1..22: mol_type = other DNA
gttagaaagataagtgtaaaat

SEQ ID NO: 153270 - DNA, 22 bp, synthetic construct
  misc_feature 1..22: note = chemically synthesized
  source 1..22: mol_type = other DNA
gaaagataagtgtaaaattatt

SEQ ID NO: 153271 - DNA, 22 bp, synthetic construct
  misc_feature 1..22: note = chemically synthesized
  source 1..22: mol_type = other DNA
ttcctagaacaataaattaggt

SEQ ID NO: 153272 - DNA, 22 bp, synthetic construct
  misc_feature 1..22: note = chemically synthesized
  source 1..22: mol_type = other DNA
ctagaacaataaattaggtctt

SEQ ID NO: 153273 - DNA, 22 bp, synthetic construct
  misc_feature 1..22: note = chemically synthesized
  source 1..22: mol_type = other DNA
gaacaataaattaggtcttctg

SEQ ID NO: 153274 - DNA, 22 bp, synthetic construct
  misc_feature 1..22: note = chemically synthesized
  source 1..22: mol_type = other DNA
ggtcttctgggttacagtataa

SEQ ID NO: 153275 - DNA, 22 bp, synthetic construct
  misc_feature 1..22: note = chemically synthesized
  source 1..22: mol_type = other DNA
ctgggttacagtataaggttaa

SEQ ID NO: 153276 - DNA, 22 bp, synthetic construct
  misc_feature 1..22: note = chemically synthesized
  source 1..22: mol_type = other DNA
tgggttacagtataaggttaat

SEQ ID NO: 153277 - DNA, 22 bp, synthetic construct
  misc_feature 1..22: note = chemically synthesized
  source 1..22: mol_type = other DNA
ggttacagtataaggttaattt

SEQ ID NO: 153278 - DNA, 22 bp, synthetic construct
  misc_feature 1..22: note = chemically synthesized
  source 1..22: mol_type = other DNA
cagtataaggttaatttgaagg

SEQ ID NO: 153279 - DNA, 22 bp, synthetic construct
  misc_feature 1..22: note = chemically synthesized
  source 1..22: mol_type = other DNA
atttgaaggataaaggagtgaa

SEQ ID NO: 153280 - DNA, 22 bp, synthetic construct
  misc_feature 1..22: note = chemically synthesized
  source 1..22: mol_type = other DNA
gaaggataaaggagtgaatttc

SEQ ID NO: 153281 - DNA, 22 bp, synthetic construct
  misc_feature 1..22: note = chemically synthesized
  source 1..22: mol_type = other DNA
aaggataaaggagtgaatttcc

SEQ ID NO: 153282 - DNA, 22 bp, synthetic construct
  misc_feature 1..22: note = chemically synthesized
  source 1..22: mol_type = other DNA
cctgatgtcaaagaggatctag

SEQ ID NO: 153283 - DNA, 22 bp, synthetic construct
  misc_feature 1..22: note = chemically synthesized
  source 1..22: mol_type = other DNA
ctgatgtcaaagaggatctagt

SEQ ID NO: 153284 - DNA, 22 bp, synthetic construct
  misc_feature 1..22: note = chemically synthesized
  source 1..22: mol_type = other DNA
atgtcaaagaggatctagtgca

SEQ ID NO: 153285 - DNA, 22 bp, synthetic construct
  misc_feature 1..22: note = chemically synthesized
  source 1..22: mol_type = other DNA
gtgcatcttctggtatagctat

SEQ ID NO: 153286 - DNA, 22 bp, synthetic construct
  misc_feature 1..22: note = chemically synthesized
  source 1..22: mol_type = other DNA
ctggtatagctatcagaagtga

SEQ ID NO: 153287 - DNA, 22 bp, synthetic construct
  misc_feature 1..22: note = chemically synthesized
  source 1..22: mol_type = other DNA
tggtatagctatcagaagtgaa

SEQ ID NO: 153288 - DNA, 22 bp, synthetic construct
  misc_feature 1..22: note = chemically synthesized
  source 1..22: mol_type = other DNA
gtatagctatcagaagtgaaaa

SEQ ID NO: 153289 - DNA, 22 bp, synthetic construct
  misc_feature 1..22: note = chemically synthesized
  source 1..22: mol_type = other DNA
tcagaagtgaaaactgtgaggt

SEQ ID NO: 153290 - DNA, 22 bp, synthetic construct
  misc_feature 1..22: note = chemically synthesized
  source 1..22: mol_type = other DNA
tgaggtaggttctagaggggaa

SEQ ID NO: 153291 - DNA, 22 bp, synthetic construct
  misc_feature 1..22: note = chemically synthesized
  source 1..22: mol_type = other DNA
tagaggggaaaatgtcaatata

SEQ ID NO: 153292 - DNA, 22 bp, synthetic construct
  misc_feature 1..22: note = chemically synthesized
  source 1..22: mol_type = other DNA
gaggggaaaatgtcaatatata

SEQ ID NO: 153293 - DNA, 22 bp, synthetic construct
  misc_feature 1..22: note = chemically synthesized
  source 1..22: mol_type = other DNA
tttactatataatcatagtagc

SEQ ID NO: 153294 - DNA, 22 bp, synthetic construct
  misc_feature 1..22: note = chemically synthesized
  source 1..22: mol_type = other DNA
ttactatataatcatagtagct

SEQ ID NO: 153295 - DNA, 22 bp, synthetic construct
  misc_feature 1..22: note = chemically synthesized
  source 1..22: mol_type = other DNA
tactatataatcatagtagctg

SEQ ID NO: 153296 - DNA, 22 bp, synthetic construct
  misc_feature 1..22: note = chemically synthesized
  source 1..22: mol_type = other DNA
actatataatcatagtagctgc

SEQ ID NO: 153297 - DNA, 22 bp, synthetic construct
  misc_feature 1..22: note = chemically synthesized
  source 1..22: mol_type = other DNA
ctatataatcatagtagctgcc

SEQ ID NO: 153298 - DNA, 22 bp, synthetic construct
  misc_feature 1..22: note = chemically synthesized
  source 1..22: mol_type = other DNA
tataatcatagtagctgccgag

SEQ ID NO: 153299 - DNA, 22 bp, synthetic construct
  misc_feature 1..22: note = chemically synthesized
  source 1..22: mol_type = other DNA
ccgaggcgggcggatcatgagg

SEQ ID NO: 153300 - DNA, 22 bp, synthetic construct
  misc_feature 1..22: note = chemically synthesized
  source 1..22: mol_type = other DNA
gccagcaatggtgaaaccccgt

SEQ ID NO: 153301 - DNA, 22 bp, synthetic construct
  misc_feature 1..22: note = chemically synthesized
  source 1..22: mol_type = other DNA
tactaaaaaaacacaagaaagt

SEQ ID NO: 153302 - DNA, 22 bp, synthetic construct
  misc_feature 1..22: note = chemically synthesized
  source 1..22: mol_type = other DNA
ctaaaaaaacacaagaaagtat

SEQ ID NO: 153303 - DNA, 22 bp, synthetic construct
  misc_feature 1..22: note = chemically synthesized
  source 1..22: mol_type = other DNA
aaaaaacacaagaaagtatcca

SEQ ID NO: 153304 - DNA, 22 bp, synthetic construct
  misc_feature 1..22: note = chemically synthesized
  source 1..22: mol_type = other DNA
tagtcccaggtactcgggaggc

SEQ ID NO: 153305 - DNA, 22 bp, synthetic construct
  misc_feature 1..22: note = chemically synthesized
  source 1..22: mol_type = other DNA
gggaggctgagacaggagaatg

SEQ ID NO: 153306 - DNA, 22 bp, synthetic construct
  misc_feature 1..22: note = chemically synthesized
  source 1..22: mol_type = other DNA
agacaggagaatggcgtgaacc

SEQ ID NO: 153307 - DNA, 22 bp, synthetic construct
  misc_feature 1..22: note = chemically synthesized
  source 1..22: mol_type = other DNA
gcagtgagtcgagatcacgcca

SEQ ID NO: 153308 - DNA, 22 bp, synthetic construct
  misc_feature 1..22: note = chemically synthesized
  source 1..22: mol_type = other DNA
cagtgagtcgagatcacgccac

SEQ ID NO: 153309 - DNA, 22 bp, synthetic construct
  misc_feature 1..22: note = chemically synthesized
  source 1..22: mol_type = other DNA
cactccagcctgggcgacagag

SEQ ID NO: 153310 - DNA, 22 bp, synthetic construct
  misc_feature 1..22: note = chemically synthesized
  source 1..22: mol_type = other DNA
cagcctgggcgacagagagaga

SEQ ID NO: 153311 - DNA, 22 bp, synthetic construct
  misc_feature 1..22: note = chemically synthesized
  source 1..22: mol_type = other DNA
ggcgacagagagagactctgtc

SEQ ID NO: 153312 - DNA, 22 bp, synthetic construct
  misc_feature 1..22: note = chemically synthesized
  source 1..22: mol_type = other DNA
tgtctcaaaaaaaaaaaaaaaa

SEQ ID NO: 153313 - DNA, 22 bp, synthetic construct
  misc_feature 1..22: note = chemically synthesized
  source 1..22: mol_type = other DNA
tctcaaaaaaaaaaaaaaaaag

SEQ ID NO: 153314 - DNA, 22 bp, synthetic construct
  misc_feature 1..22: note = chemically synthesized
  source 1..22: mol_type = other DNA
aaaaaaaaaaaaaaaaagagaa

SEQ ID NO: 153315 - DNA, 22 bp, synthetic construct
  misc_feature 1..22: note = chemically synthesized
  source 1..22: mol_type = other DNA
atatgaatgtcaggtggtagta

SEQ ID NO: 153316 - DNA, 22 bp, synthetic construct
  misc_feature 1..22: note = chemically synthesized
  source 1..22: mol_type = other DNA
ctccaggttccctaatgataat

SEQ ID NO: 153317 - DNA, 22 bp, synthetic construct
  misc_feature 1..22: note = chemically synthesized
  source 1..22: mol_type = other DNA
caggttccctaatgataataaa

SEQ ID NO: 153318 - DNA, 22 bp, synthetic construct
  misc_feature 1..22: note = chemically synthesized
  source 1..22: mol_type = other DNA
cctaatgataataaatgtctgc

SEQ ID NO: 153319 - DNA, 22 bp, synthetic construct
  misc_feature 1..22: note = chemically synthesized
  source 1..22: mol_type = other DNA
atgataataaatgtctgcatgg

SEQ ID NO: 153320 - DNA, 22 bp, synthetic construct
  misc_feature 1..22: note = chemically synthesized
  source 1..22: mol_type = other DNA
catggtccctcctggccgactg

SEQ ID NO: 153321 - DNA, 22 bp, synthetic construct
  misc_feature 1..22: note = chemically synthesized
  source 1..22: mol_type = other DNA
ctggccgactggaatgtggcca

SEQ ID NO: 153322 - DNA, 22 bp, synthetic construct
  misc_feature 1..22: note = chemically synthesized
  source 1..22: mol_type = other DNA
gccgactggaatgtggccaatc

SEQ ID NO: 153323 - DNA, 22 bp, synthetic construct
  misc_feature 1..22: note = chemically synthesized
  source 1..22: mol_type = other DNA
gaatgtggccaatctgacaaga

SEQ ID NO: 153324 - DNA, 22 bp, synthetic construct
  misc_feature 1..22: note = chemically synthesized
  source 1..22: mol_type = other DNA
acaagattcctatgccccagtt

SEQ ID NO: 153325 - DNA, 22 bp, synthetic construct
  misc_feature 1..22: note = chemically synthesized
  source 1..22: mol_type = other DNA
ctatgccccagttttataatga

SEQ ID NO: 153326 - DNA, 22 bp, synthetic construct
  misc_feature 1..22: note = chemically synthesized
  source 1..22: mol_type = other DNA
tgccccagttttataatgaaaa

SEQ ID NO: 153327 - DNA, 22 bp, synthetic construct
  misc_feature 1..22: note = chemically synthesized
  source 1..22: mol_type = other DNA
tataatgaaaagagaagttagc

SEQ ID NO: 153328 - DNA, 22 bp, synthetic construct
  misc_feature 1..22: note = chemically synthesized
  source 1..22: mol_type = other DNA
ataatgaaaagagaagttagct

SEQ ID NO: 153329 - DNA, 22 bp, synthetic construct
  misc_feature 1..22: note = chemically synthesized
  source 1..22: mol_type = other DNA
taatgaaaagagaagttagctg

SEQ ID NO: 153330 - DNA, 22 bp, synthetic construct
  misc_feature 1..22: note = chemically synthesized
  source 1..22: mol_type = other DNA
gctgctgaatctgtagaggtca

SEQ ID NO: 153331 - DNA, 22 bp, synthetic construct
  misc_feature 1..22: note = chemically synthesized
  source 1..22: mol_type = other DNA
ctgaatctgtagaggtcatgtg

SEQ ID NO: 153332 - DNA, 22 bp, synthetic construct
  misc_feature 1..22: note = chemically synthesized
  source 1..22: mol_type = other DNA
aatctgtagaggtcatgtgaat

SEQ ID NO: 153333 - DNA, 22 bp, synthetic construct
  misc_feature 1..22: note = chemically synthesized
  source 1..22: mol_type = other DNA
tagaggtcatgtgaatgtctca

SEQ ID NO: 153334 - DNA, 22 bp, synthetic construct
  misc_feature 1..22: note = chemically synthesized
  source 1..22: mol_type = other DNA
atagatttctcaatggccaaag

SEQ ID NO: 153335 - DNA, 22 bp, synthetic construct
  misc_feature 1..22: note = chemically synthesized
  source 1..22: mol_type = other DNA
ctcaatggccaaagaagcttcc

SEQ ID NO: 153336 - DNA, 22 bp, synthetic construct
  misc_feature 1..22: note = chemically synthesized
  source 1..22: mol_type = other DNA
tcaatggccaaagaagcttcct

SEQ ID NO: 153337 - DNA, 22 bp, synthetic construct
  misc_feature 1..22: note = chemically synthesized
  source 1..22: mol_type = other DNA
aatggccaaagaagcttccttc

SEQ ID NO: 153338 - DNA, 22 bp, synthetic construct
  misc_feature 1..22: note = chemically synthesized
  source 1..22: mol_type = other DNA
ccttctaatgctttgaaagtga

SEQ ID NO: 153339 - DNA, 22 bp, synthetic construct
  misc_feature 1..22: note = chemically synthesized
  source 1..22: mol_type = other DNA
cttctaatgctttgaaagtgaa

SEQ ID NO: 153340 - DNA, 22 bp, synthetic construct
  misc_feature 1..22: note = chemically synthesized
  source 1..22: mol_type = other DNA
ctaatgctttgaaagtgaataa

SEQ ID NO: 153341 - DNA, 22 bp, synthetic construct
  misc_feature 1..22: note = chemically synthesized
  source 1..22: mol_type = other DNA
taatgctttgaaagtgaataag

SEQ ID NO: 153342 - DNA, 22 bp, synthetic construct
  misc_feature 1..22: note = chemically synthesized
  source 1..22: mol_type = other DNA
atgctttgaaagtgaataagca

SEQ ID NO: 153343 - DNA, 22 bp, synthetic construct
  misc_feature 1..22: note = chemically synthesized
  source 1..22: mol_type = other DNA
tgaaagtgaataagcatccacc

SEQ ID NO: 153344 - DNA, 22 bp, synthetic construct
  misc_feature 1..22: note = chemically synthesized
  source 1..22: mol_type = other DNA
gaaagtgaataagcatccaccc

SEQ ID NO: 153345 - DNA, 22 bp, synthetic construct
  misc_feature 1..22: note = chemically synthesized
  source 1..22: mol_type = other DNA
aaagtgaataagcatccaccct

SEQ ID NO: 153346 - DNA, 22 bp, synthetic construct
  misc_feature 1..22: note = chemically synthesized
  source 1..22: mol_type = other DNA
ccatacgccggagagctgacac

SEQ ID NO: 153347 - DNA, 22 bp, synthetic construct
  misc_feature 1..22: note = chemically synthesized
  source 1..22: mol_type = other DNA
acacaacactggggaagcagag

SEQ ID NO: 153348 - DNA, 22 bp, synthetic construct
  misc_feature 1..22: note = chemically synthesized
  source 1..22: mol_type = other DNA
gggaagcagagaattcttcaac

SEQ ID NO: 153349 - DNA, 22 bp, synthetic construct
  misc_feature 1..22: note = chemically synthesized
  source 1..22: mol_type = other DNA
ttcaacaactgacaatatgttt

SEQ ID NO: 153350 - DNA, 22 bp, synthetic construct
  misc_feature 1..22: note = chemically synthesized
  source 1..22: mol_type = other DNA
caacaactgacaatatgttttc

SEQ ID NO: 153351 - DNA, 22 bp, synthetic construct
  misc_feature 1..22: note = chemically synthesized
  source 1..22: mol_type = other DNA
aacaactgacaatatgttttcc

SEQ ID NO: 153352 - DNA, 22 bp, synthetic construct
  misc_feature 1..22: note = chemically synthesized
  source 1..22: mol_type = other DNA
acaatatgttttccaccagcca

SEQ ID NO: 153353 - DNA, 22 bp, synthetic construct
  misc_feature 1..22: note = chemically synthesized
  source 1..22: mol_type = other DNA
tccaccagccactcatagggaa

SEQ ID NO: 153354 - DNA, 22 bp, synthetic construct
  misc_feature 1..22: note = chemically synthesized
  source 1..22: mol_type = other DNA
ccaccagccactcatagggaag

SEQ ID NO: 153355 - DNA, 22 bp, synthetic construct
  misc_feature 1..22: note = chemically synthesized
  source 1..22: mol_type = other DNA
caccagccactcatagggaagc

SEQ ID NO: 153356 - DNA, 22 bp, synthetic construct
  misc_feature 1..22: note = chemically synthesized
  source 1..22: mol_type = other DNA
atagggaagcatcagaatgaat

SEQ ID NO: 153357 - DNA, 22 bp, synthetic construct
  misc_feature 1..22: note = chemically synthesized
  source 1..22: mol_type = other DNA
atatttattatttgaacaatat

SEQ ID NO: 153358 - DNA, 22 bp, synthetic construct
  misc_feature 1..22: note = chemically synthesized
  source 1..22: mol_type = other DNA
tatttattatttgaacaatatt

SEQ ID NO: 153359 - DNA, 22 bp, synthetic construct
  misc_feature 1..22: note = chemically synthesized
  source 1..22: mol_type = other DNA
attatttgaacaatattacatg

SEQ ID NO: 153360 - DNA, 22 bp, synthetic construct
  misc_feature 1..22: note = chemically synthesized
  source 1..22: mol_type = other DNA
ttatttgaacaatattacatgt

SEQ ID NO: 153361 - DNA, 22 bp, synthetic construct
  misc_feature 1..22: note = chemically synthesized
  source 1..22: mol_type = other DNA
tttgaacaatattacatgtctg

SEQ ID NO: 153362 - DNA, 22 bp, synthetic construct
  misc_feature 1..22: note = chemically synthesized
  source 1..22: mol_type = other DNA
gaacaatattacatgtctgaca

SEQ ID NO: 153363 - DNA, 22 bp, synthetic construct
  misc_feature 1..22: note = chemically synthesized
  source 1..22: mol_type = other DNA
aacaatattacatgtctgacac

SEQ ID NO: 153364 - DNA, 22 bp, synthetic construct
  misc_feature 1..22: note = chemically synthesized
  source 1..22: mol_type = other DNA
catgtctgacacaactgagttg

SEQ ID NO: 153365 - DNA, 22 bp, synthetic construct
  misc_feature 1..22: note = chemically synthesized
  source 1..22: mol_type = other DNA
acacaactgagttgttggtttg

SEQ ID NO: 153366 - DNA, 22 bp, synthetic construct
  misc_feature 1..22: note = chemically synthesized
  source 1..22: mol_type = other DNA
agttgttggtttgagagttatg

SEQ ID NO: 153367 - DNA, 22 bp, synthetic construct
  misc_feature 1..22: note = chemically synthesized
  source 1..22: mol_type = other DNA
ttggtttgagagttatgtttaa

SEQ ID NO: 153368 - DNA, 22 bp, synthetic construct
  misc_feature 1..22: note = chemically synthesized
  source 1..22: mol_type = other DNA
gtttgagagttatgtttaacag

SEQ ID NO: 153369 - DNA, 22 bp, synthetic construct
  misc_feature 1..22: note = chemically synthesized
  source 1..22: mol_type = other DNA
gagagttatgtttaacagggag

SEQ ID NO: 153370 - DNA, 22 bp, synthetic construct
  misc_feature 1..22: note = chemically synthesized
  source 1..22: mol_type = other DNA
agagttatgtttaacagggaga

SEQ ID NO: 153371 - DNA, 22 bp, synthetic construct
  misc_feature 1..22: note = chemically synthesized
  source 1..22: mol_type = other DNA
tgtttaacagggagagtaggaa

SEQ ID NO: 153372 - DNA, 22 bp, synthetic construct
  misc_feature 1..22: note = chemically synthesized
  source 1..22: mol_type = other DNA
aacagggagagtaggaaggctc

SEQ ID NO: 153373 - DNA, 22 bp, synthetic construct
  misc_feature 1..22: note = chemically synthesized
  source 1..22: mol_type = other DNA
acagggagagtaggaaggctca

SEQ ID NO: 153374 - DNA, 22 bp, synthetic construct
  misc_feature 1..22: note = chemically synthesized
  source 1..22: mol_type = other DNA
atctgaagacttcatactatga

SEQ ID NO: 153375 - DNA, 22 bp, synthetic construct
  misc_feature 1..22: note = chemically synthesized
  source 1..22: mol_type = other DNA
aagacttcatactatgagtgtt

SEQ ID NO: 153376 - DNA, 22 bp, synthetic construct
  misc_feature 1..22: note = chemically synthesized
  source 1..22: mol_type = other DNA
catactatgagtgtttgtgctt

SEQ ID NO: 153377 - DNA, 22 bp, synthetic construct
  misc_feature 1..22: note = chemically synthesized
  source 1..22: mol_type = other DNA
atactatgagtgtttgtgcttc

SEQ ID NO: 153378 - DNA, 22 bp, synthetic construct
  misc_feature 1..22: note = chemically synthesized
  source 1..22: mol_type = other DNA
tgagtgtttgtgcttcagatta

SEQ ID NO: 153379 - DNA, 22 bp, synthetic construct
  misc_feature 1..22: note = chemically synthesized
  source 1..22: mol_type = other DNA
gtgcttcagattaggcaaccta

SEQ ID NO: 153380 - DNA, 22 bp, synthetic construct
  misc_feature 1..22: note = chemically synthesized
  source 1..22: mol_type = other DNA
tgcttcagattaggcaacctat

SEQ ID NO: 153381 - DNA, 22 bp, synthetic construct
  misc_feature 1..22: note = chemically synthesized
  source 1..22: mol_type = other DNA
cagattaggcaacctatagaat

SEQ ID NO: 153382 - DNA, 22 bp, synthetic construct
  misc_feature 1..22: note = chemically synthesized
  source 1..22: mol_type = other DNA
agattaggcaacctatagaatg

SEQ ID NO: 153383 - DNA, 22 bp, synthetic construct
  misc_feature 1..22: note = chemically synthesized
  source 1..22: mol_type = other DNA
ggcaacctatagaatgtgaacc

SEQ ID NO: 153384 - DNA, 22 bp, synthetic construct
  misc_feature 1..22: note = chemically synthesized
  source 1..22: mol_type = other DNA
tagaatgtgaaccaaaatagtt

SEQ ID NO: 153385 - DNA, 22 bp, synthetic construct
  misc_feature 1..22: note = chemically synthesized
  source 1..22: mol_type = other DNA
gaaataatggccgtgacaaaac

SEQ ID NO: 153386 - DNA, 22 bp, synthetic construct
  misc_feature 1..22: note = chemically synthesized
  source 1..22: mol_type = other DNA
aaataatggccgtgacaaaaca

SEQ ID NO: 153387 - DNA, 22 bp, synthetic construct
  misc_feature 1..22: note = chemically synthesized
  source 1..22: mol_type = other DNA
ataaaaaatacctaagagtatc

SEQ ID NO: 153388 - DNA, 22 bp, synthetic construct
  misc_feature 1..22: note = chemically synthesized
  source 1..22: mol_type = other DNA
agagtatcctcagaaatcattg

SEQ ID NO: 153389 - DNA, 22 bp, synthetic construct
  misc_feature 1..22: note = chemically synthesized
  source 1..22: mol_type = other DNA
agaaatcattgcttattttaga

SEQ ID NO: 153390 - DNA, 22 bp, synthetic construct
  misc_feature 1..22: note = chemically synthesized
  source 1..22: mol_type = other DNA
cttattttagagctatataatt

SEQ ID NO: 153391 - DNA, 22 bp, synthetic construct
  misc_feature 1..22: note = chemically synthesized
  source 1..22: mol_type = other DNA
attttagagctatataattgta

SEQ ID NO: 153392 - DNA, 22 bp, synthetic construct
  misc_feature 1..22: note = chemically synthesized
  source 1..22: mol_type = other DNA
ttttagagctatataattgtac

SEQ ID NO: 153393 - DNA, 22 bp, synthetic construct
  misc_feature 1..22: note = chemically synthesized
  source 1..22: mol_type = other DNA
tagagctatataattgtactat

SEQ ID NO: 153394 - DNA, 22 bp, synthetic construct
  misc_feature 1..22: note = chemically synthesized
  source 1..22: mol_type = other DNA
agagctatataattgtactatg

SEQ ID NO: 153395 - DNA, 22 bp, synthetic construct
  misc_feature 1..22: note = chemically synthesized
  source 1..22: mol_type = other DNA
gagctatataattgtactatga

SEQ ID NO: 153396 - DNA, 22 bp, synthetic construct
  misc_feature 1..22: note = chemically synthesized
  source 1..22: mol_type = other DNA
tataattgtactatgatgataa

SEQ ID NO: 153397 - DNA, 22 bp, synthetic construct
  misc_feature 1..22: note = chemically synthesized
  source 1..22: mol_type = other DNA
tactatgatgataagatttatg

SEQ ID NO: 153398 - DNA, 22 bp, synthetic construct
  misc_feature 1..22: note = chemically synthesized
  source 1..22: mol_type = other DNA
tgatgataagatttatgaagaa

SEQ ID NO: 153399 - DNA, 22 bp, synthetic construct
  misc_feature 1..22: note = chemically synthesized
  source 1..22: mol_type = other DNA
atgaagaacttcagaatcttta

SEQ ID NO: 153400 - DNA, 22 bp, synthetic construct
  misc_feature 1..22: note = chemically synthesized
  source 1..22: mol_type = other DNA
tgaagaacttcagaatctttac

SEQ ID NO: 153401 - DNA, 22 bp, synthetic construct
  misc_feature 1..22: note = chemically synthesized
  source 1..22: mol_type = other DNA
cagaatctttacaattcagcca

SEQ ID NO: 153402 - DNA, 22 bp, synthetic construct
  misc_feature 1..22: note = chemically synthesized
  source 1..22: mol_type = other DNA
agaatctttacaattcagccaa

SEQ ID NO: 153403 - DNA, 22 bp, synthetic construct
  misc_feature 1..22: note = chemically synthesized
  source 1..22: mol_type = other DNA
tacaattcagccaaagggagga

SEQ ID NO: 153404 - DNA, 22 bp, synthetic construct
  misc_feature 1..22: note = chemically synthesized
  source 1..22: mol_type = other DNA
acaattcagccaaagggaggaa

SEQ ID NO: 153405 - DNA, 22 bp, synthetic construct
  misc_feature 1..22: note = chemically synthesized
  source 1..22: mol_type = other DNA
caattcagccaaagggaggaaa

SEQ ID NO: 153406 - DNA, 22 bp, synthetic construct
  misc_feature 1..22: note = chemically synthesized
  source 1..22: mol_type = other DNA
agccaaagggaggaaaatcagt

SEQ ID NO: 153407 - DNA, 22 bp, synthetic construct
  misc_feature 1..22: note = chemically synthesized
  source 1..22: mol_type = other DNA
tatatgattactgggctttata

SEQ ID NO: 153408 - DNA, 22 bp, synthetic construct
  misc_feature 1..22: note = chemically synthesized
  source 1..22: mol_type = other DNA
atatgattactgggctttatac

SEQ ID NO: 153409 - DNA, 22 bp, synthetic construct
  misc_feature 1..22: note = chemically synthesized
  source 1..22: mol_type = other DNA
tatgattactgggctttataca

SEQ ID NO: 153410 - DNA, 22 bp, synthetic construct
  misc_feature 1..22: note = chemically synthesized
  source 1..22: mol_type = other DNA
ctgggctttatacagaaagaaa

SEQ ID NO: 153411 - DNA, 22 bp, synthetic construct
  misc_feature 1..22: note = chemically synthesized
  source 1..22: mol_type = other DNA
ggctttatacagaaagaaacag

SEQ ID NO: 153412 - DNA, 22 bp, synthetic construct
  misc_feature 1..22: note = chemically synthesized
  source 1..22: mol_type = other DNA
tatacagaaagaaacaggttta

SEQ ID NO: 153413 - DNA, 22 bp, synthetic construct
  misc_feature 1..22: note = chemically synthesized
  source 1..22: mol_type = other DNA
atacagaaagaaacaggtttag

SEQ ID NO: 153414 - DNA, 22 bp, synthetic construct
  misc_feature 1..22: note = chemically synthesized
  source 1..22: mol_type = other DNA
tacagaaagaaacaggtttaga

SEQ ID NO: 153415 - DNA, 22 bp, synthetic construct
  misc_feature 1..22: note = chemically synthesized
  source 1..22: mol_type = other DNA
agaacattagtagtttagattg

SEQ ID NO: 153416 - DNA, 22 bp, synthetic construct
  misc_feature 1..22: note = chemically synthesized
  source 1..22: mol_type = other DNA
gaacattagtagtttagattgt

SEQ ID NO: 153417 - DNA, 22 bp, synthetic construct
  misc_feature 1..22: note = chemically synthesized
  source 1..22: mol_type = other DNA
gtagtttagattgtttgttttg

SEQ ID NO: 153418 - DNA, 22 bp, synthetic construct
  misc_feature 1..22: note = chemically synthesized
  source 1..22: mol_type = other DNA
agattgtttgttttgcaaaggc

SEQ ID NO: 153419 - DNA, 22 bp, synthetic construct
  misc_feature 1..22: note = chemically synthesized
  source 1..22: mol_type = other DNA
gattgtttgttttgcaaaggcc

SEQ ID NO: 153420 - DNA, 22 bp, synthetic construct
  misc_feature 1..22: note = chemically synthesized
  source 1..22: mol_type = other DNA
tttgttttgcaaaggcctctat

SEQ ID NO: 153421 - DNA, 22 bp, synthetic construct
  misc_feature 1..22: note = chemically synthesized
  source 1..22: mol_type = other DNA
gttttgcaaaggcctctatctg

SEQ ID NO: 153422 - DNA, 22 bp, synthetic construct
  misc_feature 1..22: note = chemically synthesized
  source 1..22: mol_type = other DNA
ttttgcaaaggcctctatctgg

SEQ ID NO: 153423 - DNA, 22 bp, synthetic construct
  misc_feature 1..22: note = chemically synthesized
  source 1..22: mol_type = other DNA
tgcaaaggcctctatctggaag

SEQ ID NO: 153424 - DNA, 22 bp, synthetic construct
  misc_feature 1..22: note = chemically synthesized
  source 1..22: mol_type = other DNA
gcaaaggcctctatctggaagc

SEQ ID NO: 153425 - DNA, 22 bp, synthetic construct
  misc_feature 1..22: note = chemically synthesized
  source 1..22: mol_type = other DNA
caaaggcctctatctggaagca

SEQ ID NO: 153426 - DNA, 22 bp, synthetic construct
  misc_feature 1..22: note = chemically synthesized
  source 1..22: mol_type = other DNA
tatctggaagcaattacttaaa

SEQ ID NO: 153427 - DNA, 22 bp, synthetic construct
  misc_feature 1..22: note = chemically synthesized
  source 1..22: mol_type = other DNA
tctggaagcaattacttaaaaa

SEQ ID NO: 153428 - DNA, 22 bp, synthetic construct
  misc_feature 1..22: note = chemically synthesized
  source 1..22: mol_type = other DNA
gaagcaattacttaaaaaaata

SEQ ID NO: 153429 - DNA, 22 bp, synthetic construct
  misc_feature 1..22: note = chemically synthesized
  source 1..22: mol_type = other DNA
cttaaaaaaataactaaacctc

SEQ ID NO: 153430 - DNA, 22 bp, synthetic construct
  misc_feature 1..22: note = chemically synthesized
  source 1..22: mol_type = other DNA
aaaaaaataactaaacctctcc

SEQ ID NO: 153431 - DNA, 22 bp, synthetic construct
  misc_feature 1..22: note = chemically synthesized
  source 1..22: mol_type = other DNA
aaaaaataactaaacctctcct

SEQ ID NO: 153432 - DNA, 22 bp, synthetic construct
  misc_feature 1..22: note = chemically synthesized
  source 1..22: mol_type = other DNA
aacctctcctgaggaagaaaag

SEQ ID NO: 153433 - DNA, 22 bp, synthetic construct
  misc_feature 1..22: note = chemically synthesized
  source 1..22: mol_type = other DNA
tcctgaggaagaaaaggcaatt

SEQ ID NO: 153434 - DNA, 22 bp, synthetic construct
  misc_feature 1..22: note = chemically synthesized
  source 1..22: mol_type = other DNA
ctgaggaagaaaaggcaatttc

SEQ ID NO: 153435 - DNA, 22 bp, synthetic construct
  misc_feature 1..22: note = chemically synthesized
  source 1..22: mol_type = other DNA
aggaagaaaaggcaatttcaga

SEQ ID NO: 153436 - DNA, 22 bp, synthetic construct
  misc_feature 1..22: note = chemically synthesized
  source 1..22: mol_type = other DNA
cagagacatcagcccaggtcct

SEQ ID NO: 153437 - DNA, 22 bp, synthetic construct
  misc_feature 1..22: note = chemically synthesized
  source 1..22: mol_type = other DNA
agagacatcagcccaggtcctg

SEQ ID NO: 153438 - DNA, 22 bp, synthetic construct
  misc_feature 1..22: note = chemically synthesized
  source 1..22: mol_type = other DNA
aaaggaagagcagatggagaca

SEQ ID NO: 153439 - DNA, 22 bp, synthetic construct
  misc_feature 1..22: note = chemically synthesized
  source 1..22: mol_type = other DNA
aaaacactgtctgttttgaaaa

SEQ ID NO: 153440 - DNA, 22 bp, synthetic construct
  misc_feature 1..22: note = chemically synthesized
  source 1..22: mol_type = other DNA
aaacactgtctgttttgaaaag

SEQ ID NO: 153441 - DNA, 22 bp, synthetic construct
  misc_feature 1..22: note = chemically synthesized
  source 1..22: mol_type = other DNA
tctgttttgaaaagctacatag

SEQ ID NO: 153442 - DNA, 22 bp, synthetic construct
  misc_feature 1..22: note = chemically synthesized
  source 1..22: mol_type = other DNA
ttttgaaaagctacatagtagc

SEQ ID NO: 153443 - DNA, 22 bp, synthetic construct
  misc_feature 1..22: note = chemically synthesized
  source 1..22: mol_type = other DNA
tgaaaagctacatagtagccag

SEQ ID NO: 153444 - DNA, 22 bp, synthetic construct
  misc_feature 1..22: note = chemically synthesized
  source 1..22: mol_type = other DNA
gaaaagctacatagtagccagg

SEQ ID NO: 153445 - DNA, 22 bp, synthetic construct
  misc_feature 1..22: note = chemically synthesized
  source 1..22: mol_type = other DNA
aaaagctacatagtagccaggt

SEQ ID NO: 153446 - DNA, 22 bp, synthetic construct
  misc_feature 1..22: note = chemically synthesized
  source 1..22: mol_type = other DNA
catagtagccaggtggagacat

SEQ ID NO: 153447 - DNA, 22 bp, synthetic construct
  misc_feature 1..22: note = chemically synthesized
  source 1..22: mol_type = other DNA
ttccatatatctcaaaaagcca

SEQ ID NO: 153448 - DNA, 22 bp, synthetic construct
  misc_feature 1..22: note = chemically synthesized
  source 1..22: mol_type = other DNA
tccatatatctcaaaaagccag

SEQ ID NO: 153449 - DNA, 22 bp, synthetic construct
  misc_feature 1..22: note = chemically synthesized
  source 1..22: mol_type = other DNA
ccatatatctcaaaaagccagc

SEQ ID NO: 153450 - DNA, 22 bp, synthetic construct
  misc_feature 1..22: note = chemically synthesized
  source 1..22: mol_type = other DNA
catatatctcaaaaagccagct

SEQ ID NO: 153451 - DNA, 22 bp, synthetic construct
  misc_feature 1..22: note = chemically synthesized
  source 1..22: mol_type = other DNA
aaaaagccagcttctaaggaaa

SEQ ID NO: 153452 - DNA, 22 bp, synthetic construct
  misc_feature 1..22: note = chemically synthesized
  source 1..22: mol_type = other DNA
ctaaggaaacttgttttccatg

SEQ ID NO: 153453 - DNA, 22 bp, synthetic construct
  misc_feature 1..22: note = chemically synthesized
  source 1..22: mol_type = other DNA
taaggaaacttgttttccatga

SEQ ID NO: 153454 - DNA, 22 bp, synthetic construct
  misc_feature 1..22: note = chemically synthesized
  source 1..22: mol_type = other DNA
aggaaacttgttttccatgaat

SEQ ID NO: 153455 - DNA, 22 bp, synthetic construct
  misc_feature 1..22: note = chemically synthesized
  source 1..22: mol_type = other DNA
gttttccatgaattaggcaaca

SEQ ID NO: 153456 - DNA, 22 bp, synthetic construct
  misc_feature 1..22: note = chemically synthesized
  source 1..22: mol_type = other DNA
ttttccatgaattaggcaacaa

SEQ ID NO: 153457 - DNA, 22 bp, synthetic construct
  misc_feature 1..22: note = chemically synthesized
  source 1..22: mol_type = other DNA
tccatgaattaggcaacaacag

SEQ ID NO: 153458 - DNA, 22 bp, synthetic construct
  misc_feature 1..22: note = chemically synthesized
  source 1..22: mol_type = other DNA
ccatgaattaggcaacaacagc

SEQ ID NO: 153459 - DNA, 22 bp, synthetic construct
  misc_feature 1..22: note = chemically synthesized
  source 1..22: mol_type = other DNA
catgaattaggcaacaacagct

SEQ ID NO: 153460 - DNA, 22 bp, synthetic construct
  misc_feature 1..22: note = chemically synthesized
  source 1..22: mol_type = other DNA
ggcaacaacagctgaaactgtt

SEQ ID NO: 153461 - DNA, 22 bp, synthetic construct
  misc_feature 1..22: note = chemically synthesized
  source 1..22: mol_type = other DNA
aaactgttgttgatgtggtagc

SEQ ID NO: 153462 - DNA, 22 bp, synthetic construct
  misc_feature 1..22: note = chemically synthesized
  source 1..22: mol_type = other DNA
ttgttgatgtggtagcctgcag

SEQ ID NO: 153463 - DNA, 22 bp, synthetic construct
  misc_feature 1..22: note = chemically synthesized
  source 1..22: mol_type = other DNA
ttgatgtggtagcctgcagagc

SEQ ID NO: 153464 - DNA, 22 bp, synthetic construct
  misc_feature 1..22: note = chemically synthesized
  source 1..22: mol_type = other DNA
atgtggtagcctgcagagccag

SEQ ID NO: 153465 - DNA, 22 bp, synthetic construct
  misc_feature 1..22: note = chemically synthesized
  source 1..22: mol_type = other DNA
cagagccagtgagaagcagtta

SEQ ID NO: 153466 - DNA, 22 bp, synthetic construct
  misc_feature 1..22: note = chemically synthesized
  source 1..22: mol_type = other DNA
tcagattcctttgtaaggcctg

SEQ ID NO: 153467 - DNA, 22 bp, synthetic construct
  misc_feature 1..22: note = chemically synthesized
  source 1..22: mol_type = other DNA
ctttgtaaggcctgcaaggcta

SEQ ID NO: 153468 - DNA, 22 bp, synthetic construct
  misc_feature 1..22: note = chemically synthesized
  source 1..22: mol_type = other DNA
tgtaaggcctgcaaggctacta

SEQ ID NO: 153469 - DNA, 22 bp, synthetic construct
  misc_feature 1..22: note = chemically synthesized
  source 1..22: mol_type = other DNA
gtaaggcctgcaaggctactat

SEQ ID NO: 153470 - DNA, 22 bp, synthetic construct
  misc_feature 1..22: note = chemically synthesized
  source 1..22: mol_type = other DNA
taaggcctgcaaggctactatc

SEQ ID NO: 153471 - DNA, 22 bp, synthetic construct
  misc_feature 1..22: note = chemically synthesized
  source 1..22: mol_type = other DNA
caaggctactatccagcgtcac

SEQ ID NO: 153472 - DNA, 22 bp, synthetic construct
  misc_feature 1..22: note = chemically synthesized
  source 1..22: mol_type = other DNA
ctatccagcgtcactgagaaac

SEQ ID NO: 153473 - DNA, 22 bp, synthetic construct
  misc_feature 1..22: note = chemically synthesized
  source 1..22: mol_type = other DNA
tccagcgtcactgagaaacgtt

SEQ ID NO: 153474 - DNA, 22 bp, synthetic construct
  misc_feature 1..22: note = chemically synthesized
  source 1..22: mol_type = other DNA
agaaacgttacgaaaacagcca

SEQ ID NO: 153475 - DNA, 22 bp, synthetic construct
  misc_feature 1..22: note = chemically synthesized
  source 1..22: mol_type = other DNA
cgaaaacagccacagtgatgtt

SEQ ID NO: 153476 - DNA, 22 bp, synthetic construct
  misc_feature 1..22: note = chemically synthesized
  source 1..22: mol_type = other DNA
gggaaacacagttctcttttgc

SEQ ID NO: 153477 - DNA, 22 bp, synthetic construct
  misc_feature 1..22: note = chemically synthesized
  source 1..22: mol_type = other DNA
tcttttgcctttttttttttaa

SEQ ID NO: 153478 - DNA, 22 bp, synthetic construct
  misc_feature 1..22: note = chemically synthesized
  source 1..22: mol_type = other DNA
ttttgcctttttttttttaata

SEQ ID NO: 153479 - DNA, 22 bp, synthetic construct
  misc_feature 1..22: note = chemically synthesized
  source 1..22: mol_type = other DNA
ttgcctttttttttttaatagg

SEQ ID NO: 153480 - DNA, 22 bp, synthetic construct
  misc_feature 1..22: note = chemically synthesized
  source 1..22: mol_type = other DNA
tgcctttttttttttaataggt

SEQ ID NO: 153481 - DNA, 22 bp, synthetic construct
  misc_feature 1..22: note = chemically synthesized
  source 1..22: mol_type = other DNA
gcctttttttttttaataggta

SEQ ID NO: 153482 - DNA, 22 bp, synthetic construct
  misc_feature 1..22: note = chemically synthesized
  source 1..22: mol_type = other DNA
cctttttttttttaataggtag

SEQ ID NO: 153483 - DNA, 22 bp, synthetic construct
  misc_feature 1..22: note = chemically synthesized
  source 1..22: mol_type = other DNA
tttttttttaataggtagactg

SEQ ID NO: 153484 - DNA, 22 bp, synthetic construct
  misc_feature 1..22: note = chemically synthesized
  source 1..22: mol_type = other DNA
ttttttttaataggtagactgt

SEQ ID NO: 153485 - DNA, 22 bp, synthetic construct
  misc_feature 1..22: note = chemically synthesized
  source 1..22: mol_type = other DNA
tttttttaataggtagactgtc

SEQ ID NO: 153486 - DNA, 22 bp, synthetic construct
  misc_feature 1..22: note = chemically synthesized
  source 1..22: mol_type = other DNA
ttttttaataggtagactgtca

SEQ ID NO: 153487 - DNA, 22 bp, synthetic construct
  misc_feature 1..22: note = chemically synthesized
  source 1..22: mol_type = other DNA
tttttaataggtagactgtcat

SEQ ID NO: 153488 - DNA, 22 bp, synthetic construct
  misc_feature 1..22: note = chemically synthesized
  source 1..22: mol_type = other DNA
ttttaataggtagactgtcata

SEQ ID NO: 153489 - DNA, 22 bp, synthetic construct
  misc_feature 1..22: note = chemically synthesized
  source 1..22: mol_type = other DNA
tttaataggtagactgtcatat

SEQ ID NO: 153490 - DNA, 22 bp, synthetic construct
  misc_feature 1..22: note = chemically synthesized
  source 1..22: mol_type = other DNA
ttaataggtagactgtcatatc

SEQ ID NO: 153491 - DNA, 22 bp, synthetic construct
  misc_feature 1..22: note = chemically synthesized
  source 1..22: mol_type = other DNA
taataggtagactgtcatatca

SEQ ID NO: 153492 - DNA, 22 bp, synthetic construct
  misc_feature 1..22: note = chemically synthesized
  source 1..22: mol_type = other DNA
aataggtagactgtcatatcat

SEQ ID NO: 153493 - DNA, 22 bp, synthetic construct
  misc_feature 1..22: note = chemically synthesized
  source 1..22: mol_type = other DNA
ataggtagactgtcatatcatt

SEQ ID NO: 153494 - DNA, 22 bp, synthetic construct
  misc_feature 1..22: note = chemically synthesized
  source 1..22: mol_type = other DNA
tcatatcattgtaactgctgcc

SEQ ID NO: 153495 - DNA, 22 bp, synthetic construct
  misc_feature 1..22: note = chemically synthesized
  source 1..22: mol_type = other DNA
taactgctgccttaaatgaagt

SEQ ID NO: 153496 - DNA, 22 bp, synthetic construct
  misc_feature 1..22: note = chemically synthesized
  source 1..22: mol_type = other DNA
ctgccttaaatgaagtcacggt

SEQ ID NO: 153497 - DNA, 22 bp, synthetic construct
  misc_feature 1..22: note = chemically synthesized
  source 1..22: mol_type = other DNA
ccttaaatgaagtcacggttat

SEQ ID NO: 153498 - DNA, 22 bp, synthetic construct
  misc_feature 1..22: note = chemically synthesized
  source 1..22: mol_type = other DNA
aaatgaagtcacggttattata

SEQ ID NO: 153499 - DNA, 22 bp, synthetic construct
  misc_feature 1..22: note = chemically synthesized
  source 1..22: mol_type = other DNA
aatgaagtcacggttattataa

SEQ ID NO: 153500 - DNA, 22 bp, synthetic construct
  misc_feature 1..22: note = chemically synthesized
  source 1..22: mol_type = other DNA
ttataataaggagaaaacaaaa

SEQ ID NO: 153501 - DNA, 22 bp, synthetic construct
  misc_feature 1..22: note = chemically synthesized
  source 1..22: mol_type = other DNA
taataaggagaaaacaaaaata

SEQ ID NO: 153502 - DNA, 22 bp, synthetic construct
  misc_feature 1..22: note = chemically synthesized
  source 1..22: mol_type = other DNA
ccgagaacaaggtgacaaaagt

SEQ ID NO: 153503 - DNA, 22 bp, synthetic construct
  misc_feature 1..22: note = chemically synthesized
  source 1..22: mol_type = other DNA
agaaaatcagaaagtctagtcc

SEQ ID NO: 153504 - DNA, 22 bp, synthetic construct
  misc_feature 1..22: note = chemically synthesized
  source 1..22: mol_type = other DNA
gtccattcaattgctattcatt

SEQ ID NO: 153505 - DNA, 22 bp, synthetic construct
  misc_feature 1..22: note = chemically synthesized
  source 1..22: mol_type = other DNA
aattgctattcatttaactctt

SEQ ID NO: 153506 - DNA, 22 bp, synthetic construct
  misc_feature 1..22: note = chemically synthesized
  source 1..22: mol_type = other DNA
ctattcatttaactcttacacc

SEQ ID NO: 153507 - DNA, 22 bp, synthetic construct
  misc_feature 1..22: note = chemically synthesized
  source 1..22: mol_type = other DNA
ttcatttaactcttacaccgaa

SEQ ID NO: 153508 - DNA, 22 bp, synthetic construct
  misc_feature 1..22: note = chemically synthesized
  source 1..22: mol_type = other DNA
atttaactcttacaccgaaaag

SEQ ID NO: 153509 - DNA, 22 bp, synthetic construct
  misc_feature 1..22: note = chemically synthesized
  source 1..22: mol_type = other DNA
aactcttacaccgaaaagctaa

SEQ ID NO: 153510 - DNA, 22 bp, synthetic construct
  misc_feature 1..22: note = chemically synthesized
  source 1..22: mol_type = other DNA
actcttacaccgaaaagctaag

SEQ ID NO: 153511 - DNA, 22 bp, synthetic construct
  misc_feature 1..22: note = chemically synthesized
  source 1..22: mol_type = other DNA
ttacaccgaaaagctaaggtcc

SEQ ID NO: 153512 - DNA, 22 bp, synthetic construct
  misc_feature 1..22: note = chemically synthesized
  source 1..22: mol_type = other DNA
acaccgaaaagctaaggtccag

SEQ ID NO: 153513 - DNA, 22 bp, synthetic construct
  misc_feature 1..22: note = chemically synthesized
  source 1..22: mol_type = other DNA
caccgaaaagctaaggtccagt

SEQ ID NO: 153514 - DNA, 22 bp, synthetic construct
  misc_feature 1..22: note = chemically synthesized
  source 1..22: mol_type = other DNA
aggtccagtgggagaaatcagt

SEQ ID NO: 153515 - DNA, 22 bp, synthetic construct
  misc_feature 1..22: note = chemically synthesized
  source 1..22: mol_type = other DNA
ttagaagtgagaggacatgatt

SEQ ID NO: 153516 - DNA, 22 bp, synthetic construct
  misc_feature 1..22: note = chemically synthesized
  source 1..22: mol_type = other DNA
agaagtgagaggacatgattca

SEQ ID NO: 153517 - DNA, 22 bp, synthetic construct
  misc_feature 1..22: note = chemically synthesized
  source 1..22: mol_type = other DNA
gaagtgagaggacatgattcag

SEQ ID NO: 153518 - DNA, 22 bp, synthetic construct
  misc_feature 1..22: note = chemically synthesized
  source 1..22: mol_type = other DNA
aggattagaaatgtgtttttag

SEQ ID NO: 153519 - DNA, 22 bp, synthetic construct
  misc_feature 1..22: note = chemically synthesized
  source 1..22: mol_type = other DNA
gaaatgtgtttttagtaaaaat

SEQ ID NO: 153520 - DNA, 22 bp, synthetic construct
  misc_feature 1..22: note = chemically synthesized
  source 1..22: mol_type = other DNA
ttagtaaaaatgatctgctaat

SEQ ID NO: 153521 - DNA, 22 bp, synthetic construct
  misc_feature 1..22: note = chemically synthesized
  source 1..22: mol_type = other DNA
tagtaaaaatgatctgctaata

SEQ ID NO: 153522 - DNA, 22 bp, synthetic construct
  misc_feature 1..22: note = chemically synthesized
  source 1..22: mol_type = other DNA
agtaaaaatgatctgctaataa

SEQ ID NO: 153523 - DNA, 22 bp, synthetic construct
  misc_feature 1..22: note = chemically synthesized
  source 1..22: mol_type = other DNA
gtaaaaatgatctgctaataat

SEQ ID NO: 153524 - DNA, 22 bp, synthetic construct
  misc_feature 1..22: note = chemically synthesized
  source 1..22: mol_type = other DNA
ctaataataaatccacaggcag

SEQ ID NO: 153525 - DNA, 22 bp, synthetic construct
  misc_feature 1..22: note = chemically synthesized
  source 1..22: mol_type = other DNA
ataataaatccacaggcagatg

SEQ ID NO: 153526 - DNA, 22 bp, synthetic construct
  misc_feature 1..22: note = chemically synthesized
  source 1..22: mol_type = other DNA
actgtacaccagcagtcttcaa

SEQ ID NO: 153527 - DNA, 22 bp, synthetic construct
  misc_feature 1..22: note = chemically synthesized
  source 1..22: mol_type = other DNA
tacaccagcagtcttcaatgtt

SEQ ID NO: 153528 - DNA, 22 bp, synthetic construct
  misc_feature 1..22: note = chemically synthesized
  source 1..22: mol_type = other DNA
caatgtttttggtaccagggac

SEQ ID NO: 153529 - DNA, 22 bp, synthetic construct
  misc_feature 1..22: note = chemically synthesized
  source 1..22: mol_type = other DNA
aatgtttttggtaccagggact

SEQ ID NO: 153530 - DNA, 22 bp, synthetic construct
  misc_feature 1..22: note = chemically synthesized
  source 1..22: mol_type = other DNA
ttggtaccagggactgcttttg

SEQ ID NO: 153531 - DNA, 22 bp, synthetic construct
  misc_feature 1..22: note = chemically synthesized
  source 1..22: mol_type = other DNA
tggtaccagggactgcttttgt

SEQ ID NO: 153532 - DNA, 22 bp, synthetic construct
  misc_feature 1..22: note = chemically synthesized
  source 1..22: mol_type = other DNA
ggtaccagggactgcttttgtg

SEQ ID NO: 153533 - DNA, 22 bp, synthetic construct
  misc_feature 1..22: note = chemically synthesized
  source 1..22: mol_type = other DNA
gtaccagggactgcttttgtgg

SEQ ID NO: 153534 - DNA, 22 bp, synthetic construct
  misc_feature 1..22: note = chemically synthesized
  source 1..22: mol_type = other DNA
cttttgtggaagacaaggtgca

SEQ ID NO: 153535 - DNA, 22 bp, synthetic construct
  misc_feature 1..22: note = chemically synthesized
  source 1..22: mol_type = other DNA
ttgtggaagacaaggtgcagga

SEQ ID NO: 153536 - DNA, 22 bp, synthetic construct
  misc_feature 1..22: note = chemically synthesized
  source 1..22: mol_type = other DNA
tgtggaagacaaggtgcaggag

SEQ ID NO: 153537 - DNA, 22 bp, synthetic construct
  misc_feature 1..22: note = chemically synthesized
  source 1..22: mol_type = other DNA
gtggaagacaaggtgcaggagg

SEQ ID NO: 153538 - DNA, 22 bp, synthetic construct
  misc_feature 1..22: note = chemically synthesized
  source 1..22: mol_type = other DNA
tggaagacaaggtgcaggaggg

SEQ ID NO: 153539 - DNA, 22 bp, synthetic construct
  misc_feature 1..22: note = chemically synthesized
  source 1..22: mol_type = other DNA
caggatgaaactgttccacctc

SEQ ID NO: 153540 - DNA, 22 bp, synthetic construct
  misc_feature 1..22: note = chemically synthesized
  source 1..22: mol_type = other DNA
aggatgaaactgttccacctca

SEQ ID NO: 153541 - DNA, 22 bp, synthetic construct
  misc_feature 1..22: note = chemically synthesized
  source 1..22: mol_type = other DNA
ttccacctcagagcattaggca

SEQ ID NO: 153542 - DNA, 22 bp, synthetic construct
  misc_feature 1..22: note = chemically synthesized
  source 1..22: mol_type = other DNA
cacctcagagcattaggcatta

SEQ ID NO: 153543 - DNA, 22 bp, synthetic construct
  misc_feature 1..22: note = chemically synthesized
  source 1..22: mol_type = other DNA
agagcattaggcattagattct

SEQ ID NO: 153544 - DNA, 22 bp, synthetic construct
  misc_feature 1..22: note = chemically synthesized
  source 1..22: mol_type = other DNA
ggcattagattctcataagaag

SEQ ID NO: 153545 - DNA, 22 bp, synthetic construct
  misc_feature 1..22: note = chemically synthesized
  source 1..22: mol_type = other DNA
gattctcataagaagccgcaac

SEQ ID NO: 153546 - DNA, 22 bp, synthetic construct
  misc_feature 1..22: note = chemically synthesized
  source 1..22: mol_type = other DNA
tcataagaagccgcaacctaga

SEQ ID NO: 153547 - DNA, 22 bp, synthetic construct
  misc_feature 1..22: note = chemically synthesized
  source 1..22: mol_type = other DNA
ataagaagccgcaacctagatc

SEQ ID NO: 153548 - DNA, 22 bp, synthetic construct
  misc_feature 1..22: note = chemically synthesized
  source 1..22: mol_type = other DNA
gatcccttgcatgcctctatga

SEQ ID NO: 153549 - DNA, 22 bp, synthetic construct
  misc_feature 1..22: note = chemically synthesized
  source 1..22: mol_type = other DNA
gcatgcctctatgagaatctaa

SEQ ID NO: 153550 - DNA, 22 bp, synthetic construct
  misc_feature 1..22: note = chemically synthesized
  source 1..22: mol_type = other DNA
catgcctctatgagaatctaat

SEQ ID NO: 153551 - DNA, 22 bp, synthetic construct
  misc_feature 1..22: note = chemically synthesized
  source 1..22: mol_type = other DNA
tatgagaatctaatgccgccac

SEQ ID NO: 153552 - DNA, 22 bp, synthetic construct
  misc_feature 1..22: note = chemically synthesized
  source 1..22: mol_type = other DNA
tgagaatctaatgccgccactg

SEQ ID NO: 153553 - DNA, 22 bp, synthetic construct
  misc_feature 1..22: note = chemically synthesized
  source 1..22: mol_type = other DNA
atgccgccactgccgatgtgac

SEQ ID NO: 153554 - DNA, 22 bp, synthetic construct
  misc_feature 1..22: note = chemically synthesized
  source 1..22: mol_type = other DNA
ccgatgtgacaggaggaggagc

SEQ ID NO: 153555 - DNA, 22 bp, synthetic construct
  misc_feature 1..22: note = chemically synthesized
  source 1..22: mol_type = other DNA
aggcagtaatgcttgctcatcc

SEQ ID NO: 153556 - DNA, 22 bp, synthetic construct
  misc_feature 1..22: note = chemically synthesized
  source 1..22: mol_type = other DNA
gctcatccccctgctgtgagac

SEQ ID NO: 153557 - DNA, 22 bp, synthetic construct
  misc_feature 1..22: note = chemically synthesized
  source 1..22: mol_type = other DNA
ctcatccccctgctgtgagacc

SEQ ID NO: 153558 - DNA, 22 bp, synthetic construct
  misc_feature 1..22: note = chemically synthesized
  source 1..22: mol_type = other DNA
atccccctgctgtgagaccagg

SEQ ID NO: 153559 - DNA, 22 bp, synthetic construct
  misc_feature 1..22: note = chemically synthesized
  source 1..22: mol_type = other DNA
ctgtgagaccaggttcctagca

SEQ ID NO: 153560 - DNA, 22 bp, synthetic construct
  misc_feature 1..22: note = chemically synthesized
  source 1..22: mol_type = other DNA
tgagaccaggttcctagcaggc

SEQ ID NO: 153561 - DNA, 22 bp, synthetic construct
  misc_feature 1..22: note = chemically synthesized
  source 1..22: mol_type = other DNA
ctagcaggccacggaccagtac

SEQ ID NO: 153562 - DNA, 22 bp, synthetic construct
  misc_feature 1..22: note = chemically synthesized
  source 1..22: mol_type = other DNA
gcaggccacggaccagtactgg

SEQ ID NO: 153563 - DNA, 22 bp, synthetic construct
  misc_feature 1..22: note = chemically synthesized
  source 1..22: mol_type = other DNA
gtaagtggccaggactgctcta

SEQ ID NO: 153564 - DNA, 22 bp, synthetic construct
  misc_feature 1..22: note = chemically synthesized
  source 1..22: mol_type = other DNA
ctctacactatacctccctatt

SEQ ID NO: 153565 - DNA, 22 bp, synthetic construct
  misc_feature 1..22: note = chemically synthesized
  source 1..22: mol_type = other DNA
tacactatacctccctattttc

SEQ ID NO: 153566 - DNA, 22 bp, synthetic construct
  misc_feature 1..22: note = chemically synthesized
  source 1..22: mol_type = other DNA
cactatacctccctattttcct

SEQ ID NO: 153567 - DNA, 22 bp, synthetic construct
  misc_feature 1..22: note = chemically synthesized
  source 1..22: mol_type = other DNA
tacctccctattttcctaggct

SEQ ID NO: 153568 - DNA, 22 bp, synthetic construct
  misc_feature 1..22: note = chemically synthesized
  source 1..22: mol_type = other DNA
cctattttcctaggcttatcaa

SEQ ID NO: 153569 - DNA, 22 bp, synthetic construct
  misc_feature 1..22: note = chemically synthesized
  source 1..22: mol_type = other DNA
ttttcctaggcttatcaaaatc

SEQ ID NO: 153570 - DNA, 22 bp, synthetic construct
  misc_feature 1..22: note = chemically synthesized
  source 1..22: mol_type = other DNA
tcctaggcttatcaaaatcgta

SEQ ID NO: 153571 - DNA, 22 bp, synthetic construct
  misc_feature 1..22: note = chemically synthesized
  source 1..22: mol_type = other DNA
cctaggcttatcaaaatcgtat

SEQ ID NO: 153572 - DNA, 22 bp, synthetic construct
  misc_feature 1..22: note = chemically synthesized
  source 1..22: mol_type = other DNA
ctaggcttatcaaaatcgtatt

SEQ ID NO: 153573 - DNA, 22 bp, synthetic construct
  misc_feature 1..22: note = chemically synthesized
  source 1..22: mol_type = other DNA
ggcttatcaaaatcgtattgtt

SEQ ID NO: 153574 - DNA, 22 bp, synthetic construct
  misc_feature 1..22: note = chemically synthesized
  source 1..22: mol_type = other DNA
atcaaaatcgtattgttaaaca

SEQ ID NO: 153575 - DNA, 22 bp, synthetic construct
  misc_feature 1..22: note = chemically synthesized
  source 1..22: mol_type = other DNA
tcaaaatcgtattgttaaacag

SEQ ID NO: 153576 - DNA, 22 bp, synthetic construct
  misc_feature 1..22: note = chemically synthesized
  source 1..22: mol_type = other DNA
ttaaacagacttaagagatgtt

SEQ ID NO: 153577 - DNA, 22 bp, synthetic construct
  misc_feature 1..22: note = chemically synthesized
  source 1..22: mol_type = other DNA
aacagacttaagagatgttcta

SEQ ID NO: 153578 - DNA, 22 bp, synthetic construct
  misc_feature 1..22: note = chemically synthesized
  source 1..22: mol_type = other DNA
aagagatgttctacttgaggtt

SEQ ID NO: 153579 - DNA, 22 bp, synthetic construct
  misc_feature 1..22: note = chemically synthesized
  source 1..22: mol_type = other DNA
agagatgttctacttgaggttg

SEQ ID NO: 153580 - DNA, 22 bp, synthetic construct
  misc_feature 1..22: note = chemically synthesized
  source 1..22: mol_type = other DNA
tacttgaggttgtgtctccatt

SEQ ID NO: 153581 - DNA, 22 bp, synthetic construct
  misc_feature 1..22: note = chemically synthesized
  source 1..22: mol_type = other DNA
cttgaggttgtgtctccattcc

SEQ ID NO: 153582 - DNA, 22 bp, synthetic construct
  misc_feature 1..22: note = chemically synthesized
  source 1..22: mol_type = other DNA
gaggttgtgtctccattcccta

SEQ ID NO: 153583 - DNA, 22 bp, synthetic construct
  misc_feature 1..22: note = chemically synthesized
  source 1..22: mol_type = other DNA
aggttgtgtctccattccctag

SEQ ID NO: 153584 - DNA, 22 bp, synthetic construct
  misc_feature 1..22: note = chemically synthesized
  source 1..22: mol_type = other DNA
tgtctccattccctaggatatt

SEQ ID NO: 153585 - DNA, 22 bp, synthetic construct
  misc_feature 1..22: note = chemically synthesized
  source 1..22: mol_type = other DNA
cattccctaggatatttgttac

SEQ ID NO: 153586 - DNA, 22 bp, synthetic construct
  misc_feature 1..22: note = chemically synthesized
  source 1..22: mol_type = other DNA
cctaggatatttgttaccatta

SEQ ID NO: 153587 - DNA, 22 bp, synthetic construct
  misc_feature 1..22: note = chemically synthesized
  source 1..22: mol_type = other DNA
ggatatttgttaccattacttg

SEQ ID NO: 153588 - DNA, 22 bp, synthetic construct
  misc_feature 1..22: note = chemically synthesized
  source 1..22: mol_type = other DNA
gttaccattacttgcagaagat

SEQ ID NO: 153589 - DNA, 22 bp, synthetic construct
  misc_feature 1..22: note = chemically synthesized
  source 1..22: mol_type = other DNA
ttaccattacttgcagaagata

SEQ ID NO: 153590 - DNA, 22 bp, synthetic construct
  misc_feature 1..22: note = chemically synthesized
  source 1..22: mol_type = other DNA
ccattacttgcagaagataatt

SEQ ID NO: 153591 - DNA, 22 bp, synthetic construct
  misc_feature 1..22: note = chemically synthesized
  source 1..22: mol_type = other DNA
cttgcagaagataattgctaga

SEQ ID NO: 153592 - DNA, 22 bp, synthetic construct
  misc_feature 1..22: note = chemically synthesized
  source 1..22: mol_type = other DNA
gcagaagataattgctagagta

SEQ ID NO: 153593 - DNA, 22 bp, synthetic construct
  misc_feature 1..22: note = chemically synthesized
  source 1..22: mol_type = other DNA
cagaagataattgctagagtag

SEQ ID NO: 153594 - DNA, 22 bp, synthetic construct
  misc_feature 1..22: note = chemically synthesized
  source 1..22: mol_type = other DNA
ctagagtagtgaatagaggcct

SEQ ID NO: 153595 - DNA, 22 bp, synthetic construct
  misc_feature 1..22: note = chemically synthesized
  source 1..22: mol_type = other DNA
gagtagtgaatagaggcctcca

SEQ ID NO: 153596 - DNA, 22 bp, synthetic construct
  misc_feature 1..22: note = chemically synthesized
  source 1..22: mol_type = other DNA
cagatgaaggaaataaaaatag

SEQ ID NO: 153597 - DNA, 22 bp, synthetic construct
  misc_feature 1..22: note = chemically synthesized
  source 1..22: mol_type = other DNA
tcccagaagtctcttgcagaaa

SEQ ID NO: 153598 - DNA, 22 bp, synthetic construct
  misc_feature 1..22: note = chemically synthesized
  source 1..22: mol_type = other DNA
cccagaagtctcttgcagaaac

SEQ ID NO: 153599 - DNA, 22 bp, synthetic construct
  misc_feature 1..22: note = chemically synthesized
  source 1..22: mol_type = other DNA
ccagaagtctcttgcagaaact

SEQ ID NO: 153600 - DNA, 22 bp, synthetic construct
  misc_feature 1..22: note = chemically synthesized
  source 1..22: mol_type = other DNA
ttgcagaaacttaaaaattaat

SEQ ID NO: 153601 - DNA, 22 bp, synthetic construct
  misc_feature 1..22: note = chemically synthesized
  source 1..22: mol_type = other DNA
gcagaaacttaaaaattaatgc

SEQ ID NO: 153602 - DNA, 22 bp, synthetic construct
  misc_feature 1..22: note = chemically synthesized
  source 1..22: mol_type = other DNA
cagaaacttaaaaattaatgcc

SEQ ID NO: 153603 - DNA, 22 bp, synthetic construct
  misc_feature 1..22: note = chemically synthesized
  source 1..22: mol_type = other DNA
aaaaattaatgccaacctagcc

SEQ ID NO: 153604 - DNA, 22 bp, synthetic construct
  misc_feature 1..22: note = chemically synthesized
  source 1..22: mol_type = other DNA
aaaattaatgccaacctagcca

SEQ ID NO: 153605 - DNA, 22 bp, synthetic construct
  misc_feature 1..22: note = chemically synthesized
  source 1..22: mol_type = other DNA
atgccaacctagccaagaacac

SEQ ID NO: 153606 - DNA, 22 bp, synthetic construct
  misc_feature 1..22: note = chemically synthesized
  source 1..22: mol_type = other DNA
gccaagaacacccctgcagtag

SEQ ID NO: 153607 - DNA, 22 bp, synthetic construct
  misc_feature 1..22: note = chemically synthesized
  source 1..22: mol_type = other DNA
cagtaggagtcgatgtcctaaa

SEQ ID NO: 153608 - DNA, 22 bp, synthetic construct
  misc_feature 1..22: note = chemically synthesized
  source 1..22: mol_type = other DNA
aagcttttccagtaaaagtgtg

SEQ ID NO: 153609 - DNA, 22 bp, synthetic construct
  misc_feature 1..22: note = chemically synthesized
  source 1..22: mol_type = other DNA
ttccagtaaaagtgtggtttct

SEQ ID NO: 153610 - DNA, 22 bp, synthetic construct
  misc_feature 1..22: note = chemically synthesized
  source 1..22: mol_type = other DNA
tccagtaaaagtgtggtttctg

SEQ ID NO: 153611 - DNA, 22 bp, synthetic construct
  misc_feature 1..22: note = chemically synthesized
  source 1..22: mol_type = other DNA
ccagtaaaagtgtggtttctgc

SEQ ID NO: 153612 - DNA, 22 bp, synthetic construct
  misc_feature 1..22: note = chemically synthesized
  source 1..22: mol_type = other DNA
cagtaaaagtgtggtttctgcc

SEQ ID NO: 153613 - DNA, 22 bp, synthetic construct
  misc_feature 1..22: note = chemically synthesized
  source 1..22: mol_type = other DNA
ctgcccctgcagtcttggcacc

SEQ ID NO: 153614 - DNA, 22 bp, synthetic construct
  misc_feature 1..22: note = chemically synthesized
  source 1..22: mol_type = other DNA
tgcccctgcagtcttggcacca

SEQ ID NO: 153615 - DNA, 22 bp, synthetic construct
  misc_feature 1..22: note = chemically synthesized
  source 1..22: mol_type = other DNA
cccctgcagtcttggcaccatg

SEQ ID NO: 153616 - DNA, 22 bp, synthetic construct
  misc_feature 1..22: note = chemically synthesized
  source 1..22: mol_type = other DNA
cagtcttggcaccatgtaatgg

SEQ ID NO: 153617 - DNA, 22 bp, synthetic construct
  misc_feature 1..22: note = chemically synthesized
  source 1..22: mol_type = other DNA
ggcaccatgtaatggcacatag

SEQ ID NO: 153618 - DNA, 22 bp, synthetic construct
  misc_feature 1..22: note = chemically synthesized
  source 1..22: mol_type = other DNA
gcaccatgtaatggcacataga

SEQ ID NO: 153619 - DNA, 22 bp, synthetic construct
  misc_feature 1..22: note = chemically synthesized
  source 1..22: mol_type = other DNA
tcaggttgcagccagaactgag

SEQ ID NO: 153620 - DNA, 22 bp, synthetic construct
  misc_feature 1..22: note = chemically synthesized
  source 1..22: mol_type = other DNA
caggttgcagccagaactgagg

SEQ ID NO: 153621 - DNA, 22 bp, synthetic construct
  misc_feature 1..22: note = chemically synthesized
  source 1..22: mol_type = other DNA
aggttgcagccagaactgagga

SEQ ID NO: 153622 - DNA, 22 bp, synthetic construct
  misc_feature 1..22: note = chemically synthesized
  source 1..22: mol_type = other DNA
cagccagaactgaggaatcaat

SEQ ID NO: 153623 - DNA, 22 bp, synthetic construct
  misc_feature 1..22: note = chemically synthesized
  source 1..22: mol_type = other DNA
aggaatcaatcggtgtttagct

SEQ ID NO: 153624 - DNA, 22 bp, synthetic construct
  misc_feature 1..22: note = chemically synthesized
  source 1..22: mol_type = other DNA
agcttttgagatgctggtaatg

SEQ ID NO: 153625 - DNA, 22 bp, synthetic construct
  misc_feature 1..22: note = chemically synthesized
  source 1..22: mol_type = other DNA
gcttttgagatgctggtaatgt

SEQ ID NO: 153626 - DNA, 22 bp, synthetic construct
  misc_feature 1..22: note = chemically synthesized
  source 1..22: mol_type = other DNA
ttgagatgctggtaatgttctc

SEQ ID NO: 153627 - DNA, 22 bp, synthetic construct
  misc_feature 1..22: note = chemically synthesized
  source 1..22: mol_type = other DNA
tgagatgctggtaatgttctct

SEQ ID NO: 153628 - DNA, 22 bp, synthetic construct
  misc_feature 1..22: note = chemically synthesized
  source 1..22: mol_type = other DNA
gagatgctggtaatgttctctt

SEQ ID NO: 153629 - DNA, 22 bp, synthetic construct
  misc_feature 1..22: note = chemically synthesized
  source 1..22: mol_type = other DNA
agatgctggtaatgttctcttt

SEQ ID NO: 153630 - DNA, 22 bp, synthetic construct
  misc_feature 1..22: note = chemically synthesized
  source 1..22: mol_type = other DNA
gtaatgttctctttcttggtct

SEQ ID NO: 153631 - DNA, 22 bp, synthetic construct
  misc_feature 1..22: note = chemically synthesized
  source 1..22: mol_type = other DNA
tctttcttggtctgagtgtttg

SEQ ID NO: 153632 - DNA, 22 bp, synthetic construct
  misc_feature 1..22: note = chemically synthesized
  source 1..22: mol_type = other DNA
tttcttggtctgagtgtttgtt

SEQ ID NO: 153633 - DNA, 22 bp, synthetic construct
  misc_feature 1..22: note = chemically synthesized
  source 1..22: mol_type = other DNA
tcttggtctgagtgtttgttaa

SEQ ID NO: 153634 - DNA, 22 bp, synthetic construct
  misc_feature 1..22: note = chemically synthesized
  source 1..22: mol_type = other DNA
cttggtctgagtgtttgttaaa

SEQ ID NO: 153635 - DNA, 22 bp, synthetic construct
  misc_feature 1..22: note = chemically synthesized
  source 1..22: mol_type = other DNA
ttggtctgagtgtttgttaaaa

SEQ ID NO: 153636 - DNA, 22 bp, synthetic construct
  misc_feature 1..22: note = chemically synthesized
  source 1..22: mol_type = other DNA
ggtctgagtgtttgttaaaagc

SEQ ID NO: 153637 - DNA, 22 bp, synthetic construct
  misc_feature 1..22: note = chemically synthesized
  source 1..22: mol_type = other DNA
gtctgagtgtttgttaaaagct

SEQ ID NO: 153638 - DNA, 22 bp, synthetic construct
  misc_feature 1..22: note = chemically synthesized
  source 1..22: mol_type = other DNA
agtgtttgttaaaagcttttgc

SEQ ID NO: 153639 - DNA, 22 bp, synthetic construct
  misc_feature 1..22: note = chemically synthesized
  source 1..22: mol_type = other DNA
gttaaaagcttttgctaatttt

SEQ ID NO: 153640 - DNA, 22 bp, synthetic construct
  misc_feature 1..22: note = chemically synthesized
  source 1..22: mol_type = other DNA
ttaaaagcttttgctaattttg

SEQ ID NO: 153641 - DNA, 22 bp, synthetic construct
  misc_feature 1..22: note = chemically synthesized
  source 1..22: mol_type = other DNA
aaagcttttgctaattttgtgt

SEQ ID NO: 153642 - DNA, 22 bp, synthetic construct
  misc_feature 1..22: note = chemically synthesized
  source 1..22: mol_type = other DNA
ttgctaattttgtgtcaattta

SEQ ID NO: 153643 - DNA, 22 bp, synthetic construct
  misc_feature 1..22: note = chemically synthesized
  source 1..22: mol_type = other DNA
tgctaattttgtgtcaatttaa

SEQ ID NO: 153644 - DNA, 22 bp, synthetic construct
  misc_feature 1..22: note = chemically synthesized
  source 1..22: mol_type = other DNA
gctaattttgtgtcaatttaac

SEQ ID NO: 153645 - DNA, 22 bp, synthetic construct
  misc_feature 1..22: note = chemically synthesized
  source 1..22: mol_type = other DNA
ctaattttgtgtcaatttaaca

SEQ ID NO: 153646 - DNA, 22 bp, synthetic construct
  misc_feature 1..22: note = chemically synthesized
  source 1..22: mol_type = other DNA
attttgtgtcaatttaacaaac

SEQ ID NO: 153647 - DNA, 22 bp, synthetic construct
  misc_feature 1..22: note = chemically synthesized
  source 1..22: mol_type = other DNA
tgtgtcaatttaacaaactgta

SEQ ID NO: 153648 - DNA, 22 bp, synthetic construct
  misc_feature 1..22: note = chemically synthesized
  source 1..22: mol_type = other DNA
gtgtcaatttaacaaactgtac

SEQ ID NO: 153649 - DNA, 22 bp, synthetic construct
  misc_feature 1..22: note = chemically synthesized
  source 1..22: mol_type = other DNA
tgtcaatttaacaaactgtact

SEQ ID NO: 153650 - DNA, 22 bp, synthetic construct
  misc_feature 1..22: note = chemically synthesized
  source 1..22: mol_type = other DNA
aacaaactgtacttttatttat

SEQ ID NO: 153651 - DNA, 22 bp, synthetic construct
  misc_feature 1..22: note = chemically synthesized
  source 1..22: mol_type = other DNA
acaaactgtacttttatttatg

SEQ ID NO: 153652 - DNA, 22 bp, synthetic construct
  misc_feature 1..22: note = chemically synthesized
  source 1..22: mol_type = other DNA
tacttttatttatgtatttttc

SEQ ID NO: 153653 - DNA, 22 bp, synthetic construct
  misc_feature 1..22: note = chemically synthesized
  source 1..22: mol_type = other DNA
ttatttatgtatttttctgtac

SEQ ID NO: 153654 - DNA, 22 bp, synthetic construct
  misc_feature 1..22: note = chemically synthesized
  source 1..22: mol_type = other DNA
tatttatgtatttttctgtact

SEQ ID NO: 153655 - DNA, 22 bp, synthetic construct
  misc_feature 1..22: note = chemically synthesized
  source 1..22: mol_type = other DNA
atttatgtatttttctgtactg

SEQ ID NO: 153656 - DNA, 22 bp, synthetic construct
  misc_feature 1..22: note = chemically synthesized
  source 1..22: mol_type = other DNA
tttatgtatttttctgtactga

SEQ ID NO: 153657 - DNA, 22 bp, synthetic construct
  misc_feature 1..22: note = chemically synthesized
  source 1..22: mol_type = other DNA
atgtatttttctgtactgaata

SEQ ID NO: 153658 - DNA, 22 bp, synthetic construct
  misc_feature 1..22: note = chemically synthesized
  source 1..22: mol_type = other DNA
tgtatttttctgtactgaataa

SEQ ID NO: 153659 - DNA, 22 bp, synthetic construct
  misc_feature 1..22: note = chemically synthesized
  source 1..22: mol_type = other DNA
ttctgtactgaataataaaata

SEQ ID NO: 153660 - DNA, 22 bp, synthetic construct
  misc_feature 1..22: note = chemically synthesized
  source 1..22: mol_type = other DNA
tctgtactgaataataaaatat

SEQ ID NO: 153661 - DNA, 22 bp, synthetic construct
  misc_feature 1..22: note = chemically synthesized
  source 1..22: mol_type = other DNA
ctgtactgaataataaaatata

SEQ ID NO: 153662 - DNA, 22 bp, synthetic construct
  misc_feature 1..22: note = chemically synthesized
  source 1..22: mol_type = other DNA
tgtactgaataataaaatataa

SEQ ID NO: 153663 - DNA, 22 bp, synthetic construct
  misc_feature 1..22: note = chemically synthesized
  source 1..22: mol_type = other DNA
tactgaataataaaatataaat

SEQ ID NO: 153664 - DNA, 22 bp, synthetic construct
  misc_feature 1..22: note = chemically synthesized
  source 1..22: mol_type = other DNA
aataataaaatataaatttaag

SEQ ID NO: 153665 - DNA, 22 bp, synthetic construct
  misc_feature 1..22: note = chemically synthesized
  source 1..22: mol_type = other DNA
aagaaatatgagtgaaagtgtc

SEQ ID NO: 153666 - DNA, 22 bp, synthetic construct
  misc_feature 1..22: note = chemically synthesized
  source 1..22: mol_type = other DNA
agaaatatgagtgaaagtgtca

SEQ ID NO: 153667 - DNA, 22 bp, synthetic construct
  misc_feature 1..22: note = chemically synthesized
  source 1..22: mol_type = other DNA
acatataaacctggcagactga

SEQ ID NO: 153668 - DNA, 22 bp, synthetic construct
  misc_feature 1..22: note = chemically synthesized
  source 1..22: mol_type = other DNA
catataaacctggcagactgaa

SEQ ID NO: 153669 - DNA, 22 bp, synthetic construct
  misc_feature 1..22: note = chemically synthesized
  source 1..22: mol_type = other DNA
gcagactgaatatgtgttcatt

SEQ ID NO: 153670 - DNA, 22 bp, synthetic construct
  misc_feature 1..22: note = chemically synthesized
  source 1..22: mol_type = other DNA
aatatgtgttcatttctgctac

SEQ ID NO: 153671 - DNA, 22 bp, synthetic construct
  misc_feature 1..22: note = chemically synthesized
  source 1..22: mol_type = other DNA
atttctgctactttctctaatc

SEQ ID NO: 153672 - DNA, 22 bp, synthetic construct
  misc_feature 1..22: note = chemically synthesized
  source 1..22: mol_type = other DNA
ctgctactttctctaatccact

SEQ ID NO: 153673 - DNA, 22 bp, synthetic construct
  misc_feature 1..22: note = chemically synthesized
  source 1..22: mol_type = other DNA
tgctactttctctaatccacta

SEQ ID NO: 153674 - DNA, 22 bp, synthetic construct
  misc_feature 1..22: note = chemically synthesized
  source 1..22: mol_type = other DNA
ctactttctctaatccactaaa

SEQ ID NO: 153675 - DNA, 22 bp, synthetic construct
  misc_feature 1..22: note = chemically synthesized
  source 1..22: mol_type = other DNA
ctttctctaatccactaaagct

SEQ ID NO: 153676 - DNA, 22 bp, synthetic construct
  misc_feature 1..22: note = chemically synthesized
  source 1..22: mol_type = other DNA
tctctaatccactaaagctata

SEQ ID NO: 153677 - DNA, 22 bp, synthetic construct
  misc_feature 1..22: note = chemically synthesized
  source 1..22: mol_type = other DNA
ctctaatccactaaagctatag

SEQ ID NO: 153678 - DNA, 22 bp, synthetic construct
  misc_feature 1..22: note = chemically synthesized
  source 1..22: mol_type = other DNA
tctaatccactaaagctataga

SEQ ID NO: 153679 - DNA, 22 bp, synthetic construct
  misc_feature 1..22: note = chemically synthesized
  source 1..22: mol_type = other DNA
taatccactaaagctatagatg

SEQ ID NO: 153680 - DNA, 22 bp, synthetic construct
  misc_feature 1..22: note = chemically synthesized
  source 1..22: mol_type = other DNA
atccactaaagctatagatgta

SEQ ID NO: 153681 - DNA, 22 bp, synthetic construct
  misc_feature 1..22: note = chemically synthesized
  source 1..22: mol_type = other DNA
aagctatagatgtacacagaga

SEQ ID NO: 153682 - DNA, 22 bp, synthetic construct
  misc_feature 1..22: note = chemically synthesized
  source 1..22: mol_type = other DNA
tagatgtacacagagacactgt

SEQ ID NO: 153683 - DNA, 22 bp, synthetic construct
  misc_feature 1..22: note = chemically synthesized
  source 1..22: mol_type = other DNA
tgaagaaaatagcacaatatgt

SEQ ID NO: 153684 - DNA, 22 bp, synthetic construct
  misc_feature 1..22: note = chemically synthesized
  source 1..22: mol_type = other DNA
ataagtatatacatttaaatat

SEQ ID NO: 153685 - DNA, 22 bp, synthetic construct
  misc_feature 1..22: note = chemically synthesized
  source 1..22: mol_type = other DNA
aaatatgattttttaaaaaaca

SEQ ID NO: 153686 - DNA, 22 bp, synthetic construct
  misc_feature 1..22: note = chemically synthesized
  source 1..22: mol_type = other DNA
aatatgattttttaaaaaacag

SEQ ID NO: 153687 - DNA, 22 bp, synthetic construct
  misc_feature 1..22: note = chemically synthesized
  source 1..22: mol_type = other DNA
tttaaaaaacagaacaggataa

SEQ ID NO: 153688 - DNA, 22 bp, synthetic construct
  misc_feature 1..22: note = chemically synthesized
  source 1..22: mol_type = other DNA
ttaaaaaacagaacaggataat

SEQ ID NO: 153689 - DNA, 22 bp, synthetic construct
  misc_feature 1..22: note = chemically synthesized
  source 1..22: mol_type = other DNA
taaaaaacagaacaggataatc

SEQ ID NO: 153690 - DNA, 22 bp, synthetic construct
  misc_feature 1..22: note = chemically synthesized
  source 1..22: mol_type = other DNA
aaaaaacagaacaggataatct

SEQ ID NO: 153691 - DNA, 22 bp, synthetic construct
  misc_feature 1..22: note = chemically synthesized
  source 1..22: mol_type = other DNA
aaaaacagaacaggataatctg

SEQ ID NO: 153692 - DNA, 22 bp, synthetic construct
  misc_feature 1..22: note = chemically synthesized
  source 1..22: mol_type = other DNA
aaatctatatgtctacagaaaa

SEQ ID NO: 153693 - DNA, 22 bp, synthetic construct
  misc_feature 1..22: note = chemically synthesized
  source 1..22: mol_type = other DNA
tatgtctacagaaaaggatacc

SEQ ID NO: 153694 - DNA, 22 bp, synthetic construct
  misc_feature 1..22: note = chemically synthesized
  source 1..22: mol_type = other DNA
cagaaaaggataccaatgagaa

SEQ ID NO: 153695 - DNA, 22 bp, synthetic construct
  misc_feature 1..22: note = chemically synthesized
  source 1..22: mol_type = other DNA
tctgcaaagagcattttctgga

SEQ ID NO: 153696 - DNA, 22 bp, synthetic construct
  misc_feature 1..22: note = chemically synthesized
  source 1..22: mol_type = other DNA
caaagagcattttctggaaaaa

SEQ ID NO: 153697 - DNA, 22 bp, synthetic construct
  misc_feature 1..22: note = chemically synthesized
  source 1..22: mol_type = other DNA
tctggaaaaacacagaaattac

SEQ ID NO: 153698 - DNA, 22 bp, synthetic construct
  misc_feature 1..22: note = chemically synthesized
  source 1..22: mol_type = other DNA
ctggaaaaacacagaaattact

SEQ ID NO: 153699 - DNA, 22 bp, synthetic construct
  misc_feature 1..22: note = chemically synthesized
  source 1..22: mol_type = other DNA
tggaaaaacacagaaattactt

SEQ ID NO: 153700 - DNA, 22 bp, synthetic construct
  misc_feature 1..22: note = chemically synthesized
  source 1..22: mol_type = other DNA
gaaaaacacagaaattacttat

SEQ ID NO: 153701 - DNA, 22 bp, synthetic construct
  misc_feature 1..22: note = chemically synthesized
  source 1..22: mol_type = other DNA
cttataaagcattcgtgagggg

SEQ ID NO: 153702 - DNA, 22 bp, synthetic construct
  misc_feature 1..22: note = chemically synthesized
  source 1..22: mol_type = other DNA
ataaagcattcgtgaggggtag

SEQ ID NO: 153703 - DNA, 22 bp, synthetic construct
  misc_feature 1..22: note = chemically synthesized
  source 1..22: mol_type = other DNA
taaagcattcgtgaggggtagg

SEQ ID NO: 153704 - DNA, 22 bp, synthetic construct
  misc_feature 1..22: note = chemically synthesized
  source 1..22: mol_type = other DNA
gtgaggggtagggctaaaaatg

SEQ ID NO: 153705 - DNA, 22 bp, synthetic construct
  misc_feature 1..22: note = chemically synthesized
  source 1..22: mol_type = other DNA
aaaatggtagaaaaggtgaata

SEQ ID NO: 153706 - DNA, 22 bp, synthetic construct
  misc_feature 1..22: note = chemically synthesized
  source 1..22: mol_type = other DNA
tttaaggttgcctaaaagatag

SEQ ID NO: 153707 - DNA, 22 bp, synthetic construct
  misc_feature 1..22: note = chemically synthesized
  source 1..22: mol_type = other DNA
aaggttgcctaaaagatagcca

SEQ ID NO: 153708 - DNA, 22 bp, synthetic construct
  misc_feature 1..22: note = chemically synthesized
  source 1..22: mol_type = other DNA
aggttgcctaaaagatagccag

SEQ ID NO: 153709 - DNA, 22 bp, synthetic construct
  misc_feature 1..22: note = chemically synthesized
  source 1..22: mol_type = other DNA
cctaaaagatagccaggtactc

SEQ ID NO: 153710 - DNA, 22 bp, synthetic construct
  misc_feature 1..22: note = chemically synthesized
  source 1..22: mol_type = other DNA
aaagatagccaggtactcattt

SEQ ID NO: 153711 - DNA, 22 bp, synthetic construct
  misc_feature 1..22: note = chemically synthesized
  source 1..22: mol_type = other DNA
atttctctttagttctggcaaa

SEQ ID NO: 153712 - DNA, 22 bp, synthetic construct
  misc_feature 1..22: note = chemically synthesized
  source 1..22: mol_type = other DNA
ctctttagttctggcaaaatga

SEQ ID NO: 153713 - DNA, 22 bp, synthetic construct
  misc_feature 1..22: note = chemically synthesized
  source 1..22: mol_type = other DNA
tctttagttctggcaaaatgat

SEQ ID NO: 153714 - DNA, 22 bp, synthetic construct
  misc_feature 1..22: note = chemically synthesized
  source 1..22: mol_type = other DNA
tttagttctggcaaaatgatta

SEQ ID NO: 153715 - DNA, 22 bp, synthetic construct
  misc_feature 1..22: note = chemically synthesized
  source 1..22: mol_type = other DNA
tagttctggcaaaatgattagt

SEQ ID NO: 153716 - DNA, 22 bp, synthetic construct
  misc_feature 1..22: note = chemically synthesized
  source 1..22: mol_type = other DNA
agttctggcaaaatgattagtg

SEQ ID NO: 153717 - DNA, 22 bp, synthetic construct
  misc_feature 1..22: note = chemically synthesized
  source 1..22: mol_type = other DNA
gttctggcaaaatgattagtgt

SEQ ID NO: 153718 - DNA, 22 bp, synthetic construct
  misc_feature 1..22: note = chemically synthesized
  source 1..22: mol_type = other DNA
tggcaaaatgattagtgtctgt

SEQ ID NO: 153719 - DNA, 22 bp, synthetic construct
  misc_feature 1..22: note = chemically synthesized
  source 1..22: mol_type = other DNA
gcaaaatgattagtgtctgtag

SEQ ID NO: 153720 - DNA, 22 bp, synthetic construct
  misc_feature 1..22: note = chemically synthesized
  source 1..22: mol_type = other DNA
gtgtctgtagtaaccaaatcaa

SEQ ID NO: 153721 - DNA, 22 bp, synthetic construct
  misc_feature 1..22: note = chemically synthesized
  source 1..22: mol_type = other DNA
tagtaaccaaatcaatgatgat

SEQ ID NO: 153722 - DNA, 22 bp, synthetic construct
  misc_feature 1..22: note = chemically synthesized
  source 1..22: mol_type = other DNA
ggaaattcagtgcaaaggatgc

SEQ ID NO: 153723 - DNA, 22 bp, synthetic construct
  misc_feature 1..22: note = chemically synthesized
  source 1..22: mol_type = other DNA
agtgcaaaggatgccaggacta

SEQ ID NO: 153724 - DNA, 22 bp, synthetic construct
  misc_feature 1..22: note = chemically synthesized
  source 1..22: mol_type = other DNA
aggtgtaatatatgaaacagag

SEQ ID NO: 153725 - DNA, 22 bp, synthetic construct
  misc_feature 1..22: note = chemically synthesized
  source 1..22: mol_type = other DNA
tgcaaaagaatacatattgaat

SEQ ID NO: 153726 - DNA, 22 bp, synthetic construct
  misc_feature 1..22: note = chemically synthesized
  source 1..22: mol_type = other DNA
aatgatgataaactgtctcaag

SEQ ID NO: 153727 - DNA, 22 bp, synthetic construct
  misc_feature 1..22: note = chemically synthesized
  source 1..22: mol_type = other DNA
tctcaagagaaaggactaatag

SEQ ID NO: 153728 - DNA, 22 bp, synthetic construct
  misc_feature 1..22: note = chemically synthesized
  source 1..22: mol_type = other DNA
aagagaaaggactaatagatat

SEQ ID NO: 153729 - DNA, 22 bp, synthetic construct
  misc_feature 1..22: note = chemically synthesized
  source 1..22: mol_type = other DNA
atagatattggcatttgagtat

SEQ ID NO: 153730 - DNA, 22 bp, synthetic construct
  misc_feature 1..22: note = chemically synthesized
  source 1..22: mol_type = other DNA
gcatttgagtattcgcttactg

SEQ ID NO: 153731 - DNA, 22 bp, synthetic construct
  misc_feature 1..22: note = chemically synthesized
  source 1..22: mol_type = other DNA
gagtattcgcttactggattag

SEQ ID NO: 153732 - DNA, 22 bp, synthetic construct
  misc_feature 1..22: note = chemically synthesized
  source 1..22: mol_type = other DNA
agtattcgcttactggattagc

SEQ ID NO: 153733 - DNA, 22 bp, synthetic construct
  misc_feature 1..22: note = chemically synthesized
  source 1..22: mol_type = other DNA
gcttactggattagctaggctt

SEQ ID NO: 153734 - DNA, 22 bp, synthetic construct
  misc_feature 1..22: note = chemically synthesized
  source 1..22: mol_type = other DNA
actggattagctaggcttcttt

SEQ ID NO: 153735 - DNA, 22 bp, synthetic construct
  misc_feature 1..22: note = chemically synthesized
  source 1..22: mol_type = other DNA
ctggattagctaggcttctttc

SEQ ID NO: 153736 - DNA, 22 bp, synthetic construct
  misc_feature 1..22: note = chemically synthesized
  source 1..22: mol_type = other DNA
gattagctaggcttctttctga

SEQ ID NO: 153737 - DNA, 22 bp, synthetic construct
  misc_feature 1..22: note = chemically synthesized
  source 1..22: mol_type = other DNA
gctaggcttctttctgatcagc

SEQ ID NO: 153738 - DNA, 22 bp, synthetic construct
  misc_feature 1..22: note = chemically synthesized
  source 1..22: mol_type = other DNA
ggcttctttctgatcagccttc

SEQ ID NO: 153739 - DNA, 22 bp, synthetic construct
  misc_feature 1..22: note = chemically synthesized
  source 1..22: mol_type = other DNA
ctttctgatcagccttcaaagt

SEQ ID NO: 153740 - DNA, 22 bp, synthetic construct
  misc_feature 1..22: note = chemically synthesized
  source 1..22: mol_type = other DNA
tttctgatcagccttcaaagta

SEQ ID NO: 153741 - DNA, 22 bp, synthetic construct
  misc_feature 1..22: note = chemically synthesized
  source 1..22: mol_type = other DNA
tctgatcagccttcaaagtaac

SEQ ID NO: 153742 - DNA, 22 bp, synthetic construct
  misc_feature 1..22: note = chemically synthesized
  source 1..22: mol_type = other DNA
ctgatcagccttcaaagtaact

SEQ ID NO: 153743 - DNA, 22 bp, synthetic construct
  misc_feature 1..22: note = chemically synthesized
  source 1..22: mol_type = other DNA
tgatcagccttcaaagtaactg

SEQ ID NO: 153744 - DNA, 22 bp, synthetic construct
  misc_feature 1..22: note = chemically synthesized
  source 1..22: mol_type = other DNA
atcagccttcaaagtaactggc

SEQ ID NO: 153745 - DNA, 22 bp, synthetic construct
  misc_feature 1..22: note = chemically synthesized
  source 1..22: mol_type = other DNA
caaagtaactggccagataact

SEQ ID NO: 153746 - DNA, 22 bp, synthetic construct
  misc_feature 1..22: note = chemically synthesized
  source 1..22: mol_type = other DNA
aaagtaactggccagataacta

SEQ ID NO: 153747 - DNA, 22 bp, synthetic construct
  misc_feature 1..22: note = chemically synthesized
  source 1..22: mol_type = other DNA
gccagataactaattgtaccgt

SEQ ID NO: 153748 - DNA, 22 bp, synthetic construct
  misc_feature 1..22: note = chemically synthesized
  source 1..22: mol_type = other DNA
attgtaccgtgttcatagaaat

SEQ ID NO: 153749 - DNA, 22 bp, synthetic construct
  misc_feature 1..22: note = chemically synthesized
  source 1..22: mol_type = other DNA
taccgtgttcatagaaatcccc

SEQ ID NO: 153750 - DNA, 22 bp, synthetic construct
  misc_feature 1..22: note = chemically synthesized
  source 1..22: mol_type = other DNA
atagaaatccccactatactct

SEQ ID NO: 153751 - DNA, 22 bp, synthetic construct
  misc_feature 1..22: note = chemically synthesized
  source 1..22: mol_type = other DNA
tactctttttaaaattatttta

SEQ ID NO: 153752 - DNA, 22 bp, synthetic construct
  misc_feature 1..22: note = chemically synthesized
  source 1..22: mol_type = other DNA
tttttaaaattattttatttta

SEQ ID NO: 153753 - DNA, 22 bp, synthetic construct
  misc_feature 1..22: note = chemically synthesized
  source 1..22: mol_type = other DNA
tttaaaattattttattttatt

SEQ ID NO: 153754 - DNA, 22 bp, synthetic construct
  misc_feature 1..22: note = chemically synthesized
  source 1..22: mol_type = other DNA
ttaaaattattttattttatta

SEQ ID NO: 153755 - DNA, 22 bp, synthetic construct
  misc_feature 1..22: note = chemically synthesized
  source 1..22: mol_type = other DNA
taaaattattttattttattat

SEQ ID NO: 153756 - DNA, 22 bp, synthetic construct
  misc_feature 1..22: note = chemically synthesized
  source 1..22: mol_type = other DNA
aaaattattttattttattatt

SEQ ID NO: 153757 - DNA, 22 bp, synthetic construct
  misc_feature 1..22: note = chemically synthesized
  source 1..22: mol_type = other DNA
aaattattttattttattatta

SEQ ID NO: 153758 - DNA, 22 bp, synthetic construct
  misc_feature 1..22: note = chemically synthesized
  source 1..22: mol_type = other DNA
ttttattttattattattatac

SEQ ID NO: 153759 - DNA, 22 bp, synthetic construct
  misc_feature 1..22: note = chemically synthesized
  source 1..22: mol_type = other DNA
tattttattattattatacttt

SEQ ID NO: 153760 - DNA, 22 bp, synthetic construct
  misc_feature 1..22: note = chemically synthesized
  source 1..22: mol_type = other DNA
attttattattattatacttta

SEQ ID NO: 153761 - DNA, 22 bp, synthetic construct
  misc_feature 1..22: note = chemically synthesized
  source 1..22: mol_type = other DNA
ttttattattattatactttaa

SEQ ID NO: 153762 - DNA, 22 bp, synthetic construct
  misc_feature 1..22: note = chemically synthesized
  source 1..22: mol_type = other DNA
tattattattatactttaagtt

SEQ ID NO: 153763 - DNA, 22 bp, synthetic construct
  misc_feature 1..22: note = chemically synthesized
  source 1..22: mol_type = other DNA
attattattatactttaagttt

SEQ ID NO: 153764 - DNA, 22 bp, synthetic construct
  misc_feature 1..22: note = chemically synthesized
  source 1..22: mol_type = other DNA
ttattattatactttaagtttt

SEQ ID NO: 153765 - DNA, 22 bp, synthetic construct
  misc_feature 1..22: note = chemically synthesized
  source 1..22: mol_type = other DNA
ttattatactttaagttttagg

SEQ ID NO: 153766 - DNA, 22 bp, synthetic construct
  misc_feature 1..22: note = chemically synthesized
  source 1..22: mol_type = other DNA
ttatactttaagttttagggta

SEQ ID NO: 153767 - DNA, 22 bp, synthetic construct
  misc_feature 1..22: note = chemically synthesized
  source 1..22: mol_type = other DNA
tactttaagttttagggtacat

SEQ ID NO: 153768 - DNA, 22 bp, synthetic construct
  misc_feature 1..22: note = chemically synthesized
  source 1..22: mol_type = other DNA
taagttttagggtacatgtgca

SEQ ID NO: 153769 - DNA, 22 bp, synthetic construct
  misc_feature 1..22: note = chemically synthesized
  source 1..22: mol_type = other DNA
aagttttagggtacatgtgcac

SEQ ID NO: 153770 - DNA, 22 bp, synthetic construct
  misc_feature 1..22: note = chemically synthesized
  source 1..22: mol_type = other DNA
agttttagggtacatgtgcaca

SEQ ID NO: 153771 - DNA, 22 bp, synthetic construct
  misc_feature 1..22: note = chemically synthesized
  source 1..22: mol_type = other DNA
tagggtacatgtgcacaatgtg

SEQ ID NO: 153772 - DNA, 22 bp, synthetic construct
  misc_feature 1..22: note = chemically synthesized
  source 1..22: mol_type = other DNA
agggtacatgtgcacaatgtgc

SEQ ID NO: 153773 - DNA, 22 bp, synthetic construct
  misc_feature 1..22: note = chemically synthesized
  source 1..22: mol_type = other DNA
gggtacatgtgcacaatgtgca

SEQ ID NO: 153774 - DNA, 22 bp, synthetic construct
  misc_feature 1..22: note = chemically synthesized
  source 1..22: mol_type = other DNA
gttacatatgtatacatgtgcc

SEQ ID NO: 153775 - DNA, 22 bp, synthetic construct
  misc_feature 1..22: note = chemically synthesized
  source 1..22: mol_type = other DNA
catatgtatacatgtgccatgc

SEQ ID NO: 153776 - DNA, 22 bp, synthetic construct
  misc_feature 1..22: note = chemically synthesized
  source 1..22: mol_type = other DNA
gtgtgcttcacccattaactca

SEQ ID NO: 153777 - DNA, 22 bp, synthetic construct
  misc_feature 1..22: note = chemically synthesized
  source 1..22: mol_type = other DNA
cacccattaactcatcatttag

SEQ ID NO: 153778 - DNA, 22 bp, synthetic construct
  misc_feature 1..22: note = chemically synthesized
  source 1..22: mol_type = other DNA
acccattaactcatcatttagc

SEQ ID NO: 153779 - DNA, 22 bp, synthetic construct
  misc_feature 1..22: note = chemically synthesized
  source 1..22: mol_type = other DNA
actcatcatttagcattaggta

SEQ ID NO: 153780 - DNA, 22 bp, synthetic construct
  misc_feature 1..22: note = chemically synthesized
  source 1..22: mol_type = other DNA
atcatttagcattaggtatatc

SEQ ID NO: 153781 - DNA, 22 bp, synthetic construct
  misc_feature 1..22: note = chemically synthesized
  source 1..22: mol_type = other DNA
agcattaggtatatctcctaat

SEQ ID NO: 153782 - DNA, 22 bp, synthetic construct
  misc_feature 1..22: note = chemically synthesized
  source 1..22: mol_type = other DNA
gcattaggtatatctcctaatg

SEQ ID NO: 153783 - DNA, 22 bp, synthetic construct
  misc_feature 1..22: note = chemically synthesized
  source 1..22: mol_type = other DNA
ggtatatctcctaatgctatcc

SEQ ID NO: 153784 - DNA, 22 bp, synthetic construct
  misc_feature 1..22: note = chemically synthesized
  source 1..22: mol_type = other DNA
ctaatgctatccctcctccctc

SEQ ID NO: 153785 - DNA, 22 bp, synthetic construct
  misc_feature 1..22: note = chemically synthesized
  source 1..22: mol_type = other DNA
atgctatccctcctccctcccc

SEQ ID NO: 153786 - DNA, 22 bp, synthetic construct
  misc_feature 1..22: note = chemically synthesized
  source 1..22: mol_type = other DNA
tccctcctccctccccccaccc

SEQ ID NO: 153787 - DNA, 22 bp, synthetic construct
  misc_feature 1..22: note = chemically synthesized
  source 1..22: mol_type = other DNA
ctccctccccccaccccacaac

SEQ ID NO: 153788 - DNA, 22 bp, synthetic construct
  misc_feature 1..22: note = chemically synthesized
  source 1..22: mol_type = other DNA
cctccccccaccccacaacagt

SEQ ID NO: 153789 - DNA, 22 bp, synthetic construct
  misc_feature 1..22: note = chemically synthesized
  source 1..22: mol_type = other DNA
cccccaccccacaacagtcccc

SEQ ID NO: 153790 - DNA, 22 bp, synthetic construct
  misc_feature 1..22: note = chemically synthesized
  source 1..22: mol_type = other DNA
cccttcctgtgtccatgtgttc

SEQ ID NO: 153791 - DNA, 22 bp, synthetic construct
  misc_feature 1..22: note = chemically synthesized
  source 1..22: mol_type = other DNA
cctgtgtccatgtgttctcatt

SEQ ID NO: 153792 - DNA, 22 bp, synthetic construct
  misc_feature 1..22: note = chemically synthesized
  source 1..22: mol_type = other DNA
ctgtgtccatgtgttctcattg

SEQ ID NO: 153793 - DNA, 22 bp, synthetic construct
  misc_feature 1..22: note = chemically synthesized
  source 1..22: mol_type = other DNA
tgtccatgtgttctcattgttc

SEQ ID NO: 153794 - DNA, 22 bp, synthetic construct
  misc_feature 1..22: note = chemically synthesized
  source 1..22: mol_type = other DNA
tcattgttcaattcccacctat

SEQ ID NO: 153795 - DNA, 22 bp, synthetic construct
  misc_feature 1..22: note = chemically synthesized
  source 1..22: mol_type = other DNA
attgttcaattcccacctatga

SEQ ID NO: 153796 - DNA, 22 bp, synthetic construct
  misc_feature 1..22: note = chemically synthesized
  source 1..22: mol_type = other DNA
ttcaattcccacctatgagtga

SEQ ID NO: 153797 - DNA, 22 bp, synthetic construct
  misc_feature 1..22: note = chemically synthesized
  source 1..22: mol_type = other DNA
aattcccacctatgagtgagaa

SEQ ID NO: 153798 - DNA, 22 bp, synthetic construct
  misc_feature 1..22: note = chemically synthesized
  source 1..22: mol_type = other DNA
ccacctatgagtgagaacatgc

SEQ ID NO: 153799 - DNA, 22 bp, synthetic construct
  misc_feature 1..22: note = chemically synthesized
  source 1..22: mol_type = other DNA
tgagtgagaacatgcagtgttt

SEQ ID NO: 153800 - DNA, 22 bp, synthetic construct
  misc_feature 1..22: note = chemically synthesized
  source 1..22: mol_type = other DNA
ggtttttcgtccttgcgatagt

SEQ ID NO: 153801 - DNA, 22 bp, synthetic construct
  misc_feature 1..22: note = chemically synthesized
  source 1..22: mol_type = other DNA
gtttttcgtccttgcgatagtt

SEQ ID NO: 153802 - DNA, 22 bp, synthetic construct
  misc_feature 1..22: note = chemically synthesized
  source 1..22: mol_type = other DNA
ttcgtccttgcgatagtttact

SEQ ID NO: 153803 - DNA, 22 bp, synthetic construct
  misc_feature 1..22: note = chemically synthesized
  source 1..22: mol_type = other DNA
tcgtccttgcgatagtttactg

SEQ ID NO: 153804 - DNA, 22 bp, synthetic construct
  misc_feature 1..22: note = chemically synthesized
  source 1..22: mol_type = other DNA
cgtccttgcgatagtttactga

SEQ ID NO: 153805 - DNA, 22 bp, synthetic construct
  misc_feature 1..22: note = chemically synthesized
  source 1..22: mol_type = other DNA
gtccttgcgatagtttactgag

SEQ ID NO: 153806 - DNA, 22 bp, synthetic construct
  misc_feature 1..22: note = chemically synthesized
  source 1..22: mol_type = other DNA
gcgatagtttactgagaatgat

SEQ ID NO: 153807 - DNA, 22 bp, synthetic construct
  misc_feature 1..22: note = chemically synthesized
  source 1..22: mol_type = other DNA
cgatagtttactgagaatgatg

SEQ ID NO: 153808 - DNA, 22 bp, synthetic construct
  misc_feature 1..22: note = chemically synthesized
  source 1..22: mol_type = other DNA
actgagaatgatgatttccaat

SEQ ID NO: 153809 - DNA, 22 bp, synthetic construct
  misc_feature 1..22: note = chemically synthesized
  source 1..22: mol_type = other DNA
ctgagaatgatgatttccaatt

SEQ ID NO: 153810 - DNA, 22 bp, synthetic construct
  misc_feature 1..22: note = chemically synthesized
  source 1..22: mol_type = other DNA
agaatgatgatttccaatttca

SEQ ID NO: 153811 - DNA, 22 bp, synthetic construct
  misc_feature 1..22: note = chemically synthesized
  source 1..22: mol_type = other DNA
ccaatttcatccatgtccctac

SEQ ID NO: 153812 - DNA, 22 bp, synthetic construct
  misc_feature 1..22: note = chemically synthesized
  source 1..22: mol_type = other DNA
caatttcatccatgtccctaca

SEQ ID NO: 153813 - DNA, 22 bp, synthetic construct
  misc_feature 1..22: note = chemically synthesized
  source 1..22: mol_type = other DNA
catccatgtccctacaaaggac

SEQ ID NO: 153814 - DNA, 22 bp, synthetic construct
  misc_feature 1..22: note = chemically synthesized
  source 1..22: mol_type = other DNA
atccatgtccctacaaaggaca

SEQ ID NO: 153815 - DNA, 22 bp, synthetic construct
  misc_feature 1..22: note = chemically synthesized
  source 1..22: mol_type = other DNA
caaaggacatgaactcatcctt

SEQ ID NO: 153816 - DNA, 22 bp, synthetic construct
  misc_feature 1..22: note = chemically synthesized
  source 1..22: mol_type = other DNA
atccttttttatggctgcatag

SEQ ID NO: 153817 - DNA, 22 bp, synthetic construct
  misc_feature 1..22: note = chemically synthesized
  source 1..22: mol_type = other DNA
ttttatggctgcatagtattcc

SEQ ID NO: 153818 - DNA, 22 bp, synthetic construct
  misc_feature 1..22: note = chemically synthesized
  source 1..22: mol_type = other DNA
tttatggctgcatagtattcca

SEQ ID NO: 153819 - DNA, 22 bp, synthetic construct
  misc_feature 1..22: note = chemically synthesized
  source 1..22: mol_type = other DNA
ttatggctgcatagtattccat

SEQ ID NO: 153820 - DNA, 22 bp, synthetic construct
  misc_feature 1..22: note = chemically synthesized
  source 1..22: mol_type = other DNA
tatggctgcatagtattccatg

SEQ ID NO: 153821 - DNA, 22 bp, synthetic construct
  misc_feature 1..22: note = chemically synthesized
  source 1..22: mol_type = other DNA
atggctgcatagtattccatgg

SEQ ID NO: 153822 - DNA, 22 bp, synthetic construct
  misc_feature 1..22: note = chemically synthesized
  source 1..22: mol_type = other DNA
tggctgcatagtattccatggt

SEQ ID NO: 153823 - DNA, 22 bp, synthetic construct
  misc_feature 1..22: note = chemically synthesized
  source 1..22: mol_type = other DNA
catagtattccatggtgtgtat

SEQ ID NO: 153824 - DNA, 22 bp, synthetic construct
  misc_feature 1..22: note = chemically synthesized
  source 1..22: mol_type = other DNA
catggtgtgtatgtgccacatt

SEQ ID NO: 153825 - DNA, 22 bp, synthetic construct
  misc_feature 1..22: note = chemically synthesized
  source 1..22: mol_type = other DNA
tcttaatccagtctatcattgt

SEQ ID NO: 153826 - DNA, 22 bp, synthetic construct
  misc_feature 1..22: note = chemically synthesized
  source 1..22: mol_type = other DNA
cttaatccagtctatcattgtt

SEQ ID NO: 153827 - DNA, 22 bp, synthetic construct
  misc_feature 1..22: note = chemically synthesized
  source 1..22: mol_type = other DNA
ttaatccagtctatcattgttg

SEQ ID NO: 153828 - DNA, 22 bp, synthetic construct
  misc_feature 1..22: note = chemically synthesized
  source 1..22: mol_type = other DNA
aatccagtctatcattgttgga

SEQ ID NO: 153829 - DNA, 22 bp, synthetic construct
  misc_feature 1..22: note = chemically synthesized
  source 1..22: mol_type = other DNA
atccagtctatcattgttggac

SEQ ID NO: 153830 - DNA, 22 bp, synthetic construct
  misc_feature 1..22: note = chemically synthesized
  source 1..22: mol_type = other DNA
tcattgttggacatttgggttg

SEQ ID NO: 153831 - DNA, 22 bp, synthetic construct
  misc_feature 1..22: note = chemically synthesized
  source 1..22: mol_type = other DNA
ttggacatttgggttggttcca

SEQ ID NO: 153832 - DNA, 22 bp, synthetic construct
  misc_feature 1..22: note = chemically synthesized
  source 1..22: mol_type = other DNA
gacatttgggttggttccaagt

SEQ ID NO: 153833 - DNA, 22 bp, synthetic construct
  misc_feature 1..22: note = chemically synthesized
  source 1..22: mol_type = other DNA
gggttggttccaagtctttgct

SEQ ID NO: 153834 - DNA, 22 bp, synthetic construct
  misc_feature 1..22: note = chemically synthesized
  source 1..22: mol_type = other DNA
ggttggttccaagtctttgcta

SEQ ID NO: 153835 - DNA, 22 bp, synthetic construct
  misc_feature 1..22: note = chemically synthesized
  source 1..22: mol_type = other DNA
gttccaagtctttgctattgtg

SEQ ID NO: 153836 - DNA, 22 bp, synthetic construct
  misc_feature 1..22: note = chemically synthesized
  source 1..22: mol_type = other DNA
caagtctttgctattgtgaata

SEQ ID NO: 153837 - DNA, 22 bp, synthetic construct
  misc_feature 1..22: note = chemically synthesized
  source 1..22: mol_type = other DNA
tgctattgtgaatagtgccgca

SEQ ID NO: 153838 - DNA, 22 bp, synthetic construct
  misc_feature 1..22: note = chemically synthesized
  source 1..22: mol_type = other DNA
gctattgtgaatagtgccgcaa

SEQ ID NO: 153839 - DNA, 22 bp, synthetic construct
  misc_feature 1..22: note = chemically synthesized
  source 1..22: mol_type = other DNA
ctattgtgaatagtgccgcaat

SEQ ID NO: 153840 - DNA, 22 bp, synthetic construct
  misc_feature 1..22: note = chemically synthesized
  source 1..22: mol_type = other DNA
ttgtgaatagtgccgcaataaa

SEQ ID NO: 153841 - DNA, 22 bp, synthetic construct
  misc_feature 1..22: note = chemically synthesized
  source 1..22: mol_type = other DNA
tgaatagtgccgcaataaattg

SEQ ID NO: 153842 - DNA, 22 bp, synthetic construct
  misc_feature 1..22: note = chemically synthesized
  source 1..22: mol_type = other DNA
catttacaaacctttagctaga

SEQ ID NO: 153843 - DNA, 22 bp, synthetic construct
  misc_feature 1..22: note = chemically synthesized
  source 1..22: mol_type = other DNA
acaaacctttagctagacatga

SEQ ID NO: 153844 - DNA, 22 bp, synthetic construct
  misc_feature 1..22: note = chemically synthesized
  source 1..22: mol_type = other DNA
caaacctttagctagacatgaa

SEQ ID NO: 153845 - DNA, 22 bp, synthetic construct
  misc_feature 1..22: note = chemically synthesized
  source 1..22: mol_type = other DNA
tagctagacatgaaagttctcc

SEQ ID NO: 153846 - DNA, 22 bp, synthetic construct
  misc_feature 1..22: note = chemically synthesized
  source 1..22: mol_type = other DNA
agctagacatgaaagttctcca

SEQ ID NO: 153847 - DNA, 22 bp, synthetic construct
  misc_feature 1..22: note = chemically synthesized
  source 1..22: mol_type = other DNA
gctagacatgaaagttctccag

SEQ ID NO: 153848 - DNA, 22 bp, synthetic construct
  misc_feature 1..22: note = chemically synthesized
  source 1..22: mol_type = other DNA
gacatgaaagttctccagttcc

SEQ ID NO: 153849 - DNA, 22 bp, synthetic construct
  misc_feature 1..22: note = chemically synthesized
  source 1..22: mol_type = other DNA
tccagttccatatttcatggtg

SEQ ID NO: 153850 - DNA, 22 bp, synthetic construct
  misc_feature 1..22: note = chemically synthesized
  source 1..22: mol_type = other DNA
cagttccatatttcatggtgag

SEQ ID NO: 153851 - DNA, 22 bp, synthetic construct
  misc_feature 1..22: note = chemically synthesized
  source 1..22: mol_type = other DNA
catatttcatggtgaggaacaa

SEQ ID NO: 153852 - DNA, 22 bp, synthetic construct
  misc_feature 1..22: note = chemically synthesized
  source 1..22: mol_type = other DNA
catggtgaggaacaaagaatat

SEQ ID NO: 153853 - DNA, 22 bp, synthetic construct
  misc_feature 1..22: note = chemically synthesized
  source 1..22: mol_type = other DNA
atggtgaggaacaaagaatatg

SEQ ID NO: 153854 - DNA, 22 bp, synthetic construct
  misc_feature 1..22: note = chemically synthesized
  source 1..22: mol_type = other DNA
tattctttgttcctcaccatga

SEQ ID NO: 153855 - DNA, 22 bp, synthetic construct
  misc_feature 1..22: note = chemically synthesized
  source 1..22: mol_type = other DNA
tttgttcctcaccatgaaatat

SEQ ID NO: 153856 - DNA, 22 bp, synthetic construct
  misc_feature 1..22: note = chemically synthesized
  source 1..22: mol_type = other DNA
tgttcctcaccatgaaatatgg

SEQ ID NO: 153857 - DNA, 22 bp, synthetic construct
  misc_feature 1..22: note = chemically synthesized
  source 1..22: mol_type = other DNA
gttcctcaccatgaaatatgga

SEQ ID NO: 153858 - DNA, 22 bp, synthetic construct
  misc_feature 1..22: note = chemically synthesized
  source 1..22: mol_type = other DNA
ttcctcaccatgaaatatggaa

SEQ ID NO: 153859 - DNA, 22 bp, synthetic construct
  misc_feature 1..22: note = chemically synthesized
  source 1..22: mol_type = other DNA
ctcaccatgaaatatggaactg

SEQ ID NO: 153860 - DNA, 22 bp, synthetic construct
  misc_feature 1..22: note = chemically synthesized
  source 1..22: mol_type = other DNA
accatgaaatatggaactggag

SEQ ID NO: 153861 - DNA, 22 bp, synthetic construct
  misc_feature 1..22: note = chemically synthesized
  source 1..22: mol_type = other DNA
gagaactttcatgtctagctaa

SEQ ID NO: 153862 - DNA, 22 bp, synthetic construct
  misc_feature 1..22: note = chemically synthesized
  source 1..22: mol_type = other DNA
tcatgtctagctaaaggtttgt

SEQ ID NO: 153863 - DNA, 22 bp, synthetic construct
  misc_feature 1..22: note = chemically synthesized
  source 1..22: mol_type = other DNA
catgtctagctaaaggtttgta

SEQ ID NO: 153864 - DNA, 22 bp, synthetic construct
  misc_feature 1..22: note = chemically synthesized
  source 1..22: mol_type = other DNA
atgtctagctaaaggtttgtaa

SEQ ID NO: 153865 - DNA, 22 bp, synthetic construct
  misc_feature 1..22: note = chemically synthesized
  source 1..22: mol_type = other DNA
gctaaaggtttgtaaatgcacc

SEQ ID NO: 153866 - DNA, 22 bp, synthetic construct
  misc_feature 1..22: note = chemically synthesized
  source 1..22: mol_type = other DNA
aaggtttgtaaatgcaccaatc

SEQ ID NO: 153867 - DNA, 22 bp, synthetic construct
  misc_feature 1..22: note = chemically synthesized
  source 1..22: mol_type = other DNA
gtaaatgcaccaatcagcaatc

SEQ ID NO: 153868 - DNA, 22 bp, synthetic construct
  misc_feature 1..22: note = chemically synthesized
  source 1..22: mol_type = other DNA
taaatgcaccaatcagcaatct

SEQ ID NO: 153869 - DNA, 22 bp, synthetic construct
  misc_feature 1..22: note = chemically synthesized
  source 1..22: mol_type = other DNA
tgtctaactcaaggtttgtaaa

SEQ ID NO: 153870 - DNA, 22 bp, synthetic construct
  misc_feature 1..22: note = chemically synthesized
  source 1..22: mol_type = other DNA
actcaaggtttgtaaatgcacc

SEQ ID NO: 153871 - DNA, 22 bp, synthetic construct
  misc_feature 1..22: note = chemically synthesized
  source 1..22: mol_type = other DNA
aaggtttgtaaatgcaccaatc

SEQ ID NO: 153872 - DNA, 22 bp, synthetic construct
  misc_feature 1..22: note = chemically synthesized
  source 1..22: mol_type = other DNA
gtaaatgcaccaatcagtgctc

SEQ ID NO: 153873 - DNA, 22 bp, synthetic construct
  misc_feature 1..22: note = chemically synthesized
  source 1..22: mol_type = other DNA
taaatgcaccaatcagtgctct

SEQ ID NO: 153874 - DNA, 22 bp, synthetic construct
  misc_feature 1..22: note = chemically synthesized
  source 1..22: mol_type = other DNA
tgtgtctagctaatctagtggg

SEQ ID NO: 153875 - DNA, 22 bp, synthetic construct
  misc_feature 1..22: note = chemically synthesized
  source 1..22: mol_type = other DNA
tgtctagctaatctagtgggga

SEQ ID NO: 153876 - DNA, 22 bp, synthetic construct
  misc_feature 1..22: note = chemically synthesized
  source 1..22: mol_type = other DNA
gctaatctagtggggacttgga

SEQ ID NO: 153877 - DNA, 22 bp, synthetic construct
  misc_feature 1..22: note = chemically synthesized
  source 1..22: mol_type = other DNA
atctagtggggacttggagaac

SEQ ID NO: 153878 - DNA, 22 bp, synthetic construct
  misc_feature 1..22: note = chemically synthesized
  source 1..22: mol_type = other DNA
gtggggacttggagaacttttg

SEQ ID NO: 153879 - DNA, 22 bp, synthetic construct
  misc_feature 1..22: note = chemically synthesized
  source 1..22: mol_type = other DNA
ggagaacttttgtgtctagcta

SEQ ID NO: 153880 - DNA, 22 bp, synthetic construct
  misc_feature 1..22: note = chemically synthesized
  source 1..22: mol_type = other DNA
gagaacttttgtgtctagctaa

SEQ ID NO: 153881 - DNA, 22 bp, synthetic construct
  misc_feature 1..22: note = chemically synthesized
  source 1..22: mol_type = other DNA
ttgtgtctagctaaaggattgt

SEQ ID NO: 153882 - DNA, 22 bp, synthetic construct
  misc_feature 1..22: note = chemically synthesized
  source 1..22: mol_type = other DNA
tgtgtctagctaaaggattgta

SEQ ID NO: 153883 - DNA, 22 bp, synthetic construct
  misc_feature 1..22: note = chemically synthesized
  source 1..22: mol_type = other DNA
gtgtctagctaaaggattgtaa

SEQ ID NO: 153884 - DNA, 22 bp, synthetic construct
  misc_feature 1..22: note = chemically synthesized
  source 1..22: mol_type = other DNA
tgtctagctaaaggattgtaaa

SEQ ID NO: 153885 - DNA, 22 bp, synthetic construct
  misc_feature 1..22: note = chemically synthesized
  source 1..22: mol_type = other DNA
gctaaaggattgtaaatgcact

SEQ ID NO: 153886 - DNA, 22 bp, synthetic construct
  misc_feature 1..22: note = chemically synthesized
  source 1..22: mol_type = other DNA
aaggattgtaaatgcactaatc

SEQ ID NO: 153887 - DNA, 22 bp, synthetic construct
  misc_feature 1..22: note = chemically synthesized
  source 1..22: mol_type = other DNA
taaatgcactaatcagcactct

SEQ ID NO: 153888 - DNA, 22 bp, synthetic construct
  misc_feature 1..22: note = chemically synthesized
  source 1..22: mol_type = other DNA
atcagcactctgtgtctagctc

SEQ ID NO: 153889 - DNA, 22 bp, synthetic construct
  misc_feature 1..22: note = chemically synthesized
  source 1..22: mol_type = other DNA
tgtgtctagctcaaggtttgta

SEQ ID NO: 153890 - DNA, 22 bp, synthetic construct
  misc_feature 1..22: note = chemically synthesized
  source 1..22: mol_type = other DNA
tgtctagctcaaggtttgtaaa

SEQ ID NO: 153891 - DNA, 22 bp, synthetic construct
  misc_feature 1..22: note = chemically synthesized
  source 1..22: mol_type = other DNA
gctcaaggtttgtaaatgcacc

SEQ ID NO: 153892 - DNA, 22 bp, synthetic construct
  misc_feature 1..22: note = chemically synthesized
  source 1..22: mol_type = other DNA
aaggtttgtaaatgcaccaatc

SEQ ID NO: 153893 - DNA, 22 bp, synthetic construct
  misc_feature 1..22: note = chemically synthesized
  source 1..22: mol_type = other DNA
gtaaatgcaccaatcagcactc

SEQ ID NO: 153894 - DNA, 22 bp, synthetic construct
  misc_feature 1..22: note = chemically synthesized
  source 1..22: mol_type = other DNA
taaatgcaccaatcagcactct

SEQ ID NO: 153895 - DNA, 22 bp, synthetic construct
  misc_feature 1..22: note = chemically synthesized
  source 1..22: mol_type = other DNA
tgccaaaacggaccaaccagct

SEQ ID NO: 153896 - DNA, 22 bp, synthetic construct
  misc_feature 1..22: note = chemically synthesized
  source 1..22: mol_type = other DNA
ccaaaacggaccaaccagctct

SEQ ID NO: 153897 - DNA, 22 bp, synthetic construct
  misc_feature 1..22: note = chemically synthesized
  source 1..22: mol_type = other DNA
tctgtaaaatgggccaatcagc

SEQ ID NO: 153898 - DNA, 22 bp, synthetic construct
  misc_feature 1..22: note = chemically synthesized
  source 1..22: mol_type = other DNA
tgtaaaatgggccaatcagctc

SEQ ID NO: 153899 - DNA, 22 bp, synthetic construct
  misc_feature 1..22: note = chemically synthesized
  source 1..22: mol_type = other DNA
taaaatgggccaatcagctctc

SEQ ID NO: 153900 - DNA, 22 bp, synthetic construct
  misc_feature 1..22: note = chemically synthesized
  source 1..22: mol_type = other DNA
tctgtaaaatggaccaatcagc

SEQ ID NO: 153901 - DNA, 22 bp, synthetic construct
  misc_feature 1..22: note = chemically synthesized
  source 1..22: mol_type = other DNA
tgtaaaatggaccaatcagcag

SEQ ID NO: 153902 - DNA, 22 bp, synthetic construct
  misc_feature 1..22: note = chemically synthesized
  source 1..22: mol_type = other DNA
taaaatggaccaatcagcagga

SEQ ID NO: 153903 - DNA, 22 bp, synthetic construct
  misc_feature 1..22: note = chemically synthesized
  source 1..22: mol_type = other DNA
ccggagccagctgtgacaactg

SEQ ID NO: 153904 - DNA, 22 bp, synthetic construct
  misc_feature 1..22: note = chemically synthesized
  source 1..22: mol_type = other DNA
tgacaactgacttgggttccct

SEQ ID NO: 153905 - DNA, 22 bp, synthetic construct
  misc_feature 1..22: note = chemically synthesized
  source 1..22: mol_type = other DNA
acttgggttccctaccatgctg

SEQ ID NO: 153906 - DNA, 22 bp, synthetic construct
  misc_feature 1..22: note = chemically synthesized
  source 1..22: mol_type = other DNA
gggttccctaccatgctgtgga

SEQ ID NO: 153907 - DNA, 22 bp, synthetic construct
  misc_feature 1..22: note = chemically synthesized
  source 1..22: mol_type = other DNA
ggttccctaccatgctgtggaa

SEQ ID NO: 153908 - DNA, 22 bp, synthetic construct
  misc_feature 1..22: note = chemically synthesized
  source 1..22: mol_type = other DNA
cctaccatgctgtggaagcttt

SEQ ID NO: 153909 - DNA, 22 bp, synthetic construct
  misc_feature 1..22: note = chemically synthesized
  source 1..22: mol_type = other DNA
ccatgctgtggaagctttgttc

SEQ ID NO: 153910 - DNA, 22 bp, synthetic construct
  misc_feature 1..22: note = chemically synthesized
  source 1..22: mol_type = other DNA
tggaagctttgttcttttattc

SEQ ID NO: 153911 - DNA, 22 bp, synthetic construct
  misc_feature 1..22: note = chemically synthesized
  source 1..22: mol_type = other DNA
tgttcttttattcttcacaata

SEQ ID NO: 153912 - DNA, 22 bp, synthetic construct
  misc_feature 1..22: note = chemically synthesized
  source 1..22: mol_type = other DNA
gttcttttattcttcacaataa

SEQ ID NO: 153913 - DNA, 22 bp, synthetic construct
  misc_feature 1..22: note = chemically synthesized
  source 1..22: mol_type = other DNA
ttcttttattcttcacaataaa

SEQ ID NO: 153914 - DNA, 22 bp, synthetic construct
  misc_feature 1..22: note = chemically synthesized
  source 1..22: mol_type = other DNA
ttttattcttcacaataaatct

SEQ ID NO: 153915 - DNA, 22 bp, synthetic construct
  misc_feature 1..22: note = chemically synthesized
  source 1..22: mol_type = other DNA
ttattcttcacaataaatctta

SEQ ID NO: 153916 - DNA, 22 bp, synthetic construct
  misc_feature 1..22: note = chemically synthesized
  source 1..22: mol_type = other DNA
tattcttcacaataaatcttac

SEQ ID NO: 153917 - DNA, 22 bp, synthetic construct
  misc_feature 1..22: note = chemically synthesized
  source 1..22: mol_type = other DNA
attcttcacaataaatcttact

SEQ ID NO: 153918 - DNA, 22 bp, synthetic construct
  misc_feature 1..22: note = chemically synthesized
  source 1..22: mol_type = other DNA
ttcttcacaataaatcttactg

SEQ ID NO: 153919 - DNA, 22 bp, synthetic construct
  misc_feature 1..22: note = chemically synthesized
  source 1..22: mol_type = other DNA
ttcacaataaatcttactgctg

SEQ ID NO: 153920 - DNA, 22 bp, synthetic construct
  misc_feature 1..22: note = chemically synthesized
  source 1..22: mol_type = other DNA
cacaataaatcttactgctgct

SEQ ID NO: 153921 - DNA, 22 bp, synthetic construct
  misc_feature 1..22: note = chemically synthesized
  source 1..22: mol_type = other DNA
acaataaatcttactgctgctc

SEQ ID NO: 153922 - DNA, 22 bp, synthetic construct
  misc_feature 1..22: note = chemically synthesized
  source 1..22: mol_type = other DNA
actgctgctcactctttggatc

SEQ ID NO: 153923 - DNA, 22 bp, synthetic construct
  misc_feature 1..22: note = chemically synthesized
  source 1..22: mol_type = other DNA
ctgctgctcactctttggatcc

SEQ ID NO: 153924 - DNA, 22 bp, synthetic construct
  misc_feature 1..22: note = chemically synthesized
  source 1..22: mol_type = other DNA
ctgctcactctttggatccgcg

SEQ ID NO: 153925 - DNA, 22 bp, synthetic construct
  misc_feature 1..22: note = chemically synthesized
  source 1..22: mol_type = other DNA
ctcactctttggatccgcgctg

SEQ ID NO: 153926 - DNA, 22 bp, synthetic construct
  misc_feature 1..22: note = chemically synthesized
  source 1..22: mol_type = other DNA
actctttggatccgcgctgcct

SEQ ID NO: 153927 - DNA, 22 bp, synthetic construct
  misc_feature 1..22: note = chemically synthesized
  source 1..22: mol_type = other DNA
tttggatccgcgctgcctttat

SEQ ID NO: 153928 - DNA, 22 bp, synthetic construct
  misc_feature 1..22: note = chemically synthesized
  source 1..22: mol_type = other DNA
tggatccgcgctgcctttatga

SEQ ID NO: 153929 - DNA, 22 bp, synthetic construct
  misc_feature 1..22: note = chemically synthesized
  source 1..22: mol_type = other DNA
ggatccgcgctgcctttatgag

SEQ ID NO: 153930 - DNA, 22 bp, synthetic construct
  misc_feature 1..22: note = chemically synthesized
  source 1..22: mol_type = other DNA
gatccgcgctgcctttatgagc

SEQ ID NO: 153931 - DNA, 22 bp, synthetic construct
  misc_feature 1..22: note = chemically synthesized
  source 1..22: mol_type = other DNA
cctttatgagctgtaacactca

SEQ ID NO: 153932 - DNA, 22 bp, synthetic construct
  misc_feature 1..22: note = chemically synthesized
  source 1..22: mol_type = other DNA
tatgagctgtaacactcactgc

SEQ ID NO: 153933 - DNA, 22 bp, synthetic construct
  misc_feature 1..22: note = chemically synthesized
  source 1..22: mol_type = other DNA
atgagctgtaacactcactgcg

SEQ ID NO: 153934 - DNA, 22 bp, synthetic construct
  misc_feature 1..22: note = chemically synthesized
  source 1..22: mol_type = other DNA
tgagctgtaacactcactgcga

SEQ ID NO: 153935 - DNA, 22 bp, synthetic construct
  misc_feature 1..22: note = chemically synthesized
  source 1..22: mol_type = other DNA
taacactcactgcgaaggtctg

SEQ ID NO: 153936 - DNA, 22 bp, synthetic construct
  misc_feature 1..22: note = chemically synthesized
  source 1..22: mol_type = other DNA
actgcgaaggtctgcggcttca

SEQ ID NO: 153937 - DNA, 22 bp, synthetic construct
  misc_feature 1..22: note = chemically synthesized
  source 1..22: mol_type = other DNA
cgaaggtctgcggcttcacttc

SEQ ID NO: 153938 - DNA, 22 bp, synthetic construct
  misc_feature 1..22: note = chemically synthesized
  source 1..22: mol_type = other DNA
cggcttcacttctgaagccagc

SEQ ID NO: 153939 - DNA, 22 bp, synthetic construct
  misc_feature 1..22: note = chemically synthesized
  source 1..22: mol_type = other DNA
cacttctgaagccagcaagacc

SEQ ID NO: 153940 - DNA, 22 bp, synthetic construct
  misc_feature 1..22: note = chemically synthesized
  source 1..22: mol_type = other DNA
acttctgaagccagcaagacca

SEQ ID NO: 153941 - DNA, 22 bp, synthetic construct
  misc_feature 1..22: note = chemically synthesized
  source 1..22: mol_type = other DNA
ctgaagccagcaagaccacgaa

SEQ ID NO: 153942 - DNA, 22 bp, synthetic construct
  misc_feature 1..22: note = chemically synthesized
  source 1..22: mol_type = other DNA
tgaagccagcaagaccacgaac

SEQ ID NO: 153943 - DNA, 22 bp, synthetic construct
  misc_feature 1..22: note = chemically synthesized
  source 1..22: mol_type = other DNA
aagccagcaagaccacgaaccc

SEQ ID NO: 153944 - DNA, 22 bp, synthetic construct
  misc_feature 1..22: note = chemically synthesized
  source 1..22: mol_type = other DNA
catacgctccgcctttaagagc

SEQ ID NO: 153945 - DNA, 22 bp, synthetic construct
  misc_feature 1..22: note = chemically synthesized
  source 1..22: mol_type = other DNA
cgcctttaagagctgtaacact

SEQ ID NO: 153946 - DNA, 22 bp, synthetic construct
  misc_feature 1..22: note = chemically synthesized
  source 1..22: mol_type = other DNA
taagagctgtaacactccccgt

SEQ ID NO: 153947 - DNA, 22 bp, synthetic construct
  misc_feature 1..22: note = chemically synthesized
  source 1..22: mol_type = other DNA
aagagctgtaacactccccgtg

SEQ ID NO: 153948 - DNA, 22 bp, synthetic construct
  misc_feature 1..22: note = chemically synthesized
  source 1..22: mol_type = other DNA
agagctgtaacactccccgtgg

SEQ ID NO: 153949 - DNA, 22 bp, synthetic construct
  misc_feature 1..22: note = chemically synthesized
  source 1..22: mol_type = other DNA
taacactccccgtgggggtctg

SEQ ID NO: 153950 - DNA, 22 bp, synthetic construct
  misc_feature 1..22: note = chemically synthesized
  source 1..22: mol_type = other DNA
cccgtgggggtctgcagcttca

SEQ ID NO: 153951 - DNA, 22 bp, synthetic construct
  misc_feature 1..22: note = chemically synthesized
  source 1..22: mol_type = other DNA
cagcttcactcctggagccagc

SEQ ID NO: 153952 - DNA, 22 bp, synthetic construct
  misc_feature 1..22: note = chemically synthesized
  source 1..22: mol_type = other DNA
cactcctggagccagcaagacc

SEQ ID NO: 153953 - DNA, 22 bp, synthetic construct
  misc_feature 1..22: note = chemically synthesized
  source 1..22: mol_type = other DNA
actcctggagccagcaagaccg

SEQ ID NO: 153954 - DNA, 22 bp, synthetic construct
  misc_feature 1..22: note = chemically synthesized
  source 1..22: mol_type = other DNA
ctggagccagcaagaccgtgaa

SEQ ID NO: 153955 - DNA, 22 bp, synthetic construct
  misc_feature 1..22: note = chemically synthesized
  source 1..22: mol_type = other DNA
gagccagcaagaccgtgaacac

SEQ ID NO: 153956 - DNA, 22 bp, synthetic construct
  misc_feature 1..22: note = chemically synthesized
  source 1..22: mol_type = other DNA
tggacacatctgaagtaacaaa

SEQ ID NO: 153957 - DNA, 22 bp, synthetic construct
  misc_feature 1..22: note = chemically synthesized
  source 1..22: mol_type = other DNA
gacacatctgaagtaacaaact

SEQ ID NO: 153958 - DNA, 22 bp, synthetic construct
  misc_feature 1..22: note = chemically synthesized
  source 1..22: mol_type = other DNA
aagtaacaaactttggacacac

SEQ ID NO: 153959 - DNA, 22 bp, synthetic construct
  misc_feature 1..22: note = chemically synthesized
  source 1..22: mol_type = other DNA
tggacacaccatcctttgaaca

SEQ ID NO: 153960 - DNA, 22 bp, synthetic construct
  misc_feature 1..22: note = chemically synthesized
  source 1..22: mol_type = other DNA
ggacacaccatcctttgaacac

SEQ ID NO: 153961 - DNA, 22 bp, synthetic construct
  misc_feature 1..22: note = chemically synthesized
  source 1..22: mol_type = other DNA
gacacaccatcctttgaacaca

SEQ ID NO: 153962 - DNA, 22 bp, synthetic construct
  misc_feature 1..22: note = chemically synthesized
  source 1..22: mol_type = other DNA
tgaacacaccatctttaagaat

SEQ ID NO: 153963 - DNA, 22 bp, synthetic construct
  misc_feature 1..22: note = chemically synthesized
  source 1..22: mol_type = other DNA
gaacacaccatctttaagaatt

SEQ ID NO: 153964 - DNA, 22 bp, synthetic construct
  misc_feature 1..22: note = chemically synthesized
  source 1..22: mol_type = other DNA
aacacaccatctttaagaattg

SEQ ID NO: 153965 - DNA, 22 bp, synthetic construct
  misc_feature 1..22: note = chemically synthesized
  source 1..22: mol_type = other DNA
taagaattgtaacactcaccac

SEQ ID NO: 153966 - DNA, 22 bp, synthetic construct
  misc_feature 1..22: note = chemically synthesized
  source 1..22: mol_type = other DNA
aagaattgtaacactcaccacg

SEQ ID NO: 153967 - DNA, 22 bp, synthetic construct
  misc_feature 1..22: note = chemically synthesized
  source 1..22: mol_type = other DNA
agaattgtaacactcaccacga

SEQ ID NO: 153968 - DNA, 22 bp, synthetic construct
  misc_feature 1..22: note = chemically synthesized
  source 1..22: mol_type = other DNA
taacactcaccacgagggttcg

SEQ ID NO: 153969 - DNA, 22 bp, synthetic construct
  misc_feature 1..22: note = chemically synthesized
  source 1..22: mol_type = other DNA
accacgagggttcgcggcttca

SEQ ID NO: 153970 - DNA, 22 bp, synthetic construct
  misc_feature 1..22: note = chemically synthesized
  source 1..22: mol_type = other DNA
gcggcttcattctttaagtcag

SEQ ID NO: 153971 - DNA, 22 bp, synthetic construct
  misc_feature 1..22: note = chemically synthesized
  source 1..22: mol_type = other DNA
cattctttaagtcagcgagacc

SEQ ID NO: 153972 - DNA, 22 bp, synthetic construct
  misc_feature 1..22: note = chemically synthesized
  source 1..22: mol_type = other DNA
attctttaagtcagcgagacca

SEQ ID NO: 153973 - DNA, 22 bp, synthetic construct
  misc_feature 1..22: note = chemically synthesized
  source 1..22: mol_type = other DNA
tttaagtcagcgagaccaagaa

SEQ ID NO: 153974 - DNA, 22 bp, synthetic construct
  misc_feature 1..22: note = chemically synthesized
  source 1..22: mol_type = other DNA
taagtcagcgagaccaagaacc

SEQ ID NO: 153975 - DNA, 22 bp, synthetic construct
  misc_feature 1..22: note = chemically synthesized
  source 1..22: mol_type = other DNA
aagtcagcgagaccaagaaccc

SEQ ID NO: 153976 - DNA, 22 bp, synthetic construct
  misc_feature 1..22: note = chemically synthesized
  source 1..22: mol_type = other DNA
agtcagcgagaccaagaaccca

SEQ ID NO: 153977 - DNA, 22 bp, synthetic construct
  misc_feature 1..22: note = chemically synthesized
  source 1..22: mol_type = other DNA
cggacacagaaggatggacaaa

SEQ ID NO: 153978 - DNA, 22 bp, synthetic construct
  misc_feature 1..22: note = chemically synthesized
  source 1..22: mol_type = other DNA
tcaggaatgcaattaagtccac

SEQ ID NO: 153979 - DNA, 22 bp, synthetic construct
  misc_feature 1..22: note = chemically synthesized
  source 1..22: mol_type = other DNA
agtccaccaacacaaaaattac

SEQ ID NO: 153980 - DNA, 22 bp, synthetic construct
  misc_feature 1..22: note = chemically synthesized
  source 1..22: mol_type = other DNA
catacctagaatcaattttaat

SEQ ID NO: 153981 - DNA, 22 bp, synthetic construct
  misc_feature 1..22: note = chemically synthesized
  source 1..22: mol_type = other DNA
gaatcaattttaataaagaaaa

SEQ ID NO: 153982 - DNA, 22 bp, synthetic construct
  misc_feature 1..22: note = chemically synthesized
  source 1..22: mol_type = other DNA
taataaagaaaacttatttgga

SEQ ID NO: 153983 - DNA, 22 bp, synthetic construct
  misc_feature 1..22: note = chemically synthesized
  source 1..22: mol_type = other DNA
aataaagaaaacttatttggag

SEQ ID NO: 153984 - DNA, 22 bp, synthetic construct
  misc_feature 1..22: note = chemically synthesized
  source 1..22: mol_type = other DNA
ataaagaaaacttatttggagc

SEQ ID NO: 153985 - DNA, 22 bp, synthetic construct
  misc_feature 1..22: note = chemically synthesized
  source 1..22: mol_type = other DNA
atttggagcacagcttattcag

SEQ ID NO: 153986 - DNA, 22 bp, synthetic construct
  misc_feature 1..22: note = chemically synthesized
  source 1..22: mol_type = other DNA
tttggagcacagcttattcagg

SEQ ID NO: 153987 - DNA, 22 bp, synthetic construct
  misc_feature 1..22: note = chemically synthesized
  source 1..22: mol_type = other DNA
ggagcacagcttattcagggca

SEQ ID NO: 153988 - DNA, 22 bp, synthetic construct
  misc_feature 1..22: note = chemically synthesized
  source 1..22: mol_type = other DNA
gagcacagcttattcagggcag

SEQ ID NO: 153989 - DNA, 22 bp, synthetic construct
  misc_feature 1..22: note = chemically synthesized
  source 1..22: mol_type = other DNA
attcagggcagaaaataaaagc

SEQ ID NO: 153990 - DNA, 22 bp, synthetic construct
  misc_feature 1..22: note = chemically synthesized
  source 1..22: mol_type = other DNA
ttcagggcagaaaataaaagct

SEQ ID NO: 153991 - DNA, 22 bp, synthetic construct
  misc_feature 1..22: note = chemically synthesized
  source 1..22: mol_type = other DNA
agggcagaaaataaaagctaat

SEQ ID NO: 153992 - DNA, 22 bp, synthetic construct
  misc_feature 1..22: note = chemically synthesized
  source 1..22: mol_type = other DNA
ataataaaagaggtgcataata

SEQ ID NO: 153993 - DNA, 22 bp, synthetic construct
  misc_feature 1..22: note = chemically synthesized
  source 1..22: mol_type = other DNA
ttaattaaataaccactcattt

SEQ ID NO: 153994 - DNA, 22 bp, synthetic construct
  misc_feature 1..22: note = chemically synthesized
  source 1..22: mol_type = other DNA
aattaaataaccactcatttta

SEQ ID NO: 153995 - DNA, 22 bp, synthetic construct
  misc_feature 1..22: note = chemically synthesized
  source 1..22: mol_type = other DNA
attaaataaccactcattttag

SEQ ID NO: 153996 - DNA, 22 bp, synthetic construct
  misc_feature 1..22: note = chemically synthesized
  source 1..22: mol_type = other DNA
aataaccactcattttagatcc

SEQ ID NO: 153997 - DNA, 22 bp, synthetic construct
  misc_feature 1..22: note = chemically synthesized
  source 1..22: mol_type = other DNA
attttagatccttgatatttga

SEQ ID NO: 153998 - DNA, 22 bp, synthetic construct
  misc_feature 1..22: note = chemically synthesized
  source 1..22: mol_type = other DNA
tagatccttgatatttgaacag

SEQ ID NO: 153999 - DNA, 22 bp, synthetic construct
  misc_feature 1..22: note = chemically synthesized
  source 1..22: mol_type = other DNA
agatccttgatatttgaacaga

SEQ ID NO: 154000 - DNA, 22 bp, synthetic construct
  misc_feature 1..22: note = chemically synthesized
  source 1..22: mol_type = other DNA
gatccttgatatttgaacagaa

SEQ ID NO: 154001 - DNA, 22 bp, synthetic construct
  misc_feature 1..22: note = chemically synthesized
  source 1..22: mol_type = other DNA
gatatttgaacagaatagtata

SEQ ID NO: 154002 - DNA, 22 bp, synthetic construct
  misc_feature 1..22: note = chemically synthesized
  source 1..22: mol_type = other DNA
atatttgaacagaatagtataa

SEQ ID NO: 154003 - DNA, 22 bp, synthetic construct
  misc_feature 1..22: note = chemically synthesized
  source 1..22: mol_type = other DNA
gaacagaatagtataaaaaata

SEQ ID NO: 154004 - DNA, 22 bp, synthetic construct
  misc_feature 1..22: note = chemically synthesized
  source 1..22: mol_type = other DNA
aacagaatagtataaaaaatag

SEQ ID NO: 154005 - DNA, 22 bp, synthetic construct
  misc_feature 1..22: note = chemically synthesized
  source 1..22: mol_type = other DNA
aagagtgcagaaaaaaaggaca

SEQ ID NO: 154006 - DNA, 22 bp, synthetic construct
  misc_feature 1..22: note = chemically synthesized
  source 1..22: mol_type = other DNA
agagtgcagaaaaaaaggacaa

SEQ ID NO: 154007 - DNA, 22 bp, synthetic construct
  misc_feature 1..22: note = chemically synthesized
  source 1..22: mol_type = other DNA
caaaatcttaactggagttcag

SEQ ID NO: 154008 - DNA, 22 bp, synthetic construct
  misc_feature 1..22: note = chemically synthesized
  source 1..22: mol_type = other DNA
aactggagttcaggagagagtg

SEQ ID NO: 154009 - DNA, 22 bp, synthetic construct
  misc_feature 1..22: note = chemically synthesized
  source 1..22: mol_type = other DNA
actggagttcaggagagagtga

SEQ ID NO: 154010 - DNA, 22 bp, synthetic construct
  misc_feature 1..22: note = chemically synthesized
  source 1..22: mol_type = other DNA
gagttcaggagagagtgaaaat

SEQ ID NO: 154011 - DNA, 22 bp, synthetic construct
  misc_feature 1..22: note = chemically synthesized
  source 1..22: mol_type = other DNA
aggagagagtgaaaatagaaca

SEQ ID NO: 154012 - DNA, 22 bp, synthetic construct
  misc_feature 1..22: note = chemically synthesized
  source 1..22: mol_type = other DNA
actagagatcaatacaagacaa

SEQ ID NO: 154013 - DNA, 22 bp, synthetic construct
  misc_feature 1..22: note = chemically synthesized
  source 1..22: mol_type = other DNA
ctagagatcaatacaagacaat

SEQ ID NO: 154014 - DNA, 22 bp, synthetic construct
  misc_feature 1..22: note = chemically synthesized
  source 1..22: mol_type = other DNA
gagatcaatacaagacaatttt

SEQ ID NO: 154015 - DNA, 22 bp, synthetic construct
  misc_feature 1..22: note = chemically synthesized
  source 1..22: mol_type = other DNA
tctgaacaaaagaacacagcag

SEQ ID NO: 154016 - DNA, 22 bp, synthetic construct
  misc_feature 1..22: note = chemically synthesized
  source 1..22: mol_type = other DNA
ctgaacaaaagaacacagcagt

SEQ ID NO: 154017 - DNA, 22 bp, synthetic construct
  misc_feature 1..22: note = chemically synthesized
  source 1..22: mol_type = other DNA
tgaacaaaagaacacagcagtt

SEQ ID NO: 154018 - DNA, 22 bp, synthetic construct
  misc_feature 1..22: note = chemically synthesized
  source 1..22: mol_type = other DNA
aacaaaagaacacagcagttga

SEQ ID NO: 154019 - DNA, 22 bp, synthetic construct
  misc_feature 1..22: note = chemically synthesized
  source 1..22: mol_type = other DNA
aaattgagagtatccacaaaat

SEQ ID NO: 154020 - DNA, 22 bp, synthetic construct
  misc_feature 1..22: note = chemically synthesized
  source 1..22: mol_type = other DNA
agagtatccacaaaatacccag

SEQ ID NO: 154021 - DNA, 22 bp, synthetic construct
  misc_feature 1..22: note = chemically synthesized
  source 1..22: mol_type = other DNA
atggtaagttaagagaatgaaa

SEQ ID NO: 154022 - DNA, 22 bp, synthetic construct
  misc_feature 1..22: note = chemically synthesized
  source 1..22: mol_type = other DNA
agagaatgaaaaaaacaagcca

SEQ ID NO: 154023 - DNA, 22 bp, synthetic construct
  misc_feature 1..22: note = chemically synthesized
  source 1..22: mol_type = other DNA
gcaaaacatattatctgataaa

SEQ ID NO: 154024 - DNA, 22 bp, synthetic construct
  misc_feature 1..22: note = chemically synthesized
  source 1..22: mol_type = other DNA
caaaacatattatctgataaag

SEQ ID NO: 154025 - DNA, 22 bp, synthetic construct
  misc_feature 1..22: note = chemically synthesized
  source 1..22: mol_type = other DNA
tctgataaaggacttgtataca

SEQ ID NO: 154026 - DNA, 22 bp, synthetic construct
  misc_feature 1..22: note = chemically synthesized
  source 1..22: mol_type = other DNA
ataaaggacttgtatacatatt

SEQ ID NO: 154027 - DNA, 22 bp, synthetic construct
  misc_feature 1..22: note = chemically synthesized
  source 1..22: mol_type = other DNA
gtatacatattatacaaagaac

SEQ ID NO: 154028 - DNA, 22 bp, synthetic construct
  misc_feature 1..22: note = chemically synthesized
  source 1..22: mol_type = other DNA
tatacatattatacaaagaact

SEQ ID NO: 154029 - DNA, 22 bp, synthetic construct
  misc_feature 1..22: note = chemically synthesized
  source 1..22: mol_type = other DNA
tacaaagaacttttaaaattct

SEQ ID NO: 154030 - DNA, 22 bp, synthetic construct
  misc_feature 1..22: note = chemically synthesized
  source 1..22: mol_type = other DNA
ttaaaattctacaataaaaaac

SEQ ID NO: 154031 - DNA, 22 bp, synthetic construct
  misc_feature 1..22: note = chemically synthesized
  source 1..22: mol_type = other DNA
taaaattctacaataaaaaaca

SEQ ID NO: 154032 - DNA, 22 bp, synthetic construct
  misc_feature 1..22: note = chemically synthesized
  source 1..22: mol_type = other DNA
aaaattctacaataaaaaacaa

SEQ ID NO: 154033 - DNA, 22 bp, synthetic construct
  misc_feature 1..22: note = chemically synthesized
  source 1..22: mol_type = other DNA
aaattctacaataaaaaacaaa

SEQ ID NO: 154034 - DNA, 22 bp, synthetic construct
  misc_feature 1..22: note = chemically synthesized
  source 1..22: mol_type = other DNA
tacaataaaaaacaaacaatcc

SEQ ID NO: 154035 - DNA, 22 bp, synthetic construct
  misc_feature 1..22: note = chemically synthesized
  source 1..22: mol_type = other DNA
caataaaaaacaaacaatccaa

SEQ ID NO: 154036 - DNA, 22 bp, synthetic construct
  misc_feature 1..22: note = chemically synthesized
  source 1..22: mol_type = other DNA
caaagtgggcaaaagatctgaa

SEQ ID NO: 154037 - DNA, 22 bp, synthetic construct
  misc_feature 1..22: note = chemically synthesized
  source 1..22: mol_type = other DNA
aacagacactttaccaaagaag

SEQ ID NO: 154038 - DNA, 22 bp, synthetic construct
  misc_feature 1..22: note = chemically synthesized
  source 1..22: mol_type = other DNA
taccaaagaagatatatagatt

SEQ ID NO: 154039 - DNA, 22 bp, synthetic construct
  misc_feature 1..22: note = chemically synthesized
  source 1..22: mol_type = other DNA
accaaagaagatatatagattg

SEQ ID NO: 154040 - DNA, 22 bp, synthetic construct
  misc_feature 1..22: note = chemically synthesized
  source 1..22: mol_type = other DNA
ccaaagaagatatatagattgc

SEQ ID NO: 154041 - DNA, 22 bp, synthetic construct
  misc_feature 1..22: note = chemically synthesized
  source 1..22: mol_type = other DNA
caataagcacatgaaaatatac

SEQ ID NO: 154042 - DNA, 22 bp, synthetic construct
  misc_feature 1..22: note = chemically synthesized
  source 1..22: mol_type = other DNA
agtaacacatgtcattaagaaa

SEQ ID NO: 154043 - DNA, 22 bp, synthetic construct
  misc_feature 1..22: note = chemically synthesized
  source 1..22: mol_type = other DNA
agaaactgcacattaaaacaag

SEQ ID NO: 154044 - DNA, 22 bp, synthetic construct
  misc_feature 1..22: note = chemically synthesized
  source 1..22: mol_type = other DNA
cacattaaaacaagaagatacc

SEQ ID NO: 154045 - DNA, 22 bp, synthetic construct
  misc_feature 1..22: note = chemically synthesized
  source 1..22: mol_type = other DNA
aaacaagaagataccaaccact

SEQ ID NO: 154046 - DNA, 22 bp, synthetic construct
  misc_feature 1..22: note = chemically synthesized
  source 1..22: mol_type = other DNA
cacacatattagaaggccaaat

SEQ ID NO: 154047 - DNA, 22 bp, synthetic construct
  misc_feature 1..22: note = chemically synthesized
  source 1..22: mol_type = other DNA
gaaggccaaattccaaaatact

SEQ ID NO: 154048 - DNA, 22 bp, synthetic construct
  misc_feature 1..22: note = chemically synthesized
  source 1..22: mol_type = other DNA
caaaatactgacatccaccaaa

SEQ ID NO: 154049 - DNA, 22 bp, synthetic construct
  misc_feature 1..22: note = chemically synthesized
  source 1..22: mol_type = other DNA
acatccaccaaacactggcaac

SEQ ID NO: 154050 - DNA, 22 bp, synthetic construct
  misc_feature 1..22: note = chemically synthesized
  source 1..22: mol_type = other DNA
gcaacgaagtggagcaacagta

SEQ ID NO: 154051 - DNA, 22 bp, synthetic construct
  misc_feature 1..22: note = chemically synthesized
  source 1..22: mol_type = other DNA
tcacttattgcttgtagggatg

SEQ ID NO: 154052 - DNA, 22 bp, synthetic construct
  misc_feature 1..22: note = chemically synthesized
  source 1..22: mol_type = other DNA
acttattgcttgtagggatgag

SEQ ID NO: 154053 - DNA, 22 bp, synthetic construct
  misc_feature 1..22: note = chemically synthesized
  source 1..22: mol_type = other DNA
attgcttgtagggatgagaaat

SEQ ID NO: 154054 - DNA, 22 bp, synthetic construct
  misc_feature 1..22: note = chemically synthesized
  source 1..22: mol_type = other DNA
ttgcttgtagggatgagaaata

SEQ ID NO: 154055 - DNA, 22 bp, synthetic construct
  misc_feature 1..22: note = chemically synthesized
  source 1..22: mol_type = other DNA
cttgtagggatgagaaatagtg

SEQ ID NO: 154056 - DNA, 22 bp, synthetic construct
  misc_feature 1..22: note = chemically synthesized
  source 1..22: mol_type = other DNA
gtagggatgagaaatagtgcag

SEQ ID NO: 154057 - DNA, 22 bp, synthetic construct
  misc_feature 1..22: note = chemically synthesized
  source 1..22: mol_type = other DNA
tagggatgagaaatagtgcagc

SEQ ID NO: 154058 - DNA, 22 bp, synthetic construct
  misc_feature 1..22: note = chemically synthesized
  source 1..22: mol_type = other DNA
gaagacagtttacagtttctta

SEQ ID NO: 154059 - DNA, 22 bp, synthetic construct
  misc_feature 1..22: note = chemically synthesized
  source 1..22: mol_type = other DNA
acagtttcttacaaaactagtc

SEQ ID NO: 154060 - DNA, 22 bp, synthetic construct
  misc_feature 1..22: note = chemically synthesized
  source 1..22: mol_type = other DNA
cagtttcttacaaaactagtct

SEQ ID NO: 154061 - DNA, 22 bp, synthetic construct
  misc_feature 1..22: note = chemically synthesized
  source 1..22: mol_type = other DNA
cttacaaaactagtcttttcat

SEQ ID NO: 154062 - DNA, 22 bp, synthetic construct
  misc_feature 1..22: note = chemically synthesized
  source 1..22: mol_type = other DNA
ttacaaaactagtcttttcatg

SEQ ID NO: 154063 - DNA, 22 bp, synthetic construct
  misc_feature 1..22: note = chemically synthesized
  source 1..22: mol_type = other DNA
acaaaactagtcttttcatgtg

SEQ ID NO: 154064 - DNA, 22 bp, synthetic construct
  misc_feature 1..22: note = chemically synthesized
  source 1..22: mol_type = other DNA
caaaactagtcttttcatgtga

SEQ ID NO: 154065 - DNA, 22 bp, synthetic construct
  misc_feature 1..22: note = chemically synthesized
  source 1..22: mol_type = other DNA
gtcttttcatgtgacccaacaa

SEQ ID NO: 154066 - DNA, 22 bp, synthetic construct
  misc_feature 1..22: note = chemically synthesized
  source 1..22: mol_type = other DNA
ttcatgtgacccaacaatcaca

SEQ ID NO: 154067 - DNA, 22 bp, synthetic construct
  misc_feature 1..22: note = chemically synthesized
  source 1..22: mol_type = other DNA
tcatgtgacccaacaatcacac

SEQ ID NO: 154068 - DNA, 22 bp, synthetic construct
  misc_feature 1..22: note = chemically synthesized
  source 1..22: mol_type = other DNA
catgtgacccaacaatcacact

SEQ ID NO: 154069 - DNA, 22 bp, synthetic construct
  misc_feature 1..22: note = chemically synthesized
  source 1..22: mol_type = other DNA
atgtgacccaacaatcacactc

SEQ ID NO: 154070 - DNA, 22 bp, synthetic construct
  misc_feature 1..22: note = chemically synthesized
  source 1..22: mol_type = other DNA
ctatgtatttacccaaatgagt

SEQ ID NO: 154071 - DNA, 22 bp, synthetic construct
  misc_feature 1..22: note = chemically synthesized
  source 1..22: mol_type = other DNA
tgtatttacccaaatgagtcaa

SEQ ID NO: 154072 - DNA, 22 bp, synthetic construct
  misc_feature 1..22: note = chemically synthesized
  source 1..22: mol_type = other DNA
acccaaatgagtcaaaaattta

SEQ ID NO: 154073 - DNA, 22 bp, synthetic construct
  misc_feature 1..22: note = chemically synthesized
  source 1..22: mol_type = other DNA
cccaaatgagtcaaaaatttat

SEQ ID NO: 154074 - DNA, 22 bp, synthetic construct
  misc_feature 1..22: note = chemically synthesized
  source 1..22: mol_type = other DNA
atgtccacacacagacatgaac

SEQ ID NO: 154075 - DNA, 22 bp, synthetic construct
  misc_feature 1..22: note = chemically synthesized
  source 1..22: mol_type = other DNA
tgtccacacacagacatgaact

SEQ ID NO: 154076 - DNA, 22 bp, synthetic construct
  misc_feature 1..22: note = chemically synthesized
  source 1..22: mol_type = other DNA
accaaggtttataggaacttta

SEQ ID NO: 154077 - DNA, 22 bp, synthetic construct
  misc_feature 1..22: note = chemically synthesized
  source 1..22: mol_type = other DNA
ataggaactttactcataattg

SEQ ID NO: 154078 - DNA, 22 bp, synthetic construct
  misc_feature 1..22: note = chemically synthesized
  source 1..22: mol_type = other DNA
taggaactttactcataattgc

SEQ ID NO: 154079 - DNA, 22 bp, synthetic construct
  misc_feature 1..22: note = chemically synthesized
  source 1..22: mol_type = other DNA
tactcataattgccaaaagttg

SEQ ID NO: 154080 - DNA, 22 bp, synthetic construct
  misc_feature 1..22: note = chemically synthesized
  source 1..22: mol_type = other DNA
actcataattgccaaaagttga

SEQ ID NO: 154081 - DNA, 22 bp, synthetic construct
  misc_feature 1..22: note = chemically synthesized
  source 1..22: mol_type = other DNA
ctcataattgccaaaagttgaa

SEQ ID NO: 154082 - DNA, 22 bp, synthetic construct
  misc_feature 1..22: note = chemically synthesized
  source 1..22: mol_type = other DNA
ataattgccaaaagttgaaagt

SEQ ID NO: 154083 - DNA, 22 bp, synthetic construct
  misc_feature 1..22: note = chemically synthesized
  source 1..22: mol_type = other DNA
ccaaaagttgaaagtaaccaag

SEQ ID NO: 154084 - DNA, 22 bp, synthetic construct
  misc_feature 1..22: note = chemically synthesized
  source 1..22: mol_type = other DNA
aaagtaaccaagatgaatggat

SEQ ID NO: 154085 - DNA, 22 bp, synthetic construct
  misc_feature 1..22: note = chemically synthesized
  source 1..22: mol_type = other DNA
tggaacatccataggatagaat

SEQ ID NO: 154086 - DNA, 22 bp, synthetic construct
  misc_feature 1..22: note = chemically synthesized
  source 1..22: mol_type = other DNA
ttcagtgatataaataaaggtc

SEQ ID NO: 154087 - DNA, 22 bp, synthetic construct
  misc_feature 1..22: note = chemically synthesized
  source 1..22: mol_type = other DNA
agtgatataaataaaggtctat

SEQ ID NO: 154088 - DNA, 22 bp, synthetic construct
  misc_feature 1..22: note = chemically synthesized
  source 1..22: mol_type = other DNA
tcaagctgtgaaaagacataaa

SEQ ID NO: 154089 - DNA, 22 bp, synthetic construct
  misc_feature 1..22: note = chemically synthesized
  source 1..22: mol_type = other DNA
tgaaaagacataaagagcttta

SEQ ID NO: 154090 - DNA, 22 bp, synthetic construct
  misc_feature 1..22: note = chemically synthesized
  source 1..22: mol_type = other DNA
taattgtatattgcttaattca

SEQ ID NO: 154091 - DNA, 22 bp, synthetic construct
  misc_feature 1..22: note = chemically synthesized
  source 1..22: mol_type = other DNA
aattgtatattgcttaattcat

SEQ ID NO: 154092 - DNA, 22 bp, synthetic construct
  misc_feature 1..22: note = chemically synthesized
  source 1..22: mol_type = other DNA
attgtatattgcttaattcatt

SEQ ID NO: 154093 - DNA, 22 bp, synthetic construct
  misc_feature 1..22: note = chemically synthesized
  source 1..22: mol_type = other DNA
tatattgcttaattcattttct

SEQ ID NO: 154094 - DNA, 22 bp, synthetic construct
  misc_feature 1..22: note = chemically synthesized
  source 1..22: mol_type = other DNA
cttaattcattttctttaatta

SEQ ID NO: 154095 - DNA, 22 bp, synthetic construct
  misc_feature 1..22: note = chemically synthesized
  source 1..22: mol_type = other DNA
aattcattttctttaattatag

SEQ ID NO: 154096 - DNA, 22 bp, synthetic construct
  misc_feature 1..22: note = chemically synthesized
  source 1..22: mol_type = other DNA
attcattttctttaattatagt

SEQ ID NO: 154097 - DNA, 22 bp, synthetic construct
  misc_feature 1..22: note = chemically synthesized
  source 1..22: mol_type = other DNA
attttctttaattatagtcatc

SEQ ID NO: 154098 - DNA, 22 bp, synthetic construct
  misc_feature 1..22: note = chemically synthesized
  source 1..22: mol_type = other DNA
tctttaattatagtcatcattc

SEQ ID NO: 154099 - DNA, 22 bp, synthetic construct
  misc_feature 1..22: note = chemically synthesized
  source 1..22: mol_type = other DNA
ctttaattatagtcatcattct

SEQ ID NO: 154100 - DNA, 22 bp, synthetic construct
  misc_feature 1..22: note = chemically synthesized
  source 1..22: mol_type = other DNA
tttaattatagtcatcattctc

SEQ ID NO: 154101 - DNA, 22 bp, synthetic construct
  misc_feature 1..22: note = chemically synthesized
  source 1..22: mol_type = other DNA
taattatagtcatcattctcta

SEQ ID NO: 154102 - DNA, 22 bp, synthetic construct
  misc_feature 1..22: note = chemically synthesized
  source 1..22: mol_type = other DNA
aattatagtcatcattctctac

SEQ ID NO: 154103 - DNA, 22 bp, synthetic construct
  misc_feature 1..22: note = chemically synthesized
  source 1..22: mol_type = other DNA
attatagtcatcattctctaca

SEQ ID NO: 154104 - DNA, 22 bp, synthetic construct
  misc_feature 1..22: note = chemically synthesized
  source 1..22: mol_type = other DNA
tagtcatcattctctacatatt

SEQ ID NO: 154105 - DNA, 22 bp, synthetic construct
  misc_feature 1..22: note = chemically synthesized
  source 1..22: mol_type = other DNA
tctacatattactccattaacc

SEQ ID NO: 154106 - DNA, 22 bp, synthetic construct
  misc_feature 1..22: note = chemically synthesized
  source 1..22: mol_type = other DNA
tacatattactccattaaccta

SEQ ID NO: 154107 - DNA, 22 bp, synthetic construct
  misc_feature 1..22: note = chemically synthesized
  source 1..22: mol_type = other DNA
catattactccattaacctatt

SEQ ID NO: 154108 - DNA, 22 bp, synthetic construct
  misc_feature 1..22: note = chemically synthesized
  source 1..22: mol_type = other DNA
ctccattaacctattttatctt

SEQ ID NO: 154109 - DNA, 22 bp, synthetic construct
  misc_feature 1..22: note = chemically synthesized
  source 1..22: mol_type = other DNA
cattaacctattttatcttgct

SEQ ID NO: 154110 - DNA, 22 bp, synthetic construct
  misc_feature 1..22: note = chemically synthesized
  source 1..22: mol_type = other DNA
acctattttatcttgctgttga

SEQ ID NO: 154111 - DNA, 22 bp, synthetic construct
  misc_feature 1..22: note = chemically synthesized
  source 1..22: mol_type = other DNA
ttttatcttgctgttgagaaac

SEQ ID NO: 154112 - DNA, 22 bp, synthetic construct
  misc_feature 1..22: note = chemically synthesized
  source 1..22: mol_type = other DNA
tatcttgctgttgagaaacttc

SEQ ID NO: 154113 - DNA, 22 bp, synthetic construct
  misc_feature 1..22: note = chemically synthesized
  source 1..22: mol_type = other DNA
atcttgctgttgagaaacttcc

SEQ ID NO: 154114 - DNA, 22 bp, synthetic construct
  misc_feature 1..22: note = chemically synthesized
  source 1..22: mol_type = other DNA
tcttgctgttgagaaacttcca

SEQ ID NO: 154115 - DNA, 22 bp, synthetic construct
  misc_feature 1..22: note = chemically synthesized
  source 1..22: mol_type = other DNA
gctgttgagaaacttccattcc

SEQ ID NO: 154116 - DNA, 22 bp, synthetic construct
  misc_feature 1..22: note = chemically synthesized
  source 1..22: mol_type = other DNA
ctgttgagaaacttccattcct

SEQ ID NO: 154117 - DNA, 22 bp, synthetic construct
  misc_feature 1..22: note = chemically synthesized
  source 1..22: mol_type = other DNA
ttgagaaacttccattcctata

SEQ ID NO: 154118 - DNA, 22 bp, synthetic construct
  misc_feature 1..22: note = chemically synthesized
  source 1..22: mol_type = other DNA
agaaacttccattcctatagtc

SEQ ID NO: 154119 - DNA, 22 bp, synthetic construct
  misc_feature 1..22: note = chemically synthesized
  source 1..22: mol_type = other DNA
ccattcctatagtctttcatat

SEQ ID NO: 154120 - DNA, 22 bp, synthetic construct
  misc_feature 1..22: note = chemically synthesized
  source 1..22: mol_type = other DNA
cattcctatagtctttcatatc

SEQ ID NO: 154121 - DNA, 22 bp, synthetic construct
  misc_feature 1..22: note = chemically synthesized
  source 1..22: mol_type = other DNA
ctatagtctttcatatccttct

SEQ ID NO: 154122 - DNA, 22 bp, synthetic construct
  misc_feature 1..22: note = chemically synthesized
  source 1..22: mol_type = other DNA
tagtctttcatatccttctgtt

SEQ ID NO: 154123 - DNA, 22 bp, synthetic construct
  misc_feature 1..22: note = chemically synthesized
  source 1..22: mol_type = other DNA
tcatatccttctgttctgatta

SEQ ID NO: 154124 - DNA, 22 bp, synthetic construct
  misc_feature 1..22: note = chemically synthesized
  source 1..22: mol_type = other DNA
catatccttctgttctgattat

SEQ ID NO: 154125 - DNA, 22 bp, synthetic construct
  misc_feature 1..22: note = chemically synthesized
  source 1..22: mol_type = other DNA
atatccttctgttctgattatt

SEQ ID NO: 154126 - DNA, 22 bp, synthetic construct
  misc_feature 1..22: note = chemically synthesized
  source 1..22: mol_type = other DNA
ctgttctgattattattcctca

SEQ ID NO: 154127 - DNA, 22 bp, synthetic construct
  misc_feature 1..22: note = chemically synthesized
  source 1..22: mol_type = other DNA
tgttctgattattattcctcaa

SEQ ID NO: 154128 - DNA, 22 bp, synthetic construct
  misc_feature 1..22: note = chemically synthesized
  source 1..22: mol_type = other DNA
ttctgattattattcctcaaac

SEQ ID NO: 154129 - DNA, 22 bp, synthetic construct
  misc_feature 1..22: note = chemically synthesized
  source 1..22: mol_type = other DNA
tgattattattcctcaaacaaa

SEQ ID NO: 154130 - DNA, 22 bp, synthetic construct
  misc_feature 1..22: note = chemically synthesized
  source 1..22: mol_type = other DNA
attattattcctcaaacaaata

SEQ ID NO: 154131 - DNA, 22 bp, synthetic construct
  misc_feature 1..22: note = chemically synthesized
  source 1..22: mol_type = other DNA
ttattcctcaaacaaatataga

SEQ ID NO: 154132 - DNA, 22 bp, synthetic construct
  misc_feature 1..22: note = chemically synthesized
  source 1..22: mol_type = other DNA
ttcctcaaacaaatatagatat

SEQ ID NO: 154133 - DNA, 22 bp, synthetic construct
  misc_feature 1..22: note = chemically synthesized
  source 1..22: mol_type = other DNA
ctcaaacaaatatagatattca

SEQ ID NO: 154134 - DNA, 22 bp, synthetic construct
  misc_feature 1..22: note = chemically synthesized
  source 1..22: mol_type = other DNA
aaacaaatatagatattcaata

SEQ ID NO: 154135 - DNA, 22 bp, synthetic construct
  misc_feature 1..22: note = chemically synthesized
  source 1..22: mol_type = other DNA
aataatagacaaatagtgaata

SEQ ID NO: 154136 - DNA, 22 bp, synthetic construct
  misc_feature 1..22: note = chemically synthesized
  source 1..22: mol_type = other DNA
tttgacttagtttcagacagct

SEQ ID NO: 154137 - DNA, 22 bp, synthetic construct
  misc_feature 1..22: note = chemically synthesized
  source 1..22: mol_type = other DNA
tgacttagtttcagacagctat

SEQ ID NO: 154138 - DNA, 22 bp, synthetic construct
  misc_feature 1..22: note = chemically synthesized
  source 1..22: mol_type = other DNA
gacttagtttcagacagctatt

SEQ ID NO: 154139 - DNA, 22 bp, synthetic construct
  misc_feature 1..22: note = chemically synthesized
  source 1..22: mol_type = other DNA
acttagtttcagacagctattg

SEQ ID NO: 154140 - DNA, 22 bp, synthetic construct
  misc_feature 1..22: note = chemically synthesized
  source 1..22: mol_type = other DNA
agtttcagacagctattgcata

SEQ ID NO: 154141 - DNA, 22 bp, synthetic construct
  misc_feature 1..22: note = chemically synthesized
  source 1..22: mol_type = other DNA
gtttcagacagctattgcatag

SEQ ID NO: 154142 - DNA, 22 bp, synthetic construct
  misc_feature 1..22: note = chemically synthesized
  source 1..22: mol_type = other DNA
cagacagctattgcatagaatg

SEQ ID NO: 154143 - DNA, 22 bp, synthetic construct
  misc_feature 1..22: note = chemically synthesized
  source 1..22: mol_type = other DNA
agacagctattgcatagaatga

SEQ ID NO: 154144 - DNA, 22 bp, synthetic construct
  misc_feature 1..22: note = chemically synthesized
  source 1..22: mol_type = other DNA
ttgcatagaatgaaatagatta

SEQ ID NO: 154145 - DNA, 22 bp, synthetic construct
  misc_feature 1..22: note = chemically synthesized
  source 1..22: mol_type = other DNA
catagaatgaaatagattaata

SEQ ID NO: 154146 - DNA, 22 bp, synthetic construct
  misc_feature 1..22: note = chemically synthesized
  source 1..22: mol_type = other DNA
atatttaataacaggtaatgtt

SEQ ID NO: 154147 - DNA, 22 bp, synthetic construct
  misc_feature 1..22: note = chemically synthesized
  source 1..22: mol_type = other DNA
aataacaggtaatgttatgatt

SEQ ID NO: 154148 - DNA, 22 bp, synthetic construct
  misc_feature 1..22: note = chemically synthesized
  source 1..22: mol_type = other DNA
ataacaggtaatgttatgattt

SEQ ID NO: 154149 - DNA, 22 bp, synthetic construct
  misc_feature 1..22: note = chemically synthesized
  source 1..22: mol_type = other DNA
tgatttattaaaaataagatga

SEQ ID NO: 154150 - DNA, 22 bp, synthetic construct
  misc_feature 1..22: note = chemically synthesized
  source 1..22: mol_type = other DNA
attaaaaataagatgataaata

SEQ ID NO: 154151 - DNA, 22 bp, synthetic construct
  misc_feature 1..22: note = chemically synthesized
  source 1..22: mol_type = other DNA
ttaaaaataagatgataaataa

SEQ ID NO: 154152 - DNA, 22 bp, synthetic construct
  misc_feature 1..22: note = chemically synthesized
  source 1..22: mol_type = other DNA
aaaataagatgataaataaaag

SEQ ID NO: 154153 - DNA, 22 bp, synthetic construct
  misc_feature 1..22: note = chemically synthesized
  source 1..22: mol_type = other DNA
agtatcttcccatggagataac

SEQ ID NO: 154154 - DNA, 22 bp, synthetic construct
  misc_feature 1..22: note = chemically synthesized
  source 1..22: mol_type = other DNA
gtatcttcccatggagataaca

SEQ ID NO: 154155 - DNA, 22 bp, synthetic construct
  misc_feature 1..22: note = chemically synthesized
  source 1..22: mol_type = other DNA
cccatggagataacacacttag

SEQ ID NO: 154156 - DNA, 22 bp, synthetic construct
  misc_feature 1..22: note = chemically synthesized
  source 1..22: mol_type = other DNA
ccatggagataacacacttaga

SEQ ID NO: 154157 - DNA, 22 bp, synthetic construct
  misc_feature 1..22: note = chemically synthesized
  source 1..22: mol_type = other DNA
agatacaggtttcatgtcactt

SEQ ID NO: 154158 - DNA, 22 bp, synthetic construct
  misc_feature 1..22: note = chemically synthesized
  source 1..22: mol_type = other DNA
gatacaggtttcatgtcacttt

SEQ ID NO: 154159 - DNA, 22 bp, synthetic construct
  misc_feature 1..22: note = chemically synthesized
  source 1..22: mol_type = other DNA
catgtcactttggacatgagta

SEQ ID NO: 154160 - DNA, 22 bp, synthetic construct
  misc_feature 1..22: note = chemically synthesized
  source 1..22: mol_type = other DNA
atgtcactttggacatgagtaa

SEQ ID NO: 154161 - DNA, 22 bp, synthetic construct
  misc_feature 1..22: note = chemically synthesized
  source 1..22: mol_type = other DNA
tggacatgagtaaagaggagta

SEQ ID NO: 154162 - DNA, 22 bp, synthetic construct
  misc_feature 1..22: note = chemically synthesized
  source 1..22: mol_type = other DNA
ggacatgagtaaagaggagtaa

SEQ ID NO: 154163 - DNA, 22 bp, synthetic construct
  misc_feature 1..22: note = chemically synthesized
  source 1..22: mol_type = other DNA
gacatgagtaaagaggagtaaa

SEQ ID NO: 154164 - DNA, 22 bp, synthetic construct
  misc_feature 1..22: note = chemically synthesized
  source 1..22: mol_type = other DNA
actcccaaatcttgatcacatt

SEQ ID NO: 154165 - DNA, 22 bp, synthetic construct
  misc_feature 1..22: note = chemically synthesized
  source 1..22: mol_type = other DNA
ccaaatcttgatcacattgagt

SEQ ID NO: 154166 - DNA, 22 bp, synthetic construct
  misc_feature 1..22: note = chemically synthesized
  source 1..22: mol_type = other DNA
gatcacattgagtatcaaagga

SEQ ID NO: 154167 - DNA, 22 bp, synthetic construct
  misc_feature 1..22: note = chemically synthesized
  source 1..22: mol_type = other DNA
atcacattgagtatcaaaggaa

SEQ ID NO: 154168 - DNA, 22 bp, synthetic construct
  misc_feature 1..22: note = chemically synthesized
  source 1..22: mol_type = other DNA
agtatcaaaggaaggaagaaga

SEQ ID NO: 154169 - DNA, 22 bp, synthetic construct
  misc_feature 1..22: note = chemically synthesized
  source 1..22: mol_type = other DNA
ttaatggtggcattaaatatca

SEQ ID NO: 154170 - DNA, 22 bp, synthetic construct
  misc_feature 1..22: note = chemically synthesized
  source 1..22: mol_type = other DNA
atggtggcattaaatatcattt

SEQ ID NO: 154171 - DNA, 22 bp, synthetic construct
  misc_feature 1..22: note = chemically synthesized
  source 1..22: mol_type = other DNA
aatatcatttattattggatgt

SEQ ID NO: 154172 - DNA, 22 bp, synthetic construct
  misc_feature 1..22: note = chemically synthesized
  source 1..22: mol_type = other DNA
attattggatgtgttattggca

SEQ ID NO: 154173 - DNA, 22 bp, synthetic construct
  misc_feature 1..22: note = chemically synthesized
  source 1..22: mol_type = other DNA
ttattggatgtgttattggcat

SEQ ID NO: 154174 - DNA, 22 bp, synthetic construct
  misc_feature 1..22: note = chemically synthesized
  source 1..22: mol_type = other DNA
ttggatgtgttattggcattgt

SEQ ID NO: 154175 - DNA, 22 bp, synthetic construct
  misc_feature 1..22: note = chemically synthesized
  source 1..22: mol_type = other DNA
gatgtgttattggcattgtatt

SEQ ID NO: 154176 - DNA, 22 bp, synthetic construct
  misc_feature 1..22: note = chemically synthesized
  source 1..22: mol_type = other DNA
ttggcattgtattggcatgttt

SEQ ID NO: 154177 - DNA, 22 bp, synthetic construct
  misc_feature 1..22: note = chemically synthesized
  source 1..22: mol_type = other DNA
gcattgtattggcatgttttca

SEQ ID NO: 154178 - DNA, 22 bp, synthetic construct
  misc_feature 1..22: note = chemically synthesized
  source 1..22: mol_type = other DNA
tattggcatgttttcacactgc

SEQ ID NO: 154179 - DNA, 22 bp, synthetic construct
  misc_feature 1..22: note = chemically synthesized
  source 1..22: mol_type = other DNA
gcatgttttcacactgctgtaa

SEQ ID NO: 154180 - DNA, 22 bp, synthetic construct
  misc_feature 1..22: note = chemically synthesized
  source 1..22: mol_type = other DNA
tcacactgctgtaaaaaaatac

SEQ ID NO: 154181 - DNA, 22 bp, synthetic construct
  misc_feature 1..22: note = chemically synthesized
  source 1..22: mol_type = other DNA
cacactgctgtaaaaaaatacc

SEQ ID NO: 154182 - DNA, 22 bp, synthetic construct
  misc_feature 1..22: note = chemically synthesized
  source 1..22: mol_type = other DNA
acactgctgtaaaaaaatacct

SEQ ID NO: 154183 - DNA, 22 bp, synthetic construct
  misc_feature 1..22: note = chemically synthesized
  source 1..22: mol_type = other DNA
ctgtaaaaaaatacctgagact

SEQ ID NO: 154184 - DNA, 22 bp, synthetic construct
  misc_feature 1..22: note = chemically synthesized
  source 1..22: mol_type = other DNA
taaaaaaatacctgagactggg

SEQ ID NO: 154185 - DNA, 22 bp, synthetic construct
  misc_feature 1..22: note = chemically synthesized
  source 1..22: mol_type = other DNA
agactgggtaatttataaagaa

SEQ ID NO: 154186 - DNA, 22 bp, synthetic construct
  misc_feature 1..22: note = chemically synthesized
  source 1..22: mol_type = other DNA
ggtaatttataaagaacagagg

SEQ ID NO: 154187 - DNA, 22 bp, synthetic construct
  misc_feature 1..22: note = chemically synthesized
  source 1..22: mol_type = other DNA
ataaagaacagaggtttaattg

SEQ ID NO: 154188 - DNA, 22 bp, synthetic construct
  misc_feature 1..22: note = chemically synthesized
  source 1..22: mol_type = other DNA
taaagaacagaggtttaattgg

SEQ ID NO: 154189 - DNA, 22 bp, synthetic construct
  misc_feature 1..22: note = chemically synthesized
  source 1..22: mol_type = other DNA
aattggctcaaagttcttcagg

SEQ ID NO: 154190 - DNA, 22 bp, synthetic construct
  misc_feature 1..22: note = chemically synthesized
  source 1..22: mol_type = other DNA
attggctcaaagttcttcaggc

SEQ ID NO: 154191 - DNA, 22 bp, synthetic construct
  misc_feature 1..22: note = chemically synthesized
  source 1..22: mol_type = other DNA
gctcaaagttcttcaggctgta

SEQ ID NO: 154192 - DNA, 22 bp, synthetic construct
  misc_feature 1..22: note = chemically synthesized
  source 1..22: mol_type = other DNA
aaagttcttcaggctgtacaag

SEQ ID NO: 154193 - DNA, 22 bp, synthetic construct
  misc_feature 1..22: note = chemically synthesized
  source 1..22: mol_type = other DNA
ttcaggctgtacaagaagcatg

SEQ ID NO: 154194 - DNA, 22 bp, synthetic construct
  misc_feature 1..22: note = chemically synthesized
  source 1..22: mol_type = other DNA
caggctgtacaagaagcatggc

SEQ ID NO: 154195 - DNA, 22 bp, synthetic construct
  misc_feature 1..22: note = chemically synthesized
  source 1..22: mol_type = other DNA
aggctgtacaagaagcatggca

SEQ ID NO: 154196 - DNA, 22 bp, synthetic construct
  misc_feature 1..22: note = chemically synthesized
  source 1..22: mol_type = other DNA
tacaagaagcatggcagcatct

SEQ ID NO: 154197 - DNA, 22 bp, synthetic construct
  misc_feature 1..22: note = chemically synthesized
  source 1..22: mol_type = other DNA
ctcagcttctagggagacctca

SEQ ID NO: 154198 - DNA, 22 bp, synthetic construct
  misc_feature 1..22: note = chemically synthesized
  source 1..22: mol_type = other DNA
agcttctagggagacctcaaga

SEQ ID NO: 154199 - DNA, 22 bp, synthetic construct
  misc_feature 1..22: note = chemically synthesized
  source 1..22: mol_type = other DNA
ctagggagacctcaagaaactt

SEQ ID NO: 154200 - DNA, 22 bp, synthetic construct
  misc_feature 1..22: note = chemically synthesized
  source 1..22: mol_type = other DNA
tagggagacctcaagaaactta

SEQ ID NO: 154201 - DNA, 22 bp, synthetic construct
  misc_feature 1..22: note = chemically synthesized
  source 1..22: mol_type = other DNA
gggagacctcaagaaacttaca

SEQ ID NO: 154202 - DNA, 22 bp, synthetic construct
  misc_feature 1..22: note = chemically synthesized
  source 1..22: mol_type = other DNA
aagaaacttacaatcatggcag

SEQ ID NO: 154203 - DNA, 22 bp, synthetic construct
  misc_feature 1..22: note = chemically synthesized
  source 1..22: mol_type = other DNA
acaatcatggcagaagacaaag

SEQ ID NO: 154204 - DNA, 22 bp, synthetic construct
  misc_feature 1..22: note = chemically synthesized
  source 1..22: mol_type = other DNA
caatcatggcagaagacaaagc

SEQ ID NO: 154205 - DNA, 22 bp, synthetic construct
  misc_feature 1..22: note = chemically synthesized
  source 1..22: mol_type = other DNA
cacatggccaggacagggagaa

SEQ ID NO: 154206 - DNA, 22 bp, synthetic construct
  misc_feature 1..22: note = chemically synthesized
  source 1..22: mol_type = other DNA
acatggccaggacagggagaag

SEQ ID NO: 154207 - DNA, 22 bp, synthetic construct
  misc_feature 1..22: note = chemically synthesized
  source 1..22: mol_type = other DNA
cacactttcaaacaaccagcct

SEQ ID NO: 154208 - DNA, 22 bp, synthetic construct
  misc_feature 1..22: note = chemically synthesized
  source 1..22: mol_type = other DNA
tcaaacaaccagcctcttgaga

SEQ ID NO: 154209 - DNA, 22 bp, synthetic construct
  misc_feature 1..22: note = chemically synthesized
  source 1..22: mol_type = other DNA
caaacaaccagcctcttgagaa

SEQ ID NO: 154210 - DNA, 22 bp, synthetic construct
  misc_feature 1..22: note = chemically synthesized
  source 1..22: mol_type = other DNA
aaacaaccagcctcttgagaac

SEQ ID NO: 154211 - DNA, 22 bp, synthetic construct
  misc_feature 1..22: note = chemically synthesized
  source 1..22: mol_type = other DNA
ttgagaactcactatacagtac

SEQ ID NO: 154212 - DNA, 22 bp, synthetic construct
  misc_feature 1..22: note = chemically synthesized
  source 1..22: mol_type = other DNA
gagaactcactatacagtacca

SEQ ID NO: 154213 - DNA, 22 bp, synthetic construct
  misc_feature 1..22: note = chemically synthesized
  source 1..22: mol_type = other DNA
agaactcactatacagtaccaa

SEQ ID NO: 154214 - DNA, 22 bp, synthetic construct
  misc_feature 1..22: note = chemically synthesized
  source 1..22: mol_type = other DNA
actatacagtaccaagggggat

SEQ ID NO: 154215 - DNA, 22 bp, synthetic construct
  misc_feature 1..22: note = chemically synthesized
  source 1..22: mol_type = other DNA
tacagtaccaagggggatggta

SEQ ID NO: 154216 - DNA, 22 bp, synthetic construct
  misc_feature 1..22: note = chemically synthesized
  source 1..22: mol_type = other DNA
aatcgctgatgagaactctgcc

SEQ ID NO: 154217 - DNA, 22 bp, synthetic construct
  misc_feature 1..22: note = chemically synthesized
  source 1..22: mol_type = other DNA
atgagaactctgccaccatgat

SEQ ID NO: 154218 - DNA, 22 bp, synthetic construct
  misc_feature 1..22: note = chemically synthesized
  source 1..22: mol_type = other DNA
tgccaccatgattgaattacct

SEQ ID NO: 154219 - DNA, 22 bp, synthetic construct
  misc_feature 1..22: note = chemically synthesized
  source 1..22: mol_type = other DNA
ccaccatgattgaattacctcc

SEQ ID NO: 154220 - DNA, 22 bp, synthetic construct
  misc_feature 1..22: note = chemically synthesized
  source 1..22: mol_type = other DNA
aattacctcccacaaggcccca

SEQ ID NO: 154221 - DNA, 22 bp, synthetic construct
  misc_feature 1..22: note = chemically synthesized
  source 1..22: mol_type = other DNA
cctcccacaaggccccacctcc

SEQ ID NO: 154222 - DNA, 22 bp, synthetic construct
  misc_feature 1..22: note = chemically synthesized
  source 1..22: mol_type = other DNA
ccacaaggccccacctccaacg

SEQ ID NO: 154223 - DNA, 22 bp, synthetic construct
  misc_feature 1..22: note = chemically synthesized
  source 1..22: mol_type = other DNA
caacgctggtgattataattta

SEQ ID NO: 154224 - DNA, 22 bp, synthetic construct
  misc_feature 1..22: note = chemically synthesized
  source 1..22: mol_type = other DNA
gtgattataatttaacatgata

SEQ ID NO: 154225 - DNA, 22 bp, synthetic construct
  misc_feature 1..22: note = chemically synthesized
  source 1..22: mol_type = other DNA
taatttaacatgatatttgggt

SEQ ID NO: 154226 - DNA, 22 bp, synthetic construct
  misc_feature 1..22: note = chemically synthesized
  source 1..22: mol_type = other DNA
aacatgatatttgggtggtgac

SEQ ID NO: 154227 - DNA, 22 bp, synthetic construct
  misc_feature 1..22: note = chemically synthesized
  source 1..22: mol_type = other DNA
acatgatatttgggtggtgaca

SEQ ID NO: 154228 - DNA, 22 bp, synthetic construct
  misc_feature 1..22: note = chemically synthesized
  source 1..22: mol_type = other DNA
gggtggtgacacagatccaaac

SEQ ID NO: 154229 - DNA, 22 bp, synthetic construct
  misc_feature 1..22: note = chemically synthesized
  source 1..22: mol_type = other DNA
ggtggtgacacagatccaaacc

SEQ ID NO: 154230 - DNA, 22 bp, synthetic construct
  misc_feature 1..22: note = chemically synthesized
  source 1..22: mol_type = other DNA
ccacctctggccccttccaaat

SEQ ID NO: 154231 - DNA, 22 bp, synthetic construct
  misc_feature 1..22: note = chemically synthesized
  source 1..22: mol_type = other DNA
cacctctggccccttccaaatc

SEQ ID NO: 154232 - DNA, 22 bp, synthetic construct
  misc_feature 1..22: note = chemically synthesized
  source 1..22: mol_type = other DNA
tggccccttccaaatctcatgt

SEQ ID NO: 154233 - DNA, 22 bp, synthetic construct
  misc_feature 1..22: note = chemically synthesized
  source 1..22: mol_type = other DNA
gccccttccaaatctcatgttc

SEQ ID NO: 154234 - DNA, 22 bp, synthetic construct
  misc_feature 1..22: note = chemically synthesized
  source 1..22: mol_type = other DNA
ccaaatctcatgttcttctcac

SEQ ID NO: 154235 - DNA, 22 bp, synthetic construct
  misc_feature 1..22: note = chemically synthesized
  source 1..22: mol_type = other DNA
caaatctcatgttcttctcaca

SEQ ID NO: 154236 - DNA, 22 bp, synthetic construct
  misc_feature 1..22: note = chemically synthesized
  source 1..22: mol_type = other DNA
atgttcttctcacatcacaaaa

SEQ ID NO: 154237 - DNA, 22 bp, synthetic construct
  misc_feature 1..22: note = chemically synthesized
  source 1..22: mol_type = other DNA
ttctcacatcacaaaatacaat

SEQ ID NO: 154238 - DNA, 22 bp, synthetic construct
  misc_feature 1..22: note = chemically synthesized
  source 1..22: mol_type = other DNA
ctcacatcacaaaatacaatca

SEQ ID NO: 154239 - DNA, 22 bp, synthetic construct
  misc_feature 1..22: note = chemically synthesized
  source 1..22: mol_type = other DNA
tcacatcacaaaatacaatcat

SEQ ID NO: 154240 - DNA, 22 bp, synthetic construct
  misc_feature 1..22: note = chemically synthesized
  source 1..22: mol_type = other DNA
acatcacaaaatacaatcatta

SEQ ID NO: 154241 - DNA, 22 bp, synthetic construct
  misc_feature 1..22: note = chemically synthesized
  source 1..22: mol_type = other DNA
cttcccaacagtcctacaaagt

SEQ ID NO: 154242 - DNA, 22 bp, synthetic construct
  misc_feature 1..22: note = chemically synthesized
  source 1..22: mol_type = other DNA
cccaacagtcctacaaagtctt

SEQ ID NO: 154243 - DNA, 22 bp, synthetic construct
  misc_feature 1..22: note = chemically synthesized
  source 1..22: mol_type = other DNA
ccaacagtcctacaaagtctta

SEQ ID NO: 154244 - DNA, 22 bp, synthetic construct
  misc_feature 1..22: note = chemically synthesized
  source 1..22: mol_type = other DNA
caaagtcttaactcattccagc

SEQ ID NO: 154245 - DNA, 22 bp, synthetic construct
  misc_feature 1..22: note = chemically synthesized
  source 1..22: mol_type = other DNA
aactcattccagcattaactca

SEQ ID NO: 154246 - DNA, 22 bp, synthetic construct
  misc_feature 1..22: note = chemically synthesized
  source 1..22: mol_type = other DNA
actcattccagcattaactcaa

SEQ ID NO: 154247 - DNA, 22 bp, synthetic construct
  misc_feature 1..22: note = chemically synthesized
  source 1..22: mol_type = other DNA
attccagcattaactcaaaagt

SEQ ID NO: 154248 - DNA, 22 bp, synthetic construct
  misc_feature 1..22: note = chemically synthesized
  source 1..22: mol_type = other DNA
cagcattaactcaaaagtccaa

SEQ ID NO: 154249 - DNA, 22 bp, synthetic construct
  misc_feature 1..22: note = chemically synthesized
  source 1..22: mol_type = other DNA
actcaaaagtccaaagtccaaa

SEQ ID NO: 154250 - DNA, 22 bp, synthetic construct
  misc_feature 1..22: note = chemically synthesized
  source 1..22: mol_type = other DNA
aaaagtccaaagtccaaagtct

SEQ ID NO: 154251 - DNA, 22 bp, synthetic construct
  misc_feature 1..22: note = chemically synthesized
  source 1..22: mol_type = other DNA
atccaagacaaggcaagtccct

SEQ ID NO: 154252 - DNA, 22 bp, synthetic construct
  misc_feature 1..22: note = chemically synthesized
  source 1..22: mol_type = other DNA
tccaagacaaggcaagtccctt

SEQ ID NO: 154253 - DNA, 22 bp, synthetic construct
  misc_feature 1..22: note = chemically synthesized
  source 1..22: mol_type = other DNA
caacctatgagcctgtaaaatc

SEQ ID NO: 154254 - DNA, 22 bp, synthetic construct
  misc_feature 1..22: note = chemically synthesized
  source 1..22: mol_type = other DNA
aacctatgagcctgtaaaatca

SEQ ID NO: 154255 - DNA, 22 bp, synthetic construct
  misc_feature 1..22: note = chemically synthesized
  source 1..22: mol_type = other DNA
tgagcctgtaaaatcaaaaaca

SEQ ID NO: 154256 - DNA, 22 bp, synthetic construct
  misc_feature 1..22: note = chemically synthesized
  source 1..22: mol_type = other DNA
taaaatcaaaaacaagttagtt

SEQ ID NO: 154257 - DNA, 22 bp, synthetic construct
  misc_feature 1..22: note = chemically synthesized
  source 1..22: mol_type = other DNA
gttacttccaagacataatgga

SEQ ID NO: 154258 - DNA, 22 bp, synthetic construct
  misc_feature 1..22: note = chemically synthesized
  source 1..22: mol_type = other DNA
cttccaagacataatggaggta

SEQ ID NO: 154259 - DNA, 22 bp, synthetic construct
  misc_feature 1..22: note = chemically synthesized
  source 1..22: mol_type = other DNA
ccaagacataatggaggtactg

SEQ ID NO: 154260 - DNA, 22 bp, synthetic construct
  misc_feature 1..22: note = chemically synthesized
  source 1..22: mol_type = other DNA
caagacataatggaggtactgg

SEQ ID NO: 154261 - DNA, 22 bp, synthetic construct
  misc_feature 1..22: note = chemically synthesized
  source 1..22: mol_type = other DNA
gcattgggtacaaattcccatt

SEQ ID NO: 154262 - DNA, 22 bp, synthetic construct
  misc_feature 1..22: note = chemically synthesized
  source 1..22: mol_type = other DNA
ggtacaaattcccattccaaaa

SEQ ID NO: 154263 - DNA, 22 bp, synthetic construct
  misc_feature 1..22: note = chemically synthesized
  source 1..22: mol_type = other DNA
ccattccaaaagagagaaatgc

SEQ ID NO: 154264 - DNA, 22 bp, synthetic construct
  misc_feature 1..22: note = chemically synthesized
  source 1..22: mol_type = other DNA
caaaagagagaaatgcaccaaa

SEQ ID NO: 154265 - DNA, 22 bp, synthetic construct
  misc_feature 1..22: note = chemically synthesized
  source 1..22: mol_type = other DNA
aagatcccacacgagtagaaaa

SEQ ID NO: 154266 - DNA, 22 bp, synthetic construct
  misc_feature 1..22: note = chemically synthesized
  source 1..22: mol_type = other DNA
caccttgatatggtttggcagt

SEQ ID NO: 154267 - DNA, 22 bp, synthetic construct
  misc_feature 1..22: note = chemically synthesized
  source 1..22: mol_type = other DNA
gatatggtttggcagttttccc

SEQ ID NO: 154268 - DNA, 22 bp, synthetic construct
  misc_feature 1..22: note = chemically synthesized
  source 1..22: mol_type = other DNA
atatggtttggcagttttccca

SEQ ID NO: 154269 - DNA, 22 bp, synthetic construct
  misc_feature 1..22: note = chemically synthesized
  source 1..22: mol_type = other DNA
ggcagttttcccacccaaattt

SEQ ID NO: 154270 - DNA, 22 bp, synthetic construct
  misc_feature 1..22: note = chemically synthesized
  source 1..22: mol_type = other DNA
gcagttttcccacccaaatttc

SEQ ID NO: 154271 - DNA, 22 bp, synthetic construct
  misc_feature 1..22: note = chemically synthesized
  source 1..22: mol_type = other DNA
tcccacccaaatttcttcttga

SEQ ID NO: 154272 - DNA, 22 bp, synthetic construct
  misc_feature 1..22: note = chemically synthesized
  source 1..22: mol_type = other DNA
cccacccaaatttcttcttgaa

SEQ ID NO: 154273 - DNA, 22 bp, synthetic construct
  misc_feature 1..22: note = chemically synthesized
  source 1..22: mol_type = other DNA
ccacccaaatttcttcttgaat

SEQ ID NO: 154274 - DNA, 22 bp, synthetic construct
  misc_feature 1..22: note = chemically synthesized
  source 1..22: mol_type = other DNA
cttcttgaatagtaggtcccat

SEQ ID NO: 154275 - DNA, 22 bp, synthetic construct
  misc_feature 1..22: note = chemically synthesized
  source 1..22: mol_type = other DNA
ttcttgaatagtaggtcccata

SEQ ID NO: 154276 - DNA, 22 bp, synthetic construct
  misc_feature 1..22: note = chemically synthesized
  source 1..22: mol_type = other DNA
cttgaatagtaggtcccataat

SEQ ID NO: 154277 - DNA, 22 bp, synthetic construct
  misc_feature 1..22: note = chemically synthesized
  source 1..22: mol_type = other DNA
ttgaatagtaggtcccataatc

SEQ ID NO: 154278 - DNA, 22 bp, synthetic construct
  misc_feature 1..22: note = chemically synthesized
  source 1..22: mol_type = other DNA
gaatagtaggtcccataatccc

SEQ ID NO: 154279 - DNA, 22 bp, synthetic construct
  misc_feature 1..22: note = chemically synthesized
  source 1..22: mol_type = other DNA
aatagtaggtcccataatccct

SEQ ID NO: 154280 - DNA, 22 bp, synthetic construct
  misc_feature 1..22: note = chemically synthesized
  source 1..22: mol_type = other DNA
cctgtcatggaaggaacacact

SEQ ID NO: 154281 - DNA, 22 bp, synthetic construct
  misc_feature 1..22: note = chemically synthesized
  source 1..22: mol_type = other DNA
tcatggaaggaacacactggga

SEQ ID NO: 154282 - DNA, 22 bp, synthetic construct
  misc_feature 1..22: note = chemically synthesized
  source 1..22: mol_type = other DNA
ggatgtaattgaatcatggggg

SEQ ID NO: 154283 - DNA, 22 bp, synthetic construct
  misc_feature 1..22: note = chemically synthesized
  source 1..22: mol_type = other DNA
aatcatgggggtaggtttttca

SEQ ID NO: 154284 - DNA, 22 bp, synthetic construct
  misc_feature 1..22: note = chemically synthesized
  source 1..22: mol_type = other DNA
ttcacatgctgttctcatgata

SEQ ID NO: 154285 - DNA, 22 bp, synthetic construct
  misc_feature 1..22: note = chemically synthesized
  source 1..22: mol_type = other DNA
tcacatgctgttctcatgatag

SEQ ID NO: 154286 - DNA, 22 bp, synthetic construct
  misc_feature 1..22: note = chemically synthesized
  source 1..22: mol_type = other DNA
cacatgctgttctcatgatagt

SEQ ID NO: 154287 - DNA, 22 bp, synthetic construct
  misc_feature 1..22: note = chemically synthesized
  source 1..22: mol_type = other DNA
acatgctgttctcatgatagtg

SEQ ID NO: 154288 - DNA, 22 bp, synthetic construct
  misc_feature 1..22: note = chemically synthesized
  source 1..22: mol_type = other DNA
ttctcatgatagtgagtaagtc

SEQ ID NO: 154289 - DNA, 22 bp, synthetic construct
  misc_feature 1..22: note = chemically synthesized
  source 1..22: mol_type = other DNA
tcatgatagtgagtaagtctca

SEQ ID NO: 154290 - DNA, 22 bp, synthetic construct
  misc_feature 1..22: note = chemically synthesized
  source 1..22: mol_type = other DNA
atgatagtgagtaagtctcaca

SEQ ID NO: 154291 - DNA, 22 bp, synthetic construct
  misc_feature 1..22: note = chemically synthesized
  source 1..22: mol_type = other DNA
acaagatctgatggttttataa

SEQ ID NO: 154292 - DNA, 22 bp, synthetic construct
  misc_feature 1..22: note = chemically synthesized
  source 1..22: mol_type = other DNA
atggttttataaagggcatttc

SEQ ID NO: 154293 - DNA, 22 bp, synthetic construct
  misc_feature 1..22: note = chemically synthesized
  source 1..22: mol_type = other DNA
tataaagggcatttcccttgca

SEQ ID NO: 154294 - DNA, 22 bp, synthetic construct
  misc_feature 1..22: note = chemically synthesized
  source 1..22: mol_type = other DNA
ataaagggcatttcccttgcac

SEQ ID NO: 154295 - DNA, 22 bp, synthetic construct
  misc_feature 1..22: note = chemically synthesized
  source 1..22: mol_type = other DNA
taaagggcatttcccttgcaca

SEQ ID NO: 154296 - DNA, 22 bp, synthetic construct
  misc_feature 1..22: note = chemically synthesized
  source 1..22: mol_type = other DNA
cccttgcacatgctctcttgcc

SEQ ID NO: 154297 - DNA, 22 bp, synthetic construct
  misc_feature 1..22: note = chemically synthesized
  source 1..22: mol_type = other DNA
ccttgcacatgctctcttgcct

SEQ ID NO: 154298 - DNA, 22 bp, synthetic construct
  misc_feature 1..22: note = chemically synthesized
  source 1..22: mol_type = other DNA
gcacatgctctcttgcctgcca

SEQ ID NO: 154299 - DNA, 22 bp, synthetic construct
  misc_feature 1..22: note = chemically synthesized
  source 1..22: mol_type = other DNA
cacatgctctcttgcctgccac

SEQ ID NO: 154300 - DNA, 22 bp, synthetic construct
  misc_feature 1..22: note = chemically synthesized
  source 1..22: mol_type = other DNA
tcttgcctgccaccatgtcaga

SEQ ID NO: 154301 - DNA, 22 bp, synthetic construct
  misc_feature 1..22: note = chemically synthesized
  source 1..22: mol_type = other DNA
ttgcctgccaccatgtcagatg

SEQ ID NO: 154302 - DNA, 22 bp, synthetic construct
  misc_feature 1..22: note = chemically synthesized
  source 1..22: mol_type = other DNA
gcctgccaccatgtcagatgtg

SEQ ID NO: 154303 - DNA, 22 bp, synthetic construct
  misc_feature 1..22: note = chemically synthesized
  source 1..22: mol_type = other DNA
cctgccaccatgtcagatgtga

SEQ ID NO: 154304 - DNA, 22 bp, synthetic construct
  misc_feature 1..22: note = chemically synthesized
  source 1..22: mol_type = other DNA
ccaccatgtcagatgtgacttt

SEQ ID NO: 154305 - DNA, 22 bp, synthetic construct
  misc_feature 1..22: note = chemically synthesized
  source 1..22: mol_type = other DNA
tgctcctccttcaccttccacc

SEQ ID NO: 154306 - DNA, 22 bp, synthetic construct
  misc_feature 1..22: note = chemically synthesized
  source 1..22: mol_type = other DNA
gctcctccttcaccttccacca

SEQ ID NO: 154307 - DNA, 22 bp, synthetic construct
  misc_feature 1..22: note = chemically synthesized
  source 1..22: mol_type = other DNA
ctcctccttcaccttccaccat

SEQ ID NO: 154308 - DNA, 22 bp, synthetic construct
  misc_feature 1..22: note = chemically synthesized
  source 1..22: mol_type = other DNA
ctccttcaccttccaccatgat

SEQ ID NO: 154309 - DNA, 22 bp, synthetic construct
  misc_feature 1..22: note = chemically synthesized
  source 1..22: mol_type = other DNA
cttcaccttccaccatgattgt

SEQ ID NO: 154310 - DNA, 22 bp, synthetic construct
  misc_feature 1..22: note = chemically synthesized
  source 1..22: mol_type = other DNA
caccttccaccatgattgtaag

SEQ ID NO: 154311 - DNA, 22 bp, synthetic construct
  misc_feature 1..22: note = chemically synthesized
  source 1..22: mol_type = other DNA
accttccaccatgattgtaagg

SEQ ID NO: 154312 - DNA, 22 bp, synthetic construct
  misc_feature 1..22: note = chemically synthesized
  source 1..22: mol_type = other DNA
ccaccatgattgtaaggcctcc

SEQ ID NO: 154313 - DNA, 22 bp, synthetic construct
  misc_feature 1..22: note = chemically synthesized
  source 1..22: mol_type = other DNA
caccatgattgtaaggcctccc

SEQ ID NO: 154314 - DNA, 22 bp, synthetic construct
  misc_feature 1..22: note = chemically synthesized
  source 1..22: mol_type = other DNA
taaggcctccccagcaatgtgg

SEQ ID NO: 154315 - DNA, 22 bp, synthetic construct
  misc_feature 1..22: note = chemically synthesized
  source 1..22: mol_type = other DNA
cccagcaatgtggatctatgag

SEQ ID NO: 154316 - DNA, 22 bp, synthetic construct
  misc_feature 1..22: note = chemically synthesized
  source 1..22: mol_type = other DNA
tgagtccattaaatctcttttt

SEQ ID NO: 154317 - DNA, 22 bp, synthetic construct
  misc_feature 1..22: note = chemically synthesized
  source 1..22: mol_type = other DNA
aatctctttttctttataaatt

SEQ ID NO: 154318 - DNA, 22 bp, synthetic construct
  misc_feature 1..22: note = chemically synthesized
  source 1..22: mol_type = other DNA
tttttctttataaattacccag

SEQ ID NO: 154319 - DNA, 22 bp, synthetic construct
  misc_feature 1..22: note = chemically synthesized
  source 1..22: mol_type = other DNA
tttctttataaattacccagtc

SEQ ID NO: 154320 - DNA, 22 bp, synthetic construct
  misc_feature 1..22: note = chemically synthesized
  source 1..22: mol_type = other DNA
ttctttataaattacccagtct

SEQ ID NO: 154321 - DNA, 22 bp, synthetic construct
  misc_feature 1..22: note = chemically synthesized
  source 1..22: mol_type = other DNA
tctttataaattacccagtctc

SEQ ID NO: 154322 - DNA, 22 bp, synthetic construct
  misc_feature 1..22: note = chemically synthesized
  source 1..22: mol_type = other DNA
ctttataaattacccagtctcg

SEQ ID NO: 154323 - DNA, 22 bp, synthetic construct
  misc_feature 1..22: note = chemically synthesized
  source 1..22: mol_type = other DNA
tttataaattacccagtctcgg

SEQ ID NO: 154324 - DNA, 22 bp, synthetic construct
  misc_feature 1..22: note = chemically synthesized
  source 1..22: mol_type = other DNA
tataaattacccagtctcgggt

SEQ ID NO: 154325 - DNA, 22 bp, synthetic construct
  misc_feature 1..22: note = chemically synthesized
  source 1..22: mol_type = other DNA
ataaattacccagtctcgggta

SEQ ID NO: 154326 - DNA, 22 bp, synthetic construct
  misc_feature 1..22: note = chemically synthesized
  source 1..22: mol_type = other DNA
taaattacccagtctcgggtat

SEQ ID NO: 154327 - DNA, 22 bp, synthetic construct
  misc_feature 1..22: note = chemically synthesized
  source 1..22: mol_type = other DNA
cccagtctcgggtatttcttca

SEQ ID NO: 154328 - DNA, 22 bp, synthetic construct
  misc_feature 1..22: note = chemically synthesized
  source 1..22: mol_type = other DNA
gggtatttcttcatagcagttt

SEQ ID NO: 154329 - DNA, 22 bp, synthetic construct
  misc_feature 1..22: note = chemically synthesized
  source 1..22: mol_type = other DNA
cttcatagcagtttaaaacgga

SEQ ID NO: 154330 - DNA, 22 bp, synthetic construct
  misc_feature 1..22: note = chemically synthesized
  source 1..22: mol_type = other DNA
ttcatagcagtttaaaacggac

SEQ ID NO: 154331 - DNA, 22 bp, synthetic construct
  misc_feature 1..22: note = chemically synthesized
  source 1..22: mol_type = other DNA
catagcagtttaaaacggacaa

SEQ ID NO: 154332 - DNA, 22 bp, synthetic construct
  misc_feature 1..22: note = chemically synthesized
  source 1..22: mol_type = other DNA
atagcagtttaaaacggacaaa

SEQ ID NO: 154333 - DNA, 22 bp, synthetic construct
  misc_feature 1..22: note = chemically synthesized
  source 1..22: mol_type = other DNA
aaaacggacaaatacacacctt

SEQ ID NO: 154334 - DNA, 22 bp, synthetic construct
  misc_feature 1..22: note = chemically synthesized
  source 1..22: mol_type = other DNA
aaacggacaaatacacacctta

SEQ ID NO: 154335 - DNA, 22 bp, synthetic construct
  misc_feature 1..22: note = chemically synthesized
  source 1..22: mol_type = other DNA
aacactccaaaataatctcctt

SEQ ID NO: 154336 - DNA, 22 bp, synthetic construct
  misc_feature 1..22: note = chemically synthesized
  source 1..22: mol_type = other DNA
acactccaaaataatctccttt

SEQ ID NO: 154337 - DNA, 22 bp, synthetic construct
  misc_feature 1..22: note = chemically synthesized
  source 1..22: mol_type = other DNA
caaaataatctcctttgacccc

SEQ ID NO: 154338 - DNA, 22 bp, synthetic construct
  misc_feature 1..22: note = chemically synthesized
  source 1..22: mol_type = other DNA
ctttgaccccatgtctcatatc

SEQ ID NO: 154339 - DNA, 22 bp, synthetic construct
  misc_feature 1..22: note = chemically synthesized
  source 1..22: mol_type = other DNA
tgaccccatgtctcatatcagg

SEQ ID NO: 154340 - DNA, 22 bp, synthetic construct
  misc_feature 1..22: note = chemically synthesized
  source 1..22: mol_type = other DNA
gaccccatgtctcatatcaggg

SEQ ID NO: 154341 - DNA, 22 bp, synthetic construct
  misc_feature 1..22: note = chemically synthesized
  source 1..22: mol_type = other DNA
accccatgtctcatatcaggga

SEQ ID NO: 154342 - DNA, 22 bp, synthetic construct
  misc_feature 1..22: note = chemically synthesized
  source 1..22: mol_type = other DNA
atatcagggacacactgatgca

SEQ ID NO: 154343 - DNA, 22 bp, synthetic construct
  misc_feature 1..22: note = chemically synthesized
  source 1..22: mol_type = other DNA
atgcaagaggtgggctcccaag

SEQ ID NO: 154344 - DNA, 22 bp, synthetic construct
  misc_feature 1..22: note = chemically synthesized
  source 1..22: mol_type = other DNA
ccaaggccttgggcagttccac

SEQ ID NO: 154345 - DNA, 22 bp, synthetic construct
  misc_feature 1..22: note = chemically synthesized
  source 1..22: mol_type = other DNA
gggcagttccacccctattgct

SEQ ID NO: 154346 - DNA, 22 bp, synthetic construct
  misc_feature 1..22: note = chemically synthesized
  source 1..22: mol_type = other DNA
ggcagttccacccctattgctt

SEQ ID NO: 154347 - DNA, 22 bp, synthetic construct
  misc_feature 1..22: note = chemically synthesized
  source 1..22: mol_type = other DNA
cacccctattgctttgcacagt

SEQ ID NO: 154348 - DNA, 22 bp, synthetic construct
  misc_feature 1..22: note = chemically synthesized
  source 1..22: mol_type = other DNA
ttgctttgcacagtttagcccc

SEQ ID NO: 154349 - DNA, 22 bp, synthetic construct
  misc_feature 1..22: note = chemically synthesized
  source 1..22: mol_type = other DNA
ctttgcacagtttagcccctgc

SEQ ID NO: 154350 - DNA, 22 bp, synthetic construct
  misc_feature 1..22: note = chemically synthesized
  source 1..22: mol_type = other DNA
tgcacagtttagcccctgctgc

SEQ ID NO: 154351 - DNA, 22 bp, synthetic construct
  misc_feature 1..22: note = chemically synthesized
  source 1..22: mol_type = other DNA
gcacagtttagcccctgctgct

SEQ ID NO: 154352 - DNA, 22 bp, synthetic construct
  misc_feature 1..22: note = chemically synthesized
  source 1..22: mol_type = other DNA
cacagtttagcccctgctgctg

SEQ ID NO: 154353 - DNA, 22 bp, synthetic construct
  misc_feature 1..22: note = chemically synthesized
  source 1..22: mol_type = other DNA
agcccctgctgctgctcttaag

SEQ ID NO: 154354 - DNA, 22 bp, synthetic construct
  misc_feature 1..22: note = chemically synthesized
  source 1..22: mol_type = other DNA
gcccctgctgctgctcttaaga

SEQ ID NO: 154355 - DNA, 22 bp, synthetic construct
  misc_feature 1..22: note = chemically synthesized
  source 1..22: mol_type = other DNA
ctgctgctcttaagagattgta

SEQ ID NO: 154356 - DNA, 22 bp, synthetic construct
  misc_feature 1..22: note = chemically synthesized
  source 1..22: mol_type = other DNA
ctgctcttaagagattgtattg

SEQ ID NO: 154357 - DNA, 22 bp, synthetic construct
  misc_feature 1..22: note = chemically synthesized
  source 1..22: mol_type = other DNA
ctcttaagagattgtattgagt

SEQ ID NO: 154358 - DNA, 22 bp, synthetic construct
  misc_feature 1..22: note = chemically synthesized
  source 1..22: mol_type = other DNA
ttaagagattgtattgagtgtt

SEQ ID NO: 154359 - DNA, 22 bp, synthetic construct
  misc_feature 1..22: note = chemically synthesized
  source 1..22: mol_type = other DNA
aagagattgtattgagtgtttg

SEQ ID NO: 154360 - DNA, 22 bp, synthetic construct
  misc_feature 1..22: note = chemically synthesized
  source 1..22: mol_type = other DNA
agagattgtattgagtgtttgc

SEQ ID NO: 154361 - DNA, 22 bp, synthetic construct
  misc_feature 1..22: note = chemically synthesized
  source 1..22: mol_type = other DNA
tattgagtgtttgcagcttttc

SEQ ID NO: 154362 - DNA, 22 bp, synthetic construct
  misc_feature 1..22: note = chemically synthesized
  source 1..22: mol_type = other DNA
agtgtttgcagcttttctaggt

SEQ ID NO: 154363 - DNA, 22 bp, synthetic construct
  misc_feature 1..22: note = chemically synthesized
  source 1..22: mol_type = other DNA
gcagcttttctaggtgcacggt

SEQ ID NO: 154364 - DNA, 22 bp, synthetic construct
  misc_feature 1..22: note = chemically synthesized
  source 1..22: mol_type = other DNA
cagcttttctaggtgcacggtg

SEQ ID NO: 154365 - DNA, 22 bp, synthetic construct
  misc_feature 1..22: note = chemically synthesized
  source 1..22: mol_type = other DNA
ttctaggtgcacggtgcaaact

SEQ ID NO: 154366 - DNA, 22 bp, synthetic construct
  misc_feature 1..22: note = chemically synthesized
  source 1..22: mol_type = other DNA
tctaggtgcacggtgcaaactg

SEQ ID NO: 154367 - DNA, 22 bp, synthetic construct
  misc_feature 1..22: note = chemically synthesized
  source 1..22: mol_type = other DNA
ctaggtgcacggtgcaaactgt

SEQ ID NO: 154368 - DNA, 22 bp, synthetic construct
  misc_feature 1..22: note = chemically synthesized
  source 1..22: mol_type = other DNA
taggtgcacggtgcaaactgtc

SEQ ID NO: 154369 - DNA, 22 bp, synthetic construct
  misc_feature 1..22: note = chemically synthesized
  source 1..22: mol_type = other DNA
ggtgcacggtgcaaactgtcag

SEQ ID NO: 154370 - DNA, 22 bp, synthetic construct
  misc_feature 1..22: note = chemically synthesized
  source 1..22: mol_type = other DNA
tcagtggatctaccattctggg

SEQ ID NO: 154371 - DNA, 22 bp, synthetic construct
  misc_feature 1..22: note = chemically synthesized
  source 1..22: mol_type = other DNA
ccattctggggtctggaggacg

SEQ ID NO: 154372 - DNA, 22 bp, synthetic construct
  misc_feature 1..22: note = chemically synthesized
  source 1..22: mol_type = other DNA
tggggtctggaggacggtggcc

SEQ ID NO: 154373 - DNA, 22 bp, synthetic construct
  misc_feature 1..22: note = chemically synthesized
  source 1..22: mol_type = other DNA
gggtctggaggacggtggccct

SEQ ID NO: 154374 - DNA, 22 bp, synthetic construct
  misc_feature 1..22: note = chemically synthesized
  source 1..22: mol_type = other DNA
gaggacggtggcccttttctca

SEQ ID NO: 154375 - DNA, 22 bp, synthetic construct
  misc_feature 1..22: note = chemically synthesized
  source 1..22: mol_type = other DNA
ttctcatagctctgctaggcag

SEQ ID NO: 154376 - DNA, 22 bp, synthetic construct
  misc_feature 1..22: note = chemically synthesized
  source 1..22: mol_type = other DNA
tctcatagctctgctaggcagt

SEQ ID NO: 154377 - DNA, 22 bp, synthetic construct
  misc_feature 1..22: note = chemically synthesized
  source 1..22: mol_type = other DNA
ctcatagctctgctaggcagtg

SEQ ID NO: 154378 - DNA, 22 bp, synthetic construct
  misc_feature 1..22: note = chemically synthesized
  source 1..22: mol_type = other DNA
tcatagctctgctaggcagtgc

SEQ ID NO: 154379 - DNA, 22 bp, synthetic construct
  misc_feature 1..22: note = chemically synthesized
  source 1..22: mol_type = other DNA
atagctctgctaggcagtgccc

SEQ ID NO: 154380 - DNA, 22 bp, synthetic construct
  misc_feature 1..22: note = chemically synthesized
  source 1..22: mol_type = other DNA
tgctaggcagtgccccagtgga

SEQ ID NO: 154381 - DNA, 22 bp, synthetic construct
  misc_feature 1..22: note = chemically synthesized
  source 1..22: mol_type = other DNA
ctaggcagtgccccagtggaga

SEQ ID NO: 154382 - DNA, 22 bp, synthetic construct
  misc_feature 1..22: note = chemically synthesized
  source 1..22: mol_type = other DNA
ggcagtgccccagtggagactc

SEQ ID NO: 154383 - DNA, 22 bp, synthetic construct
  misc_feature 1..22: note = chemically synthesized
  source 1..22: mol_type = other DNA
tgtgagggggttccaacctcat

SEQ ID NO: 154384 - DNA, 22 bp, synthetic construct
  misc_feature 1..22: note = chemically synthesized
  source 1..22: mol_type = other DNA
tgagggggttccaacctcatat

SEQ ID NO: 154385 - DNA, 22 bp, synthetic construct
  misc_feature 1..22: note = chemically synthesized
  source 1..22: mol_type = other DNA
caacctcatatttttcctccac

SEQ ID NO: 154386 - DNA, 22 bp, synthetic construct
  misc_feature 1..22: note = chemically synthesized
  source 1..22: mol_type = other DNA
atatttttcctccacattgccc

SEQ ID NO: 154387 - DNA, 22 bp, synthetic construct
  misc_feature 1..22: note = chemically synthesized
  source 1..22: mol_type = other DNA
ttcctccacattgccctattag

SEQ ID NO: 154388 - DNA, 22 bp, synthetic construct
  misc_feature 1..22: note = chemically synthesized
  source 1..22: mol_type = other DNA
tcctccacattgccctattaga

SEQ ID NO: 154389 - DNA, 22 bp, synthetic construct
  misc_feature 1..22: note = chemically synthesized
  source 1..22: mol_type = other DNA
cctccacattgccctattagag

SEQ ID NO: 154390 - DNA, 22 bp, synthetic construct
  misc_feature 1..22: note = chemically synthesized
  source 1..22: mol_type = other DNA
ctccacattgccctattagagg

SEQ ID NO: 154391 - DNA, 22 bp, synthetic construct
  misc_feature 1..22: note = chemically synthesized
  source 1..22: mol_type = other DNA
cacattgccctattagaggttc

SEQ ID NO: 154392 - DNA, 22 bp, synthetic construct
  misc_feature 1..22: note = chemically synthesized
  source 1..22: mol_type = other DNA
ccctattagaggttcttcatga

SEQ ID NO: 154393 - DNA, 22 bp, synthetic construct
  misc_feature 1..22: note = chemically synthesized
  source 1..22: mol_type = other DNA
ttagaggttcttcatgagggtt

SEQ ID NO: 154394 - DNA, 22 bp, synthetic construct
  misc_feature 1..22: note = chemically synthesized
  source 1..22: mol_type = other DNA
gaggttcttcatgagggttctg

SEQ ID NO: 154395 - DNA, 22 bp, synthetic construct
  misc_feature 1..22: note = chemically synthesized
  source 1..22: mol_type = other DNA
ttcatgagggttctgcccctgc

SEQ ID NO: 154396 - DNA, 22 bp, synthetic construct
  misc_feature 1..22: note = chemically synthesized
  source 1..22: mol_type = other DNA
catgagggttctgcccctgcag

SEQ ID NO: 154397 - DNA, 22 bp, synthetic construct
  misc_feature 1..22: note = chemically synthesized
  source 1..22: mol_type = other DNA
atgagggttctgcccctgcagg

SEQ ID NO: 154398 - DNA, 22 bp, synthetic construct
  misc_feature 1..22: note = chemically synthesized
  source 1..22: mol_type = other DNA
tgcccctgcaggaggcttctgc

SEQ ID NO: 154399 - DNA, 22 bp, synthetic construct
  misc_feature 1..22: note = chemically synthesized
  source 1..22: mol_type = other DNA
cccctgcaggaggcttctgcct

SEQ ID NO: 154400 - DNA, 22 bp, synthetic construct
  misc_feature 1..22: note = chemically synthesized
  source 1..22: mol_type = other DNA
caggaggcttctgcctgaacac

SEQ ID NO: 154401 - DNA, 22 bp, synthetic construct
  misc_feature 1..22: note = chemically synthesized
  source 1..22: mol_type = other DNA
ctgcctgaacactcaggctttt

SEQ ID NO: 154402 - DNA, 22 bp, synthetic construct
  misc_feature 1..22: note = chemically synthesized
  source 1..22: mol_type = other DNA
tgcctgaacactcaggcttttc

SEQ ID NO: 154403 - DNA, 22 bp, synthetic construct
  misc_feature 1..22: note = chemically synthesized
  source 1..22: mol_type = other DNA
cctgaacactcaggcttttcta

SEQ ID NO: 154404 - DNA, 22 bp, synthetic construct
  misc_feature 1..22: note = chemically synthesized
  source 1..22: mol_type = other DNA
aacactcaggcttttctacaca

SEQ ID NO: 154405 - DNA, 22 bp, synthetic construct
  misc_feature 1..22: note = chemically synthesized
  source 1..22: mol_type = other DNA
aggcttttctacacatcctctg

SEQ ID NO: 154406 - DNA, 22 bp, synthetic construct
  misc_feature 1..22: note = chemically synthesized
  source 1..22: mol_type = other DNA
ttctacacatcctctgaaatct

SEQ ID NO: 154407 - DNA, 22 bp, synthetic construct
  misc_feature 1..22: note = chemically synthesized
  source 1..22: mol_type = other DNA
tctacacatcctctgaaatcta

SEQ ID NO: 154408 - DNA, 22 bp, synthetic construct
  misc_feature 1..22: note = chemically synthesized
  source 1..22: mol_type = other DNA
ctacacatcctctgaaatctag

SEQ ID NO: 154409 - DNA, 22 bp, synthetic construct
  misc_feature 1..22: note = chemically synthesized
  source 1..22: mol_type = other DNA
tacacatcctctgaaatctagg

SEQ ID NO: 154410 - DNA, 22 bp, synthetic construct
  misc_feature 1..22: note = chemically synthesized
  source 1..22: mol_type = other DNA
cacatcctctgaaatctaggtg

SEQ ID NO: 154411 - DNA, 22 bp, synthetic construct
  misc_feature 1..22: note = chemically synthesized
  source 1..22: mol_type = other DNA
tgaaatctaggtggaggcttac

SEQ ID NO: 154412 - DNA, 22 bp, synthetic construct
  misc_feature 1..22: note = chemically synthesized
  source 1..22: mol_type = other DNA
aaatctaggtggaggcttacaa

SEQ ID NO: 154413 - DNA, 22 bp, synthetic construct
  misc_feature 1..22: note = chemically synthesized
  source 1..22: mol_type = other DNA
ggtggaggcttacaagcctcaa

SEQ ID NO: 154414 - DNA, 22 bp, synthetic construct
  misc_feature 1..22: note = chemically synthesized
  source 1..22: mol_type = other DNA
acaagcctcaactttttgacct

SEQ ID NO: 154415 - DNA, 22 bp, synthetic construct
  misc_feature 1..22: note = chemically synthesized
  source 1..22: mol_type = other DNA
caagcctcaactttttgacctt

SEQ ID NO: 154416 - DNA, 22 bp, synthetic construct
  misc_feature 1..22: note = chemically synthesized
  source 1..22: mol_type = other DNA
aactttttgacctttgcacact

SEQ ID NO: 154417 - DNA, 22 bp, synthetic construct
  misc_feature 1..22: note = chemically synthesized
  source 1..22: mol_type = other DNA
tttgacctttgcacactcccag

SEQ ID NO: 154418 - DNA, 22 bp, synthetic construct
  misc_feature 1..22: note = chemically synthesized
  source 1..22: mol_type = other DNA
ttgacctttgcacactcccaga

SEQ ID NO: 154419 - DNA, 22 bp, synthetic construct
  misc_feature 1..22: note = chemically synthesized
  source 1..22: mol_type = other DNA
tgacctttgcacactcccagat

SEQ ID NO: 154420 - DNA, 22 bp, synthetic construct
  misc_feature 1..22: note = chemically synthesized
  source 1..22: mol_type = other DNA
gacctttgcacactcccagatt

SEQ ID NO: 154421 - DNA, 22 bp, synthetic construct
  misc_feature 1..22: note = chemically synthesized
  source 1..22: mol_type = other DNA
acctttgcacactcccagattt

SEQ ID NO: 154422 - DNA, 22 bp, synthetic construct
  misc_feature 1..22: note = chemically synthesized
  source 1..22: mol_type = other DNA
tgcacactcccagatttatcac

SEQ ID NO: 154423 - DNA, 22 bp, synthetic construct
  misc_feature 1..22: note = chemically synthesized
  source 1..22: mol_type = other DNA
gcacactcccagatttatcacc

SEQ ID NO: 154424 - DNA, 22 bp, synthetic construct
  misc_feature 1..22: note = chemically synthesized
  source 1..22: mol_type = other DNA
cacactcccagatttatcacca

SEQ ID NO: 154425 - DNA, 22 bp, synthetic construct
  misc_feature 1..22: note = chemically synthesized
  source 1..22: mol_type = other DNA
ccagatttatcaccatgtggaa

SEQ ID NO: 154426 - DNA, 22 bp, synthetic construct
  misc_feature 1..22: note = chemically synthesized
  source 1..22: mol_type = other DNA
atcaccatgtggaagcctccaa

SEQ ID NO: 154427 - DNA, 22 bp, synthetic construct
  misc_feature 1..22: note = chemically synthesized
  source 1..22: mol_type = other DNA
tcaccatgtggaagcctccaag

SEQ ID NO: 154428 - DNA, 22 bp, synthetic construct
  misc_feature 1..22: note = chemically synthesized
  source 1..22: mol_type = other DNA
caaggcttatgtcttgcaccct

SEQ ID NO: 154429 - DNA, 22 bp, synthetic construct
  misc_feature 1..22: note = chemically synthesized
  source 1..22: mol_type = other DNA
atgtcttgcaccctctgaagca

SEQ ID NO: 154430 - DNA, 22 bp, synthetic construct
  misc_feature 1..22: note = chemically synthesized
  source 1..22: mol_type = other DNA
tgtcttgcaccctctgaagcag

SEQ ID NO: 154431 - DNA, 22 bp, synthetic construct
  misc_feature 1..22: note = chemically synthesized
  source 1..22: mol_type = other DNA
gcaccctctgaagcagtggcct

SEQ ID NO: 154432 - DNA, 22 bp, synthetic construct
  misc_feature 1..22: note = chemically synthesized
  source 1..22: mol_type = other DNA
caccctctgaagcagtggcctt

SEQ ID NO: 154433 - DNA, 22 bp, synthetic construct
  misc_feature 1..22: note = chemically synthesized
  source 1..22: mol_type = other DNA
tgaagcagtggccttagctgtt

SEQ ID NO: 154434 - DNA, 22 bp, synthetic construct
  misc_feature 1..22: note = chemically synthesized
  source 1..22: mol_type = other DNA
aagcagtggccttagctgttct

SEQ ID NO: 154435 - DNA, 22 bp, synthetic construct
  misc_feature 1..22: note = chemically synthesized
  source 1..22: mol_type = other DNA
agctgttcttgggcccctttga

SEQ ID NO: 154436 - DNA, 22 bp, synthetic construct
  misc_feature 1..22: note = chemically synthesized
  source 1..22: mol_type = other DNA
gctgttcttgggcccctttgag

SEQ ID NO: 154437 - DNA, 22 bp, synthetic construct
  misc_feature 1..22: note = chemically synthesized
  source 1..22: mol_type = other DNA
ttcttgggcccctttgagccac

SEQ ID NO: 154438 - DNA, 22 bp, synthetic construct
  misc_feature 1..22: note = chemically synthesized
  source 1..22: mol_type = other DNA
ttgggcccctttgagccacagc

SEQ ID NO: 154439 - DNA, 22 bp, synthetic construct
  misc_feature 1..22: note = chemically synthesized
  source 1..22: mol_type = other DNA
gggcccctttgagccacagctg

SEQ ID NO: 154440 - DNA, 22 bp, synthetic construct
  misc_feature 1..22: note = chemically synthesized
  source 1..22: mol_type = other DNA
ggcccctttgagccacagctgg

SEQ ID NO: 154441 - DNA, 22 bp, synthetic construct
  misc_feature 1..22: note = chemically synthesized
  source 1..22: mol_type = other DNA
tgagccacagctggtgctggag

SEQ ID NO: 154442 - DNA, 22 bp, synthetic construct
  misc_feature 1..22: note = chemically synthesized
  source 1..22: mol_type = other DNA
gagccacagctggtgctggagc

SEQ ID NO: 154443 - DNA, 22 bp, synthetic construct
  misc_feature 1..22: note = chemically synthesized
  source 1..22: mol_type = other DNA
agccacagctggtgctggagca

SEQ ID NO: 154444 - DNA, 22 bp, synthetic construct
  misc_feature 1..22: note = chemically synthesized
  source 1..22: mol_type = other DNA
gtgctggagcagccaggatgca

SEQ ID NO: 154445 - DNA, 22 bp, synthetic construct
  misc_feature 1..22: note = chemically synthesized
  source 1..22: mol_type = other DNA
gagcagccaggatgcaaggaac

SEQ ID NO: 154446 - DNA, 22 bp, synthetic construct
  misc_feature 1..22: note = chemically synthesized
  source 1..22: mol_type = other DNA
aagctgctcaaggcagcagggt

SEQ ID NO: 154447 - DNA, 22 bp, synthetic construct
  misc_feature 1..22: note = chemically synthesized
  source 1..22: mol_type = other DNA
ctcaaggcagcagggtcctgaa

SEQ ID NO: 154448 - DNA, 22 bp, synthetic construct
  misc_feature 1..22: note = chemically synthesized
  source 1..22: mol_type = other DNA
aaggcagcagggtcctgaatct

SEQ ID NO: 154449 - DNA, 22 bp, synthetic construct
  misc_feature 1..22: note = chemically synthesized
  source 1..22: mol_type = other DNA
aatctcacccacaaaatcattc

SEQ ID NO: 154450 - DNA, 22 bp, synthetic construct
  misc_feature 1..22: note = chemically synthesized
  source 1..22: mol_type = other DNA
acccacaaaatcattcagtact

SEQ ID NO: 154451 - DNA, 22 bp, synthetic construct
  misc_feature 1..22: note = chemically synthesized
  source 1..22: mol_type = other DNA
agtactcctaggccaccaggcc

SEQ ID NO: 154452 - DNA, 22 bp, synthetic construct
  misc_feature 1..22: note = chemically synthesized
  source 1..22: mol_type = other DNA
ctaggccaccaggcctgtgatg

SEQ ID NO: 154453 - DNA, 22 bp, synthetic construct
  misc_feature 1..22: note = chemically synthesized
  source 1..22: mol_type = other DNA
ggccaccaggcctgtgatgtga

SEQ ID NO: 154454 - DNA, 22 bp, synthetic construct
  misc_feature 1..22: note = chemically synthesized
  source 1..22: mol_type = other DNA
tgatgtgaggggctgctacaag

SEQ ID NO: 154455 - DNA, 22 bp, synthetic construct
  misc_feature 1..22: note = chemically synthesized
  source 1..22: mol_type = other DNA
ctacaagggtctctgaaatgtc

SEQ ID NO: 154456 - DNA, 22 bp, synthetic construct
  misc_feature 1..22: note = chemically synthesized
  source 1..22: mol_type = other DNA
caagggtctctgaaatgtcttt

SEQ ID NO: 154457 - DNA, 22 bp, synthetic construct
  misc_feature 1..22: note = chemically synthesized
  source 1..22: mol_type = other DNA
tgaaatgtctttgaggcattct

SEQ ID NO: 154458 - DNA, 22 bp, synthetic construct
  misc_feature 1..22: note = chemically synthesized
  source 1..22: mol_type = other DNA
aaatgtctttgaggcattctcc

SEQ ID NO: 154459 - DNA, 22 bp, synthetic construct
  misc_feature 1..22: note = chemically synthesized
  source 1..22: mol_type = other DNA
tgaggcattctcccctttattt

SEQ ID NO: 154460 - DNA, 22 bp, synthetic construct
  misc_feature 1..22: note = chemically synthesized
  source 1..22: mol_type = other DNA
gaggcattctcccctttatttt

SEQ ID NO: 154461 - DNA, 22 bp, synthetic construct
  misc_feature 1..22: note = chemically synthesized
  source 1..22: mol_type = other DNA
aggcattctcccctttattttg

SEQ ID NO: 154462 - DNA, 22 bp, synthetic construct
  misc_feature 1..22: note = chemically synthesized
  source 1..22: mol_type = other DNA
tcccctttattttggctattag

SEQ ID NO: 154463 - DNA, 22 bp, synthetic construct
  misc_feature 1..22: note = chemically synthesized
  source 1..22: mol_type = other DNA
ccctttattttggctattagaa

SEQ ID NO: 154464 - DNA, 22 bp, synthetic construct
  misc_feature 1..22: note = chemically synthesized
  source 1..22: mol_type = other DNA
tattttggctattagaactcgg

SEQ ID NO: 154465 - DNA, 22 bp, synthetic construct
  misc_feature 1..22: note = chemically synthesized
  source 1..22: mol_type = other DNA
attttggctattagaactcggc

SEQ ID NO: 154466 - DNA, 22 bp, synthetic construct
  misc_feature 1..22: note = chemically synthesized
  source 1..22: mol_type = other DNA
ttttggctattagaactcggct

SEQ ID NO: 154467 - DNA, 22 bp, synthetic construct
  misc_feature 1..22: note = chemically synthesized
  source 1..22: mol_type = other DNA
tggctattagaactcggctcct

SEQ ID NO: 154468 - DNA, 22 bp, synthetic construct
  misc_feature 1..22: note = chemically synthesized
  source 1..22: mol_type = other DNA
ggctattagaactcggctcctc

SEQ ID NO: 154469 - DNA, 22 bp, synthetic construct
  misc_feature 1..22: note = chemically synthesized
  source 1..22: mol_type = other DNA
gctattagaactcggctcctct

SEQ ID NO: 154470 - DNA, 22 bp, synthetic construct
  misc_feature 1..22: note = chemically synthesized
  source 1..22: mol_type = other DNA
ttagaactcggctcctcttcat

SEQ ID NO: 154471 - DNA, 22 bp, synthetic construct
  misc_feature 1..22: note = chemically synthesized
  source 1..22: mol_type = other DNA
gaactcggctcctcttcattta

SEQ ID NO: 154472 - DNA, 22 bp, synthetic construct
  misc_feature 1..22: note = chemically synthesized
  source 1..22: mol_type = other DNA
ggctcctcttcatttatgcaaa

SEQ ID NO: 154473 - DNA, 22 bp, synthetic construct
  misc_feature 1..22: note = chemically synthesized
  source 1..22: mol_type = other DNA
ctcttcatttatgcaaatttct

SEQ ID NO: 154474 - DNA, 22 bp, synthetic construct
  misc_feature 1..22: note = chemically synthesized
  source 1..22: mol_type = other DNA
ttcatttatgcaaatttctaca

SEQ ID NO: 154475 - DNA, 22 bp, synthetic construct
  misc_feature 1..22: note = chemically synthesized
  source 1..22: mol_type = other DNA
catttatgcaaatttctacagc

SEQ ID NO: 154476 - DNA, 22 bp, synthetic construct
  misc_feature 1..22: note = chemically synthesized
  source 1..22: mol_type = other DNA
atttatgcaaatttctacagcc

SEQ ID NO: 154477 - DNA, 22 bp, synthetic construct
  misc_feature 1..22: note = chemically synthesized
  source 1..22: mol_type = other DNA
atgcaaatttctacagcctgct

SEQ ID NO: 154478 - DNA, 22 bp, synthetic construct
  misc_feature 1..22: note = chemically synthesized
  source 1..22: mol_type = other DNA
tgcaaatttctacagcctgctt

SEQ ID NO: 154479 - DNA, 22 bp, synthetic construct
  misc_feature 1..22: note = chemically synthesized
  source 1..22: mol_type = other DNA
ctacagcctgcttgaattgctc

SEQ ID NO: 154480 - DNA, 22 bp, synthetic construct
  misc_feature 1..22: note = chemically synthesized
  source 1..22: mol_type = other DNA
tacagcctgcttgaattgctcc

SEQ ID NO: 154481 - DNA, 22 bp, synthetic construct
  misc_feature 1..22: note = chemically synthesized
  source 1..22: mol_type = other DNA
cagcctgcttgaattgctcctt

SEQ ID NO: 154482 - DNA, 22 bp, synthetic construct
  misc_feature 1..22: note = chemically synthesized
  source 1..22: mol_type = other DNA
cttgaattgctcctttgaaaat

SEQ ID NO: 154483 - DNA, 22 bp, synthetic construct
  misc_feature 1..22: note = chemically synthesized
  source 1..22: mol_type = other DNA
gaattgctcctttgaaaatgag

SEQ ID NO: 154484 - DNA, 22 bp, synthetic construct
  misc_feature 1..22: note = chemically synthesized
  source 1..22: mol_type = other DNA
aattgctcctttgaaaatgagc

SEQ ID NO: 154485 - DNA, 22 bp, synthetic construct
  misc_feature 1..22: note = chemically synthesized
  source 1..22: mol_type = other DNA
ctcctttgaaaatgagcttctg

SEQ ID NO: 154486 - DNA, 22 bp, synthetic construct
  misc_feature 1..22: note = chemically synthesized
  source 1..22: mol_type = other DNA
ctttgaaaatgagcttctgttt

SEQ ID NO: 154487 - DNA, 22 bp, synthetic construct
  misc_feature 1..22: note = chemically synthesized
  source 1..22: mol_type = other DNA
tgaaaatgagcttctgttttct

SEQ ID NO: 154488 - DNA, 22 bp, synthetic construct
  misc_feature 1..22: note = chemically synthesized
  source 1..22: mol_type = other DNA
gaaaatgagcttctgttttcta

SEQ ID NO: 154489 - DNA, 22 bp, synthetic construct
  misc_feature 1..22: note = chemically synthesized
  source 1..22: mol_type = other DNA
aaaatgagcttctgttttctac

SEQ ID NO: 154490 - DNA, 22 bp, synthetic construct
  misc_feature 1..22: note = chemically synthesized
  source 1..22: mol_type = other DNA
ctgttttctaccacatggccga

SEQ ID NO: 154491 - DNA, 22 bp, synthetic construct
  misc_feature 1..22: note = chemically synthesized
  source 1..22: mol_type = other DNA
tgttttctaccacatggccgag

SEQ ID NO: 154492 - DNA, 22 bp, synthetic construct
  misc_feature 1..22: note = chemically synthesized
  source 1..22: mol_type = other DNA
ttttctaccacatggccgagca

SEQ ID NO: 154493 - DNA, 22 bp, synthetic construct
  misc_feature 1..22: note = chemically synthesized
  source 1..22: mol_type = other DNA
tctaccacatggccgagcagat

SEQ ID NO: 154494 - DNA, 22 bp, synthetic construct
  misc_feature 1..22: note = chemically synthesized
  source 1..22: mol_type = other DNA
ctaccacatggccgagcagata

SEQ ID NO: 154495 - DNA, 22 bp, synthetic construct
  misc_feature 1..22: note = chemically synthesized
  source 1..22: mol_type = other DNA
taccacatggccgagcagataa

SEQ ID NO: 154496 - DNA, 22 bp, synthetic construct
  misc_feature 1..22: note = chemically synthesized
  source 1..22: mol_type = other DNA
ccacatggccgagcagataatt

SEQ ID NO: 154497 - DNA, 22 bp, synthetic construct
  misc_feature 1..22: note = chemically synthesized
  source 1..22: mol_type = other DNA
tccaaacttttatgctctgctt

SEQ ID NO: 154498 - DNA, 22 bp, synthetic construct
  misc_feature 1..22: note = chemically synthesized
  source 1..22: mol_type = other DNA
ccaaacttttatgctctgcttc

SEQ ID NO: 154499 - DNA, 22 bp, synthetic construct
  misc_feature 1..22: note = chemically synthesized
  source 1..22: mol_type = other DNA
caaacttttatgctctgcttcc

SEQ ID NO: 154500 - DNA, 22 bp, synthetic construct
  misc_feature 1..22: note = chemically synthesized
  source 1..22: mol_type = other DNA
ttatgctctgcttcccttttaa

SEQ ID NO: 154501 - DNA, 22 bp, synthetic construct
  misc_feature 1..22: note = chemically synthesized
  source 1..22: mol_type = other DNA
tatgctctgcttcccttttaaa

SEQ ID NO: 154502 - DNA, 22 bp, synthetic construct
  misc_feature 1..22: note = chemically synthesized
  source 1..22: mol_type = other DNA
atgctctgcttcccttttaaat

SEQ ID NO: 154503 - DNA, 22 bp, synthetic construct
  misc_feature 1..22: note = chemically synthesized
  source 1..22: mol_type = other DNA
tgctctgcttcccttttaaata

SEQ ID NO: 154504 - DNA, 22 bp, synthetic construct
  misc_feature 1..22: note = chemically synthesized
  source 1..22: mol_type = other DNA
tgcttcccttttaaatataagt

SEQ ID NO: 154505 - DNA, 22 bp, synthetic construct
  misc_feature 1..22: note = chemically synthesized
  source 1..22: mol_type = other DNA
cttcccttttaaatataagttc

SEQ ID NO: 154506 - DNA, 22 bp, synthetic construct
  misc_feature 1..22: note = chemically synthesized
  source 1..22: mol_type = other DNA
cccttttaaatataagttctga

SEQ ID NO: 154507 - DNA, 22 bp, synthetic construct
  misc_feature 1..22: note = chemically synthesized
  source 1..22: mol_type = other DNA
ccttttaaatataagttctgat

SEQ ID NO: 154508 - DNA, 22 bp, synthetic construct
  misc_feature 1..22: note = chemically synthesized
  source 1..22: mol_type = other DNA
ttaaatataagttctgatttta

SEQ ID NO: 154509 - DNA, 22 bp, synthetic construct
  misc_feature 1..22: note = chemically synthesized
  source 1..22: mol_type = other DNA
taaatataagttctgattttat

SEQ ID NO: 154510 - DNA, 22 bp, synthetic construct
  misc_feature 1..22: note = chemically synthesized
  source 1..22: mol_type = other DNA
aaatataagttctgattttatg

SEQ ID NO: 154511 - DNA, 22 bp, synthetic construct
  misc_feature 1..22: note = chemically synthesized
  source 1..22: mol_type = other DNA
aatataagttctgattttatgt

SEQ ID NO: 154512 - DNA, 22 bp, synthetic construct
  misc_feature 1..22: note = chemically synthesized
  source 1..22: mol_type = other DNA
tgattttatgttatttctttgc

SEQ ID NO: 154513 - DNA, 22 bp, synthetic construct
  misc_feature 1..22: note = chemically synthesized
  source 1..22: mol_type = other DNA
attttatgttatttctttgctc

SEQ ID NO: 154514 - DNA, 22 bp, synthetic construct
  misc_feature 1..22: note = chemically synthesized
  source 1..22: mol_type = other DNA
tatgttatttctttgctcacac

SEQ ID NO: 154515 - DNA, 22 bp, synthetic construct
  misc_feature 1..22: note = chemically synthesized
  source 1..22: mol_type = other DNA
atgttatttctttgctcacaca

SEQ ID NO: 154516 - DNA, 22 bp, synthetic construct
  misc_feature 1..22: note = chemically synthesized
  source 1..22: mol_type = other DNA
tgttatttctttgctcacacat

SEQ ID NO: 154517 - DNA, 22 bp, synthetic construct
  misc_feature 1..22: note = chemically synthesized
  source 1..22: mol_type = other DNA
tttctttgctcacacatatgag

SEQ ID NO: 154518 - DNA, 22 bp, synthetic construct
  misc_feature 1..22: note = chemically synthesized
  source 1..22: mol_type = other DNA
ctttgctcacacatatgagcat

SEQ ID NO: 154519 - DNA, 22 bp, synthetic construct
  misc_feature 1..22: note = chemically synthesized
  source 1..22: mol_type = other DNA
tttgctcacacatatgagcata

SEQ ID NO: 154520 - DNA, 22 bp, synthetic construct
  misc_feature 1..22: note = chemically synthesized
  source 1..22: mol_type = other DNA
tgctcacacatatgagcatagg

SEQ ID NO: 154521 - DNA, 22 bp, synthetic construct
  misc_feature 1..22: note = chemically synthesized
  source 1..22: mol_type = other DNA
gctcacacatatgagcataggt

SEQ ID NO: 154522 - DNA, 22 bp, synthetic construct
  misc_feature 1..22: note = chemically synthesized
  source 1..22: mol_type = other DNA
ctcacacatatgagcataggtt

SEQ ID NO: 154523 - DNA, 22 bp, synthetic construct
  misc_feature 1..22: note = chemically synthesized
  source 1..22: mol_type = other DNA
acacatatgagcataggttgtt

SEQ ID NO: 154524 - DNA, 22 bp, synthetic construct
  misc_feature 1..22: note = chemically synthesized
  source 1..22: mol_type = other DNA
ttagaagcagccaggacacatc

SEQ ID NO: 154525 - DNA, 22 bp, synthetic construct
  misc_feature 1..22: note = chemically synthesized
  source 1..22: mol_type = other DNA
gaagcagccaggacacatcttg

SEQ ID NO: 154526 - DNA, 22 bp, synthetic construct
  misc_feature 1..22: note = chemically synthesized
  source 1..22: mol_type = other DNA
gaacaccttgctgcttagaaac

SEQ ID NO: 154527 - DNA, 22 bp, synthetic construct
  misc_feature 1..22: note = chemically synthesized
  source 1..22: mol_type = other DNA
aacaccttgctgcttagaaact

SEQ ID NO: 154528 - DNA, 22 bp, synthetic construct
  misc_feature 1..22: note = chemically synthesized
  source 1..22: mol_type = other DNA
gctgcttagaaacttctgtcac

SEQ ID NO: 154529 - DNA, 22 bp, synthetic construct
  misc_feature 1..22: note = chemically synthesized
  source 1..22: mol_type = other DNA
ctgcttagaaacttctgtcaca

SEQ ID NO: 154530 - DNA, 22 bp, synthetic construct
  misc_feature 1..22: note = chemically synthesized
  source 1..22: mol_type = other DNA
cttagaaacttctgtcacataa

SEQ ID NO: 154531 - DNA, 22 bp, synthetic construct
  misc_feature 1..22: note = chemically synthesized
  source 1..22: mol_type = other DNA
agaaacttctgtcacataactt

SEQ ID NO: 154532 - DNA, 22 bp, synthetic construct
  misc_feature 1..22: note = chemically synthesized
  source 1..22: mol_type = other DNA
gaaacttctgtcacataactta

SEQ ID NO: 154533 - DNA, 22 bp, synthetic construct
  misc_feature 1..22: note = chemically synthesized
  source 1..22: mol_type = other DNA
ctgtcacataacttaaataata

SEQ ID NO: 154534 - DNA, 22 bp, synthetic construct
  misc_feature 1..22: note = chemically synthesized
  source 1..22: mol_type = other DNA
tgtcacataacttaaataatat

SEQ ID NO: 154535 - DNA, 22 bp, synthetic construct
  misc_feature 1..22: note = chemically synthesized
  source 1..22: mol_type = other DNA
tcacataacttaaataatatta

SEQ ID NO: 154536 - DNA, 22 bp, synthetic construct
  misc_feature 1..22: note = chemically synthesized
  source 1..22: mol_type = other DNA
aaataatattatcaacttcgaa

SEQ ID NO: 154537 - DNA, 22 bp, synthetic construct
  misc_feature 1..22: note = chemically synthesized
  source 1..22: mol_type = other DNA
aataatattatcaacttcgaat

SEQ ID NO: 154538 - DNA, 22 bp, synthetic construct
  misc_feature 1..22: note = chemically synthesized
  source 1..22: mol_type = other DNA
tcaacttcgaatttccacagat

SEQ ID NO: 154539 - DNA, 22 bp, synthetic construct
  misc_feature 1..22: note = chemically synthesized
  source 1..22: mol_type = other DNA
cgaatttccacagattctctaa

SEQ ID NO: 154540 - DNA, 22 bp, synthetic construct
  misc_feature 1..22: note = chemically synthesized
  source 1..22: mol_type = other DNA
gaatttccacagattctctaag

SEQ ID NO: 154541 - DNA, 22 bp, synthetic construct
  misc_feature 1..22: note = chemically synthesized
  source 1..22: mol_type = other DNA
ccacagattctctaaggtagag

SEQ ID NO: 154542 - DNA, 22 bp, synthetic construct
  misc_feature 1..22: note = chemically synthesized
  source 1..22: mol_type = other DNA
cacagattctctaaggtagagg

SEQ ID NO: 154543 - DNA, 22 bp, synthetic construct
  misc_feature 1..22: note = chemically synthesized
  source 1..22: mol_type = other DNA
tctaaggtagaggcacagtgca

SEQ ID NO: 154544 - DNA, 22 bp, synthetic construct
  misc_feature 1..22: note = chemically synthesized
  source 1..22: mol_type = other DNA
taaggtagaggcacagtgcagt

SEQ ID NO: 154545 - DNA, 22 bp, synthetic construct
  misc_feature 1..22: note = chemically synthesized
  source 1..22: mol_type = other DNA
aggtagaggcacagtgcagtca

SEQ ID NO: 154546 - DNA, 22 bp, synthetic construct
  misc_feature 1..22: note = chemically synthesized
  source 1..22: mol_type = other DNA
tttgctaatgtataacaaaagt

SEQ ID NO: 154547 - DNA, 22 bp, synthetic construct
  misc_feature 1..22: note = chemically synthesized
  source 1..22: mol_type = other DNA
tgctaatgtataacaaaagtga

SEQ ID NO: 154548 - DNA, 22 bp, synthetic construct
  misc_feature 1..22: note = chemically synthesized
  source 1..22: mol_type = other DNA
gctaatgtataacaaaagtgac

SEQ ID NO: 154549 - DNA, 22 bp, synthetic construct
  misc_feature 1..22: note = chemically synthesized
  source 1..22: mol_type = other DNA
ctaatgtataacaaaagtgacc

SEQ ID NO: 154550 - DNA, 22 bp, synthetic construct
  misc_feature 1..22: note = chemically synthesized
  source 1..22: mol_type = other DNA
atgtataacaaaagtgaccttt

SEQ ID NO: 154551 - DNA, 22 bp, synthetic construct
  misc_feature 1..22: note = chemically synthesized
  source 1..22: mol_type = other DNA
tgctccagtttccaataaattc

SEQ ID NO: 154552 - DNA, 22 bp, synthetic construct
  misc_feature 1..22: note = chemically synthesized
  source 1..22: mol_type = other DNA
gctccagtttccaataaattca

SEQ ID NO: 154553 - DNA, 22 bp, synthetic construct
  misc_feature 1..22: note = chemically synthesized
  source 1..22: mol_type = other DNA
ctccagtttccaataaattcat

SEQ ID NO: 154554 - DNA, 22 bp, synthetic construct
  misc_feature 1..22: note = chemically synthesized
  source 1..22: mol_type = other DNA
cagtttccaataaattcatttc

SEQ ID NO: 154555 - DNA, 22 bp, synthetic construct
  misc_feature 1..22: note = chemically synthesized
  source 1..22: mol_type = other DNA
ccaataaattcatttccatctg

SEQ ID NO: 154556 - DNA, 22 bp, synthetic construct
  misc_feature 1..22: note = chemically synthesized
  source 1..22: mol_type = other DNA
caataaattcatttccatctga

SEQ ID NO: 154557 - DNA, 22 bp, synthetic construct
  misc_feature 1..22: note = chemically synthesized
  source 1..22: mol_type = other DNA
atttccatctgagaccacctca

SEQ ID NO: 154558 - DNA, 22 bp, synthetic construct
  misc_feature 1..22: note = chemically synthesized
  source 1..22: mol_type = other DNA
ccatctgagaccacctcagcct

SEQ ID NO: 154559 - DNA, 22 bp, synthetic construct
  misc_feature 1..22: note = chemically synthesized
  source 1..22: mol_type = other DNA
catctgagaccacctcagcctg

SEQ ID NO: 154560 - DNA, 22 bp, synthetic construct
  misc_feature 1..22: note = chemically synthesized
  source 1..22: mol_type = other DNA
agaccacctcagcctggacttc

SEQ ID NO: 154561 - DNA, 22 bp, synthetic construct
  misc_feature 1..22: note = chemically synthesized
  source 1..22: mol_type = other DNA
agcctggacttcattgtccata

SEQ ID NO: 154562 - DNA, 22 bp, synthetic construct
  misc_feature 1..22: note = chemically synthesized
  source 1..22: mol_type = other DNA
gacttcattgtccatatcacta

SEQ ID NO: 154563 - DNA, 22 bp, synthetic construct
  misc_feature 1..22: note = chemically synthesized
  source 1..22: mol_type = other DNA
cattgtccatatcactatcaga

SEQ ID NO: 154564 - DNA, 22 bp, synthetic construct
  misc_feature 1..22: note = chemically synthesized
  source 1..22: mol_type = other DNA
attgtccatatcactatcagaa

SEQ ID NO: 154565 - DNA, 22 bp, synthetic construct
  misc_feature 1..22: note = chemically synthesized
  source 1..22: mol_type = other DNA
tccatatcactatcagaatttt

SEQ ID NO: 154566 - DNA, 22 bp, synthetic construct
  misc_feature 1..22: note = chemically synthesized
  source 1..22: mol_type = other DNA
tcagaattttggtcacaaccat

SEQ ID NO: 154567 - DNA, 22 bp, synthetic construct
  misc_feature 1..22: note = chemically synthesized
  source 1..22: mol_type = other DNA
tggtcacaaccattccacaagt

SEQ ID NO: 154568 - DNA, 22 bp, synthetic construct
  misc_feature 1..22: note = chemically synthesized
  source 1..22: mol_type = other DNA
ggtcacaaccattccacaagtc

SEQ ID NO: 154569 - DNA, 22 bp, synthetic construct
  misc_feature 1..22: note = chemically synthesized
  source 1..22: mol_type = other DNA
gtcacaaccattccacaagtct

SEQ ID NO: 154570 - DNA, 22 bp, synthetic construct
  misc_feature 1..22: note = chemically synthesized
  source 1..22: mol_type = other DNA
cacaagtctctagaaagttcca

SEQ ID NO: 154571 - DNA, 22 bp, synthetic construct
  misc_feature 1..22: note = chemically synthesized
  source 1..22: mol_type = other DNA
tagaaagttccaaattctccct

SEQ ID NO: 154572 - DNA, 22 bp, synthetic construct
  misc_feature 1..22: note = chemically synthesized
  source 1..22: mol_type = other DNA
gaaagttccaaattctccctca

SEQ ID NO: 154573 - DNA, 22 bp, synthetic construct
  misc_feature 1..22: note = chemically synthesized
  source 1..22: mol_type = other DNA
caaattctccctcatctccctg

SEQ ID NO: 154574 - DNA, 22 bp, synthetic construct
  misc_feature 1..22: note = chemically synthesized
  source 1..22: mol_type = other DNA
tccctcatctccctgtcttctt

SEQ ID NO: 154575 - DNA, 22 bp, synthetic construct
  misc_feature 1..22: note = chemically synthesized
  source 1..22: mol_type = other DNA
cctcatctccctgtcttcttct

SEQ ID NO: 154576 - DNA, 22 bp, synthetic construct
  misc_feature 1..22: note = chemically synthesized
  source 1..22: mol_type = other DNA
atctccctgtcttcttctgagc

SEQ ID NO: 154577 - DNA, 22 bp, synthetic construct
  misc_feature 1..22: note = chemically synthesized
  source 1..22: mol_type = other DNA
cctgtcttcttctgagccgtcc

SEQ ID NO: 154578 - DNA, 22 bp, synthetic construct
  misc_feature 1..22: note = chemically synthesized
  source 1..22: mol_type = other DNA
tcttcttctgagccgtccacac

SEQ ID NO: 154579 - DNA, 22 bp, synthetic construct
  misc_feature 1..22: note = chemically synthesized
  source 1..22: mol_type = other DNA
cttctgagccgtccacactctt

SEQ ID NO: 154580 - DNA, 22 bp, synthetic construct
  misc_feature 1..22: note = chemically synthesized
  source 1..22: mol_type = other DNA
ttctgagccgtccacactcttc

SEQ ID NO: 154581 - DNA, 22 bp, synthetic construct
  misc_feature 1..22: note = chemically synthesized
  source 1..22: mol_type = other DNA
ctgagccgtccacactcttcca

SEQ ID NO: 154582 - DNA, 22 bp, synthetic construct
  misc_feature 1..22: note = chemically synthesized
  source 1..22: mol_type = other DNA
tgagccgtccacactcttccaa

SEQ ID NO: 154583 - DNA, 22 bp, synthetic construct
  misc_feature 1..22: note = chemically synthesized
  source 1..22: mol_type = other DNA
agccgtccacactcttccaact

SEQ ID NO: 154584 - DNA, 22 bp, synthetic construct
  misc_feature 1..22: note = chemically synthesized
  source 1..22: mol_type = other DNA
ttccaacttctgcctgttatcc

SEQ ID NO: 154585 - DNA, 22 bp, synthetic construct
  misc_feature 1..22: note = chemically synthesized
  source 1..22: mol_type = other DNA
ccaacttctgcctgttatccaa

SEQ ID NO: 154586 - DNA, 22 bp, synthetic construct
  misc_feature 1..22: note = chemically synthesized
  source 1..22: mol_type = other DNA
caacttctgcctgttatccaat

SEQ ID NO: 154587 - DNA, 22 bp, synthetic construct
  misc_feature 1..22: note = chemically synthesized
  source 1..22: mol_type = other DNA
ctgcctgttatccaatgccaaa

SEQ ID NO: 154588 - DNA, 22 bp, synthetic construct
  misc_feature 1..22: note = chemically synthesized
  source 1..22: mol_type = other DNA
tgcctgttatccaatgccaaag

SEQ ID NO: 154589 - DNA, 22 bp, synthetic construct
  misc_feature 1..22: note = chemically synthesized
  source 1..22: mol_type = other DNA
cctgttatccaatgccaaagtt

SEQ ID NO: 154590 - DNA, 22 bp, synthetic construct
  misc_feature 1..22: note = chemically synthesized
  source 1..22: mol_type = other DNA
ttatccaatgccaaagttgctt

SEQ ID NO: 154591 - DNA, 22 bp, synthetic construct
  misc_feature 1..22: note = chemically synthesized
  source 1..22: mol_type = other DNA
tccaatgccaaagttgcttcca

SEQ ID NO: 154592 - DNA, 22 bp, synthetic construct
  misc_feature 1..22: note = chemically synthesized
  source 1..22: mol_type = other DNA
cttccacattttcatgtatctt

SEQ ID NO: 154593 - DNA, 22 bp, synthetic construct
  misc_feature 1..22: note = chemically synthesized
  source 1..22: mol_type = other DNA
ccacattttcatgtatctttat

SEQ ID NO: 154594 - DNA, 22 bp, synthetic construct
  misc_feature 1..22: note = chemically synthesized
  source 1..22: mol_type = other DNA
cacattttcatgtatctttata

SEQ ID NO: 154595 - DNA, 22 bp, synthetic construct
  misc_feature 1..22: note = chemically synthesized
  source 1..22: mol_type = other DNA
tcatgtatctttatagcagtac

SEQ ID NO: 154596 - DNA, 22 bp, synthetic construct
  misc_feature 1..22: note = chemically synthesized
  source 1..22: mol_type = other DNA
catgtatctttatagcagtacc

SEQ ID NO: 154597 - DNA, 22 bp, synthetic construct
  misc_feature 1..22: note = chemically synthesized
  source 1..22: mol_type = other DNA
atgtatctttatagcagtaccc

SEQ ID NO: 154598 - DNA, 22 bp, synthetic construct
  misc_feature 1..22: note = chemically synthesized
  source 1..22: mol_type = other DNA
tatagcagtaccccacttttgg

SEQ ID NO: 154599 - DNA, 22 bp, synthetic construct
  misc_feature 1..22: note = chemically synthesized
  source 1..22: mol_type = other DNA
atagcagtaccccacttttggt

SEQ ID NO: 154600 - DNA, 22 bp, synthetic construct
  misc_feature 1..22: note = chemically synthesized
  source 1..22: mol_type = other DNA
tagcagtaccccacttttggta

SEQ ID NO: 154601 - DNA, 22 bp, synthetic construct
  misc_feature 1..22: note = chemically synthesized
  source 1..22: mol_type = other DNA
ttggtaccaattttctgtactg

SEQ ID NO: 154602 - DNA, 22 bp, synthetic construct
  misc_feature 1..22: note = chemically synthesized
  source 1..22: mol_type = other DNA
tggtaccaattttctgtactgg

SEQ ID NO: 154603 - DNA, 22 bp, synthetic construct
  misc_feature 1..22: note = chemically synthesized
  source 1..22: mol_type = other DNA
ggtaccaattttctgtactggt

SEQ ID NO: 154604 - DNA, 22 bp, synthetic construct
  misc_feature 1..22: note = chemically synthesized
  source 1..22: mol_type = other DNA
gtaccaattttctgtactggtc

SEQ ID NO: 154605 - DNA, 22 bp, synthetic construct
  misc_feature 1..22: note = chemically synthesized
  source 1..22: mol_type = other DNA
tctgtactggtccattctcatc

SEQ ID NO: 154606 - DNA, 22 bp, synthetic construct
  misc_feature 1..22: note = chemically synthesized
  source 1..22: mol_type = other DNA
ctgtactggtccattctcatct

SEQ ID NO: 154607 - DNA, 22 bp, synthetic construct
  misc_feature 1..22: note = chemically synthesized
  source 1..22: mol_type = other DNA
tgtactggtccattctcatctt

SEQ ID NO: 154608 - DNA, 22 bp, synthetic construct
  misc_feature 1..22: note = chemically synthesized
  source 1..22: mol_type = other DNA
tactggtccattctcatcttgc

SEQ ID NO: 154609 - DNA, 22 bp, synthetic construct
  misc_feature 1..22: note = chemically synthesized
  source 1..22: mol_type = other DNA
gtccattctcatcttgctataa

SEQ ID NO: 154610 - DNA, 22 bp, synthetic construct
  misc_feature 1..22: note = chemically synthesized
  source 1..22: mol_type = other DNA
tcatcttgctataaggaaatac

SEQ ID NO: 154611 - DNA, 22 bp, synthetic construct
  misc_feature 1..22: note = chemically synthesized
  source 1..22: mol_type = other DNA
atcttgctataaggaaatacct

SEQ ID NO: 154612 - DNA, 22 bp, synthetic construct
  misc_feature 1..22: note = chemically synthesized
  source 1..22: mol_type = other DNA
gctataaggaaatacctgagac

SEQ ID NO: 154613 - DNA, 22 bp, synthetic construct
  misc_feature 1..22: note = chemically synthesized
  source 1..22: mol_type = other DNA
ctataaggaaatacctgagact

SEQ ID NO: 154614 - DNA, 22 bp, synthetic construct
  misc_feature 1..22: note = chemically synthesized
  source 1..22: mol_type = other DNA
taaggaaatacctgagactggg

SEQ ID NO: 154615 - DNA, 22 bp, synthetic construct
  misc_feature 1..22: note = chemically synthesized
  source 1..22: mol_type = other DNA
agactgggtaaatggtgaagaa

SEQ ID NO: 154616 - DNA, 22 bp, synthetic construct
  misc_feature 1..22: note = chemically synthesized
  source 1..22: mol_type = other DNA
ggtaaatggtgaagaacagaga

SEQ ID NO: 154617 - DNA, 22 bp, synthetic construct
  misc_feature 1..22: note = chemically synthesized
  source 1..22: mol_type = other DNA
aattggctcacagttctaaagg

SEQ ID NO: 154618 - DNA, 22 bp, synthetic construct
  misc_feature 1..22: note = chemically synthesized
  source 1..22: mol_type = other DNA
attggctcacagttctaaaggc

SEQ ID NO: 154619 - DNA, 22 bp, synthetic construct
  misc_feature 1..22: note = chemically synthesized
  source 1..22: mol_type = other DNA
gctcacagttctaaaggctgta

SEQ ID NO: 154620 - DNA, 22 bp, synthetic construct
  misc_feature 1..22: note = chemically synthesized
  source 1..22: mol_type = other DNA
acagttctaaaggctgtacagg

SEQ ID NO: 154621 - DNA, 22 bp, synthetic construct
  misc_feature 1..22: note = chemically synthesized
  source 1..22: mol_type = other DNA
taaaggctgtacaggaagcatg

SEQ ID NO: 154622 - DNA, 22 bp, synthetic construct
  misc_feature 1..22: note = chemically synthesized
  source 1..22: mol_type = other DNA
aaggctgtacaggaagcatggc

SEQ ID NO: 154623 - DNA, 22 bp, synthetic construct
  misc_feature 1..22: note = chemically synthesized
  source 1..22: mol_type = other DNA
tacaggaagcatggcaacgtct

SEQ ID NO: 154624 - DNA, 22 bp, synthetic construct
  misc_feature 1..22: note = chemically synthesized
  source 1..22: mol_type = other DNA
ctcagcttctagggaggtttca

SEQ ID NO: 154625 - DNA, 22 bp, synthetic construct
  misc_feature 1..22: note = chemically synthesized
  source 1..22: mol_type = other DNA
agcttctagggaggtttcagga

SEQ ID NO: 154626 - DNA, 22 bp, synthetic construct
  misc_feature 1..22: note = chemically synthesized
  source 1..22: mol_type = other DNA
ctagggaggtttcaggaaactt

SEQ ID NO: 154627 - DNA, 22 bp, synthetic construct
  misc_feature 1..22: note = chemically synthesized
  source 1..22: mol_type = other DNA
tagggaggtttcaggaaactta

SEQ ID NO: 154628 - DNA, 22 bp, synthetic construct
  misc_feature 1..22: note = chemically synthesized
  source 1..22: mol_type = other DNA
gggaggtttcaggaaacttata

SEQ ID NO: 154629 - DNA, 22 bp, synthetic construct
  misc_feature 1..22: note = chemically synthesized
  source 1..22: mol_type = other DNA
caggaaacttataatcatggca

SEQ ID NO: 154630 - DNA, 22 bp, synthetic construct
  misc_feature 1..22: note = chemically synthesized
  source 1..22: mol_type = other DNA
aggaaacttataatcatggcag

SEQ ID NO: 154631 - DNA, 22 bp, synthetic construct
  misc_feature 1..22: note = chemically synthesized
  source 1..22: mol_type = other DNA
ataatcatggcagagagaaaaa

SEQ ID NO: 154632 - DNA, 22 bp, synthetic construct
  misc_feature 1..22: note = chemically synthesized
  source 1..22: mol_type = other DNA
taatcatggcagagagaaaaac

SEQ ID NO: 154633 - DNA, 22 bp, synthetic construct
  misc_feature 1..22: note = chemically synthesized
  source 1..22: mol_type = other DNA
cacatggctggagcaggaagaa

SEQ ID NO: 154634 - DNA, 22 bp, synthetic construct
  misc_feature 1..22: note = chemically synthesized
  source 1..22: mol_type = other DNA
acatggctggagcaggaagaag

SEQ ID NO: 154635 - DNA, 22 bp, synthetic construct
  misc_feature 1..22: note = chemically synthesized
  source 1..22: mol_type = other DNA
gagcaggaagaagaggcaggga

SEQ ID NO: 154636 - DNA, 22 bp, synthetic construct
  misc_feature 1..22: note = chemically synthesized
  source 1..22: mol_type = other DNA
atgagaactcacccactatacg

SEQ ID NO: 154637 - DNA, 22 bp, synthetic construct
  misc_feature 1..22: note = chemically synthesized
  source 1..22: mol_type = other DNA
acccactatacgtaccaaaagg

SEQ ID NO: 154638 - DNA, 22 bp, synthetic construct
  misc_feature 1..22: note = chemically synthesized
  source 1..22: mol_type = other DNA
tacgtaccaaaagggactgata

SEQ ID NO: 154639 - DNA, 22 bp, synthetic construct
  misc_feature 1..22: note = chemically synthesized
  source 1..22: mol_type = other DNA
atattaagctatttatgataac

SEQ ID NO: 154640 - DNA, 22 bp, synthetic construct
  misc_feature 1..22: note = chemically synthesized
  source 1..22: mol_type = other DNA
agctatttatgataactctgct

SEQ ID NO: 154641 - DNA, 22 bp, synthetic construct
  misc_feature 1..22: note = chemically synthesized
  source 1..22: mol_type = other DNA
tttatgataactctgctcctat

SEQ ID NO: 154642 - DNA, 22 bp, synthetic construct
  misc_feature 1..22: note = chemically synthesized
  source 1..22: mol_type = other DNA
atgataactctgctcctatgat

SEQ ID NO: 154643 - DNA, 22 bp, synthetic construct
  misc_feature 1..22: note = chemically synthesized
  source 1..22: mol_type = other DNA
tgataactctgctcctatgatc

SEQ ID NO: 154644 - DNA, 22 bp, synthetic construct
  misc_feature 1..22: note = chemically synthesized
  source 1..22: mol_type = other DNA
tgctcctatgatccaatcactt

SEQ ID NO: 154645 - DNA, 22 bp, synthetic construct
  misc_feature 1..22: note = chemically synthesized
  source 1..22: mol_type = other DNA
ctcctatgatccaatcacttcc

SEQ ID NO: 154646 - DNA, 22 bp, synthetic construct
  misc_feature 1..22: note = chemically synthesized
  source 1..22: mol_type = other DNA
ctatgatccaatcacttcccac

SEQ ID NO: 154647 - DNA, 22 bp, synthetic construct
  misc_feature 1..22: note = chemically synthesized
  source 1..22: mol_type = other DNA
tgatccaatcacttcccaccag

SEQ ID NO: 154648 - DNA, 22 bp, synthetic construct
  misc_feature 1..22: note = chemically synthesized
  source 1..22: mol_type = other DNA
cccaccaggccccatcttcaac

SEQ ID NO: 154649 - DNA, 22 bp, synthetic construct
  misc_feature 1..22: note = chemically synthesized
  source 1..22: mol_type = other DNA
ccaccaggccccatcttcaaca

SEQ ID NO: 154650 - DNA, 22 bp, synthetic construct
  misc_feature 1..22: note = chemically synthesized
  source 1..22: mol_type = other DNA
caacactggggattacagctga

SEQ ID NO: 154651 - DNA, 22 bp, synthetic construct
  misc_feature 1..22: note = chemically synthesized
  source 1..22: mol_type = other DNA
aacactggggattacagctgaa

SEQ ID NO: 154652 - DNA, 22 bp, synthetic construct
  misc_feature 1..22: note = chemically synthesized
  source 1..22: mol_type = other DNA
gggattacagctgaacatgaga

SEQ ID NO: 154653 - DNA, 22 bp, synthetic construct
  misc_feature 1..22: note = chemically synthesized
  source 1..22: mol_type = other DNA
cagctgaacatgagattagggt

SEQ ID NO: 154654 - DNA, 22 bp, synthetic construct
  misc_feature 1..22: note = chemically synthesized
  source 1..22: mol_type = other DNA
aacatgagattagggtggagac

SEQ ID NO: 154655 - DNA, 22 bp, synthetic construct
  misc_feature 1..22: note = chemically synthesized
  source 1..22: mol_type = other DNA
gggtggagacacagatccaaac

SEQ ID NO: 154656 - DNA, 22 bp, synthetic construct
  misc_feature 1..22: note = chemically synthesized
  source 1..22: mol_type = other DNA
ctcttgtgattaaacacaattc

SEQ ID NO: 154657 - DNA, 22 bp, synthetic construct
  misc_feature 1..22: note = chemically synthesized
  source 1..22: mol_type = other DNA
ttgtgattaaacacaattcaac

SEQ ID NO: 154658 - DNA, 22 bp, synthetic construct
  misc_feature 1..22: note = chemically synthesized
  source 1..22: mol_type = other DNA
gtgattaaacacaattcaacaa

SEQ ID NO: 154659 - DNA, 22 bp, synthetic construct
  misc_feature 1..22: note = chemically synthesized
  source 1..22: mol_type = other DNA
tgattaaacacaattcaacaaa

SEQ ID NO: 154660 - DNA, 22 bp, synthetic construct
  misc_feature 1..22: note = chemically synthesized
  source 1..22: mol_type = other DNA
aacacaattcaacaaaatacat

SEQ ID NO: 154661 - DNA, 22 bp, synthetic construct
  misc_feature 1..22: note = chemically synthesized
  source 1..22: mol_type = other DNA
aacaaaatacataaaatgtaag

SEQ ID NO: 154662 - DNA, 22 bp, synthetic construct
  misc_feature 1..22: note = chemically synthesized
  source 1..22: mol_type = other DNA
aactttgtttctttaatacaag

SEQ ID NO: 154663 - DNA, 22 bp, synthetic construct
  misc_feature 1..22: note = chemically synthesized
  source 1..22: mol_type = other DNA
tgtttctttaatacaagcagtc

SEQ ID NO: 154664 - DNA, 22 bp, synthetic construct
  misc_feature 1..22: note = chemically synthesized
  source 1..22: mol_type = other DNA
gtttctttaatacaagcagtcg

SEQ ID NO: 154665 - DNA, 22 bp, synthetic construct
  misc_feature 1..22: note = chemically synthesized
  source 1..22: mol_type = other DNA
tttctttaatacaagcagtcgt

SEQ ID NO: 154666 - DNA, 22 bp, synthetic construct
  misc_feature 1..22: note = chemically synthesized
  source 1..22: mol_type = other DNA
ctttaatacaagcagtcgtatt

SEQ ID NO: 154667 - DNA, 22 bp, synthetic construct
  misc_feature 1..22: note = chemically synthesized
  source 1..22: mol_type = other DNA
tttaatacaagcagtcgtattg

SEQ ID NO: 154668 - DNA, 22 bp, synthetic construct
  misc_feature 1..22: note = chemically synthesized
  source 1..22: mol_type = other DNA
taatacaagcagtcgtattggc

SEQ ID NO: 154669 - DNA, 22 bp, synthetic construct
  misc_feature 1..22: note = chemically synthesized
  source 1..22: mol_type = other DNA
aatacaagcagtcgtattggct

SEQ ID NO: 154670 - DNA, 22 bp, synthetic construct
  misc_feature 1..22: note = chemically synthesized
  source 1..22: mol_type = other DNA
atacaagcagtcgtattggctt

SEQ ID NO: 154671 - DNA, 22 bp, synthetic construct
  misc_feature 1..22: note = chemically synthesized
  source 1..22: mol_type = other DNA
gcttctatacaagtttatctct

SEQ ID NO: 154672 - DNA, 22 bp, synthetic construct
  misc_feature 1..22: note = chemically synthesized
  source 1..22: mol_type = other DNA
ctatacaagtttatctctgcac

SEQ ID NO: 154673 - DNA, 22 bp, synthetic construct
  misc_feature 1..22: note = chemically synthesized
  source 1..22: mol_type = other DNA
tatacaagtttatctctgcacg

SEQ ID NO: 154674 - DNA, 22 bp, synthetic construct
  misc_feature 1..22: note = chemically synthesized
  source 1..22: mol_type = other DNA
tacaagtttatctctgcacgac

SEQ ID NO: 154675 - DNA, 22 bp, synthetic construct
  misc_feature 1..22: note = chemically synthesized
  source 1..22: mol_type = other DNA
atctctgcacgacacacatatt

SEQ ID NO: 154676 - DNA, 22 bp, synthetic construct
  misc_feature 1..22: note = chemically synthesized
  source 1..22: mol_type = other DNA
tctctgcacgacacacatatta

SEQ ID NO: 154677 - DNA, 22 bp, synthetic construct
  misc_feature 1..22: note = chemically synthesized
  source 1..22: mol_type = other DNA
tgcacgacacacatattatgat

SEQ ID NO: 154678 - DNA, 22 bp, synthetic construct
  misc_feature 1..22: note = chemically synthesized
  source 1..22: mol_type = other DNA
cacgacacacatattatgatgt

SEQ ID NO: 154679 - DNA, 22 bp, synthetic construct
  misc_feature 1..22: note = chemically synthesized
  source 1..22: mol_type = other DNA
tgatgtattagaaggaagataa

SEQ ID NO: 154680 - DNA, 22 bp, synthetic construct
  misc_feature 1..22: note = chemically synthesized
  source 1..22: mol_type = other DNA
gaaggaagataaatgtcatcaa

SEQ ID NO: 154681 - DNA, 22 bp, synthetic construct
  misc_feature 1..22: note = chemically synthesized
  source 1..22: mol_type = other DNA
attaaggcaggtcctggtgtat

SEQ ID NO: 154682 - DNA, 22 bp, synthetic construct
  misc_feature 1..22: note = chemically synthesized
  source 1..22: mol_type = other DNA
ttaaggcaggtcctggtgtatc

SEQ ID NO: 154683 - DNA, 22 bp, synthetic construct
  misc_feature 1..22: note = chemically synthesized
  source 1..22: mol_type = other DNA
aggcaggtcctggtgtatcctt

SEQ ID NO: 154684 - DNA, 22 bp, synthetic construct
  misc_feature 1..22: note = chemically synthesized
  source 1..22: mol_type = other DNA
gtgtatccttccttaaagaaaa

SEQ ID NO: 154685 - DNA, 22 bp, synthetic construct
  misc_feature 1..22: note = chemically synthesized
  source 1..22: mol_type = other DNA
ccttaaagaaaagtatctaata

SEQ ID NO: 154686 - DNA, 22 bp, synthetic construct
  misc_feature 1..22: note = chemically synthesized
  source 1..22: mol_type = other DNA
cttaaagaaaagtatctaataa

SEQ ID NO: 154687 - DNA, 22 bp, synthetic construct
  misc_feature 1..22: note = chemically synthesized
  source 1..22: mol_type = other DNA
aaagaaaagtatctaataacct

SEQ ID NO: 154688 - DNA, 22 bp, synthetic construct
  misc_feature 1..22: note = chemically synthesized
  source 1..22: mol_type = other DNA
aagaaaagtatctaataacctt

SEQ ID NO: 154689 - DNA, 22 bp, synthetic construct
  misc_feature 1..22: note = chemically synthesized
  source 1..22: mol_type = other DNA
ataaccttacgttagctaaacg

SEQ ID NO: 154690 - DNA, 22 bp, synthetic construct
  misc_feature 1..22: note = chemically synthesized
  source 1..22: mol_type = other DNA
acgttagctaaacgaagagata

SEQ ID NO: 154691 - DNA, 22 bp, synthetic construct
  misc_feature 1..22: note = chemically synthesized
  source 1..22: mol_type = other DNA
cgttagctaaacgaagagataa

SEQ ID NO: 154692 - DNA, 22 bp, synthetic construct
  misc_feature 1..22: note = chemically synthesized
  source 1..22: mol_type = other DNA
gctaaacgaagagataatatat

SEQ ID NO: 154693 - DNA, 22 bp, synthetic construct
  misc_feature 1..22: note = chemically synthesized
  source 1..22: mol_type = other DNA
aacgaagagataatatattagt

SEQ ID NO: 154694 - DNA, 22 bp, synthetic construct
  misc_feature 1..22: note = chemically synthesized
  source 1..22: mol_type = other DNA
gtaattcttcccagataaagat

SEQ ID NO: 154695 - DNA, 22 bp, synthetic construct
  misc_feature 1..22: note = chemically synthesized
  source 1..22: mol_type = other DNA
ttcccagataaagatcatctct

SEQ ID NO: 154696 - DNA, 22 bp, synthetic construct
  misc_feature 1..22: note = chemically synthesized
  source 1..22: mol_type = other DNA
cccagataaagatcatctctaa

SEQ ID NO: 154697 - DNA, 22 bp, synthetic construct
  misc_feature 1..22: note = chemically synthesized
  source 1..22: mol_type = other DNA
ccagataaagatcatctctaaa

SEQ ID NO: 154698 - DNA, 22 bp, synthetic construct
  misc_feature 1..22: note = chemically synthesized
  source 1..22: mol_type = other DNA
taaagtaattcacaaactccac

SEQ ID NO: 154699 - DNA, 22 bp, synthetic construct
  misc_feature 1..22: note = chemically synthesized
  source 1..22: mol_type = other DNA
aagtaattcacaaactccacct

SEQ ID NO: 154700 - DNA, 22 bp, synthetic construct
  misc_feature 1..22: note = chemically synthesized
  source 1..22: mol_type = other DNA
acaaactccacctggaaagaag

SEQ ID NO: 154701 - DNA, 22 bp, synthetic construct
  misc_feature 1..22: note = chemically synthesized
  source 1..22: mol_type = other DNA
cacctggaaagaagagtggcta

SEQ ID NO: 154702 - DNA, 22 bp, synthetic construct
  misc_feature 1..22: note = chemically synthesized
  source 1..22: mol_type = other DNA
gaaagaagagtggctattgctc

SEQ ID NO: 154703 - DNA, 22 bp, synthetic construct
  misc_feature 1..22: note = chemically synthesized
  source 1..22: mol_type = other DNA
ttgctcaagctattcttcaatg

SEQ ID NO: 154704 - DNA, 22 bp, synthetic construct
  misc_feature 1..22: note = chemically synthesized
  source 1..22: mol_type = other DNA
ctcaagctattcttcaatgtgg

SEQ ID NO: 154705 - DNA, 22 bp, synthetic construct
  misc_feature 1..22: note = chemically synthesized
  source 1..22: mol_type = other DNA
aagctattcttcaatgtggcag

SEQ ID NO: 154706 - DNA, 22 bp, synthetic construct
  misc_feature 1..22: note = chemically synthesized
  source 1..22: mol_type = other DNA
ttcttcaatgtggcaggggaaa

SEQ ID NO: 154707 - DNA, 22 bp, synthetic construct
  misc_feature 1..22: note = chemically synthesized
  source 1..22: mol_type = other DNA
ttcaatgtggcaggggaaaaat

SEQ ID NO: 154708 - DNA, 22 bp, synthetic construct
  misc_feature 1..22: note = chemically synthesized
  source 1..22: mol_type = other DNA
caatgtggcaggggaaaaatct

SEQ ID NO: 154709 - DNA, 22 bp, synthetic construct
  misc_feature 1..22: note = chemically synthesized
  source 1..22: mol_type = other DNA
aatgtggcaggggaaaaatctt

SEQ ID NO: 154710 - DNA, 22 bp, synthetic construct
  misc_feature 1..22: note = chemically synthesized
  source 1..22: mol_type = other DNA
tgaaaaagctacaagactctgc

SEQ ID NO: 154711 - DNA, 22 bp, synthetic construct
  misc_feature 1..22: note = chemically synthesized
  source 1..22: mol_type = other DNA
gaaaaagctacaagactctgca

SEQ ID NO: 154712 - DNA, 22 bp, synthetic construct
  misc_feature 1..22: note = chemically synthesized
  source 1..22: mol_type = other DNA
aaaaagctacaagactctgcaa

SEQ ID NO: 154713 - DNA, 22 bp, synthetic construct
  misc_feature 1..22: note = chemically synthesized
  source 1..22: mol_type = other DNA
caagactctgcaaatattgatt

SEQ ID NO: 154714 - DNA, 22 bp, synthetic construct
  misc_feature 1..22: note = chemically synthesized
  source 1..22: mol_type = other DNA
tgcaaatattgattccaaccac

SEQ ID NO: 154715 - DNA, 22 bp, synthetic construct
  misc_feature 1..22: note = chemically synthesized
  source 1..22: mol_type = other DNA
caaatattgattccaaccactg

SEQ ID NO: 154716 - DNA, 22 bp, synthetic construct
  misc_feature 1..22: note = chemically synthesized
  source 1..22: mol_type = other DNA
attccaaccactgagaaactct

SEQ ID NO: 154717 - DNA, 22 bp, synthetic construct
  misc_feature 1..22: note = chemically synthesized
  source 1..22: mol_type = other DNA
caaccactgagaaactctacag

SEQ ID NO: 154718 - DNA, 22 bp, synthetic construct
  misc_feature 1..22: note = chemically synthesized
  source 1..22: mol_type = other DNA
agaaactctacagcagggatgt

SEQ ID NO: 154719 - DNA, 22 bp, synthetic construct
  misc_feature 1..22: note = chemically synthesized
  source 1..22: mol_type = other DNA
tacagcagggatgtccaatctt

SEQ ID NO: 154720 - DNA, 22 bp, synthetic construct
  misc_feature 1..22: note = chemically synthesized
  source 1..22: mol_type = other DNA
cagcagggatgtccaatctttt

SEQ ID NO: 154721 - DNA, 22 bp, synthetic construct
  misc_feature 1..22: note = chemically synthesized
  source 1..22: mol_type = other DNA
ttggcttccctgggccacacat

SEQ ID NO: 154722 - DNA, 22 bp, synthetic construct
  misc_feature 1..22: note = chemically synthesized
  source 1..22: mol_type = other DNA
tggcttccctgggccacacata

SEQ ID NO: 154723 - DNA, 22 bp, synthetic construct
  misc_feature 1..22: note = chemically synthesized
  source 1..22: mol_type = other DNA
ggcttccctgggccacacataa

SEQ ID NO: 154724 - DNA, 22 bp, synthetic construct
  misc_feature 1..22: note = chemically synthesized
  source 1..22: mol_type = other DNA
gcttccctgggccacacataaa

SEQ ID NO: 154725 - DNA, 22 bp, synthetic construct
  misc_feature 1..22: note = chemically synthesized
  source 1..22: mol_type = other DNA
ccctgggccacacataaaatat

SEQ ID NO: 154726 - DNA, 22 bp, synthetic construct
  misc_feature 1..22: note = chemically synthesized
  source 1..22: mol_type = other DNA
cctgggccacacataaaatata

SEQ ID NO: 154727 - DNA, 22 bp, synthetic construct
  misc_feature 1..22: note = chemically synthesized
  source 1..22: mol_type = other DNA
ggccacacataaaatatactaa

SEQ ID NO: 154728 - DNA, 22 bp, synthetic construct
  misc_feature 1..22: note = chemically synthesized
  source 1..22: mol_type = other DNA
acactaatgacagctcatgagc

SEQ ID NO: 154729 - DNA, 22 bp, synthetic construct
  misc_feature 1..22: note = chemically synthesized
  source 1..22: mol_type = other DNA
atgacagctcatgagccaaaaa

SEQ ID NO: 154730 - DNA, 22 bp, synthetic construct
  misc_feature 1..22: note = chemically synthesized
  source 1..22: mol_type = other DNA
atgagccaaaaaaaaaaaaaaa

SEQ ID NO: 154731 - DNA, 22 bp, synthetic construct
  misc_feature 1..22: note = chemically synthesized
  source 1..22: mol_type = other DNA
ataatgttttaagaaagttgtg

SEQ ID NO: 154732 - DNA, 22 bp, synthetic construct
  misc_feature 1..22: note = chemically synthesized
  source 1..22: mol_type = other DNA
taagaaagttgtgttggatagc

SEQ ID NO: 154733 - DNA, 22 bp, synthetic construct
  misc_feature 1..22: note = chemically synthesized
  source 1..22: mol_type = other DNA
aagaaagttgtgttggatagca

SEQ ID NO: 154734 - DNA, 22 bp, synthetic construct
  misc_feature 1..22: note = chemically synthesized
  source 1..22: mol_type = other DNA
agaaagttgtgttggatagcat

SEQ ID NO: 154735 - DNA, 22 bp, synthetic construct
  misc_feature 1..22: note = chemically synthesized
  source 1..22: mol_type = other DNA
tgttggatagcattcaaagcca

SEQ ID NO: 154736 - DNA, 22 bp, synthetic construct
  misc_feature 1..22: note = chemically synthesized
  source 1..22: mol_type = other DNA
gatagcattcaaagccatcttg

SEQ ID NO: 154737 - DNA, 22 bp, synthetic construct
  misc_feature 1..22: note = chemically synthesized
  source 1..22: mol_type = other DNA
aaagccatcttgggatgcatgc

SEQ ID NO: 154738 - DNA, 22 bp, synthetic construct
  misc_feature 1..22: note = chemically synthesized
  source 1..22: mol_type = other DNA
gggatgcatgcagcccacgggc

SEQ ID NO: 154739 - DNA, 22 bp, synthetic construct
  misc_feature 1..22: note = chemically synthesized
  source 1..22: mol_type = other DNA
ggatgcatgcagcccacgggcc

SEQ ID NO: 154740 - DNA, 22 bp, synthetic construct
  misc_feature 1..22: note = chemically synthesized
  source 1..22: mol_type = other DNA
gacaagcttgctctacagccta

SEQ ID NO: 154741 - DNA, 22 bp, synthetic construct
  misc_feature 1..22: note = chemically synthesized
  source 1..22: mol_type = other DNA
gctctacagcctacaaacaagg

SEQ ID NO: 154742 - DNA, 22 bp, synthetic construct
  misc_feature 1..22: note = chemically synthesized
  source 1..22: mol_type = other DNA
ctctacagcctacaaacaagga

SEQ ID NO: 154743 - DNA, 22 bp, synthetic construct
  misc_feature 1..22: note = chemically synthesized
  source 1..22: mol_type = other DNA
tacagcctacaaacaaggaaga

SEQ ID NO: 154744 - DNA, 22 bp, synthetic construct
  misc_feature 1..22: note = chemically synthesized
  source 1..22: mol_type = other DNA
cagcctacaaacaaggaagaaa

SEQ ID NO: 154745 - DNA, 22 bp, synthetic construct
  misc_feature 1..22: note = chemically synthesized
  source 1..22: mol_type = other DNA
caaacaaggaagaaataaatta

SEQ ID NO: 154746 - DNA, 22 bp, synthetic construct
  misc_feature 1..22: note = chemically synthesized
  source 1..22: mol_type = other DNA
atatttctgttctcttttctgg

SEQ ID NO: 154747 - DNA, 22 bp, synthetic construct
  misc_feature 1..22: note = chemically synthesized
  source 1..22: mol_type = other DNA
ctgttctcttttctggcaccaa

SEQ ID NO: 154748 - DNA, 22 bp, synthetic construct
  misc_feature 1..22: note = chemically synthesized
  source 1..22: mol_type = other DNA
tgttctcttttctggcaccaac

SEQ ID NO: 154749 - DNA, 22 bp, synthetic construct
  misc_feature 1..22: note = chemically synthesized
  source 1..22: mol_type = other DNA
ttctcttttctggcaccaactc

SEQ ID NO: 154750 - DNA, 22 bp, synthetic construct
  misc_feature 1..22: note = chemically synthesized
  source 1..22: mol_type = other DNA
tcttttctggcaccaactccca

SEQ ID NO: 154751 - DNA, 22 bp, synthetic construct
  misc_feature 1..22: note = chemically synthesized
  source 1..22: mol_type = other DNA
ttttctggcaccaactcccagc

SEQ ID NO: 154752 - DNA, 22 bp, synthetic construct
  misc_feature 1..22: note = chemically synthesized
  source 1..22: mol_type = other DNA
ttctggcaccaactcccagctt

SEQ ID NO: 154753 - DNA, 22 bp, synthetic construct
  misc_feature 1..22: note = chemically synthesized
  source 1..22: mol_type = other DNA
tctggcaccaactcccagcttt

SEQ ID NO: 154754 - DNA, 22 bp, synthetic construct
  misc_feature 1..22: note = chemically synthesized
  source 1..22: mol_type = other DNA
ctggcaccaactcccagcttta

SEQ ID NO: 154755 - DNA, 22 bp, synthetic construct
  misc_feature 1..22: note = chemically synthesized
  source 1..22: mol_type = other DNA
tggcaccaactcccagctttac

SEQ ID NO: 154756 - DNA, 22 bp, synthetic construct
  misc_feature 1..22: note = chemically synthesized
  source 1..22: mol_type = other DNA
gcaccaactcccagctttacta

SEQ ID NO: 154757 - DNA, 22 bp, synthetic construct
  misc_feature 1..22: note = chemically synthesized
  source 1..22: mol_type = other DNA
ccagctttactagcaccaactc

SEQ ID NO: 154758 - DNA, 22 bp, synthetic construct
  misc_feature 1..22: note = chemically synthesized
  source 1..22: mol_type = other DNA
tactagcaccaactcccagctt

SEQ ID NO: 154759 - DNA, 22 bp, synthetic construct
  misc_feature 1..22: note = chemically synthesized
  source 1..22: mol_type = other DNA
actagcaccaactcccagcttt

SEQ ID NO: 154760 - DNA, 22 bp, synthetic construct
  misc_feature 1..22: note = chemically synthesized
  source 1..22: mol_type = other DNA
ctagcaccaactcccagcttta

SEQ ID NO: 154761 - DNA, 22 bp, synthetic construct
  misc_feature 1..22: note = chemically synthesized
  source 1..22: mol_type = other DNA
gcaccaactcccagctttacta

SEQ ID NO: 154762 - DNA, 22 bp, synthetic construct
  misc_feature 1..22: note = chemically synthesized
  source 1..22: mol_type = other DNA
ccagctttactaacttacaaat

SEQ ID NO: 154763 - DNA, 22 bp, synthetic construct
  misc_feature 1..22: note = chemically synthesized
  source 1..22: mol_type = other DNA
tactaacttacaaatgagaaga

SEQ ID NO: 154764 - DNA, 22 bp, synthetic construct
  misc_feature 1..22: note = chemically synthesized
  source 1..22: mol_type = other DNA
actaacttacaaatgagaagaa

SEQ ID NO: 154765 - DNA, 22 bp, synthetic construct
  misc_feature 1..22: note = chemically synthesized
  source 1..22: mol_type = other DNA
ctaacttacaaatgagaagaaa

SEQ ID NO: 154766 - DNA, 22 bp, synthetic construct
  misc_feature 1..22: note = chemically synthesized
  source 1..22: mol_type = other DNA
acttacaaatgagaagaaacca

SEQ ID NO: 154767 - DNA, 22 bp, synthetic construct
  misc_feature 1..22: note = chemically synthesized
  source 1..22: mol_type = other DNA
acaaatgagaagaaaccaggtg

SEQ ID NO: 154768 - DNA, 22 bp, synthetic construct
  misc_feature 1..22: note = chemically synthesized
  source 1..22: mol_type = other DNA
caaatgagaagaaaccaggtgt

SEQ ID NO: 154769 - DNA, 22 bp, synthetic construct
  misc_feature 1..22: note = chemically synthesized
  source 1..22: mol_type = other DNA
tgccaaattacttgttcgaaga

SEQ ID NO: 154770 - DNA, 22 bp, synthetic construct
  misc_feature 1..22: note = chemically synthesized
  source 1..22: mol_type = other DNA
cttgttcgaagaaaggatcatc

SEQ ID NO: 154771 - DNA, 22 bp, synthetic construct
  misc_feature 1..22: note = chemically synthesized
  source 1..22: mol_type = other DNA
gttcgaagaaaggatcatctgg

SEQ ID NO: 154772 - DNA, 22 bp, synthetic construct
  misc_feature 1..22: note = chemically synthesized
  source 1..22: mol_type = other DNA
ttcgaagaaaggatcatctgga

SEQ ID NO: 154773 - DNA, 22 bp, synthetic construct
  misc_feature 1..22: note = chemically synthesized
  source 1..22: mol_type = other DNA
gaagaaaggatcatctggaatt

SEQ ID NO: 154774 - DNA, 22 bp, synthetic construct
  misc_feature 1..22: note = chemically synthesized
  source 1..22: mol_type = other DNA
gaattcttttcttggatttcct

SEQ ID NO: 154775 - DNA, 22 bp, synthetic construct
  misc_feature 1..22: note = chemically synthesized
  source 1..22: mol_type = other DNA
ttttcttggatttcctccactc

SEQ ID NO: 154776 - DNA, 22 bp, synthetic construct
  misc_feature 1..22: note = chemically synthesized
  source 1..22: mol_type = other DNA
ttcttggatttcctccactcaa

SEQ ID NO: 154777 - DNA, 22 bp, synthetic construct
  misc_feature 1..22: note = chemically synthesized
  source 1..22: mol_type = other DNA
tcttggatttcctccactcaag

SEQ ID NO: 154778 - DNA, 22 bp, synthetic construct
  misc_feature 1..22: note = chemically synthesized
  source 1..22: mol_type = other DNA
cttggatttcctccactcaagt

SEQ ID NO: 154779 - DNA, 22 bp, synthetic construct
  misc_feature 1..22: note = chemically synthesized
  source 1..22: mol_type = other DNA
ttggatttcctccactcaagtc

SEQ ID NO: 154780 - DNA, 22 bp, synthetic construct
  misc_feature 1..22: note = chemically synthesized
  source 1..22: mol_type = other DNA
ggatttcctccactcaagtccc

SEQ ID NO: 154781 - DNA, 22 bp, synthetic construct
  misc_feature 1..22: note = chemically synthesized
  source 1..22: mol_type = other DNA
gatttcctccactcaagtccca

SEQ ID NO: 154782 - DNA, 22 bp, synthetic construct
  misc_feature 1..22: note = chemically synthesized
  source 1..22: mol_type = other DNA
cctccactcaagtcccatagta

SEQ ID NO: 154783 - DNA, 22 bp, synthetic construct
  misc_feature 1..22: note = chemically synthesized
  source 1..22: mol_type = other DNA
ctccactcaagtcccatagtaa

SEQ ID NO: 154784 - DNA, 22 bp, synthetic construct
  misc_feature 1..22: note = chemically synthesized
  source 1..22: mol_type = other DNA
cactcaagtcccatagtaagat

SEQ ID NO: 154785 - DNA, 22 bp, synthetic construct
  misc_feature 1..22: note = chemically synthesized
  source 1..22: mol_type = other DNA
aagtcccatagtaagataaagg

SEQ ID NO: 154786 - DNA, 22 bp, synthetic construct
  misc_feature 1..22: note = chemically synthesized
  source 1..22: mol_type = other DNA
tcatttaattgtatctttttca

SEQ ID NO: 154787 - DNA, 22 bp, synthetic construct
  misc_feature 1..22: note = chemically synthesized
  source 1..22: mol_type = other DNA
catttaattgtatctttttcat

SEQ ID NO: 154788 - DNA, 22 bp, synthetic construct
  misc_feature 1..22: note = chemically synthesized
  source 1..22: mol_type = other DNA
atttaattgtatctttttcatt

SEQ ID NO: 154789 - DNA, 22 bp, synthetic construct
  misc_feature 1..22: note = chemically synthesized
  source 1..22: mol_type = other DNA
aattgtatctttttcatttttt

SEQ ID NO: 154790 - DNA, 22 bp, synthetic construct
  misc_feature 1..22: note = chemically synthesized
  source 1..22: mol_type = other DNA
attgtatctttttcattttttg

SEQ ID NO: 154791 - DNA, 22 bp, synthetic construct
  misc_feature 1..22: note = chemically synthesized
  source 1..22: mol_type = other DNA
tatctttttcattttttggctg

SEQ ID NO: 154792 - DNA, 22 bp, synthetic construct
  misc_feature 1..22: note = chemically synthesized
  source 1..22: mol_type = other DNA
tttcattttttggctgaagcac

SEQ ID NO: 154793 - DNA, 22 bp, synthetic construct
  misc_feature 1..22: note = chemically synthesized
  source 1..22: mol_type = other DNA
ttcattttttggctgaagcact

SEQ ID NO: 154794 - DNA, 22 bp, synthetic construct
  misc_feature 1..22: note = chemically synthesized
  source 1..22: mol_type = other DNA
tcattttttggctgaagcacta

SEQ ID NO: 154795 - DNA, 22 bp, synthetic construct
  misc_feature 1..22: note = chemically synthesized
  source 1..22: mol_type = other DNA
cattttttggctgaagcactag

SEQ ID NO: 154796 - DNA, 22 bp, synthetic construct
  misc_feature 1..22: note = chemically synthesized
  source 1..22: mol_type = other DNA
attttttggctgaagcactagc

SEQ ID NO: 154797 - DNA, 22 bp, synthetic construct
  misc_feature 1..22: note = chemically synthesized
  source 1..22: mol_type = other DNA
tttggctgaagcactagcatcc

SEQ ID NO: 154798 - DNA, 22 bp, synthetic construct
  misc_feature 1..22: note = chemically synthesized
  source 1..22: mol_type = other DNA
ttggctgaagcactagcatcca

SEQ ID NO: 154799 - DNA, 22 bp, synthetic construct
  misc_feature 1..22: note = chemically synthesized
  source 1..22: mol_type = other DNA
tggctgaagcactagcatccag

SEQ ID NO: 154800 - DNA, 22 bp, synthetic construct
  misc_feature 1..22: note = chemically synthesized
  source 1..22: mol_type = other DNA
ggctgaagcactagcatccagg

SEQ ID NO: 154801 - DNA, 22 bp, synthetic construct
  misc_feature 1..22: note = chemically synthesized
  source 1..22: mol_type = other DNA
gctgaagcactagcatccagga

SEQ ID NO: 154802 - DNA, 22 bp, synthetic construct
  misc_feature 1..22: note = chemically synthesized
  source 1..22: mol_type = other DNA
aagcactagcatccaggacact

SEQ ID NO: 154803 - DNA, 22 bp, synthetic construct
  misc_feature 1..22: note = chemically synthesized
  source 1..22: mol_type = other DNA
gcatccaggacactaatttacc

SEQ ID NO: 154804 - DNA, 22 bp, synthetic construct
  misc_feature 1..22: note = chemically synthesized
  source 1..22: mol_type = other DNA
atttacctatagaacaattatc

SEQ ID NO: 154805 - DNA, 22 bp, synthetic construct
  misc_feature 1..22: note = chemically synthesized
  source 1..22: mol_type = other DNA
acctatagaacaattatctaga

SEQ ID NO: 154806 - DNA, 22 bp, synthetic construct
  misc_feature 1..22: note = chemically synthesized
  source 1..22: mol_type = other DNA
cctatagaacaattatctagac

SEQ ID NO: 154807 - DNA, 22 bp, synthetic construct
  misc_feature 1..22: note = chemically synthesized
  source 1..22: mol_type = other DNA
tagaacaattatctagactcaa

SEQ ID NO: 154808 - DNA, 22 bp, synthetic construct
  misc_feature 1..22: note = chemically synthesized
  source 1..22: mol_type = other DNA
tctagactcaattagaagtatc

SEQ ID NO: 154809 - DNA, 22 bp, synthetic construct
  misc_feature 1..22: note = chemically synthesized
  source 1..22: mol_type = other DNA
gactcaattagaagtatcttac

SEQ ID NO: 154810 - DNA, 22 bp, synthetic construct
  misc_feature 1..22: note = chemically synthesized
  source 1..22: mol_type = other DNA
aattagaagtatcttacatatt

SEQ ID NO: 154811 - DNA, 22 bp, synthetic construct
  misc_feature 1..22: note = chemically synthesized
  source 1..22: mol_type = other DNA
gaagtatcttacatattgaagc

SEQ ID NO: 154812 - DNA, 22 bp, synthetic construct
  misc_feature 1..22: note = chemically synthesized
  source 1..22: mol_type = other DNA
acatattgaagcagagttagag

SEQ ID NO: 154813 - DNA, 22 bp, synthetic construct
  misc_feature 1..22: note = chemically synthesized
  source 1..22: mol_type = other DNA
catattgaagcagagttagagc

SEQ ID NO: 154814 - DNA, 22 bp, synthetic construct
  misc_feature 1..22: note = chemically synthesized
  source 1..22: mol_type = other DNA
aagcagagttagagctaaaatc

SEQ ID NO: 154815 - DNA, 22 bp, synthetic construct
  misc_feature 1..22: note = chemically synthesized
  source 1..22: mol_type = other DNA
gagctaaaatctcaagcaatcc

SEQ ID NO: 154816 - DNA, 22 bp, synthetic construct
  misc_feature 1..22: note = chemically synthesized
  source 1..22: mol_type = other DNA
aaatctcaagcaatccaacatc

SEQ ID NO: 154817 - DNA, 22 bp, synthetic construct
  misc_feature 1..22: note = chemically synthesized
  source 1..22: mol_type = other DNA
aagcaatccaacatccttaatt

SEQ ID NO: 154818 - DNA, 22 bp, synthetic construct
  misc_feature 1..22: note = chemically synthesized
  source 1..22: mol_type = other DNA
aatttacagatactaaatcagt

SEQ ID NO: 154819 - DNA, 22 bp, synthetic construct
  misc_feature 1..22: note = chemically synthesized
  source 1..22: mol_type = other DNA
atttacagatactaaatcagta

SEQ ID NO: 154820 - DNA, 22 bp, synthetic construct
  misc_feature 1..22: note = chemically synthesized
  source 1..22: mol_type = other DNA
acagatactaaatcagtagcca

SEQ ID NO: 154821 - DNA, 22 bp, synthetic construct
  misc_feature 1..22: note = chemically synthesized
  source 1..22: mol_type = other DNA
cagatactaaatcagtagccaa

SEQ ID NO: 154822 - DNA, 22 bp, synthetic construct
  misc_feature 1..22: note = chemically synthesized
  source 1..22: mol_type = other DNA
aatcagtagccaaagccatttt

SEQ ID NO: 154823 - DNA, 22 bp, synthetic construct
  misc_feature 1..22: note = chemically synthesized
  source 1..22: mol_type = other DNA
ttactgctattttggttaacag

SEQ ID NO: 154824 - DNA, 22 bp, synthetic construct
  misc_feature 1..22: note = chemically synthesized
  source 1..22: mol_type = other DNA
tactgctattttggttaacagg

SEQ ID NO: 154825 - DNA, 22 bp, synthetic construct
  misc_feature 1..22: note = chemically synthesized
  source 1..22: mol_type = other DNA
actgctattttggttaacaggg

SEQ ID NO: 154826 - DNA, 22 bp, synthetic construct
  misc_feature 1..22: note = chemically synthesized
  source 1..22: mol_type = other DNA
ctgctattttggttaacagggc

SEQ ID NO: 154827 - DNA, 22 bp, synthetic construct
  misc_feature 1..22: note = chemically synthesized
  source 1..22: mol_type = other DNA
ctattttggttaacagggccac

SEQ ID NO: 154828 - DNA, 22 bp, synthetic construct
  misc_feature 1..22: note = chemically synthesized
  source 1..22: mol_type = other DNA
ttttggttaacagggccacaat

SEQ ID NO: 154829 - DNA, 22 bp, synthetic construct
  misc_feature 1..22: note = chemically synthesized
  source 1..22: mol_type = other DNA
tggttaacagggccacaatcat

SEQ ID NO: 154830 - DNA, 22 bp, synthetic construct
  misc_feature 1..22: note = chemically synthesized
  source 1..22: mol_type = other DNA
ggttaacagggccacaatcatt

SEQ ID NO: 154831 - DNA, 22 bp, synthetic construct
  misc_feature 1..22: note = chemically synthesized
  source 1..22: mol_type = other DNA
gttaacagggccacaatcattt

SEQ ID NO: 154832 - DNA, 22 bp, synthetic construct
  misc_feature 1..22: note = chemically synthesized
  source 1..22: mol_type = other DNA
acagggccacaatcatttatcc

SEQ ID NO: 154833 - DNA, 22 bp, synthetic construct
  misc_feature 1..22: note = chemically synthesized
  source 1..22: mol_type = other DNA
atccatttccttgaaatccata

SEQ ID NO: 154834 - DNA, 22 bp, synthetic construct
  misc_feature 1..22: note = chemically synthesized
  source 1..22: mol_type = other DNA
tccatttccttgaaatccatag

SEQ ID NO: 154835 - DNA, 22 bp, synthetic construct
  misc_feature 1..22: note = chemically synthesized
  source 1..22: mol_type = other DNA
ccttgaaatccatagaaattta

SEQ ID NO: 154836 - DNA, 22 bp, synthetic construct
  misc_feature 1..22: note = chemically synthesized
  source 1..22: mol_type = other DNA
cttgaaatccatagaaatttaa

SEQ ID NO: 154837 - DNA, 22 bp, synthetic construct
  misc_feature 1..22: note = chemically synthesized
  source 1..22: mol_type = other DNA
gaaatccatagaaatttaaaaa

SEQ ID NO: 154838 - DNA, 22 bp, synthetic construct
  misc_feature 1..22: note = chemically synthesized
  source 1..22: mol_type = other DNA
aaatccatagaaatttaaaaac

SEQ ID NO: 154839 - DNA, 22 bp, synthetic construct
  misc_feature 1..22: note = chemically synthesized
  source 1..22: mol_type = other DNA
aaaaactgagtcttttaacagc

SEQ ID NO: 154840 - DNA, 22 bp, synthetic construct
  misc_feature 1..22: note = chemically synthesized
  source 1..22: mol_type = other DNA
aaaactgagtcttttaacagca

SEQ ID NO: 154841 - DNA, 22 bp, synthetic construct
  misc_feature 1..22: note = chemically synthesized
  source 1..22: mol_type = other DNA
agtcttttaacagcacaatctg

SEQ ID NO: 154842 - DNA, 22 bp, synthetic construct
  misc_feature 1..22: note = chemically synthesized
  source 1..22: mol_type = other DNA
ttaacagcacaatctgctctaa

SEQ ID NO: 154843 - DNA, 22 bp, synthetic construct
  misc_feature 1..22: note = chemically synthesized
  source 1..22: mol_type = other DNA
taacagcacaatctgctctaaa

SEQ ID NO: 154844 - DNA, 22 bp, synthetic construct
  misc_feature 1..22: note = chemically synthesized
  source 1..22: mol_type = other DNA
aacagcacaatctgctctaaag

SEQ ID NO: 154845 - DNA, 22 bp, synthetic construct
  misc_feature 1..22: note = chemically synthesized
  source 1..22: mol_type = other DNA
acagcacaatctgctctaaagt

SEQ ID NO: 154846 - DNA, 22 bp, synthetic construct
  misc_feature 1..22: note = chemically synthesized
  source 1..22: mol_type = other DNA
ctctaaagtgatggcaatttct

SEQ ID NO: 154847 - DNA, 22 bp, synthetic construct
  misc_feature 1..22: note = chemically synthesized
  source 1..22: mol_type = other DNA
taaagtgatggcaatttctgac

SEQ ID NO: 154848 - DNA, 22 bp, synthetic construct
  misc_feature 1..22: note = chemically synthesized
  source 1..22: mol_type = other DNA
aagtgatggcaatttctgacat

SEQ ID NO: 154849 - DNA, 22 bp, synthetic construct
  misc_feature 1..22: note = chemically synthesized
  source 1..22: mol_type = other DNA
ctgacatgaacttatgtgagaa

SEQ ID NO: 154850 - DNA, 22 bp, synthetic construct
  misc_feature 1..22: note = chemically synthesized
  source 1..22: mol_type = other DNA
tgacatgaacttatgtgagaat

SEQ ID NO: 154851 - DNA, 22 bp, synthetic construct
  misc_feature 1..22: note = chemically synthesized
  source 1..22: mol_type = other DNA
acatgaacttatgtgagaattt

SEQ ID NO: 154852 - DNA, 22 bp, synthetic construct
  misc_feature 1..22: note = chemically synthesized
  source 1..22: mol_type = other DNA
atgtgagaatttttataatctt

SEQ ID NO: 154853 - DNA, 22 bp, synthetic construct
  misc_feature 1..22: note = chemically synthesized
  source 1..22: mol_type = other DNA
tgtgagaatttttataatcttt

SEQ ID NO: 154854 - DNA, 22 bp, synthetic construct
  misc_feature 1..22: note = chemically synthesized
  source 1..22: mol_type = other DNA
ttataatctttatttattctac

SEQ ID NO: 154855 - DNA, 22 bp, synthetic construct
  misc_feature 1..22: note = chemically synthesized
  source 1..22: mol_type = other DNA
tataatctttatttattctaca

SEQ ID NO: 154856 - DNA, 22 bp, synthetic construct
  misc_feature 1..22: note = chemically synthesized
  source 1..22: mol_type = other DNA
ataatctttatttattctacat

SEQ ID NO: 154857 - DNA, 22 bp, synthetic construct
  misc_feature 1..22: note = chemically synthesized
  source 1..22: mol_type = other DNA
taatctttatttattctacata

SEQ ID NO: 154858 - DNA, 22 bp, synthetic construct
  misc_feature 1..22: note = chemically synthesized
  source 1..22: mol_type = other DNA
tatttattctacataatactta

SEQ ID NO: 154859 - DNA, 22 bp, synthetic construct
  misc_feature 1..22: note = chemically synthesized
  source 1..22: mol_type = other DNA
atttattctacataatacttac

SEQ ID NO: 154860 - DNA, 22 bp, synthetic construct
  misc_feature 1..22: note = chemically synthesized
  source 1..22: mol_type = other DNA
tttattctacataatacttaca

SEQ ID NO: 154861 - DNA, 22 bp, synthetic construct
  misc_feature 1..22: note = chemically synthesized
  source 1..22: mol_type = other DNA
attctacataatacttacatgt

SEQ ID NO: 154862 - DNA, 22 bp, synthetic construct
  misc_feature 1..22: note = chemically synthesized
  source 1..22: mol_type = other DNA
ttctacataatacttacatgtt

SEQ ID NO: 154863 - DNA, 22 bp, synthetic construct
  misc_feature 1..22: note = chemically synthesized
  source 1..22: mol_type = other DNA
tacataatacttacatgttccc

SEQ ID NO: 154864 - DNA, 22 bp, synthetic construct
  misc_feature 1..22: note = chemically synthesized
  source 1..22: mol_type = other DNA
cataatacttacatgttccctg

SEQ ID NO: 154865 - DNA, 22 bp, synthetic construct
  misc_feature 1..22: note = chemically synthesized
  source 1..22: mol_type = other DNA
acatgttccctgcaaaaatatc

SEQ ID NO: 154866 - DNA, 22 bp, synthetic construct
  misc_feature 1..22: note = chemically synthesized
  source 1..22: mol_type = other DNA
catgttccctgcaaaaatatct

SEQ ID NO: 154867 - DNA, 22 bp, synthetic construct
  misc_feature 1..22: note = chemically synthesized
  source 1..22: mol_type = other DNA
cctgcaaaaatatctaggtata

SEQ ID NO: 154868 - DNA, 22 bp, synthetic construct
  misc_feature 1..22: note = chemically synthesized
  source 1..22: mol_type = other DNA
caaaaatatctaggtatattag

SEQ ID NO: 154869 - DNA, 22 bp, synthetic construct
  misc_feature 1..22: note = chemically synthesized
  source 1..22: mol_type = other DNA
ggtatattagataatcatatag

SEQ ID NO: 154870 - DNA, 22 bp, synthetic construct
  misc_feature 1..22: note = chemically synthesized
  source 1..22: mol_type = other DNA
gataatcatatagatatatgat

SEQ ID NO: 154871 - DNA, 22 bp, synthetic construct
  misc_feature 1..22: note = chemically synthesized
  source 1..22: mol_type = other DNA
ttaagggcataccgagattcca

SEQ ID NO: 154872 - DNA, 22 bp, synthetic construct
  misc_feature 1..22: note = chemically synthesized
  source 1..22: mol_type = other DNA
agggcataccgagattccaatg

SEQ ID NO: 154873 - DNA, 22 bp, synthetic construct
  misc_feature 1..22: note = chemically synthesized
  source 1..22: mol_type = other DNA
caatgatattgttacttgatgt

SEQ ID NO: 154874 - DNA, 22 bp, synthetic construct
  misc_feature 1..22: note = chemically synthesized
  source 1..22: mol_type = other DNA
ttacttgatgtcaataatatta

SEQ ID NO: 154875 - DNA, 22 bp, synthetic construct
  misc_feature 1..22: note = chemically synthesized
  source 1..22: mol_type = other DNA
cttgatgtcaataatattatat

SEQ ID NO: 154876 - DNA, 22 bp, synthetic construct
  misc_feature 1..22: note = chemically synthesized
  source 1..22: mol_type = other DNA
gatgtcaataatattatataac

SEQ ID NO: 154877 - DNA, 22 bp, synthetic construct
  misc_feature 1..22: note = chemically synthesized
  source 1..22: mol_type = other DNA
atgtcaataatattatataaca

SEQ ID NO: 154878 - DNA, 22 bp, synthetic construct
  misc_feature 1..22: note = chemically synthesized
  source 1..22: mol_type = other DNA
tataacattcataaaaattgga

SEQ ID NO: 154879 - DNA, 22 bp, synthetic construct
  misc_feature 1..22: note = chemically synthesized
  source 1..22: mol_type = other DNA
ataaaaattggaaaattatttt

SEQ ID NO: 154880 - DNA, 22 bp, synthetic construct
  misc_feature 1..22: note = chemically synthesized
  source 1..22: mol_type = other DNA
gaaaattatttttctaaagcat

SEQ ID NO: 154881 - DNA, 22 bp, synthetic construct
  misc_feature 1..22: note = chemically synthesized
  source 1..22: mol_type = other DNA
tttttctaaagcatgtggctca

SEQ ID NO: 154882 - DNA, 22 bp, synthetic construct
  misc_feature 1..22: note = chemically synthesized
  source 1..22: mol_type = other DNA
ttctaaagcatgtggctcaaag

SEQ ID NO: 154883 - DNA, 22 bp, synthetic construct
  misc_feature 1..22: note = chemically synthesized
  source 1..22: mol_type = other DNA
tctaaagcatgtggctcaaaga

SEQ ID NO: 154884 - DNA, 22 bp, synthetic construct
  misc_feature 1..22: note = chemically synthesized
  source 1..22: mol_type = other DNA
ctaaagcatgtggctcaaagac

SEQ ID NO: 154885 - DNA, 22 bp, synthetic construct
  misc_feature 1..22: note = chemically synthesized
  source 1..22: mol_type = other DNA
taaagcatgtggctcaaagact

SEQ ID NO: 154886 - DNA, 22 bp, synthetic construct
  misc_feature 1..22: note = chemically synthesized
  source 1..22: mol_type = other DNA
aagcatgtggctcaaagactgt

SEQ ID NO: 154887 - DNA, 22 bp, synthetic construct
  misc_feature 1..22: note = chemically synthesized
  source 1..22: mol_type = other DNA
aaagactgtagacttctataag

SEQ ID NO: 154888 - DNA, 22 bp, synthetic construct
  misc_feature 1..22: note = chemically synthesized
  source 1..22: mol_type = other DNA
tagacttctataagaaaactaa

SEQ ID NO: 154889 - DNA, 22 bp, synthetic construct
  misc_feature 1..22: note = chemically synthesized
  source 1..22: mol_type = other DNA
ctataagaaaactaaacatatt

SEQ ID NO: 154890 - DNA, 22 bp, synthetic construct
  misc_feature 1..22: note = chemically synthesized
  source 1..22: mol_type = other DNA
tataagaaaactaaacatatta

SEQ ID NO: 154891 - DNA, 22 bp, synthetic construct
  misc_feature 1..22: note = chemically synthesized
  source 1..22: mol_type = other DNA
taagaaaactaaacatattaaa

SEQ ID NO: 154892 - DNA, 22 bp, synthetic construct
  misc_feature 1..22: note = chemically synthesized
  source 1..22: mol_type = other DNA
aacatattaaattaaacatatc

SEQ ID NO: 154893 - DNA, 22 bp, synthetic construct
  misc_feature 1..22: note = chemically synthesized
  source 1..22: mol_type = other DNA
aattaaacatatcaataactat

SEQ ID NO: 154894 - DNA, 22 bp, synthetic construct
  misc_feature 1..22: note = chemically synthesized
  source 1..22: mol_type = other DNA
aacatatcaataactattattt

SEQ ID NO: 154895 - DNA, 22 bp, synthetic construct
  misc_feature 1..22: note = chemically synthesized
  source 1..22: mol_type = other DNA
ttatttcatctgcatagaatat

SEQ ID NO: 154896 - DNA, 22 bp, synthetic construct
  misc_feature 1..22: note = chemically synthesized
  source 1..22: mol_type = other DNA
tttcatctgcatagaatattgc

SEQ ID NO: 154897 - DNA, 22 bp, synthetic construct
  misc_feature 1..22: note = chemically synthesized
  source 1..22: mol_type = other DNA
catctgcatagaatattgctga

SEQ ID NO: 154898 - DNA, 22 bp, synthetic construct
  misc_feature 1..22: note = chemically synthesized
  source 1..22: mol_type = other DNA
atctgcatagaatattgctgaa

SEQ ID NO: 154899 - DNA, 22 bp, synthetic construct
  misc_feature 1..22: note = chemically synthesized
  source 1..22: mol_type = other DNA
catagaatattgctgaaggtgt

SEQ ID NO: 154900 - DNA, 22 bp, synthetic construct
  misc_feature 1..22: note = chemically synthesized
  source 1..22: mol_type = other DNA
ctgaaggtgtgttttaaagtag

SEQ ID NO: 154901 - DNA, 22 bp, synthetic construct
  misc_feature 1..22: note = chemically synthesized
  source 1..22: mol_type = other DNA
aaggtgtgttttaaagtagtaa

SEQ ID NO: 154902 - DNA, 22 bp, synthetic construct
  misc_feature 1..22: note = chemically synthesized
  source 1..22: mol_type = other DNA
taaagtagtaacatggtacttg

SEQ ID NO: 154903 - DNA, 22 bp, synthetic construct
  misc_feature 1..22: note = chemically synthesized
  source 1..22: mol_type = other DNA
aaagtagtaacatggtacttgt

SEQ ID NO: 154904 - DNA, 22 bp, synthetic construct
  misc_feature 1..22: note = chemically synthesized
  source 1..22: mol_type = other DNA
aagtagtaacatggtacttgta

SEQ ID NO: 154905 - DNA, 22 bp, synthetic construct
  misc_feature 1..22: note = chemically synthesized
  source 1..22: mol_type = other DNA
gtatcacagcagccgtagtttg

SEQ ID NO: 154906 - DNA, 22 bp, synthetic construct
  misc_feature 1..22: note = chemically synthesized
  source 1..22: mol_type = other DNA
tatcacagcagccgtagtttgg

SEQ ID NO: 154907 - DNA, 22 bp, synthetic construct
  misc_feature 1..22: note = chemically synthesized
  source 1..22: mol_type = other DNA
ggatcactgccctcttgcatat

SEQ ID NO: 154908 - DNA, 22 bp, synthetic construct
  misc_feature 1..22: note = chemically synthesized
  source 1..22: mol_type = other DNA
gatcactgccctcttgcatatt

SEQ ID NO: 154909 - DNA, 22 bp, synthetic construct
  misc_feature 1..22: note = chemically synthesized
  source 1..22: mol_type = other DNA
ccctcttgcatattatatttat

SEQ ID NO: 154910 - DNA, 22 bp, synthetic construct
  misc_feature 1..22: note = chemically synthesized
  source 1..22: mol_type = other DNA
ttgcatattatatttatcagaa

SEQ ID NO: 154911 - DNA, 22 bp, synthetic construct
  misc_feature 1..22: note = chemically synthesized
  source 1..22: mol_type = other DNA
gcatattatatttatcagaaat

SEQ ID NO: 154912 - DNA, 22 bp, synthetic construct
  misc_feature 1..22: note = chemically synthesized
  source 1..22: mol_type = other DNA
catattatatttatcagaaatc

SEQ ID NO: 154913 - DNA, 22 bp, synthetic construct
  misc_feature 1..22: note = chemically synthesized
  source 1..22: mol_type = other DNA
tatttatcagaaatcattattt

SEQ ID NO: 154914 - DNA, 22 bp, synthetic construct
  misc_feature 1..22: note = chemically synthesized
  source 1..22: mol_type = other DNA
atcagaaatcattatttactga

SEQ ID NO: 154915 - DNA, 22 bp, synthetic construct
  misc_feature 1..22: note = chemically synthesized
  source 1..22: mol_type = other DNA
tcagaaatcattatttactgaa

SEQ ID NO: 154916 - DNA, 22 bp, synthetic construct
  misc_feature 1..22: note = chemically synthesized
  source 1..22: mol_type = other DNA
tttactgaaaacatttgctcaa

SEQ ID NO: 154917 - DNA, 22 bp, synthetic construct
  misc_feature 1..22: note = chemically synthesized
  source 1..22: mol_type = other DNA
actgaaaacatttgctcaaaaa

SEQ ID NO: 154918 - DNA, 22 bp, synthetic construct
  misc_feature 1..22: note = chemically synthesized
  source 1..22: mol_type = other DNA
ctgaaaacatttgctcaaaaaa

SEQ ID NO: 154919 - DNA, 22 bp, synthetic construct
  misc_feature 1..22: note = chemically synthesized
  source 1..22: mol_type = other DNA
aaaacatttgctcaaaaaaaaa

SEQ ID NO: 154920 - DNA, 22 bp, synthetic construct
  misc_feature 1..22: note = chemically synthesized
  source 1..22: mol_type = other DNA
gctcaaaaaaaaattcttcaag

SEQ ID NO: 154921 - DNA, 22 bp, synthetic construct
  misc_feature 1..22: note = chemically synthesized
  source 1..22: mol_type = other DNA
ctcaaaaaaaaattcttcaagt

SEQ ID NO: 154922 - DNA, 22 bp, synthetic construct
  misc_feature 1..22: note = chemically synthesized
  source 1..22: mol_type = other DNA
aaaaaaaaattcttcaagtttt

SEQ ID NO: 154923 - DNA, 22 bp, synthetic construct
  misc_feature 1..22: note = chemically synthesized
  source 1..22: mol_type = other DNA
ttcaagttttagagtccccaga

SEQ ID NO: 154924 - DNA, 22 bp, synthetic construct
  misc_feature 1..22: note = chemically synthesized
  source 1..22: mol_type = other DNA
caagttttagagtccccagatt

SEQ ID NO: 154925 - DNA, 22 bp, synthetic construct
  misc_feature 1..22: note = chemically synthesized
  source 1..22: mol_type = other DNA
aagttttagagtccccagattt

SEQ ID NO: 154926 - DNA, 22 bp, synthetic construct
  misc_feature 1..22: note = chemically synthesized
  source 1..22: mol_type = other DNA
tagagtccccagatttaaaaac

SEQ ID NO: 154927 - DNA, 22 bp, synthetic construct
  misc_feature 1..22: note = chemically synthesized
  source 1..22: mol_type = other DNA
agagtccccagatttaaaaaca

SEQ ID NO: 154928 - DNA, 22 bp, synthetic construct
  misc_feature 1..22: note = chemically synthesized
  source 1..22: mol_type = other DNA
gagtccccagatttaaaaacat

SEQ ID NO: 154929 - DNA, 22 bp, synthetic construct
  misc_feature 1..22: note = chemically synthesized
  source 1..22: mol_type = other DNA
aaaaacattataataagttatc

SEQ ID NO: 154930 - DNA, 22 bp, synthetic construct
  misc_feature 1..22: note = chemically synthesized
  source 1..22: mol_type = other DNA
aaaacattataataagttatca

SEQ ID NO: 154931 - DNA, 22 bp, synthetic construct
  misc_feature 1..22: note = chemically synthesized
  source 1..22: mol_type = other DNA
taataagttatcagcagagtat

SEQ ID NO: 154932 - DNA, 22 bp, synthetic construct
  misc_feature 1..22: note = chemically synthesized
  source 1..22: mol_type = other DNA
tcagcagagtatacctcttgga

SEQ ID NO: 154933 - DNA, 22 bp, synthetic construct
  misc_feature 1..22: note = chemically synthesized
  source 1..22: mol_type = other DNA
ttggattctattctttgttctt

SEQ ID NO: 154934 - DNA, 22 bp, synthetic construct
  misc_feature 1..22: note = chemically synthesized
  source 1..22: mol_type = other DNA
ggattctattctttgttcttcc

SEQ ID NO: 154935 - DNA, 22 bp, synthetic construct
  misc_feature 1..22: note = chemically synthesized
  source 1..22: mol_type = other DNA
gattctattctttgttcttcct

SEQ ID NO: 154936 - DNA, 22 bp, synthetic construct
  misc_feature 1..22: note = chemically synthesized
  source 1..22: mol_type = other DNA
tattctttgttcttcctgtcac

SEQ ID NO: 154937 - DNA, 22 bp, synthetic construct
  misc_feature 1..22: note = chemically synthesized
  source 1..22: mol_type = other DNA
ttctttgttcttcctgtcacta

SEQ ID NO: 154938 - DNA, 22 bp, synthetic construct
  misc_feature 1..22: note = chemically synthesized
  source 1..22: mol_type = other DNA
tttgttcttcctgtcactatca

SEQ ID NO: 154939 - DNA, 22 bp, synthetic construct
  misc_feature 1..22: note = chemically synthesized
  source 1..22: mol_type = other DNA
tgttcttcctgtcactatcagg

SEQ ID NO: 154940 - DNA, 22 bp, synthetic construct
  misc_feature 1..22: note = chemically synthesized
  source 1..22: mol_type = other DNA
gttcttcctgtcactatcaggt

SEQ ID NO: 154941 - DNA, 22 bp, synthetic construct
  misc_feature 1..22: note = chemically synthesized
  source 1..22: mol_type = other DNA
ttcttcctgtcactatcaggta

SEQ ID NO: 154942 - DNA, 22 bp, synthetic construct
  misc_feature 1..22: note = chemically synthesized
  source 1..22: mol_type = other DNA
ttcctgtcactatcaggtagtc

SEQ ID NO: 154943 - DNA, 22 bp, synthetic construct
  misc_feature 1..22: note = chemically synthesized
  source 1..22: mol_type = other DNA
cctgtcactatcaggtagtcag

SEQ ID NO: 154944 - DNA, 22 bp, synthetic construct
  misc_feature 1..22: note = chemically synthesized
  source 1..22: mol_type = other DNA
ctgtcactatcaggtagtcaga

SEQ ID NO: 154945 - DNA, 22 bp, synthetic construct
  misc_feature 1..22: note = chemically synthesized
  source 1..22: mol_type = other DNA
tcactatcaggtagtcagatgc

SEQ ID NO: 154946 - DNA, 22 bp, synthetic construct
  misc_feature 1..22: note = chemically synthesized
  source 1..22: mol_type = other DNA
tcaggtagtcagatgcagacat

SEQ ID NO: 154947 - DNA, 22 bp, synthetic construct
  misc_feature 1..22: note = chemically synthesized
  source 1..22: mol_type = other DNA
ctgttgtcccctaaattctcct

SEQ ID NO: 154948 - DNA, 22 bp, synthetic construct
  misc_feature 1..22: note = chemically synthesized
  source 1..22: mol_type = other DNA
tgttgtcccctaaattctcctt

SEQ ID NO: 154949 - DNA, 22 bp, synthetic construct
  misc_feature 1..22: note = chemically synthesized
  source 1..22: mol_type = other DNA
ttgtcccctaaattctccttgt

SEQ ID NO: 154950 - DNA, 22 bp, synthetic construct
  misc_feature 1..22: note = chemically synthesized
  source 1..22: mol_type = other DNA
tcccctaaattctccttgtcct

SEQ ID NO: 154951 - DNA, 22 bp, synthetic construct
  misc_feature 1..22: note = chemically synthesized
  source 1..22: mol_type = other DNA
aattctccttgtcctttctcca

SEQ ID NO: 154952 - DNA, 22 bp, synthetic construct
  misc_feature 1..22: note = chemically synthesized
  source 1..22: mol_type = other DNA
tccttgtcctttctccatctct

SEQ ID NO: 154953 - DNA, 22 bp, synthetic construct
  misc_feature 1..22: note = chemically synthesized
  source 1..22: mol_type = other DNA
cttgtcctttctccatctcttt

SEQ ID NO: 154954 - DNA, 22 bp, synthetic construct
  misc_feature 1..22: note = chemically synthesized
  source 1..22: mol_type = other DNA
gtcctttctccatctctttttc

SEQ ID NO: 154955 - DNA, 22 bp, synthetic construct
  misc_feature 1..22: note = chemically synthesized
  source 1..22: mol_type = other DNA
tcctttctccatctctttttct

SEQ ID NO: 154956 - DNA, 22 bp, synthetic construct
  misc_feature 1..22: note = chemically synthesized
  source 1..22: mol_type = other DNA
tctccatctctttttctataat

SEQ ID NO: 154957 - DNA, 22 bp, synthetic construct
  misc_feature 1..22: note = chemically synthesized
  source 1..22: mol_type = other DNA
ctccatctctttttctataata

SEQ ID NO: 154958 - DNA, 22 bp, synthetic construct
  misc_feature 1..22: note = chemically synthesized
  source 1..22: mol_type = other DNA
tccatctctttttctataatat

SEQ ID NO: 154959 - DNA, 22 bp, synthetic construct
  misc_feature 1..22: note = chemically synthesized
  source 1..22: mol_type = other DNA
catctctttttctataatatcc

SEQ ID NO: 154960 - DNA, 22 bp, synthetic construct
  misc_feature 1..22: note = chemically synthesized
  source 1..22: mol_type = other DNA
tttttctataatatcctttgat

SEQ ID NO: 154961 - DNA, 22 bp, synthetic construct
  misc_feature 1..22: note = chemically synthesized
  source 1..22: mol_type = other DNA
tttctataatatcctttgattc

SEQ ID NO: 154962 - DNA, 22 bp, synthetic construct
  misc_feature 1..22: note = chemically synthesized
  source 1..22: mol_type = other DNA
ttctataatatcctttgattcc

SEQ ID NO: 154963 - DNA, 22 bp, synthetic construct
  misc_feature 1..22: note = chemically synthesized
  source 1..22: mol_type = other DNA
tctataatatcctttgattcct

SEQ ID NO: 154964 - DNA, 22 bp, synthetic construct
  misc_feature 1..22: note = chemically synthesized
  source 1..22: mol_type = other DNA
ctataatatcctttgattcctt

SEQ ID NO: 154965 - DNA, 22 bp, synthetic construct
  misc_feature 1..22: note = chemically synthesized
  source 1..22: mol_type = other DNA
tataatatcctttgattccttt

SEQ ID NO: 154966 - DNA, 22 bp, synthetic construct
  misc_feature 1..22: note = chemically synthesized
  source 1..22: mol_type = other DNA
taatatcctttgattcctttaa

SEQ ID NO: 154967 - DNA, 22 bp, synthetic construct
  misc_feature 1..22: note = chemically synthesized
  source 1..22: mol_type = other DNA
tgattcctttaatttcttttcc

SEQ ID NO: 154968 - DNA, 22 bp, synthetic construct
  misc_feature 1..22: note = chemically synthesized
  source 1..22: mol_type = other DNA
gattcctttaatttcttttcca

SEQ ID NO: 154969 - DNA, 22 bp, synthetic construct
  misc_feature 1..22: note = chemically synthesized
  source 1..22: mol_type = other DNA
attcctttaatttcttttccaa

SEQ ID NO: 154970 - DNA, 22 bp, synthetic construct
  misc_feature 1..22: note = chemically synthesized
  source 1..22: mol_type = other DNA
ctttaatttcttttccaaggat

SEQ ID NO: 154971 - DNA, 22 bp, synthetic construct
  misc_feature 1..22: note = chemically synthesized
  source 1..22: mol_type = other DNA
taatttcttttccaaggatagg

SEQ ID NO: 154972 - DNA, 22 bp, synthetic construct
  misc_feature 1..22: note = chemically synthesized
  source 1..22: mol_type = other DNA
aatttcttttccaaggataggt

SEQ ID NO: 154973 - DNA, 22 bp, synthetic construct
  misc_feature 1..22: note = chemically synthesized
  source 1..22: mol_type = other DNA
atttcttttccaaggataggtg

SEQ ID NO: 154974 - DNA, 22 bp, synthetic construct
  misc_feature 1..22: note = chemically synthesized
  source 1..22: mol_type = other DNA
cttttccaaggataggtgggaa

SEQ ID NO: 154975 - DNA, 22 bp, synthetic construct
  misc_feature 1..22: note = chemically synthesized
  source 1..22: mol_type = other DNA
ttttccaaggataggtgggaag

SEQ ID NO: 154976 - DNA, 22 bp, synthetic construct
  misc_feature 1..22: note = chemically synthesized
  source 1..22: mol_type = other DNA
ttccaaggataggtgggaagat

SEQ ID NO: 154977 - DNA, 22 bp, synthetic construct
  misc_feature 1..22: note = chemically synthesized
  source 1..22: mol_type = other DNA
tccaaggataggtgggaagata

SEQ ID NO: 154978 - DNA, 22 bp, synthetic construct
  misc_feature 1..22: note = chemically synthesized
  source 1..22: mol_type = other DNA
ccaaggataggtgggaagataa

SEQ ID NO: 154979 - DNA, 22 bp, synthetic construct
  misc_feature 1..22: note = chemically synthesized
  source 1..22: mol_type = other DNA
caaggataggtgggaagataag

SEQ ID NO: 154980 - DNA, 22 bp, synthetic construct
  misc_feature 1..22: note = chemically synthesized
  source 1..22: mol_type = other DNA
tcctttctttaatgtctaaaaa

SEQ ID NO: 154981 - DNA, 22 bp, synthetic construct
  misc_feature 1..22: note = chemically synthesized
  source 1..22: mol_type = other DNA
tctttaatgtctaaaaaagcaa

SEQ ID NO: 154982 - DNA, 22 bp, synthetic construct
  misc_feature 1..22: note = chemically synthesized
  source 1..22: mol_type = other DNA
ctttaatgtctaaaaaagcaag

SEQ ID NO: 154983 - DNA, 22 bp, synthetic construct
  misc_feature 1..22: note = chemically synthesized
  source 1..22: mol_type = other DNA
tttaatgtctaaaaaagcaagg

SEQ ID NO: 154984 - DNA, 22 bp, synthetic construct
  misc_feature 1..22: note = chemically synthesized
  source 1..22: mol_type = other DNA
taatgtctaaaaaagcaaggtg

SEQ ID NO: 154985 - DNA, 22 bp, synthetic construct
  misc_feature 1..22: note = chemically synthesized
  source 1..22: mol_type = other DNA
aatgtctaaaaaagcaaggtga

SEQ ID NO: 154986 - DNA, 22 bp, synthetic construct
  misc_feature 1..22: note = chemically synthesized
  source 1..22: mol_type = other DNA
atgtctaaaaaagcaaggtgaa

SEQ ID NO: 154987 - DNA, 22 bp, synthetic construct
  misc_feature 1..22: note = chemically synthesized
  source 1..22: mol_type = other DNA
aaaaagcaaggtgaagccatcc

SEQ ID NO: 154988 - DNA, 22 bp, synthetic construct
  misc_feature 1..22: note = chemically synthesized
  source 1..22: mol_type = other DNA
accctcactatggtttcaagac

SEQ ID NO: 154989 - DNA, 22 bp, synthetic construct
  misc_feature 1..22: note = chemically synthesized
  source 1..22: mol_type = other DNA
ccctcactatggtttcaagacc

SEQ ID NO: 154990 - DNA, 22 bp, synthetic construct
  misc_feature 1..22: note = chemically synthesized
  source 1..22: mol_type = other DNA
actatggtttcaagacctttga

SEQ ID NO: 154991 - DNA, 22 bp, synthetic construct
  misc_feature 1..22: note = chemically synthesized
  source 1..22: mol_type = other DNA
tggtttcaagacctttgaatgg

SEQ ID NO: 154992 - DNA, 22 bp, synthetic construct
  misc_feature 1..22: note = chemically synthesized
  source 1..22: mol_type = other DNA
caagacctttgaatggaaagca

SEQ ID NO: 154993 - DNA, 22 bp, synthetic construct
  misc_feature 1..22: note = chemically synthesized
  source 1..22: mol_type = other DNA
aagacctttgaatggaaagcac

SEQ ID NO: 154994 - DNA, 22 bp, synthetic construct
  misc_feature 1..22: note = chemically synthesized
  source 1..22: mol_type = other DNA
tgaatggaaagcacttgaaatg

SEQ ID NO: 154995 - DNA, 22 bp, synthetic construct
  misc_feature 1..22: note = chemically synthesized
  source 1..22: mol_type = other DNA
gaatggaaagcacttgaaatgc

SEQ ID NO: 154996 - DNA, 22 bp, synthetic construct
  misc_feature 1..22: note = chemically synthesized
  source 1..22: mol_type = other DNA
aatggaaagcacttgaaatgca

SEQ ID NO: 154997 - DNA, 22 bp, synthetic construct
  misc_feature 1..22: note = chemically synthesized
  source 1..22: mol_type = other DNA
gaaatgcatgtgataattctta

SEQ ID NO: 154998 - DNA, 22 bp, synthetic construct
  misc_feature 1..22: note = chemically synthesized
  source 1..22: mol_type = other DNA
aaatgcatgtgataattcttat

SEQ ID NO: 154999 - DNA, 22 bp, synthetic construct
  misc_feature 1..22: note = chemically synthesized
  source 1..22: mol_type = other DNA
ttatatctcccaccatatagca

SEQ ID NO: 155000 - DNA, 22 bp, synthetic construct
  misc_feature 1..22: note = chemically synthesized
  source 1..22: mol_type = other DNA
atatctcccaccatatagcact

SEQ ID NO: 155001 - DNA, 22 bp, synthetic construct
  misc_feature 1..22: note = chemically synthesized
  source 1..22: mol_type = other DNA
tatctcccaccatatagcactc

SEQ ID NO: 155002 - DNA, 22 bp, synthetic construct
  misc_feature 1..22: note = chemically synthesized
  source 1..22: mol_type = other DNA
ccaccatatagcactcacactt

SEQ ID NO: 155003 - DNA, 22 bp, synthetic construct
  misc_feature 1..22: note = chemically synthesized
  source 1..22: mol_type = other DNA
acacttacgtaataaaatatga

SEQ ID NO: 155004 - DNA, 22 bp, synthetic construct
  misc_feature 1..22: note = chemically synthesized
  source 1..22: mol_type = other DNA
acgtaataaaatatgacctctc

SEQ ID NO: 155005 - DNA, 22 bp, synthetic construct
  misc_feature 1..22: note = chemically synthesized
  source 1..22: mol_type = other DNA
cgtaataaaatatgacctctct

SEQ ID NO: 155006 - DNA, 22 bp, synthetic construct
  misc_feature 1..22: note = chemically synthesized
  source 1..22: mol_type = other DNA
tcttagccagtgagaactaaga

SEQ ID NO: 155007 - DNA, 22 bp, synthetic construct
  misc_feature 1..22: note = chemically synthesized
  source 1..22: mol_type = other DNA
ttagccagtgagaactaagatg

SEQ ID NO: 155008 - DNA, 22 bp, synthetic construct
  misc_feature 1..22: note = chemically synthesized
  source 1..22: mol_type = other DNA
agccagtgagaactaagatgcc

SEQ ID NO: 155009 - DNA, 22 bp, synthetic construct
  misc_feature 1..22: note = chemically synthesized
  source 1..22: mol_type = other DNA
gccagtgagaactaagatgcct

SEQ ID NO: 155010 - DNA, 22 bp, synthetic construct
  misc_feature 1..22: note = chemically synthesized
  source 1..22: mol_type = other DNA
agatgcctagatgactgattgg

SEQ ID NO: 155011 - DNA, 22 bp, synthetic construct
  misc_feature 1..22: note = chemically synthesized
  source 1..22: mol_type = other DNA
gatgactgattggaggacctgg

SEQ ID NO: 155012 - DNA, 22 bp, synthetic construct
  misc_feature 1..22: note = chemically synthesized
  source 1..22: mol_type = other DNA
attggaggacctgggcacttgc

SEQ ID NO: 155013 - DNA, 22 bp, synthetic construct
  misc_feature 1..22: note = chemically synthesized
  source 1..22: mol_type = other DNA
gaggacctgggcacttgcctag

SEQ ID NO: 155014 - DNA, 22 bp, synthetic construct
  misc_feature 1..22: note = chemically synthesized
  source 1..22: mol_type = other DNA
ggcacttgcctagcatccaatc

SEQ ID NO: 155015 - DNA, 22 bp, synthetic construct
  misc_feature 1..22: note = chemically synthesized
  source 1..22: mol_type = other DNA
gcctagcatccaatcaagatca

SEQ ID NO: 155016 - DNA, 22 bp, synthetic construct
  misc_feature 1..22: note = chemically synthesized
  source 1..22: mol_type = other DNA
cctagcatccaatcaagatcat

SEQ ID NO: 155017 - DNA, 22 bp, synthetic construct
  misc_feature 1..22: note = chemically synthesized
  source 1..22: mol_type = other DNA
gcatccaatcaagatcatccag

SEQ ID NO: 155018 - DNA, 22 bp, synthetic construct
  misc_feature 1..22: note = chemically synthesized
  source 1..22: mol_type = other DNA
atgtcaaacatcatatttatag

SEQ ID NO: 155019 - DNA, 22 bp, synthetic construct
  misc_feature 1..22: note = chemically synthesized
  source 1..22: mol_type = other DNA
atagggaagttttactattttt

SEQ ID NO: 155020 - DNA, 22 bp, synthetic construct
  misc_feature 1..22: note = chemically synthesized
  source 1..22: mol_type = other DNA
tagggaagttttactatttttt

SEQ ID NO: 155021 - DNA, 22 bp, synthetic construct
  misc_feature 1..22: note = chemically synthesized
  source 1..22: mol_type = other DNA
tactatttttttttactaagtt

SEQ ID NO: 155022 - DNA, 22 bp, synthetic construct
  misc_feature 1..22: note = chemically synthesized
  source 1..22: mol_type = other DNA
actatttttttttactaagttt

SEQ ID NO: 155023 - DNA, 22 bp, synthetic construct
  misc_feature 1..22: note = chemically synthesized
  source 1..22: mol_type = other DNA
ctatttttttttactaagtttt

SEQ ID NO: 155024 - DNA, 22 bp, synthetic construct
  misc_feature 1..22: note = chemically synthesized
  source 1..22: mol_type = other DNA
tttttttttactaagttttact

SEQ ID NO: 155025 - DNA, 22 bp, synthetic construct
  misc_feature 1..22: note = chemically synthesized
  source 1..22: mol_type = other DNA
ttttttactaagttttactact

SEQ ID NO: 155026 - DNA, 22 bp, synthetic construct
  misc_feature 1..22: note = chemically synthesized
  source 1..22: mol_type = other DNA
tttttactaagttttactacta

SEQ ID NO: 155027 - DNA, 22 bp, synthetic construct
  misc_feature 1..22: note = chemically synthesized
  source 1..22: mol_type = other DNA
ttttactaagttttactactat

SEQ ID NO: 155028 - DNA, 22 bp, synthetic construct
  misc_feature 1..22: note = chemically synthesized
  source 1..22: mol_type = other DNA
tttactaagttttactactata

SEQ ID NO: 155029 - DNA, 22 bp, synthetic construct
  misc_feature 1..22: note = chemically synthesized
  source 1..22: mol_type = other DNA
ttactaagttttactactatag

SEQ ID NO: 155030 - DNA, 22 bp, synthetic construct
  misc_feature 1..22: note = chemically synthesized
  source 1..22: mol_type = other DNA
tactaagttttactactatagg

SEQ ID NO: 155031 - DNA, 22 bp, synthetic construct
  misc_feature 1..22: note = chemically synthesized
  source 1..22: mol_type = other DNA
actaagttttactactataggt

SEQ ID NO: 155032 - DNA, 22 bp, synthetic construct
  misc_feature 1..22: note = chemically synthesized
  source 1..22: mol_type = other DNA
ctaagttttactactataggtg

SEQ ID NO: 155033 - DNA, 22 bp, synthetic construct
  misc_feature 1..22: note = chemically synthesized
  source 1..22: mol_type = other DNA
agttttactactataggtgaaa

SEQ ID NO: 155034 - DNA, 22 bp, synthetic construct
  misc_feature 1..22: note = chemically synthesized
  source 1..22: mol_type = other DNA
tactactataggtgaaaaaagc

SEQ ID NO: 155035 - DNA, 22 bp, synthetic construct
  misc_feature 1..22: note = chemically synthesized
  source 1..22: mol_type = other DNA
actactataggtgaaaaaagct

SEQ ID NO: 155036 - DNA, 22 bp, synthetic construct
  misc_feature 1..22: note = chemically synthesized
  source 1..22: mol_type = other DNA
ctactataggtgaaaaaagctt

SEQ ID NO: 155037 - DNA, 22 bp, synthetic construct
  misc_feature 1..22: note = chemically synthesized
  source 1..22: mol_type = other DNA
ctataggtgaaaaaagcttcta

SEQ ID NO: 155038 - DNA, 22 bp, synthetic construct
  misc_feature 1..22: note = chemically synthesized
  source 1..22: mol_type = other DNA
taggtgaaaaaagcttctaggg

SEQ ID NO: 155039 - DNA, 22 bp, synthetic construct
  misc_feature 1..22: note = chemically synthesized
  source 1..22: mol_type = other DNA
ctagggattctttgaaaaatat

SEQ ID NO: 155040 - DNA, 22 bp, synthetic construct
  misc_feature 1..22: note = chemically synthesized
  source 1..22: mol_type = other DNA
tagggattctttgaaaaatatc

SEQ ID NO: 155041 - DNA, 22 bp, synthetic construct
  misc_feature 1..22: note = chemically synthesized
  source 1..22: mol_type = other DNA
gggattctttgaaaaatatcag

SEQ ID NO: 155042 - DNA, 22 bp, synthetic construct
  misc_feature 1..22: note = chemically synthesized
  source 1..22: mol_type = other DNA
tttgaaaaatatcagaaaatca

SEQ ID NO: 155043 - DNA, 22 bp, synthetic construct
  misc_feature 1..22: note = chemically synthesized
  source 1..22: mol_type = other DNA
tgaaaaatatcagaaaatcaca

SEQ ID NO: 155044 - DNA, 22 bp, synthetic construct
  misc_feature 1..22: note = chemically synthesized
  source 1..22: mol_type = other DNA
gaaaaatatcagaaaatcacag

SEQ ID NO: 155045 - DNA, 22 bp, synthetic construct
  misc_feature 1..22: note = chemically synthesized
  source 1..22: mol_type = other DNA
aaaaatatcagaaaatcacaga

SEQ ID NO: 155046 - DNA, 22 bp, synthetic construct
  misc_feature 1..22: note = chemically synthesized
  source 1..22: mol_type = other DNA
cacttgagagaataaggaaaca

SEQ ID NO: 155047 - DNA, 22 bp, synthetic construct
  misc_feature 1..22: note = chemically synthesized
  source 1..22: mol_type = other DNA
gagagaataaggaaacatctct

SEQ ID NO: 155048 - DNA, 22 bp, synthetic construct
  misc_feature 1..22: note = chemically synthesized
  source 1..22: mol_type = other DNA
agagaataaggaaacatctctc

SEQ ID NO: 155049 - DNA, 22 bp, synthetic construct
  misc_feature 1..22: note = chemically synthesized
  source 1..22: mol_type = other DNA
tctccataaatctggcttatca

SEQ ID NO: 155050 - DNA, 22 bp, synthetic construct
  misc_feature 1..22: note = chemically synthesized
  source 1..22: mol_type = other DNA
tccataaatctggcttatcagt

SEQ ID NO: 155051 - DNA, 22 bp, synthetic construct
  misc_feature 1..22: note = chemically synthesized
  source 1..22: mol_type = other DNA
cataaatctggcttatcagtgt

SEQ ID NO: 155052 - DNA, 22 bp, synthetic construct
  misc_feature 1..22: note = chemically synthesized
  source 1..22: mol_type = other DNA
gcttatcagtgtgaagccagtt

SEQ ID NO: 155053 - DNA, 22 bp, synthetic construct
  misc_feature 1..22: note = chemically synthesized
  source 1..22: mol_type = other DNA
atcagtgtgaagccagttttta

SEQ ID NO: 155054 - DNA, 22 bp, synthetic construct
  misc_feature 1..22: note = chemically synthesized
  source 1..22: mol_type = other DNA
tcagtgtgaagccagtttttaa

SEQ ID NO: 155055 - DNA, 22 bp, synthetic construct
  misc_feature 1..22: note = chemically synthesized
  source 1..22: mol_type = other DNA
ttaattccatgaatatcatggt

SEQ ID NO: 155056 - DNA, 22 bp, synthetic construct
  misc_feature 1..22: note = chemically synthesized
  source 1..22: mol_type = other DNA
taattccatgaatatcatggta

SEQ ID NO: 155057 - DNA, 22 bp, synthetic construct
  misc_feature 1..22: note = chemically synthesized
  source 1..22: mol_type = other DNA
aattccatgaatatcatggtat

SEQ ID NO: 155058 - DNA, 22 bp, synthetic construct
  misc_feature 1..22: note = chemically synthesized
  source 1..22: mol_type = other DNA
attccatgaatatcatggtatt

SEQ ID NO: 155059 - DNA, 22 bp, synthetic construct
  misc_feature 1..22: note = chemically synthesized
  source 1..22: mol_type = other DNA
catgaatatcatggtatttgtt

SEQ ID NO: 155060 - DNA, 22 bp, synthetic construct
  misc_feature 1..22: note = chemically synthesized
  source 1..22: mol_type = other DNA
gtttctatctttttatcttcat

SEQ ID NO: 155061 - DNA, 22 bp, synthetic construct
  misc_feature 1..22: note = chemically synthesized
  source 1..22: mol_type = other DNA
tttctatctttttatcttcatc

SEQ ID NO: 155062 - DNA, 22 bp, synthetic construct
  misc_feature 1..22: note = chemically synthesized
  source 1..22: mol_type = other DNA
ctatctttttatcttcatctgt

SEQ ID NO: 155063 - DNA, 22 bp, synthetic construct
  misc_feature 1..22: note = chemically synthesized
  source 1..22: mol_type = other DNA
tatctttttatcttcatctgta

SEQ ID NO: 155064 - DNA, 22 bp, synthetic construct
  misc_feature 1..22: note = chemically synthesized
  source 1..22: mol_type = other DNA
tctttttatcttcatctgtatt

SEQ ID NO: 155065 - DNA, 22 bp, synthetic construct
  misc_feature 1..22: note = chemically synthesized
  source 1..22: mol_type = other DNA
tttatcttcatctgtattcctc

SEQ ID NO: 155066 - DNA, 22 bp, synthetic construct
  misc_feature 1..22: note = chemically synthesized
  source 1..22: mol_type = other DNA
ttatcttcatctgtattcctca

SEQ ID NO: 155067 - DNA, 22 bp, synthetic construct
  misc_feature 1..22: note = chemically synthesized
  source 1..22: mol_type = other DNA
tatcttcatctgtattcctcat

SEQ ID NO: 155068 - DNA, 22 bp, synthetic construct
  misc_feature 1..22: note = chemically synthesized
  source 1..22: mol_type = other DNA
atcttcatctgtattcctcatt

SEQ ID NO: 155069 - DNA, 22 bp, synthetic construct
  misc_feature 1..22: note = chemically synthesized
  source 1..22: mol_type = other DNA
tcttcatctgtattcctcatta

SEQ ID NO: 155070 - DNA, 22 bp, synthetic construct
  misc_feature 1..22: note = chemically synthesized
  source 1..22: mol_type = other DNA
catctgtattcctcattaaagt

SEQ ID NO: 155071 - DNA, 22 bp, synthetic construct
  misc_feature 1..22: note = chemically synthesized
  source 1..22: mol_type = other DNA
atctgtattcctcattaaagta

SEQ ID NO: 155072 - DNA, 22 bp, synthetic construct
  misc_feature 1..22: note = chemically synthesized
  source 1..22: mol_type = other DNA
tattcctcattaaagtatcctt

SEQ ID NO: 155073 - DNA, 22 bp, synthetic construct
  misc_feature 1..22: note = chemically synthesized
  source 1..22: mol_type = other DNA
ctcattaaagtatccttcaaga

SEQ ID NO: 155074 - DNA, 22 bp, synthetic construct
  misc_feature 1..22: note = chemically synthesized
  source 1..22: mol_type = other DNA
attaaagtatccttcaagagaa

SEQ ID NO: 155075 - DNA, 22 bp, synthetic construct
  misc_feature 1..22: note = chemically synthesized
  source 1..22: mol_type = other DNA
aagtatccttcaagagaatggg

SEQ ID NO: 155076 - DNA, 22 bp, synthetic construct
  misc_feature 1..22: note = chemically synthesized
  source 1..22: mol_type = other DNA
caagagaatgggatatctacag

SEQ ID NO: 155077 - DNA, 22 bp, synthetic construct
  misc_feature 1..22: note = chemically synthesized
  source 1..22: mol_type = other DNA
aagagaatgggatatctacagt

SEQ ID NO: 155078 - DNA, 22 bp, synthetic construct
  misc_feature 1..22: note = chemically synthesized
  source 1..22: mol_type = other DNA
cagtagctaatataatttcttg

SEQ ID NO: 155079 - DNA, 22 bp, synthetic construct
  misc_feature 1..22: note = chemically synthesized
  source 1..22: mol_type = other DNA
atataatttcttggcccttcag

SEQ ID NO: 155080 - DNA, 22 bp, synthetic construct
  misc_feature 1..22: note = chemically synthesized
  source 1..22: mol_type = other DNA
cttggcccttcagattctgacc

SEQ ID NO: 155081 - DNA, 22 bp, synthetic construct
  misc_feature 1..22: note = chemically synthesized
  source 1..22: mol_type = other DNA
ttggcccttcagattctgaccc

SEQ ID NO: 155082 - DNA, 22 bp, synthetic construct
  misc_feature 1..22: note = chemically synthesized
  source 1..22: mol_type = other DNA
ggcccttcagattctgacccat

SEQ ID NO: 155083 - DNA, 22 bp, synthetic construct
  misc_feature 1..22: note = chemically synthesized
  source 1..22: mol_type = other DNA
gcccttcagattctgacccatt

SEQ ID NO: 155084 - DNA, 22 bp, synthetic construct
  misc_feature 1..22: note = chemically synthesized
  source 1..22: mol_type = other DNA
cagattctgacccatttaccat

SEQ ID NO: 155085 - DNA, 22 bp, synthetic construct
  misc_feature 1..22: note = chemically synthesized
  source 1..22: mol_type = other DNA
agattctgacccatttaccatg

SEQ ID NO: 155086 - DNA, 22 bp, synthetic construct
  misc_feature 1..22: note = chemically synthesized
  source 1..22: mol_type = other DNA
tgacccatttaccatgtgacca

SEQ ID NO: 155087 - DNA, 22 bp, synthetic construct
  misc_feature 1..22: note = chemically synthesized
  source 1..22: mol_type = other DNA
acccatttaccatgtgaccaag

SEQ ID NO: 155088 - DNA, 22 bp, synthetic construct
  misc_feature 1..22: note = chemically synthesized
  source 1..22: mol_type = other DNA
accatgtgaccaagaaaaagca

SEQ ID NO: 155089 - DNA, 22 bp, synthetic construct
  misc_feature 1..22: note = chemically synthesized
  source 1..22: mol_type = other DNA
ccatgtgaccaagaaaaagcag

SEQ ID NO: 155090 - DNA, 22 bp, synthetic construct
  misc_feature 1..22: note = chemically synthesized
  source 1..22: mol_type = other DNA
aaaaattaaagggaaataaaat

SEQ ID NO: 155091 - DNA, 22 bp, synthetic construct
  misc_feature 1..22: note = chemically synthesized
  source 1..22: mol_type = other DNA
aaaattaaagggaaataaaatg

SEQ ID NO: 155092 - DNA, 22 bp, synthetic construct
  misc_feature 1..22: note = chemically synthesized
  source 1..22: mol_type = other DNA
aagggaaataaaatgagagaat

SEQ ID NO: 155093 - DNA, 22 bp, synthetic construct
  misc_feature 1..22: note = chemically synthesized
  source 1..22: mol_type = other DNA
acttttaggtgccatctaagat

SEQ ID NO: 155094 - DNA, 22 bp, synthetic construct
  misc_feature 1..22: note = chemically synthesized
  source 1..22: mol_type = other DNA
ttaggtgccatctaagatgtgt

SEQ ID NO: 155095 - DNA, 22 bp, synthetic construct
  misc_feature 1..22: note = chemically synthesized
  source 1..22: mol_type = other DNA
taggtgccatctaagatgtgta

SEQ ID NO: 155096 - DNA, 22 bp, synthetic construct
  misc_feature 1..22: note = chemically synthesized
  source 1..22: mol_type = other DNA
aggtgccatctaagatgtgtaa

SEQ ID NO: 155097 - DNA, 22 bp, synthetic construct
  misc_feature 1..22: note = chemically synthesized
  source 1..22: mol_type = other DNA
ggtgccatctaagatgtgtaaa

SEQ ID NO: 155098 - DNA, 22 bp, synthetic construct
  misc_feature 1..22: note = chemically synthesized
  source 1..22: mol_type = other DNA
agatgtgtaaagtccttctccc

SEQ ID NO: 155099 - DNA, 22 bp, synthetic construct
  misc_feature 1..22: note = chemically synthesized
  source 1..22: mol_type = other DNA
ctcccacatgtctcctttgcaa

SEQ ID NO: 155100 - DNA, 22 bp, synthetic construct
  misc_feature 1..22: note = chemically synthesized
  source 1..22: mol_type = other DNA
tcccacatgtctcctttgcaac

SEQ ID NO: 155101 - DNA, 22 bp, synthetic construct
  misc_feature 1..22: note = chemically synthesized
  source 1..22: mol_type = other DNA
ccacatgtctcctttgcaacct

SEQ ID NO: 155102 - DNA, 22 bp, synthetic construct
  misc_feature 1..22: note = chemically synthesized
  source 1..22: mol_type = other DNA
ctttgcaacctatatttgccaa

SEQ ID NO: 155103 - DNA, 22 bp, synthetic construct
  misc_feature 1..22: note = chemically synthesized
  source 1..22: mol_type = other DNA
tgcaacctatatttgccaatgg

SEQ ID NO: 155104 - DNA, 22 bp, synthetic construct
  misc_feature 1..22: note = chemically synthesized
  source 1..22: mol_type = other DNA
gcaacctatatttgccaatggc

SEQ ID NO: 155105 - DNA, 22 bp, synthetic construct
  misc_feature 1..22: note = chemically synthesized
  source 1..22: mol_type = other DNA
caacctatatttgccaatggct

SEQ ID NO: 155106 - DNA, 22 bp, synthetic construct
  misc_feature 1..22: note = chemically synthesized
  source 1..22: mol_type = other DNA
tatttgccaatggctcattgga

SEQ ID NO: 155107 - DNA, 22 bp, synthetic construct
  misc_feature 1..22: note = chemically synthesized
  source 1..22: mol_type = other DNA
gccaatggctcattggaaacaa

SEQ ID NO: 155108 - DNA, 22 bp, synthetic construct
  misc_feature 1..22: note = chemically synthesized
  source 1..22: mol_type = other DNA
ccaatggctcattggaaacaat

SEQ ID NO: 155109 - DNA, 22 bp, synthetic construct
  misc_feature 1..22: note = chemically synthesized
  source 1..22: mol_type = other DNA
attggaaacaatatatgacagg

SEQ ID NO: 155110 - DNA, 22 bp, synthetic construct
  misc_feature 1..22: note = chemically synthesized
  source 1..22: mol_type = other DNA
gaaacaatatatgacagggaca

SEQ ID NO: 155111 - DNA, 22 bp, synthetic construct
  misc_feature 1..22: note = chemically synthesized
  source 1..22: mol_type = other DNA
gacatgtagatgtatgtattaa

SEQ ID NO: 155112 - DNA, 22 bp, synthetic construct
  misc_feature 1..22: note = chemically synthesized
  source 1..22: mol_type = other DNA
acttaggtgtcagagagtggtg

SEQ ID NO: 155113 - DNA, 22 bp, synthetic construct
  misc_feature 1..22: note = chemically synthesized
  source 1..22: mol_type = other DNA
aggtgtcagagagtggtggctg

SEQ ID NO: 155114 - DNA, 22 bp, synthetic construct
  misc_feature 1..22: note = chemically synthesized
  source 1..22: mol_type = other DNA
ggtgtcagagagtggtggctga

SEQ ID NO: 155115 - DNA, 22 bp, synthetic construct
  misc_feature 1..22: note = chemically synthesized
  source 1..22: mol_type = other DNA
aagaaaaaaaatgcacaaatta

SEQ ID NO: 155116 - DNA, 22 bp, synthetic construct
  misc_feature 1..22: note = chemically synthesized
  source 1..22: mol_type = other DNA
taatgaaagagaatgcagtatg

SEQ ID NO: 155117 - DNA, 22 bp, synthetic construct
  misc_feature 1..22: note = chemically synthesized
  source 1..22: mol_type = other DNA
ctccctgtggactatgtaccag

SEQ ID NO: 155118 - DNA, 22 bp, synthetic construct
  misc_feature 1..22: note = chemically synthesized
  source 1..22: mol_type = other DNA
tccctgtggactatgtaccaga

SEQ ID NO: 155119 - DNA, 22 bp, synthetic construct
  misc_feature 1..22: note = chemically synthesized
  source 1..22: mol_type = other DNA
cctgtggactatgtaccagaag

SEQ ID NO: 155120 - DNA, 22 bp, synthetic construct
  misc_feature 1..22: note = chemically synthesized
  source 1..22: mol_type = other DNA
tggactatgtaccagaagcagc

SEQ ID NO: 155121 - DNA, 22 bp, synthetic construct
  misc_feature 1..22: note = chemically synthesized
  source 1..22: mol_type = other DNA
tgtaccagaagcagctctgtgt

SEQ ID NO: 155122 - DNA, 22 bp, synthetic construct
  misc_feature 1..22: note = chemically synthesized
  source 1..22: mol_type = other DNA
tgtgtcatctccttccatggga

SEQ ID NO: 155123 - DNA, 22 bp, synthetic construct
  misc_feature 1..22: note = chemically synthesized
  source 1..22: mol_type = other DNA
tgtcatctccttccatgggagg

SEQ ID NO: 155124 - DNA, 22 bp, synthetic construct
  misc_feature 1..22: note = chemically synthesized
  source 1..22: mol_type = other DNA
cttccatgggaggagtaaaatt

SEQ ID NO: 155125 - DNA, 22 bp, synthetic construct
  misc_feature 1..22: note = chemically synthesized
  source 1..22: mol_type = other DNA
ccatgggaggagtaaaattcgt

SEQ ID NO: 155126 - DNA, 22 bp, synthetic construct
  misc_feature 1..22: note = chemically synthesized
  source 1..22: mol_type = other DNA
catgggaggagtaaaattcgtc

SEQ ID NO: 155127 - DNA, 22 bp, synthetic construct
  misc_feature 1..22: note = chemically synthesized
  source 1..22: mol_type = other DNA
gtcctcttaagctgaaaacctt

SEQ ID NO: 155128 - DNA, 22 bp, synthetic construct
  misc_feature 1..22: note = chemically synthesized
  source 1..22: mol_type = other DNA
ttaagctgaaaaccttgggccc

SEQ ID NO: 155129 - DNA, 22 bp, synthetic construct
  misc_feature 1..22: note = chemically synthesized
  source 1..22: mol_type = other DNA
aagctgaaaaccttgggcccaa

SEQ ID NO: 155130 - DNA, 22 bp, synthetic construct
  misc_feature 1..22: note = chemically synthesized
  source 1..22: mol_type = other DNA
agctgaaaaccttgggcccaag

SEQ ID NO: 155131 - DNA, 22 bp, synthetic construct
  misc_feature 1..22: note = chemically synthesized
  source 1..22: mol_type = other DNA
aaaaccttgggcccaagacatg

SEQ ID NO: 155132 - DNA, 22 bp, synthetic construct
  misc_feature 1..22: note = chemically synthesized
  source 1..22: mol_type = other DNA
gggcccaagacatgctttaaaa

SEQ ID NO: 155133 - DNA, 22 bp, synthetic construct
  misc_feature 1..22: note = chemically synthesized
  source 1..22: mol_type = other DNA
ggcccaagacatgctttaaaag

SEQ ID NO: 155134 - DNA, 22 bp, synthetic construct
  misc_feature 1..22: note = chemically synthesized
  source 1..22: mol_type = other DNA
taaaagaagtataaatagttcc

SEQ ID NO: 155135 - DNA, 22 bp, synthetic construct
  misc_feature 1..22: note = chemically synthesized
  source 1..22: mol_type = other DNA
aaaagaagtataaatagttcca

SEQ ID NO: 155136 - DNA, 22 bp, synthetic construct
  misc_feature 1..22: note = chemically synthesized
  source 1..22: mol_type = other DNA
aaagaagtataaatagttccag

SEQ ID NO: 155137 - DNA, 22 bp, synthetic construct
  misc_feature 1..22: note = chemically synthesized
  source 1..22: mol_type = other DNA
cagatttcctaatctctttgca

SEQ ID NO: 155138 - DNA, 22 bp, synthetic construct
  misc_feature 1..22: note = chemically synthesized
  source 1..22: mol_type = other DNA
cctaatctctttgcatttattt

SEQ ID NO: 155139 - DNA, 22 bp, synthetic construct
  misc_feature 1..22: note = chemically synthesized
  source 1..22: mol_type = other DNA
ctaatctctttgcatttatttt

SEQ ID NO: 155140 - DNA, 22 bp, synthetic construct
  misc_feature 1..22: note = chemically synthesized
  source 1..22: mol_type = other DNA
atctctttgcatttattttgtc

SEQ ID NO: 155141 - DNA, 22 bp, synthetic construct
  misc_feature 1..22: note = chemically synthesized
  source 1..22: mol_type = other DNA
tttgcatttattttgtctcctc

SEQ ID NO: 155142 - DNA, 22 bp, synthetic construct
  misc_feature 1..22: note = chemically synthesized
  source 1..22: mol_type = other DNA
tgcatttattttgtctcctctc

SEQ ID NO: 155143 - DNA, 22 bp, synthetic construct
  misc_feature 1..22: note = chemically synthesized
  source 1..22: mol_type = other DNA
gcatttattttgtctcctctca

SEQ ID NO: 155144 - DNA, 22 bp, synthetic construct
  misc_feature 1..22: note = chemically synthesized
  source 1..22: mol_type = other DNA
catttattttgtctcctctcaa

SEQ ID NO: 155145 - DNA, 22 bp, synthetic construct
  misc_feature 1..22: note = chemically synthesized
  source 1..22: mol_type = other DNA
attttgtctcctctcaacctgc

SEQ ID NO: 155146 - DNA, 22 bp, synthetic construct
  misc_feature 1..22: note = chemically synthesized
  source 1..22: mol_type = other DNA
ttttgtctcctctcaacctgct

SEQ ID NO: 155147 - DNA, 22 bp, synthetic construct
  misc_feature 1..22: note = chemically synthesized
  source 1..22: mol_type = other DNA
tgtctcctctcaacctgctaaa

SEQ ID NO: 155148 - DNA, 22 bp, synthetic construct
  misc_feature 1..22: note = chemically synthesized
  source 1..22: mol_type = other DNA
gtctcctctcaacctgctaaat

SEQ ID NO: 155149 - DNA, 22 bp, synthetic construct
  misc_feature 1..22: note = chemically synthesized
  source 1..22: mol_type = other DNA
tctcctctcaacctgctaaata

SEQ ID NO: 155150 - DNA, 22 bp, synthetic construct
  misc_feature 1..22: note = chemically synthesized
  source 1..22: mol_type = other DNA
ctctcaacctgctaaatatctt

SEQ ID NO: 155151 - DNA, 22 bp, synthetic construct
  misc_feature 1..22: note = chemically synthesized
  source 1..22: mol_type = other DNA
tcaacctgctaaatatcttcag

SEQ ID NO: 155152 - DNA, 22 bp, synthetic construct
  misc_feature 1..22: note = chemically synthesized
  source 1..22: mol_type = other DNA
aacctgctaaatatcttcagga

SEQ ID NO: 155153 - DNA, 22 bp, synthetic construct
  misc_feature 1..22: note = chemically synthesized
  source 1..22: mol_type = other DNA
ctaaatatcttcaggattctag

SEQ ID NO: 155154 - DNA, 22 bp, synthetic construct
  misc_feature 1..22: note = chemically synthesized
  source 1..22: mol_type = other DNA
aatatcttcaggattctagaaa

SEQ ID NO: 155155 - DNA, 22 bp, synthetic construct
  misc_feature 1..22: note = chemically synthesized
  source 1..22: mol_type = other DNA
caggattctagaaaatgcaagt

SEQ ID NO: 155156 - DNA, 22 bp, synthetic construct
  misc_feature 1..22: note = chemically synthesized
  source 1..22: mol_type = other DNA
aggattctagaaaatgcaagta

SEQ ID NO: 155157 - DNA, 22 bp, synthetic construct
  misc_feature 1..22: note = chemically synthesized
  source 1..22: mol_type = other DNA
tagaaaatgcaagtaagtaaac

SEQ ID NO: 155158 - DNA, 22 bp, synthetic construct
  misc_feature 1..22: note = chemically synthesized
  source 1..22: mol_type = other DNA
gaaaatgcaagtaagtaaactg

SEQ ID NO: 155159 - DNA, 22 bp, synthetic construct
  misc_feature 1..22: note = chemically synthesized
  source 1..22: mol_type = other DNA
agttatgctcaatgaaaacttg

SEQ ID NO: 155160 - DNA, 22 bp, synthetic construct
  misc_feature 1..22: note = chemically synthesized
  source 1..22: mol_type = other DNA
tgctcaatgaaaacttgtagaa

SEQ ID NO: 155161 - DNA, 22 bp, synthetic construct
  misc_feature 1..22: note = chemically synthesized
  source 1..22: mol_type = other DNA
aatgaaaacttgtagaaaataa

SEQ ID NO: 155162 - DNA, 22 bp, synthetic construct
  misc_feature 1..22: note = chemically synthesized
  source 1..22: mol_type = other DNA
gtagaaaataacaccagaaaaa

SEQ ID NO: 155163 - DNA, 22 bp, synthetic construct
  misc_feature 1..22: note = chemically synthesized
  source 1..22: mol_type = other DNA
tagaaaataacaccagaaaaaa

SEQ ID NO: 155164 - DNA, 22 bp, synthetic construct
  misc_feature 1..22: note = chemically synthesized
  source 1..22: mol_type = other DNA
cagaagcagctcattcttccga

SEQ ID NO: 155165 - DNA, 22 bp, synthetic construct
  misc_feature 1..22: note = chemically synthesized
  source 1..22: mol_type = other DNA
attcttccgataacttaatcat

SEQ ID NO: 155166 - DNA, 22 bp, synthetic construct
  misc_feature 1..22: note = chemically synthesized
  source 1..22: mol_type = other DNA
ttccgataacttaatcatctaa

SEQ ID NO: 155167 - DNA, 22 bp, synthetic construct
  misc_feature 1..22: note = chemically synthesized
  source 1..22: mol_type = other DNA
ccgataacttaatcatctaaca

SEQ ID NO: 155168 - DNA, 22 bp, synthetic construct
  misc_feature 1..22: note = chemically synthesized
  source 1..22: mol_type = other DNA
cgataacttaatcatctaacat

SEQ ID NO: 155169 - DNA, 22 bp, synthetic construct
  misc_feature 1..22: note = chemically synthesized
  source 1..22: mol_type = other DNA
aatcatctaacattttccttga

SEQ ID NO: 155170 - DNA, 22 bp, synthetic construct
  misc_feature 1..22: note = chemically synthesized
  source 1..22: mol_type = other DNA
atcatctaacattttccttgat

SEQ ID NO: 155171 - DNA, 22 bp, synthetic construct
  misc_feature 1..22: note = chemically synthesized
  source 1..22: mol_type = other DNA
acattttccttgatttttgacc

SEQ ID NO: 155172 - DNA, 22 bp, synthetic construct
  misc_feature 1..22: note = chemically synthesized
  source 1..22: mol_type = other DNA
tccttgatttttgacccatgga

SEQ ID NO: 155173 - DNA, 22 bp, synthetic construct
  misc_feature 1..22: note = chemically synthesized
  source 1..22: mol_type = other DNA
ccttgatttttgacccatggaa

SEQ ID NO: 155174 - DNA, 22 bp, synthetic construct
  misc_feature 1..22: note = chemically synthesized
  source 1..22: mol_type = other DNA
cttgatttttgacccatggaat

SEQ ID NO: 155175 - DNA, 22 bp, synthetic construct
  misc_feature 1..22: note = chemically synthesized
  source 1..22: mol_type = other DNA
gatttttgacccatggaatact

SEQ ID NO: 155176 - DNA, 22 bp, synthetic construct
  misc_feature 1..22: note = chemically synthesized
  source 1..22: mol_type = other DNA
atttttgacccatggaatacta

SEQ ID NO: 155177 - DNA, 22 bp, synthetic construct
  misc_feature 1..22: note = chemically synthesized
  source 1..22: mol_type = other DNA
ttgacccatggaatactagact

SEQ ID NO: 155178 - DNA, 22 bp, synthetic construct
  misc_feature 1..22: note = chemically synthesized
  source 1..22: mol_type = other DNA
tgacccatggaatactagactt

SEQ ID NO: 155179 - DNA, 22 bp, synthetic construct
  misc_feature 1..22: note = chemically synthesized
  source 1..22: mol_type = other DNA
gacccatggaatactagacttg

SEQ ID NO: 155180 - DNA, 22 bp, synthetic construct
  misc_feature 1..22: note = chemically synthesized
  source 1..22: mol_type = other DNA
acccatggaatactagacttgg

SEQ ID NO: 155181 - DNA, 22 bp, synthetic construct
  misc_feature 1..22: note = chemically synthesized
  source 1..22: mol_type = other DNA
gacttggctttagctggagttg

SEQ ID NO: 155182 - DNA, 22 bp, synthetic construct
  misc_feature 1..22: note = chemically synthesized
  source 1..22: mol_type = other DNA
ggctttagctggagttgatttg

SEQ ID NO: 155183 - DNA, 22 bp, synthetic construct
  misc_feature 1..22: note = chemically synthesized
  source 1..22: mol_type = other DNA
gctttagctggagttgatttgc

SEQ ID NO: 155184 - DNA, 22 bp, synthetic construct
  misc_feature 1..22: note = chemically synthesized
  source 1..22: mol_type = other DNA
tagctggagttgatttgcaatt

SEQ ID NO: 155185 - DNA, 22 bp, synthetic construct
  misc_feature 1..22: note = chemically synthesized
  source 1..22: mol_type = other DNA
agctggagttgatttgcaattg

SEQ ID NO: 155186 - DNA, 22 bp, synthetic construct
  misc_feature 1..22: note = chemically synthesized
  source 1..22: mol_type = other DNA
gctggagttgatttgcaattgt

SEQ ID NO: 155187 - DNA, 22 bp, synthetic construct
  misc_feature 1..22: note = chemically synthesized
  source 1..22: mol_type = other DNA
gagttgatttgcaattgtagta

SEQ ID NO: 155188 - DNA, 22 bp, synthetic construct
  misc_feature 1..22: note = chemically synthesized
  source 1..22: mol_type = other DNA
atttgcaattgtagtatttttt

SEQ ID NO: 155189 - DNA, 22 bp, synthetic construct
  misc_feature 1..22: note = chemically synthesized
  source 1..22: mol_type = other DNA
gcaattgtagtattttttgtgt

SEQ ID NO: 155190 - DNA, 22 bp, synthetic construct
  misc_feature 1..22: note = chemically synthesized
  source 1..22: mol_type = other DNA
caattgtagtattttttgtgtt

SEQ ID NO: 155191 - DNA, 22 bp, synthetic construct
  misc_feature 1..22: note = chemically synthesized
  source 1..22: mol_type = other DNA
tagtattttttgtgttcttgta

SEQ ID NO: 155192 - DNA, 22 bp, synthetic construct
  misc_feature 1..22: note = chemically synthesized
  source 1..22: mol_type = other DNA
tttgtgttcttgtattaagtaa

SEQ ID NO: 155193 - DNA, 22 bp, synthetic construct
  misc_feature 1..22: note = chemically synthesized
  source 1..22: mol_type = other DNA
ttgtgttcttgtattaagtaag

SEQ ID NO: 155194 - DNA, 22 bp, synthetic construct
  misc_feature 1..22: note = chemically synthesized
  source 1..22: mol_type = other DNA
tgtgttcttgtattaagtaagt

SEQ ID NO: 155195 - DNA, 22 bp, synthetic construct
  misc_feature 1..22: note = chemically synthesized
  source 1..22: mol_type = other DNA
gtgttcttgtattaagtaagtc

SEQ ID NO: 155196 - DNA, 22 bp, synthetic construct
  misc_feature 1..22: note = chemically synthesized
  source 1..22: mol_type = other DNA
tgttcttgtattaagtaagtca

SEQ ID NO: 155197 - DNA, 22 bp, synthetic construct
  misc_feature 1..22: note = chemically synthesized
  source 1..22: mol_type = other DNA
ttgtattaagtaagtcattttc

SEQ ID NO: 155198 - DNA, 22 bp, synthetic construct
  misc_feature 1..22: note = chemically synthesized
  source 1..22: mol_type = other DNA
gtattaagtaagtcattttcaa

SEQ ID NO: 155199 - DNA, 22 bp, synthetic construct
  misc_feature 1..22: note = chemically synthesized
  source 1..22: mol_type = other DNA
tattaagtaagtcattttcaaa

SEQ ID NO: 155200 - DNA, 22 bp, synthetic construct
  misc_feature 1..22: note = chemically synthesized
  source 1..22: mol_type = other DNA
agtaagtcattttcaaaaagaa

SEQ ID NO: 155201 - DNA, 22 bp, synthetic construct
  misc_feature 1..22: note = chemically synthesized
  source 1..22: mol_type = other DNA
tcaaaaagaatattttagtttt

SEQ ID NO: 155202 - DNA, 22 bp, synthetic construct
  misc_feature 1..22: note = chemically synthesized
  source 1..22: mol_type = other DNA
caaaaagaatattttagttttc

SEQ ID NO: 155203 - DNA, 22 bp, synthetic construct
  misc_feature 1..22: note = chemically synthesized
  source 1..22: mol_type = other DNA
aaaaagaatattttagttttct

SEQ ID NO: 155204 - DNA, 22 bp, synthetic construct
  misc_feature 1..22: note = chemically synthesized
  source 1..22: mol_type = other DNA
tagttttctcttagaatatgtt

SEQ ID NO: 155205 - DNA, 22 bp, synthetic construct
  misc_feature 1..22: note = chemically synthesized
  source 1..22: mol_type = other DNA
agttttctcttagaatatgttt

SEQ ID NO: 155206 - DNA, 22 bp, synthetic construct
  misc_feature 1..22: note = chemically synthesized
  source 1..22: mol_type = other DNA
gttttctcttagaatatgttta

SEQ ID NO: 155207 - DNA, 22 bp, synthetic construct
  misc_feature 1..22: note = chemically synthesized
  source 1..22: mol_type = other DNA
tctcttagaatatgtttaaata

SEQ ID NO: 155208 - DNA, 22 bp, synthetic construct
  misc_feature 1..22: note = chemically synthesized
  source 1..22: mol_type = other DNA
ctcttagaatatgtttaaataa

SEQ ID NO: 155209 - DNA, 22 bp, synthetic construct
  misc_feature 1..22: note = chemically synthesized
  source 1..22: mol_type = other DNA
tcttagaatatgtttaaataat

SEQ ID NO: 155210 - DNA, 22 bp, synthetic construct
  misc_feature 1..22: note = chemically synthesized
  source 1..22: mol_type = other DNA
ttagaatatgtttaaataatgc

SEQ ID NO: 155211 - DNA, 22 bp, synthetic construct
  misc_feature 1..22: note = chemically synthesized
  source 1..22: mol_type = other DNA
agaatatgtttaaataatgctc

SEQ ID NO: 155212 - DNA, 22 bp, synthetic construct
  misc_feature 1..22: note = chemically synthesized
  source 1..22: mol_type = other DNA
gaatatgtttaaataatgctca

SEQ ID NO: 155213 - DNA, 22 bp, synthetic construct
  misc_feature 1..22: note = chemically synthesized
  source 1..22: mol_type = other DNA
aaataatgctcattttctttga

SEQ ID NO: 155214 - DNA, 22 bp, synthetic construct
  misc_feature 1..22: note = chemically synthesized
  source 1..22: mol_type = other DNA
aataatgctcattttctttgat

SEQ ID NO: 155215 - DNA, 22 bp, synthetic construct
  misc_feature 1..22: note = chemically synthesized
  source 1..22: mol_type = other DNA
attttctttgatatgcagattt

SEQ ID NO: 155216 - DNA, 22 bp, synthetic construct
  misc_feature 1..22: note = chemically synthesized
  source 1..22: mol_type = other DNA
tctttgatatgcagatttgaat

SEQ ID NO: 155217 - DNA, 22 bp, synthetic construct
  misc_feature 1..22: note = chemically synthesized
  source 1..22: mol_type = other DNA
ctttgatatgcagatttgaatg

SEQ ID NO: 155218 - DNA, 22 bp, synthetic construct
  misc_feature 1..22: note = chemically synthesized
  source 1..22: mol_type = other DNA
tttgatatgcagatttgaatgt

SEQ ID NO: 155219 - DNA, 22 bp, synthetic construct
  misc_feature 1..22: note = chemically synthesized
  source 1..22: mol_type = other DNA
tgatatgcagatttgaatgttg

SEQ ID NO: 155220 - DNA, 22 bp, synthetic construct
  misc_feature 1..22: note = chemically synthesized
  source 1..22: mol_type = other DNA
gatatgcagatttgaatgttgt

SEQ ID NO: 155221 - DNA, 22 bp, synthetic construct
  misc_feature 1..22: note = chemically synthesized
  source 1..22: mol_type = other DNA
atatgcagatttgaatgttgta

SEQ ID NO: 155222 - DNA, 22 bp, synthetic construct
  misc_feature 1..22: note = chemically synthesized
  source 1..22: mol_type = other DNA
gaatgttgtacaaagattcaat

SEQ ID NO: 155223 - DNA, 22 bp, synthetic construct
  misc_feature 1..22: note = chemically synthesized
  source 1..22: mol_type = other DNA
aatgttgtacaaagattcaatg

SEQ ID NO: 155224 - DNA, 22 bp, synthetic construct
  misc_feature 1..22: note = chemically synthesized
  source 1..22: mol_type = other DNA
tacaaagattcaatgaatttat

SEQ ID NO: 155225 - DNA, 22 bp, synthetic construct
  misc_feature 1..22: note = chemically synthesized
  source 1..22: mol_type = other DNA
aatgaatttatattctagtagt

SEQ ID NO: 155226 - DNA, 22 bp, synthetic construct
  misc_feature 1..22: note = chemically synthesized
  source 1..22: mol_type = other DNA
atattctagtagttaaaacaag

SEQ ID NO: 155227 - DNA, 22 bp, synthetic construct
  misc_feature 1..22: note = chemically synthesized
  source 1..22: mol_type = other DNA
tattctagtagttaaaacaagg

SEQ ID NO: 155228 - DNA, 22 bp, synthetic construct
  misc_feature 1..22: note = chemically synthesized
  source 1..22: mol_type = other DNA
tagtagttaaaacaaggctcag

SEQ ID NO: 155229 - DNA, 22 bp, synthetic construct
  misc_feature 1..22: note = chemically synthesized
  source 1..22: mol_type = other DNA
gtagttaaaacaaggctcagta

SEQ ID NO: 155230 - DNA, 22 bp, synthetic construct
  misc_feature 1..22: note = chemically synthesized
  source 1..22: mol_type = other DNA
aaacaaggctcagtaataaaaa

SEQ ID NO: 155231 - DNA, 22 bp, synthetic construct
  misc_feature 1..22: note = chemically synthesized
  source 1..22: mol_type = other DNA
agtaataaaaaattttagtagt

SEQ ID NO: 155232 - DNA, 22 bp, synthetic construct
  misc_feature 1..22: note = chemically synthesized
  source 1..22: mol_type = other DNA
tagtagtttaatgtgtgtgtgt

SEQ ID NO: 155233 - DNA, 22 bp, synthetic construct
  misc_feature 1..22: note = chemically synthesized
  source 1..22: mol_type = other DNA
agtagtttaatgtgtgtgtgtg

SEQ ID NO: 155234 - DNA, 22 bp, synthetic construct
  misc_feature 1..22: note = chemically synthesized
  source 1..22: mol_type = other DNA
gtagtttaatgtgtgtgtgtgt

SEQ ID NO: 155235 - DNA, 22 bp, synthetic construct
  misc_feature 1..22: note = chemically synthesized
  source 1..22: mol_type = other DNA
aatgtgtgtgtgtgtgtgcatc

SEQ ID NO: 155236 - DNA, 22 bp, synthetic construct
  misc_feature 1..22: note = chemically synthesized
  source 1..22: mol_type = other DNA
atgtgtgtgtgtgtgtgcatcg

SEQ ID NO: 155237 - DNA, 22 bp, synthetic construct
  misc_feature 1..22: note = chemically synthesized
  source 1..22: mol_type = other DNA
tgtagtttattgactattactc

SEQ ID NO: 155238 - DNA, 22 bp, synthetic construct
  misc_feature 1..22: note = chemically synthesized
  source 1..22: mol_type = other DNA
tagtttattgactattactcat

SEQ ID NO: 155239 - DNA, 22 bp, synthetic construct
  misc_feature 1..22: note = chemically synthesized
  source 1..22: mol_type = other DNA
attgactattactcatcaggta

SEQ ID NO: 155240 - DNA, 22 bp, synthetic construct
  misc_feature 1..22: note = chemically synthesized
  source 1..22: mol_type = other DNA
ttgactattactcatcaggtaa

SEQ ID NO: 155241 - DNA, 22 bp, synthetic construct
  misc_feature 1..22: note = chemically synthesized
  source 1..22: mol_type = other DNA
actattactcatcaggtaatag

SEQ ID NO: 155242 - DNA, 22 bp, synthetic construct
  misc_feature 1..22: note = chemically synthesized
  source 1..22: mol_type = other DNA
ttactcatcaggtaatagtcta

SEQ ID NO: 155243 - DNA, 22 bp, synthetic construct
  misc_feature 1..22: note = chemically synthesized
  source 1..22: mol_type = other DNA
ctcatcaggtaatagtctaggc

SEQ ID NO: 155244 - DNA, 22 bp, synthetic construct
  misc_feature 1..22: note = chemically synthesized
  source 1..22: mol_type = other DNA
atcaggtaatagtctaggcaca

SEQ ID NO: 155245 - DNA, 22 bp, synthetic construct
  misc_feature 1..22: note = chemically synthesized
  source 1..22: mol_type = other DNA
ggcacagattaagaagctggca

SEQ ID NO: 155246 - DNA, 22 bp, synthetic construct
  misc_feature 1..22: note = chemically synthesized
  source 1..22: mol_type = other DNA
agaagctggcactccaaaattt

SEQ ID NO: 155247 - DNA, 22 bp, synthetic construct
  misc_feature 1..22: note = chemically synthesized
  source 1..22: mol_type = other DNA
gcactccaaaatttttaactct

SEQ ID NO: 155248 - DNA, 22 bp, synthetic construct
  misc_feature 1..22: note = chemically synthesized
  source 1..22: mol_type = other DNA
caaaatttttaactctcttccc

SEQ ID NO: 155249 - DNA, 22 bp, synthetic construct
  misc_feature 1..22: note = chemically synthesized
  source 1..22: mol_type = other DNA
ttaactctcttccctatgtaac

SEQ ID NO: 155250 - DNA, 22 bp, synthetic construct
  misc_feature 1..22: note = chemically synthesized
  source 1..22: mol_type = other DNA
taactctcttccctatgtaaca

SEQ ID NO: 155251 - DNA, 22 bp, synthetic construct
  misc_feature 1..22: note = chemically synthesized
  source 1..22: mol_type = other DNA
aactctcttccctatgtaacaa

SEQ ID NO: 155252 - DNA, 22 bp, synthetic construct
  misc_feature 1..22: note = chemically synthesized
  source 1..22: mol_type = other DNA
actctcttccctatgtaacaaa

SEQ ID NO: 155253 - DNA, 22 bp, synthetic construct
  misc_feature 1..22: note = chemically synthesized
  source 1..22: mol_type = other DNA
tcttccctatgtaacaaagata

SEQ ID NO: 155254 - DNA, 22 bp, synthetic construct
  misc_feature 1..22: note = chemically synthesized
  source 1..22: mol_type = other DNA
ttccctatgtaacaaagatatt

SEQ ID NO: 155255 - DNA, 22 bp, synthetic construct
  misc_feature 1..22: note = chemically synthesized
  source 1..22: mol_type = other DNA
ccctatgtaacaaagatattat

SEQ ID NO: 155256 - DNA, 22 bp, synthetic construct
  misc_feature 1..22: note = chemically synthesized
  source 1..22: mol_type = other DNA
cctatgtaacaaagatattata

SEQ ID NO: 155257 - DNA, 22 bp, synthetic construct
  misc_feature 1..22: note = chemically synthesized
  source 1..22: mol_type = other DNA
tgtaacaaagatattatactgg

SEQ ID NO: 155258 - DNA, 22 bp, synthetic construct
  misc_feature 1..22: note = chemically synthesized
  source 1..22: mol_type = other DNA
tactggtgatggggcaaaaata

SEQ ID NO: 155259 - DNA, 22 bp, synthetic construct
  misc_feature 1..22: note = chemically synthesized
  source 1..22: mol_type = other DNA
gtgatggggcaaaaataaaact

SEQ ID NO: 155260 - DNA, 22 bp, synthetic construct
  misc_feature 1..22: note = chemically synthesized
  source 1..22: mol_type = other DNA
catttcaaaattcatgtgtctg

SEQ ID NO: 155261 - DNA, 22 bp, synthetic construct
  misc_feature 1..22: note = chemically synthesized
  source 1..22: mol_type = other DNA
caaaattcatgtgtctgtcacc

SEQ ID NO: 155262 - DNA, 22 bp, synthetic construct
  misc_feature 1..22: note = chemically synthesized
  source 1..22: mol_type = other DNA
aaaattcatgtgtctgtcacca

SEQ ID NO: 155263 - DNA, 22 bp, synthetic construct
  misc_feature 1..22: note = chemically synthesized
  source 1..22: mol_type = other DNA
atgtgtctgtcaccatgctgaa

SEQ ID NO: 155264 - DNA, 22 bp, synthetic construct
  misc_feature 1..22: note = chemically synthesized
  source 1..22: mol_type = other DNA
tcaccatgctgaactatttgca

SEQ ID NO: 155265 - DNA, 22 bp, synthetic construct
  misc_feature 1..22: note = chemically synthesized
  source 1..22: mol_type = other DNA
aactatttgcaccttataaaag

SEQ ID NO: 155266 - DNA, 22 bp, synthetic construct
  misc_feature 1..22: note = chemically synthesized
  source 1..22: mol_type = other DNA
tttgcaccttataaaagtaaat

SEQ ID NO: 155267 - DNA, 22 bp, synthetic construct
  misc_feature 1..22: note = chemically synthesized
  source 1..22: mol_type = other DNA
gcaccttataaaagtaaatgac

SEQ ID NO: 155268 - DNA, 22 bp, synthetic construct
  misc_feature 1..22: note = chemically synthesized
  source 1..22: mol_type = other DNA
caccttataaaagtaaatgaca

SEQ ID NO: 155269 - DNA, 22 bp, synthetic construct
  misc_feature 1..22: note = chemically synthesized
  source 1..22: mol_type = other DNA
ataaaagtaaatgacagataca

SEQ ID NO: 155270 - DNA, 22 bp, synthetic construct
  misc_feature 1..22: note = chemically synthesized
  source 1..22: mol_type = other DNA
taaaagtaaatgacagatacag

SEQ ID NO: 155271 - DNA, 22 bp, synthetic construct
  misc_feature 1..22: note = chemically synthesized
  source 1..22: mol_type = other DNA
ccaattgataccatgtgcccag

SEQ ID NO: 155272 - DNA, 22 bp, synthetic construct
  misc_feature 1..22: note = chemically synthesized
  source 1..22: mol_type = other DNA
ataccatgtgcccagtataaga

SEQ ID NO: 155273 - DNA, 22 bp, synthetic construct
  misc_feature 1..22: note = chemically synthesized
  source 1..22: mol_type = other DNA
attaaaaaaaaatttattccta

SEQ ID NO: 155274 - DNA, 22 bp, synthetic construct
  misc_feature 1..22: note = chemically synthesized
  source 1..22: mol_type = other DNA
ttaaaaaaaaatttattcctag

SEQ ID NO: 155275 - DNA, 22 bp, synthetic construct
  misc_feature 1..22: note = chemically synthesized
  source 1..22: mol_type = other DNA
aaaaaaaatttattcctagtat

SEQ ID NO: 155276 - DNA, 22 bp, synthetic construct
  misc_feature 1..22: note = chemically synthesized
  source 1..22: mol_type = other DNA
attcctagtatttatggatact

SEQ ID NO: 155277 - DNA, 22 bp, synthetic construct
  misc_feature 1..22: note = chemically synthesized
  source 1..22: mol_type = other DNA
ttcctagtatttatggatactc

SEQ ID NO: 155278 - DNA, 22 bp, synthetic construct
  misc_feature 1..22: note = chemically synthesized
  source 1..22: mol_type = other DNA
ctagtatttatggatactctaa

SEQ ID NO: 155279 - DNA, 22 bp, synthetic construct
  misc_feature 1..22: note = chemically synthesized
  source 1..22: mol_type = other DNA
gtatttatggatactctaaatc

SEQ ID NO: 155280 - DNA, 22 bp, synthetic construct
  misc_feature 1..22: note = chemically synthesized
  source 1..22: mol_type = other DNA
atggatactctaaatcaattca

SEQ ID NO: 155281 - DNA, 22 bp, synthetic construct
  misc_feature 1..22: note = chemically synthesized
  source 1..22: mol_type = other DNA
tggatactctaaatcaattcaa

SEQ ID NO: 155282 - DNA, 22 bp, synthetic construct
  misc_feature 1..22: note = chemically synthesized
  source 1..22: mol_type = other DNA
taaatcaattcaatctcagttt

SEQ ID NO: 155283 - DNA, 22 bp, synthetic construct
  misc_feature 1..22: note = chemically synthesized
  source 1..22: mol_type = other DNA
aatcaattcaatctcagtttga

SEQ ID NO: 155284 - DNA, 22 bp, synthetic construct
  misc_feature 1..22: note = chemically synthesized
  source 1..22: mol_type = other DNA
aatctcagtttgatggataata

SEQ ID NO: 155285 - DNA, 22 bp, synthetic construct
  misc_feature 1..22: note = chemically synthesized
  source 1..22: mol_type = other DNA
agtttgatggataataagcctg

SEQ ID NO: 155286 - DNA, 22 bp, synthetic construct
  misc_feature 1..22: note = chemically synthesized
  source 1..22: mol_type = other DNA
gatggataataagcctgaagtc

SEQ ID NO: 155287 - DNA, 22 bp, synthetic construct
  misc_feature 1..22: note = chemically synthesized
  source 1..22: mol_type = other DNA
atggataataagcctgaagtcc

SEQ ID NO: 155288 - DNA, 22 bp, synthetic construct
  misc_feature 1..22: note = chemically synthesized
  source 1..22: mol_type = other DNA
aagtcctgaaagttaaacttat

SEQ ID NO: 155289 - DNA, 22 bp, synthetic construct
  misc_feature 1..22: note = chemically synthesized
  source 1..22: mol_type = other DNA
aaagttaaacttattccagttg

SEQ ID NO: 155290 - DNA, 22 bp, synthetic construct
  misc_feature 1..22: note = chemically synthesized
  source 1..22: mol_type = other DNA
aacttattccagttgacaataa

SEQ ID NO: 155291 - DNA, 22 bp, synthetic construct
  misc_feature 1..22: note = chemically synthesized
  source 1..22: mol_type = other DNA
attccagttgacaataattttg

SEQ ID NO: 155292 - DNA, 22 bp, synthetic construct
  misc_feature 1..22: note = chemically synthesized
  source 1..22: mol_type = other DNA
ttccagttgacaataattttgg

SEQ ID NO: 155293 - DNA, 22 bp, synthetic construct
  misc_feature 1..22: note = chemically synthesized
  source 1..22: mol_type = other DNA
cagttgacaataattttggtct

SEQ ID NO: 155294 - DNA, 22 bp, synthetic construct
  misc_feature 1..22: note = chemically synthesized
  source 1..22: mol_type = other DNA
acaataattttggtcttaattg

SEQ ID NO: 155295 - DNA, 22 bp, synthetic construct
  misc_feature 1..22: note = chemically synthesized
  source 1..22: mol_type = other DNA
tggtcttaattgctacaatttt

SEQ ID NO: 155296 - DNA, 22 bp, synthetic construct
  misc_feature 1..22: note = chemically synthesized
  source 1..22: mol_type = other DNA
ggtcttaattgctacaattttg

SEQ ID NO: 155297 - DNA, 22 bp, synthetic construct
  misc_feature 1..22: note = chemically synthesized
  source 1..22: mol_type = other DNA
gtcttaattgctacaattttgt

SEQ ID NO: 155298 - DNA, 22 bp, synthetic construct
  misc_feature 1..22: note = chemically synthesized
  source 1..22: mol_type = other DNA
aattgctacaattttgttagtg

SEQ ID NO: 155299 - DNA, 22 bp, synthetic construct
  misc_feature 1..22: note = chemically synthesized
  source 1..22: mol_type = other DNA
attgctacaattttgttagtgt

SEQ ID NO: 155300 - DNA, 22 bp, synthetic construct
  misc_feature 1..22: note = chemically synthesized
  source 1..22: mol_type = other DNA
ctacaattttgttagtgtcctg

SEQ ID NO: 155301 - DNA, 22 bp, synthetic construct
  misc_feature 1..22: note = chemically synthesized
  source 1..22: mol_type = other DNA
caattttgttagtgtcctgatg

SEQ ID NO: 155302 - DNA, 22 bp, synthetic construct
  misc_feature 1..22: note = chemically synthesized
  source 1..22: mol_type = other DNA
tgttagtgtcctgatgtcatct

SEQ ID NO: 155303 - DNA, 22 bp, synthetic construct
  misc_feature 1..22: note = chemically synthesized
  source 1..22: mol_type = other DNA
gttagtgtcctgatgtcatcta

SEQ ID NO: 155304 - DNA, 22 bp, synthetic construct
  misc_feature 1..22: note = chemically synthesized
  source 1..22: mol_type = other DNA
ttagtgtcctgatgtcatctat

SEQ ID NO: 155305 - DNA, 22 bp, synthetic construct
  misc_feature 1..22: note = chemically synthesized
  source 1..22: mol_type = other DNA
gtgtcctgatgtcatctattgt

SEQ ID NO: 155306 - DNA, 22 bp, synthetic construct
  misc_feature 1..22: note = chemically synthesized
  source 1..22: mol_type = other DNA
atgtcatctattgttgggatag

SEQ ID NO: 155307 - DNA, 22 bp, synthetic construct
  misc_feature 1..22: note = chemically synthesized
  source 1..22: mol_type = other DNA
ttgttgggatagagatataaat

SEQ ID NO: 155308 - DNA, 22 bp, synthetic construct
  misc_feature 1..22: note = chemically synthesized
  source 1..22: mol_type = other DNA
ttgggatagagatataaatgac

SEQ ID NO: 155309 - DNA, 22 bp, synthetic construct
  misc_feature 1..22: note = chemically synthesized
  source 1..22: mol_type = other DNA
ggatagagatataaatgactta

SEQ ID NO: 155310 - DNA, 22 bp, synthetic construct
  misc_feature 1..22: note = chemically synthesized
  source 1..22: mol_type = other DNA
atgtagctaccttcctaagaca

SEQ ID NO: 155311 - DNA, 22 bp, synthetic construct
  misc_feature 1..22: note = chemically synthesized
  source 1..22: mol_type = other DNA
tgtagctaccttcctaagacac

SEQ ID NO: 155312 - DNA, 22 bp, synthetic construct
  misc_feature 1..22: note = chemically synthesized
  source 1..22: mol_type = other DNA
ccttcctaagacactgacttca

SEQ ID NO: 155313 - DNA, 22 bp, synthetic construct
  misc_feature 1..22: note = chemically synthesized
  source 1..22: mol_type = other DNA
cctaagacactgacttcagaaa

SEQ ID NO: 155314 - DNA, 22 bp, synthetic construct
  misc_feature 1..22: note = chemically synthesized
  source 1..22: mol_type = other DNA
ctaagacactgacttcagaaaa

SEQ ID NO: 155315 - DNA, 22 bp, synthetic construct
  misc_feature 1..22: note = chemically synthesized
  source 1..22: mol_type = other DNA
agacactgacttcagaaaagac

SEQ ID NO: 155316 - DNA, 22 bp, synthetic construct
  misc_feature 1..22: note = chemically synthesized
  source 1..22: mol_type = other DNA
acttcagaaaagactcacattt

SEQ ID NO: 155317 - DNA, 22 bp, synthetic construct
  misc_feature 1..22: note = chemically synthesized
  source 1..22: mol_type = other DNA
cagaaaagactcacattttaaa

SEQ ID NO: 155318 - DNA, 22 bp, synthetic construct
  misc_feature 1..22: note = chemically synthesized
  source 1..22: mol_type = other DNA
agaaaagactcacattttaaat

SEQ ID NO: 155319 - DNA, 22 bp, synthetic construct
  misc_feature 1..22: note = chemically synthesized
  source 1..22: mol_type = other DNA
acattttaaatttatgcttatt

SEQ ID NO: 155320 - DNA, 22 bp, synthetic construct
  misc_feature 1..22: note = chemically synthesized
  source 1..22: mol_type = other DNA
taaatttatgcttattgttagg

SEQ ID NO: 155321 - DNA, 22 bp, synthetic construct
  misc_feature 1..22: note = chemically synthesized
  source 1..22: mol_type = other DNA
aaatttatgcttattgttaggt

SEQ ID NO: 155322 - DNA, 22 bp, synthetic construct
  misc_feature 1..22: note = chemically synthesized
  source 1..22: mol_type = other DNA
aatttatgcttattgttaggta

SEQ ID NO: 155323 - DNA, 22 bp, synthetic construct
  misc_feature 1..22: note = chemically synthesized
  source 1..22: mol_type = other DNA
atgcttattgttaggtatttta

SEQ ID NO: 155324 - DNA, 22 bp, synthetic construct
  misc_feature 1..22: note = chemically synthesized
  source 1..22: mol_type = other DNA
tgcttattgttaggtattttac

SEQ ID NO: 155325 - DNA, 22 bp, synthetic construct
  misc_feature 1..22: note = chemically synthesized
  source 1..22: mol_type = other DNA
attgttaggtattttacaagca

SEQ ID NO: 155326 - DNA, 22 bp, synthetic construct
  misc_feature 1..22: note = chemically synthesized
  source 1..22: mol_type = other DNA
ttgttaggtattttacaagcaa

SEQ ID NO: 155327 - DNA, 22 bp, synthetic construct
  misc_feature 1..22: note = chemically synthesized
  source 1..22: mol_type = other DNA
ttaggtattttacaagcaagag

SEQ ID NO: 155328 - DNA, 22 bp, synthetic construct
  misc_feature 1..22: note = chemically synthesized
  source 1..22: mol_type = other DNA
ggtattttacaagcaagagaac

SEQ ID NO: 155329 - DNA, 22 bp, synthetic construct
  misc_feature 1..22: note = chemically synthesized
  source 1..22: mol_type = other DNA
tacaagcaagagaactaaagtt

SEQ ID NO: 155330 - DNA, 22 bp, synthetic construct
  misc_feature 1..22: note = chemically synthesized
  source 1..22: mol_type = other DNA
acaagcaagagaactaaagttt

SEQ ID NO: 155331 - DNA, 22 bp, synthetic construct
  misc_feature 1..22: note = chemically synthesized
  source 1..22: mol_type = other DNA
caagcaagagaactaaagttta

SEQ ID NO: 155332 - DNA, 22 bp, synthetic construct
  misc_feature 1..22: note = chemically synthesized
  source 1..22: mol_type = other DNA
aagtttaaattaaatgacgtgt

SEQ ID NO: 155333 - DNA, 22 bp, synthetic construct
  misc_feature 1..22: note = chemically synthesized
  source 1..22: mol_type = other DNA
aaattaaatgacgtgtccaggg

SEQ ID NO: 155334 - DNA, 22 bp, synthetic construct
  misc_feature 1..22: note = chemically synthesized
  source 1..22: mol_type = other DNA
aattaaatgacgtgtccagggt

SEQ ID NO: 155335 - DNA, 22 bp, synthetic construct
  misc_feature 1..22: note = chemically synthesized
  source 1..22: mol_type = other DNA
aatgacgtgtccagggtcatag

SEQ ID NO: 155336 - DNA, 22 bp, synthetic construct
  misc_feature 1..22: note = chemically synthesized
  source 1..22: mol_type = other DNA
agccagtatttaaatacaacta

SEQ ID NO: 155337 - DNA, 22 bp, synthetic construct
  misc_feature 1..22: note = chemically synthesized
  source 1..22: mol_type = other DNA
gccagtatttaaatacaactat

SEQ ID NO: 155338 - DNA, 22 bp, synthetic construct
  misc_feature 1..22: note = chemically synthesized
  source 1..22: mol_type = other DNA
aaatacaactatatatgtcctt

SEQ ID NO: 155339 - DNA, 22 bp, synthetic construct
  misc_feature 1..22: note = chemically synthesized
  source 1..22: mol_type = other DNA
aatacaactatatatgtcctta

SEQ ID NO: 155340 - DNA, 22 bp, synthetic construct
  misc_feature 1..22: note = chemically synthesized
  source 1..22: mol_type = other DNA
tatatgtccttagagctatact

SEQ ID NO: 155341 - DNA, 22 bp, synthetic construct
  misc_feature 1..22: note = chemically synthesized
  source 1..22: mol_type = other DNA
agagctatactgtttctattac

SEQ ID NO: 155342 - DNA, 22 bp, synthetic construct
  misc_feature 1..22: note = chemically synthesized
  source 1..22: mol_type = other DNA
gagctatactgtttctattaca

SEQ ID NO: 155343 - DNA, 22 bp, synthetic construct
  misc_feature 1..22: note = chemically synthesized
  source 1..22: mol_type = other DNA
tactgtttctattacaccacac

SEQ ID NO: 155344 - DNA, 22 bp, synthetic construct
  misc_feature 1..22: note = chemically synthesized
  source 1..22: mol_type = other DNA
tttctattacaccacactatct

SEQ ID NO: 155345 - DNA, 22 bp, synthetic construct
  misc_feature 1..22: note = chemically synthesized
  source 1..22: mol_type = other DNA
ctattacaccacactatctttg

SEQ ID NO: 155346 - DNA, 22 bp, synthetic construct
  misc_feature 1..22: note = chemically synthesized
  source 1..22: mol_type = other DNA
tattacaccacactatctttgc

SEQ ID NO: 155347 - DNA, 22 bp, synthetic construct
  misc_feature 1..22: note = chemically synthesized
  source 1..22: mol_type = other DNA
ttacaccacactatctttgctc

SEQ ID NO: 155348 - DNA, 22 bp, synthetic construct
  misc_feature 1..22: note = chemically synthesized
  source 1..22: mol_type = other DNA
caccacactatctttgctccgt

SEQ ID NO: 155349 - DNA, 22 bp, synthetic construct
  misc_feature 1..22: note = chemically synthesized
  source 1..22: mol_type = other DNA
tctttgctccgtggatacattc

SEQ ID NO: 155350 - DNA, 22 bp, synthetic construct
  misc_feature 1..22: note = chemically synthesized
  source 1..22: mol_type = other DNA
tgctccgtggatacattcatga

SEQ ID NO: 155351 - DNA, 22 bp, synthetic construct
  misc_feature 1..22: note = chemically synthesized
  source 1..22: mol_type = other DNA
gctccgtggatacattcatgat

SEQ ID NO: 155352 - DNA, 22 bp, synthetic construct
  misc_feature 1..22: note = chemically synthesized
  source 1..22: mol_type = other DNA
ctccgtggatacattcatgatt

SEQ ID NO: 155353 - DNA, 22 bp, synthetic construct
  misc_feature 1..22: note = chemically synthesized
  source 1..22: mol_type = other DNA
cgtggatacattcatgattcag

SEQ ID NO: 155354 - DNA, 22 bp, synthetic construct
  misc_feature 1..22: note = chemically synthesized
  source 1..22: mol_type = other DNA
atgattcagtcagaatatgctg

SEQ ID NO: 155355 - DNA, 22 bp, synthetic construct
  misc_feature 1..22: note = chemically synthesized
  source 1..22: mol_type = other DNA
agtcagaatatgctgtcagaaa

SEQ ID NO: 155356 - DNA, 22 bp, synthetic construct
  misc_feature 1..22: note = chemically synthesized
  source 1..22: mol_type = other DNA
tcagaaatatcctagaataatg

SEQ ID NO: 155357 - DNA, 22 bp, synthetic construct
  misc_feature 1..22: note = chemically synthesized
  source 1..22: mol_type = other DNA
gaataatgctacaaggaaccca

SEQ ID NO: 155358 - DNA, 22 bp, synthetic construct
  misc_feature 1..22: note = chemically synthesized
  source 1..22: mol_type = other DNA
caaggaacccaggcctataatt

SEQ ID NO: 155359 - DNA, 22 bp, synthetic construct
  misc_feature 1..22: note = chemically synthesized
  source 1..22: mol_type = other DNA
taatttgggtcatcacatatga

SEQ ID NO: 155360 - DNA, 22 bp, synthetic construct
  misc_feature 1..22: note = chemically synthesized
  source 1..22: mol_type = other DNA
gggtcatcacatatgacaatgt

SEQ ID NO: 155361 - DNA, 22 bp, synthetic construct
  misc_feature 1..22: note = chemically synthesized
  source 1..22: mol_type = other DNA
ggtcatcacatatgacaatgtt

SEQ ID NO: 155362 - DNA, 22 bp, synthetic construct
  misc_feature 1..22: note = chemically synthesized
  source 1..22: mol_type = other DNA
taggaaaaacaaaaaaacaaac

SEQ ID NO: 155363 - DNA, 22 bp, synthetic construct
  misc_feature 1..22: note = chemically synthesized
  source 1..22: mol_type = other DNA
aggaaaaacaaaaaaacaaaca

SEQ ID NO: 155364 - DNA, 22 bp, synthetic construct
  misc_feature 1..22: note = chemically synthesized
  source 1..22: mol_type = other DNA
ggaaaaacaaaaaaacaaacaa

SEQ ID NO: 155365 - DNA, 22 bp, synthetic construct
  misc_feature 1..22: note = chemically synthesized
  source 1..22: mol_type = other DNA
aaaaaccataggtatcacaaaa

SEQ ID NO: 155366 - DNA, 22 bp, synthetic construct
  misc_feature 1..22: note = chemically synthesized
  source 1..22: mol_type = other DNA
aaaaccataggtatcacaaaag

SEQ ID NO: 155367 - DNA, 22 bp, synthetic construct
  misc_feature 1..22: note = chemically synthesized
  source 1..22: mol_type = other DNA
aaaggccagaaaatctgttttc

SEQ ID NO: 155368 - DNA, 22 bp, synthetic construct
  misc_feature 1..22: note = chemically synthesized
  source 1..22: mol_type = other DNA
aaggccagaaaatctgttttct

SEQ ID NO: 155369 - DNA, 22 bp, synthetic construct
  misc_feature 1..22: note = chemically synthesized
  source 1..22: mol_type = other DNA
ttttctttcccccttatcttca

SEQ ID NO: 155370 - DNA, 22 bp, synthetic construct
  misc_feature 1..22: note = chemically synthesized
  source 1..22: mol_type = other DNA
tctttcccccttatcttcattc

SEQ ID NO: 155371 - DNA, 22 bp, synthetic construct
  misc_feature 1..22: note = chemically synthesized
  source 1..22: mol_type = other DNA
ctttcccccttatcttcattcc

SEQ ID NO: 155372 - DNA, 22 bp, synthetic construct
  misc_feature 1..22: note = chemically synthesized
  source 1..22: mol_type = other DNA
tttcccccttatcttcattcct

SEQ ID NO: 155373 - DNA, 22 bp, synthetic construct
  misc_feature 1..22: note = chemically synthesized
  source 1..22: mol_type = other DNA
tcccccttatcttcattcctgt

SEQ ID NO: 155374 - DNA, 22 bp, synthetic construct
  misc_feature 1..22: note = chemically synthesized
  source 1..22: mol_type = other DNA
cccccttatcttcattcctgta

SEQ ID NO: 155375 - DNA, 22 bp, synthetic construct
  misc_feature 1..22: note = chemically synthesized
  source 1..22: mol_type = other DNA
ccccttatcttcattcctgtat

SEQ ID NO: 155376 - DNA, 22 bp, synthetic construct
  misc_feature 1..22: note = chemically synthesized
  source 1..22: mol_type = other DNA
atcttcattcctgtattttttt

SEQ ID NO: 155377 - DNA, 22 bp, synthetic construct
  misc_feature 1..22: note = chemically synthesized
  source 1..22: mol_type = other DNA
tcttcattcctgtatttttttt

SEQ ID NO: 155378 - DNA, 22 bp, synthetic construct
  misc_feature 1..22: note = chemically synthesized
  source 1..22: mol_type = other DNA
cattcctgtatttttttttcac

SEQ ID NO: 155379 - DNA, 22 bp, synthetic construct
  misc_feature 1..22: note = chemically synthesized
  source 1..22: mol_type = other DNA
attcctgtatttttttttcact

SEQ ID NO: 155380 - DNA, 22 bp, synthetic construct
  misc_feature 1..22: note = chemically synthesized
  source 1..22: mol_type = other DNA
ctgtatttttttttcacttaga

SEQ ID NO: 155381 - DNA, 22 bp, synthetic construct
  misc_feature 1..22: note = chemically synthesized
  source 1..22: mol_type = other DNA
tatttttttttcacttagattc

SEQ ID NO: 155382 - DNA, 22 bp, synthetic construct
  misc_feature 1..22: note = chemically synthesized
  source 1..22: mol_type = other DNA
ttttttcacttagattcttctc

SEQ ID NO: 155383 - DNA, 22 bp, synthetic construct
  misc_feature 1..22: note = chemically synthesized
  source 1..22: mol_type = other DNA
tttttcacttagattcttctct

SEQ ID NO: 155384 - DNA, 22 bp, synthetic construct
  misc_feature 1..22: note = chemically synthesized
  source 1..22: mol_type = other DNA
ttttcacttagattcttctctc

SEQ ID NO: 155385 - DNA, 22 bp, synthetic construct
  misc_feature 1..22: note = chemically synthesized
  source 1..22: mol_type = other DNA
tttcacttagattcttctctcc

SEQ ID NO: 155386 - DNA, 22 bp, synthetic construct
  misc_feature 1..22: note = chemically synthesized
  source 1..22: mol_type = other DNA
ttcacttagattcttctctccc

SEQ ID NO: 155387 - DNA, 22 bp, synthetic construct
  misc_feature 1..22: note = chemically synthesized
  source 1..22: mol_type = other DNA
tcacttagattcttctctccca

SEQ ID NO: 155388 - DNA, 22 bp, synthetic construct
  misc_feature 1..22: note = chemically synthesized
  source 1..22: mol_type = other DNA
cacttagattcttctctcccat

SEQ ID NO: 155389 - DNA, 22 bp, synthetic construct
  misc_feature 1..22: note = chemically synthesized
  source 1..22: mol_type = other DNA
acttagattcttctctcccatc

SEQ ID NO: 155390 - DNA, 22 bp, synthetic construct
  misc_feature 1..22: note = chemically synthesized
  source 1..22: mol_type = other DNA
agattcttctctcccatcccta

SEQ ID NO: 155391 - DNA, 22 bp, synthetic construct
  misc_feature 1..22: note = chemically synthesized
  source 1..22: mol_type = other DNA
gattcttctctcccatccctaa

SEQ ID NO: 155392 - DNA, 22 bp, synthetic construct
  misc_feature 1..22: note = chemically synthesized
  source 1..22: mol_type = other DNA
ttctctcccatccctaatgtcc

SEQ ID NO: 155393 - DNA, 22 bp, synthetic construct
  misc_feature 1..22: note = chemically synthesized
  source 1..22: mol_type = other DNA
ctctcccatccctaatgtcctg

SEQ ID NO: 155394 - DNA, 22 bp, synthetic construct
  misc_feature 1..22: note = chemically synthesized
  source 1..22: mol_type = other DNA
tctcccatccctaatgtcctga

SEQ ID NO: 155395 - DNA, 22 bp, synthetic construct
  misc_feature 1..22: note = chemically synthesized
  source 1..22: mol_type = other DNA
tcccatccctaatgtcctgatg

SEQ ID NO: 155396 - DNA, 22 bp, synthetic construct
  misc_feature 1..22: note = chemically synthesized
  source 1..22: mol_type = other DNA
ccatccctaatgtcctgatgaa

SEQ ID NO: 155397 - DNA, 22 bp, synthetic construct
  misc_feature 1..22: note = chemically synthesized
  source 1..22: mol_type = other DNA
atgtcctgatgaagccccagtc

SEQ ID NO: 155398 - DNA, 22 bp, synthetic construct
  misc_feature 1..22: note = chemically synthesized
  source 1..22: mol_type = other DNA
atgaagccccagtcactgtaac

SEQ ID NO: 155399 - DNA, 22 bp, synthetic construct
  misc_feature 1..22: note = chemically synthesized
  source 1..22: mol_type = other DNA
taaccctcacttctataactac

SEQ ID NO: 155400 - DNA, 22 bp, synthetic construct
  misc_feature 1..22: note = chemically synthesized
  source 1..22: mol_type = other DNA
acttctataactacgcttcact

SEQ ID NO: 155401 - DNA, 22 bp, synthetic construct
  misc_feature 1..22: note = chemically synthesized
  source 1..22: mol_type = other DNA
ctataactacgcttcactcaca

SEQ ID NO: 155402 - DNA, 22 bp, synthetic construct
  misc_feature 1..22: note = chemically synthesized
  source 1..22: mol_type = other DNA
tataactacgcttcactcacat

SEQ ID NO: 155403 - DNA, 22 bp, synthetic construct
  misc_feature 1..22: note = chemically synthesized
  source 1..22: mol_type = other DNA
taactacgcttcactcacatgc

SEQ ID NO: 155404 - DNA, 22 bp, synthetic construct
  misc_feature 1..22: note = chemically synthesized
  source 1..22: mol_type = other DNA
cgcttcactcacatgcatggct

SEQ ID NO: 155405 - DNA, 22 bp, synthetic construct
  misc_feature 1..22: note = chemically synthesized
  source 1..22: mol_type = other DNA
cactcacatgcatggctctggc

SEQ ID NO: 155406 - DNA, 22 bp, synthetic construct
  misc_feature 1..22: note = chemically synthesized
  source 1..22: mol_type = other DNA
actcacatgcatggctctggcc

SEQ ID NO: 155407 - DNA, 22 bp, synthetic construct
  misc_feature 1..22: note = chemically synthesized
  source 1..22: mol_type = other DNA
acatgcatggctctggcctaga

SEQ ID NO: 155408 - DNA, 22 bp, synthetic construct
  misc_feature 1..22: note = chemically synthesized
  source 1..22: mol_type = other DNA
tggcctagaactgtgtcaggaa

SEQ ID NO: 155409 - DNA, 22 bp, synthetic construct
  misc_feature 1..22: note = chemically synthesized
  source 1..22: mol_type = other DNA
gcctagaactgtgtcaggaatg

SEQ ID NO: 155410 - DNA, 22 bp, synthetic construct
  misc_feature 1..22: note = chemically synthesized
  source 1..22: mol_type = other DNA
gaactgtgtcaggaatgcttca

SEQ ID NO: 155411 - DNA, 22 bp, synthetic construct
  misc_feature 1..22: note = chemically synthesized
  source 1..22: mol_type = other DNA
tgtcaggaatgcttcaaaatta

SEQ ID NO: 155412 - DNA, 22 bp, synthetic construct
  misc_feature 1..22: note = chemically synthesized
  source 1..22: mol_type = other DNA
caaaattattctttcctttctc

SEQ ID NO: 155413 - DNA, 22 bp, synthetic construct
  misc_feature 1..22: note = chemically synthesized
  source 1..22: mol_type = other DNA
aaaattattctttcctttctct

SEQ ID NO: 155414 - DNA, 22 bp, synthetic construct
  misc_feature 1..22: note = chemically synthesized
  source 1..22: mol_type = other DNA
ttctttcctttctctgaaacat

SEQ ID NO: 155415 - DNA, 22 bp, synthetic construct
  misc_feature 1..22: note = chemically synthesized
  source 1..22: mol_type = other DNA
tttcctttctctgaaacatcaa

SEQ ID NO: 155416 - DNA, 22 bp, synthetic construct
  misc_feature 1..22: note = chemically synthesized
  source 1..22: mol_type = other DNA
tcctttctctgaaacatcaaca

SEQ ID NO: 155417 - DNA, 22 bp, synthetic construct
  misc_feature 1..22: note = chemically synthesized
  source 1..22: mol_type = other DNA
cctttctctgaaacatcaacag

SEQ ID NO: 155418 - DNA, 22 bp, synthetic construct
  misc_feature 1..22: note = chemically synthesized
  source 1..22: mol_type = other DNA
ctttctctgaaacatcaacagt

SEQ ID NO: 155419 - DNA, 22 bp, synthetic construct
  misc_feature 1..22: note = chemically synthesized
  source 1..22: mol_type = other DNA
tctctgaaacatcaacagttta

SEQ ID NO: 155420 - DNA, 22 bp, synthetic construct
  misc_feature 1..22: note = chemically synthesized
  source 1..22: mol_type = other DNA
ctctgaaacatcaacagtttac

SEQ ID NO: 155421 - DNA, 22 bp, synthetic construct
  misc_feature 1..22: note = chemically synthesized
  source 1..22: mol_type = other DNA
tctgaaacatcaacagtttact

SEQ ID NO: 155422 - DNA, 22 bp, synthetic construct
  misc_feature 1..22: note = chemically synthesized
  source 1..22: mol_type = other DNA
tgaaacatcaacagtttactta

SEQ ID NO: 155423 - DNA, 22 bp, synthetic construct
  misc_feature 1..22: note = chemically synthesized
  source 1..22: mol_type = other DNA
aaacatcaacagtttacttaaa

SEQ ID NO: 155424 - DNA, 22 bp, synthetic construct
  misc_feature 1..22: note = chemically synthesized
  source 1..22: mol_type = other DNA
acttaaaatattctaacaatgt

SEQ ID NO: 155425 - DNA, 22 bp, synthetic construct
  misc_feature 1..22: note = chemically synthesized
  source 1..22: mol_type = other DNA
cttaaaatattctaacaatgtg

SEQ ID NO: 155426 - DNA, 22 bp, synthetic construct
  misc_feature 1..22: note = chemically synthesized
  source 1..22: mol_type = other DNA
aaaatattctaacaatgtgaga

SEQ ID NO: 155427 - DNA, 22 bp, synthetic construct
  misc_feature 1..22: note = chemically synthesized
  source 1..22: mol_type = other DNA
aaatattctaacaatgtgagat

SEQ ID NO: 155428 - DNA, 22 bp, synthetic construct
  misc_feature 1..22: note = chemically synthesized
  source 1..22: mol_type = other DNA
taacaatgtgagatatatatta

SEQ ID NO: 155429 - DNA, 22 bp, synthetic construct
  misc_feature 1..22: note = chemically synthesized
  source 1..22: mol_type = other DNA
acaatgtgagatatatattaaa

SEQ ID NO: 155430 - DNA, 22 bp, synthetic construct
  misc_feature 1..22: note = chemically synthesized
  source 1..22: mol_type = other DNA
aatagtaaaacaattagtttat

SEQ ID NO: 155431 - DNA, 22 bp, synthetic construct
  misc_feature 1..22: note = chemically synthesized
  source 1..22: mol_type = other DNA
gtttatgtaaataaagtagatc

SEQ ID NO: 155432 - DNA, 22 bp, synthetic construct
  misc_feature 1..22: note = chemically synthesized
  source 1..22: mol_type = other DNA
atgtaaataaagtagatccaca

SEQ ID NO: 155433 - DNA, 22 bp, synthetic construct
  misc_feature 1..22: note = chemically synthesized
  source 1..22: mol_type = other DNA
tgtaaataaagtagatccacag

SEQ ID NO: 155434 - DNA, 22 bp, synthetic construct
  misc_feature 1..22: note = chemically synthesized
  source 1..22: mol_type = other DNA
aataacttcaaattttatctta

SEQ ID NO: 155435 - DNA, 22 bp, synthetic construct
  misc_feature 1..22: note = chemically synthesized
  source 1..22: mol_type = other DNA
caaattttatcttaatattttt

SEQ ID NO: 155436 - DNA, 22 bp, synthetic construct
  misc_feature 1..22: note = chemically synthesized
  source 1..22: mol_type = other DNA
aaattttatcttaatattttta

SEQ ID NO: 155437 - DNA, 22 bp, synthetic construct
  misc_feature 1..22: note = chemically synthesized
  source 1..22: mol_type = other DNA
tatcttaatatttttaaagaac

SEQ ID NO: 155438 - DNA, 22 bp, synthetic construct
  misc_feature 1..22: note = chemically synthesized
  source 1..22: mol_type = other DNA
atcttaatatttttaaagaacc

SEQ ID NO: 155439 - DNA, 22 bp, synthetic construct
  misc_feature 1..22: note = chemically synthesized
  source 1..22: mol_type = other DNA
tcttaatatttttaaagaacct

SEQ ID NO: 155440 - DNA, 22 bp, synthetic construct
  misc_feature 1..22: note = chemically synthesized
  source 1..22: mol_type = other DNA
aatatttttaaagaacctcatt

SEQ ID NO: 155441 - DNA, 22 bp, synthetic construct
  misc_feature 1..22: note = chemically synthesized
  source 1..22: mol_type = other DNA
atatttttaaagaacctcattc

SEQ ID NO: 155442 - DNA, 22 bp, synthetic construct
  misc_feature 1..22: note = chemically synthesized
  source 1..22: mol_type = other DNA
ttaaagaacctcattccaactt

SEQ ID NO: 155443 - DNA, 22 bp, synthetic construct
  misc_feature 1..22: note = chemically synthesized
  source 1..22: mol_type = other DNA
taaagaacctcattccaactta

SEQ ID NO: 155444 - DNA, 22 bp, synthetic construct
  misc_feature 1..22: note = chemically synthesized
  source 1..22: mol_type = other DNA
aaagaacctcattccaacttaa

SEQ ID NO: 155445 - DNA, 22 bp, synthetic construct
  misc_feature 1..22: note = chemically synthesized
  source 1..22: mol_type = other DNA
aagaacctcattccaacttaaa

SEQ ID NO: 155446 - DNA, 22 bp, synthetic construct
  misc_feature 1..22: note = chemically synthesized
  source 1..22: mol_type = other DNA
attccaacttaaagcaagggta

SEQ ID NO: 155447 - DNA, 22 bp, synthetic construct
  misc_feature 1..22: note = chemically synthesized
  source 1..22: mol_type = other DNA
caacttaaagcaagggtaaatt

SEQ ID NO: 155448 - DNA, 22 bp, synthetic construct
  misc_feature 1..22: note = chemically synthesized
  source 1..22: mol_type = other DNA
aaagcaagggtaaattgctcag

SEQ ID NO: 155449 - DNA, 22 bp, synthetic construct
  misc_feature 1..22: note = chemically synthesized
  source 1..22: mol_type = other DNA
aagcaagggtaaattgctcagc

SEQ ID NO: 155450 - DNA, 22 bp, synthetic construct
  misc_feature 1..22: note = chemically synthesized
  source 1..22: mol_type = other DNA
ctcagctgtgtgggtattttaa

SEQ ID NO: 155451 - DNA, 22 bp, synthetic construct
  misc_feature 1..22: note = chemically synthesized
  source 1..22: mol_type = other DNA
agctgtgtgggtattttaaatt

SEQ ID NO: 155452 - DNA, 22 bp, synthetic construct
  misc_feature 1..22: note = chemically synthesized
  source 1..22: mol_type = other DNA
tgtgggtattttaaattctaaa

SEQ ID NO: 155453 - DNA, 22 bp, synthetic construct
  misc_feature 1..22: note = chemically synthesized
  source 1..22: mol_type = other DNA
taaattctaaactgtaactcaa

SEQ ID NO: 155454 - DNA, 22 bp, synthetic construct
  misc_feature 1..22: note = chemically synthesized
  source 1..22: mol_type = other DNA
aaattctaaactgtaactcaaa

SEQ ID NO: 155455 - DNA, 22 bp, synthetic construct
  misc_feature 1..22: note = chemically synthesized
  source 1..22: mol_type = other DNA
aattctaaactgtaactcaaaa

SEQ ID NO: 155456 - DNA, 22 bp, synthetic construct
  misc_feature 1..22: note = chemically synthesized
  source 1..22: mol_type = other DNA
taaactgtaactcaaaaaatgg

SEQ ID NO: 155457 - DNA, 22 bp, synthetic construct
  misc_feature 1..22: note = chemically synthesized
  source 1..22: mol_type = other DNA
aactgtaactcaaaaaatggga

SEQ ID NO: 155458 - DNA, 22 bp, synthetic construct
  misc_feature 1..22: note = chemically synthesized
  source 1..22: mol_type = other DNA
taactcaaaaaatgggacccaa

SEQ ID NO: 155459 - DNA, 22 bp, synthetic construct
  misc_feature 1..22: note = chemically synthesized
  source 1..22: mol_type = other DNA
aaaaaatgggacccaaacattt

SEQ ID NO: 155460 - DNA, 22 bp, synthetic construct
  misc_feature 1..22: note = chemically synthesized
  source 1..22: mol_type = other DNA
ccatcatataaaatttgagacc

SEQ ID NO: 155461 - DNA, 22 bp, synthetic construct
  misc_feature 1..22: note = chemically synthesized
  source 1..22: mol_type = other DNA
catcatataaaatttgagacca

SEQ ID NO: 155462 - DNA, 22 bp, synthetic construct
  misc_feature 1..22: note = chemically synthesized
  source 1..22: mol_type = other DNA
gagaccagaatatttagcactt

SEQ ID NO: 155463 - DNA, 22 bp, synthetic construct
  misc_feature 1..22: note = chemically synthesized
  source 1..22: mol_type = other DNA
agaccagaatatttagcactta

SEQ ID NO: 155464 - DNA, 22 bp, synthetic construct
  misc_feature 1..22: note = chemically synthesized
  source 1..22: mol_type = other DNA
agcacttagcaaaaacaaaagt

SEQ ID NO: 155465 - DNA, 22 bp, synthetic construct
  misc_feature 1..22: note = chemically synthesized
  source 1..22: mol_type = other DNA
gcacttagcaaaaacaaaagta

SEQ ID NO: 155466 - DNA, 22 bp, synthetic construct
  misc_feature 1..22: note = chemically synthesized
  source 1..22: mol_type = other DNA
agcaaaaacaaaagtaaaggta

SEQ ID NO: 155467 - DNA, 22 bp, synthetic construct
  misc_feature 1..22: note = chemically synthesized
  source 1..22: mol_type = other DNA
gcaaaaacaaaagtaaaggtag

SEQ ID NO: 155468 - DNA, 22 bp, synthetic construct
  misc_feature 1..22: note = chemically synthesized
  source 1..22: mol_type = other DNA
tgctatacaatgatcagtatat

SEQ ID NO: 155469 - DNA, 22 bp, synthetic construct
  misc_feature 1..22: note = chemically synthesized
  source 1..22: mol_type = other DNA
tacaatgatcagtatattgaac

SEQ ID NO: 155470 - DNA, 22 bp, synthetic construct
  misc_feature 1..22: note = chemically synthesized
  source 1..22: mol_type = other DNA
aactgtaatggaatcaagagat

SEQ ID NO: 155471 - DNA, 22 bp, synthetic construct
  misc_feature 1..22: note = chemically synthesized
  source 1..22: mol_type = other DNA
taatggaatcaagagatggggg

SEQ ID NO: 155472 - DNA, 22 bp, synthetic construct
  misc_feature 1..22: note = chemically synthesized
  source 1..22: mol_type = other DNA
cttaagcccctgtgccacctca

SEQ ID NO: 155473 - DNA, 22 bp, synthetic construct
  misc_feature 1..22: note = chemically synthesized
  source 1..22: mol_type = other DNA
ttaagcccctgtgccacctcaa

SEQ ID NO: 155474 - DNA, 22 bp, synthetic construct
  misc_feature 1..22: note = chemically synthesized
  source 1..22: mol_type = other DNA
aagcccctgtgccacctcaaaa

SEQ ID NO: 155475 - DNA, 22 bp, synthetic construct
  misc_feature 1..22: note = chemically synthesized
  source 1..22: mol_type = other DNA
agcccctgtgccacctcaaaaa

SEQ ID NO: 155476 - DNA, 22 bp, synthetic construct
  misc_feature 1..22: note = chemically synthesized
  source 1..22: mol_type = other DNA
tgccacctcaaaaaacaagaac

SEQ ID NO: 155477 - DNA, 22 bp, synthetic construct
  misc_feature 1..22: note = chemically synthesized
  source 1..22: mol_type = other DNA
aaaaaacaagaactttagccag

SEQ ID NO: 155478 - DNA, 22 bp, synthetic construct
  misc_feature 1..22: note = chemically synthesized
  source 1..22: mol_type = other DNA
tagccagcttttacttgagaaa

SEQ ID NO: 155479 - DNA, 22 bp, synthetic construct
  misc_feature 1..22: note = chemically synthesized
  source 1..22: mol_type = other DNA
agccagcttttacttgagaaag

SEQ ID NO: 155480 - DNA, 22 bp, synthetic construct
  misc_feature 1..22: note = chemically synthesized
  source 1..22: mol_type = other DNA
gccagcttttacttgagaaagg

SEQ ID NO: 155481 - DNA, 22 bp, synthetic construct
  misc_feature 1..22: note = chemically synthesized
  source 1..22: mol_type = other DNA
ttacttgagaaagggaacttag

SEQ ID NO: 155482 - DNA, 22 bp, synthetic construct
  misc_feature 1..22: note = chemically synthesized
  source 1..22: mol_type = other DNA
tacttgagaaagggaacttaga

SEQ ID NO: 155483 - DNA, 22 bp, synthetic construct
  misc_feature 1..22: note = chemically synthesized
  source 1..22: mol_type = other DNA
acttgagaaagggaacttagag

SEQ ID NO: 155484 - DNA, 22 bp, synthetic construct
  misc_feature 1..22: note = chemically synthesized
  source 1..22: mol_type = other DNA
cttgagaaagggaacttagaga

SEQ ID NO: 155485 - DNA, 22 bp, synthetic construct
  misc_feature 1..22: note = chemically synthesized
  source 1..22: mol_type = other DNA
gagaaagggaacttagagagta

SEQ ID NO: 155486 - DNA, 22 bp, synthetic construct
  misc_feature 1..22: note = chemically synthesized
  source 1..22: mol_type = other DNA
agaaagggaacttagagagtat

SEQ ID NO: 155487 - DNA, 22 bp, synthetic construct
  misc_feature 1..22: note = chemically synthesized
  source 1..22: mol_type = other DNA
agagagtatagaagccacctgt

SEQ ID NO: 155488 - DNA, 22 bp, synthetic construct
  misc_feature 1..22: note = chemically synthesized
  source 1..22: mol_type = other DNA
gagagtatagaagccacctgtc

SEQ ID NO: 155489 - DNA, 22 bp, synthetic construct
  misc_feature 1..22: note = chemically synthesized
  source 1..22: mol_type = other DNA
tcattcacatattattatctat

SEQ ID NO: 155490 - DNA, 22 bp, synthetic construct
  misc_feature 1..22: note = chemically synthesized
  source 1..22: mol_type = other DNA
acatattattatctatgtttat

SEQ ID NO: 155491 - DNA, 22 bp, synthetic construct
  misc_feature 1..22: note = chemically synthesized
  source 1..22: mol_type = other DNA
ttatctatgtttatacccatgc

SEQ ID NO: 155492 - DNA, 22 bp, synthetic construct
  misc_feature 1..22: note = chemically synthesized
  source 1..22: mol_type = other DNA
tctatgtttatacccatgcatc

SEQ ID NO: 155493 - DNA, 22 bp, synthetic construct
  misc_feature 1..22: note = chemically synthesized
  source 1..22: mol_type = other DNA
tgtttatacccatgcatctatc

SEQ ID NO: 155494 - DNA, 22 bp, synthetic construct
  misc_feature 1..22: note = chemically synthesized
  source 1..22: mol_type = other DNA
atacccatgcatctatctatct

SEQ ID NO: 155495 - DNA, 22 bp, synthetic construct
  misc_feature 1..22: note = chemically synthesized
  source 1..22: mol_type = other DNA
tacccatgcatctatctatcta

SEQ ID NO: 155496 - DNA, 22 bp, synthetic construct
  misc_feature 1..22: note = chemically synthesized
  source 1..22: mol_type = other DNA
tctatctatctatctatctatc

SEQ ID NO: 155497 - DNA, 22 bp, synthetic construct
  misc_feature 1..22: note = chemically synthesized
  source 1..22: mol_type = other DNA
tctatctatctatctatctatc

SEQ ID NO: 155498 - DNA, 22 bp, synthetic construct
  misc_feature 1..22: note = chemically synthesized
  source 1..22: mol_type = other DNA
tctatctatctatctatctatc

SEQ ID NO: 155499 - DNA, 22 bp, synthetic construct
  misc_feature 1..22: note = chemically synthesized
  source 1..22: mol_type = other DNA
tctatctatctatctatctatc

SEQ ID NO: 155500 - DNA, 22 bp, synthetic construct
  misc_feature 1..22: note = chemically synthesized
  source 1..22: mol_type = other DNA
tctatctatctatctatctatc

SEQ ID NO: 155501 - DNA, 22 bp, synthetic construct
  misc_feature 1..22: note = chemically synthesized
  source 1..22: mol_type = other DNA
tctatctatctatctatctatc

SEQ ID NO: 155502 - DNA, 22 bp, synthetic construct
  misc_feature 1..22: note = chemically synthesized
  source 1..22: mol_type = other DNA
tctatctatctatctatctatc

SEQ ID NO: 155503 - DNA, 22 bp, synthetic construct
  misc_feature 1..22: note = chemically synthesized
  source 1..22: mol_type = other DNA
tctatctatctatctatctttc

SEQ ID NO: 155504 - DNA, 22 bp, synthetic construct
  misc_feature 1..22: note = chemically synthesized
  source 1..22: mol_type = other DNA
tctatctatctatctttctagc

SEQ ID NO: 155505 - DNA, 22 bp, synthetic construct
  misc_feature 1..22: note = chemically synthesized
  source 1..22: mol_type = other DNA
tctatctatctttctagctagc

SEQ ID NO: 155506 - DNA, 22 bp, synthetic construct
  misc_feature 1..22: note = chemically synthesized
  source 1..22: mol_type = other DNA
tctatctttctagctagctagc

SEQ ID NO: 155507 - DNA, 22 bp, synthetic construct
  misc_feature 1..22: note = chemically synthesized
  source 1..22: mol_type = other DNA
tctttctagctagctagctagc

SEQ ID NO: 155508 - DNA, 22 bp, synthetic construct
  misc_feature 1..22: note = chemically synthesized
  source 1..22: mol_type = other DNA
tctagctagctagctagctagc

SEQ ID NO: 155509 - DNA, 22 bp, synthetic construct
  misc_feature 1..22: note = chemically synthesized
  source 1..22: mol_type = other DNA
ctagctagctagctagctagct

SEQ ID NO: 155510 - DNA, 22 bp, synthetic construct
  misc_feature 1..22: note = chemically synthesized
  source 1..22: mol_type = other DNA
tagctagctagctagctagcta

SEQ ID NO: 155511 - DNA, 22 bp, synthetic construct
  misc_feature 1..22: note = chemically synthesized
  source 1..22: mol_type = other DNA
gctagctagctagctagctagc

SEQ ID NO: 155512 - DNA, 22 bp, synthetic construct
  misc_feature 1..22: note = chemically synthesized
  source 1..22: mol_type = other DNA
gctagctagctagctagctagc

SEQ ID NO: 155513 - DNA, 22 bp, synthetic construct
  misc_feature 1..22: note = chemically synthesized
  source 1..22: mol_type = other DNA
gctagctagctagctagctatc

SEQ ID NO: 155514 - DNA, 22 bp, synthetic construct
  misc_feature 1..22: note = chemically synthesized
  source 1..22: mol_type = other DNA
gctagctagctagctatctacc

SEQ ID NO: 155515 - DNA, 22 bp, synthetic construct
  misc_feature 1..22: note = chemically synthesized
  source 1..22: mol_type = other DNA
gctagctagctatctacctatc

SEQ ID NO: 155516 - DNA, 22 bp, synthetic construct
  misc_feature 1..22: note = chemically synthesized
  source 1..22: mol_type = other DNA
gctagctatctacctatctaat

SEQ ID NO: 155517 - DNA, 22 bp, synthetic construct
  misc_feature 1..22: note = chemically synthesized
  source 1..22: mol_type = other DNA
gctatctacctatctaatctat

SEQ ID NO: 155518 - DNA, 22 bp, synthetic construct
  misc_feature 1..22: note = chemically synthesized
  source 1..22: mol_type = other DNA
tctacctatctaatctatctct

SEQ ID NO: 155519 - DNA, 22 bp, synthetic construct
  misc_feature 1..22: note = chemically synthesized
  source 1..22: mol_type = other DNA
cctatctaatctatctctgtat

SEQ ID NO: 155520 - DNA, 22 bp, synthetic construct
  misc_feature 1..22: note = chemically synthesized
  source 1..22: mol_type = other DNA
tctaatctatctctgtatatgt

SEQ ID NO: 155521 - DNA, 22 bp, synthetic construct
  misc_feature 1..22: note = chemically synthesized
  source 1..22: mol_type = other DNA
atctatctctgtatatgtcacc

SEQ ID NO: 155522 - DNA, 22 bp, synthetic construct
  misc_feature 1..22: note = chemically synthesized
  source 1..22: mol_type = other DNA
tctctgtatatgtcacctaccc

SEQ ID NO: 155523 - DNA, 22 bp, synthetic construct
  misc_feature 1..22: note = chemically synthesized
  source 1..22: mol_type = other DNA
tgtatatgtcacctaccctggt

SEQ ID NO: 155524 - DNA, 22 bp, synthetic construct
  misc_feature 1..22: note = chemically synthesized
  source 1..22: mol_type = other DNA
tatatgtcacctaccctggtgt

SEQ ID NO: 155525 - DNA, 22 bp, synthetic construct
  misc_feature 1..22: note = chemically synthesized
  source 1..22: mol_type = other DNA
ccctggtgttgcatctcctaat

SEQ ID NO: 155526 - DNA, 22 bp, synthetic construct
  misc_feature 1..22: note = chemically synthesized
  source 1..22: mol_type = other DNA
gtgttgcatctcctaatcttat

SEQ ID NO: 155527 - DNA, 22 bp, synthetic construct
  misc_feature 1..22: note = chemically synthesized
  source 1..22: mol_type = other DNA
catctcctaatcttattttcca

SEQ ID NO: 155528 - DNA, 22 bp, synthetic construct
  misc_feature 1..22: note = chemically synthesized
  source 1..22: mol_type = other DNA
ctaatcttattttccactcaat

SEQ ID NO: 155529 - DNA, 22 bp, synthetic construct
  misc_feature 1..22: note = chemically synthesized
  source 1..22: mol_type = other DNA
atcttattttccactcaatatt

SEQ ID NO: 155530 - DNA, 22 bp, synthetic construct
  misc_feature 1..22: note = chemically synthesized
  source 1..22: mol_type = other DNA
attttccactcaatattaaact

SEQ ID NO: 155531 - DNA, 22 bp, synthetic construct
  misc_feature 1..22: note = chemically synthesized
  source 1..22: mol_type = other DNA
ttttccactcaatattaaactt

SEQ ID NO: 155532 - DNA, 22 bp, synthetic construct
  misc_feature 1..22: note = chemically synthesized
  source 1..22: mol_type = other DNA
tccactcaatattaaacttgct

SEQ ID NO: 155533 - DNA, 22 bp, synthetic construct
  misc_feature 1..22: note = chemically synthesized
  source 1..22: mol_type = other DNA
ccactcaatattaaacttgctt

SEQ ID NO: 155534 - DNA, 22 bp, synthetic construct
  misc_feature 1..22: note = chemically synthesized
  source 1..22: mol_type = other DNA
cactcaatattaaacttgcttc

SEQ ID NO: 155535 - DNA, 22 bp, synthetic construct
  misc_feature 1..22: note = chemically synthesized
  source 1..22: mol_type = other DNA
aatattaaacttgcttctatcc

SEQ ID NO: 155536 - DNA, 22 bp, synthetic construct
  misc_feature 1..22: note = chemically synthesized
  source 1..22: mol_type = other DNA
aacttgcttctatccacatttt

SEQ ID NO: 155537 - DNA, 22 bp, synthetic construct
  misc_feature 1..22: note = chemically synthesized
  source 1..22: mol_type = other DNA
gcttctatccacattttttaga

SEQ ID NO: 155538 - DNA, 22 bp, synthetic construct
  misc_feature 1..22: note = chemically synthesized
  source 1..22: mol_type = other DNA
cttctatccacattttttagaa

SEQ ID NO: 155539 - DNA, 22 bp, synthetic construct
  misc_feature 1..22: note = chemically synthesized
  source 1..22: mol_type = other DNA
ctatccacattttttagaacta

SEQ ID NO: 155540 - DNA, 22 bp, synthetic construct
  misc_feature 1..22: note = chemically synthesized
  source 1..22: mol_type = other DNA
tatccacattttttagaactag

SEQ ID NO: 155541 - DNA, 22 bp, synthetic construct
  misc_feature 1..22: note = chemically synthesized
  source 1..22: mol_type = other DNA
tccacattttttagaactagta

SEQ ID NO: 155542 - DNA, 22 bp, synthetic construct
  misc_feature 1..22: note = chemically synthesized
  source 1..22: mol_type = other DNA
tttagaactagtaattagtaat

SEQ ID NO: 155543 - DNA, 22 bp, synthetic construct
  misc_feature 1..22: note = chemically synthesized
  source 1..22: mol_type = other DNA
ttagaactagtaattagtaata

SEQ ID NO: 155544 - DNA, 22 bp, synthetic construct
  misc_feature 1..22: note = chemically synthesized
  source 1..22: mol_type = other DNA
tagaactagtaattagtaataa

SEQ ID NO: 155545 - DNA, 22 bp, synthetic construct
  misc_feature 1..22: note = chemically synthesized
  source 1..22: mol_type = other DNA
agaactagtaattagtaataac

SEQ ID NO: 155546 - DNA, 22 bp, synthetic construct
  misc_feature 1..22: note = chemically synthesized
  source 1..22: mol_type = other DNA
gaactagtaattagtaataaca

SEQ ID NO: 155547 - DNA, 22 bp, synthetic construct
  misc_feature 1..22: note = chemically synthesized
  source 1..22: mol_type = other DNA
gtaattagtaataacaagtaat

SEQ ID NO: 155548 - DNA, 22 bp, synthetic construct
  misc_feature 1..22: note = chemically synthesized
  source 1..22: mol_type = other DNA
gtaataacaagtaatatattga

SEQ ID NO: 155549 - DNA, 22 bp, synthetic construct
  misc_feature 1..22: note = chemically synthesized
  source 1..22: mol_type = other DNA
aagtaatatagactcctgtttt

SEQ ID NO: 155550 - DNA, 22 bp, synthetic construct
  misc_feature 1..22: note = chemically synthesized
  source 1..22: mol_type = other DNA
ctgttttataatgtgaaaacat

SEQ ID NO: 155551 - DNA, 22 bp, synthetic construct
  misc_feature 1..22: note = chemically synthesized
  source 1..22: mol_type = other DNA
ttttataatgtgaaaacattaa

SEQ ID NO: 155552 - DNA, 22 bp, synthetic construct
  misc_feature 1..22: note = chemically synthesized
  source 1..22: mol_type = other DNA
tataatgtgaaaacattaaatt

SEQ ID NO: 155553 - DNA, 22 bp, synthetic construct
  misc_feature 1..22: note = chemically synthesized
  source 1..22: mol_type = other DNA
ataatgtgaaaacattaaatta

SEQ ID NO: 155554 - DNA, 22 bp, synthetic construct
  misc_feature 1..22: note = chemically synthesized
  source 1..22: mol_type = other DNA
taatgtgaaaacattaaattac

SEQ ID NO: 155555 - DNA, 22 bp, synthetic construct
  misc_feature 1..22: note = chemically synthesized
  source 1..22: mol_type = other DNA
aattacttgctgctgtggtggt

SEQ ID NO: 155556 - DNA, 22 bp, synthetic construct
  misc_feature 1..22: note = chemically synthesized
  source 1..22: mol_type = other DNA
cttgctgctgtggtggtactta

SEQ ID NO: 155557 - DNA, 22 bp, synthetic construct
  misc_feature 1..22: note = chemically synthesized
  source 1..22: mol_type = other DNA
gctgctgtggtggtacttagat

SEQ ID NO: 155558 - DNA, 22 bp, synthetic construct
  misc_feature 1..22: note = chemically synthesized
  source 1..22: mol_type = other DNA
ctgctgtggtggtacttagata

SEQ ID NO: 155559 - DNA, 22 bp, synthetic construct
  misc_feature 1..22: note = chemically synthesized
  source 1..22: mol_type = other DNA
ctgtggtggtacttagatatac

SEQ ID NO: 155560 - DNA, 22 bp, synthetic construct
  misc_feature 1..22: note = chemically synthesized
  source 1..22: mol_type = other DNA
tggtggtacttagatatacaat

SEQ ID NO: 155561 - DNA, 22 bp, synthetic construct
  misc_feature 1..22: note = chemically synthesized
  source 1..22: mol_type = other DNA
agatatacaatgtgtaaactat

SEQ ID NO: 155562 - DNA, 22 bp, synthetic construct
  misc_feature 1..22: note = chemically synthesized
  source 1..22: mol_type = other DNA
gatatacaatgtgtaaactatt

SEQ ID NO: 155563 - DNA, 22 bp, synthetic construct
  misc_feature 1..22: note = chemically synthesized
  source 1..22: mol_type = other DNA
ttaattattgtctcaatttcag

SEQ ID NO: 155564 - DNA, 22 bp, synthetic construct
  misc_feature 1..22: note = chemically synthesized
  source 1..22: mol_type = other DNA
attattgtctcaatttcagagc

SEQ ID NO: 155565 - DNA, 22 bp, synthetic construct
  misc_feature 1..22: note = chemically synthesized
  source 1..22: mol_type = other DNA
ttgtctcaatttcagagcctat

SEQ ID NO: 155566 - DNA, 22 bp, synthetic construct
  misc_feature 1..22: note = chemically synthesized
  source 1..22: mol_type = other DNA
tctcaatttcagagcctattat

SEQ ID NO: 155567 - DNA, 22 bp, synthetic construct
  misc_feature 1..22: note = chemically synthesized
  source 1..22: mol_type = other DNA
aatttcagagcctattatttgt

SEQ ID NO: 155568 - DNA, 22 bp, synthetic construct
  misc_feature 1..22: note = chemically synthesized
  source 1..22: mol_type = other DNA
cagagcctattatttgtctatt

SEQ ID NO: 155569 - DNA, 22 bp, synthetic construct
  misc_feature 1..22: note = chemically synthesized
  source 1..22: mol_type = other DNA
agagcctattatttgtctatta

SEQ ID NO: 155570 - DNA, 22 bp, synthetic construct
  misc_feature 1..22: note = chemically synthesized
  source 1..22: mol_type = other DNA
ttatttgtctattaagagattc

SEQ ID NO: 155571 - DNA, 22 bp, synthetic construct
  misc_feature 1..22: note = chemically synthesized
  source 1..22: mol_type = other DNA
tttgtctattaagagattcaat

SEQ ID NO: 155572 - DNA, 22 bp, synthetic construct
  misc_feature 1..22: note = chemically synthesized
  source 1..22: mol_type = other DNA
gtctattaagagattcaatttc

SEQ ID NO: 155573 - DNA, 22 bp, synthetic construct
  misc_feature 1..22: note = chemically synthesized
  source 1..22: mol_type = other DNA
tctattaagagattcaatttct

SEQ ID NO: 155574 - DNA, 22 bp, synthetic construct
  misc_feature 1..22: note = chemically synthesized
  source 1..22: mol_type = other DNA
ttaagagattcaatttctccct

SEQ ID NO: 155575 - DNA, 22 bp, synthetic construct
  misc_feature 1..22: note = chemically synthesized
  source 1..22: mol_type = other DNA
agagattcaatttctccctggt

SEQ ID NO: 155576 - DNA, 22 bp, synthetic construct
  misc_feature 1..22: note = chemically synthesized
  source 1..22: mol_type = other DNA
aatttctccctggtttagtctt

SEQ ID NO: 155577 - DNA, 22 bp, synthetic construct
  misc_feature 1..22: note = chemically synthesized
  source 1..22: mol_type = other DNA
ctccctggtttagtcttgggag

SEQ ID NO: 155578 - DNA, 22 bp, synthetic construct
  misc_feature 1..22: note = chemically synthesized
  source 1..22: mol_type = other DNA
tccctggtttagtcttgggagg

SEQ ID NO: 155579 - DNA, 22 bp, synthetic construct
  misc_feature 1..22: note = chemically synthesized
  source 1..22: mol_type = other DNA
cctggtttagtcttgggagggt

SEQ ID NO: 155580 - DNA, 22 bp, synthetic construct
  misc_feature 1..22: note = chemically synthesized
  source 1..22: mol_type = other DNA
gtttagtcttgggagggtgtat

SEQ ID NO: 155581 - DNA, 22 bp, synthetic construct
  misc_feature 1..22: note = chemically synthesized
  source 1..22: mol_type = other DNA
agtcttgggagggtgtatgtgt

SEQ ID NO: 155582 - DNA, 22 bp, synthetic construct
  misc_feature 1..22: note = chemically synthesized
  source 1..22: mol_type = other DNA
gtcttgggagggtgtatgtgtc

SEQ ID NO: 155583 - DNA, 22 bp, synthetic construct
  misc_feature 1..22: note = chemically synthesized
  source 1..22: mol_type = other DNA
gggagggtgtatgtgtcgagga

SEQ ID NO: 155584 - DNA, 22 bp, synthetic construct
  misc_feature 1..22: note = chemically synthesized
  source 1..22: mol_type = other DNA
ggagggtgtatgtgtcgaggaa

SEQ ID NO: 155585 - DNA, 22 bp, synthetic construct
  misc_feature 1..22: note = chemically synthesized
  source 1..22: mol_type = other DNA
atccatttctactagattttct

SEQ ID NO: 155586 - DNA, 22 bp, synthetic construct
  misc_feature 1..22: note = chemically synthesized
  source 1..22: mol_type = other DNA
tccatttctactagattttcta

SEQ ID NO: 155587 - DNA, 22 bp, synthetic construct
  misc_feature 1..22: note = chemically synthesized
  source 1..22: mol_type = other DNA
ctactagattttctagtttatt

SEQ ID NO: 155588 - DNA, 22 bp, synthetic construct
  misc_feature 1..22: note = chemically synthesized
  source 1..22: mol_type = other DNA
tactagattttctagtttattt

SEQ ID NO: 155589 - DNA, 22 bp, synthetic construct
  misc_feature 1..22: note = chemically synthesized
  source 1..22: mol_type = other DNA
ctagattttctagtttatttgc

SEQ ID NO: 155590 - DNA, 22 bp, synthetic construct
  misc_feature 1..22: note = chemically synthesized
  source 1..22: mol_type = other DNA
gattttctagtttatttgcgta

SEQ ID NO: 155591 - DNA, 22 bp, synthetic construct
  misc_feature 1..22: note = chemically synthesized
  source 1..22: mol_type = other DNA
tctagtttatttgcgtagaggt

SEQ ID NO: 155592 - DNA, 22 bp, synthetic construct
  misc_feature 1..22: note = chemically synthesized
  source 1..22: mol_type = other DNA
ctagtttatttgcgtagaggtg

SEQ ID NO: 155593 - DNA, 22 bp, synthetic construct
  misc_feature 1..22: note = chemically synthesized
  source 1..22: mol_type = other DNA
tagtttatttgcgtagaggtgt

SEQ ID NO: 155594 - DNA, 22 bp, synthetic construct
  misc_feature 1..22: note = chemically synthesized
  source 1..22: mol_type = other DNA
gtttatttgcgtagaggtgttt

SEQ ID NO: 155595 - DNA, 22 bp, synthetic construct
  misc_feature 1..22: note = chemically synthesized
  source 1..22: mol_type = other DNA
atttgcgtagaggtgtttatag

SEQ ID NO: 155596 - DNA, 22 bp, synthetic construct
  misc_feature 1..22: note = chemically synthesized
  source 1..22: mol_type = other DNA
tttgcgtagaggtgtttatagt

SEQ ID NO: 155597 - DNA, 22 bp, synthetic construct
  misc_feature 1..22: note = chemically synthesized
  source 1..22: mol_type = other DNA
gcgtagaggtgtttatagtatt

SEQ ID NO: 155598 - DNA, 22 bp, synthetic construct
  misc_feature 1..22: note = chemically synthesized
  source 1..22: mol_type = other DNA
cgtagaggtgtttatagtattc

SEQ ID NO: 155599 - DNA, 22 bp, synthetic construct
  misc_feature 1..22: note = chemically synthesized
  source 1..22: mol_type = other DNA
atagtattctctgatggtagtt

SEQ ID NO: 155600 - DNA, 22 bp, synthetic construct
  misc_feature 1..22: note = chemically synthesized
  source 1..22: mol_type = other DNA
tagtattctctgatggtagttt

SEQ ID NO: 155601 - DNA, 22 bp, synthetic construct
  misc_feature 1..22: note = chemically synthesized
  source 1..22: mol_type = other DNA
tctgatggtagtttgtatgtct

SEQ ID NO: 155602 - DNA, 22 bp, synthetic construct
  misc_feature 1..22: note = chemically synthesized
  source 1..22: mol_type = other DNA
tgatggtagtttgtatgtctgt

SEQ ID NO: 155603 - DNA, 22 bp, synthetic construct
  misc_feature 1..22: note = chemically synthesized
  source 1..22: mol_type = other DNA
atggtagtttgtatgtctgtgg

SEQ ID NO: 155604 - DNA, 22 bp, synthetic construct
  misc_feature 1..22: note = chemically synthesized
  source 1..22: mol_type = other DNA
gtatgtctgtgggattggtggt

SEQ ID NO: 155605 - DNA, 22 bp, synthetic construct
  misc_feature 1..22: note = chemically synthesized
  source 1..22: mol_type = other DNA
tatgtctgtgggattggtggtg

SEQ ID NO: 155606 - DNA, 22 bp, synthetic construct
  misc_feature 1..22: note = chemically synthesized
  source 1..22: mol_type = other DNA
tgggattggtggtgatatcccc

SEQ ID NO: 155607 - DNA, 22 bp, synthetic construct
  misc_feature 1..22: note = chemically synthesized
  source 1..22: mol_type = other DNA
gtggtgatatcccctttatcat

SEQ ID NO: 155608 - DNA, 22 bp, synthetic construct
  misc_feature 1..22: note = chemically synthesized
  source 1..22: mol_type = other DNA
tatcatttcttattgcatctat

SEQ ID NO: 155609 - DNA, 22 bp, synthetic construct
  misc_feature 1..22: note = chemically synthesized
  source 1..22: mol_type = other DNA
atcatttcttattgcatctatt

SEQ ID NO: 155610 - DNA, 22 bp, synthetic construct
  misc_feature 1..22: note = chemically synthesized
  source 1..22: mol_type = other DNA
tcatttcttattgcatctattt

SEQ ID NO: 155611 - DNA, 22 bp, synthetic construct
  misc_feature 1..22: note = chemically synthesized
  source 1..22: mol_type = other DNA
cttattgcatctatttgagtct

SEQ ID NO: 155612 - DNA, 22 bp, synthetic construct
  misc_feature 1..22: note = chemically synthesized
  source 1..22: mol_type = other DNA
ttattgcatctatttgagtctt

SEQ ID NO: 155613 - DNA, 22 bp, synthetic construct
  misc_feature 1..22: note = chemically synthesized
  source 1..22: mol_type = other DNA
attgcatctatttgagtcttct

SEQ ID NO: 155614 - DNA, 22 bp, synthetic construct
  misc_feature 1..22: note = chemically synthesized
  source 1..22: mol_type = other DNA
ttgcatctatttgagtcttctc

SEQ ID NO: 155615 - DNA, 22 bp, synthetic construct
  misc_feature 1..22: note = chemically synthesized
  source 1..22: mol_type = other DNA
catctatttgagtcttctctct

SEQ ID NO: 155616 - DNA, 22 bp, synthetic construct
  misc_feature 1..22: note = chemically synthesized
  source 1..22: mol_type = other DNA
tttgagtcttctctcttttctt

SEQ ID NO: 155617 - DNA, 22 bp, synthetic construct
  misc_feature 1..22: note = chemically synthesized
  source 1..22: mol_type = other DNA
gagtcttctctcttttcttctt

SEQ ID NO: 155618 - DNA, 22 bp, synthetic construct
  misc_feature 1..22: note = chemically synthesized
  source 1..22: mol_type = other DNA
agtcttctctcttttcttcttt

SEQ ID NO: 155619 - DNA, 22 bp, synthetic construct
  misc_feature 1..22: note = chemically synthesized
  source 1..22: mol_type = other DNA
ctctcttttcttctttattagt

SEQ ID NO: 155620 - DNA, 22 bp, synthetic construct
  misc_feature 1..22: note = chemically synthesized
  source 1..22: mol_type = other DNA
tctcttttcttctttattagtc

SEQ ID NO: 155621 - DNA, 22 bp, synthetic construct
  misc_feature 1..22: note = chemically synthesized
  source 1..22: mol_type = other DNA
tcttttcttctttattagtctt

SEQ ID NO: 155622 - DNA, 22 bp, synthetic construct
  misc_feature 1..22: note = chemically synthesized
  source 1..22: mol_type = other DNA
ttttcttctttattagtcttgc

SEQ ID NO: 155623 - DNA, 22 bp, synthetic construct
  misc_feature 1..22: note = chemically synthesized
  source 1..22: mol_type = other DNA
ttcttctttattagtcttgcta

SEQ ID NO: 155624 - DNA, 22 bp, synthetic construct
  misc_feature 1..22: note = chemically synthesized
  source 1..22: mol_type = other DNA
tcttctttattagtcttgctag

SEQ ID NO: 155625 - DNA, 22 bp, synthetic construct
  misc_feature 1..22: note = chemically synthesized
  source 1..22: mol_type = other DNA
cttctttattagtcttgctagc

SEQ ID NO: 155626 - DNA, 22 bp, synthetic construct
  misc_feature 1..22: note = chemically synthesized
  source 1..22: mol_type = other DNA
ttctttattagtcttgctagca

SEQ ID NO: 155627 - DNA, 22 bp, synthetic construct
  misc_feature 1..22: note = chemically synthesized
  source 1..22: mol_type = other DNA
ctttattagtcttgctagcagt

SEQ ID NO: 155628 - DNA, 22 bp, synthetic construct
  misc_feature 1..22: note = chemically synthesized
  source 1..22: mol_type = other DNA
tttattagtcttgctagcagtc

SEQ ID NO: 155629 - DNA, 22 bp, synthetic construct
  misc_feature 1..22: note = chemically synthesized
  source 1..22: mol_type = other DNA
tattagtcttgctagcagtcta

SEQ ID NO: 155630 - DNA, 22 bp, synthetic construct
  misc_feature 1..22: note = chemically synthesized
  source 1..22: mol_type = other DNA
attagtcttgctagcagtctat

SEQ ID NO: 155631 - DNA, 22 bp, synthetic construct
  misc_feature 1..22: note = chemically synthesized
  source 1..22: mol_type = other DNA
ttagtcttgctagcagtctatc

SEQ ID NO: 155632 - DNA, 22 bp, synthetic construct
  misc_feature 1..22: note = chemically synthesized
  source 1..22: mol_type = other DNA
gtcttgctagcagtctatcaat

SEQ ID NO: 155633 - DNA, 22 bp, synthetic construct
  misc_feature 1..22: note = chemically synthesized
  source 1..22: mol_type = other DNA
gctagcagtctatcaattttgt

SEQ ID NO: 155634 - DNA, 22 bp, synthetic construct
  misc_feature 1..22: note = chemically synthesized
  source 1..22: mol_type = other DNA
ctagcagtctatcaattttgtt

SEQ ID NO: 155635 - DNA, 22 bp, synthetic construct
  misc_feature 1..22: note = chemically synthesized
  source 1..22: mol_type = other DNA
gcagtctatcaattttgttgat

SEQ ID NO: 155636 - DNA, 22 bp, synthetic construct
  misc_feature 1..22: note = chemically synthesized
  source 1..22: mol_type = other DNA
tcaattttgttgatcttttcaa

SEQ ID NO: 155637 - DNA, 22 bp, synthetic construct
  misc_feature 1..22: note = chemically synthesized
  source 1..22: mol_type = other DNA
tgttgatcttttcaaaaaacca

SEQ ID NO: 155638 - DNA, 22 bp, synthetic construct
  misc_feature 1..22: note = chemically synthesized
  source 1..22: mol_type = other DNA
gttgatcttttcaaaaaaccag

SEQ ID NO: 155639 - DNA, 22 bp, synthetic construct
  misc_feature 1..22: note = chemically synthesized
  source 1..22: mol_type = other DNA
ttgatcttttcaaaaaaccagc

SEQ ID NO: 155640 - DNA, 22 bp, synthetic construct
  misc_feature 1..22: note = chemically synthesized
  source 1..22: mol_type = other DNA
atcttttcaaaaaaccagctcc

SEQ ID NO: 155641 - DNA, 22 bp, synthetic construct
  misc_feature 1..22: note = chemically synthesized
  source 1..22: mol_type = other DNA
ttcaaaaaaccagctcctggat

SEQ ID NO: 155642 - DNA, 22 bp, synthetic construct
  misc_feature 1..22: note = chemically synthesized
  source 1..22: mol_type = other DNA
tcaaaaaaccagctcctggatt

SEQ ID NO: 155643 - DNA, 22 bp, synthetic construct
  misc_feature 1..22: note = chemically synthesized
  source 1..22: mol_type = other DNA
caaaaaaccagctcctggattc

SEQ ID NO: 155644 - DNA, 22 bp, synthetic construct
  misc_feature 1..22: note = chemically synthesized
  source 1..22: mol_type = other DNA
aaaaaaccagctcctggattca

SEQ ID NO: 155645 - DNA, 22 bp, synthetic construct
  misc_feature 1..22: note = chemically synthesized
  source 1..22: mol_type = other DNA
ctggattcattgatttttttaa

SEQ ID NO: 155646 - DNA, 22 bp, synthetic construct
  misc_feature 1..22: note = chemically synthesized
  source 1..22: mol_type = other DNA
gattcattgatttttttaaggg

SEQ ID NO: 155647 - DNA, 22 bp, synthetic construct
  misc_feature 1..22: note = chemically synthesized
  source 1..22: mol_type = other DNA
attgatttttttaagggttttt

SEQ ID NO: 155648 - DNA, 22 bp, synthetic construct
  misc_feature 1..22: note = chemically synthesized
  source 1..22: mol_type = other DNA
atttttttaagggttttttgtg

SEQ ID NO: 155649 - DNA, 22 bp, synthetic construct
  misc_feature 1..22: note = chemically synthesized
  source 1..22: mol_type = other DNA
ttttaagggttttttgtgtctc

SEQ ID NO: 155650 - DNA, 22 bp, synthetic construct
  misc_feature 1..22: note = chemically synthesized
  source 1..22: mol_type = other DNA
tttaagggttttttgtgtctca

SEQ ID NO: 155651 - DNA, 22 bp, synthetic construct
  misc_feature 1..22: note = chemically synthesized
  source 1..22: mol_type = other DNA
ttaagggttttttgtgtctcaa

SEQ ID NO: 155652 - DNA, 22 bp, synthetic construct
  misc_feature 1..22: note = chemically synthesized
  source 1..22: mol_type = other DNA
taagggttttttgtgtctcaat

SEQ ID NO: 155653 - DNA, 22 bp, synthetic construct
  misc_feature 1..22: note = chemically synthesized
  source 1..22: mol_type = other DNA
aagggttttttgtgtctcaatc

SEQ ID NO: 155654 - DNA, 22 bp, synthetic construct
  misc_feature 1..22: note = chemically synthesized
  source 1..22: mol_type = other DNA
agggttttttgtgtctcaatct

SEQ ID NO: 155655 - DNA, 22 bp, synthetic construct
  misc_feature 1..22: note = chemically synthesized
  source 1..22: mol_type = other DNA
tttgtgtctcaatctccttcac

SEQ ID NO: 155656 - DNA, 22 bp, synthetic construct
  misc_feature 1..22: note = chemically synthesized
  source 1..22: mol_type = other DNA
ttgtgtctcaatctccttcact

SEQ ID NO: 155657 - DNA, 22 bp, synthetic construct
  misc_feature 1..22: note = chemically synthesized
  source 1..22: mol_type = other DNA
tgtgtctcaatctccttcactt

SEQ ID NO: 155658 - DNA, 22 bp, synthetic construct
  misc_feature 1..22: note = chemically synthesized
  source 1..22: mol_type = other DNA
gtgtctcaatctccttcacttc

SEQ ID NO: 155659 - DNA, 22 bp, synthetic construct
  misc_feature 1..22: note = chemically synthesized
  source 1..22: mol_type = other DNA
tgtctcaatctccttcacttct

SEQ ID NO: 155660 - DNA, 22 bp, synthetic construct
  misc_feature 1..22: note = chemically synthesized
  source 1..22: mol_type = other DNA
aatctccttcacttctgctctg

SEQ ID NO: 155661 - DNA, 22 bp, synthetic construct
  misc_feature 1..22: note = chemically synthesized
  source 1..22: mol_type = other DNA
cttcacttctgctctgatctta

SEQ ID NO: 155662 - DNA, 22 bp, synthetic construct
  misc_feature 1..22: note = chemically synthesized
  source 1..22: mol_type = other DNA
cacttctgctctgatcttactt

SEQ ID NO: 155663 - DNA, 22 bp, synthetic construct
  misc_feature 1..22: note = chemically synthesized
  source 1..22: mol_type = other DNA
acttctgctctgatcttactta

SEQ ID NO: 155664 - DNA, 22 bp, synthetic construct
  misc_feature 1..22: note = chemically synthesized
  source 1..22: mol_type = other DNA
ctgctctgatcttacttatttc

SEQ ID NO: 155665 - DNA, 22 bp, synthetic construct
  misc_feature 1..22: note = chemically synthesized
  source 1..22: mol_type = other DNA
tgctctgatcttacttatttct

SEQ ID NO: 155666 - DNA, 22 bp, synthetic construct
  misc_feature 1..22: note = chemically synthesized
  source 1..22: mol_type = other DNA
ctctgatcttacttatttcttg

SEQ ID NO: 155667 - DNA, 22 bp, synthetic construct
  misc_feature 1..22: note = chemically synthesized
  source 1..22: mol_type = other DNA
tgatcttacttatttcttgcct

SEQ ID NO: 155668 - DNA, 22 bp, synthetic construct
  misc_feature 1..22: note = chemically synthesized
  source 1..22: mol_type = other DNA
atcttacttatttcttgccttc

SEQ ID NO: 155669 - DNA, 22 bp, synthetic construct
  misc_feature 1..22: note = chemically synthesized
  source 1..22: mol_type = other DNA
acttatttcttgccttccgcta

SEQ ID NO: 155670 - DNA, 22 bp, synthetic construct
  misc_feature 1..22: note = chemically synthesized
  source 1..22: mol_type = other DNA
cttatttcttgccttccgctag

SEQ ID NO: 155671 - DNA, 22 bp, synthetic construct
  misc_feature 1..22: note = chemically synthesized
  source 1..22: mol_type = other DNA
atttcttgccttccgctagctt

SEQ ID NO: 155672 - DNA, 22 bp, synthetic construct
  misc_feature 1..22: note = chemically synthesized
  source 1..22: mol_type = other DNA
tttcttgccttccgctagcttt

SEQ ID NO: 155673 - DNA, 22 bp, synthetic construct
  misc_feature 1..22: note = chemically synthesized
  source 1..22: mol_type = other DNA
cttgccttccgctagcttttga

SEQ ID NO: 155674 - DNA, 22 bp, synthetic construct
  misc_feature 1..22: note = chemically synthesized
  source 1..22: mol_type = other DNA
ttgccttccgctagcttttgaa

SEQ ID NO: 155675 - DNA, 22 bp, synthetic construct
  misc_feature 1..22: note = chemically synthesized
  source 1..22: mol_type = other DNA
gccttccgctagcttttgaaag

SEQ ID NO: 155676 - DNA, 22 bp, synthetic construct
  misc_feature 1..22: note = chemically synthesized
  source 1..22: mol_type = other DNA
ccttccgctagcttttgaaagt

SEQ ID NO: 155677 - DNA, 22 bp, synthetic construct
  misc_feature 1..22: note = chemically synthesized
  source 1..22: mol_type = other DNA
ccgctagcttttgaaagtgttt

SEQ ID NO: 155678 - DNA, 22 bp, synthetic construct
  misc_feature 1..22: note = chemically synthesized
  source 1..22: mol_type = other DNA
cgctagcttttgaaagtgtttg

SEQ ID NO: 155679 - DNA, 22 bp, synthetic construct
  misc_feature 1..22: note = chemically synthesized
  source 1..22: mol_type = other DNA
gcttttgaaagtgtttgctctt

SEQ ID NO: 155680 - DNA, 22 bp, synthetic construct
  misc_feature 1..22: note = chemically synthesized
  source 1..22: mol_type = other DNA
ttgaaagtgtttgctcttgctt

SEQ ID NO: 155681 - DNA, 22 bp, synthetic construct
  misc_feature 1..22: note = chemically synthesized
  source 1..22: mol_type = other DNA
tgaaagtgtttgctcttgcttc

SEQ ID NO: 155682 - DNA, 22 bp, synthetic construct
  misc_feature 1..22: note = chemically synthesized
  source 1..22: mol_type = other DNA
gaaagtgtttgctcttgcttct

SEQ ID NO: 155683 - DNA, 22 bp, synthetic construct
  misc_feature 1..22: note = chemically synthesized
  source 1..22: mol_type = other DNA
aaagtgtttgctcttgcttctc

SEQ ID NO: 155684 - DNA, 22 bp, synthetic construct
  misc_feature 1..22: note = chemically synthesized
  source 1..22: mol_type = other DNA
gctcttgcttctctagttcttt

SEQ ID NO: 155685 - DNA, 22 bp, synthetic construct
  misc_feature 1..22: note = chemically synthesized
  source 1..22: mol_type = other DNA
ctcttgcttctctagttctttt

SEQ ID NO: 155686 - DNA, 22 bp, synthetic construct
  misc_feature 1..22: note = chemically synthesized
  source 1..22: mol_type = other DNA
ttgcttctctagttcttttaat

SEQ ID NO: 155687 - DNA, 22 bp, synthetic construct
  misc_feature 1..22: note = chemically synthesized
  source 1..22: mol_type = other DNA
gcttctctagttcttttaattg

SEQ ID NO: 155688 - DNA, 22 bp, synthetic construct
  misc_feature 1..22: note = chemically synthesized
  source 1..22: mol_type = other DNA
cttctctagttcttttaattgt

SEQ ID NO: 155689 - DNA, 22 bp, synthetic construct
  misc_feature 1..22: note = chemically synthesized
  source 1..22: mol_type = other DNA
ctctagttcttttaattgtgat

SEQ ID NO: 155690 - DNA, 22 bp, synthetic construct
  misc_feature 1..22: note = chemically synthesized
  source 1..22: mol_type = other DNA
tctagttcttttaattgtgatg

SEQ ID NO: 155691 - DNA, 22 bp, synthetic construct
  misc_feature 1..22: note = chemically synthesized
  source 1..22: mol_type = other DNA
tagttcttttaattgtgatgtt

SEQ ID NO: 155692 - DNA, 22 bp, synthetic construct
  misc_feature 1..22: note = chemically synthesized
  source 1..22: mol_type = other DNA
gttcttttaattgtgatgttag

SEQ ID NO: 155693 - DNA, 22 bp, synthetic construct
  misc_feature 1..22: note = chemically synthesized
  source 1..22: mol_type = other DNA
ttttaattgtgatgttagggtg

SEQ ID NO: 155694 - DNA, 22 bp, synthetic construct
  misc_feature 1..22: note = chemically synthesized
  source 1..22: mol_type = other DNA
ttaattgtgatgttagggtgtc

SEQ ID NO: 155695 - DNA, 22 bp, synthetic construct
  misc_feature 1..22: note = chemically synthesized
  source 1..22: mol_type = other DNA
taattgtgatgttagggtgtca

SEQ ID NO: 155696 - DNA, 22 bp, synthetic construct
  misc_feature 1..22: note = chemically synthesized
  source 1..22: mol_type = other DNA
aattgtgatgttagggtgtcaa

SEQ ID NO: 155697 - DNA, 22 bp, synthetic construct
  misc_feature 1..22: note = chemically synthesized
  source 1..22: mol_type = other DNA
attgtgatgttagggtgtcaat

SEQ ID NO: 155698 - DNA, 22 bp, synthetic construct
  misc_feature 1..22: note = chemically synthesized
  source 1..22: mol_type = other DNA
tgatgttagggtgtcaatttta

SEQ ID NO: 155699 - DNA, 22 bp, synthetic construct
  misc_feature 1..22: note = chemically synthesized
  source 1..22: mol_type = other DNA
gggtgtcaattttagatctttc

SEQ ID NO: 155700 - DNA, 22 bp, synthetic construct
  misc_feature 1..22: note = chemically synthesized
  source 1..22: mol_type = other DNA
tagatctttcctgctttctttt

SEQ ID NO: 155701 - DNA, 22 bp, synthetic construct
  misc_feature 1..22: note = chemically synthesized
  source 1..22: mol_type = other DNA
agatctttcctgctttcttttg

SEQ ID NO: 155702 - DNA, 22 bp, synthetic construct
  misc_feature 1..22: note = chemically synthesized
  source 1..22: mol_type = other DNA
gatctttcctgctttcttttgt

SEQ ID NO: 155703 - DNA, 22 bp, synthetic construct
  misc_feature 1..22: note = chemically synthesized
  source 1..22: mol_type = other DNA
tcctgctttcttttgtgggcat

SEQ ID NO: 155704 - DNA, 22 bp, synthetic construct
  misc_feature 1..22: note = chemically synthesized
  source 1..22: mol_type = other DNA
cctgctttcttttgtgggcatt

SEQ ID NO: 155705 - DNA, 22 bp, synthetic construct
  misc_feature 1..22: note = chemically synthesized
  source 1..22: mol_type = other DNA
ctgctttcttttgtgggcattt

SEQ ID NO: 155706 - DNA, 22 bp, synthetic construct
  misc_feature 1..22: note = chemically synthesized
  source 1..22: mol_type = other DNA
ctttcttttgtgggcatttagt

SEQ ID NO: 155707 - DNA, 22 bp, synthetic construct
  misc_feature 1..22: note = chemically synthesized
  source 1..22: mol_type = other DNA
tcttttgtgggcatttagtgct

SEQ ID NO: 155708 - DNA, 22 bp, synthetic construct
  misc_feature 1..22: note = chemically synthesized
  source 1..22: mol_type = other DNA
cttttgtgggcatttagtgcta

SEQ ID NO: 155709 - DNA, 22 bp, synthetic construct
  misc_feature 1..22: note = chemically synthesized
  source 1..22: mol_type = other DNA
ttttgtgggcatttagtgctat

SEQ ID NO: 155710 - DNA, 22 bp, synthetic construct
  misc_feature 1..22: note = chemically synthesized
  source 1..22: mol_type = other DNA
ttgtgggcatttagtgctataa

SEQ ID NO: 155711 - DNA, 22 bp, synthetic construct
  misc_feature 1..22: note = chemically synthesized
  source 1..22: mol_type = other DNA
tgtgggcatttagtgctataaa

SEQ ID NO: 155712 - DNA, 22 bp, synthetic construct
  misc_feature 1..22: note = chemically synthesized
  source 1..22: mol_type = other DNA
gtgggcatttagtgctataaat

SEQ ID NO: 155713 - DNA, 22 bp, synthetic construct
  misc_feature 1..22: note = chemically synthesized
  source 1..22: mol_type = other DNA
tgggcatttagtgctataaatt

SEQ ID NO: 155714 - DNA, 22 bp, synthetic construct
  misc_feature 1..22: note = chemically synthesized
  source 1..22: mol_type = other DNA
agtgctataaatttccctctac

SEQ ID NO: 155715 - DNA, 22 bp, synthetic construct
  misc_feature 1..22: note = chemically synthesized
  source 1..22: mol_type = other DNA
gtgctataaatttccctctaca

SEQ ID NO: 155716 - DNA, 22 bp, synthetic construct
  misc_feature 1..22: note = chemically synthesized
  source 1..22: mol_type = other DNA
taaatttccctctacacactgc

SEQ ID NO: 155717 - DNA, 22 bp, synthetic construct
  misc_feature 1..22: note = chemically synthesized
  source 1..22: mol_type = other DNA
ccctctacacactgctttaaat

SEQ ID NO: 155718 - DNA, 22 bp, synthetic construct
  misc_feature 1..22: note = chemically synthesized
  source 1..22: mol_type = other DNA
cctctacacactgctttaaatg

SEQ ID NO: 155719 - DNA, 22 bp, synthetic construct
  misc_feature 1..22: note = chemically synthesized
  source 1..22: mol_type = other DNA
tacacactgctttaaatgtgtc

SEQ ID NO: 155720 - DNA, 22 bp, synthetic construct
  misc_feature 1..22: note = chemically synthesized
  source 1..22: mol_type = other DNA
cacactgctttaaatgtgtccc

SEQ ID NO: 155721 - DNA, 22 bp, synthetic construct
  misc_feature 1..22: note = chemically synthesized
  source 1..22: mol_type = other DNA
ctttaaatgtgtcccagagatt

SEQ ID NO: 155722 - DNA, 22 bp, synthetic construct
  misc_feature 1..22: note = chemically synthesized
  source 1..22: mol_type = other DNA
taaatgtgtcccagagattctg

SEQ ID NO: 155723 - DNA, 22 bp, synthetic construct
  misc_feature 1..22: note = chemically synthesized
  source 1..22: mol_type = other DNA
aaatgtgtcccagagattctgt

SEQ ID NO: 155724 - DNA, 22 bp, synthetic construct
  misc_feature 1..22: note = chemically synthesized
  source 1..22: mol_type = other DNA
aatgtgtcccagagattctgtt

SEQ ID NO: 155725 - DNA, 22 bp, synthetic construct
  misc_feature 1..22: note = chemically synthesized
  source 1..22: mol_type = other DNA
tgttttgttgtatctttattct

SEQ ID NO: 155726 - DNA, 22 bp, synthetic construct
  misc_feature 1..22: note = chemically synthesized
  source 1..22: mol_type = other DNA
ttttgttgtatctttattctcg

SEQ ID NO: 155727 - DNA, 22 bp, synthetic construct
  misc_feature 1..22: note = chemically synthesized
  source 1..22: mol_type = other DNA
tgttgtatctttattctcgttg

SEQ ID NO: 155728 - DNA, 22 bp, synthetic construct
  misc_feature 1..22: note = chemically synthesized
  source 1..22: mol_type = other DNA
gttgtatctttattctcgttgg

SEQ ID NO: 155729 - DNA, 22 bp, synthetic construct
  misc_feature 1..22: note = chemically synthesized
  source 1..22: mol_type = other DNA
ttgtatctttattctcgttggt

SEQ ID NO: 155730 - DNA, 22 bp, synthetic construct
  misc_feature 1..22: note = chemically synthesized
  source 1..22: mol_type = other DNA
tatctttattctcgttggtttc

SEQ ID NO: 155731 - DNA, 22 bp, synthetic construct
  misc_feature 1..22: note = chemically synthesized
  source 1..22: mol_type = other DNA
tattctcgttggtttcaaagaa

SEQ ID NO: 155732 - DNA, 22 bp, synthetic construct
  misc_feature 1..22: note = chemically synthesized
  source 1..22: mol_type = other DNA
attctcgttggtttcaaagaac

SEQ ID NO: 155733 - DNA, 22 bp, synthetic construct
  misc_feature 1..22: note = chemically synthesized
  source 1..22: mol_type = other DNA
ttctcgttggtttcaaagaaca

SEQ ID NO: 155734 - DNA, 22 bp, synthetic construct
  misc_feature 1..22: note = chemically synthesized
  source 1..22: mol_type = other DNA
tcgttggtttcaaagaacatct

SEQ ID NO: 155735 - DNA, 22 bp, synthetic construct
  misc_feature 1..22: note = chemically synthesized
  source 1..22: mol_type = other DNA
gttggtttcaaagaacatcttt

SEQ ID NO: 155736 - DNA, 22 bp, synthetic construct
  misc_feature 1..22: note = chemically synthesized
  source 1..22: mol_type = other DNA
gtttcaaagaacatctttattt

SEQ ID NO: 155737 - DNA, 22 bp, synthetic construct
  misc_feature 1..22: note = chemically synthesized
  source 1..22: mol_type = other DNA
caaagaacatctttatttctgc

SEQ ID NO: 155738 - DNA, 22 bp, synthetic construct
  misc_feature 1..22: note = chemically synthesized
  source 1..22: mol_type = other DNA
aaagaacatctttatttctgcc

SEQ ID NO: 155739 - DNA, 22 bp, synthetic construct
  misc_feature 1..22: note = chemically synthesized
  source 1..22: mol_type = other DNA
tatttctgccttcattttgtta

SEQ ID NO: 155740 - DNA, 22 bp, synthetic construct
  misc_feature 1..22: note = chemically synthesized
  source 1..22: mol_type = other DNA
atttctgccttcattttgttat

SEQ ID NO: 155741 - DNA, 22 bp, synthetic construct
  misc_feature 1..22: note = chemically synthesized
  source 1..22: mol_type = other DNA
tttctgccttcattttgttatg

SEQ ID NO: 155742 - DNA, 22 bp, synthetic construct
  misc_feature 1..22: note = chemically synthesized
  source 1..22: mol_type = other DNA
ctgccttcattttgttatgtac

SEQ ID NO: 155743 - DNA, 22 bp, synthetic construct
  misc_feature 1..22: note = chemically synthesized
  source 1..22: mol_type = other DNA
tgccttcattttgttatgtacc

SEQ ID NO: 155744 - DNA, 22 bp, synthetic construct
  misc_feature 1..22: note = chemically synthesized
  source 1..22: mol_type = other DNA
ccttcattttgttatgtaccca

SEQ ID NO: 155745 - DNA, 22 bp, synthetic construct
  misc_feature 1..22: note = chemically synthesized
  source 1..22: mol_type = other DNA
cattttgttatgtacccagtag

SEQ ID NO: 155746 - DNA, 22 bp, synthetic construct
  misc_feature 1..22: note = chemically synthesized
  source 1..22: mol_type = other DNA
attttgttatgtacccagtagt

SEQ ID NO: 155747 - DNA, 22 bp, synthetic construct
  misc_feature 1..22: note = chemically synthesized
  source 1..22: mol_type = other DNA
tgttatgtacccagtagtcatt

SEQ ID NO: 155748 - DNA, 22 bp, synthetic construct
  misc_feature 1..22: note = chemically synthesized
  source 1..22: mol_type = other DNA
gttatgtacccagtagtcattc

SEQ ID NO: 155749 - DNA, 22 bp, synthetic construct
  misc_feature 1..22: note = chemically synthesized
  source 1..22: mol_type = other DNA
ttatgtacccagtagtcattca

SEQ ID NO: 155750 - DNA, 22 bp, synthetic construct
  misc_feature 1..22: note = chemically synthesized
  source 1..22: mol_type = other DNA
tgtacccagtagtcattcagga

SEQ ID NO: 155751 - DNA, 22 bp, synthetic construct
  misc_feature 1..22: note = chemically synthesized
  source 1..22: mol_type = other DNA
aggagcaggctgttcagtttcc

SEQ ID NO: 155752 - DNA, 22 bp, synthetic construct
  misc_feature 1..22: note = chemically synthesized
  source 1..22: mol_type = other DNA
ttcagtttccatgtagttgagt

SEQ ID NO: 155753 - DNA, 22 bp, synthetic construct
  misc_feature 1..22: note = chemically synthesized
  source 1..22: mol_type = other DNA
agtttccatgtagttgagtggt

SEQ ID NO: 155754 - DNA, 22 bp, synthetic construct
  misc_feature 1..22: note = chemically synthesized
  source 1..22: mol_type = other DNA
ccatgtagttgagtggttttga

SEQ ID NO: 155755 - DNA, 22 bp, synthetic construct
  misc_feature 1..22: note = chemically synthesized
  source 1..22: mol_type = other DNA
catgtagttgagtggttttgag

SEQ ID NO: 155756 - DNA, 22 bp, synthetic construct
  misc_feature 1..22: note = chemically synthesized
  source 1..22: mol_type = other DNA
agtggttttgagtgagtttctt

SEQ ID NO: 155757 - DNA, 22 bp, synthetic construct
  misc_feature 1..22: note = chemically synthesized
  source 1..22: mol_type = other DNA
tgagtgagtttcttaatcctga

SEQ ID NO: 155758 - DNA, 22 bp, synthetic construct
  misc_feature 1..22: note = chemically synthesized
  source 1..22: mol_type = other DNA
gagtgagtttcttaatcctgag

SEQ ID NO: 155759 - DNA, 22 bp, synthetic construct
  misc_feature 1..22: note = chemically synthesized
  source 1..22: mol_type = other DNA
agtgagtttcttaatcctgagt

SEQ ID NO: 155760 - DNA, 22 bp, synthetic construct
  misc_feature 1..22: note = chemically synthesized
  source 1..22: mol_type = other DNA
cttaatcctgagttctagtttg

SEQ ID NO: 155761 - DNA, 22 bp, synthetic construct
  misc_feature 1..22: note = chemically synthesized
  source 1..22: mol_type = other DNA
ttaatcctgagttctagtttga

SEQ ID NO: 155762 - DNA, 22 bp, synthetic construct
  misc_feature 1..22: note = chemically synthesized
  source 1..22: mol_type = other DNA
aatcctgagttctagtttgatt

SEQ ID NO: 155763 - DNA, 22 bp, synthetic construct
  misc_feature 1..22: note = chemically synthesized
  source 1..22: mol_type = other DNA
atcctgagttctagtttgattg

SEQ ID NO: 155764 - DNA, 22 bp, synthetic construct
  misc_feature 1..22: note = chemically synthesized
  source 1..22: mol_type = other DNA
agttctagtttgattgcactgt

SEQ ID NO: 155765 - DNA, 22 bp, synthetic construct
  misc_feature 1..22: note = chemically synthesized
  source 1..22: mol_type = other DNA
tagtttgattgcactgtggtct

SEQ ID NO: 155766 - DNA, 22 bp, synthetic construct
  misc_feature 1..22: note = chemically synthesized
  source 1..22: mol_type = other DNA
gtttgattgcactgtggtctga

SEQ ID NO: 155767 - DNA, 22 bp, synthetic construct
  misc_feature 1..22: note = chemically synthesized
  source 1..22: mol_type = other DNA
gattgcactgtggtctgagaga

SEQ ID NO: 155768 - DNA, 22 bp, synthetic construct
  misc_feature 1..22: note = chemically synthesized
  source 1..22: mol_type = other DNA
attgcactgtggtctgagagac

SEQ ID NO: 155769 - DNA, 22 bp, synthetic construct
  misc_feature 1..22: note = chemically synthesized
  source 1..22: mol_type = other DNA
cactgtggtctgagagacagtt

SEQ ID NO: 155770 - DNA, 22 bp, synthetic construct
  misc_feature 1..22: note = chemically synthesized
  source 1..22: mol_type = other DNA
tggtctgagagacagtttgtta

SEQ ID NO: 155771 - DNA, 22 bp, synthetic construct
  misc_feature 1..22: note = chemically synthesized
  source 1..22: mol_type = other DNA
agagacagtttgttattgtttc

SEQ ID NO: 155772 - DNA, 22 bp, synthetic construct
  misc_feature 1..22: note = chemically synthesized
  source 1..22: mol_type = other DNA
gttattgtttctgttcttttac

SEQ ID NO: 155773 - DNA, 22 bp, synthetic construct
  misc_feature 1..22: note = chemically synthesized
  source 1..22: mol_type = other DNA
ttattgtttctgttcttttacg

SEQ ID NO: 155774 - DNA, 22 bp, synthetic construct
  misc_feature 1..22: note = chemically synthesized
  source 1..22: mol_type = other DNA
ttgtttctgttcttttacgttt

SEQ ID NO: 155775 - DNA, 22 bp, synthetic construct
  misc_feature 1..22: note = chemically synthesized
  source 1..22: mol_type = other DNA
tttctgttcttttacgtttgct

SEQ ID NO: 155776 - DNA, 22 bp, synthetic construct
  misc_feature 1..22: note = chemically synthesized
  source 1..22: mol_type = other DNA
ctgttcttttacgtttgctgag

SEQ ID NO: 155777 - DNA, 22 bp, synthetic construct
  misc_feature 1..22: note = chemically synthesized
  source 1..22: mol_type = other DNA
tgttcttttacgtttgctgagg

SEQ ID NO: 155778 - DNA, 22 bp, synthetic construct
  misc_feature 1..22: note = chemically synthesized
  source 1..22: mol_type = other DNA
ttcttttacgtttgctgaggag

SEQ ID NO: 155779 - DNA, 22 bp, synthetic construct
  misc_feature 1..22: note = chemically synthesized
  source 1..22: mol_type = other DNA
ttttacgtttgctgaggagtgc

SEQ ID NO: 155780 - DNA, 22 bp, synthetic construct
  misc_feature 1..22: note = chemically synthesized
  source 1..22: mol_type = other DNA
ttacgtttgctgaggagtgctt

SEQ ID NO: 155781 - DNA, 22 bp, synthetic construct
  misc_feature 1..22: note = chemically synthesized
  source 1..22: mol_type = other DNA
tacgtttgctgaggagtgcttc

SEQ ID NO: 155782 - DNA, 22 bp, synthetic construct
  misc_feature 1..22: note = chemically synthesized
  source 1..22: mol_type = other DNA
acgtttgctgaggagtgcttca

SEQ ID NO: 155783 - DNA, 22 bp, synthetic construct
  misc_feature 1..22: note = chemically synthesized
  source 1..22: mol_type = other DNA
cgtttgctgaggagtgcttcac

SEQ ID NO: 155784 - DNA, 22 bp, synthetic construct
  misc_feature 1..22: note = chemically synthesized
  source 1..22: mol_type = other DNA
gctgaggagtgcttcacttcca

SEQ ID NO: 155785 - DNA, 22 bp, synthetic construct
  misc_feature 1..22: note = chemically synthesized
  source 1..22: mol_type = other DNA
ctgaggagtgcttcacttccaa

SEQ ID NO: 155786 - DNA, 22 bp, synthetic construct
  misc_feature 1..22: note = chemically synthesized
  source 1..22: mol_type = other DNA
aggagtgcttcacttccaacta

SEQ ID NO: 155787 - DNA, 22 bp, synthetic construct
  misc_feature 1..22: note = chemically synthesized
  source 1..22: mol_type = other DNA
cacttccaactatgtggtcaac

SEQ ID NO: 155788 - DNA, 22 bp, synthetic construct
  misc_feature 1..22: note = chemically synthesized
  source 1..22: mol_type = other DNA
acttccaactatgtggtcaact

SEQ ID NO: 155789 - DNA, 22 bp, synthetic construct
  misc_feature 1..22: note = chemically synthesized
  source 1..22: mol_type = other DNA
ccaactatgtggtcaactggaa

SEQ ID NO: 155790 - DNA, 22 bp, synthetic construct
  misc_feature 1..22: note = chemically synthesized
  source 1..22: mol_type = other DNA
caactatgtggtcaactggaat

SEQ ID NO: 155791 - DNA, 22 bp, synthetic construct
  misc_feature 1..22: note = chemically synthesized
  source 1..22: mol_type = other DNA
tgtggtcaactggaataggtgt

SEQ ID NO: 155792 - DNA, 22 bp, synthetic construct
  misc_feature 1..22: note = chemically synthesized
  source 1..22: mol_type = other DNA
gaataggtgtggtgtggtgctg

SEQ ID NO: 155793 - DNA, 22 bp, synthetic construct
  misc_feature 1..22: note = chemically synthesized
  source 1..22: mol_type = other DNA
agaagaatgtatattctattga

SEQ ID NO: 155794 - DNA, 22 bp, synthetic construct
  misc_feature 1..22: note = chemically synthesized
  source 1..22: mol_type = other DNA
tattgatttgggatggagagtt

SEQ ID NO: 155795 - DNA, 22 bp, synthetic construct
  misc_feature 1..22: note = chemically synthesized
  source 1..22: mol_type = other DNA
ttgatttgggatggagagttct

SEQ ID NO: 155796 - DNA, 22 bp, synthetic construct
  misc_feature 1..22: note = chemically synthesized
  source 1..22: mol_type = other DNA
atttgggatggagagttctgta

SEQ ID NO: 155797 - DNA, 22 bp, synthetic construct
  misc_feature 1..22: note = chemically synthesized
  source 1..22: mol_type = other DNA
gggatggagagttctgtagatg

SEQ ID NO: 155798 - DNA, 22 bp, synthetic construct
  misc_feature 1..22: note = chemically synthesized
  source 1..22: mol_type = other DNA
ggatggagagttctgtagatgt

SEQ ID NO: 155799 - DNA, 22 bp, synthetic construct
  misc_feature 1..22: note = chemically synthesized
  source 1..22: mol_type = other DNA
tgtagatgtctattaggtctgc

SEQ ID NO: 155800 - DNA, 22 bp, synthetic construct
  misc_feature 1..22: note = chemically synthesized
  source 1..22: mol_type = other DNA
tagatgtctattaggtctgctt

SEQ ID NO: 155801 - DNA, 22 bp, synthetic construct
  misc_feature 1..22: note = chemically synthesized
  source 1..22: mol_type = other DNA
ttaggtctgcttggtgcagagc

SEQ ID NO: 155802 - DNA, 22 bp, synthetic construct
  misc_feature 1..22: note = chemically synthesized
  source 1..22: mol_type = other DNA
ggtctgcttggtgcagagctga

SEQ ID NO: 155803 - DNA, 22 bp, synthetic construct
  misc_feature 1..22: note = chemically synthesized
  source 1..22: mol_type = other DNA
cttggtgcagagctgaattcaa

SEQ ID NO: 155804 - DNA, 22 bp, synthetic construct
  misc_feature 1..22: note = chemically synthesized
  source 1..22: mol_type = other DNA
ggtgcagagctgaattcaattc

SEQ ID NO: 155805 - DNA, 22 bp, synthetic construct
  misc_feature 1..22: note = chemically synthesized
  source 1..22: mol_type = other DNA
gtgcagagctgaattcaattcc

SEQ ID NO: 155806 - DNA, 22 bp, synthetic construct
  misc_feature 1..22: note = chemically synthesized
  source 1..22: mol_type = other DNA
aattcaattcctggatatcctt

SEQ ID NO: 155807 - DNA, 22 bp, synthetic construct
  misc_feature 1..22: note = chemically synthesized
  source 1..22: mol_type = other DNA
aattcctggatatccttgttaa

SEQ ID NO: 155808 - DNA, 22 bp, synthetic construct
  misc_feature 1..22: note = chemically synthesized
  source 1..22: mol_type = other DNA
ctggatatccttgttaactttc

SEQ ID NO: 155809 - DNA, 22 bp, synthetic construct
  misc_feature 1..22: note = chemically synthesized
  source 1..22: mol_type = other DNA
gatatccttgttaactttctgt

SEQ ID NO: 155810 - DNA, 22 bp, synthetic construct
  misc_feature 1..22: note = chemically synthesized
  source 1..22: mol_type = other DNA
gttaactttctgtctcgttgat

SEQ ID NO: 155811 - DNA, 22 bp, synthetic construct
  misc_feature 1..22: note = chemically synthesized
  source 1..22: mol_type = other DNA
ttaactttctgtctcgttgatc

SEQ ID NO: 155812 - DNA, 22 bp, synthetic construct
  misc_feature 1..22: note = chemically synthesized
  source 1..22: mol_type = other DNA
actttctgtctcgttgatctgt

SEQ ID NO: 155813 - DNA, 22 bp, synthetic construct
  misc_feature 1..22: note = chemically synthesized
  source 1..22: mol_type = other DNA
tctgtctcgttgatctgtctaa

SEQ ID NO: 155814 - DNA, 22 bp, synthetic construct
  misc_feature 1..22: note = chemically synthesized
  source 1..22: mol_type = other DNA
ctgtctcgttgatctgtctaat

SEQ ID NO: 155815 - DNA, 22 bp, synthetic construct
  misc_feature 1..22: note = chemically synthesized
  source 1..22: mol_type = other DNA
tgtctcgttgatctgtctaatg

SEQ ID NO: 155816 - DNA, 22 bp, synthetic construct
  misc_feature 1..22: note = chemically synthesized
  source 1..22: mol_type = other DNA
tctcgttgatctgtctaatgtt

SEQ ID NO: 155817 - DNA, 22 bp, synthetic construct
  misc_feature 1..22: note = chemically synthesized
  source 1..22: mol_type = other DNA
gttgatctgtctaatgttgaca

SEQ ID NO: 155818 - DNA, 22 bp, synthetic construct
  misc_feature 1..22: note = chemically synthesized
  source 1..22: mol_type = other DNA
atctgtctaatgttgacagtgg

SEQ ID NO: 155819 - DNA, 22 bp, synthetic construct
  misc_feature 1..22: note = chemically synthesized
  source 1..22: mol_type = other DNA
tctaatgttgacagtggggtgt

SEQ ID NO: 155820 - DNA, 22 bp, synthetic construct
  misc_feature 1..22: note = chemically synthesized
  source 1..22: mol_type = other DNA
atgttgacagtggggtgttaaa

SEQ ID NO: 155821 - DNA, 22 bp, synthetic construct
  misc_feature 1..22: note = chemically synthesized
  source 1..22: mol_type = other DNA
acagtggggtgttaaagtctcc

SEQ ID NO: 155822 - DNA, 22 bp, synthetic construct
  misc_feature 1..22: note = chemically synthesized
  source 1..22: mol_type = other DNA
aagtctcccattattattgtgt

SEQ ID NO: 155823 - DNA, 22 bp, synthetic construct
  misc_feature 1..22: note = chemically synthesized
  source 1..22: mol_type = other DNA
ccattattattgtgtgggagtc

SEQ ID NO: 155824 - DNA, 22 bp, synthetic construct
  misc_feature 1..22: note = chemically synthesized
  source 1..22: mol_type = other DNA
ttattgtgtgggagtctaagtc

SEQ ID NO: 155825 - DNA, 22 bp, synthetic construct
  misc_feature 1..22: note = chemically synthesized
  source 1..22: mol_type = other DNA
ttgtgtgggagtctaagtctct

SEQ ID NO: 155826 - DNA, 22 bp, synthetic construct
  misc_feature 1..22: note = chemically synthesized
  source 1..22: mol_type = other DNA
tgtgggagtctaagtctctttg

SEQ ID NO: 155827 - DNA, 22 bp, synthetic construct
  misc_feature 1..22: note = chemically synthesized
  source 1..22: mol_type = other DNA
agtctctttgtaggtctctaag

SEQ ID NO: 155828 - DNA, 22 bp, synthetic construct
  misc_feature 1..22: note = chemically synthesized
  source 1..22: mol_type = other DNA
tttgtaggtctctaaggacttg

SEQ ID NO: 155829 - DNA, 22 bp, synthetic construct
  misc_feature 1..22: note = chemically synthesized
  source 1..22: mol_type = other DNA
tgtaggtctctaaggacttgct

SEQ ID NO: 155830 - DNA, 22 bp, synthetic construct
  misc_feature 1..22: note = chemically synthesized
  source 1..22: mol_type = other DNA
gtaggtctctaaggacttgctt

SEQ ID NO: 155831 - DNA, 22 bp, synthetic construct
  misc_feature 1..22: note = chemically synthesized
  source 1..22: mol_type = other DNA
taggtctctaaggacttgcttt

SEQ ID NO: 155832 - DNA, 22 bp, synthetic construct
  misc_feature 1..22: note = chemically synthesized
  source 1..22: mol_type = other DNA
taaggacttgctttatgaatct

SEQ ID NO: 155833 - DNA, 22 bp, synthetic construct
  misc_feature 1..22: note = chemically synthesized
  source 1..22: mol_type = other DNA
aggacttgctttatgaatctgg

SEQ ID NO: 155834 - DNA, 22 bp, synthetic construct
  misc_feature 1..22: note = chemically synthesized
  source 1..22: mol_type = other DNA
gctttatgaatctgggtgctgc

SEQ ID NO: 155835 - DNA, 22 bp, synthetic construct
  misc_feature 1..22: note = chemically synthesized
  source 1..22: mol_type = other DNA
ctttatgaatctgggtgctgct

SEQ ID NO: 155836 - DNA, 22 bp, synthetic construct
  misc_feature 1..22: note = chemically synthesized
  source 1..22: mol_type = other DNA
tatgaatctgggtgctgctgta

SEQ ID NO: 155837 - DNA, 22 bp, synthetic construct
  misc_feature 1..22: note = chemically synthesized
  source 1..22: mol_type = other DNA
atgaatctgggtgctgctgtat

SEQ ID NO: 155838 - DNA, 22 bp, synthetic construct
  misc_feature 1..22: note = chemically synthesized
  source 1..22: mol_type = other DNA
tgaatctgggtgctgctgtatt

SEQ ID NO: 155839 - DNA, 22 bp, synthetic construct
  misc_feature 1..22: note = chemically synthesized
  source 1..22: mol_type = other DNA
ggtgctgctgtattgggtgcat

SEQ ID NO: 155840 - DNA, 22 bp, synthetic construct
  misc_feature 1..22: note = chemically synthesized
  source 1..22: mol_type = other DNA
ctgtattgggtgcatatatatt

SEQ ID NO: 155841 - DNA, 22 bp, synthetic construct
  misc_feature 1..22: note = chemically synthesized
  source 1..22: mol_type = other DNA
tattgggtgcatatatatttag

SEQ ID NO: 155842 - DNA, 22 bp, synthetic construct
  misc_feature 1..22: note = chemically synthesized
  source 1..22: mol_type = other DNA
ggtgcatatatatttaggatag

SEQ ID NO: 155843 - DNA, 22 bp, synthetic construct
  misc_feature 1..22: note = chemically synthesized
  source 1..22: mol_type = other DNA
aggatagttagctcttcttgtt

SEQ ID NO: 155844 - DNA, 22 bp, synthetic construct
  misc_feature 1..22: note = chemically synthesized
  source 1..22: mol_type = other DNA
ggatagttagctcttcttgttg

SEQ ID NO: 155845 - DNA, 22 bp, synthetic construct
  misc_feature 1..22: note = chemically synthesized
  source 1..22: mol_type = other DNA
gctcttcttgttgaattgatcc

SEQ ID NO: 155846 - DNA, 22 bp, synthetic construct
  misc_feature 1..22: note = chemically synthesized
  source 1..22: mol_type = other DNA
ttcttgttgaattgatcccttt

SEQ ID NO: 155847 - DNA, 22 bp, synthetic construct
  misc_feature 1..22: note = chemically synthesized
  source 1..22: mol_type = other DNA
cttgttgaattgatccctttac

SEQ ID NO: 155848 - DNA, 22 bp, synthetic construct
  misc_feature 1..22: note = chemically synthesized
  source 1..22: mol_type = other DNA
ttgttgaattgatccctttacc

SEQ ID NO: 155849 - DNA, 22 bp, synthetic construct
  misc_feature 1..22: note = chemically synthesized
  source 1..22: mol_type = other DNA
gttgaattgatccctttaccag

SEQ ID NO: 155850 - DNA, 22 bp, synthetic construct
  misc_feature 1..22: note = chemically synthesized
  source 1..22: mol_type = other DNA
ttgaattgatccctttaccagt

SEQ ID NO: 155851 - DNA, 22 bp, synthetic construct
  misc_feature 1..22: note = chemically synthesized
  source 1..22: mol_type = other DNA
aattgatccctttaccagtatg

SEQ ID NO: 155852 - DNA, 22 bp, synthetic construct
  misc_feature 1..22: note = chemically synthesized
  source 1..22: mol_type = other DNA
atccctttaccagtatgtaatg

SEQ ID NO: 155853 - DNA, 22 bp, synthetic construct
  misc_feature 1..22: note = chemically synthesized
  source 1..22: mol_type = other DNA
taccagtatgtaatggccttct

SEQ ID NO: 155854 - DNA, 22 bp, synthetic construct
  misc_feature 1..22: note = chemically synthesized
  source 1..22: mol_type = other DNA
accagtatgtaatggccttctt

SEQ ID NO: 155855 - DNA, 22 bp, synthetic construct
  misc_feature 1..22: note = chemically synthesized
  source 1..22: mol_type = other DNA
ccagtatgtaatggccttcttt

SEQ ID NO: 155856 - DNA, 22 bp, synthetic construct
  misc_feature 1..22: note = chemically synthesized
  source 1..22: mol_type = other DNA
ctttgtctcttttgatctttgt

SEQ ID NO: 155857 - DNA, 22 bp, synthetic construct
  misc_feature 1..22: note = chemically synthesized
  source 1..22: mol_type = other DNA
tttgtctcttttgatctttgtt

SEQ ID NO: 155858 - DNA, 22 bp, synthetic construct
  misc_feature 1..22: note = chemically synthesized
  source 1..22: mol_type = other DNA
tgtctcttttgatctttgttgg

SEQ ID NO: 155859 - DNA, 22 bp, synthetic construct
  misc_feature 1..22: note = chemically synthesized
  source 1..22: mol_type = other DNA
gtctcttttgatctttgttggt

SEQ ID NO: 155860 - DNA, 22 bp, synthetic construct
  misc_feature 1..22: note = chemically synthesized
  source 1..22: mol_type = other DNA
tctcttttgatctttgttggtt

SEQ ID NO: 155861 - DNA, 22 bp, synthetic construct
  misc_feature 1..22: note = chemically synthesized
  source 1..22: mol_type = other DNA
ttttgatctttgttggtttaaa

SEQ ID NO: 155862 - DNA, 22 bp, synthetic construct
  misc_feature 1..22: note = chemically synthesized
  source 1..22: mol_type = other DNA
ttgatctttgttggtttaaagt

SEQ ID NO: 155863 - DNA, 22 bp, synthetic construct
  misc_feature 1..22: note = chemically synthesized
  source 1..22: mol_type = other DNA
tgatctttgttggtttaaagtc

SEQ ID NO: 155864 - DNA, 22 bp, synthetic construct
  misc_feature 1..22: note = chemically synthesized
  source 1..22: mol_type = other DNA
gatctttgttggtttaaagtct

SEQ ID NO: 155865 - DNA, 22 bp, synthetic construct
  misc_feature 1..22: note = chemically synthesized
  source 1..22: mol_type = other DNA
atctttgttggtttaaagtctg

SEQ ID NO: 155866 - DNA, 22 bp, synthetic construct
  misc_feature 1..22: note = chemically synthesized
  source 1..22: mol_type = other DNA
tgttggtttaaagtctgtttta

SEQ ID NO: 155867 - DNA, 22 bp, synthetic construct
  misc_feature 1..22: note = chemically synthesized
  source 1..22: mol_type = other DNA
gttggtttaaagtctgttttat

SEQ ID NO: 155868 - DNA, 22 bp, synthetic construct
  misc_feature 1..22: note = chemically synthesized
  source 1..22: mol_type = other DNA
ttggtttaaagtctgttttatc

SEQ ID NO: 155869 - DNA, 22 bp, synthetic construct
  misc_feature 1..22: note = chemically synthesized
  source 1..22: mol_type = other DNA
gtttaaagtctgttttatcaga

SEQ ID NO: 155870 - DNA, 22 bp, synthetic construct
  misc_feature 1..22: note = chemically synthesized
  source 1..22: mol_type = other DNA
aaagtctgttttatcagagact

SEQ ID NO: 155871 - DNA, 22 bp, synthetic construct
  misc_feature 1..22: note = chemically synthesized
  source 1..22: mol_type = other DNA
aagtctgttttatcagagacta

SEQ ID NO: 155872 - DNA, 22 bp, synthetic construct
  misc_feature 1..22: note = chemically synthesized
  source 1..22: mol_type = other DNA
ttttatcagagactaagattgc

SEQ ID NO: 155873 - DNA, 22 bp, synthetic construct
  misc_feature 1..22: note = chemically synthesized
  source 1..22: mol_type = other DNA
tatcagagactaagattgcaaa

SEQ ID NO: 155874 - DNA, 22 bp, synthetic construct
  misc_feature 1..22: note = chemically synthesized
  source 1..22: mol_type = other DNA
atcagagactaagattgcaaac

SEQ ID NO: 155875 - DNA, 22 bp, synthetic construct
  misc_feature 1..22: note = chemically synthesized
  source 1..22: mol_type = other DNA
tcagagactaagattgcaaacc

SEQ ID NO: 155876 - DNA, 22 bp, synthetic construct
  misc_feature 1..22: note = chemically synthesized
  source 1..22: mol_type = other DNA
agattgcaaaccctgccttttt

SEQ ID NO: 155877 - DNA, 22 bp, synthetic construct
  misc_feature 1..22: note = chemically synthesized
  source 1..22: mol_type = other DNA
caaaccctgccttttttttgtt

SEQ ID NO: 155878 - DNA, 22 bp, synthetic construct
  misc_feature 1..22: note = chemically synthesized
  source 1..22: mol_type = other DNA
ccttttttttgttttccatttg

SEQ ID NO: 155879 - DNA, 22 bp, synthetic construct
  misc_feature 1..22: note = chemically synthesized
  source 1..22: mol_type = other DNA
ttttttgttttccatttgcttg

SEQ ID NO: 155880 - DNA, 22 bp, synthetic construct
  misc_feature 1..22: note = chemically synthesized
  source 1..22: mol_type = other DNA
tttttgttttccatttgcttgg

SEQ ID NO: 155881 - DNA, 22 bp, synthetic construct
  misc_feature 1..22: note = chemically synthesized
  source 1..22: mol_type = other DNA
ttttgttttccatttgcttggt

SEQ ID NO: 155882 - DNA, 22 bp, synthetic construct
  misc_feature 1..22: note = chemically synthesized
  source 1..22: mol_type = other DNA
tttgttttccatttgcttggta

SEQ ID NO: 155883 - DNA, 22 bp, synthetic construct
  misc_feature 1..22: note = chemically synthesized
  source 1..22: mol_type = other DNA
ttgttttccatttgcttggtag

SEQ ID NO: 155884 - DNA, 22 bp, synthetic construct
  misc_feature 1..22: note = chemically synthesized
  source 1..22: mol_type = other DNA
tgttttccatttgcttggtaga

SEQ ID NO: 155885 - DNA, 22 bp, synthetic construct
  misc_feature 1..22: note = chemically synthesized
  source 1..22: mol_type = other DNA
gttttccatttgcttggtagat

SEQ ID NO: 155886 - DNA, 22 bp, synthetic construct
  misc_feature 1..22: note = chemically synthesized
  source 1..22: mol_type = other DNA
ttttccatttgcttggtagatc

SEQ ID NO: 155887 - DNA, 22 bp, synthetic construct
  misc_feature 1..22: note = chemically synthesized
  source 1..22: mol_type = other DNA
tccatttgcttggtagatcttc

SEQ ID NO: 155888 - DNA, 22 bp, synthetic construct
  misc_feature 1..22: note = chemically synthesized
  source 1..22: mol_type = other DNA
ccatttgcttggtagatcttcc

SEQ ID NO: 155889 - DNA, 22 bp, synthetic construct
  misc_feature 1..22: note = chemically synthesized
  source 1..22: mol_type = other DNA
catttgcttggtagatcttcct

SEQ ID NO: 155890 - DNA, 22 bp, synthetic construct
  misc_feature 1..22: note = chemically synthesized
  source 1..22: mol_type = other DNA
gcttggtagatcttcctccatc

SEQ ID NO: 155891 - DNA, 22 bp, synthetic construct
  misc_feature 1..22: note = chemically synthesized
  source 1..22: mol_type = other DNA
cttggtagatcttcctccatcc

SEQ ID NO: 155892 - DNA, 22 bp, synthetic construct
  misc_feature 1..22: note = chemically synthesized
  source 1..22: mol_type = other DNA
ggtagatcttcctccatccctt

SEQ ID NO: 155893 - DNA, 22 bp, synthetic construct
  misc_feature 1..22: note = chemically synthesized
  source 1..22: mol_type = other DNA
gtagatcttcctccatcccttt

SEQ ID NO: 155894 - DNA, 22 bp, synthetic construct
  misc_feature 1..22: note = chemically synthesized
  source 1..22: mol_type = other DNA
cctccatccctttattttgagc

SEQ ID NO: 155895 - DNA, 22 bp, synthetic construct
  misc_feature 1..22: note = chemically synthesized
  source 1..22: mol_type = other DNA
ctccatccctttattttgagcc

SEQ ID NO: 155896 - DNA, 22 bp, synthetic construct
  misc_feature 1..22: note = chemically synthesized
  source 1..22: mol_type = other DNA
catccctttattttgagcctat

SEQ ID NO: 155897 - DNA, 22 bp, synthetic construct
  misc_feature 1..22: note = chemically synthesized
  source 1..22: mol_type = other DNA
tattttgagcctatgtgtgtct

SEQ ID NO: 155898 - DNA, 22 bp, synthetic construct
  misc_feature 1..22: note = chemically synthesized
  source 1..22: mol_type = other DNA
attttgagcctatgtgtgtctc

SEQ ID NO: 155899 - DNA, 22 bp, synthetic construct
  misc_feature 1..22: note = chemically synthesized
  source 1..22: mol_type = other DNA
ttttgagcctatgtgtgtctct

SEQ ID NO: 155900 - DNA, 22 bp, synthetic construct
  misc_feature 1..22: note = chemically synthesized
  source 1..22: mol_type = other DNA
tgagcctatgtgtgtctctcca

SEQ ID NO: 155901 - DNA, 22 bp, synthetic construct
  misc_feature 1..22: note = chemically synthesized
  source 1..22: mol_type = other DNA
gagcctatgtgtgtctctccac

SEQ ID NO: 155902 - DNA, 22 bp, synthetic construct
  misc_feature 1..22: note = chemically synthesized
  source 1..22: mol_type = other DNA
agcctatgtgtgtctctccaca

SEQ ID NO: 155903 - DNA, 22 bp, synthetic construct
  misc_feature 1..22: note = chemically synthesized
  source 1..22: mol_type = other DNA
tgtgtgtctctccacatgagat

SEQ ID NO: 155904 - DNA, 22 bp, synthetic construct
  misc_feature 1..22: note = chemically synthesized
  source 1..22: mol_type = other DNA
tccacatgagattggtttcctg

SEQ ID NO: 155905 - DNA, 22 bp, synthetic construct
  misc_feature 1..22: note = chemically synthesized
  source 1..22: mol_type = other DNA
cacatgagattggtttcctgaa

SEQ ID NO: 155906 - DNA, 22 bp, synthetic construct
  misc_feature 1..22: note = chemically synthesized
  source 1..22: mol_type = other DNA
gtttcctgaatacagcacactg

SEQ ID NO: 155907 - DNA, 22 bp, synthetic construct
  misc_feature 1..22: note = chemically synthesized
  source 1..22: mol_type = other DNA
cctgaatacagcacactgatag

SEQ ID NO: 155908 - DNA, 22 bp, synthetic construct
  misc_feature 1..22: note = chemically synthesized
  source 1..22: mol_type = other DNA
ctgaatacagcacactgatagg

SEQ ID NO: 155909 - DNA, 22 bp, synthetic construct
  misc_feature 1..22: note = chemically synthesized
  source 1..22: mol_type = other DNA
aatacagcacactgataggtct

SEQ ID NO: 155910 - DNA, 22 bp, synthetic construct
  misc_feature 1..22: note = chemically synthesized
  source 1..22: mol_type = other DNA
ataggtcttgactctttatcca

SEQ ID NO: 155911 - DNA, 22 bp, synthetic construct
  misc_feature 1..22: note = chemically synthesized
  source 1..22: mol_type = other DNA
gactctttatccaatttgccag

SEQ ID NO: 155912 - DNA, 22 bp, synthetic construct
  misc_feature 1..22: note = chemically synthesized
  source 1..22: mol_type = other DNA
actctttatccaatttgccagt

SEQ ID NO: 155913 - DNA, 22 bp, synthetic construct
  misc_feature 1..22: note = chemically synthesized
  source 1..22: mol_type = other DNA
tttatccaatttgccagtctgt

SEQ ID NO: 155914 - DNA, 22 bp, synthetic construct
  misc_feature 1..22: note = chemically synthesized
  source 1..22: mol_type = other DNA
tatccaatttgccagtctgtgt

SEQ ID NO: 155915 - DNA, 22 bp, synthetic construct
  misc_feature 1..22: note = chemically synthesized
  source 1..22: mol_type = other DNA
atccaatttgccagtctgtgtc

SEQ ID NO: 155916 - DNA, 22 bp, synthetic construct
  misc_feature 1..22: note = chemically synthesized
  source 1..22: mol_type = other DNA
tccaatttgccagtctgtgtct

SEQ ID NO: 155917 - DNA, 22 bp, synthetic construct
  misc_feature 1..22: note = chemically synthesized
  source 1..22: mol_type = other DNA
gccagtctgtgtcttttaattg

SEQ ID NO: 155918 - DNA, 22 bp, synthetic construct
  misc_feature 1..22: note = chemically synthesized
  source 1..22: mol_type = other DNA
ccagtctgtgtcttttaattgg

SEQ ID NO: 155919 - DNA, 22 bp, synthetic construct
  misc_feature 1..22: note = chemically synthesized
  source 1..22: mol_type = other DNA
tgtcttttaattggagcattta

SEQ ID NO: 155920 - DNA, 22 bp, synthetic construct
  misc_feature 1..22: note = chemically synthesized
  source 1..22: mol_type = other DNA
ttaattggagcatttagctcat

SEQ ID NO: 155921 - DNA, 22 bp, synthetic construct
  misc_feature 1..22: note = chemically synthesized
  source 1..22: mol_type = other DNA
taattggagcatttagctcatt

SEQ ID NO: 155922 - DNA, 22 bp, synthetic construct
  misc_feature 1..22: note = chemically synthesized
  source 1..22: mol_type = other DNA
aattggagcatttagctcattt

SEQ ID NO: 155923 - DNA, 22 bp, synthetic construct
  misc_feature 1..22: note = chemically synthesized
  source 1..22: mol_type = other DNA
attggagcatttagctcattta

SEQ ID NO: 155924 - DNA, 22 bp, synthetic construct
  misc_feature 1..22: note = chemically synthesized
  source 1..22: mol_type = other DNA
gagcatttagctcatttacatt

SEQ ID NO: 155925 - DNA, 22 bp, synthetic construct
  misc_feature 1..22: note = chemically synthesized
  source 1..22: mol_type = other DNA
agctcatttacatttaaggtta

SEQ ID NO: 155926 - DNA, 22 bp, synthetic construct
  misc_feature 1..22: note = chemically synthesized
  source 1..22: mol_type = other DNA
gctcatttacatttaaggttaa

SEQ ID NO: 155927 - DNA, 22 bp, synthetic construct
  misc_feature 1..22: note = chemically synthesized
  source 1..22: mol_type = other DNA
atttacatttaaggttaatatt

SEQ ID NO: 155928 - DNA, 22 bp, synthetic construct
  misc_feature 1..22: note = chemically synthesized
  source 1..22: mol_type = other DNA
acatttaaggttaatattgtta

SEQ ID NO: 155929 - DNA, 22 bp, synthetic construct
  misc_feature 1..22: note = chemically synthesized
  source 1..22: mol_type = other DNA
catttaaggttaatattgttat

SEQ ID NO: 155930 - DNA, 22 bp, synthetic construct
  misc_feature 1..22: note = chemically synthesized
  source 1..22: mol_type = other DNA
aaggttaatattgttatgtgag

SEQ ID NO: 155931 - DNA, 22 bp, synthetic construct
  misc_feature 1..22: note = chemically synthesized
  source 1..22: mol_type = other DNA
aggttaatattgttatgtgaga

SEQ ID NO: 155932 - DNA, 22 bp, synthetic construct
  misc_feature 1..22: note = chemically synthesized
  source 1..22: mol_type = other DNA
atattgttatgtgagaatttga

SEQ ID NO: 155933 - DNA, 22 bp, synthetic construct
  misc_feature 1..22: note = chemically synthesized
  source 1..22: mol_type = other DNA
ttatgtgagaatttgatcctgt

SEQ ID NO: 155934 - DNA, 22 bp, synthetic construct
  misc_feature 1..22: note = chemically synthesized
  source 1..22: mol_type = other DNA
tgtgagaatttgatcctgtcat

SEQ ID NO: 155935 - DNA, 22 bp, synthetic construct
  misc_feature 1..22: note = chemically synthesized
  source 1..22: mol_type = other DNA
gatcctgtcattatgatgttag

SEQ ID NO: 155936 - DNA, 22 bp, synthetic construct
  misc_feature 1..22: note = chemically synthesized
  source 1..22: mol_type = other DNA
atcctgtcattatgatgttagc

SEQ ID NO: 155937 - DNA, 22 bp, synthetic construct
  misc_feature 1..22: note = chemically synthesized
  source 1..22: mol_type = other DNA
tcattatgatgttagctggtta

SEQ ID NO: 155938 - DNA, 22 bp, synthetic construct
  misc_feature 1..22: note = chemically synthesized
  source 1..22: mol_type = other DNA
tgatgttagctggttattttgc

SEQ ID NO: 155939 - DNA, 22 bp, synthetic construct
  misc_feature 1..22: note = chemically synthesized
  source 1..22: mol_type = other DNA
gctggttattttgcttgctagt

SEQ ID NO: 155940 - DNA, 22 bp, synthetic construct
  misc_feature 1..22: note = chemically synthesized
  source 1..22: mol_type = other DNA
gttattttgcttgctagttgat

SEQ ID NO: 155941 - DNA, 22 bp, synthetic construct
  misc_feature 1..22: note = chemically synthesized
  source 1..22: mol_type = other DNA
ttttgcttgctagttgatgcag

SEQ ID NO: 155942 - DNA, 22 bp, synthetic construct
  misc_feature 1..22: note = chemically synthesized
  source 1..22: mol_type = other DNA
tgcttgctagttgatgcagttt

SEQ ID NO: 155943 - DNA, 22 bp, synthetic construct
  misc_feature 1..22: note = chemically synthesized
  source 1..22: mol_type = other DNA
gcttgctagttgatgcagtttc

SEQ ID NO: 155944 - DNA, 22 bp, synthetic construct
  misc_feature 1..22: note = chemically synthesized
  source 1..22: mol_type = other DNA
cttgctagttgatgcagtttct

SEQ ID NO: 155945 - DNA, 22 bp, synthetic construct
  misc_feature 1..22: note = chemically synthesized
  source 1..22: mol_type = other DNA
gctagttgatgcagtttctccc

SEQ ID NO: 155946 - DNA, 22 bp, synthetic construct
  misc_feature 1..22: note = chemically synthesized
  source 1..22: mol_type = other DNA
ctagttgatgcagtttctccct

SEQ ID NO: 155947 - DNA, 22 bp, synthetic construct
  misc_feature 1..22: note = chemically synthesized
  source 1..22: mol_type = other DNA
gttgatgcagtttctccctagc

SEQ ID NO: 155948 - DNA, 22 bp, synthetic construct
  misc_feature 1..22: note = chemically synthesized
  source 1..22: mol_type = other DNA
atgcagtttctccctagccttg

SEQ ID NO: 155949 - DNA, 22 bp, synthetic construct
  misc_feature 1..22: note = chemically synthesized
  source 1..22: mol_type = other DNA
ctccctagccttgatggtcttt

SEQ ID NO: 155950 - DNA, 22 bp, synthetic construct
  misc_feature 1..22: note = chemically synthesized
  source 1..22: mol_type = other DNA
tccctagccttgatggtcttta

SEQ ID NO: 155951 - DNA, 22 bp, synthetic construct
  misc_feature 1..22: note = chemically synthesized
  source 1..22: mol_type = other DNA
cctagccttgatggtctttaca

SEQ ID NO: 155952 - DNA, 22 bp, synthetic construct
  misc_feature 1..22: note = chemically synthesized
  source 1..22: mol_type = other DNA
gccttgatggtctttacaattt

SEQ ID NO: 155953 - DNA, 22 bp, synthetic construct
  misc_feature 1..22: note = chemically synthesized
  source 1..22: mol_type = other DNA
gatggtctttacaatttggcat

SEQ ID NO: 155954 - DNA, 22 bp, synthetic construct
  misc_feature 1..22: note = chemically synthesized
  source 1..22: mol_type = other DNA
atggtctttacaatttggcatg

SEQ ID NO: 155955 - DNA, 22 bp, synthetic construct
  misc_feature 1..22: note = chemically synthesized
  source 1..22: mol_type = other DNA
tacaatttggcatgtttttgca

SEQ ID NO: 155956 - DNA, 22 bp, synthetic construct
  misc_feature 1..22: note = chemically synthesized
  source 1..22: mol_type = other DNA
acaatttggcatgtttttgcag

SEQ ID NO: 155957 - DNA, 22 bp, synthetic construct
  misc_feature 1..22: note = chemically synthesized
  source 1..22: mol_type = other DNA
caatttggcatgtttttgcagt

SEQ ID NO: 155958 - DNA, 22 bp, synthetic construct
  misc_feature 1..22: note = chemically synthesized
  source 1..22: mol_type = other DNA
ggcatgtttttgcagtggctgg

SEQ ID NO: 155959 - DNA, 22 bp, synthetic construct
  misc_feature 1..22: note = chemically synthesized
  source 1..22: mol_type = other DNA
gcatgtttttgcagtggctggt

SEQ ID NO: 155960 - DNA, 22 bp, synthetic construct
  misc_feature 1..22: note = chemically synthesized
  source 1..22: mol_type = other DNA
ttgcagtggctggtactggttg

SEQ ID NO: 155961 - DNA, 22 bp, synthetic construct
  misc_feature 1..22: note = chemically synthesized
  source 1..22: mol_type = other DNA
tgcagtggctggtactggttgt

SEQ ID NO: 155962 - DNA, 22 bp, synthetic construct
  misc_feature 1..22: note = chemically synthesized
  source 1..22: mol_type = other DNA
gcagtggctggtactggttgtt

SEQ ID NO: 155963 - DNA, 22 bp, synthetic construct
  misc_feature 1..22: note = chemically synthesized
  source 1..22: mol_type = other DNA
cagtggctggtactggttgttt

SEQ ID NO: 155964 - DNA, 22 bp, synthetic construct
  misc_feature 1..22: note = chemically synthesized
  source 1..22: mol_type = other DNA
gtactggttgtttctttccatg

SEQ ID NO: 155965 - DNA, 22 bp, synthetic construct
  misc_feature 1..22: note = chemically synthesized
  source 1..22: mol_type = other DNA
gttgtttctttccatgtttact

SEQ ID NO: 155966 - DNA, 22 bp, synthetic construct
  misc_feature 1..22: note = chemically synthesized
  source 1..22: mol_type = other DNA
tttctttccatgtttactgctt

SEQ ID NO: 155967 - DNA, 22 bp, synthetic construct
  misc_feature 1..22: note = chemically synthesized
  source 1..22: mol_type = other DNA
ctttccatgtttactgcttcct

SEQ ID NO: 155968 - DNA, 22 bp, synthetic construct
  misc_feature 1..22: note = chemically synthesized
  source 1..22: mol_type = other DNA
tttccatgtttactgcttcctt

SEQ ID NO: 155969 - DNA, 22 bp, synthetic construct
  misc_feature 1..22: note = chemically synthesized
  source 1..22: mol_type = other DNA
tccatgtttactgcttccttca

SEQ ID NO: 155970 - DNA, 22 bp, synthetic construct
  misc_feature 1..22: note = chemically synthesized
  source 1..22: mol_type = other DNA
ccatgtttactgcttccttcag

SEQ ID NO: 155971 - DNA, 22 bp, synthetic construct
  misc_feature 1..22: note = chemically synthesized
  source 1..22: mol_type = other DNA
catgtttactgcttccttcagg

SEQ ID NO: 155972 - DNA, 22 bp, synthetic construct
  misc_feature 1..22: note = chemically synthesized
  source 1..22: mol_type = other DNA
actgcttccttcaggagctctt

SEQ ID NO: 155973 - DNA, 22 bp, synthetic construct
  misc_feature 1..22: note = chemically synthesized
  source 1..22: mol_type = other DNA
ctgcttccttcaggagctcttt

SEQ ID NO: 155974 - DNA, 22 bp, synthetic construct
  misc_feature 1..22: note = chemically synthesized
  source 1..22: mol_type = other DNA
cttccttcaggagctcttttag

SEQ ID NO: 155975 - DNA, 22 bp, synthetic construct
  misc_feature 1..22: note = chemically synthesized
  source 1..22: mol_type = other DNA
ccttcaggagctcttttagggc

SEQ ID NO: 155976 - DNA, 22 bp, synthetic construct
  misc_feature 1..22: note = chemically synthesized
  source 1..22: mol_type = other DNA
cttcaggagctcttttagggca

SEQ ID NO: 155977 - DNA, 22 bp, synthetic construct
  misc_feature 1..22: note = chemically synthesized
  source 1..22: mol_type = other DNA
caggagctcttttagggcaggc

SEQ ID NO: 155978 - DNA, 22 bp, synthetic construct
  misc_feature 1..22: note = chemically synthesized
  source 1..22: mol_type = other DNA
aggagctcttttagggcaggcc

SEQ ID NO: 155979 - DNA, 22 bp, synthetic construct
  misc_feature 1..22: note = chemically synthesized
  source 1..22: mol_type = other DNA
ttttagggcaggcctggtggtg

SEQ ID NO: 155980 - DNA, 22 bp, synthetic construct
  misc_feature 1..22: note = chemically synthesized
  source 1..22: mol_type = other DNA
ttagggcaggcctggtggtgac

SEQ ID NO: 155981 - DNA, 22 bp, synthetic construct
  misc_feature 1..22: note = chemically synthesized
  source 1..22: mol_type = other DNA
tagggcaggcctggtggtgaca

SEQ ID NO: 155982 - DNA, 22 bp, synthetic construct
  misc_feature 1..22: note = chemically synthesized
  source 1..22: mol_type = other DNA
agggcaggcctggtggtgacaa

SEQ ID NO: 155983 - DNA, 22 bp, synthetic construct
  misc_feature 1..22: note = chemically synthesized
  source 1..22: mol_type = other DNA
gggcaggcctggtggtgacaaa

SEQ ID NO: 155984 - DNA, 22 bp, synthetic construct
  misc_feature 1..22: note = chemically synthesized
  source 1..22: mol_type = other DNA
gtggtgacaaaatcagcaattg

SEQ ID NO: 155985 - DNA, 22 bp, synthetic construct
  misc_feature 1..22: note = chemically synthesized
  source 1..22: mol_type = other DNA
cttgtctgtaaagtattttatt

SEQ ID NO: 155986 - DNA, 22 bp, synthetic construct
  misc_feature 1..22: note = chemically synthesized
  source 1..22: mol_type = other DNA
gtctgtaaagtattttatttct

SEQ ID NO: 155987 - DNA, 22 bp, synthetic construct
  misc_feature 1..22: note = chemically synthesized
  source 1..22: mol_type = other DNA
tctgtaaagtattttatttctc

SEQ ID NO: 155988 - DNA, 22 bp, synthetic construct
  misc_feature 1..22: note = chemically synthesized
  source 1..22: mol_type = other DNA
taaagtattttatttctccttc

SEQ ID NO: 155989 - DNA, 22 bp, synthetic construct
  misc_feature 1..22: note = chemically synthesized
  source 1..22: mol_type = other DNA
tatttctccttcacttatgaag

SEQ ID NO: 155990 - DNA, 22 bp, synthetic construct
  misc_feature 1..22: note = chemically synthesized
  source 1..22: mol_type = other DNA
atttctccttcacttatgaagc

SEQ ID NO: 155991 - DNA, 22 bp, synthetic construct
  misc_feature 1..22: note = chemically synthesized
  source 1..22: mol_type = other DNA
tttctccttcacttatgaagct

SEQ ID NO: 155992 - DNA, 22 bp, synthetic construct
  misc_feature 1..22: note = chemically synthesized
  source 1..22: mol_type = other DNA
ctccttcacttatgaagcttac

SEQ ID NO: 155993 - DNA, 22 bp, synthetic construct
  misc_feature 1..22: note = chemically synthesized
  source 1..22: mol_type = other DNA
tccttcacttatgaagcttacc

SEQ ID NO: 155994 - DNA, 22 bp, synthetic construct
  misc_feature 1..22: note = chemically synthesized
  source 1..22: mol_type = other DNA
cttcacttatgaagcttaccaa

SEQ ID NO: 155995 - DNA, 22 bp, synthetic construct
  misc_feature 1..22: note = chemically synthesized
  source 1..22: mol_type = other DNA
cacttatgaagcttaccaacca

SEQ ID NO: 155996 - DNA, 22 bp, synthetic construct
  misc_feature 1..22: note = chemically synthesized
  source 1..22: mol_type = other DNA
acttatgaagcttaccaaccaa

SEQ ID NO: 155997 - DNA, 22 bp, synthetic construct
  misc_feature 1..22: note = chemically synthesized
  source 1..22: mol_type = other DNA
atgaagcttaccaaccaaaaaa

SEQ ID NO: 155998 - DNA, 22 bp, synthetic construct
  misc_feature 1..22: note = chemically synthesized
  source 1..22: mol_type = other DNA
tgaagcttaccaaccaaaaaaa

SEQ ID NO: 155999 - DNA, 22 bp, synthetic construct
  misc_feature 1..22: note = chemically synthesized
  source 1..22: mol_type = other DNA
accaaccaaaaaaagtccagga

SEQ ID NO: 156000 - DNA, 22 bp, synthetic construct
  misc_feature 1..22: note = chemically synthesized
  source 1..22: mol_type = other DNA
ccaaccaaaaaaagtccaggac

SEQ ID NO: 156001 - DNA, 22 bp, synthetic construct
  misc_feature 1..22: note = chemically synthesized
  source 1..22: mol_type = other DNA
acagccgaattctaccagaggt

SEQ ID NO: 156002 - DNA, 22 bp, synthetic construct
  misc_feature 1..22: note = chemically synthesized
  source 1..22: mol_type = other DNA
taccagaggtacaaggaggagc

SEQ ID NO: 156003 - DNA, 22 bp, synthetic construct
  misc_feature 1..22: note = chemically synthesized
  source 1..22: mol_type = other DNA
ccagaggtacaaggaggagctg

SEQ ID NO: 156004 - DNA, 22 bp, synthetic construct
  misc_feature 1..22: note = chemically synthesized
  source 1..22: mol_type = other DNA
gtaccattccttctgaaactat

SEQ ID NO: 156005 - DNA, 22 bp, synthetic construct
  misc_feature 1..22: note = chemically synthesized
  source 1..22: mol_type = other DNA
cttctgaaactattccaatcaa

SEQ ID NO: 156006 - DNA, 22 bp, synthetic construct
  misc_feature 1..22: note = chemically synthesized
  source 1..22: mol_type = other DNA
ctgaaactattccaatcaatag

SEQ ID NO: 156007 - DNA, 22 bp, synthetic construct
  misc_feature 1..22: note = chemically synthesized
  source 1..22: mol_type = other DNA
tgaaactattccaatcaataga

SEQ ID NO: 156008 - DNA, 22 bp, synthetic construct
  misc_feature 1..22: note = chemically synthesized
  source 1..22: mol_type = other DNA
aaactattccaatcaatagaaa

SEQ ID NO: 156009 - DNA, 22 bp, synthetic construct
  misc_feature 1..22: note = chemically synthesized
  source 1..22: mol_type = other DNA
ttccaatcaatagaaaaagagg

SEQ ID NO: 156010 - DNA, 22 bp, synthetic construct
  misc_feature 1..22: note = chemically synthesized
  source 1..22: mol_type = other DNA
caatcaatagaaaaagagggaa

SEQ ID NO: 156011 - DNA, 22 bp, synthetic construct
  misc_feature 1..22: note = chemically synthesized
  source 1..22: mol_type = other DNA
cctaactcattttatgaggcca

SEQ ID NO: 156012 - DNA, 22 bp, synthetic construct
  misc_feature 1..22: note = chemically synthesized
  source 1..22: mol_type = other DNA
actcattttatgaggccagcat

SEQ ID NO: 156013 - DNA, 22 bp, synthetic construct
  misc_feature 1..22: note = chemically synthesized
  source 1..22: mol_type = other DNA
attttatgaggccagcatcatc

SEQ ID NO: 156014 - DNA, 22 bp, synthetic construct
  misc_feature 1..22: note = chemically synthesized
  source 1..22: mol_type = other DNA
tatgaggccagcatcatcttga

SEQ ID NO: 156015 - DNA, 22 bp, synthetic construct
  misc_feature 1..22: note = chemically synthesized
  source 1..22: mol_type = other DNA
atgaggccagcatcatcttgat

SEQ ID NO: 156016 - DNA, 22 bp, synthetic construct
  misc_feature 1..22: note = chemically synthesized
  source 1..22: mol_type = other DNA
tgaggccagcatcatcttgata

SEQ ID NO: 156017 - DNA, 22 bp, synthetic construct
  misc_feature 1..22: note = chemically synthesized
  source 1..22: mol_type = other DNA
gataccaaagcctagcagacac

SEQ ID NO: 156018 - DNA, 22 bp, synthetic construct
  misc_feature 1..22: note = chemically synthesized
  source 1..22: mol_type = other DNA
ataccaaagcctagcagacaca

SEQ ID NO: 156019 - DNA, 22 bp, synthetic construct
  misc_feature 1..22: note = chemically synthesized
  source 1..22: mol_type = other DNA
gcagacacacaacaaaaaaaga

SEQ ID NO: 156020 - DNA, 22 bp, synthetic construct
  misc_feature 1..22: note = chemically synthesized
  source 1..22: mol_type = other DNA
tacaccaatatccctgatgaac

SEQ ID NO: 156021 - DNA, 22 bp, synthetic construct
  misc_feature 1..22: note = chemically synthesized
  source 1..22: mol_type = other DNA
acaccaatatccctgatgaaca

SEQ ID NO: 156022 - DNA, 22 bp, synthetic construct
  misc_feature 1..22: note = chemically synthesized
  source 1..22: mol_type = other DNA
caccaatatccctgatgaacat

SEQ ID NO: 156023 - DNA, 22 bp, synthetic construct
  misc_feature 1..22: note = chemically synthesized
  source 1..22: mol_type = other DNA
atgaacatcgatgcaaaaatcc

SEQ ID NO: 156024 - DNA, 22 bp, synthetic construct
  misc_feature 1..22: note = chemically synthesized
  source 1..22: mol_type = other DNA
agtaaaatactggcaaaccaaa

SEQ ID NO: 156025 - DNA, 22 bp, synthetic construct
  misc_feature 1..22: note = chemically synthesized
  source 1..22: mol_type = other DNA
gcaaaccaaatccaggagcaca

SEQ ID NO: 156026 - DNA, 22 bp, synthetic construct
  misc_feature 1..22: note = chemically synthesized
  source 1..22: mol_type = other DNA
atccaccatgatcaagtgggct

SEQ ID NO: 156027 - DNA, 22 bp, synthetic construct
  misc_feature 1..22: note = chemically synthesized
  source 1..22: mol_type = other DNA
tccaccatgatcaagtgggctt

SEQ ID NO: 156028 - DNA, 22 bp, synthetic construct
  misc_feature 1..22: note = chemically synthesized
  source 1..22: mol_type = other DNA
catccctgggatgcagggctgg

SEQ ID NO: 156029 - DNA, 22 bp, synthetic construct
  misc_feature 1..22: note = chemically synthesized
  source 1..22: mol_type = other DNA
atccctgggatgcagggctggt

SEQ ID NO: 156030 - DNA, 22 bp, synthetic construct
  misc_feature 1..22: note = chemically synthesized
  source 1..22: mol_type = other DNA
ggatgcagggctggttcaacat

SEQ ID NO: 156031 - DNA, 22 bp, synthetic construct
  misc_feature 1..22: note = chemically synthesized
  source 1..22: mol_type = other DNA
gttcaacatatgcaaatcaata

SEQ ID NO: 156032 - DNA, 22 bp, synthetic construct
  misc_feature 1..22: note = chemically synthesized
  source 1..22: mol_type = other DNA
aacatatgcaaatcaataaaca

SEQ ID NO: 156033 - DNA, 22 bp, synthetic construct
  misc_feature 1..22: note = chemically synthesized
  source 1..22: mol_type = other DNA
tctcaatagatgcagaaaaggc

SEQ ID NO: 156034 - DNA, 22 bp, synthetic construct
  misc_feature 1..22: note = chemically synthesized
  source 1..22: mol_type = other DNA
aatagatgcagaaaaggccttt

SEQ ID NO: 156035 - DNA, 22 bp, synthetic construct
  misc_feature 1..22: note = chemically synthesized
  source 1..22: mol_type = other DNA
tgacaaaattcaacaatgcttc

SEQ ID NO: 156036 - DNA, 22 bp, synthetic construct
  misc_feature 1..22: note = chemically synthesized
  source 1..22: mol_type = other DNA
gacaaaattcaacaatgcttca

SEQ ID NO: 156037 - DNA, 22 bp, synthetic construct
  misc_feature 1..22: note = chemically synthesized
  source 1..22: mol_type = other DNA
acaaaattcaacaatgcttcat

SEQ ID NO: 156038 - DNA, 22 bp, synthetic construct
  misc_feature 1..22: note = chemically synthesized
  source 1..22: mol_type = other DNA
aacaatgcttcatactaaaaac

SEQ ID NO: 156039 - DNA, 22 bp, synthetic construct
  misc_feature 1..22: note = chemically synthesized
  source 1..22: mol_type = other DNA
catactaaaaactctcaataaa

SEQ ID NO: 156040 - DNA, 22 bp, synthetic construct
  misc_feature 1..22: note = chemically synthesized
  source 1..22: mol_type = other DNA
atactaaaaactctcaataaat

SEQ ID NO: 156041 - DNA, 22 bp, synthetic construct
  misc_feature 1..22: note = chemically synthesized
  source 1..22: mol_type = other DNA
aaaactctcaataaattaggta

SEQ ID NO: 156042 - DNA, 22 bp, synthetic construct
  misc_feature 1..22: note = chemically synthesized
  source 1..22: mol_type = other DNA
tcaataaattaggtatcgatgg

SEQ ID NO: 156043 - DNA, 22 bp, synthetic construct
  misc_feature 1..22: note = chemically synthesized
  source 1..22: mol_type = other DNA
aataaattaggtatcgatggga

SEQ ID NO: 156044 - DNA, 22 bp, synthetic construct
  misc_feature 1..22: note = chemically synthesized
  source 1..22: mol_type = other DNA
ggtatcgatgggacatatctca

SEQ ID NO: 156045 - DNA, 22 bp, synthetic construct
  misc_feature 1..22: note = chemically synthesized
  source 1..22: mol_type = other DNA
aaaataataagagctatctatg

SEQ ID NO: 156046 - DNA, 22 bp, synthetic construct
  misc_feature 1..22: note = chemically synthesized
  source 1..22: mol_type = other DNA
tctatgacaaacccacagccaa

SEQ ID NO: 156047 - DNA, 22 bp, synthetic construct
  misc_feature 1..22: note = chemically synthesized
  source 1..22: mol_type = other DNA
tgacaaacccacagccaatatc

SEQ ID NO: 156048 - DNA, 22 bp, synthetic construct
  misc_feature 1..22: note = chemically synthesized
  source 1..22: mol_type = other DNA
aatggacaaaaactggaagcat

SEQ ID NO: 156049 - DNA, 22 bp, synthetic construct
  misc_feature 1..22: note = chemically synthesized
  source 1..22: mol_type = other DNA
gaagcattccctttgaaaactg

SEQ ID NO: 156050 - DNA, 22 bp, synthetic construct
  misc_feature 1..22: note = chemically synthesized
  source 1..22: mol_type = other DNA
cctttgaaaactggcacaagac

SEQ ID NO: 156051 - DNA, 22 bp, synthetic construct
  misc_feature 1..22: note = chemically synthesized
  source 1..22: mol_type = other DNA
tgaaaactggcacaagacaggg

SEQ ID NO: 156052 - DNA, 22 bp, synthetic construct
  misc_feature 1..22: note = chemically synthesized
  source 1..22: mol_type = other DNA
gaaaactggcacaagacaggga

SEQ ID NO: 156053 - DNA, 22 bp, synthetic construct
  misc_feature 1..22: note = chemically synthesized
  source 1..22: mol_type = other DNA
aaaactggcacaagacagggat

SEQ ID NO: 156054 - DNA, 22 bp, synthetic construct
  misc_feature 1..22: note = chemically synthesized
  source 1..22: mol_type = other DNA
gcacaagacagggatgccctct

SEQ ID NO: 156055 - DNA, 22 bp, synthetic construct
  misc_feature 1..22: note = chemically synthesized
  source 1..22: mol_type = other DNA
tctcaccactcctattcaacat

SEQ ID NO: 156056 - DNA, 22 bp, synthetic construct
  source 1..22: mol_type = other DNA
tcaccactcctattcaacatag

SEQ ID NO: 156057 - DNA, 22 bp, synthetic construct
  misc_feature 1..22: note = chemically synthesized
  source 1..22: mol_type = other DNA
accactcctattcaacatagtg

SEQ ID NO: 156058 - DNA, 22 bp, synthetic construct
  misc_feature 1..22: note = chemically synthesized
  source 1..22: mol_type = other DNA
ctattcaacatagtgttggaag

SEQ ID NO: 156059 - DNA, 22 bp, synthetic construct
  misc_feature 1..22: note = chemically synthesized
  source 1..22: mol_type = other DNA
ttcaacatagtgttggaagttc

SEQ ID NO: 156060 - DNA, 22 bp, synthetic construct
  misc_feature 1..22: note = chemically synthesized
  source 1..22: mol_type = other DNA
aacatagtgttggaagttctgg

SEQ ID NO: 156061 - DNA, 22 bp, synthetic construct
  misc_feature 1..22: note = chemically synthesized
  source 1..22: mol_type = other DNA
gaagttctggccagggcaatca

SEQ ID NO: 156062 - DNA, 22 bp, synthetic construct
  misc_feature 1..22: note = chemically synthesized
  source 1..22: mol_type = other DNA
tggccagggcaatcaggcaaga

SEQ ID NO: 156063 - DNA, 22 bp, synthetic construct
  misc_feature 1..22: note = chemically synthesized
  source 1..22: mol_type = other DNA
gccagggcaatcaggcaagaga

SEQ ID NO: 156064 - DNA, 22 bp, synthetic construct
  misc_feature 1..22: note = chemically synthesized
  source 1..22: mol_type = other DNA
aattaggaaaagaggaagtgaa

SEQ ID NO: 156065 - DNA, 22 bp, synthetic construct
  misc_feature 1..22: note = chemically synthesized
  source 1..22: mol_type = other DNA
ggaaaagaggaagtgaaattgt

SEQ ID NO: 156066 - DNA, 22 bp, synthetic construct
  misc_feature 1..22: note = chemically synthesized
  source 1..22: mol_type = other DNA
tccctgtttgcagatgacgtga

SEQ ID NO: 156067 - DNA, 22 bp, synthetic construct
  misc_feature 1..22: note = chemically synthesized
  source 1..22: mol_type = other DNA
tttgcagatgacgtgattgtat

SEQ ID NO: 156068 - DNA, 22 bp, synthetic construct
  misc_feature 1..22: note = chemically synthesized
  source 1..22: mol_type = other DNA
gcagatgacgtgattgtatatc

SEQ ID NO: 156069 - DNA, 22 bp, synthetic construct
  misc_feature 1..22: note = chemically synthesized
  source 1..22: mol_type = other DNA
cagatgacgtgattgtatatct

SEQ ID NO: 156070 - DNA, 22 bp, synthetic construct
  misc_feature 1..22: note = chemically synthesized
  source 1..22: mol_type = other DNA
tatatctagaaaaccccatcgt

SEQ ID NO: 156071 - DNA, 22 bp, synthetic construct
  misc_feature 1..22: note = chemically synthesized
  source 1..22: mol_type = other DNA
gaaaaccccatcgtctcagccc

SEQ ID NO: 156072 - DNA, 22 bp, synthetic construct
  misc_feature 1..22: note = chemically synthesized
  source 1..22: mol_type = other DNA
agcccaaaatctccttaagctg

SEQ ID NO: 156073 - DNA, 22 bp, synthetic construct
  misc_feature 1..22: note = chemically synthesized
  source 1..22: mol_type = other DNA
cttaagctgataagcaacttca

SEQ ID NO: 156074 - DNA, 22 bp, synthetic construct
  misc_feature 1..22: note = chemically synthesized
  source 1..22: mol_type = other DNA
aagctgataagcaacttcagaa

SEQ ID NO: 156075 - DNA, 22 bp, synthetic construct
  misc_feature 1..22: note = chemically synthesized
  source 1..22: mol_type = other DNA
agctgataagcaacttcagaaa

SEQ ID NO: 156076 - DNA, 22 bp, synthetic construct
  misc_feature 1..22: note = chemically synthesized
  source 1..22: mol_type = other DNA
ataagcaacttcagaaaagtct

SEQ ID NO: 156077 - DNA, 22 bp, synthetic construct
  misc_feature 1..22: note = chemically synthesized
  source 1..22: mol_type = other DNA
cagaaaagtctcagcatacaaa

SEQ ID NO: 156078 - DNA, 22 bp, synthetic construct
  misc_feature 1..22: note = chemically synthesized
  source 1..22: mol_type = other DNA
agaaaagtctcagcatacaaaa

SEQ ID NO: 156079 - DNA, 22 bp, synthetic construct
  misc_feature 1..22: note = chemically synthesized
  source 1..22: mol_type = other DNA
agcatacaaaatcaatgtgcaa

SEQ ID NO: 156080 - DNA, 22 bp, synthetic construct
  misc_feature 1..22: note = chemically synthesized
  source 1..22: mol_type = other DNA
ctatacaccaataacagacaaa

SEQ ID NO: 156081 - DNA, 22 bp, synthetic construct
  misc_feature 1..22: note = chemically synthesized
  source 1..22: mol_type = other DNA
tacaccaataacagacaaacag

SEQ ID NO: 156082 - DNA, 22 bp, synthetic construct
  misc_feature 1..22: note = chemically synthesized
  source 1..22: mol_type = other DNA
ccattcacaattgcctcaaaga

SEQ ID NO: 156083 - DNA, 22 bp, synthetic construct
  misc_feature 1..22: note = chemically synthesized
  source 1..22: mol_type = other DNA
acaattgcctcaaagagaataa

SEQ ID NO: 156084 - DNA, 22 bp, synthetic construct
  misc_feature 1..22: note = chemically synthesized
  source 1..22: mol_type = other DNA
cctcaaagagaataaaatacct

SEQ ID NO: 156085 - DNA, 22 bp, synthetic construct
  misc_feature 1..22: note = chemically synthesized
  source 1..22: mol_type = other DNA
aaagagaataaaatacctagga

SEQ ID NO: 156086 - DNA, 22 bp, synthetic construct
  misc_feature 1..22: note = chemically synthesized
  source 1..22: mol_type = other DNA
ggaatccaacttacaagggatg

SEQ ID NO: 156087 - DNA, 22 bp, synthetic construct
  misc_feature 1..22: note = chemically synthesized
  source 1..22: mol_type = other DNA
acaagggatgtgaaggacctct

SEQ ID NO: 156088 - DNA, 22 bp, synthetic construct
  misc_feature 1..22: note = chemically synthesized
  source 1..22: mol_type = other DNA
caagggatgtgaaggacctctt

SEQ ID NO: 156089 - DNA, 22 bp, synthetic construct
  misc_feature 1..22: note = chemically synthesized
  source 1..22: mol_type = other DNA
ttcaaggagaacaacaaaacac

SEQ ID NO: 156090 - DNA, 22 bp, synthetic construct
  misc_feature 1..22: note = chemically synthesized
  source 1..22: mol_type = other DNA
caaggagaacaacaaaacactg

SEQ ID NO: 156091 - DNA, 22 bp, synthetic construct
  misc_feature 1..22: note = chemically synthesized
  source 1..22: mol_type = other DNA
aaggagaacaacaaaacactgc

SEQ ID NO: 156092 - DNA, 22 bp, synthetic construct
  misc_feature 1..22: note = chemically synthesized
  source 1..22: mol_type = other DNA
ctcaacgaaataaaagaggata

SEQ ID NO: 156093 - DNA, 22 bp, synthetic construct
  misc_feature 1..22: note = chemically synthesized
  source 1..22: mol_type = other DNA
aacgaaataaaagaggatacaa

SEQ ID NO: 156094 - DNA, 22 bp, synthetic construct
  misc_feature 1..22: note = chemically synthesized
  source 1..22: mol_type = other DNA
catgctcatggataggaagaat

SEQ ID NO: 156095 - DNA, 22 bp, synthetic construct
  misc_feature 1..22: note = chemically synthesized
  source 1..22: mol_type = other DNA
atggataggaagaatcaatatc

SEQ ID NO: 156096 - DNA, 22 bp, synthetic construct
  misc_feature 1..22: note = chemically synthesized
  source 1..22: mol_type = other DNA
actgcccaaggtaatttataga

SEQ ID NO: 156097 - DNA, 22 bp, synthetic construct
  misc_feature 1..22: note = chemically synthesized
  source 1..22: mol_type = other DNA
ctgcccaaggtaatttatagat

SEQ ID NO: 156098 - DNA, 22 bp, synthetic construct
  misc_feature 1..22: note = chemically synthesized
  source 1..22: mol_type = other DNA
cccaaggtaatttatagattca

SEQ ID NO: 156099 - DNA, 22 bp, synthetic construct
  misc_feature 1..22: note = chemically synthesized
  source 1..22: mol_type = other DNA
atagattcaatgccatccccat

SEQ ID NO: 156100 - DNA, 22 bp, synthetic construct
  misc_feature 1..22: note = chemically synthesized
  source 1..22: mol_type = other DNA
tagattcaatgccatccccatc

SEQ ID NO: 156101 - DNA, 22 bp, synthetic construct
  misc_feature 1..22: note = chemically synthesized
  source 1..22: mol_type = other DNA
aatgccatccccatcaagctac

SEQ ID NO: 156102 - DNA, 22 bp, synthetic construct
  misc_feature 1..22: note = chemically synthesized
  source 1..22: mol_type = other DNA
ccaatgactttcttcacagaat

SEQ ID NO: 156103 - DNA, 22 bp, synthetic construct
  misc_feature 1..22: note = chemically synthesized
  source 1..22: mol_type = other DNA
tcttcacagaattggaaaaaac

SEQ ID NO: 156104 - DNA, 22 bp, synthetic construct
  misc_feature 1..22: note = chemically synthesized
  source 1..22: mol_type = other DNA
cttcacagaattggaaaaaact

SEQ ID NO: 156105 - DNA, 22 bp, synthetic construct
  misc_feature 1..22: note = chemically synthesized
  source 1..22: mol_type = other DNA
ttcacagaattggaaaaaacta

SEQ ID NO: 156106 - DNA, 22 bp, synthetic construct
  misc_feature 1..22: note = chemically synthesized
  source 1..22: mol_type = other DNA
cacagaattggaaaaaactact

SEQ ID NO: 156107 - DNA, 22 bp, synthetic construct
  misc_feature 1..22: note = chemically synthesized
  source 1..22: mol_type = other DNA
acagaattggaaaaaactactt

SEQ ID NO: 156108 - DNA, 22 bp, synthetic construct
  misc_feature 1..22: note = chemically synthesized
  source 1..22: mol_type = other DNA
gaaaaaactactttaaagttca

SEQ ID NO: 156109 - DNA, 22 bp, synthetic construct
  misc_feature 1..22: note = chemically synthesized
  source 1..22: mol_type = other DNA
ctttaaagttcatatggaacca

SEQ ID NO: 156110 - DNA, 22 bp, synthetic construct
  misc_feature 1..22: note = chemically synthesized
  source 1..22: mol_type = other DNA
taaagttcatatggaaccaaaa

SEQ ID NO: 156111 - DNA, 22 bp, synthetic construct
  misc_feature 1..22: note = chemically synthesized
  source 1..22: mol_type = other DNA
aaagttcatatggaaccaaaaa

SEQ ID NO: 156112 - DNA, 22 bp, synthetic construct
  misc_feature 1..22: note = chemically synthesized
  source 1..22: mol_type = other DNA
aagttcatatggaaccaaaaaa

SEQ ID NO: 156113 - DNA, 22 bp, synthetic construct
  misc_feature 1..22: note = chemically synthesized
  source 1..22: mol_type = other DNA
atatggaaccaaaaaagagccc

SEQ ID NO: 156114 - DNA, 22 bp, synthetic construct
  misc_feature 1..22: note = chemically synthesized
  source 1..22: mol_type = other DNA
acaagtcaatcctaagccaaaa

SEQ ID NO: 156115 - DNA, 22 bp, synthetic construct
  misc_feature 1..22: note = chemically synthesized
  source 1..22: mol_type = other DNA
agccaaaagaacaaagctagag

SEQ ID NO: 156116 - DNA, 22 bp, synthetic construct
  misc_feature 1..22: note = chemically synthesized
  source 1..22: mol_type = other DNA
gaggcatcatgctacctgactt

SEQ ID NO: 156117 - DNA, 22 bp, synthetic construct
  misc_feature 1..22: note = chemically synthesized
  source 1..22: mol_type = other DNA
cctgacttcaaactatactaca

SEQ ID NO: 156118 - DNA, 22 bp, synthetic construct
  misc_feature 1..22: note = chemically synthesized
  source 1..22: mol_type = other DNA
acttcaaactatactacaaggt

SEQ ID NO: 156119 - DNA, 22 bp, synthetic construct
  misc_feature 1..22: note = chemically synthesized
  source 1..22: mol_type = other DNA
caaactatactacaaggtacag

SEQ ID NO: 156120 - DNA, 22 bp, synthetic construct
  misc_feature 1..22: note = chemically synthesized
  source 1..22: mol_type = other DNA
aaactatactacaaggtacagt

SEQ ID NO: 156121 - DNA, 22 bp, synthetic construct
  misc_feature 1..22: note = chemically synthesized
  source 1..22: mol_type = other DNA
tactacaaggtacagtaaccaa

SEQ ID NO: 156122 - DNA, 22 bp, synthetic construct
  misc_feature 1..22: note = chemically synthesized
  source 1..22: mol_type = other DNA
caaggtacagtaaccaaaacaa

SEQ ID NO: 156123 - DNA, 22 bp, synthetic construct
  misc_feature 1..22: note = chemically synthesized
  source 1..22: mol_type = other DNA
gtaccaaaacagagatgtagac

SEQ ID NO: 156124 - DNA, 22 bp, synthetic construct
  misc_feature 1..22: note = chemically synthesized
  source 1..22: mol_type = other DNA
tcagaaataataccacacatcc

SEQ ID NO: 156125 - DNA, 22 bp, synthetic construct
  misc_feature 1..22: note = chemically synthesized
  source 1..22: mol_type = other DNA
agaaataataccacacatccac

SEQ ID NO: 156126 - DNA, 22 bp, synthetic construct
  misc_feature 1..22: note = chemically synthesized
  source 1..22: mol_type = other DNA
tctgatctttgacaaacctgac

SEQ ID NO: 156127 - DNA, 22 bp, synthetic construct
  misc_feature 1..22: note = chemically synthesized
  source 1..22: mol_type = other DNA
atctttgacaaacctgacaaaa

SEQ ID NO: 156128 - DNA, 22 bp, synthetic construct
  misc_feature 1..22: note = chemically synthesized
  source 1..22: mol_type = other DNA
tgacaaacctgacaaaaacaag

SEQ ID NO: 156129 - DNA, 22 bp, synthetic construct
  misc_feature 1..22: note = chemically synthesized
  source 1..22: mol_type = other DNA
gacaaacctgacaaaaacaagc

SEQ ID NO: 156130 - DNA, 22 bp, synthetic construct
  misc_feature 1..22: note = chemically synthesized
  source 1..22: mol_type = other DNA
acaaacctgacaaaaacaagca

SEQ ID NO: 156131 - DNA, 22 bp, synthetic construct
  misc_feature 1..22: note = chemically synthesized
  source 1..22: mol_type = other DNA
acaaaaacaagcaatggggaaa

SEQ ID NO: 156132 - DNA, 22 bp, synthetic construct
  misc_feature 1..22: note = chemically synthesized
  source 1..22: mol_type = other DNA
cctatttaataaatgatgctgg

SEQ ID NO: 156133 - DNA, 22 bp, synthetic construct
  misc_feature 1..22: note = chemically synthesized
  source 1..22: mol_type = other DNA
tttaataaatgatgctgggaaa

SEQ ID NO: 156134 - DNA, 22 bp, synthetic construct
  misc_feature 1..22: note = chemically synthesized
  source 1..22: mol_type = other DNA
aataaatgatgctgggaaaact

SEQ ID NO: 156135 - DNA, 22 bp, synthetic construct
  misc_feature 1..22: note = chemically synthesized
  source 1..22: mol_type = other DNA
ataaatgatgctgggaaaactg

SEQ ID NO: 156136 - DNA, 22 bp, synthetic construct
  misc_feature 1..22: note = chemically synthesized
  source 1..22: mol_type = other DNA
ggaaaactggctagccatatgt

SEQ ID NO: 156137 - DNA, 22 bp, synthetic construct
  misc_feature 1..22: note = chemically synthesized
  source 1..22: mol_type = other DNA
gctagccatatgtagaaagctg

SEQ ID NO: 156138 - DNA, 22 bp, synthetic construct
  misc_feature 1..22: note = chemically synthesized
  source 1..22: mol_type = other DNA
gccatatgtagaaagctgaaac

SEQ ID NO: 156139 - DNA, 22 bp, synthetic construct
  misc_feature 1..22: note = chemically synthesized
  source 1..22: mol_type = other DNA
aaactggatcccttccttacac

SEQ ID NO: 156140 - DNA, 22 bp, synthetic construct
  misc_feature 1..22: note = chemically synthesized
  source 1..22: mol_type = other DNA
gatcccttccttacaccttata

SEQ ID NO: 156141 - DNA, 22 bp, synthetic construct
  misc_feature 1..22: note = chemically synthesized
  source 1..22: mol_type = other DNA
ccttacaccttatacaaaaatt

SEQ ID NO: 156142 - DNA, 22 bp, synthetic construct
  misc_feature 1..22: note = chemically synthesized
  source 1..22: mol_type = other DNA
cttacaccttatacaaaaatta

SEQ ID NO: 156143 - DNA, 22 bp, synthetic construct
  misc_feature 1..22: note = chemically synthesized
  source 1..22: mol_type = other DNA
acaccttatacaaaaattattt

SEQ ID NO: 156144 - DNA, 22 bp, synthetic construct
  misc_feature 1..22: note = chemically synthesized
  source 1..22: mol_type = other DNA
caccttatacaaaaattatttc

SEQ ID NO: 156145 - DNA, 22 bp, synthetic construct
  misc_feature 1..22: note = chemically synthesized
  source 1..22: mol_type = other DNA
atacaaaaattatttcaagatg

SEQ ID NO: 156146 - DNA, 22 bp, synthetic construct
  misc_feature 1..22: note = chemically synthesized
  source 1..22: mol_type = other DNA
tacaaaaattatttcaagatgg

SEQ ID NO: 156147 - DNA, 22 bp, synthetic construct
  misc_feature 1..22: note = chemically synthesized
  source 1..22: mol_type = other DNA
tttcaagatggattaaagactt

SEQ ID NO: 156148 - DNA, 22 bp, synthetic construct
  misc_feature 1..22: note = chemically synthesized
  source 1..22: mol_type = other DNA
caagatggattaaagacttaca

SEQ ID NO: 156149 - DNA, 22 bp, synthetic construct
  misc_feature 1..22: note = chemically synthesized
  source 1..22: mol_type = other DNA
aagatggattaaagacttacat

SEQ ID NO: 156150 - DNA, 22 bp, synthetic construct
  misc_feature 1..22: note = chemically synthesized
  source 1..22: mol_type = other DNA
aagacttacatgttagacctaa

SEQ ID NO: 156151 - DNA, 22 bp, synthetic construct
  misc_feature 1..22: note = chemically synthesized
  source 1..22: mol_type = other DNA
acatgttagacctaaaaccata

SEQ ID NO: 156152 - DNA, 22 bp, synthetic construct
  misc_feature 1..22: note = chemically synthesized
  source 1..22: mol_type = other DNA
catgttagacctaaaaccataa

SEQ ID NO: 156153 - DNA, 22 bp, synthetic construct
  misc_feature 1..22: note = chemically synthesized
  source 1..22: mol_type = other DNA
gacctaaaaccataaaaacctt

SEQ ID NO: 156154 - DNA, 22 bp, synthetic construct
  misc_feature 1..22: note = chemically synthesized
  source 1..22: mol_type = other DNA
aaaccataaaaaccttagaaga

SEQ ID NO: 156155 - DNA, 22 bp, synthetic construct
  misc_feature 1..22: note = chemically synthesized
  source 1..22: mol_type = other DNA
agaagaaaacctaagcaatacc

SEQ ID NO: 156156 - DNA, 22 bp, synthetic construct
  misc_feature 1..22: note = chemically synthesized
  source 1..22: mol_type = other DNA
gaagaaaacctaagcaatacca

SEQ ID NO: 156157 - DNA, 22 bp, synthetic construct
  misc_feature 1..22: note = chemically synthesized
  source 1..22: mol_type = other DNA
agcaataccattcaggacatag

SEQ ID NO: 156158 - DNA, 22 bp, synthetic construct
  misc_feature 1..22: note = chemically synthesized
  source 1..22: mol_type = other DNA
aggacataggcatgggcaagga

SEQ ID NO: 156159 - DNA, 22 bp, synthetic construct
  misc_feature 1..22: note = chemically synthesized
  source 1..22: mol_type = other DNA
catgtctaaaacaccaaaagca

SEQ ID NO: 156160 - DNA, 22 bp, synthetic construct
  misc_feature 1..22: note = chemically synthesized
  source 1..22: mol_type = other DNA
atgtctaaaacaccaaaagcaa

SEQ ID NO: 156161 - DNA, 22 bp, synthetic construct
  misc_feature 1..22: note = chemically synthesized
  source 1..22: mol_type = other DNA
aaacaccaaaagcaatggcaac

SEQ ID NO: 156162 - DNA, 22 bp, synthetic construct
  misc_feature 1..22: note = chemically synthesized
  source 1..22: mol_type = other DNA
attaaactaaagagcttctgca

SEQ ID NO: 156163 - DNA, 22 bp, synthetic construct
  misc_feature 1..22: note = chemically synthesized
  source 1..22: mol_type = other DNA
aactaaagagcttctgcacagc

SEQ ID NO: 156164 - DNA, 22 bp, synthetic construct
  misc_feature 1..22: note = chemically synthesized
  source 1..22: mol_type = other DNA
aagagcttctgcacagcaaaag

SEQ ID NO: 156165 - DNA, 22 bp, synthetic construct
  misc_feature 1..22: note = chemically synthesized
  source 1..22: mol_type = other DNA
ctgcacagcaaaagaaactacc

SEQ ID NO: 156166 - DNA, 22 bp, synthetic construct
  misc_feature 1..22: note = chemically synthesized
  source 1..22: mol_type = other DNA
tgcacagcaaaagaaactacca

SEQ ID NO: 156167 - DNA, 22 bp, synthetic construct
  misc_feature 1..22: note = chemically synthesized
  source 1..22: mol_type = other DNA
cacagcaaaagaaactaccatc

SEQ ID NO: 156168 - DNA, 22 bp, synthetic construct
  misc_feature 1..22: note = chemically synthesized
  source 1..22: mol_type = other DNA
ccatcagagtgaacaggcaacc

SEQ ID NO: 156169 - DNA, 22 bp, synthetic construct
  misc_feature 1..22: note = chemically synthesized
  source 1..22: mol_type = other DNA
cacaatgggagaaaatttttgc

SEQ ID NO: 156170 - DNA, 22 bp, synthetic construct
  misc_feature 1..22: note = chemically synthesized
  source 1..22: mol_type = other DNA
ttgcaatctactcatctgacaa

SEQ ID NO: 156171 - DNA, 22 bp, synthetic construct
  misc_feature 1..22: note = chemically synthesized
  source 1..22: mol_type = other DNA
tgcaatctactcatctgacaaa

SEQ ID NO: 156172 - DNA, 22 bp, synthetic construct
  misc_feature 1..22: note = chemically synthesized
  source 1..22: mol_type = other DNA
gcaatctactcatctgacaaag

SEQ ID NO: 156173 - DNA, 22 bp, synthetic construct
  misc_feature 1..22: note = chemically synthesized
  source 1..22: mol_type = other DNA
caatctactcatctgacaaagg

SEQ ID NO: 156174 - DNA, 22 bp, synthetic construct
  misc_feature 1..22: note = chemically synthesized
  source 1..22: mol_type = other DNA
ctcatctgacaaagggctaata

SEQ ID NO: 156175 - DNA, 22 bp, synthetic construct
  misc_feature 1..22: note = chemically synthesized
  source 1..22: mol_type = other DNA
atctgacaaagggctaatatcc

SEQ ID NO: 156176 - DNA, 22 bp, synthetic construct
  misc_feature 1..22: note = chemically synthesized
  source 1..22: mol_type = other DNA
acaaagggctaatatccagaat

SEQ ID NO: 156177 - DNA, 22 bp, synthetic construct
  misc_feature 1..22: note = chemically synthesized
  source 1..22: mol_type = other DNA
atatccagaatctacaatgaac

SEQ ID NO: 156178 - DNA, 22 bp, synthetic construct
  misc_feature 1..22: note = chemically synthesized
  source 1..22: mol_type = other DNA
caatgaactcaaacaaatttac

SEQ ID NO: 156179 - DNA, 22 bp, synthetic construct
  misc_feature 1..22: note = chemically synthesized
  source 1..22: mol_type = other DNA
aaacaaatttacaagaaaaaaa

SEQ ID NO: 156180 - DNA, 22 bp, synthetic construct
  misc_feature 1..22: note = chemically synthesized
  source 1..22: mol_type = other DNA
acaagaaaaaaacaaacaactg

SEQ ID NO: 156181 - DNA, 22 bp, synthetic construct
  misc_feature 1..22: note = chemically synthesized
  source 1..22: mol_type = other DNA
caagaaaaaaacaaacaactgc

SEQ ID NO: 156182 - DNA, 22 bp, synthetic construct
  misc_feature 1..22: note = chemically synthesized
  source 1..22: mol_type = other DNA
catcaacaagggggtgaaggat

SEQ ID NO: 156183 - DNA, 22 bp, synthetic construct
  misc_feature 1..22: note = chemically synthesized
  source 1..22: mol_type = other DNA
ctcaaaagaagacatttatgca

SEQ ID NO: 156184 - DNA, 22 bp, synthetic construct
  misc_feature 1..22: note = chemically synthesized
  source 1..22: mol_type = other DNA
tcaaaagaagacatttatgcag

SEQ ID NO: 156185 - DNA, 22 bp, synthetic construct
  misc_feature 1..22: note = chemically synthesized
  source 1..22: mol_type = other DNA
aaaagaagacatttatgcagcc

SEQ ID NO: 156186 - DNA, 22 bp, synthetic construct
  misc_feature 1..22: note = chemically synthesized
  source 1..22: mol_type = other DNA
atgcagccaaaaaacacatgaa

SEQ ID NO: 156187 - DNA, 22 bp, synthetic construct
  misc_feature 1..22: note = chemically synthesized
  source 1..22: mol_type = other DNA
tgcagccaaaaaacacatgaaa

SEQ ID NO: 156188 - DNA, 22 bp, synthetic construct
  misc_feature 1..22: note = chemically synthesized
  source 1..22: mol_type = other DNA
atcatcactggccatcagagaa

SEQ ID NO: 156189 - DNA, 22 bp, synthetic construct
  misc_feature 1..22: note = chemically synthesized
  source 1..22: mol_type = other DNA
gccatcagagaaatgcaaatca

SEQ ID NO: 156190 - DNA, 22 bp, synthetic construct
  misc_feature 1..22: note = chemically synthesized
  source 1..22: mol_type = other DNA
acaccagttagaatggtgatca

SEQ ID NO: 156191 - DNA, 22 bp, synthetic construct
  misc_feature 1..22: note = chemically synthesized
  source 1..22: mol_type = other DNA
gaatggtgatcattaaaaagtc

SEQ ID NO: 156192 - DNA, 22 bp, synthetic construct
  misc_feature 1..22: note = chemically synthesized
  source 1..22: mol_type = other DNA
aaaagtcaggaaaccacaggtg

SEQ ID NO: 156193 - DNA, 22 bp, synthetic construct
  misc_feature 1..22: note = chemically synthesized
  source 1..22: mol_type = other DNA
gagaggatgtggagaaatagga

SEQ ID NO: 156194 - DNA, 22 bp, synthetic construct
  misc_feature 1..22: note = chemically synthesized
  source 1..22: mol_type = other DNA
ttacactgttggtgggactata

SEQ ID NO: 156195 - DNA, 22 bp, synthetic construct
  misc_feature 1..22: note = chemically synthesized
  source 1..22: mol_type = other DNA
tacactgttggtgggactataa

SEQ ID NO: 156196 - DNA, 22 bp, synthetic construct
  misc_feature 1..22: note = chemically synthesized
  source 1..22: mol_type = other DNA
acactgttggtgggactataaa

SEQ ID NO: 156197 - DNA, 22 bp, synthetic construct
  misc_feature 1..22: note = chemically synthesized
  source 1..22: mol_type = other DNA
cactgttggtgggactataaac

SEQ ID NO: 156198 - DNA, 22 bp, synthetic construct
  misc_feature 1..22: note = chemically synthesized
  source 1..22: mol_type = other DNA
ttggtgggactataaactagtt

SEQ ID NO: 156199 - DNA, 22 bp, synthetic construct
  misc_feature 1..22: note = chemically synthesized
  source 1..22: mol_type = other DNA
gtgggactataaactagttcaa

SEQ ID NO: 156200 - DNA, 22 bp, synthetic construct
  misc_feature 1..22: note = chemically synthesized
  source 1..22: mol_type = other DNA
taaactagttcaaccattgtgg

SEQ ID NO: 156201 - DNA, 22 bp, synthetic construct
  misc_feature 1..22: note = chemically synthesized
  source 1..22: mol_type = other DNA
gttcaaccattgtggaagtcag

SEQ ID NO: 156202 - DNA, 22 bp, synthetic construct
  misc_feature 1..22: note = chemically synthesized
  source 1..22: mol_type = other DNA
aaccattgtggaagtcagtgtg

SEQ ID NO: 156203 - DNA, 22 bp, synthetic construct
  misc_feature 1..22: note = chemically synthesized
  source 1..22: mol_type = other DNA
tggaagtcagtgtggcaattcc

SEQ ID NO: 156204 - DNA, 22 bp, synthetic construct
  misc_feature 1..22: note = chemically synthesized
  source 1..22: mol_type = other DNA
ctcagggatctagaactagaaa

SEQ ID NO: 156205 - DNA, 22 bp, synthetic construct
  misc_feature 1..22: note = chemically synthesized
  source 1..22: mol_type = other DNA
agggatctagaactagaaatac

SEQ ID NO: 156206 - DNA, 22 bp, synthetic construct
  misc_feature 1..22: note = chemically synthesized
  source 1..22: mol_type = other DNA
gaactagaaataccatttgacc

SEQ ID NO: 156207 - DNA, 22 bp, synthetic construct
  misc_feature 1..22: note = chemically synthesized
  source 1..22: mol_type = other DNA
gaaataccatttgacccagcca

SEQ ID NO: 156208 - DNA, 22 bp, synthetic construct
  misc_feature 1..22: note = chemically synthesized
  source 1..22: mol_type = other DNA
gacccagccatcctattactgg

SEQ ID NO: 156209 - DNA, 22 bp, synthetic construct
  misc_feature 1..22: note = chemically synthesized
  source 1..22: mol_type = other DNA
acccagccatcctattactggg

SEQ ID NO: 156210 - DNA, 22 bp, synthetic construct
  misc_feature 1..22: note = chemically synthesized
  source 1..22: mol_type = other DNA
ttactgggtatatacccaaagg

SEQ ID NO: 156211 - DNA, 22 bp, synthetic construct
  misc_feature 1..22: note = chemically synthesized
  source 1..22: mol_type = other DNA
ctgggtatatacccaaaggaat

SEQ ID NO: 156212 - DNA, 22 bp, synthetic construct
  misc_feature 1..22: note = chemically synthesized
  source 1..22: mol_type = other DNA
ggtatatacccaaaggaatgta

SEQ ID NO: 156213 - DNA, 22 bp, synthetic construct
  misc_feature 1..22: note = chemically synthesized
  source 1..22: mol_type = other DNA
ctataaagacacatgcacacgt

SEQ ID NO: 156214 - DNA, 22 bp, synthetic construct
  misc_feature 1..22: note = chemically synthesized
  source 1..22: mol_type = other DNA
taaagacacatgcacacgtatg

SEQ ID NO: 156215 - DNA, 22 bp, synthetic construct
  misc_feature 1..22: note = chemically synthesized
  source 1..22: mol_type = other DNA
attgtggcactattcacaatag

SEQ ID NO: 156216 - DNA, 22 bp, synthetic construct
  misc_feature 1..22: note = chemically synthesized
  source 1..22: mol_type = other DNA
ttgtggcactattcacaatagc

SEQ ID NO: 156217 - DNA, 22 bp, synthetic construct
  misc_feature 1..22: note = chemically synthesized
  source 1..22: mol_type = other DNA
tggcactattcacaatagcaaa

SEQ ID NO: 156218 - DNA, 22 bp, synthetic construct
  misc_feature 1..22: note = chemically synthesized
  source 1..22: mol_type = other DNA
ttcacaatagcaaagacttgga

SEQ ID NO: 156219 - DNA, 22 bp, synthetic construct
  misc_feature 1..22: note = chemically synthesized
  source 1..22: mol_type = other DNA
acaatagcaaagacttggaacc

SEQ ID NO: 156220 - DNA, 22 bp, synthetic construct
  misc_feature 1..22: note = chemically synthesized
  source 1..22: mol_type = other DNA
ggaaccaacccaaatgtccaac

SEQ ID NO: 156221 - DNA, 22 bp, synthetic construct
  misc_feature 1..22: note = chemically synthesized
  source 1..22: mol_type = other DNA
gaaccaacccaaatgtccaaca

SEQ ID NO: 156222 - DNA, 22 bp, synthetic construct
  misc_feature 1..22: note = chemically synthesized
  source 1..22: mol_type = other DNA
gattaagaaaatgtggcacata

SEQ ID NO: 156223 - DNA, 22 bp, synthetic construct
  misc_feature 1..22: note = chemically synthesized
  source 1..22: mol_type = other DNA
agaaaatgtggcacatatacat

SEQ ID NO: 156224 - DNA, 22 bp, synthetic construct
  misc_feature 1..22: note = chemically synthesized
  source 1..22: mol_type = other DNA
tgcagccataaaaaatgatgag

SEQ ID NO: 156225 - DNA, 22 bp, synthetic construct
  misc_feature 1..22: note = chemically synthesized
  source 1..22: mol_type = other DNA
atgtcctttgtagggacatgga

SEQ ID NO: 156226 - DNA, 22 bp, synthetic construct
  misc_feature 1..22: note = chemically synthesized
  source 1..22: mol_type = other DNA
tgtagggacatggatgaaactg

SEQ ID NO: 156227 - DNA, 22 bp, synthetic construct
  misc_feature 1..22: note = chemically synthesized
  source 1..22: mol_type = other DNA
gtagggacatggatgaaactgg

SEQ ID NO: 156228 - DNA, 22 bp, synthetic construct
  misc_feature 1..22: note = chemically synthesized
  source 1..22: mol_type = other DNA
tagggacatggatgaaactgga

SEQ ID NO: 156229 - DNA, 22 bp, synthetic construct
  misc_feature 1..22: note = chemically synthesized
  source 1..22: mol_type = other DNA
gaaaccatcattctgagcaaag

SEQ ID NO: 156230 - DNA, 22 bp, synthetic construct
  misc_feature 1..22: note = chemically synthesized
  source 1..22: mol_type = other DNA
tgagcaaagtatcgcaaggacg

SEQ ID NO: 156231 - DNA, 22 bp, synthetic construct
  misc_feature 1..22: note = chemically synthesized
  source 1..22: mol_type = other DNA
agcaaagtatcgcaaggacgaa

SEQ ID NO: 156232 - DNA, 22 bp, synthetic construct
  misc_feature 1..22: note = chemically synthesized
  source 1..22: mol_type = other DNA
tcactcataggtgggagttgaa

SEQ ID NO: 156233 - DNA, 22 bp, synthetic construct
  misc_feature 1..22: note = chemically synthesized
  source 1..22: mol_type = other DNA
actcataggtgggagttgaaca

SEQ ID NO: 156234 - DNA, 22 bp, synthetic construct
  misc_feature 1..22: note = chemically synthesized
  source 1..22: mol_type = other DNA
ataggtgggagttgaacaatga

SEQ ID NO: 156235 - DNA, 22 bp, synthetic construct
  misc_feature 1..22: note = chemically synthesized
  source 1..22: mol_type = other DNA
aacaatgagaacatttggacac

SEQ ID NO: 156236 - DNA, 22 bp, synthetic construct
  misc_feature 1..22: note = chemically synthesized
  source 1..22: mol_type = other DNA
ggacacagtgaggggaacatca

SEQ ID NO: 156237 - DNA, 22 bp, synthetic construct
  misc_feature 1..22: note = chemically synthesized
  source 1..22: mol_type = other DNA
gacacagtgaggggaacatcac

SEQ ID NO: 156238 - DNA, 22 bp, synthetic construct
  misc_feature 1..22: note = chemically synthesized
  source 1..22: mol_type = other DNA
ttgtggggtgggggccgggggg

SEQ ID NO: 156239 - DNA, 22 bp, synthetic construct
  misc_feature 1..22: note = chemically synthesized
  source 1..22: mol_type = other DNA
tggggtgggggccggggggagg

SEQ ID NO: 156240 - DNA, 22 bp, synthetic construct
  misc_feature 1..22: note = chemically synthesized
  source 1..22: mol_type = other DNA
ggagatatacctaatgtaaatg

SEQ ID NO: 156241 - DNA, 22 bp, synthetic construct
  misc_feature 1..22: note = chemically synthesized
  source 1..22: mol_type = other DNA
atgtaaatgacgagttaatggg

SEQ ID NO: 156242 - DNA, 22 bp, synthetic construct
  misc_feature 1..22: note = chemically synthesized
  source 1..22: mol_type = other DNA
atgggtgcagcacaccaacatg

SEQ ID NO: 156243 - DNA, 22 bp, synthetic construct
  misc_feature 1..22: note = chemically synthesized
  source 1..22: mol_type = other DNA
catgttgtgcacatgtacccta

SEQ ID NO: 156244 - DNA, 22 bp, synthetic construct
  misc_feature 1..22: note = chemically synthesized
  source 1..22: mol_type = other DNA
tgcacatgtaccctagaactta

SEQ ID NO: 156245 - DNA, 22 bp, synthetic construct
  misc_feature 1..22: note = chemically synthesized
  source 1..22: mol_type = other DNA
gaacttaaagtataataaacat

SEQ ID NO: 156246 - DNA, 22 bp, synthetic construct
  misc_feature 1..22: note = chemically synthesized
  source 1..22: mol_type = other DNA
aaagtataataaacatatatat

SEQ ID NO: 156247 - DNA, 22 bp, synthetic construct
  misc_feature 1..22: note = chemically synthesized
  source 1..22: mol_type = other DNA
aagtataataaacatatatata

SEQ ID NO: 156248 - DNA, 22 bp, synthetic construct
  misc_feature 1..22: note = chemically synthesized
  source 1..22: mol_type = other DNA
tctcattttcaatcagtgactg

SEQ ID NO: 156249 - DNA, 22 bp, synthetic construct
  misc_feature 1..22: note = chemically synthesized
  source 1..22: mol_type = other DNA
attttcaatcagtgactgaagt

SEQ ID NO: 156250 - DNA, 22 bp, synthetic construct
  misc_feature 1..22: note = chemically synthesized
  source 1..22: mol_type = other DNA
tcaatcagtgactgaagtggaa

SEQ ID NO: 156251 - DNA, 22 bp, synthetic construct
  misc_feature 1..22: note = chemically synthesized
  source 1..22: mol_type = other DNA
caatcagtgactgaagtggaaa

SEQ ID NO: 156252 - DNA, 22 bp, synthetic construct
  misc_feature 1..22: note = chemically synthesized
  source 1..22: mol_type = other DNA
aatcagtgactgaagtggaaag

SEQ ID NO: 156253 - DNA, 22 bp, synthetic construct
  misc_feature 1..22: note = chemically synthesized
  source 1..22: mol_type = other DNA
aagtggaaagaaacaaaatatt

SEQ ID NO: 156254 - DNA, 22 bp, synthetic construct
  misc_feature 1..22: note = chemically synthesized
  source 1..22: mol_type = other DNA
tattctttaccacctatgaggc

SEQ ID NO: 156255 - DNA, 22 bp, synthetic construct
  misc_feature 1..22: note = chemically synthesized
  source 1..22: mol_type = other DNA
attctttaccacctatgaggca

SEQ ID NO: 156256 - DNA, 22 bp, synthetic construct
  misc_feature 1..22: note = chemically synthesized
  source 1..22: mol_type = other DNA
ttctttaccacctatgaggcat

SEQ ID NO: 156257 - DNA, 22 bp, synthetic construct
  misc_feature 1..22: note = chemically synthesized
  source 1..22: mol_type = other DNA
tttaccacctatgaggcatata

SEQ ID NO: 156258 - DNA, 22 bp, synthetic construct
  misc_feature 1..22: note = chemically synthesized
  source 1..22: mol_type = other DNA
taccacctatgaggcatatact

SEQ ID NO: 156259 - DNA, 22 bp, synthetic construct
  misc_feature 1..22: note = chemically synthesized
  source 1..22: mol_type = other DNA
accacctatgaggcatatactt

SEQ ID NO: 156260 - DNA, 22 bp, synthetic construct
  misc_feature 1..22: note = chemically synthesized
  source 1..22: mol_type = other DNA
ccacctatgaggcatatacttt

SEQ ID NO: 156261 - DNA, 22 bp, synthetic construct
  misc_feature 1..22: note = chemically synthesized
  source 1..22: mol_type = other DNA
tgaggcatatactttttttttt

SEQ ID NO: 156262 - DNA, 22 bp, synthetic construct
  misc_feature 1..22: note = chemically synthesized
  source 1..22: mol_type = other DNA
ttttttttgagagggagtctcg

SEQ ID NO: 156263 - DNA, 22 bp, synthetic construct
  misc_feature 1..22: note = chemically synthesized
  source 1..22: mol_type = other DNA
tttttttgagagggagtctcgc

SEQ ID NO: 156264 - DNA, 22 bp, synthetic construct
  misc_feature 1..22: note = chemically synthesized
  source 1..22: mol_type = other DNA
ttttttgagagggagtctcgct

SEQ ID NO: 156265 - DNA, 22 bp, synthetic construct
  misc_feature 1..22: note = chemically synthesized
  source 1..22: mol_type = other DNA
tttttgagagggagtctcgctc

SEQ ID NO: 156266 - DNA, 22 bp, synthetic construct
  misc_feature 1..22: note = chemically synthesized
  source 1..22: mol_type = other DNA
ttttgagagggagtctcgctct

SEQ ID NO: 156267 - DNA, 22 bp, synthetic construct
  misc_feature 1..22: note = chemically synthesized
  source 1..22: mol_type = other DNA
tttgagagggagtctcgctctg

SEQ ID NO: 156268 - DNA, 22 bp, synthetic construct
  misc_feature 1..22: note = chemically synthesized
  source 1..22: mol_type = other DNA
ttgagagggagtctcgctctgt

SEQ ID NO: 156269 - DNA, 22 bp, synthetic construct
  misc_feature 1..22: note = chemically synthesized
  source 1..22: mol_type = other DNA
tgagagggagtctcgctctgtc

SEQ ID NO: 156270 - DNA, 22 bp, synthetic construct
  misc_feature 1..22: note = chemically synthesized
  source 1..22: mol_type = other DNA
gagagggagtctcgctctgtca

SEQ ID NO: 156271 - DNA, 22 bp, synthetic construct
  misc_feature 1..22: note = chemically synthesized
  source 1..22: mol_type = other DNA
agagggagtctcgctctgtcac

SEQ ID NO: 156272 - DNA, 22 bp, synthetic construct
  misc_feature 1..22: note = chemically synthesized
  source 1..22: mol_type = other DNA
gctctgtcacctaggctggagt

SEQ ID NO: 156273 - DNA, 22 bp, synthetic construct
  misc_feature 1..22: note = chemically synthesized
  source 1..22: mol_type = other DNA
tgtcacctaggctggagtgcag

SEQ ID NO: 156274 - DNA, 22 bp, synthetic construct
  misc_feature 1..22: note = chemically synthesized
  source 1..22: mol_type = other DNA
tcacctaggctggagtgcagtt

SEQ ID NO: 156275 - DNA, 22 bp, synthetic construct
  misc_feature 1..22: note = chemically synthesized
  source 1..22: mol_type = other DNA
ggctggagtgcagttgcgcgat

SEQ ID NO: 156276 - DNA, 22 bp, synthetic construct
  misc_feature 1..22: note = chemically synthesized
  source 1..22: mol_type = other DNA
gagtgcagttgcgcgatctctg

SEQ ID NO: 156277 - DNA, 22 bp, synthetic construct
  misc_feature 1..22: note = chemically synthesized
  source 1..22: mol_type = other DNA
cgcgatctctgctcactgaaac

SEQ ID NO: 156278 - DNA, 22 bp, synthetic construct
  misc_feature 1..22: note = chemically synthesized
  source 1..22: mol_type = other DNA
tgctcactgaaacttctgcctc

SEQ ID NO: 156279 - DNA, 22 bp, synthetic construct
  misc_feature 1..22: note = chemically synthesized
  source 1..22: mol_type = other DNA
ctcactgaaacttctgcctccc

SEQ ID NO: 156280 - DNA, 22 bp, synthetic construct
  misc_feature 1..22: note = chemically synthesized
  source 1..22: mol_type = other DNA
actgaaacttctgcctcccagg

SEQ ID NO: 156281 - DNA, 22 bp, synthetic construct
  misc_feature 1..22: note = chemically synthesized
  source 1..22: mol_type = other DNA
aaacttctgcctcccaggttca

SEQ ID NO: 156282 - DNA, 22 bp, synthetic construct
  misc_feature 1..22: note = chemically synthesized
  source 1..22: mol_type = other DNA
ctgcctcccaggttcaagcgat

SEQ ID NO: 156283 - DNA, 22 bp, synthetic construct
  misc_feature 1..22: note = chemically synthesized
  source 1..22: mol_type = other DNA
tgcctcccaggttcaagcgatt

SEQ ID NO: 156284 - DNA, 22 bp, synthetic construct
  misc_feature 1..22: note = chemically synthesized
  source 1..22: mol_type = other DNA
cctcccaggttcaagcgattct

SEQ ID NO: 156285 - DNA, 22 bp, synthetic construct
  misc_feature 1..22: note = chemically synthesized
  source 1..22: mol_type = other DNA
ccaggttcaagcgattctcctg

SEQ ID NO: 156286 - DNA, 22 bp, synthetic construct
  misc_feature 1..22: note = chemically synthesized
  source 1..22: mol_type = other DNA
aagcgattctcctgcctcagcc

SEQ ID NO: 156287 - DNA, 22 bp, synthetic construct
  misc_feature 1..22: note = chemically synthesized
  source 1..22: mol_type = other DNA
tcctgcctcagcctcttgagta

SEQ ID NO: 156288 - DNA, 22 bp, synthetic construct
  misc_feature 1..22: note = chemically synthesized
  source 1..22: mol_type = other DNA
ctgcctcagcctcttgagtagc

SEQ ID NO: 156289 - DNA, 22 bp, synthetic construct
  misc_feature 1..22: note = chemically synthesized
  source 1..22: mol_type = other DNA
cctcagcctcttgagtagctgg

SEQ ID NO: 156290 - DNA, 22 bp, synthetic construct
  misc_feature 1..22: note = chemically synthesized
  source 1..22: mol_type = other DNA
agcctcttgagtagctgggatt

SEQ ID NO: 156291 - DNA, 22 bp, synthetic construct
  misc_feature 1..22: note = chemically synthesized
  source 1..22: mol_type = other DNA
ttgagtagctgggattaaaggt

SEQ ID NO: 156292 - DNA, 22 bp, synthetic construct
  misc_feature 1..22: note = chemically synthesized
  source 1..22: mol_type = other DNA
gagtagctgggattaaaggtgc

SEQ ID NO: 156293 - DNA, 22 bp, synthetic construct
  misc_feature 1..22: note = chemically synthesized
  source 1..22: mol_type = other DNA
agtagctgggattaaaggtgca

SEQ ID NO: 156294 - DNA, 22 bp, synthetic construct
  misc_feature 1..22: note = chemically synthesized
  source 1..22: mol_type = other DNA
ggattaaaggtgcacaccacta

SEQ ID NO: 156295 - DNA, 22 bp, synthetic construct
  misc_feature 1..22: note = chemically synthesized
  source 1..22: mol_type = other DNA
aaggtgcacaccactatgccca

SEQ ID NO: 156296 - DNA, 22 bp, synthetic construct
  misc_feature 1..22: note = chemically synthesized
  source 1..22: mol_type = other DNA
tgcccagctaatttttgtattt

SEQ ID NO: 156297 - DNA, 22 bp, synthetic construct
  misc_feature 1..22: note = chemically synthesized
  source 1..22: mol_type = other DNA
atttttgtatttttagtagaga

SEQ ID NO: 156298 - DNA, 22 bp, synthetic construct
  misc_feature 1..22: note = chemically synthesized
  source 1..22: mol_type = other DNA
ttgtatttttagtagagacggg

SEQ ID NO: 156299 - DNA, 22 bp, synthetic construct
  misc_feature 1..22: note = chemically synthesized
  source 1..22: mol_type = other DNA
tgtatttttagtagagacgggg

SEQ ID NO: 156300 - DNA, 22 bp, synthetic construct
  misc_feature 1..22: note = chemically synthesized
  source 1..22: mol_type = other DNA
gtatttttagtagagacggggt

SEQ ID NO: 156301 - DNA, 22 bp, synthetic construct
  misc_feature 1..22: note = chemically synthesized
  source 1..22: mol_type = other DNA
tatttttagtagagacggggtt

SEQ ID NO: 156302 - DNA, 22 bp, synthetic construct
  misc_feature 1..22: note = chemically synthesized
  source 1..22: mol_type = other DNA
ttagtagagacggggtttcatt

SEQ ID NO: 156303 - DNA, 22 bp, synthetic construct
  misc_feature 1..22: note = chemically synthesized
  source 1..22: mol_type = other DNA
tagtagagacggggtttcattg

SEQ ID NO: 156304 - DNA, 22 bp, synthetic construct
  misc_feature 1..22: note = chemically synthesized
  source 1..22: mol_type = other DNA
agtagagacggggtttcattgt

SEQ ID NO: 156305 - DNA, 22 bp, synthetic construct
  misc_feature 1..22: note = chemically synthesized
  source 1..22: mol_type = other DNA
gtagagacggggtttcattgtt

SEQ ID NO: 156306 - DNA, 22 bp, synthetic construct
  misc_feature 1..22: note = chemically synthesized
  source 1..22: mol_type = other DNA
cattgttttggtcaagctggtc

SEQ ID NO: 156307 - DNA, 22 bp, synthetic construct
  misc_feature 1..22: note = chemically synthesized
  source 1..22: mol_type = other DNA
attgttttggtcaagctggtct

SEQ ID NO: 156308 - DNA, 22 bp, synthetic construct
  misc_feature 1..22: note = chemically synthesized
  source 1..22: mol_type = other DNA
ttttggtcaagctggtctggaa

SEQ ID NO: 156309 - DNA, 22 bp, synthetic construct
  misc_feature 1..22: note = chemically synthesized
  source 1..22: mol_type = other DNA
tggtcaagctggtctggaactc

SEQ ID NO: 156310 - DNA, 22 bp, synthetic construct
  misc_feature 1..22: note = chemically synthesized
  source 1..22: mol_type = other DNA
ggtcaagctggtctggaactcc

SEQ ID NO: 156311 - DNA, 22 bp, synthetic construct
  misc_feature 1..22: note = chemically synthesized
  source 1..22: mol_type = other DNA
gtcaagctggtctggaactcct

SEQ ID NO: 156312 - DNA, 22 bp, synthetic construct
  misc_feature 1..22: note = chemically synthesized
  source 1..22: mol_type = other DNA
gtctggaactcctgaccttgtg

SEQ ID NO: 156313 - DNA, 22 bp, synthetic construct
  misc_feature 1..22: note = chemically synthesized
  source 1..22: mol_type = other DNA
gaactcctgaccttgtgatcta

SEQ ID NO: 156314 - DNA, 22 bp, synthetic construct
  misc_feature 1..22: note = chemically synthesized
  source 1..22: mol_type = other DNA
ctgaccttgtgatctacccgcc

SEQ ID NO: 156315 - DNA, 22 bp, synthetic construct
  misc_feature 1..22: note = chemically synthesized
  source 1..22: mol_type = other DNA
accttgtgatctacccgcctca

SEQ ID NO: 156316 - DNA, 22 bp, synthetic construct
  misc_feature 1..22: note = chemically synthesized
  source 1..22: mol_type = other DNA
gtgatctacccgcctcagcctc

SEQ ID NO: 156317 - DNA, 22 bp, synthetic construct
  misc_feature 1..22: note = chemically synthesized
  source 1..22: mol_type = other DNA
tgatctacccgcctcagcctct

SEQ ID NO: 156318 - DNA, 22 bp, synthetic construct
  misc_feature 1..22: note = chemically synthesized
  source 1..22: mol_type = other DNA
cccgcctcagcctctcaaagtg

SEQ ID NO: 156319 - DNA, 22 bp, synthetic construct
  misc_feature 1..22: note = chemically synthesized
  source 1..22: mol_type = other DNA
agcctctcaaagtgctgggatt

SEQ ID NO: 156320 - DNA, 22 bp, synthetic construct
  misc_feature 1..22: note = chemically synthesized
  source 1..22: mol_type = other DNA
tcaaagtgctgggattacaggt

SEQ ID NO: 156321 - DNA, 22 bp, synthetic construct
  misc_feature 1..22: note = chemically synthesized
  source 1..22: mol_type = other DNA
aaagtgctgggattacaggtgt

SEQ ID NO: 156322 - DNA, 22 bp, synthetic construct
  misc_feature 1..22: note = chemically synthesized
  source 1..22: mol_type = other DNA
ggattacaggtgtgagccaccg

SEQ ID NO: 156323 - DNA, 22 bp, synthetic construct
  misc_feature 1..22: note = chemically synthesized
  source 1..22: mol_type = other DNA
caggtgtgagccaccgtgccag

SEQ ID NO: 156324 - DNA, 22 bp, synthetic construct
  misc_feature 1..22: note = chemically synthesized
  source 1..22: mol_type = other DNA
gcatatagatttaaaaacccag

SEQ ID NO: 156325 - DNA, 22 bp, synthetic construct
  misc_feature 1..22: note = chemically synthesized
  source 1..22: mol_type = other DNA
aaaaacccagctccgtctgcca

SEQ ID NO: 156326 - DNA, 22 bp, synthetic construct
  misc_feature 1..22: note = chemically synthesized
  source 1..22: mol_type = other DNA
aaaacccagctccgtctgccat

SEQ ID NO: 156327 - DNA, 22 bp, synthetic construct
  misc_feature 1..22: note = chemically synthesized
  source 1..22: mol_type = other DNA
cgtctgccattgcaaatatcta

SEQ ID NO: 156328 - DNA, 22 bp, synthetic construct
  misc_feature 1..22: note = chemically synthesized
  source 1..22: mol_type = other DNA
ccattgcaaatatctaaagttt

SEQ ID NO: 156329 - DNA, 22 bp, synthetic construct
  misc_feature 1..22: note = chemically synthesized
  source 1..22: mol_type = other DNA
caaatatctaaagtttataatg

SEQ ID NO: 156330 - DNA, 22 bp, synthetic construct
  misc_feature 1..22: note = chemically synthesized
  source 1..22: mol_type = other DNA
aagtttataatgttttatccta

SEQ ID NO: 156331 - DNA, 22 bp, synthetic construct
  misc_feature 1..22: note = chemically synthesized
  source 1..22: mol_type = other DNA
ataatgttttatcctatatttt

SEQ ID NO: 156332 - DNA, 22 bp, synthetic construct
  misc_feature 1..22: note = chemically synthesized
  source 1..22: mol_type = other DNA
taatgttttatcctatattttt

SEQ ID NO: 156333 - DNA, 22 bp, synthetic construct
  misc_feature 1..22: note = chemically synthesized
  source 1..22: mol_type = other DNA
tatcctatatttttgagaaata

SEQ ID NO: 156334 - DNA, 22 bp, synthetic construct
  misc_feature 1..22: note = chemically synthesized
  source 1..22: mol_type = other DNA
atcctatatttttgagaaatag

SEQ ID NO: 156335 - DNA, 22 bp, synthetic construct
  misc_feature 1..22: note = chemically synthesized
  source 1..22: mol_type = other DNA
tcctatatttttgagaaataga

SEQ ID NO: 156336 - DNA, 22 bp, synthetic construct
  misc_feature 1..22: note = chemically synthesized
  source 1..22: mol_type = other DNA
tatttttgagaaatagattaat

SEQ ID NO: 156337 - DNA, 22 bp, synthetic construct
  misc_feature 1..22: note = chemically synthesized
  source 1..22: mol_type = other DNA
ttgagaaatagattaattggca

SEQ ID NO: 156338 - DNA, 22 bp, synthetic construct
  misc_feature 1..22: note = chemically synthesized
  source 1..22: mol_type = other DNA
tgagaaatagattaattggcag

SEQ ID NO: 156339 - DNA, 22 bp, synthetic construct
  misc_feature 1..22: note = chemically synthesized
  source 1..22: mol_type = other DNA
gagaaatagattaattggcaga

SEQ ID NO: 156340 - DNA, 22 bp, synthetic construct
  misc_feature 1..22: note = chemically synthesized
  source 1..22: mol_type = other DNA
agaaatagattaattggcagaa

SEQ ID NO: 156341 - DNA, 22 bp, synthetic construct
  misc_feature 1..22: note = chemically synthesized
  source 1..22: mol_type = other DNA
attggcagaacaatttaatttg

SEQ ID NO: 156342 - DNA, 22 bp, synthetic construct
  misc_feature 1..22: note = chemically synthesized
  source 1..22: mol_type = other DNA
gcagaacaatttaatttgctgt

SEQ ID NO: 156343 - DNA, 22 bp, synthetic construct
  misc_feature 1..22: note = chemically synthesized
  source 1..22: mol_type = other DNA
aatttgctgtatgtcttcaatg

SEQ ID NO: 156344 - DNA, 22 bp, synthetic construct
  misc_feature 1..22: note = chemically synthesized
  source 1..22: mol_type = other DNA
atttgctgtatgtcttcaatgg

SEQ ID NO: 156345 - DNA, 22 bp, synthetic construct
  misc_feature 1..22: note = chemically synthesized
  source 1..22: mol_type = other DNA
gctgtatgtcttcaatggctag

SEQ ID NO: 156346 - DNA, 22 bp, synthetic construct
  misc_feature 1..22: note = chemically synthesized
  source 1..22: mol_type = other DNA
ctgtatgtcttcaatggctagc

SEQ ID NO: 156347 - DNA, 22 bp, synthetic construct
  misc_feature 1..22: note = chemically synthesized
  source 1..22: mol_type = other DNA
tatgtcttcaatggctagcata

SEQ ID NO: 156348 - DNA, 22 bp, synthetic construct
  misc_feature 1..22: note = chemically synthesized
  source 1..22: mol_type = other DNA
caatggctagcatatggcttaa

SEQ ID NO: 156349 - DNA, 22 bp, synthetic construct
  misc_feature 1..22: note = chemically synthesized
  source 1..22: mol_type = other DNA
aatggctagcatatggcttaac

SEQ ID NO: 156350 - DNA, 22 bp, synthetic construct
  misc_feature 1..22: note = chemically synthesized
  source 1..22: mol_type = other DNA
gcatatggcttaacaataagtt

SEQ ID NO: 156351 - DNA, 22 bp, synthetic construct
  misc_feature 1..22: note = chemically synthesized
  source 1..22: mol_type = other DNA
aacaataagttaaggccaatca

SEQ ID NO: 156352 - DNA, 22 bp, synthetic construct
  misc_feature 1..22: note = chemically synthesized
  source 1..22: mol_type = other DNA
acaataagttaaggccaatcaa

SEQ ID NO: 156353 - DNA, 22 bp, synthetic construct
  misc_feature 1..22: note = chemically synthesized
  source 1..22: mol_type = other DNA
aggccaatcaatgtggaagaag

SEQ ID NO: 156354 - DNA, 22 bp, synthetic construct
  misc_feature 1..22: note = chemically synthesized
  source 1..22: mol_type = other DNA
tattgcttgaaatctattttgt

SEQ ID NO: 156355 - DNA, 22 bp, synthetic construct
  misc_feature 1..22: note = chemically synthesized
  source 1..22: mol_type = other DNA
cttgaaatctattttgtcagac

SEQ ID NO: 156356 - DNA, 22 bp, synthetic construct
  misc_feature 1..22: note = chemically synthesized
  source 1..22: mol_type = other DNA
gaaatctattttgtcagactta

SEQ ID NO: 156357 - DNA, 22 bp, synthetic construct
  misc_feature 1..22: note = chemically synthesized
  source 1..22: mol_type = other DNA
aaatctattttgtcagacttaa

SEQ ID NO: 156358 - DNA, 22 bp, synthetic construct
  misc_feature 1..22: note = chemically synthesized
  source 1..22: mol_type = other DNA
ttttgtcagacttaattccctc

SEQ ID NO: 156359 - DNA, 22 bp, synthetic construct
  misc_feature 1..22: note = chemically synthesized
  source 1..22: mol_type = other DNA
tgtcagacttaattccctccca

SEQ ID NO: 156360 - DNA, 22 bp, synthetic construct
  misc_feature 1..22: note = chemically synthesized
  source 1..22: mol_type = other DNA
gtcagacttaattccctcccat

SEQ ID NO: 156361 - DNA, 22 bp, synthetic construct
  misc_feature 1..22: note = chemically synthesized
  source 1..22: mol_type = other DNA
tcagacttaattccctcccatt

SEQ ID NO: 156362 - DNA, 22 bp, synthetic construct
  misc_feature 1..22: note = chemically synthesized
  source 1..22: mol_type = other DNA
aattccctcccatttctgtaag

SEQ ID NO: 156363 - DNA, 22 bp, synthetic construct
  misc_feature 1..22: note = chemically synthesized
  source 1..22: mol_type = other DNA
attccctcccatttctgtaagc

SEQ ID NO: 156364 - DNA, 22 bp, synthetic construct
  misc_feature 1..22: note = chemically synthesized
  source 1..22: mol_type = other DNA
cctcccatttctgtaagcagca

SEQ ID NO: 156365 - DNA, 22 bp, synthetic construct
  misc_feature 1..22: note = chemically synthesized
  source 1..22: mol_type = other DNA
ccatttctgtaagcagcacaac

SEQ ID NO: 156366 - DNA, 22 bp, synthetic construct
  misc_feature 1..22: note = chemically synthesized
  source 1..22: mol_type = other DNA
ctgtaagcagcacaactaaatt

SEQ ID NO: 156367 - DNA, 22 bp, synthetic construct
  misc_feature 1..22: note = chemically synthesized
  source 1..22: mol_type = other DNA
tgtaagcagcacaactaaattt

SEQ ID NO: 156368 - DNA, 22 bp, synthetic construct
  misc_feature 1..22: note = chemically synthesized
  source 1..22: mol_type = other DNA
taagcagcacaactaaatttca

SEQ ID NO: 156369 - DNA, 22 bp, synthetic construct
  misc_feature 1..22: note = chemically synthesized
  source 1..22: mol_type = other DNA
aatttcataactctctattttc

SEQ ID NO: 156370 - DNA, 22 bp, synthetic construct
  misc_feature 1..22: note = chemically synthesized
  source 1..22: mol_type = other DNA
cataactctctattttccttag

SEQ ID NO: 156371 - DNA, 22 bp, synthetic construct
  misc_feature 1..22: note = chemically synthesized
  source 1..22: mol_type = other DNA
ataactctctattttccttagg

SEQ ID NO: 156372 - DNA, 22 bp, synthetic construct
  misc_feature 1..22: note = chemically synthesized
  source 1..22: mol_type = other DNA
tctattttccttagggatatga

SEQ ID NO: 156373 - DNA, 22 bp, synthetic construct
  misc_feature 1..22: note = chemically synthesized
  source 1..22: mol_type = other DNA
tattttccttagggatatgatc

SEQ ID NO: 156374 - DNA, 22 bp, synthetic construct
  misc_feature 1..22: note = chemically synthesized
  source 1..22: mol_type = other DNA
ttttccttagggatatgatcag

SEQ ID NO: 156375 - DNA, 22 bp, synthetic construct
  misc_feature 1..22: note = chemically synthesized
  source 1..22: mol_type = other DNA
tccttagggatatgatcagtaa

SEQ ID NO: 156376 - DNA, 22 bp, synthetic construct
  misc_feature 1..22: note = chemically synthesized
  source 1..22: mol_type = other DNA
ccttagggatatgatcagtaaa

SEQ ID NO: 156377 - DNA, 22 bp, synthetic construct
  misc_feature 1..22: note = chemically synthesized
  source 1..22: mol_type = other DNA
cttagggatatgatcagtaaaa

SEQ ID NO: 156378 - DNA, 22 bp, synthetic construct
  misc_feature 1..22: note = chemically synthesized
  source 1..22: mol_type = other DNA
agggatatgatcagtaaaaaat

SEQ ID NO: 156379 - DNA, 22 bp, synthetic construct
  misc_feature 1..22: note = chemically synthesized
  source 1..22: mol_type = other DNA
gggatatgatcagtaaaaaatt

SEQ ID NO: 156380 - DNA, 22 bp, synthetic construct
  misc_feature 1..22: note = chemically synthesized
  source 1..22: mol_type = other DNA
gatgctgcgttttatatctagt

SEQ ID NO: 156381 - DNA, 22 bp, synthetic construct
  misc_feature 1..22: note = chemically synthesized
  source 1..22: mol_type = other DNA
atgctgcgttttatatctagtt

SEQ ID NO: 156382 - DNA, 22 bp, synthetic construct
  misc_feature 1..22: note = chemically synthesized
  source 1..22: mol_type = other DNA
cgttttatatctagttttacct

SEQ ID NO: 156383 - DNA, 22 bp, synthetic construct
  misc_feature 1..22: note = chemically synthesized
  source 1..22: mol_type = other DNA
tatatctagttttaccttgata

SEQ ID NO: 156384 - DNA, 22 bp, synthetic construct
  misc_feature 1..22: note = chemically synthesized
  source 1..22: mol_type = other DNA
atatctagttttaccttgatag

SEQ ID NO: 156385 - DNA, 22 bp, synthetic construct
  misc_feature 1..22: note = chemically synthesized
  source 1..22: mol_type = other DNA
tatctagttttaccttgatagg

SEQ ID NO: 156386 - DNA, 22 bp, synthetic construct
  misc_feature 1..22: note = chemically synthesized
  source 1..22: mol_type = other DNA
gttttaccttgataggcagcat

SEQ ID NO: 156387 - DNA, 22 bp, synthetic construct
  misc_feature 1..22: note = chemically synthesized
  source 1..22: mol_type = other DNA
taccttgataggcagcattgga

SEQ ID NO: 156388 - DNA, 22 bp, synthetic construct
  misc_feature 1..22: note = chemically synthesized
  source 1..22: mol_type = other DNA
accttgataggcagcattggat

SEQ ID NO: 156389 - DNA, 22 bp, synthetic construct
  misc_feature 1..22: note = chemically synthesized
  source 1..22: mol_type = other DNA
ccttgataggcagcattggatg

SEQ ID NO: 156390 - DNA, 22 bp, synthetic construct
  misc_feature 1..22: note = chemically synthesized
  source 1..22: mol_type = other DNA
gataggcagcattggatggtag

SEQ ID NO: 156391 - DNA, 22 bp, synthetic construct
  misc_feature 1..22: note = chemically synthesized
  source 1..22: mol_type = other DNA
ataggcagcattggatggtagt

SEQ ID NO: 156392 - DNA, 22 bp, synthetic construct
  misc_feature 1..22: note = chemically synthesized
  source 1..22: mol_type = other DNA
gatggtagtaaagatcaaagct

SEQ ID NO: 156393 - DNA, 22 bp, synthetic construct
  misc_feature 1..22: note = chemically synthesized
  source 1..22: mol_type = other DNA
tcagatttatcctgccttactt

SEQ ID NO: 156394 - DNA, 22 bp, synthetic construct
  misc_feature 1..22: note = chemically synthesized
  source 1..22: mol_type = other DNA
cagatttatcctgccttacttt

SEQ ID NO: 156395 - DNA, 22 bp, synthetic construct
  misc_feature 1..22: note = chemically synthesized
  source 1..22: mol_type = other DNA
agatttatcctgccttacttta

SEQ ID NO: 156396 - DNA, 22 bp, synthetic construct
  misc_feature 1..22: note = chemically synthesized
  source 1..22: mol_type = other DNA
atcctgccttactttaaatcca

SEQ ID NO: 156397 - DNA, 22 bp, synthetic construct
  misc_feature 1..22: note = chemically synthesized
  source 1..22: mol_type = other DNA
tcctgccttactttaaatccag

SEQ ID NO: 156398 - DNA, 22 bp, synthetic construct
  misc_feature 1..22: note = chemically synthesized
  source 1..22: mol_type = other DNA
ccttactttaaatccagtaggg

SEQ ID NO: 156399 - DNA, 22 bp, synthetic construct
  misc_feature 1..22: note = chemically synthesized
  source 1..22: mol_type = other DNA
actttaaatccagtagggccta

SEQ ID NO: 156400 - DNA, 22 bp, synthetic construct
  misc_feature 1..22: note = chemically synthesized
  source 1..22: mol_type = other DNA
ctttaaatccagtagggcctag

SEQ ID NO: 156401 - DNA, 22 bp, synthetic construct
  misc_feature 1..22: note = chemically synthesized
  source 1..22: mol_type = other DNA
taaatccagtagggcctagggt

SEQ ID NO: 156402 - DNA, 22 bp, synthetic construct
  misc_feature 1..22: note = chemically synthesized
  source 1..22: mol_type = other DNA
aaatccagtagggcctagggta

SEQ ID NO: 156403 - DNA, 22 bp, synthetic construct
  misc_feature 1..22: note = chemically synthesized
  source 1..22: mol_type = other DNA
aatccagtagggcctagggtaa

SEQ ID NO: 156404 - DNA, 22 bp, synthetic construct
  misc_feature 1..22: note = chemically synthesized
  source 1..22: mol_type = other DNA
gggtaagaggctgaaagtctgt

SEQ ID NO: 156405 - DNA, 22 bp, synthetic construct
  misc_feature 1..22: note = chemically synthesized
  source 1..22: mol_type = other DNA
aaagtctgtgggttttttttac

SEQ ID NO: 156406 - DNA, 22 bp, synthetic construct
  misc_feature 1..22: note = chemically synthesized
  source 1..22: mol_type = other DNA
tgggttttttttacatctgtag

SEQ ID NO: 156407 - DNA, 22 bp, synthetic construct
  misc_feature 1..22: note = chemically synthesized
  source 1..22: mol_type = other DNA
tttttacatctgtagaaataat

SEQ ID NO: 156408 - DNA, 22 bp, synthetic construct
  misc_feature 1..22: note = chemically synthesized
  source 1..22: mol_type = other DNA
ttttacatctgtagaaataata

SEQ ID NO: 156409 - DNA, 22 bp, synthetic construct
  misc_feature 1..22: note = chemically synthesized
  source 1..22: mol_type = other DNA
tttacatctgtagaaataatag

SEQ ID NO: 156410 - DNA, 22 bp, synthetic construct
  misc_feature 1..22: note = chemically synthesized
  source 1..22: mol_type = other DNA
ttacatctgtagaaataatagt

SEQ ID NO: 156411 - DNA, 22 bp, synthetic construct
  misc_feature 1..22: note = chemically synthesized
  source 1..22: mol_type = other DNA
tacatctgtagaaataatagta

SEQ ID NO: 156412 - DNA, 22 bp, synthetic construct
  misc_feature 1..22: note = chemically synthesized
  source 1..22: mol_type = other DNA
acatctgtagaaataatagtat

SEQ ID NO: 156413 - DNA, 22 bp, synthetic construct
  misc_feature 1..22: note = chemically synthesized
  source 1..22: mol_type = other DNA
catctgtagaaataatagtatt

SEQ ID NO: 156414 - DNA, 22 bp, synthetic construct
  misc_feature 1..22: note = chemically synthesized
  source 1..22: mol_type = other DNA
tagaaataatagtatttatata

SEQ ID NO: 156415 - DNA, 22 bp, synthetic construct
  misc_feature 1..22: note = chemically synthesized
  source 1..22: mol_type = other DNA
atataatggttatttaaagggc

SEQ ID NO: 156416 - DNA, 22 bp, synthetic construct
  misc_feature 1..22: note = chemically synthesized
  source 1..22: mol_type = other DNA
tataatggttatttaaagggct

SEQ ID NO: 156417 - DNA, 22 bp, synthetic construct
  misc_feature 1..22: note = chemically synthesized
  source 1..22: mol_type = other DNA
tttaaagggcttttcaataggt

SEQ ID NO: 156418 - DNA, 22 bp, synthetic construct
  misc_feature 1..22: note = chemically synthesized
  source 1..22: mol_type = other DNA
aaagggcttttcaataggttat

SEQ ID NO: 156419 - DNA, 22 bp, synthetic construct
  misc_feature 1..22: note = chemically synthesized
  source 1..22: mol_type = other DNA
aagggcttttcaataggttatt

SEQ ID NO: 156420 - DNA, 22 bp, synthetic construct
  misc_feature 1..22: note = chemically synthesized
  source 1..22: mol_type = other DNA
ttcaataggttattgtgaagat

SEQ ID NO: 156421 - DNA, 22 bp, synthetic construct
  misc_feature 1..22: note = chemically synthesized
  source 1..22: mol_type = other DNA
tcaataggttattgtgaagatt

SEQ ID NO: 156422 - DNA, 22 bp, synthetic construct
  misc_feature 1..22: note = chemically synthesized
  source 1..22: mol_type = other DNA
caataggttattgtgaagattt

SEQ ID NO: 156423 - DNA, 22 bp, synthetic construct
  misc_feature 1..22: note = chemically synthesized
  source 1..22: mol_type = other DNA
aataggttattgtgaagattta

SEQ ID NO: 156424 - DNA, 22 bp, synthetic construct
  misc_feature 1..22: note = chemically synthesized
  source 1..22: mol_type = other DNA
ttgtgaagatttaataagttaa

SEQ ID NO: 156425 - DNA, 22 bp, synthetic construct
  misc_feature 1..22: note = chemically synthesized
  source 1..22: mol_type = other DNA
tgaagatttaataagttaatat

SEQ ID NO: 156426 - DNA, 22 bp, synthetic construct
  misc_feature 1..22: note = chemically synthesized
  source 1..22: mol_type = other DNA
aataagttaatatttgtaaagt

SEQ ID NO: 156427 - DNA, 22 bp, synthetic construct
  misc_feature 1..22: note = chemically synthesized
  source 1..22: mol_type = other DNA
ataagttaatatttgtaaagta

SEQ ID NO: 156428 - DNA, 22 bp, synthetic construct
  misc_feature 1..22: note = chemically synthesized
  source 1..22: mol_type = other DNA
atatttgtaaagtagtatgaca

SEQ ID NO: 156429 - DNA, 22 bp, synthetic construct
  misc_feature 1..22: note = chemically synthesized
  source 1..22: mol_type = other DNA
gtaaagtagtatgacacatatt

SEQ ID NO: 156430 - DNA, 22 bp, synthetic construct
  misc_feature 1..22: note = chemically synthesized
  source 1..22: mol_type = other DNA
taaagtagtatgacacatatta

SEQ ID NO: 156431 - DNA, 22 bp, synthetic construct
  misc_feature 1..22: note = chemically synthesized
  source 1..22: mol_type = other DNA
agcagttattaaataatatcta

SEQ ID NO: 156432 - DNA, 22 bp, synthetic construct
  misc_feature 1..22: note = chemically synthesized
  source 1..22: mol_type = other DNA
ttaaataatatctactaatttt

SEQ ID NO: 156433 - DNA, 22 bp, synthetic construct
  misc_feature 1..22: note = chemically synthesized
  source 1..22: mol_type = other DNA
aataatatctactaatttttta

SEQ ID NO: 156434 - DNA, 22 bp, synthetic construct
  misc_feature 1..22: note = chemically synthesized
  source 1..22: mol_type = other DNA
ctaattttttaaggtacaaaaa

SEQ ID NO: 156435 - DNA, 22 bp, synthetic construct
  misc_feature 1..22: note = chemically synthesized
  source 1..22: mol_type = other DNA
attttttaaggtacaaaaaatt

SEQ ID NO: 156436 - DNA, 22 bp, synthetic construct
  misc_feature 1..22: note = chemically synthesized
  source 1..22: mol_type = other DNA
tttaaggtacaaaaaattaatt

SEQ ID NO: 156437 - DNA, 22 bp, synthetic construct
  misc_feature 1..22: note = chemically synthesized
  source 1..22: mol_type = other DNA
ttaaggtacaaaaaattaatta

SEQ ID NO: 156438 - DNA, 22 bp, synthetic construct
  misc_feature 1..22: note = chemically synthesized
  source 1..22: mol_type = other DNA
taaggtacaaaaaattaattat

SEQ ID NO: 156439 - DNA, 22 bp, synthetic construct
  misc_feature 1..22: note = chemically synthesized
  source 1..22: mol_type = other DNA
aaggtacaaaaaattaattatt

SEQ ID NO: 156440 - DNA, 22 bp, synthetic construct
  misc_feature 1..22: note = chemically synthesized
  source 1..22: mol_type = other DNA
aggtacaaaaaattaattattt

SEQ ID NO: 156441 - DNA, 22 bp, synthetic construct
  misc_feature 1..22: note = chemically synthesized
  source 1..22: mol_type = other DNA
attatttggtaggacttatata

SEQ ID NO: 156442 - DNA, 22 bp, synthetic construct
  misc_feature 1..22: note = chemically synthesized
  source 1..22: mol_type = other DNA
tttggtaggacttatatattcg

SEQ ID NO: 156443 - DNA, 22 bp, synthetic construct
  misc_feature 1..22: note = chemically synthesized
  source 1..22: mol_type = other DNA
ggtaggacttatatattcggtc

SEQ ID NO: 156444 - DNA, 22 bp, synthetic construct
  misc_feature 1..22: note = chemically synthesized
  source 1..22: mol_type = other DNA
gtaggacttatatattcggtct

SEQ ID NO: 156445 - DNA, 22 bp, synthetic construct
  misc_feature 1..22: note = chemically synthesized
  source 1..22: mol_type = other DNA
atatattcggtctattaaccca

SEQ ID NO: 156446 - DNA, 22 bp, synthetic construct
  misc_feature 1..22: note = chemically synthesized
  source 1..22: mol_type = other DNA
tatattcggtctattaacccat

SEQ ID NO: 156447 - DNA, 22 bp, synthetic construct
  misc_feature 1..22: note = chemically synthesized
  source 1..22: mol_type = other DNA
ggtctattaacccattttactc

SEQ ID NO: 156448 - DNA, 22 bp, synthetic construct
  misc_feature 1..22: note = chemically synthesized
  source 1..22: mol_type = other DNA
ttaacccattttactctccttt

SEQ ID NO: 156449 - DNA, 22 bp, synthetic construct
  misc_feature 1..22: note = chemically synthesized
  source 1..22: mol_type = other DNA
acccattttactctcctttccc

SEQ ID NO: 156450 - DNA, 22 bp, synthetic construct
  misc_feature 1..22: note = chemically synthesized
  source 1..22: mol_type = other DNA
tactctcctttcccagagaaga

SEQ ID NO: 156451 - DNA, 22 bp, synthetic construct
  misc_feature 1..22: note = chemically synthesized
  source 1..22: mol_type = other DNA
actctcctttcccagagaagaa

SEQ ID NO: 156452 - DNA, 22 bp, synthetic construct
  misc_feature 1..22: note = chemically synthesized
  source 1..22: mol_type = other DNA
ctctcctttcccagagaagaaa

SEQ ID NO: 156453 - DNA, 22 bp, synthetic construct
  misc_feature 1..22: note = chemically synthesized
  source 1..22: mol_type = other DNA
tcctttcccagagaagaaaaca

SEQ ID NO: 156454 - DNA, 22 bp, synthetic construct
  misc_feature 1..22: note = chemically synthesized
  source 1..22: mol_type = other DNA
ctttcccagagaagaaaacatt

SEQ ID NO: 156455 - DNA, 22 bp, synthetic construct
  misc_feature 1..22: note = chemically synthesized
  source 1..22: mol_type = other DNA
tcccagagaagaaaacattgga

SEQ ID NO: 156456 - DNA, 22 bp, synthetic construct
  misc_feature 1..22: note = chemically synthesized
  source 1..22: mol_type = other DNA
cccagagaagaaaacattggaa

SEQ ID NO: 156457 - DNA, 22 bp, synthetic construct
  misc_feature 1..22: note = chemically synthesized
  source 1..22: mol_type = other DNA
ccagagaagaaaacattggaaa

SEQ ID NO: 156458 - DNA, 22 bp, synthetic construct
  misc_feature 1..22: note = chemically synthesized
  source 1..22: mol_type = other DNA
gaaagaaaacaaatctgatgag

SEQ ID NO: 156459 - DNA, 22 bp, synthetic construct
  misc_feature 1..22: note = chemically synthesized
  source 1..22: mol_type = other DNA
atgagacctcattcagcctaag

SEQ ID NO: 156460 - DNA, 22 bp, synthetic construct
  misc_feature 1..22: note = chemically synthesized
  source 1..22: mol_type = other DNA
attcagcctaaggtagtgtttc

SEQ ID NO: 156461 - DNA, 22 bp, synthetic construct
  misc_feature 1..22: note = chemically synthesized
  source 1..22: mol_type = other DNA
agcctaaggtagtgtttctaaa

SEQ ID NO: 156462 - DNA, 22 bp, synthetic construct
  misc_feature 1..22: note = chemically synthesized
  source 1..22: mol_type = other DNA
aggtagtgtttctaaatcctca

SEQ ID NO: 156463 - DNA, 22 bp, synthetic construct
  misc_feature 1..22: note = chemically synthesized
  source 1..22: mol_type = other DNA
ctaaatcctcaactttgtagtc

SEQ ID NO: 156464 - DNA, 22 bp, synthetic construct
  misc_feature 1..22: note = chemically synthesized
  source 1..22: mol_type = other DNA
taaatcctcaactttgtagtct

SEQ ID NO: 156465 - DNA, 22 bp, synthetic construct
  misc_feature 1..22: note = chemically synthesized
  source 1..22: mol_type = other DNA
aatcctcaactttgtagtcttt

SEQ ID NO: 156466 - DNA, 22 bp, synthetic construct
  misc_feature 1..22: note = chemically synthesized
  source 1..22: mol_type = other DNA
aactttgtagtctttcactaat

SEQ ID NO: 156467 - DNA, 22 bp, synthetic construct
  misc_feature 1..22: note = chemically synthesized
  source 1..22: mol_type = other DNA
tgtagtctttcactaatggcac

SEQ ID NO: 156468 - DNA, 22 bp, synthetic construct
  misc_feature 1..22: note = chemically synthesized
  source 1..22: mol_type = other DNA
gtagtctttcactaatggcact

SEQ ID NO: 156469 - DNA, 22 bp, synthetic construct
  misc_feature 1..22: note = chemically synthesized
  source 1..22: mol_type = other DNA
tagtctttcactaatggcacta

SEQ ID NO: 156470 - DNA, 22 bp, synthetic construct
  misc_feature 1..22: note = chemically synthesized
  source 1..22: mol_type = other DNA
tcactaatggcactaggcctgg

SEQ ID NO: 156471 - DNA, 22 bp, synthetic construct
  misc_feature 1..22: note = chemically synthesized
  source 1..22: mol_type = other DNA
cactaatggcactaggcctgga

SEQ ID NO: 156472 - DNA, 22 bp, synthetic construct
  misc_feature 1..22: note = chemically synthesized
  source 1..22: mol_type = other DNA
actaatggcactaggcctggaa

SEQ ID NO: 156473 - DNA, 22 bp, synthetic construct
  misc_feature 1..22: note = chemically synthesized
  source 1..22: mol_type = other DNA
atggcactaggcctggaataaa

SEQ ID NO: 156474 - DNA, 22 bp, synthetic construct
  misc_feature 1..22: note = chemically synthesized
  source 1..22: mol_type = other DNA
ggcctggaataaactgtacata

SEQ ID NO: 156475 - DNA, 22 bp, synthetic construct
  misc_feature 1..22: note = chemically synthesized
  source 1..22: mol_type = other DNA
gaataaactgtacatacggctc

SEQ ID NO: 156476 - DNA, 22 bp, synthetic construct
  misc_feature 1..22: note = chemically synthesized
  source 1..22: mol_type = other DNA
tacatacggctcctttctttcg

SEQ ID NO: 156477 - DNA, 22 bp, synthetic construct
  misc_feature 1..22: note = chemically synthesized
  source 1..22: mol_type = other DNA
ctttctttcgcaatcacactaa

SEQ ID NO: 156478 - DNA, 22 bp, synthetic construct
  misc_feature 1..22: note = chemically synthesized
  source 1..22: mol_type = other DNA
tctttcgcaatcacactaattc

SEQ ID NO: 156479 - DNA, 22 bp, synthetic construct
  misc_feature 1..22: note = chemically synthesized
  source 1..22: mol_type = other DNA
ctttcgcaatcacactaattcc

SEQ ID NO: 156480 - DNA, 22 bp, synthetic construct
  misc_feature 1..22: note = chemically synthesized
  source 1..22: mol_type = other DNA
tttcgcaatcacactaattccc

SEQ ID NO: 156481 - DNA, 22 bp, synthetic construct
  misc_feature 1..22: note = chemically synthesized
  source 1..22: mol_type = other DNA
tcgcaatcacactaattcccag

SEQ ID NO: 156482 - DNA, 22 bp, synthetic construct
  misc_feature 1..22: note = chemically synthesized
  source 1..22: mol_type = other DNA
cgcaatcacactaattcccagg

SEQ ID NO: 156483 - DNA, 22 bp, synthetic construct
  misc_feature 1..22: note = chemically synthesized
  source 1..22: mol_type = other DNA
gcaatcacactaattcccagga

SEQ ID NO: 156484 - DNA, 22 bp, synthetic construct
  misc_feature 1..22: note = chemically synthesized
  source 1..22: mol_type = other DNA
attcccaggatgtgtggtatgt

SEQ ID NO: 156485 - DNA, 22 bp, synthetic construct
  misc_feature 1..22: note = chemically synthesized
  source 1..22: mol_type = other DNA
ccaggatgtgtggtatgtcctg

SEQ ID NO: 156486 - DNA, 22 bp, synthetic construct
  misc_feature 1..22: note = chemically synthesized
  source 1..22: mol_type = other DNA
atgggaatcccagggctggaag

SEQ ID NO: 156487 - DNA, 22 bp, synthetic construct
  misc_feature 1..22: note = chemically synthesized
  source 1..22: mol_type = other DNA
gaaggcttgcatacctggatct

SEQ ID NO: 156488 - DNA, 22 bp, synthetic construct
  misc_feature 1..22: note = chemically synthesized
  source 1..22: mol_type = other DNA
gcatacctggatctccatccct

SEQ ID NO: 156489 - DNA, 22 bp, synthetic construct
  misc_feature 1..22: note = chemically synthesized
  source 1..22: mol_type = other DNA
catacctggatctccatccctt

SEQ ID NO: 156490 - DNA, 22 bp, synthetic construct
  misc_feature 1..22: note = chemically synthesized
  source 1..22: mol_type = other DNA
gatctccatccctttttctttt

SEQ ID NO: 156491 - DNA, 22 bp, synthetic construct
  misc_feature 1..22: note = chemically synthesized
  source 1..22: mol_type = other DNA
catccctttttcttttatgtac

SEQ ID NO: 156492 - DNA, 22 bp, synthetic construct
  misc_feature 1..22: note = chemically synthesized
  source 1..22: mol_type = other DNA
tttcttttatgtacattgtggc

SEQ ID NO: 156493 - DNA, 22 bp, synthetic construct
  misc_feature 1..22: note = chemically synthesized
  source 1..22: mol_type = other DNA
ttcttttatgtacattgtggct

SEQ ID NO: 156494 - DNA, 22 bp, synthetic construct
  misc_feature 1..22: note = chemically synthesized
  source 1..22: mol_type = other DNA
tcttttatgtacattgtggctg

SEQ ID NO: 156495 - DNA, 22 bp, synthetic construct
  misc_feature 1..22: note = chemically synthesized
  source 1..22: mol_type = other DNA
cttttatgtacattgtggctgt

SEQ ID NO: 156496 - DNA, 22 bp, synthetic construct
  misc_feature 1..22: note = chemically synthesized
  source 1..22: mol_type = other DNA
ttttatgtacattgtggctgtt

SEQ ID NO: 156497 - DNA, 22 bp, synthetic construct
  misc_feature 1..22: note = chemically synthesized
  source 1..22: mol_type = other DNA
ttatgtacattgtggctgttgc

SEQ ID NO: 156498 - DNA, 22 bp, synthetic construct
  misc_feature 1..22: note = chemically synthesized
  source 1..22: mol_type = other DNA
tatgtacattgtggctgttgca

SEQ ID NO: 156499 - DNA, 22 bp, synthetic construct
  misc_feature 1..22: note = chemically synthesized
  source 1..22: mol_type = other DNA
atgtacattgtggctgttgcag

SEQ ID NO: 156500 - DNA, 22 bp, synthetic construct
  misc_feature 1..22: note = chemically synthesized
  source 1..22: mol_type = other DNA
tgtacattgtggctgttgcagg

SEQ ID NO: 156501 - DNA, 22 bp, synthetic construct
  misc_feature 1..22: note = chemically synthesized
  source 1..22: mol_type = other DNA
tggctgttgcaggcaatatctt

SEQ ID NO: 156502 - DNA, 22 bp, synthetic construct
  misc_feature 1..22: note = chemically synthesized
  source 1..22: mol_type = other DNA
ttgcaggcaatatcttcttgat

SEQ ID NO: 156503 - DNA, 22 bp, synthetic construct
  misc_feature 1..22: note = chemically synthesized
  source 1..22: mol_type = other DNA
caggcaatatcttcttgatctt

SEQ ID NO: 156504 - DNA, 22 bp, synthetic construct
  misc_feature 1..22: note = chemically synthesized
  source 1..22: mol_type = other DNA
cttgatcttcctgatcatgact

SEQ ID NO: 156505 - DNA, 22 bp, synthetic construct
  misc_feature 1..22: note = chemically synthesized
  source 1..22: mol_type = other DNA
ttgatcttcctgatcatgactg

SEQ ID NO: 156506 - DNA, 22 bp, synthetic construct
  misc_feature 1..22: note = chemically synthesized
  source 1..22: mol_type = other DNA
gatcttcctgatcatgactgag

SEQ ID NO: 156507 - DNA, 22 bp, synthetic construct
  misc_feature 1..22: note = chemically synthesized
  source 1..22: mol_type = other DNA
atcttcctgatcatgactgagc

SEQ ID NO: 156508 - DNA, 22 bp, synthetic construct
  misc_feature 1..22: note = chemically synthesized
  source 1..22: mol_type = other DNA
cctgatcatgactgagcgcagt

SEQ ID NO: 156509 - DNA, 22 bp, synthetic construct
  misc_feature 1..22: note = chemically synthesized
  source 1..22: mol_type = other DNA
ctgatcatgactgagcgcagtc

SEQ ID NO: 156510 - DNA, 22 bp, synthetic construct
  misc_feature 1..22: note = chemically synthesized
  source 1..22: mol_type = other DNA
atcatgactgagcgcagtctcc

SEQ ID NO: 156511 - DNA, 22 bp, synthetic construct
  misc_feature 1..22: note = chemically synthesized
  source 1..22: mol_type = other DNA
agcgcagtctccatgagcccat

SEQ ID NO: 156512 - DNA, 22 bp, synthetic construct
  misc_feature 1..22: note = chemically synthesized
  source 1..22: mol_type = other DNA
catgagcccatgtatctcttcc

SEQ ID NO: 156513 - DNA, 22 bp, synthetic construct
  misc_feature 1..22: note = chemically synthesized
  source 1..22: mol_type = other DNA
ttcctatccatgctggcctcag

SEQ ID NO: 156514 - DNA, 22 bp, synthetic construct
  misc_feature 1..22: note = chemically synthesized
  source 1..22: mol_type = other DNA
cctatccatgctggcctcagcc

SEQ ID NO: 156515 - DNA, 22 bp, synthetic construct
  misc_feature 1..22: note = chemically synthesized
  source 1..22: mol_type = other DNA
ctatccatgctggcctcagccg

SEQ ID NO: 156516 - DNA, 22 bp, synthetic construct
  misc_feature 1..22: note = chemically synthesized
  source 1..22: mol_type = other DNA
tccatgctggcctcagccgact

SEQ ID NO: 156517 - DNA, 22 bp, synthetic construct
  misc_feature 1..22: note = chemically synthesized
  source 1..22: mol_type = other DNA
gcctcagccgacttcctgctcg

SEQ ID NO: 156518 - DNA, 22 bp, synthetic construct
  misc_feature 1..22: note = chemically synthesized
  source 1..22: mol_type = other DNA
agccgacttcctgctcgccact

SEQ ID NO: 156519 - DNA, 22 bp, synthetic construct
  misc_feature 1..22: note = chemically synthesized
  source 1..22: mol_type = other DNA
cctgctcgccactgctgcagcc

SEQ ID NO: 156520 - DNA, 22 bp, synthetic construct
  misc_feature 1..22: note = chemically synthesized
  source 1..22: mol_type = other DNA
ctgctcgccactgctgcagccc

SEQ ID NO: 156521 - DNA, 22 bp, synthetic construct
  misc_feature 1..22: note = chemically synthesized
  source 1..22: mol_type = other DNA
ctcgccactgctgcagccccta

SEQ ID NO: 156522 - DNA, 22 bp, synthetic construct
  misc_feature 1..22: note = chemically synthesized
  source 1..22: mol_type = other DNA
gccactgctgcagcccctaagg

SEQ ID NO: 156523 - DNA, 22 bp, synthetic construct
  misc_feature 1..22: note = chemically synthesized
  source 1..22: mol_type = other DNA
ctgcagcccctaaggtgctggc

SEQ ID NO: 156524 - DNA, 22 bp, synthetic construct
  misc_feature 1..22: note = chemically synthesized
  source 1..22: mol_type = other DNA
cagcccctaaggtgctggctat

SEQ ID NO: 156525 - DNA, 22 bp, synthetic construct
  misc_feature 1..22: note = chemically synthesized
  source 1..22: mol_type = other DNA
aggtgctggctatcctctggtt

SEQ ID NO: 156526 - DNA, 22 bp, synthetic construct
  misc_feature 1..22: note = chemically synthesized
  source 1..22: mol_type = other DNA
gctatcctctggttccactcca

SEQ ID NO: 156527 - DNA, 22 bp, synthetic construct
  misc_feature 1..22: note = chemically synthesized
  source 1..22: mol_type = other DNA
tcctctggttccactccatgga

SEQ ID NO: 156528 - DNA, 22 bp, synthetic construct
  misc_feature 1..22: note = chemically synthesized
  source 1..22: mol_type = other DNA
tggttccactccatggacatat

SEQ ID NO: 156529 - DNA, 22 bp, synthetic construct
  misc_feature 1..22: note = chemically synthesized
  source 1..22: mol_type = other DNA
gttccactccatggacatatcc

SEQ ID NO: 156530 - DNA, 22 bp, synthetic construct
  misc_feature 1..22: note = chemically synthesized
  source 1..22: mol_type = other DNA
cactccatggacatatcctttg

SEQ ID NO: 156531 - DNA, 22 bp, synthetic construct
  misc_feature 1..22: note = chemically synthesized
  source 1..22: mol_type = other DNA
catggacatatcctttggtagt

SEQ ID NO: 156532 - DNA, 22 bp, synthetic construct
  misc_feature 1..22: note = chemically synthesized
  source 1..22: mol_type = other DNA
tggtagttgtgtgtctcagatg

SEQ ID NO: 156533 - DNA, 22 bp, synthetic construct
  misc_feature 1..22: note = chemically synthesized
  source 1..22: mol_type = other DNA
ggtagttgtgtgtctcagatgt

SEQ ID NO: 156534 - DNA, 22 bp, synthetic construct
  misc_feature 1..22: note = chemically synthesized
  source 1..22: mol_type = other DNA
gtagttgtgtgtctcagatgtt

SEQ ID NO: 156535 - DNA, 22 bp, synthetic construct
  misc_feature 1..22: note = chemically synthesized
  source 1..22: mol_type = other DNA
tgtgtctcagatgttcttcata

SEQ ID NO: 156536 - DNA, 22 bp, synthetic construct
  misc_feature 1..22: note = chemically synthesized
  source 1..22: mol_type = other DNA
agatgttcttcatacatttcat

SEQ ID NO: 156537 - DNA, 22 bp, synthetic construct
  misc_feature 1..22: note = chemically synthesized
  source 1..22: mol_type = other DNA
ttcatacatttcatctttgtgg

SEQ ID NO: 156538 - DNA, 22 bp, synthetic construct
  misc_feature 1..22: note = chemically synthesized
  source 1..22: mol_type = other DNA
catacatttcatctttgtggca

SEQ ID NO: 156539 - DNA, 22 bp, synthetic construct
  misc_feature 1..22: note = chemically synthesized
  source 1..22: mol_type = other DNA
atacatttcatctttgtggcag

SEQ ID NO: 156540 - DNA, 22 bp, synthetic construct
  misc_feature 1..22: note = chemically synthesized
  source 1..22: mol_type = other DNA
catctttgtggcagaatctgct

SEQ ID NO: 156541 - DNA, 22 bp, synthetic construct
  misc_feature 1..22: note = chemically synthesized
  source 1..22: mol_type = other DNA
atctttgtggcagaatctgcta

SEQ ID NO: 156542 - DNA, 22 bp, synthetic construct
  misc_feature 1..22: note = chemically synthesized
  source 1..22: mol_type = other DNA
tgtggcagaatctgctattctc

SEQ ID NO: 156543 - DNA, 22 bp, synthetic construct
  misc_feature 1..22: note = chemically synthesized
  source 1..22: mol_type = other DNA
gtggcagaatctgctattctcc

SEQ ID NO: 156544 - DNA, 22 bp, synthetic construct
  misc_feature 1..22: note = chemically synthesized
  source 1..22: mol_type = other DNA
tggcagaatctgctattctcct

SEQ ID NO: 156545 - DNA, 22 bp, synthetic construct
  misc_feature 1..22: note = chemically synthesized
  source 1..22: mol_type = other DNA
ctattctcctggcaatggcatt

SEQ ID NO: 156546 - DNA, 22 bp, synthetic construct
  misc_feature 1..22: note = chemically synthesized
  source 1..22: mol_type = other DNA
ttctcctggcaatggcatttga

SEQ ID NO: 156547 - DNA, 22 bp, synthetic construct
  misc_feature 1..22: note = chemically synthesized
  source 1..22: mol_type = other DNA
tcctggcaatggcatttgaccg

SEQ ID NO: 156548 - DNA, 22 bp, synthetic construct
  misc_feature 1..22: note = chemically synthesized
  source 1..22: mol_type = other DNA
ctggcaatggcatttgaccgct

SEQ ID NO: 156549 - DNA, 22 bp, synthetic construct
  misc_feature 1..22: note = chemically synthesized
  source 1..22: mol_type = other DNA
gcaatggcatttgaccgctatg

SEQ ID NO: 156550 - DNA, 22 bp, synthetic construct
  misc_feature 1..22: note = chemically synthesized
  source 1..22: mol_type = other DNA
gaccgctatgtggccatctgtt

SEQ ID NO: 156551 - DNA, 22 bp, synthetic construct
  misc_feature 1..22: note = chemically synthesized
  source 1..22: mol_type = other DNA
accgctatgtggccatctgtta

SEQ ID NO: 156552 - DNA, 22 bp, synthetic construct
  misc_feature 1..22: note = chemically synthesized
  source 1..22: mol_type = other DNA
tgtggccatctgttacccactg

SEQ ID NO: 156553 - DNA, 22 bp, synthetic construct
  misc_feature 1..22: note = chemically synthesized
  source 1..22: mol_type = other DNA
ttacccactgagatacaccatt

SEQ ID NO: 156554 - DNA, 22 bp, synthetic construct
  misc_feature 1..22: note = chemically synthesized
  source 1..22: mol_type = other DNA
cccactgagatacaccatttta

SEQ ID NO: 156555 - DNA, 22 bp, synthetic construct
  misc_feature 1..22: note = chemically synthesized
  source 1..22: mol_type = other DNA
agatacaccattttaacctcat

SEQ ID NO: 156556 - DNA, 22 bp, synthetic construct
  misc_feature 1..22: note = chemically synthesized
  source 1..22: mol_type = other DNA
taacctcatcagccgtcaggaa

SEQ ID NO: 156557 - DNA, 22 bp, synthetic construct
  misc_feature 1..22: note = chemically synthesized
  source 1..22: mol_type = other DNA
aacctcatcagccgtcaggaag

SEQ ID NO: 156558 - DNA, 22 bp, synthetic construct
  misc_feature 1..22: note = chemically synthesized
  source 1..22: mol_type = other DNA
acctcatcagccgtcaggaaga

SEQ ID NO: 156559 - DNA, 22 bp, synthetic construct
  misc_feature 1..22: note = chemically synthesized
  source 1..22: mol_type = other DNA
atcagccgtcaggaagattggc

SEQ ID NO: 156560 - DNA, 22 bp, synthetic construct
  misc_feature 1..22: note = chemically synthesized
  source 1..22: mol_type = other DNA
gcatagcagctgtggtcaggag

SEQ ID NO: 156561 - DNA, 22 bp, synthetic construct
  misc_feature 1..22: note = chemically synthesized
  source 1..22: mol_type = other DNA
tggtcaggagctttttcatctg

SEQ ID NO: 156562 - DNA, 22 bp, synthetic construct
  misc_feature 1..22: note = chemically synthesized
  source 1..22: mol_type = other DNA
tttcatctgctgtccgttcatc

SEQ ID NO: 156563 - DNA, 22 bp, synthetic construct
  misc_feature 1..22: note = chemically synthesized
  source 1..22: mol_type = other DNA
ttcatctgctgtccgttcatct

SEQ ID NO: 156564 - DNA, 22 bp, synthetic construct
  misc_feature 1..22: note = chemically synthesized
  source 1..22: mol_type = other DNA
tcatctgctgtccgttcatctt

SEQ ID NO: 156565 - DNA, 22 bp, synthetic construct
  misc_feature 1..22: note = chemically synthesized
  source 1..22: mol_type = other DNA
catctgctgtccgttcatcttc

SEQ ID NO: 156566 - DNA, 22 bp, synthetic construct
  misc_feature 1..22: note = chemically synthesized
  source 1..22: mol_type = other DNA
atctgctgtccgttcatcttcc

SEQ ID NO: 156567 - DNA, 22 bp, synthetic construct
  misc_feature 1..22: note = chemically synthesized
  source 1..22: mol_type = other DNA
ctgtccgttcatcttcctggta

SEQ ID NO: 156568 - DNA, 22 bp, synthetic construct
  misc_feature 1..22: note = chemically synthesized
  source 1..22: mol_type = other DNA
tccgttcatcttcctggtatac

SEQ ID NO: 156569 - DNA, 22 bp, synthetic construct
  misc_feature 1..22: note = chemically synthesized
  source 1..22: mol_type = other DNA
atcttcctggtataccgactta

SEQ ID NO: 156570 - DNA, 22 bp, synthetic construct
  misc_feature 1..22: note = chemically synthesized
  source 1..22: mol_type = other DNA
cctggtataccgacttacatat

SEQ ID NO: 156571 - DNA, 22 bp, synthetic construct
  misc_feature 1..22: note = chemically synthesized
  source 1..22: mol_type = other DNA
ctggtataccgacttacatatt

SEQ ID NO: 156572 - DNA, 22 bp, synthetic construct
  misc_feature 1..22: note = chemically synthesized
  source 1..22: mol_type = other DNA
gtataccgacttacatattgtg

SEQ ID NO: 156573 - DNA, 22 bp, synthetic construct
  misc_feature 1..22: note = chemically synthesized
  source 1..22: mol_type = other DNA
acatattgtgggagaaacatca

SEQ ID NO: 156574 - DNA, 22 bp, synthetic construct
  misc_feature 1..22: note = chemically synthesized
  source 1..22: mol_type = other DNA
catattgtgggagaaacatcat

SEQ ID NO: 156575 - DNA, 22 bp, synthetic construct
  misc_feature 1..22: note = chemically synthesized
  source 1..22: mol_type = other DNA
tgggagaaacatcattcctcat

SEQ ID NO: 156576 - DNA, 22 bp, synthetic construct
  misc_feature 1..22: note = chemically synthesized
  source 1..22: mol_type = other DNA
ctcattcctactgtgagcacat

SEQ ID NO: 156577 - DNA, 22 bp, synthetic construct
  misc_feature 1..22: note = chemically synthesized
  source 1..22: mol_type = other DNA
attcctactgtgagcacattgc

SEQ ID NO: 156578 - DNA, 22 bp, synthetic construct
  misc_feature 1..22: note = chemically synthesized
  source 1..22: mol_type = other DNA
ctactgtgagcacattgccaga

SEQ ID NO: 156579 - DNA, 22 bp, synthetic construct
  misc_feature 1..22: note = chemically synthesized
  source 1..22: mol_type = other DNA
ctgtgagcacattgccagattg

SEQ ID NO: 156580 - DNA, 22 bp, synthetic construct
  misc_feature 1..22: note = chemically synthesized
  source 1..22: mol_type = other DNA
tgagcacattgccagattggct

SEQ ID NO: 156581 - DNA, 22 bp, synthetic construct
  misc_feature 1..22: note = chemically synthesized
  source 1..22: mol_type = other DNA
ccagattggcttgtggcaatat

SEQ ID NO: 156582 - DNA, 22 bp, synthetic construct
  misc_feature 1..22: note = chemically synthesized
  source 1..22: mol_type = other DNA
gcttgtggcaatatcaatgtca

SEQ ID NO: 156583 - DNA, 22 bp, synthetic construct
  misc_feature 1..22: note = chemically synthesized
  source 1..22: mol_type = other DNA
gtggcaatatcaatgtcaatat

SEQ ID NO: 156584 - DNA, 22 bp, synthetic construct
  misc_feature 1..22: note = chemically synthesized
  source 1..22: mol_type = other DNA
tggcaatatcaatgtcaatatc

SEQ ID NO: 156585 - DNA, 22 bp, synthetic construct
  misc_feature 1..22: note = chemically synthesized
  source 1..22: mol_type = other DNA
atggcctcactgtggccctact

SEQ ID NO: 156586 - DNA, 22 bp, synthetic construct
  misc_feature 1..22: note = chemically synthesized
  source 1..22: mol_type = other DNA
tggcctcactgtggccctactc

SEQ ID NO: 156587 - DNA, 22 bp, synthetic construct
  misc_feature 1..22: note = chemically synthesized
  source 1..22: mol_type = other DNA
actgtggccctactctctacag

SEQ ID NO: 156588 - DNA, 22 bp, synthetic construct
  misc_feature 1..22: note = chemically synthesized
  source 1..22: mol_type = other DNA
tggccctactctctacaggact

SEQ ID NO: 156589 - DNA, 22 bp, synthetic construct
  misc_feature 1..22: note = chemically synthesized
  source 1..22: mol_type = other DNA
ctctctacaggactggatatag

SEQ ID NO: 156590 - DNA, 22 bp, synthetic construct
  misc_feature 1..22: note = chemically synthesized
  source 1..22: mol_type = other DNA
tctacaggactggatatagtgc

SEQ ID NO: 156591 - DNA, 22 bp, synthetic construct
  misc_feature 1..22: note = chemically synthesized
  source 1..22: mol_type = other DNA
tacaggactggatatagtgctt

SEQ ID NO: 156592 - DNA, 22 bp, synthetic construct
  misc_feature 1..22: note = chemically synthesized
  source 1..22: mol_type = other DNA
caggactggatatagtgcttat

SEQ ID NO: 156593 - DNA, 22 bp, synthetic construct
  misc_feature 1..22: note = chemically synthesized
  source 1..22: mol_type = other DNA
gatatagtgcttatcattatat

SEQ ID NO: 156594 - DNA, 22 bp, synthetic construct
  misc_feature 1..22: note = chemically synthesized
  source 1..22: mol_type = other DNA
atcattatatcctacacaatga

SEQ ID NO: 156595 - DNA, 22 bp, synthetic construct
  misc_feature 1..22: note = chemically synthesized
  source 1..22: mol_type = other DNA
tcattatatcctacacaatgat

SEQ ID NO: 156596 - DNA, 22 bp, synthetic construct
  misc_feature 1..22: note = chemically synthesized
  source 1..22: mol_type = other DNA
tatcctacacaatgatccttca

SEQ ID NO: 156597 - DNA, 22 bp, synthetic construct
  misc_feature 1..22: note = chemically synthesized
  source 1..22: mol_type = other DNA
cacaatgatccttcactcagtg

SEQ ID NO: 156598 - DNA, 22 bp, synthetic construct
  misc_feature 1..22: note = chemically synthesized
  source 1..22: mol_type = other DNA
cactcagtgtttcagatatctt

SEQ ID NO: 156599 - DNA, 22 bp, synthetic construct
  misc_feature 1..22: note = chemically synthesized
  source 1..22: mol_type = other DNA
actcagtgtttcagatatcttc

SEQ ID NO: 156600 - DNA, 22 bp, synthetic construct
  misc_feature 1..22: note = chemically synthesized
  source 1..22: mol_type = other DNA
agtgtttcagatatcttcctgg

SEQ ID NO: 156601 - DNA, 22 bp, synthetic construct
  misc_feature 1..22: note = chemically synthesized
  source 1..22: mol_type = other DNA
cagatatcttcctgggctgcca

SEQ ID NO: 156602 - DNA, 22 bp, synthetic construct
  misc_feature 1..22: note = chemically synthesized
  source 1..22: mol_type = other DNA
agatatcttcctgggctgccag

SEQ ID NO: 156603 - DNA, 22 bp, synthetic construct
  misc_feature 1..22: note = chemically synthesized
  source 1..22: mol_type = other DNA
cctgggctgccaggttcaaggc

SEQ ID NO: 156604 - DNA, 22 bp, synthetic construct
  misc_feature 1..22: note = chemically synthesized
  source 1..22: mol_type = other DNA
ctgggctgccaggttcaaggcc

SEQ ID NO: 156605 - DNA, 22 bp, synthetic construct
  misc_feature 1..22: note = chemically synthesized
  source 1..22: mol_type = other DNA
ggctgccaggttcaaggccctt

SEQ ID NO: 156606 - DNA, 22 bp, synthetic construct
  misc_feature 1..22: note = chemically synthesized
  source 1..22: mol_type = other DNA
ccaggttcaaggcccttagtac

SEQ ID NO: 156607 - DNA, 22 bp, synthetic construct
  misc_feature 1..22: note = chemically synthesized
  source 1..22: mol_type = other DNA
aaggcccttagtacgtgcggct

SEQ ID NO: 156608 - DNA, 22 bp, synthetic construct
  misc_feature 1..22: note = chemically synthesized
  source 1..22: mol_type = other DNA
agtacgtgcggctctcatatct

SEQ ID NO: 156609 - DNA, 22 bp, synthetic construct
  misc_feature 1..22: note = chemically synthesized
  source 1..22: mol_type = other DNA
gtacgtgcggctctcatatctg

SEQ ID NO: 156610 - DNA, 22 bp, synthetic construct
  misc_feature 1..22: note = chemically synthesized
  source 1..22: mol_type = other DNA
tcatatctgtgtcatatttatg

SEQ ID NO: 156611 - DNA, 22 bp, synthetic construct
  misc_feature 1..22: note = chemically synthesized
  source 1..22: mol_type = other DNA
atatctgtgtcatatttatgtt

SEQ ID NO: 156612 - DNA, 22 bp, synthetic construct
  misc_feature 1..22: note = chemically synthesized
  source 1..22: mol_type = other DNA
tgtcatatttatgttctatacc

SEQ ID NO: 156613 - DNA, 22 bp, synthetic construct
  misc_feature 1..22: note = chemically synthesized
  source 1..22: mol_type = other DNA
atgttctataccccagcattct

SEQ ID NO: 156614 - DNA, 22 bp, synthetic construct
  misc_feature 1..22: note = chemically synthesized
  source 1..22: mol_type = other DNA
tgttctataccccagcattctt

SEQ ID NO: 156615 - DNA, 22 bp, synthetic construct
  misc_feature 1..22: note = chemically synthesized
  source 1..22: mol_type = other DNA
tataccccagcattcttttcat

SEQ ID NO: 156616 - DNA, 22 bp, synthetic construct
  misc_feature 1..22: note = chemically synthesized
  source 1..22: mol_type = other DNA
taccccagcattcttttcattt

SEQ ID NO: 156617 - DNA, 22 bp, synthetic construct
  misc_feature 1..22: note = chemically synthesized
  source 1..22: mol_type = other DNA
ttttcatttcttgcccatcgct

SEQ ID NO: 156618 - DNA, 22 bp, synthetic construct
  misc_feature 1..22: note = chemically synthesized
  source 1..22: mol_type = other DNA
ttcatttcttgcccatcgcttt

SEQ ID NO: 156619 - DNA, 22 bp, synthetic construct
  misc_feature 1..22: note = chemically synthesized
  source 1..22: mol_type = other DNA
tcatttcttgcccatcgctttg

SEQ ID NO: 156620 - DNA, 22 bp, synthetic construct
  misc_feature 1..22: note = chemically synthesized
  source 1..22: mol_type = other DNA
catttcttgcccatcgctttgg

SEQ ID NO: 156621 - DNA, 22 bp, synthetic construct
  misc_feature 1..22: note = chemically synthesized
  source 1..22: mol_type = other DNA
atttcttgcccatcgctttgga

SEQ ID NO: 156622 - DNA, 22 bp, synthetic construct
  misc_feature 1..22: note = chemically synthesized
  source 1..22: mol_type = other DNA
cttgcccatcgctttggaggta

SEQ ID NO: 156623 - DNA, 22 bp, synthetic construct
  misc_feature 1..22: note = chemically synthesized
  source 1..22: mol_type = other DNA
ttgcccatcgctttggaggtaa

SEQ ID NO: 156624 - DNA, 22 bp, synthetic construct
  misc_feature 1..22: note = chemically synthesized
  source 1..22: mol_type = other DNA
gcccatcgctttggaggtaaaa

SEQ ID NO: 156625 - DNA, 22 bp, synthetic construct
  misc_feature 1..22: note = chemically synthesized
  source 1..22: mol_type = other DNA
cccatcgctttggaggtaaaac

SEQ ID NO: 156626 - DNA, 22 bp, synthetic construct
  misc_feature 1..22: note = chemically synthesized
  source 1..22: mol_type = other DNA
tggaggtaaaaccatccctcac

SEQ ID NO: 156627 - DNA, 22 bp, synthetic construct
  misc_feature 1..22: note = chemically synthesized
  source 1..22: mol_type = other DNA
ggaggtaaaaccatccctcacc

SEQ ID NO: 156628 - DNA, 22 bp, synthetic construct
  misc_feature 1..22: note = chemically synthesized
  source 1..22: mol_type = other DNA
gaggtaaaaccatccctcacca

SEQ ID NO: 156629 - DNA, 22 bp, synthetic construct
  misc_feature 1..22: note = chemically synthesized
  source 1..22: mol_type = other DNA
accacattcacatcctagtggg

SEQ ID NO: 156630 - DNA, 22 bp, synthetic construct
  misc_feature 1..22: note = chemically synthesized
  source 1..22: mol_type = other DNA
acatcctagtgggcagtctcta

SEQ ID NO: 156631 - DNA, 22 bp, synthetic construct
  misc_feature 1..22: note = chemically synthesized
  source 1..22: mol_type = other DNA
gtgggcagtctctatgtgttag

SEQ ID NO: 156632 - DNA, 22 bp, synthetic construct
  misc_feature 1..22: note = chemically synthesized
  source 1..22: mol_type = other DNA
tatgtgttagtgccccctatgc

SEQ ID NO: 156633 - DNA, 22 bp, synthetic construct
  misc_feature 1..22: note = chemically synthesized
  source 1..22: mol_type = other DNA
tgtgttagtgccccctatgcta

SEQ ID NO: 156634 - DNA, 22 bp, synthetic construct
  misc_feature 1..22: note = chemically synthesized
  source 1..22: mol_type = other DNA
gtgccccctatgctaaacccca

SEQ ID NO: 156635 - DNA, 22 bp, synthetic construct
  misc_feature 1..22: note = chemically synthesized
  source 1..22: mol_type = other DNA
tgctaaaccccatcatttatgg

SEQ ID NO: 156636 - DNA, 22 bp, synthetic construct
  misc_feature 1..22: note = chemically synthesized
  source 1..22: mol_type = other DNA
aaccccatcatttatggggtga

SEQ ID NO: 156637 - DNA, 22 bp, synthetic construct
  misc_feature 1..22: note = chemically synthesized
  source 1..22: mol_type = other DNA
atggggtgaagaccaaacaaat

SEQ ID NO: 156638 - DNA, 22 bp, synthetic construct
  misc_feature 1..22: note = chemically synthesized
  source 1..22: mol_type = other DNA
tggggtgaagaccaaacaaatt

SEQ ID NO: 156639 - DNA, 22 bp, synthetic construct
  misc_feature 1..22: note = chemically synthesized
  source 1..22: mol_type = other DNA
aagatcgagtgattttgctttt

SEQ ID NO: 156640 - DNA, 22 bp, synthetic construct
  misc_feature 1..22: note = chemically synthesized
  source 1..22: mol_type = other DNA
tgcttttctctcctatcagtgt

SEQ ID NO: 156641 - DNA, 22 bp, synthetic construct
  misc_feature 1..22: note = chemically synthesized
  source 1..22: mol_type = other DNA
gcttttctctcctatcagtgta

SEQ ID NO: 156642 - DNA, 22 bp, synthetic construct
  misc_feature 1..22: note = chemically synthesized
  source 1..22: mol_type = other DNA
cttttctctcctatcagtgtat

SEQ ID NO: 156643 - DNA, 22 bp, synthetic construct
  misc_feature 1..22: note = chemically synthesized
  source 1..22: mol_type = other DNA
ttctctcctatcagtgtatgct

SEQ ID NO: 156644 - DNA, 22 bp, synthetic construct
  misc_feature 1..22: note = chemically synthesized
  source 1..22: mol_type = other DNA
tctctcctatcagtgtatgctg

SEQ ID NO: 156645 - DNA, 22 bp, synthetic construct
  misc_feature 1..22: note = chemically synthesized
  source 1..22: mol_type = other DNA
ctctcctatcagtgtatgctgt

SEQ ID NO: 156646 - DNA, 22 bp, synthetic construct
  misc_feature 1..22: note = chemically synthesized
  source 1..22: mol_type = other DNA
tctcctatcagtgtatgctgtt

SEQ ID NO: 156647 - DNA, 22 bp, synthetic construct
  misc_feature 1..22: note = chemically synthesized
  source 1..22: mol_type = other DNA
tcctatcagtgtatgctgttaa

SEQ ID NO: 156648 - DNA, 22 bp, synthetic construct
  misc_feature 1..22: note = chemically synthesized
  source 1..22: mol_type = other DNA
ctatcagtgtatgctgttaaga

SEQ ID NO: 156649 - DNA, 22 bp, synthetic construct
  misc_feature 1..22: note = chemically synthesized
  source 1..22: mol_type = other DNA
tcagtgtatgctgttaagatta

SEQ ID NO: 156650 - DNA, 22 bp, synthetic construct
  misc_feature 1..22: note = chemically synthesized
  source 1..22: mol_type = other DNA
ttaagattaaaaagtctgtttt

SEQ ID NO: 156651 - DNA, 22 bp, synthetic construct
  misc_feature 1..22: note = chemically synthesized
  source 1..22: mol_type = other DNA
agattaaaaagtctgttttagg

SEQ ID NO: 156652 - DNA, 22 bp, synthetic construct
  misc_feature 1..22: note = chemically synthesized
  source 1..22: mol_type = other DNA
aaaagtctgttttagggaatag

SEQ ID NO: 156653 - DNA, 22 bp, synthetic construct
  misc_feature 1..22: note = chemically synthesized
  source 1..22: mol_type = other DNA
ttttagggaatagaataaatac

SEQ ID NO: 156654 - DNA, 22 bp, synthetic construct
  misc_feature 1..22: note = chemically synthesized
  source 1..22: mol_type = other DNA
tagggaatagaataaatacaat

SEQ ID NO: 156655 - DNA, 22 bp, synthetic construct
  misc_feature 1..22: note = chemically synthesized
  source 1..22: mol_type = other DNA
agggaatagaataaatacaatc

SEQ ID NO: 156656 - DNA, 22 bp, synthetic construct
  misc_feature 1..22: note = chemically synthesized
  source 1..22: mol_type = other DNA
gggaatagaataaatacaatcc

SEQ ID NO: 156657 - DNA, 22 bp, synthetic construct
  misc_feature 1..22: note = chemically synthesized
  source 1..22: mol_type = other DNA
aaacacacttaaaatgatggtg

SEQ ID NO: 156658 - DNA, 22 bp, synthetic construct
  misc_feature 1..22: note = chemically synthesized
  source 1..22: mol_type = other DNA
aaaatgatggtgtctatcaaag

SEQ ID NO: 156659 - DNA, 22 bp, synthetic construct
  misc_feature 1..22: note = chemically synthesized
  source 1..22: mol_type = other DNA
aaatgatggtgtctatcaaagt

SEQ ID NO: 156660 - DNA, 22 bp, synthetic construct
  misc_feature 1..22: note = chemically synthesized
  source 1..22: mol_type = other DNA
tcaaagtgtccacggaattttg

SEQ ID NO: 156661 - DNA, 22 bp, synthetic construct
  misc_feature 1..22: note = chemically synthesized
  source 1..22: mol_type = other DNA
tgctaaggcactcaaagatcaa

SEQ ID NO: 156662 - DNA, 22 bp, synthetic construct
  misc_feature 1..22: note = chemically synthesized
  source 1..22: mol_type = other DNA
gctaaggcactcaaagatcaaa

SEQ ID NO: 156663 - DNA, 22 bp, synthetic construct
  misc_feature 1..22: note = chemically synthesized
  source 1..22: mol_type = other DNA
ctaaggcactcaaagatcaaag

SEQ ID NO: 156664 - DNA, 22 bp, synthetic construct
  misc_feature 1..22: note = chemically synthesized
  source 1..22: mol_type = other DNA
aggcactcaaagatcaaaggtt

SEQ ID NO: 156665 - DNA, 22 bp, synthetic construct
  misc_feature 1..22: note = chemically synthesized
  source 1..22: mol_type = other DNA
aaagatcaaaggttttgaaaaa

SEQ ID NO: 156666 - DNA, 22 bp, synthetic construct
  misc_feature 1..22: note = chemically synthesized
  source 1..22: mol_type = other DNA
tgaaaaaaaaaatactttaatg

SEQ ID NO: 156667 - DNA, 22 bp, synthetic construct
  misc_feature 1..22: note = chemically synthesized
  source 1..22: mol_type = other DNA
gaaaaaaaaaatactttaatga

SEQ ID NO: 156668 - DNA, 22 bp, synthetic construct
  misc_feature 1..22: note = chemically synthesized
  source 1..22: mol_type = other DNA
aaaaaaaaaatactttaatgaa

SEQ ID NO: 156669 - DNA, 22 bp, synthetic construct
  misc_feature 1..22: note = chemically synthesized
  source 1..22: mol_type = other DNA
taatgaaattctccattttttc

SEQ ID NO: 156670 - DNA, 22 bp, synthetic construct
  misc_feature 1..22: note = chemically synthesized
  source 1..22: mol_type = other DNA
aatgaaattctccattttttca

SEQ ID NO: 156671 - DNA, 22 bp, synthetic construct
  misc_feature 1..22: note = chemically synthesized
  source 1..22: mol_type = other DNA
atgaaattctccattttttcag

SEQ ID NO: 156672 - DNA, 22 bp, synthetic construct
  misc_feature 1..22: note = chemically synthesized
  source 1..22: mol_type = other DNA
tccattttttcagaaatactat

SEQ ID NO: 156673 - DNA, 22 bp, synthetic construct
  misc_feature 1..22: note = chemically synthesized
  source 1..22: mol_type = other DNA
cattttttcagaaatactattt

SEQ ID NO: 156674 - DNA, 22 bp, synthetic construct
  misc_feature 1..22: note = chemically synthesized
  source 1..22: mol_type = other DNA
tttcagaaatactattttcatg

SEQ ID NO: 156675 - DNA, 22 bp, synthetic construct
  misc_feature 1..22: note = chemically synthesized
  source 1..22: mol_type = other DNA
ttcagaaatactattttcatga

SEQ ID NO: 156676 - DNA, 22 bp, synthetic construct
  misc_feature 1..22: note = chemically synthesized
  source 1..22: mol_type = other DNA
tcagaaatactattttcatgaa

SEQ ID NO: 156677 - DNA, 22 bp, synthetic construct
  misc_feature 1..22: note = chemically synthesized
  source 1..22: mol_type = other DNA
cagaaatactattttcatgaat

SEQ ID NO: 156678 - DNA, 22 bp, synthetic construct
  misc_feature 1..22: note = chemically synthesized
  source 1..22: mol_type = other DNA
agaaatactattttcatgaatt

SEQ ID NO: 156679 - DNA, 22 bp, synthetic construct
  misc_feature 1..22: note = chemically synthesized
  source 1..22: mol_type = other DNA
ttttcatgaattttaacttaaa

SEQ ID NO: 156680 - DNA, 22 bp, synthetic construct
  misc_feature 1..22: note = chemically synthesized
  source 1..22: mol_type = other DNA
tcatgaattttaacttaaaaat

SEQ ID NO: 156681 - DNA, 22 bp, synthetic construct
  misc_feature 1..22: note = chemically synthesized
  source 1..22: mol_type = other DNA
catgaattttaacttaaaaata

SEQ ID NO: 156682 - DNA, 22 bp, synthetic construct
  misc_feature 1..22: note = chemically synthesized
  source 1..22: mol_type = other DNA
atgaattttaacttaaaaatat

SEQ ID NO: 156683 - DNA, 22 bp, synthetic construct
  misc_feature 1..22: note = chemically synthesized
  source 1..22: mol_type = other DNA
taacttaaaaatatataaagat

SEQ ID NO: 156684 - DNA, 22 bp, synthetic construct
  misc_feature 1..22: note = chemically synthesized
  source 1..22: mol_type = other DNA
aacttaaaaatatataaagata

SEQ ID NO: 156685 - DNA, 22 bp, synthetic construct
  misc_feature 1..22: note = chemically synthesized
  source 1..22: mol_type = other DNA
acttaaaaatatataaagataa

SEQ ID NO: 156686 - DNA, 22 bp, synthetic construct
  misc_feature 1..22: note = chemically synthesized
  source 1..22: mol_type = other DNA
aaaaatatataaagataatcga

SEQ ID NO: 156687 - DNA, 22 bp, synthetic construct
  misc_feature 1..22: note = chemically synthesized
  source 1..22: mol_type = other DNA
aaaatatataaagataatcgag

SEQ ID NO: 156688 - DNA, 22 bp, synthetic construct
  misc_feature 1..22: note = chemically synthesized
  source 1..22: mol_type = other DNA
tagggtttaatccagattgact

SEQ ID NO: 156689 - DNA, 22 bp, synthetic construct
  misc_feature 1..22: note = chemically synthesized
  source 1..22: mol_type = other DNA
agggtttaatccagattgactt

SEQ ID NO: 156690 - DNA, 22 bp, synthetic construct
  misc_feature 1..22: note = chemically synthesized
  source 1..22: mol_type = other DNA
gggtttaatccagattgacttt

SEQ ID NO: 156691 - DNA, 22 bp, synthetic construct
  misc_feature 1..22: note = chemically synthesized
  source 1..22: mol_type = other DNA
aatccagattgacttttcctac

SEQ ID NO: 156692 - DNA, 22 bp, synthetic construct
  misc_feature 1..22: note = chemically synthesized
  source 1..22: mol_type = other DNA
atccagattgacttttcctacg

SEQ ID NO: 156693 - DNA, 22 bp, synthetic construct
  misc_feature 1..22: note = chemically synthesized
  source 1..22: mol_type = other DNA
acttttcctacgtagagctagg

SEQ ID NO: 156694 - DNA, 22 bp, synthetic construct
  misc_feature 1..22: note = chemically synthesized
  source 1..22: mol_type = other DNA
ttcctacgtagagctaggaagt

SEQ ID NO: 156695 - DNA, 22 bp, synthetic construct
  misc_feature 1..22: note = chemically synthesized
  source 1..22: mol_type = other DNA
tcctacgtagagctaggaagtg

SEQ ID NO: 156696 - DNA, 22 bp, synthetic construct
  misc_feature 1..22: note = chemically synthesized
  source 1..22: mol_type = other DNA
cctacgtagagctaggaagtgg

SEQ ID NO: 156697 - DNA, 22 bp, synthetic construct
  misc_feature 1..22: note = chemically synthesized
  source 1..22: mol_type = other DNA
ctacgtagagctaggaagtggg

SEQ ID NO: 156698 - DNA, 22 bp, synthetic construct
  misc_feature 1..22: note = chemically synthesized
  source 1..22: mol_type = other DNA
cgtagagctaggaagtggggtt

SEQ ID NO: 156699 - DNA, 22 bp, synthetic construct
  misc_feature 1..22: note = chemically synthesized
  source 1..22: mol_type = other DNA
ggaagtggggttttgagtcagt

SEQ ID NO: 156700 - DNA, 22 bp, synthetic construct
  misc_feature 1..22: note = chemically synthesized
  source 1..22: mol_type = other DNA
tgagtcagtcactgggcttttt

SEQ ID NO: 156701 - DNA, 22 bp, synthetic construct
  misc_feature 1..22: note = chemically synthesized
  source 1..22: mol_type = other DNA
gagtcagtcactgggcttttta

SEQ ID NO: 156702 - DNA, 22 bp, synthetic construct
  misc_feature 1..22: note = chemically synthesized
  source 1..22: mol_type = other DNA
agtcagtcactgggctttttat

SEQ ID NO: 156703 - DNA, 22 bp, synthetic construct
  misc_feature 1..22: note = chemically synthesized
  source 1..22: mol_type = other DNA
ggctttttatagtcagtctgaa

SEQ ID NO: 156704 - DNA, 22 bp, synthetic construct
  misc_feature 1..22: note = chemically synthesized
  source 1..22: mol_type = other DNA
tttatagtcagtctgaaattct

SEQ ID NO: 156705 - DNA, 22 bp, synthetic construct
  misc_feature 1..22: note = chemically synthesized
  source 1..22: mol_type = other DNA
ttatagtcagtctgaaattctg

SEQ ID NO: 156706 - DNA, 22 bp, synthetic construct
  misc_feature 1..22: note = chemically synthesized
  source 1..22: mol_type = other DNA
tatagtcagtctgaaattctgc

SEQ ID NO: 156707 - DNA, 22 bp, synthetic construct
  misc_feature 1..22: note = chemically synthesized
  source 1..22: mol_type = other DNA
atagtcagtctgaaattctgct

SEQ ID NO: 156708 - DNA, 22 bp, synthetic construct
  misc_feature 1..22: note = chemically synthesized
  source 1..22: mol_type = other DNA
tagtcagtctgaaattctgctg

SEQ ID NO: 156709 - DNA, 22 bp, synthetic construct
  misc_feature 1..22: note = chemically synthesized
  source 1..22: mol_type = other DNA
aaattctgctgaaatgtacaac

SEQ ID NO: 156710 - DNA, 22 bp, synthetic construct
  misc_feature 1..22: note = chemically synthesized
  source 1..22: mol_type = other DNA
tgctgaaatgtacaacactccc

SEQ ID NO: 156711 - DNA, 22 bp, synthetic construct
  misc_feature 1..22: note = chemically synthesized
  source 1..22: mol_type = other DNA
ctgaaatgtacaacactcccgc

SEQ ID NO: 156712 - DNA, 22 bp, synthetic construct
  misc_feature 1..22: note = chemically synthesized
  source 1..22: mol_type = other DNA
aaatgtacaacactcccgctgt

SEQ ID NO: 156713 - DNA, 22 bp, synthetic construct
  misc_feature 1..22: note = chemically synthesized
  source 1..22: mol_type = other DNA
ccgctgtactctgcagagactt

SEQ ID NO: 156714 - DNA, 22 bp, synthetic construct
  misc_feature 1..22: note = chemically synthesized
  source 1..22: mol_type = other DNA
tactctgcagagacttgaacca

SEQ ID NO: 156715 - DNA, 22 bp, synthetic construct
  misc_feature 1..22: note = chemically synthesized
  source 1..22: mol_type = other DNA
tgcagagacttgaaccaataac

SEQ ID NO: 156716 - DNA, 22 bp, synthetic construct
  misc_feature 1..22: note = chemically synthesized
  source 1..22: mol_type = other DNA
cagagacttgaaccaataacat

SEQ ID NO: 156717 - DNA, 22 bp, synthetic construct
  misc_feature 1..22: note = chemically synthesized
  source 1..22: mol_type = other DNA
gaaccaataacatgaagccata

SEQ ID NO: 156718 - DNA, 22 bp, synthetic construct
  misc_feature 1..22: note = chemically synthesized
  source 1..22: mol_type = other DNA
aaccaataacatgaagccataa

SEQ ID NO: 156719 - DNA, 22 bp, synthetic construct
  misc_feature 1..22: note = chemically synthesized
  source 1..22: mol_type = other DNA
tttttgtcaacacctgttactt

SEQ ID NO: 156720 - DNA, 22 bp, synthetic construct
  misc_feature 1..22: note = chemically synthesized
  source 1..22: mol_type = other DNA
ttgtcaacacctgttacttaag

SEQ ID NO: 156721 - DNA, 22 bp, synthetic construct
  misc_feature 1..22: note = chemically synthesized
  source 1..22: mol_type = other DNA
tgtcaacacctgttacttaagt

SEQ ID NO: 156722 - DNA, 22 bp, synthetic construct
  misc_feature 1..22: note = chemically synthesized
  source 1..22: mol_type = other DNA
gtcaacacctgttacttaagtt

SEQ ID NO: 156723 - DNA, 22 bp, synthetic construct
  misc_feature 1..22: note = chemically synthesized
  source 1..22: mol_type = other DNA
tcaacacctgttacttaagtta

SEQ ID NO: 156724 - DNA, 22 bp, synthetic construct
  misc_feature 1..22: note = chemically synthesized
  source 1..22: mol_type = other DNA
ttacttaagttaaaatgttatc

SEQ ID NO: 156725 - DNA, 22 bp, synthetic construct
  misc_feature 1..22: note = chemically synthesized
  source 1..22: mol_type = other DNA
cttaagttaaaatgttatccct

SEQ ID NO: 156726 - DNA, 22 bp, synthetic construct
  misc_feature 1..22: note = chemically synthesized
  source 1..22: mol_type = other DNA
aagttaaaatgttatccctaga

SEQ ID NO: 156727 - DNA, 22 bp, synthetic construct
  misc_feature 1..22: note = chemically synthesized
  source 1..22: mol_type = other DNA
agttaaaatgttatccctagaa

SEQ ID NO: 156728 - DNA, 22 bp, synthetic construct
  misc_feature 1..22: note = chemically synthesized
  source 1..22: mol_type = other DNA
aaatgttatccctagaatattt

SEQ ID NO: 156729 - DNA, 22 bp, synthetic construct
  misc_feature 1..22: note = chemically synthesized
  source 1..22: mol_type = other DNA
tccctagaatattttctaactc

SEQ ID NO: 156730 - DNA, 22 bp, synthetic construct
  misc_feature 1..22: note = chemically synthesized
  source 1..22: mol_type = other DNA
gaatattttctaactcactgac

SEQ ID NO: 156731 - DNA, 22 bp, synthetic construct
  misc_feature 1..22: note = chemically synthesized
  source 1..22: mol_type = other DNA
tctaactcactgacatctcaca

SEQ ID NO: 156732 - DNA, 22 bp, synthetic construct
  misc_feature 1..22: note = chemically synthesized
  source 1..22: mol_type = other DNA
ctaactcactgacatctcacaa

SEQ ID NO: 156733 - DNA, 22 bp, synthetic construct
  misc_feature 1..22: note = chemically synthesized
  source 1..22: mol_type = other DNA
taactcactgacatctcacaaa

SEQ ID NO: 156734 - DNA, 22 bp, synthetic construct
  misc_feature 1..22: note = chemically synthesized
  source 1..22: mol_type = other DNA
actcactgacatctcacaaagt

SEQ ID NO: 156735 - DNA, 22 bp, synthetic construct
  misc_feature 1..22: note = chemically synthesized
  source 1..22: mol_type = other DNA
actgacatctcacaaagtctct

SEQ ID NO: 156736 - DNA, 22 bp, synthetic construct
  misc_feature 1..22: note = chemically synthesized
  source 1..22: mol_type = other DNA
acatctcacaaagtctcttgta

SEQ ID NO: 156737 - DNA, 22 bp, synthetic construct
  misc_feature 1..22: note = chemically synthesized
  source 1..22: mol_type = other DNA
acaaagtctcttgtatggaata

SEQ ID NO: 156738 - DNA, 22 bp, synthetic construct
  misc_feature 1..22: note = chemically synthesized
  source 1..22: mol_type = other DNA
ttgtatggaatagacacataat

SEQ ID NO: 156739 - DNA, 22 bp, synthetic construct
  misc_feature 1..22: note = chemically synthesized
  source 1..22: mol_type = other DNA
gtatggaatagacacataatac

SEQ ID NO: 156740 - DNA, 22 bp, synthetic construct
  misc_feature 1..22: note = chemically synthesized
  source 1..22: mol_type = other DNA
tatggaatagacacataataca

SEQ ID NO: 156741 - DNA, 22 bp, synthetic construct
  misc_feature 1..22: note = chemically synthesized
  source 1..22: mol_type = other DNA
aacaagtgaataatagtgaatt

SEQ ID NO: 156742 - DNA, 22 bp, synthetic construct
  misc_feature 1..22: note = chemically synthesized
  source 1..22: mol_type = other DNA
aagcaaataataaccaatatta

SEQ ID NO: 156743 - DNA, 22 bp, synthetic construct
  misc_feature 1..22: note = chemically synthesized
  source 1..22: mol_type = other DNA
aattaacaaatatgagattgcc

SEQ ID NO: 156744 - DNA, 22 bp, synthetic construct
  misc_feature 1..22: note = chemically synthesized
  source 1..22: mol_type = other DNA
acaaatatgagattgcctggat

SEQ ID NO: 156745 - DNA, 22 bp, synthetic construct
  misc_feature 1..22: note = chemically synthesized
  source 1..22: mol_type = other DNA
cctggatgatgtaaaatctgat

SEQ ID NO: 156746 - DNA, 22 bp, synthetic construct
  misc_feature 1..22: note = chemically synthesized
  source 1..22: mol_type = other DNA
gatgatgtaaaatctgatacac

SEQ ID NO: 156747 - DNA, 22 bp, synthetic construct
  misc_feature 1..22: note = chemically synthesized
  source 1..22: mol_type = other DNA
atacacatttccccctatagtg

SEQ ID NO: 156748 - DNA, 22 bp, synthetic construct
  misc_feature 1..22: note = chemically synthesized
  source 1..22: mol_type = other DNA
ccccctatagtggagattttag

SEQ ID NO: 156749 - DNA, 22 bp, synthetic construct
  misc_feature 1..22: note = chemically synthesized
  source 1..22: mol_type = other DNA
cccctatagtggagattttaga

SEQ ID NO: 156750 - DNA, 22 bp, synthetic construct
  misc_feature 1..22: note = chemically synthesized
  source 1..22: mol_type = other DNA
tagtggagattttagacccaag

SEQ ID NO: 156751 - DNA, 22 bp, synthetic construct
  misc_feature 1..22: note = chemically synthesized
  source 1..22: mol_type = other DNA
tagacccaagtcatcaatggag

SEQ ID NO: 156752 - DNA, 22 bp, synthetic construct
  misc_feature 1..22: note = chemically synthesized
  source 1..22: mol_type = other DNA
agacccaagtcatcaatggagc

SEQ ID NO: 156753 - DNA, 22 bp, synthetic construct
  misc_feature 1..22: note = chemically synthesized
  source 1..22: mol_type = other DNA
gacccaagtcatcaatggagca

SEQ ID NO: 156754 - DNA, 22 bp, synthetic construct
  misc_feature 1..22: note = chemically synthesized
  source 1..22: mol_type = other DNA
aagaagtaaaatgattgaaaat

SEQ ID NO: 156755 - DNA, 22 bp, synthetic construct
  misc_feature 1..22: note = chemically synthesized
  source 1..22: mol_type = other DNA
aaaatttctatacctgggtgat

SEQ ID NO: 156756 - DNA, 22 bp, synthetic construct
  misc_feature 1..22: note = chemically synthesized
  source 1..22: mol_type = other DNA
ctatacctgggtgataaataaa

SEQ ID NO: 156757 - DNA, 22 bp, synthetic construct
  misc_feature 1..22: note = chemically synthesized
  source 1..22: mol_type = other DNA
tatacctgggtgataaataaat

SEQ ID NO: 156758 - DNA, 22 bp, synthetic construct
  misc_feature 1..22: note = chemically synthesized
  source 1..22: mol_type = other DNA
tacctgggtgataaataaattt

SEQ ID NO: 156759 - DNA, 22 bp, synthetic construct
  misc_feature 1..22: note = chemically synthesized
  source 1..22: mol_type = other DNA
ggtgataaataaatttttaaaa

SEQ ID NO: 156760 - DNA, 22 bp, synthetic construct
  misc_feature 1..22: note = chemically synthesized
  source 1..22: mol_type = other DNA
ttaaaataaacattttttaaaa

SEQ ID NO: 156761 - DNA, 22 bp, synthetic construct
  misc_feature 1..22: note = chemically synthesized
  source 1..22: mol_type = other DNA
taaaataaacattttttaaaaa

SEQ ID NO: 156762 - DNA, 22 bp, synthetic construct
  misc_feature 1..22: note = chemically synthesized
  source 1..22: mol_type = other DNA
aaaataaacattttttaaaaag

SEQ ID NO: 156763 - DNA, 22 bp, synthetic construct
  misc_feature 1..22: note = chemically synthesized
  source 1..22: mol_type = other DNA
aaataaacattttttaaaaagc

SEQ ID NO: 156764 - DNA, 22 bp, synthetic construct
  misc_feature 1..22: note = chemically synthesized
  source 1..22: mol_type = other DNA
tttaaaaagctagagaagatta

SEQ ID NO: 156765 - DNA, 22 bp, synthetic construct
  misc_feature 1..22: note = chemically synthesized
  source 1..22: mol_type = other DNA
ttaaaaagctagagaagattaa

SEQ ID NO: 156766 - DNA, 22 bp, synthetic construct
  misc_feature 1..22: note = chemically synthesized
  source 1..22: mol_type = other DNA
taaaaagctagagaagattaag

SEQ ID NO: 156767 - DNA, 22 bp, synthetic construct
  misc_feature 1..22: note = chemically synthesized
  source 1..22: mol_type = other DNA
aaaaagctagagaagattaagg

SEQ ID NO: 156768 - DNA, 22 bp, synthetic construct
  misc_feature 1..22: note = chemically synthesized
  source 1..22: mol_type = other DNA
aaaagctagagaagattaagga

SEQ ID NO: 156769 - DNA, 22 bp, synthetic construct
  misc_feature 1..22: note = chemically synthesized
  source 1..22: mol_type = other DNA
gagaagattaaggagaatattt

SEQ ID NO: 156770 - DNA, 22 bp, synthetic construct
  misc_feature 1..22: note = chemically synthesized
  source 1..22: mol_type = other DNA
aggagaatattttccaagaaac

SEQ ID NO: 156771 - DNA, 22 bp, synthetic construct
  misc_feature 1..22: note = chemically synthesized
  source 1..22: mol_type = other DNA
tccaagaaacttaaataaaaaa

SEQ ID NO: 156772 - DNA, 22 bp, synthetic construct
  misc_feature 1..22: note = chemically synthesized
  source 1..22: mol_type = other DNA
ccaagaaacttaaataaaaaag

SEQ ID NO: 156773 - DNA, 22 bp, synthetic construct
  misc_feature 1..22: note = chemically synthesized
  source 1..22: mol_type = other DNA
caagaaacttaaataaaaaaga

SEQ ID NO: 156774 - DNA, 22 bp, synthetic construct
  misc_feature 1..22: note = chemically synthesized
  source 1..22: mol_type = other DNA
aaataaaaaagaatgtaatccc

SEQ ID NO: 156775 - DNA, 22 bp, synthetic construct
  misc_feature 1..22: note = chemically synthesized
  source 1..22: mol_type = other DNA
aataaaaaagaatgtaatccca

SEQ ID NO: 156776 - DNA, 22 bp, synthetic construct
  misc_feature 1..22: note = chemically synthesized
  source 1..22: mol_type = other DNA
tctatgatattatctacagact

SEQ ID NO: 156777 - DNA, 22 bp, synthetic construct
  misc_feature 1..22: note = chemically synthesized
  source 1..22: mol_type = other DNA
tgatattatctacagactatac

SEQ ID NO: 156778 - DNA, 22 bp, synthetic construct
  misc_feature 1..22: note = chemically synthesized
  source 1..22: mol_type = other DNA
tctacagactataccttaatcc

SEQ ID NO: 156779 - DNA, 22 bp, synthetic construct
  misc_feature 1..22: note = chemically synthesized
  source 1..22: mol_type = other DNA
cagactataccttaatcccttc

SEQ ID NO: 156780 - DNA, 22 bp, synthetic construct
  misc_feature 1..22: note = chemically synthesized
  source 1..22: mol_type = other DNA
taccttaatcccttcacatcaa

SEQ ID NO: 156781 - DNA, 22 bp, synthetic construct
  misc_feature 1..22: note = chemically synthesized
  source 1..22: mol_type = other DNA
aatcccttcacatcaatacaaa

SEQ ID NO: 156782 - DNA, 22 bp, synthetic construct
  misc_feature 1..22: note = chemically synthesized
  source 1..22: mol_type = other DNA
atcccttcacatcaatacaaat

SEQ ID NO: 156783 - DNA, 22 bp, synthetic construct
  misc_feature 1..22: note = chemically synthesized
  source 1..22: mol_type = other DNA
cacatcaatacaaatttttaca

SEQ ID NO: 156784 - DNA, 22 bp, synthetic construct
  misc_feature 1..22: note = chemically synthesized
  source 1..22: mol_type = other DNA
acatcaatacaaatttttacaa

SEQ ID NO: 156785 - DNA, 22 bp, synthetic construct
  misc_feature 1..22: note = chemically synthesized
  source 1..22: mol_type = other DNA
ttacaatctctccttcttaaaa

SEQ ID NO: 156786 - DNA, 22 bp, synthetic construct
  misc_feature 1..22: note = chemically synthesized
  source 1..22: mol_type = other DNA
tacaatctctccttcttaaaag

SEQ ID NO: 156787 - DNA, 22 bp, synthetic construct
  misc_feature 1..22: note = chemically synthesized
  source 1..22: mol_type = other DNA
acaatctctccttcttaaaagc

SEQ ID NO: 156788 - DNA, 22 bp, synthetic construct
  misc_feature 1..22: note = chemically synthesized
  source 1..22: mol_type = other DNA
caatctctccttcttaaaagcc

SEQ ID NO: 156789 - DNA, 22 bp, synthetic construct
  misc_feature 1..22: note = chemically synthesized
  source 1..22: mol_type = other DNA
tccttcttaaaagcctagaaca

SEQ ID NO: 156790 - DNA, 22 bp, synthetic construct
  misc_feature 1..22: note = chemically synthesized
  source 1..22: mol_type = other DNA
cttcttaaaagcctagaacaat

SEQ ID NO: 156791 - DNA, 22 bp, synthetic construct
  misc_feature 1..22: note = chemically synthesized
  source 1..22: mol_type = other DNA
cttaaaagcctagaacaatgcc

SEQ ID NO: 156792 - DNA, 22 bp, synthetic construct
  misc_feature 1..22: note = chemically synthesized
  source 1..22: mol_type = other DNA
ttaaaagcctagaacaatgcca

SEQ ID NO: 156793 - DNA, 22 bp, synthetic construct
  misc_feature 1..22: note = chemically synthesized
  source 1..22: mol_type = other DNA
aaaagcctagaacaatgccatg

SEQ ID NO: 156794 - DNA, 22 bp, synthetic construct
  misc_feature 1..22: note = chemically synthesized
  source 1..22: mol_type = other DNA
aaagcctagaacaatgccatga

SEQ ID NO: 156795 - DNA, 22 bp, synthetic construct
  misc_feature 1..22: note = chemically synthesized
  source 1..22: mol_type = other DNA
gaacaatgccatgagaatgttt

SEQ ID NO: 156796 - DNA, 22 bp, synthetic construct
  misc_feature 1..22: note = chemically synthesized
  source 1..22: mol_type = other DNA
aaaaaatgaccttatttacacc

SEQ ID NO: 156797 - DNA, 22 bp, synthetic construct
  misc_feature 1..22: note = chemically synthesized
  source 1..22: mol_type = other DNA
aaaaatgaccttatttacacct

SEQ ID NO: 156798 - DNA, 22 bp, synthetic construct
  misc_feature 1..22: note = chemically synthesized
  source 1..22: mol_type = other DNA
atttacacctaaagaaagacaa

SEQ ID NO: 156799 - DNA, 22 bp, synthetic construct
  misc_feature 1..22: note = chemically synthesized
  source 1..22: mol_type = other DNA
tttacacctaaagaaagacaaa

SEQ ID NO: 156800 - DNA, 22 bp, synthetic construct
  misc_feature 1..22: note = chemically synthesized
  source 1..22: mol_type = other DNA
acacctaaagaaagacaaaaaa

SEQ ID NO: 156801 - DNA, 22 bp, synthetic construct
  misc_feature 1..22: note = chemically synthesized
  source 1..22: mol_type = other DNA
cacctaaagaaagacaaaaaaa

SEQ ID NO: 156802 - DNA, 22 bp, synthetic construct
  misc_feature 1..22: note = chemically synthesized
  source 1..22: mol_type = other DNA
aagaaagacaaaaaaaaaactt

SEQ ID NO: 156803 - DNA, 22 bp, synthetic construct
  misc_feature 1..22: note = chemically synthesized
  source 1..22: mol_type = other DNA
tgagaaatctgaggtactatct

SEQ ID NO: 156804 - DNA, 22 bp, synthetic construct
  misc_feature 1..22: note = chemically synthesized
  source 1..22: mol_type = other DNA
gagaaatctgaggtactatctt

SEQ ID NO: 156805 - DNA, 22 bp, synthetic construct
  misc_feature 1..22: note = chemically synthesized
  source 1..22: mol_type = other DNA
agaaatctgaggtactatctta

SEQ ID NO: 156806 - DNA, 22 bp, synthetic construct
  misc_feature 1..22: note = chemically synthesized
  source 1..22: mol_type = other DNA
aggtactatcttaaacacttga

SEQ ID NO: 156807 - DNA, 22 bp, synthetic construct
  misc_feature 1..22: note = chemically synthesized
  source 1..22: mol_type = other DNA
tcttaaacacttgaaatctact

SEQ ID NO: 156808 - DNA, 22 bp, synthetic construct
  misc_feature 1..22: note = chemically synthesized
  source 1..22: mol_type = other DNA
aaacacttgaaatctactcatg

SEQ ID NO: 156809 - DNA, 22 bp, synthetic construct
  misc_feature 1..22: note = chemically synthesized
  source 1..22: mol_type = other DNA
aacacttgaaatctactcatgc

SEQ ID NO: 156810 - DNA, 22 bp, synthetic construct
  misc_feature 1..22: note = chemically synthesized
  source 1..22: mol_type = other DNA
gaaatctactcatgcttggctt

SEQ ID NO: 156811 - DNA, 22 bp, synthetic construct
  misc_feature 1..22: note = chemically synthesized
  source 1..22: mol_type = other DNA
aaatctactcatgcttggctta

SEQ ID NO: 156812 - DNA, 22 bp, synthetic construct
  misc_feature 1..22: note = chemically synthesized
  source 1..22: mol_type = other DNA
ctcatgcttggcttatgcttag

SEQ ID NO: 156813 - DNA, 22 bp, synthetic construct
  misc_feature 1..22: note = chemically synthesized
  source 1..22: mol_type = other DNA
atgcttggcttatgcttagctt

SEQ ID NO: 156814 - DNA, 22 bp, synthetic construct
  misc_feature 1..22: note = chemically synthesized
  source 1..22: mol_type = other DNA
ggcttatgcttagctttttctg

SEQ ID NO: 156815 - DNA, 22 bp, synthetic construct
  misc_feature 1..22: note = chemically synthesized
  source 1..22: mol_type = other DNA
gcttatgcttagctttttctgt

SEQ ID NO: 156816 - DNA, 22 bp, synthetic construct
  misc_feature 1..22: note = chemically synthesized
  source 1..22: mol_type = other DNA
atgcttagctttttctgtgatt

SEQ ID NO: 156817 - DNA, 22 bp, synthetic construct
  misc_feature 1..22: note = chemically synthesized
  source 1..22: mol_type = other DNA
tgcttagctttttctgtgattt

SEQ ID NO: 156818 - DNA, 22 bp, synthetic construct
  misc_feature 1..22: note = chemically synthesized
  source 1..22: mol_type = other DNA
agctttttctgtgatttttata

SEQ ID NO: 156819 - DNA, 22 bp, synthetic construct
  misc_feature 1..22: note = chemically synthesized
  source 1..22: mol_type = other DNA
gctttttctgtgatttttatag

SEQ ID NO: 156820 - DNA, 22 bp, synthetic construct
  misc_feature 1..22: note = chemically synthesized
  source 1..22: mol_type = other DNA
tttctgtgatttttatagaaat

SEQ ID NO: 156821 - DNA, 22 bp, synthetic construct
  misc_feature 1..22: note = chemically synthesized
  source 1..22: mol_type = other DNA
ttctgtgatttttatagaaatt

SEQ ID NO: 156822 - DNA, 22 bp, synthetic construct
  misc_feature 1..22: note = chemically synthesized
  source 1..22: mol_type = other DNA
tctgtgatttttatagaaattt

SEQ ID NO: 156823 - DNA, 22 bp, synthetic construct
  misc_feature 1..22: note = chemically synthesized
  source 1..22: mol_type = other DNA
ctgtgatttttatagaaattta

SEQ ID NO: 156824 - DNA, 22 bp, synthetic construct
  misc_feature 1..22: note = chemically synthesized
  source 1..22: mol_type = other DNA
tgtgatttttatagaaatttat

SEQ ID NO: 156825 - DNA, 22 bp, synthetic construct
  misc_feature 1..22: note = chemically synthesized
  source 1..22: mol_type = other DNA
tgatttttatagaaatttatac

SEQ ID NO: 156826 - DNA, 22 bp, synthetic construct
  misc_feature 1..22: note = chemically synthesized
  source 1..22: mol_type = other DNA
ttatagaaatttatacatgtat

SEQ ID NO: 156827 - DNA, 22 bp, synthetic construct
  misc_feature 1..22: note = chemically synthesized
  source 1..22: mol_type = other DNA
tatagaaatttatacatgtatt

SEQ ID NO: 156828 - DNA, 22 bp, synthetic construct
  misc_feature 1..22: note = chemically synthesized
  source 1..22: mol_type = other DNA
atagaaatttatacatgtatta

SEQ ID NO: 156829 - DNA, 22 bp, synthetic construct
  misc_feature 1..22: note = chemically synthesized
  source 1..22: mol_type = other DNA
tagaaatttatacatgtattaa

SEQ ID NO: 156830 - DNA, 22 bp, synthetic construct
  misc_feature 1..22: note = chemically synthesized
  source 1..22: mol_type = other DNA
atacatgtattaacacttagat

SEQ ID NO: 156831 - DNA, 22 bp, synthetic construct
  misc_feature 1..22: note = chemically synthesized
  source 1..22: mol_type = other DNA
tacatgtattaacacttagatt

SEQ ID NO: 156832 - DNA, 22 bp, synthetic construct
  misc_feature 1..22: note = chemically synthesized
  source 1..22: mol_type = other DNA
acacttagatttacatatacac

SEQ ID NO: 156833 - DNA, 22 bp, synthetic construct
  misc_feature 1..22: note = chemically synthesized
  source 1..22: mol_type = other DNA
agatttacatatacacacactt

SEQ ID NO: 156834 - DNA, 22 bp, synthetic construct
  misc_feature 1..22: note = chemically synthesized
  source 1..22: mol_type = other DNA
gatttacatatacacacactta

SEQ ID NO: 156835 - DNA, 22 bp, synthetic construct
  misc_feature 1..22: note = chemically synthesized
  source 1..22: mol_type = other DNA
acatatacacacacttaattta

SEQ ID NO: 156836 - DNA, 22 bp, synthetic construct
  misc_feature 1..22: note = chemically synthesized
  source 1..22: mol_type = other DNA
catatacacacacttaatttat

SEQ ID NO: 156837 - DNA, 22 bp, synthetic construct
  misc_feature 1..22: note = chemically synthesized
  source 1..22: mol_type = other DNA
aatttatctacatttatatgtg

SEQ ID NO: 156838 - DNA, 22 bp, synthetic construct
  misc_feature 1..22: note = chemically synthesized
  source 1..22: mol_type = other DNA
atttatctacatttatatgtgg

SEQ ID NO: 156839 - DNA, 22 bp, synthetic construct
  misc_feature 1..22: note = chemically synthesized
  source 1..22: mol_type = other DNA
atctacatttatatgtggatgt

SEQ ID NO: 156840 - DNA, 22 bp, synthetic construct
  misc_feature 1..22: note = chemically synthesized
  source 1..22: mol_type = other DNA
tctacatttatatgtggatgta

SEQ ID NO: 156841 - DNA, 22 bp, synthetic construct
  misc_feature 1..22: note = chemically synthesized
  source 1..22: mol_type = other DNA
catttatatgtggatgtacctt

SEQ ID NO: 156842 - DNA, 22 bp, synthetic construct
  misc_feature 1..22: note = chemically synthesized
  source 1..22: mol_type = other DNA
atatgtggatgtaccttcatat

SEQ ID NO: 156843 - DNA, 22 bp, synthetic construct
  misc_feature 1..22: note = chemically synthesized
  source 1..22: mol_type = other DNA
tatgtggatgtaccttcatata

SEQ ID NO: 156844 - DNA, 22 bp, synthetic construct
  misc_feature 1..22: note = chemically synthesized
  source 1..22: mol_type = other DNA
catatatatgtacacacacaca

SEQ ID NO: 156845 - DNA, 22 bp, synthetic construct
  misc_feature 1..22: note = chemically synthesized
  source 1..22: mol_type = other DNA
atatatatgtacacacacacac

SEQ ID NO: 156846 - DNA, 22 bp, synthetic construct
  misc_feature 1..22: note = chemically synthesized
  source 1..22: mol_type = other DNA
gtgcaccaaagaataagaaagt

SEQ ID NO: 156847 - DNA, 22 bp, synthetic construct
  misc_feature 1..22: note = chemically synthesized
  source 1..22: mol_type = other DNA
tgcaccaaagaataagaaagtt

SEQ ID NO: 156848 - DNA, 22 bp, synthetic construct
  misc_feature 1..22: note = chemically synthesized
  source 1..22: mol_type = other DNA
gaaatagacttcctacagtatt

SEQ ID NO: 156849 - DNA, 22 bp, synthetic construct
  misc_feature 1..22: note = chemically synthesized
  source 1..22: mol_type = other DNA
cctacagtatttccattattgg

SEQ ID NO: 156850 - DNA, 22 bp, synthetic construct
  misc_feature 1..22: note = chemically synthesized
  source 1..22: mol_type = other DNA
ctacagtatttccattattggg

SEQ ID NO: 156851 - DNA, 22 bp, synthetic construct
  misc_feature 1..22: note = chemically synthesized
  source 1..22: mol_type = other DNA
cagtatttccattattgggaag

SEQ ID NO: 156852 - DNA, 22 bp, synthetic construct
  misc_feature 1..22: note = chemically synthesized
  source 1..22: mol_type = other DNA
ccattattgggaagggagaata

SEQ ID NO: 156853 - DNA, 22 bp, synthetic construct
  misc_feature 1..22: note = chemically synthesized
  source 1..22: mol_type = other DNA
cattattgggaagggagaatac

SEQ ID NO: 156854 - DNA, 22 bp, synthetic construct
  misc_feature 1..22: note = chemically synthesized
  source 1..22: mol_type = other DNA
ttgggaagggagaatacataaa

SEQ ID NO: 156855 - DNA, 22 bp, synthetic construct
  misc_feature 1..22: note = chemically synthesized
  source 1..22: mol_type = other DNA
ggaagggagaatacataaaaca

SEQ ID NO: 156856 - DNA, 22 bp, synthetic construct
  misc_feature 1..22: note = chemically synthesized
  source 1..22: mol_type = other DNA
taaaaaatctaattaatttgtt

SEQ ID NO: 156857 - DNA, 22 bp, synthetic construct
  misc_feature 1..22: note = chemically synthesized
  source 1..22: mol_type = other DNA
aaaaatctaattaatttgtttc

SEQ ID NO: 156858 - DNA, 22 bp, synthetic construct
  misc_feature 1..22: note = chemically synthesized
  source 1..22: mol_type = other DNA
attaatttgtttctgctagtac

SEQ ID NO: 156859 - DNA, 22 bp, synthetic construct
  misc_feature 1..22: note = chemically synthesized
  source 1..22: mol_type = other DNA
atttgtttctgctagtactaca

SEQ ID NO: 156860 - DNA, 22 bp, synthetic construct
  misc_feature 1..22: note = chemically synthesized
  source 1..22: mol_type = other DNA
gtttctgctagtactacactaa

SEQ ID NO: 156861 - DNA, 22 bp, synthetic construct
  misc_feature 1..22: note = chemically synthesized
  source 1..22: mol_type = other DNA
tttctgctagtactacactaaa

SEQ ID NO: 156862 - DNA, 22 bp, synthetic construct
  misc_feature 1..22: note = chemically synthesized
  source 1..22: mol_type = other DNA
ctgctagtactacactaaatat

SEQ ID NO: 156863 - DNA, 22 bp, synthetic construct
  misc_feature 1..22: note = chemically synthesized
  source 1..22: mol_type = other DNA
tgctagtactacactaaatatt

SEQ ID NO: 156864 - DNA, 22 bp, synthetic construct
  misc_feature 1..22: note = chemically synthesized
  source 1..22: mol_type = other DNA
ctagtactacactaaatattta

SEQ ID NO: 156865 - DNA, 22 bp, synthetic construct
  misc_feature 1..22: note = chemically synthesized
  source 1..22: mol_type = other DNA
gtactacactaaatatttaagt

SEQ ID NO: 156866 - DNA, 22 bp, synthetic construct
  misc_feature 1..22: note = chemically synthesized
  source 1..22: mol_type = other DNA
cactaaatatttaagtgctatt

SEQ ID NO: 156867 - DNA, 22 bp, synthetic construct
  misc_feature 1..22: note = chemically synthesized
  source 1..22: mol_type = other DNA
aatatttaagtgctattttgaa

SEQ ID NO: 156868 - DNA, 22 bp, synthetic construct
  misc_feature 1..22: note = chemically synthesized
  source 1..22: mol_type = other DNA
aagtgctattttgaattgtctt

SEQ ID NO: 156869 - DNA, 22 bp, synthetic construct
  misc_feature 1..22: note = chemically synthesized
  source 1..22: mol_type = other DNA
agtgctattttgaattgtcttc

SEQ ID NO: 156870 - DNA, 22 bp, synthetic construct
  misc_feature 1..22: note = chemically synthesized
  source 1..22: mol_type = other DNA
ttttgaattgtcttcaaaatat

SEQ ID NO: 156871 - DNA, 22 bp, synthetic construct
  misc_feature 1..22: note = chemically synthesized
  source 1..22: mol_type = other DNA
tgaattgtcttcaaaatatttg

SEQ ID NO: 156872 - DNA, 22 bp, synthetic construct
  misc_feature 1..22: note = chemically synthesized
  source 1..22: mol_type = other DNA
gaattgtcttcaaaatatttgc

SEQ ID NO: 156873 - DNA, 22 bp, synthetic construct
  misc_feature 1..22: note = chemically synthesized
  source 1..22: mol_type = other DNA
aattgtcttcaaaatatttgca

SEQ ID NO: 156874 - DNA, 22 bp, synthetic construct
  misc_feature 1..22: note = chemically synthesized
  source 1..22: mol_type = other DNA
tcttcaaaatatttgcatttct

SEQ ID NO: 156875 - DNA, 22 bp, synthetic construct
  misc_feature 1..22: note = chemically synthesized
  source 1..22: mol_type = other DNA
caaaatatttgcatttctcagt

SEQ ID NO: 156876 - DNA, 22 bp, synthetic construct
  misc_feature 1..22: note = chemically synthesized
  source 1..22: mol_type = other DNA
aaaatatttgcatttctcagta

SEQ ID NO: 156877 - DNA, 22 bp, synthetic construct
  misc_feature 1..22: note = chemically synthesized
  source 1..22: mol_type = other DNA
gcatttctcagtacatctgtta

SEQ ID NO: 156878 - DNA, 22 bp, synthetic construct
  misc_feature 1..22: note = chemically synthesized
  source 1..22: mol_type = other DNA
catttctcagtacatctgttaa

SEQ ID NO: 156879 - DNA, 22 bp, synthetic construct
  misc_feature 1..22: note = chemically synthesized
  source 1..22: mol_type = other DNA
ctcagtacatctgttaaacttc

SEQ ID NO: 156880 - DNA, 22 bp, synthetic construct
  misc_feature 1..22: note = chemically synthesized
  source 1..22: mol_type = other DNA
tcagtacatctgttaaacttca

SEQ ID NO: 156881 - DNA, 22 bp, synthetic construct
  misc_feature 1..22: note = chemically synthesized
  source 1..22: mol_type = other DNA
agtacatctgttaaacttcata

SEQ ID NO: 156882 - DNA, 22 bp, synthetic construct
  misc_feature 1..22: note = chemically synthesized
  source 1..22: mol_type = other DNA
ttaaacttcatatagttttttt

SEQ ID NO: 156883 - DNA, 22 bp, synthetic construct
  misc_feature 1..22: note = chemically synthesized
  source 1..22: mol_type = other DNA
aacttcatatagtttttttttc

SEQ ID NO: 156884 - DNA, 22 bp, synthetic construct
  misc_feature 1..22: note = chemically synthesized
  source 1..22: mol_type = other DNA
catatagtttttttttctactc

SEQ ID NO: 156885 - DNA, 22 bp, synthetic construct
  misc_feature 1..22: note = chemically synthesized
  source 1..22: mol_type = other DNA
atatagtttttttttctactct

SEQ ID NO: 156886 - DNA, 22 bp, synthetic construct
  misc_feature 1..22: note = chemically synthesized
  source 1..22: mol_type = other DNA
ttttttctactctacacaatgt

SEQ ID NO: 156887 - DNA, 22 bp, synthetic construct
  misc_feature 1..22: note = chemically synthesized
  source 1..22: mol_type = other DNA
tttttctactctacacaatgtt

SEQ ID NO: 156888 - DNA, 22 bp, synthetic construct
  misc_feature 1..22: note = chemically synthesized
  source 1..22: mol_type = other DNA
ttttctactctacacaatgttt

SEQ ID NO: 156889 - DNA, 22 bp, synthetic construct
  misc_feature 1..22: note = chemically synthesized
  source 1..22: mol_type = other DNA
tttctactctacacaatgtttt

SEQ ID NO: 156890 - DNA, 22 bp, synthetic construct
  misc_feature 1..22: note = chemically synthesized
  source 1..22: mol_type = other DNA
ttctactctacacaatgttttg

SEQ ID NO: 156891 - DNA, 22 bp, synthetic construct
  misc_feature 1..22: note = chemically synthesized
  source 1..22: mol_type = other DNA
tctactctacacaatgttttgg

SEQ ID NO: 156892 - DNA, 22 bp, synthetic construct
  misc_feature 1..22: note = chemically synthesized
  source 1..22: mol_type = other DNA
ctactctacacaatgttttgga

SEQ ID NO: 156893 - DNA, 22 bp, synthetic construct
  misc_feature 1..22: note = chemically synthesized
  source 1..22: mol_type = other DNA
tactctacacaatgttttggac

SEQ ID NO: 156894 - DNA, 22 bp, synthetic construct
  misc_feature 1..22: note = chemically synthesized
  source 1..22: mol_type = other DNA
ctctacacaatgttttggacat

SEQ ID NO: 156895 - DNA, 22 bp, synthetic construct
  misc_feature 1..22: note = chemically synthesized
  source 1..22: mol_type = other DNA
tacacaatgttttggacattct

SEQ ID NO: 156896 - DNA, 22 bp, synthetic construct
  misc_feature 1..22: note = chemically synthesized
  source 1..22: mol_type = other DNA
cacaatgttttggacattctaa

SEQ ID NO: 156897 - DNA, 22 bp, synthetic construct
  misc_feature 1..22: note = chemically synthesized
  source 1..22: mol_type = other DNA
tggacattctaatgtgaaattt

SEQ ID NO: 156898 - DNA, 22 bp, synthetic construct
  misc_feature 1..22: note = chemically synthesized
  source 1..22: mol_type = other DNA
ggacattctaatgtgaaattta

SEQ ID NO: 156899 - DNA, 22 bp, synthetic construct
  misc_feature 1..22: note = chemically synthesized
  source 1..22: mol_type = other DNA
gacattctaatgtgaaatttac

SEQ ID NO: 156900 - DNA, 22 bp, synthetic construct
  misc_feature 1..22: note = chemically synthesized
  source 1..22: mol_type = other DNA
taatgtgaaatttacactcagc

SEQ ID NO: 156901 - DNA, 22 bp, synthetic construct
  misc_feature 1..22: note = chemically synthesized
  source 1..22: mol_type = other DNA
atgtgaaatttacactcagcgt

SEQ ID NO: 156902 - DNA, 22 bp, synthetic construct
  misc_feature 1..22: note = chemically synthesized
  source 1..22: mol_type = other DNA
acactcagcgttgcatttctcc

SEQ ID NO: 156903 - DNA, 22 bp, synthetic construct
  misc_feature 1..22: note = chemically synthesized
  source 1..22: mol_type = other DNA
cactcagcgttgcatttctcca

SEQ ID NO: 156904 - DNA, 22 bp, synthetic construct
  misc_feature 1..22: note = chemically synthesized
  source 1..22: mol_type = other DNA
agcgttgcatttctccataaaa

SEQ ID NO: 156905 - DNA, 22 bp, synthetic construct
  misc_feature 1..22: note = chemically synthesized
  source 1..22: mol_type = other DNA
catttctccataaaagtaataa

SEQ ID NO: 156906 - DNA, 22 bp, synthetic construct
  misc_feature 1..22: note = chemically synthesized
  source 1..22: mol_type = other DNA
ctccataaaagtaataatatga

SEQ ID NO: 156907 - DNA, 22 bp, synthetic construct
  misc_feature 1..22: note = chemically synthesized
  source 1..22: mol_type = other DNA
tccataaaagtaataatatgat

SEQ ID NO: 156908 - DNA, 22 bp, synthetic construct
  misc_feature 1..22: note = chemically synthesized
  source 1..22: mol_type = other DNA
cataaaagtaataatatgatgg

SEQ ID NO: 156909 - DNA, 22 bp, synthetic construct
  misc_feature 1..22: note = chemically synthesized
  source 1..22: mol_type = other DNA
cagtatgatgacagaggatttg

SEQ ID NO: 156910 - DNA, 22 bp, synthetic construct
  misc_feature 1..22: note = chemically synthesized
  source 1..22: mol_type = other DNA
gactgaaaggtaggaagatttt

SEQ ID NO: 156911 - DNA, 22 bp, synthetic construct
  misc_feature 1..22: note = chemically synthesized
  source 1..22: mol_type = other DNA
actgaaaggtaggaagattttg

SEQ ID NO: 156912 - DNA, 22 bp, synthetic construct
  misc_feature 1..22: note = chemically synthesized
  source 1..22: mol_type = other DNA
aaaggtaggaagattttgtata

SEQ ID NO: 156913 - DNA, 22 bp, synthetic construct
  misc_feature 1..22: note = chemically synthesized
  source 1..22: mol_type = other DNA
tgtatacttgattttagcagtg

SEQ ID NO: 156914 - DNA, 22 bp, synthetic construct
  misc_feature 1..22: note = chemically synthesized
  source 1..22: mol_type = other DNA
gtatacttgattttagcagtgg

SEQ ID NO: 156915 - DNA, 22 bp, synthetic construct
  misc_feature 1..22: note = chemically synthesized
  source 1..22: mol_type = other DNA
tatacttgattttagcagtggg

SEQ ID NO: 156916 - DNA, 22 bp, synthetic construct
  misc_feature 1..22: note = chemically synthesized
  source 1..22: mol_type = other DNA
gattttagcagtggggagctaa

SEQ ID NO: 156917 - DNA, 22 bp, synthetic construct
  misc_feature 1..22: note = chemically synthesized
  source 1..22: mol_type = other DNA
attttagcagtggggagctaag

SEQ ID NO: 156918 - DNA, 22 bp, synthetic construct
  misc_feature 1..22: note = chemically synthesized
  source 1..22: mol_type = other DNA
tagcagtggggagctaagaaaa

SEQ ID NO: 156919 - DNA, 22 bp, synthetic construct
  misc_feature 1..22: note = chemically synthesized
  source 1..22: mol_type = other DNA
agcagtggggagctaagaaaat

SEQ ID NO: 156920 - DNA, 22 bp, synthetic construct
  misc_feature 1..22: note = chemically synthesized
  source 1..22: mol_type = other DNA
gcagtggggagctaagaaaatg

SEQ ID NO: 156921 - DNA, 22 bp, synthetic construct
  misc_feature 1..22: note = chemically synthesized
  source 1..22: mol_type = other DNA
agaaaatgccaatttcacatcc

SEQ ID NO: 156922 - DNA, 22 bp, synthetic construct
  misc_feature 1..22: note = chemically synthesized
  source 1..22: mol_type = other DNA
cacatccaaaatgcatgcaaca

SEQ ID NO: 156923 - DNA, 22 bp, synthetic construct
  misc_feature 1..22: note = chemically synthesized
  source 1..22: mol_type = other DNA
acatccaaaatgcatgcaacat

SEQ ID NO: 156924 - DNA, 22 bp, synthetic construct
  misc_feature 1..22: note = chemically synthesized
  source 1..22: mol_type = other DNA
aaataggtatatgaatatatat

SEQ ID NO: 156925 - DNA, 22 bp, synthetic construct
  misc_feature 1..22: note = chemically synthesized
  source 1..22: mol_type = other DNA
aataggtatatgaatatatata

SEQ ID NO: 156926 - DNA, 22 bp, synthetic construct
  misc_feature 1..22: note = chemically synthesized
  source 1..22: mol_type = other DNA
cacagtaacatatacatgtcat

SEQ ID NO: 156927 - DNA, 22 bp, synthetic construct
  misc_feature 1..22: note = chemically synthesized
  source 1..22: mol_type = other DNA
tgacagttaaaatggtagaagt

SEQ ID NO: 156928 - DNA, 22 bp, synthetic construct
  misc_feature 1..22: note = chemically synthesized
  source 1..22: mol_type = other DNA
gacagttaaaatggtagaagta

SEQ ID NO: 156929 - DNA, 22 bp, synthetic construct
  misc_feature 1..22: note = chemically synthesized
  source 1..22: mol_type = other DNA
acagttaaaatggtagaagtaa

SEQ ID NO: 156930 - DNA, 22 bp, synthetic construct
  misc_feature 1..22: note = chemically synthesized
  source 1..22: mol_type = other DNA
aaatggtagaagtaaaaatgat

SEQ ID NO: 156931 - DNA, 22 bp, synthetic construct
  misc_feature 1..22: note = chemically synthesized
  source 1..22: mol_type = other DNA
aatttacaatctctaaataaac

SEQ ID NO: 156932 - DNA, 22 bp, synthetic construct
  misc_feature 1..22: note = chemically synthesized
  source 1..22: mol_type = other DNA
acaatctctaaataaactttca

SEQ ID NO: 156933 - DNA, 22 bp, synthetic construct
  misc_feature 1..22: note = chemically synthesized
  source 1..22: mol_type = other DNA
caatctctaaataaactttcag

SEQ ID NO: 156934 - DNA, 22 bp, synthetic construct
  misc_feature 1..22: note = chemically synthesized
  source 1..22: mol_type = other DNA
taaataaactttcagttgagca

SEQ ID NO: 156935 - DNA, 22 bp, synthetic construct
  misc_feature 1..22: note = chemically synthesized
  source 1..22: mol_type = other DNA
aataaactttcagttgagcact

SEQ ID NO: 156936 - DNA, 22 bp, synthetic construct
  misc_feature 1..22: note = chemically synthesized
  source 1..22: mol_type = other DNA
tcagttgagcactcagattctg

SEQ ID NO: 156937 - DNA, 22 bp, synthetic construct
  misc_feature 1..22: note = chemically synthesized
  source 1..22: mol_type = other DNA
cagttgagcactcagattctga

SEQ ID NO: 156938 - DNA, 22 bp, synthetic construct
  misc_feature 1..22: note = chemically synthesized
  source 1..22: mol_type = other DNA
agttgagcactcagattctgaa

SEQ ID NO: 156939 - DNA, 22 bp, synthetic construct
  misc_feature 1..22: note = chemically synthesized
  source 1..22: mol_type = other DNA
agcactcagattctgaaaggat

SEQ ID NO: 156940 - DNA, 22 bp, synthetic construct
  misc_feature 1..22: note = chemically synthesized
  source 1..22: mol_type = other DNA
agattctgaaaggatttaggaa

SEQ ID NO: 156941 - DNA, 22 bp, synthetic construct
  misc_feature 1..22: note = chemically synthesized
  source 1..22: mol_type = other DNA
tgaaaggatttaggaaatggct

SEQ ID NO: 156942 - DNA, 22 bp, synthetic construct
  misc_feature 1..22: note = chemically synthesized
  source 1..22: mol_type = other DNA
aaaggatttaggaaatggctgt

SEQ ID NO: 156943 - DNA, 22 bp, synthetic construct
  misc_feature 1..22: note = chemically synthesized
  source 1..22: mol_type = other DNA
aggaaatggctgttgctatgca

SEQ ID NO: 156944 - DNA, 22 bp, synthetic construct
  misc_feature 1..22: note = chemically synthesized
  source 1..22: mol_type = other DNA
ggaaatggctgttgctatgcag

SEQ ID NO: 156945 - DNA, 22 bp, synthetic construct
  misc_feature 1..22: note = chemically synthesized
  source 1..22: mol_type = other DNA
ttgctatgcagctgctgaattt

SEQ ID NO: 156946 - DNA, 22 bp, synthetic construct
  misc_feature 1..22: note = chemically synthesized
  source 1..22: mol_type = other DNA
ctatgcagctgctgaatttaac

SEQ ID NO: 156947 - DNA, 22 bp, synthetic construct
  misc_feature 1..22: note = chemically synthesized
  source 1..22: mol_type = other DNA
tgcagctgctgaatttaacatt

SEQ ID NO: 156948 - DNA, 22 bp, synthetic construct
  misc_feature 1..22: note = chemically synthesized
  source 1..22: mol_type = other DNA
ctgaatttaacattactgagcc

SEQ ID NO: 156949 - DNA, 22 bp, synthetic construct
  misc_feature 1..22: note = chemically synthesized
  source 1..22: mol_type = other DNA
aatttaacattactgagccatt

SEQ ID NO: 156950 - DNA, 22 bp, synthetic construct
  misc_feature 1..22: note = chemically synthesized
  source 1..22: mol_type = other DNA
aacattactgagccattgccct

SEQ ID NO: 156951 - DNA, 22 bp, synthetic construct
  misc_feature 1..22: note = chemically synthesized
  source 1..22: mol_type = other DNA
acattactgagccattgccctg

SEQ ID NO: 156952 - DNA, 22 bp, synthetic construct
  misc_feature 1..22: note = chemically synthesized
  source 1..22: mol_type = other DNA
ctgagccattgccctggacatg

SEQ ID NO: 156953 - DNA, 22 bp, synthetic construct
  misc_feature 1..22: note = chemically synthesized
  source 1..22: mol_type = other DNA
agccattgccctggacatgaga

SEQ ID NO: 156954 - DNA, 22 bp, synthetic construct
  misc_feature 1..22: note = chemically synthesized
  source 1..22: mol_type = other DNA
ccctggacatgagaagaagttt

SEQ ID NO: 156955 - DNA, 22 bp, synthetic construct
  misc_feature 1..22: note = chemically synthesized
  source 1..22: mol_type = other DNA
gacatgagaagaagttttcatg

SEQ ID NO: 156956 - DNA, 22 bp, synthetic construct
  misc_feature 1..22: note = chemically synthesized
  source 1..22: mol_type = other DNA
tcatgttctactgtctccttaa

SEQ ID NO: 156957 - DNA, 22 bp, synthetic construct
  misc_feature 1..22: note = chemically synthesized
  source 1..22: mol_type = other DNA
catgttctactgtctccttaac

SEQ ID NO: 156958 - DNA, 22 bp, synthetic construct
  misc_feature 1..22: note = chemically synthesized
  source 1..22: mol_type = other DNA
atgttctactgtctccttaacc

SEQ ID NO: 156959 - DNA, 22 bp, synthetic construct
  misc_feature 1..22: note = chemically synthesized
  source 1..22: mol_type = other DNA
tactgtctccttaaccagtaat

SEQ ID NO: 156960 - DNA, 22 bp, synthetic construct
  misc_feature 1..22: note = chemically synthesized
  source 1..22: mol_type = other DNA
ctgtctccttaaccagtaatcc

SEQ ID NO: 156961 - DNA, 22 bp, synthetic construct
  misc_feature 1..22: note = chemically synthesized
  source 1..22: mol_type = other DNA
tctccttaaccagtaatccttc

SEQ ID NO: 156962 - DNA, 22 bp, synthetic construct
  misc_feature 1..22: note = chemically synthesized
  source 1..22: mol_type = other DNA
cttaaccagtaatccttcagca

SEQ ID NO: 156963 - DNA, 22 bp, synthetic construct
  misc_feature 1..22: note = chemically synthesized
  source 1..22: mol_type = other DNA
aaccagtaatccttcagcagga

SEQ ID NO: 156964 - DNA, 22 bp, synthetic construct
  misc_feature 1..22: note = chemically synthesized
  source 1..22: mol_type = other DNA
accagtaatccttcagcaggaa

SEQ ID NO: 156965 - DNA, 22 bp, synthetic construct
  misc_feature 1..22: note = chemically synthesized
  source 1..22: mol_type = other DNA
cagcaggaagggaaagggaaag

SEQ ID NO: 156966 - DNA, 22 bp, synthetic construct
  misc_feature 1..22: note = chemically synthesized
  source 1..22: mol_type = other DNA
agcaggaagggaaagggaaagg

SEQ ID NO: 156967 - DNA, 22 bp, synthetic construct
  misc_feature 1..22: note = chemically synthesized
  source 1..22: mol_type = other DNA
taaagcagggagttttggaagc

SEQ ID NO: 156968 - DNA, 22 bp, synthetic construct
  misc_feature 1..22: note = chemically synthesized
  source 1..22: mol_type = other DNA
aaagcagggagttttggaagca

SEQ ID NO: 156969 - DNA, 22 bp, synthetic construct
  misc_feature 1..22: note = chemically synthesized
  source 1..22: mol_type = other DNA
aagcagggagttttggaagcac

SEQ ID NO: 156970 - DNA, 22 bp, synthetic construct
  misc_feature 1..22: note = chemically synthesized
  source 1..22: mol_type = other DNA
tggaagcacttagctaaaactg

SEQ ID NO: 156971 - DNA, 22 bp, synthetic construct
  misc_feature 1..22: note = chemically synthesized
  source 1..22: mol_type = other DNA
ggaagcacttagctaaaactga

SEQ ID NO: 156972 - DNA, 22 bp, synthetic construct
  misc_feature 1..22: note = chemically synthesized
  source 1..22: mol_type = other DNA
gaagcacttagctaaaactgat

SEQ ID NO: 156973 - DNA, 22 bp, synthetic construct
  misc_feature 1..22: note = chemically synthesized
  source 1..22: mol_type = other DNA
agctaaaactgatatggtgttc

SEQ ID NO: 156974 - DNA, 22 bp, synthetic construct
  misc_feature 1..22: note = chemically synthesized
  source 1..22: mol_type = other DNA
gctaaaactgatatggtgttct

SEQ ID NO: 156975 - DNA, 22 bp, synthetic construct
  misc_feature 1..22: note = chemically synthesized
  source 1..22: mol_type = other DNA
aaactgatatggtgttctagac

SEQ ID NO: 156976 - DNA, 22 bp, synthetic construct
  misc_feature 1..22: note = chemically synthesized
  source 1..22: mol_type = other DNA
atatggtgttctagacagaatt

SEQ ID NO: 156977 - DNA, 22 bp, synthetic construct
  misc_feature 1..22: note = chemically synthesized
  source 1..22: mol_type = other DNA
tagacagaattagcaaaaacaa

SEQ ID NO: 156978 - DNA, 22 bp, synthetic construct
  misc_feature 1..22: note = chemically synthesized
  source 1..22: mol_type = other DNA
gacagaattagcaaaaacaaaa

SEQ ID NO: 156979 - DNA, 22 bp, synthetic construct
  misc_feature 1..22: note = chemically synthesized
  source 1..22: mol_type = other DNA
gcaaaaacaaaaaacaaaaggt

SEQ ID NO: 156980 - DNA, 22 bp, synthetic construct
  misc_feature 1..22: note = chemically synthesized
  source 1..22: mol_type = other DNA
agtgattgataaggtgagaata

SEQ ID NO: 156981 - DNA, 22 bp, synthetic construct
  misc_feature 1..22: note = chemically synthesized
  source 1..22: mol_type = other DNA
ataaggtgagaatagtatttca

SEQ ID NO: 156982 - DNA, 22 bp, synthetic construct
  misc_feature 1..22: note = chemically synthesized
  source 1..22: mol_type = other DNA
caaatgagcaagagatccaaga

SEQ ID NO: 156983 - DNA, 22 bp, synthetic construct
  misc_feature 1..22: note = chemically synthesized
  source 1..22: mol_type = other DNA
aaatgagcaagagatccaagac

SEQ ID NO: 156984 - DNA, 22 bp, synthetic construct
  misc_feature 1..22: note = chemically synthesized
  source 1..22: mol_type = other DNA
cagactattgttttataactga

SEQ ID NO: 156985 - DNA, 22 bp, synthetic construct
  misc_feature 1..22: note = chemically synthesized
  source 1..22: mol_type = other DNA
ttgttttataactgaggtctta

SEQ ID NO: 156986 - DNA, 22 bp, synthetic construct
  misc_feature 1..22: note = chemically synthesized
  source 1..22: mol_type = other DNA
ttttataactgaggtcttagtt

SEQ ID NO: 156987 - DNA, 22 bp, synthetic construct
  misc_feature 1..22: note = chemically synthesized
  source 1..22: mol_type = other DNA
tataactgaggtcttagttaat

SEQ ID NO: 156988 - DNA, 22 bp, synthetic construct
  misc_feature 1..22: note = chemically synthesized
  source 1..22: mol_type = other DNA
ataactgaggtcttagttaata

SEQ ID NO: 156989 - DNA, 22 bp, synthetic construct
  misc_feature 1..22: note = chemically synthesized
  source 1..22: mol_type = other DNA
taactgaggtcttagttaatat

SEQ ID NO: 156990 - DNA, 22 bp, synthetic construct
  misc_feature 1..22: note = chemically synthesized
  source 1..22: mol_type = other DNA
aggtcttagttaatatcaatca

SEQ ID NO: 156991 - DNA, 22 bp, synthetic construct
  misc_feature 1..22: note = chemically synthesized
  source 1..22: mol_type = other DNA
agttaatatcaatcaagcaaaa

SEQ ID NO: 156992 - DNA, 22 bp, synthetic construct
  misc_feature 1..22: note = chemically synthesized
  source 1..22: mol_type = other DNA
gttaatatcaatcaagcaaaat

SEQ ID NO: 156993 - DNA, 22 bp, synthetic construct
  misc_feature 1..22: note = chemically synthesized
  source 1..22: mol_type = other DNA
atatcaatcaagcaaaattttg

SEQ ID NO: 156994 - DNA, 22 bp, synthetic construct
  misc_feature 1..22: note = chemically synthesized
  source 1..22: mol_type = other DNA
tgatttcggggggagaaaaaag

SEQ ID NO: 156995 - DNA, 22 bp, synthetic construct
  misc_feature 1..22: note = chemically synthesized
  source 1..22: mol_type = other DNA
gatttcggggggagaaaaaaga

SEQ ID NO: 156996 - DNA, 22 bp, synthetic construct
  misc_feature 1..22: note = chemically synthesized
  source 1..22: mol_type = other DNA
atttcggggggagaaaaaagac

SEQ ID NO: 156997 - DNA, 22 bp, synthetic construct
  misc_feature 1..22: note = chemically synthesized
  source 1..22: mol_type = other DNA
cggggggagaaaaaagaccaaa

SEQ ID NO: 156998 - DNA, 22 bp, synthetic construct
  misc_feature 1..22: note = chemically synthesized
  source 1..22: mol_type = other DNA
ggggggagaaaaaagaccaaat

SEQ ID NO: 156999 - DNA, 22 bp, synthetic construct
  misc_feature 1..22: note = chemically synthesized
  source 1..22: mol_type = other DNA
taatctggggtgtatttcttta

SEQ ID NO: 157000 - DNA, 22 bp, synthetic construct
  misc_feature 1..22: note = chemically synthesized
  source 1..22: mol_type = other DNA
gggtgtatttctttatttacat

SEQ ID NO: 157001 - DNA, 22 bp, synthetic construct
  misc_feature 1..22: note = chemically synthesized
  source 1..22: mol_type = other DNA
ctttatttacatctttgccttt

SEQ ID NO: 157002 - DNA, 22 bp, synthetic construct
  misc_feature 1..22: note = chemically synthesized
  source 1..22: mol_type = other DNA
tttatttacatctttgccttta

SEQ ID NO: 157003 - DNA, 22 bp, synthetic construct
  misc_feature 1..22: note = chemically synthesized
  source 1..22: mol_type = other DNA
tatttacatctttgcctttatt

SEQ ID NO: 157004 - DNA, 22 bp, synthetic construct
  misc_feature 1..22: note = chemically synthesized
  source 1..22: mol_type = other DNA
atttacatctttgcctttattt

SEQ ID NO: 157005 - DNA, 22 bp, synthetic construct
  misc_feature 1..22: note = chemically synthesized
  source 1..22: mol_type = other DNA
tttacatctttgcctttatttt

SEQ ID NO: 157006 - DNA, 22 bp, synthetic construct
  misc_feature 1..22: note = chemically synthesized
  source 1..22: mol_type = other DNA
acatctttgcctttatttttta

SEQ ID NO: 157007 - DNA, 22 bp, synthetic construct
  misc_feature 1..22: note = chemically synthesized
  source 1..22: mol_type = other DNA
catctttgcctttattttttaa

SEQ ID NO: 157008 - DNA, 22 bp, synthetic construct
  misc_feature 1..22: note = chemically synthesized
  source 1..22: mol_type = other DNA
tgcctttattttttaactttct

SEQ ID NO: 157009 - DNA, 22 bp, synthetic construct
  misc_feature 1..22: note = chemically synthesized
  source 1..22: mol_type = other DNA
gcctttattttttaactttctt

SEQ ID NO: 157010 - DNA, 22 bp, synthetic construct
  misc_feature 1..22: note = chemically synthesized
  source 1..22: mol_type = other DNA
cctttattttttaactttcttt

SEQ ID NO: 157011 - DNA, 22 bp, synthetic construct
  misc_feature 1..22: note = chemically synthesized
  source 1..22: mol_type = other DNA
tattttttaactttcttttgta

SEQ ID NO: 157012 - DNA, 22 bp, synthetic construct
  misc_feature 1..22: note = chemically synthesized
  source 1..22: mol_type = other DNA
attttttaactttcttttgtat

SEQ ID NO: 157013 - DNA, 22 bp, synthetic construct
  misc_feature 1..22: note = chemically synthesized
  source 1..22: mol_type = other DNA
ttttttaactttcttttgtata

SEQ ID NO: 157014 - DNA, 22 bp, synthetic construct
  misc_feature 1..22: note = chemically synthesized
  source 1..22: mol_type = other DNA
tttaactttcttttgtatatga

SEQ ID NO: 157015 - DNA, 22 bp, synthetic construct
  misc_feature 1..22: note = chemically synthesized
  source 1..22: mol_type = other DNA
ttaactttcttttgtatatgat

SEQ ID NO: 157016 - DNA, 22 bp, synthetic construct
  misc_feature 1..22: note = chemically synthesized
  source 1..22: mol_type = other DNA
taactttcttttgtatatgata

SEQ ID NO: 157017 - DNA, 22 bp, synthetic construct
  misc_feature 1..22: note = chemically synthesized
  source 1..22: mol_type = other DNA
aactttcttttgtatatgatat

SEQ ID NO: 157018 - DNA, 22 bp, synthetic construct
  misc_feature 1..22: note = chemically synthesized
  source 1..22: mol_type = other DNA
actttcttttgtatatgatatg

SEQ ID NO: 157019 - DNA, 22 bp, synthetic construct
  misc_feature 1..22: note = chemically synthesized
  source 1..22: mol_type = other DNA
tcttttgtatatgatatgatca

SEQ ID NO: 157020 - DNA, 22 bp, synthetic construct
  misc_feature 1..22: note = chemically synthesized
  source 1..22: mol_type = other DNA
cttttgtatatgatatgatcat

SEQ ID NO: 157021 - DNA, 22 bp, synthetic construct
  misc_feature 1..22: note = chemically synthesized
  source 1..22: mol_type = other DNA
ttttgtatatgatatgatcatt

SEQ ID NO: 157022 - DNA, 22 bp, synthetic construct
  misc_feature 1..22: note = chemically synthesized
  source 1..22: mol_type = other DNA
ttgtatatgatatgatcattta

SEQ ID NO: 157023 - DNA, 22 bp, synthetic construct
  misc_feature 1..22: note = chemically synthesized
  source 1..22: mol_type = other DNA
tgtatatgatatgatcatttaa

SEQ ID NO: 157024 - DNA, 22 bp, synthetic construct
  misc_feature 1..22: note = chemically synthesized
  source 1..22: mol_type = other DNA
gtatatgatatgatcatttaag

SEQ ID NO: 157025 - DNA, 22 bp, synthetic construct
  misc_feature 1..22: note = chemically synthesized
  source 1..22: mol_type = other DNA
tatatgatatgatcatttaagt

SEQ ID NO: 157026 - DNA, 22 bp, synthetic construct
  misc_feature 1..22: note = chemically synthesized
  source 1..22: mol_type = other DNA
aagtataagtcacctgaaagta

SEQ ID NO: 157027 - DNA, 22 bp, synthetic construct
  misc_feature 1..22: note = chemically synthesized
  source 1..22: mol_type = other DNA
agtataagtcacctgaaagtaa

SEQ ID NO: 157028 - DNA, 22 bp, synthetic construct
  misc_feature 1..22: note = chemically synthesized
  source 1..22: mol_type = other DNA
aaagtaaaaagagttatataag

SEQ ID NO: 157029 - DNA, 22 bp, synthetic construct
  misc_feature 1..22: note = chemically synthesized
  source 1..22: mol_type = other DNA
tataaggacaacataaaaatca

SEQ ID NO: 157030 - DNA, 22 bp, synthetic construct
  misc_feature 1..22: note = chemically synthesized
  source 1..22: mol_type = other DNA
tatgcaactgcaagaaccaata

SEQ ID NO: 157031 - DNA, 22 bp, synthetic construct
  misc_feature 1..22: note = chemically synthesized
  source 1..22: mol_type = other DNA
atgcaactgcaagaaccaatag

SEQ ID NO: 157032 - DNA, 22 bp, synthetic construct
  misc_feature 1..22: note = chemically synthesized
  source 1..22: mol_type = other DNA
tgcaactgcaagaaccaatagg

SEQ ID NO: 157033 - DNA, 22 bp, synthetic construct
  misc_feature 1..22: note = chemically synthesized
  source 1..22: mol_type = other DNA
caagaaccaataggaaaataga

SEQ ID NO: 157034 - DNA, 22 bp, synthetic construct
  misc_feature 1..22: note = chemically synthesized
  source 1..22: mol_type = other DNA
aaaatgatgatagaggccagac

SEQ ID NO: 157035 - DNA, 22 bp, synthetic construct
  misc_feature 1..22: note = chemically synthesized
  source 1..22: mol_type = other DNA
taatcccagctacatgggaggc

SEQ ID NO: 157036 - DNA, 22 bp, synthetic construct
  misc_feature 1..22: note = chemically synthesized
  source 1..22: mol_type = other DNA
catgggaggctgaggcaggaga

SEQ ID NO: 157037 - DNA, 22 bp, synthetic construct
  misc_feature 1..22: note = chemically synthesized
  source 1..22: mol_type = other DNA
aggcaggagaatgatttgaatt

SEQ ID NO: 157038 - DNA, 22 bp, synthetic construct
  misc_feature 1..22: note = chemically synthesized
  source 1..22: mol_type = other DNA
gaattctggaggcggaggttgc

SEQ ID NO: 157039 - DNA, 22 bp, synthetic construct
  misc_feature 1..22: note = chemically synthesized
  source 1..22: mol_type = other DNA
aattctggaggcggaggttgca

SEQ ID NO: 157040 - DNA, 22 bp, synthetic construct
  misc_feature 1..22: note = chemically synthesized
  source 1..22: mol_type = other DNA
tggaggcggaggttgcagtgag

SEQ ID NO: 157041 - DNA, 22 bp, synthetic construct
  misc_feature 1..22: note = chemically synthesized
  source 1..22: mol_type = other DNA
gaggcggaggttgcagtgagcc

SEQ ID NO: 157042 - DNA, 22 bp, synthetic construct
  misc_feature 1..22: note = chemically synthesized
  source 1..22: mol_type = other DNA
cagtgagccgagatcgcgtcac

SEQ ID NO: 157043 - DNA, 22 bp, synthetic construct
  misc_feature 1..22: note = chemically synthesized
  source 1..22: mol_type = other DNA
actctagcctggaccacagaga

SEQ ID NO: 157044 - DNA, 22 bp, synthetic construct
  misc_feature 1..22: note = chemically synthesized
  source 1..22: mol_type = other DNA
tagcctggaccacagagagaga

SEQ ID NO: 157045 - DNA, 22 bp, synthetic construct
  misc_feature 1..22: note = chemically synthesized
  source 1..22: mol_type = other DNA
gcctggaccacagagagagact

SEQ ID NO: 157046 - DNA, 22 bp, synthetic construct
  misc_feature 1..22: note = chemically synthesized
  source 1..22: mol_type = other DNA
gaccacagagagagactccatc

SEQ ID NO: 157047 - DNA, 22 bp, synthetic construct
  misc_feature 1..22: note = chemically synthesized
  source 1..22: mol_type = other DNA
catctcaaaaaaaccaaaaata

SEQ ID NO: 157048 - DNA, 22 bp, synthetic construct
  misc_feature 1..22: note = chemically synthesized
  source 1..22: mol_type = other DNA
aaaaaaaccaaaaatacgtaaa

SEQ ID NO: 157049 - DNA, 22 bp, synthetic construct
  misc_feature 1..22: note = chemically synthesized
  source 1..22: mol_type = other DNA
tatatgtgcctaaaataaatga

SEQ ID NO: 157050 - DNA, 22 bp, synthetic construct
  misc_feature 1..22: note = chemically synthesized
  source 1..22: mol_type = other DNA
aaataaatgaaataattgttta

SEQ ID NO: 157051 - DNA, 22 bp, synthetic construct
  misc_feature 1..22: note = chemically synthesized
  source 1..22: mol_type = other DNA
tttattatacattgtttattgt

SEQ ID NO: 157052 - DNA, 22 bp, synthetic construct
  misc_feature 1..22: note = chemically synthesized
  source 1..22: mol_type = other DNA
attatacattgtttattgtaac

SEQ ID NO: 157053 - DNA, 22 bp, synthetic construct
  misc_feature 1..22: note = chemically synthesized
  source 1..22: mol_type = other DNA
ttatacattgtttattgtaaca

SEQ ID NO: 157054 - DNA, 22 bp, synthetic construct
  misc_feature 1..22: note = chemically synthesized
  source 1..22: mol_type = other DNA
tacattgtttattgtaacaatt

SEQ ID NO: 157055 - DNA, 22 bp, synthetic construct
  misc_feature 1..22: note = chemically synthesized
  source 1..22: mol_type = other DNA
tttattgtaacaattctctcag

SEQ ID NO: 157056 - DNA, 22 bp, synthetic construct
  misc_feature 1..22: note = chemically synthesized
  source 1..22: mol_type = other DNA
attgtaacaattctctcagaaa

SEQ ID NO: 157057 - DNA, 22 bp, synthetic construct
  misc_feature 1..22: note = chemically synthesized
  source 1..22: mol_type = other DNA
ttgtaacaattctctcagaaac

SEQ ID NO: 157058 - DNA, 22 bp, synthetic construct
  misc_feature 1..22: note = chemically synthesized
  source 1..22: mol_type = other DNA
taacaattctctcagaaacaac

SEQ ID NO: 157059 - DNA, 22 bp, synthetic construct
  misc_feature 1..22: note = chemically synthesized
  source 1..22: mol_type = other DNA
tctcagaaacaactcataataa

SEQ ID NO: 157060 - DNA, 22 bp, synthetic construct
  misc_feature 1..22: note = chemically synthesized
  source 1..22: mol_type = other DNA
tcagaaacaactcataataaat

SEQ ID NO: 157061 - DNA, 22 bp, synthetic construct
  misc_feature 1..22: note = chemically synthesized
  source 1..22: mol_type = other DNA
agaaacaactcataataaattc

SEQ ID NO: 157062 - DNA, 22 bp, synthetic construct
  misc_feature 1..22: note = chemically synthesized
  source 1..22: mol_type = other DNA
ataataaattcaattcaaccct

SEQ ID NO: 157063 - DNA, 22 bp, synthetic construct
  misc_feature 1..22: note = chemically synthesized
  source 1..22: mol_type = other DNA
aattcaaccctaatcaaaataa

SEQ ID NO: 157064 - DNA, 22 bp, synthetic construct
  misc_feature 1..22: note = chemically synthesized
  source 1..22: mol_type = other DNA
aaccctaatcaaaataaaaatt

SEQ ID NO: 157065 - DNA, 22 bp, synthetic construct
  misc_feature 1..22: note = chemically synthesized
  source 1..22: mol_type = other DNA
atcaaaataaaaatttgtcttg

SEQ ID NO: 157066 - DNA, 22 bp, synthetic construct
  misc_feature 1..22: note = chemically synthesized
  source 1..22: mol_type = other DNA
gtcttgttttaaatttctttcc

SEQ ID NO: 157067 - DNA, 22 bp, synthetic construct
  misc_feature 1..22: note = chemically synthesized
  source 1..22: mol_type = other DNA
tcttgttttaaatttctttcca

SEQ ID NO: 157068 - DNA, 22 bp, synthetic construct
  misc_feature 1..22: note = chemically synthesized
  source 1..22: mol_type = other DNA
gttttaaatttctttccatttt

SEQ ID NO: 157069 - DNA, 22 bp, synthetic construct
  misc_feature 1..22: note = chemically synthesized
  source 1..22: mol_type = other DNA
ttttaaatttctttccattttt

SEQ ID NO: 157070 - DNA, 22 bp, synthetic construct
  misc_feature 1..22: note = chemically synthesized
  source 1..22: mol_type = other DNA
taaatttctttccatttttatt

SEQ ID NO: 157071 - DNA, 22 bp, synthetic construct
  misc_feature 1..22: note = chemically synthesized
  source 1..22: mol_type = other DNA
aaatttctttccatttttattg

SEQ ID NO: 157072 - DNA, 22 bp, synthetic construct
  misc_feature 1..22: note = chemically synthesized
  source 1..22: mol_type = other DNA
aatttctttccatttttattgt

SEQ ID NO: 157073 - DNA, 22 bp, synthetic construct
  misc_feature 1..22: note = chemically synthesized
  source 1..22: mol_type = other DNA
ctttccatttttattgtgataa

SEQ ID NO: 157074 - DNA, 22 bp, synthetic construct
  misc_feature 1..22: note = chemically synthesized
  source 1..22: mol_type = other DNA
tttccatttttattgtgataaa

SEQ ID NO: 157075 - DNA, 22 bp, synthetic construct
  misc_feature 1..22: note = chemically synthesized
  source 1..22: mol_type = other DNA
tccatttttattgtgataaagt

SEQ ID NO: 157076 - DNA, 22 bp, synthetic construct
  misc_feature 1..22: note = chemically synthesized
  source 1..22: mol_type = other DNA
ccatttttattgtgataaagtt

SEQ ID NO: 157077 - DNA, 22 bp, synthetic construct
  misc_feature 1..22: note = chemically synthesized
  source 1..22: mol_type = other DNA
catttttattgtgataaagttt

SEQ ID NO: 157078 - DNA, 22 bp, synthetic construct
  misc_feature 1..22: note = chemically synthesized
  source 1..22: mol_type = other DNA
ttattgtgataaagtttataaa

SEQ ID NO: 157079 - DNA, 22 bp, synthetic construct
  misc_feature 1..22: note = chemically synthesized
  source 1..22: mol_type = other DNA
tattgtgataaagtttataaat

SEQ ID NO: 157080 - DNA, 22 bp, synthetic construct
  misc_feature 1..22: note = chemically synthesized
  source 1..22: mol_type = other DNA
attgtgataaagtttataaata

SEQ ID NO: 157081 - DNA, 22 bp, synthetic construct
  misc_feature 1..22: note = chemically synthesized
  source 1..22: mol_type = other DNA
ttgtgataaagtttataaatat

SEQ ID NO: 157082 - DNA, 22 bp, synthetic construct
  misc_feature 1..22: note = chemically synthesized
  source 1..22: mol_type = other DNA
tgataaagtttataaatatgct

SEQ ID NO: 157083 - DNA, 22 bp, synthetic construct
  misc_feature 1..22: note = chemically synthesized
  source 1..22: mol_type = other DNA
ataaatatgctacatataatac

SEQ ID NO: 157084 - DNA, 22 bp, synthetic construct
  misc_feature 1..22: note = chemically synthesized
  source 1..22: mol_type = other DNA
taaatatgctacatataatacc

SEQ ID NO: 157085 - DNA, 22 bp, synthetic construct
  misc_feature 1..22: note = chemically synthesized
  source 1..22: mol_type = other DNA
catataataccgtatatcatat

SEQ ID NO: 157086 - DNA, 22 bp, synthetic construct
  misc_feature 1..22: note = chemically synthesized
  source 1..22: mol_type = other DNA
accatattaaccatttttaagt

SEQ ID NO: 157087 - DNA, 22 bp, synthetic construct
  misc_feature 1..22: note = chemically synthesized
  source 1..22: mol_type = other DNA
accatttttaagtataattatg

SEQ ID NO: 157088 - DNA, 22 bp, synthetic construct
  misc_feature 1..22: note = chemically synthesized
  source 1..22: mol_type = other DNA
ttaagtataattatgtggcatt

SEQ ID NO: 157089 - DNA, 22 bp, synthetic construct
  misc_feature 1..22: note = chemically synthesized
  source 1..22: mol_type = other DNA
taagtataattatgtggcatta

SEQ ID NO: 157090 - DNA, 22 bp, synthetic construct
  misc_feature 1..22: note = chemically synthesized
  source 1..22: mol_type = other DNA
aagtataattatgtggcattaa

SEQ ID NO: 157091 - DNA, 22 bp, synthetic construct
  misc_feature 1..22: note = chemically synthesized
  source 1..22: mol_type = other DNA
agtataattatgtggcattaat

SEQ ID NO: 157092 - DNA, 22 bp, synthetic construct
  misc_feature 1..22: note = chemically synthesized
  source 1..22: mol_type = other DNA
tgtggcattaattatattaaca

SEQ ID NO: 157093 - DNA, 22 bp, synthetic construct
  misc_feature 1..22: note = chemically synthesized
  source 1..22: mol_type = other DNA
attatattaacaatattgtgcc

SEQ ID NO: 157094 - DNA, 22 bp, synthetic construct
  misc_feature 1..22: note = chemically synthesized
  source 1..22: mol_type = other DNA
tattaacaatattgtgccgcta

SEQ ID NO: 157095 - DNA, 22 bp, synthetic construct
  misc_feature 1..22: note = chemically synthesized
  source 1..22: mol_type = other DNA
acaatattgtgccgctatcacc

SEQ ID NO: 157096 - DNA, 22 bp, synthetic construct
  misc_feature 1..22: note = chemically synthesized
  source 1..22: mol_type = other DNA
tgccgctatcaccatgatctca

SEQ ID NO: 157097 - DNA, 22 bp, synthetic construct
  misc_feature 1..22: note = chemically synthesized
  source 1..22: mol_type = other DNA
tcaccatgatctcatgccaaaa

SEQ ID NO: 157098 - DNA, 22 bp, synthetic construct
  misc_feature 1..22: note = chemically synthesized
  source 1..22: mol_type = other DNA
atgccaaaactttttcatcatc

SEQ ID NO: 157099 - DNA, 22 bp, synthetic construct
  misc_feature 1..22: note = chemically synthesized
  source 1..22: mol_type = other DNA
tttcatcatccaagcagaaatg

SEQ ID NO: 157100 - DNA, 22 bp, synthetic construct
  misc_feature 1..22: note = chemically synthesized
  source 1..22: mol_type = other DNA
ttcatcatccaagcagaaatgc

SEQ ID NO: 157101 - DNA, 22 bp, synthetic construct
  misc_feature 1..22: note = chemically synthesized
  source 1..22: mol_type = other DNA
tcatcatccaagcagaaatgct

SEQ ID NO: 157102 - DNA, 22 bp, synthetic construct
  misc_feature 1..22: note = chemically synthesized
  source 1..22: mol_type = other DNA
catcatccaagcagaaatgcta

SEQ ID NO: 157103 - DNA, 22 bp, synthetic construct
  misc_feature 1..22: note = chemically synthesized
  source 1..22: mol_type = other DNA
atcatccaagcagaaatgctat

SEQ ID NO: 157104 - DNA, 22 bp, synthetic construct
  misc_feature 1..22: note = chemically synthesized
  source 1..22: mol_type = other DNA
tacttgttaggcagtaactccc

SEQ ID NO: 157105 - DNA, 22 bp, synthetic construct
  misc_feature 1..22: note = chemically synthesized
  source 1..22: mol_type = other DNA
gttaggcagtaactccccagtc

SEQ ID NO: 157106 - DNA, 22 bp, synthetic construct
  misc_feature 1..22: note = chemically synthesized
  source 1..22: mol_type = other DNA
ttaggcagtaactccccagtcc

SEQ ID NO: 157107 - DNA, 22 bp, synthetic construct
  misc_feature 1..22: note = chemically synthesized
  source 1..22: mol_type = other DNA
ggcagtaactccccagtcccat

SEQ ID NO: 157108 - DNA, 22 bp, synthetic construct
  misc_feature 1..22: note = chemically synthesized
  source 1..22: mol_type = other DNA
cccagtcccatagtaacctcta

SEQ ID NO: 157109 - DNA, 22 bp, synthetic construct
  misc_feature 1..22: note = chemically synthesized
  source 1..22: mol_type = other DNA
taatctactatatgtttctcta

SEQ ID NO: 157110 - DNA, 22 bp, synthetic construct
  misc_feature 1..22: note = chemically synthesized
  source 1..22: mol_type = other DNA
atctactatatgtttctctaaa

SEQ ID NO: 157111 - DNA, 22 bp, synthetic construct
  misc_feature 1..22: note = chemically synthesized
  source 1..22: mol_type = other DNA
ctatatgtttctctaaatcagt

SEQ ID NO: 157112 - DNA, 22 bp, synthetic construct
  misc_feature 1..22: note = chemically synthesized
  source 1..22: mol_type = other DNA
tatgtttctctaaatcagtcta

SEQ ID NO: 157113 - DNA, 22 bp, synthetic construct
  misc_feature 1..22: note = chemically synthesized
  source 1..22: mol_type = other DNA
ctctaaatcagtctattttaga

SEQ ID NO: 157114 - DNA, 22 bp, synthetic construct
  misc_feature 1..22: note = chemically synthesized
  source 1..22: mol_type = other DNA
tctaaatcagtctattttagat

SEQ ID NO: 157115 - DNA, 22 bp, synthetic construct
  misc_feature 1..22: note = chemically synthesized
  source 1..22: mol_type = other DNA
taaatcagtctattttagataa

SEQ ID NO: 157116 - DNA, 22 bp, synthetic construct
  misc_feature 1..22: note = chemically synthesized
  source 1..22: mol_type = other DNA
aatcagtctattttagataatt

SEQ ID NO: 157117 - DNA, 22 bp, synthetic construct
  misc_feature 1..22: note = chemically synthesized
  source 1..22: mol_type = other DNA
ttttagataattcatataaata

SEQ ID NO: 157118 - DNA, 22 bp, synthetic construct
  misc_feature 1..22: note = chemically synthesized
  source 1..22: mol_type = other DNA
tagataattcatataaatagat

SEQ ID NO: 157119 - DNA, 22 bp, synthetic construct
  misc_feature 1..22: note = chemically synthesized
  source 1..22: mol_type = other DNA
agataattcatataaatagatt

SEQ ID NO: 157120 - DNA, 22 bp, synthetic construct
  misc_feature 1..22: note = chemically synthesized
  source 1..22: mol_type = other DNA
gataattcatataaatagattc

SEQ ID NO: 157121 - DNA, 22 bp, synthetic construct
  misc_feature 1..22: note = chemically synthesized
  source 1..22: mol_type = other DNA
atataaatagattcatacaata

SEQ ID NO: 157122 - DNA, 22 bp, synthetic construct
  misc_feature 1..22: note = chemically synthesized
  source 1..22: mol_type = other DNA
atacaatatttgttgttttgtg

SEQ ID NO: 157123 - DNA, 22 bp, synthetic construct
  misc_feature 1..22: note = chemically synthesized
  source 1..22: mol_type = other DNA
gttgttttgtgtctggcttatt

SEQ ID NO: 157124 - DNA, 22 bp, synthetic construct
  misc_feature 1..22: note = chemically synthesized
  source 1..22: mol_type = other DNA
ttgttttgtgtctggcttattt

SEQ ID NO: 157125 - DNA, 22 bp, synthetic construct
  misc_feature 1..22: note = chemically synthesized
  source 1..22: mol_type = other DNA
ttttgtgtctggcttattttac

SEQ ID NO: 157126 - DNA, 22 bp, synthetic construct
  misc_feature 1..22: note = chemically synthesized
  source 1..22: mol_type = other DNA
tgtgtctggcttattttaccca

SEQ ID NO: 157127 - DNA, 22 bp, synthetic construct
  misc_feature 1..22: note = chemically synthesized
  source 1..22: mol_type = other DNA
gtgtctggcttattttacccaa

SEQ ID NO: 157128 - DNA, 22 bp, synthetic construct
  misc_feature 1..22: note = chemically synthesized
  source 1..22: mol_type = other DNA
tgtctggcttattttacccaac

SEQ ID NO: 157129 - DNA, 22 bp, synthetic construct
  misc_feature 1..22: note = chemically synthesized
  source 1..22: mol_type = other DNA
gcttattttacccaacataagg

SEQ ID NO: 157130 - DNA, 22 bp, synthetic construct
  misc_feature 1..22: note = chemically synthesized
  source 1..22: mol_type = other DNA
attttacccaacataaggtttc

SEQ ID NO: 157131 - DNA, 22 bp, synthetic construct
  misc_feature 1..22: note = chemically synthesized
  source 1..22: mol_type = other DNA
ttttacccaacataaggtttca

SEQ ID NO: 157132 - DNA, 22 bp, synthetic construct
  misc_feature 1..22: note = chemically synthesized
  source 1..22: mol_type = other DNA
tacccaacataaggtttcaaag

SEQ ID NO: 157133 - DNA, 22 bp, synthetic construct
  misc_feature 1..22: note = chemically synthesized
  source 1..22: mol_type = other DNA
acccaacataaggtttcaaagt

SEQ ID NO: 157134 - DNA, 22 bp, synthetic construct
  misc_feature 1..22: note = chemically synthesized
  source 1..22: mol_type = other DNA
cccaacataaggtttcaaagtc

SEQ ID NO: 157135 - DNA, 22 bp, synthetic construct
  misc_feature 1..22: note = chemically synthesized
  source 1..22: mol_type = other DNA
caaagtccatccatgccataac

SEQ ID NO: 157136 - DNA, 22 bp, synthetic construct
  misc_feature 1..22: note = chemically synthesized
  source 1..22: mol_type = other DNA
aaagtccatccatgccataaca

SEQ ID NO: 157137 - DNA, 22 bp, synthetic construct
  misc_feature 1..22: note = chemically synthesized
  source 1..22: mol_type = other DNA
tgcttaatgttgtccattcata

SEQ ID NO: 157138 - DNA, 22 bp, synthetic construct
  misc_feature 1..22: note = chemically synthesized
  source 1..22: mol_type = other DNA
gcttaatgttgtccattcatag

SEQ ID NO: 157139 - DNA, 22 bp, synthetic construct
  misc_feature 1..22: note = chemically synthesized
  source 1..22: mol_type = other DNA
cttaatgttgtccattcataga

SEQ ID NO: 157140 - DNA, 22 bp, synthetic construct
  misc_feature 1..22: note = chemically synthesized
  source 1..22: mol_type = other DNA
aatgttgtccattcatagattc

SEQ ID NO: 157141 - DNA, 22 bp, synthetic construct
  misc_feature 1..22: note = chemically synthesized
  source 1..22: mol_type = other DNA
atgttgtccattcatagattct

SEQ ID NO: 157142 - DNA, 22 bp, synthetic construct
  misc_feature 1..22: note = chemically synthesized
  source 1..22: mol_type = other DNA
tccattcatagattcttggaaa

SEQ ID NO: 157143 - DNA, 22 bp, synthetic construct
  misc_feature 1..22: note = chemically synthesized
  source 1..22: mol_type = other DNA
atagattcttggaaactgaaac

SEQ ID NO: 157144 - DNA, 22 bp, synthetic construct
  misc_feature 1..22: note = chemically synthesized
  source 1..22: mol_type = other DNA
ttggaaactgaaactttaagcc

SEQ ID NO: 157145 - DNA, 22 bp, synthetic construct
  misc_feature 1..22: note = chemically synthesized
  source 1..22: mol_type = other DNA
ggaaactgaaactttaagccaa

SEQ ID NO: 157146 - DNA, 22 bp, synthetic construct
  misc_feature 1..22: note = chemically synthesized
  source 1..22: mol_type = other DNA
gaaactgaaactttaagccaag

SEQ ID NO: 157147 - DNA, 22 bp, synthetic construct
  misc_feature 1..22: note = chemically synthesized
  source 1..22: mol_type = other DNA
aaactttaagccaagtgacata

SEQ ID NO: 157148 - DNA, 22 bp, synthetic construct
  misc_feature 1..22: note = chemically synthesized
  source 1..22: mol_type = other DNA
taagccaagtgacatataatga

SEQ ID NO: 157149 - DNA, 22 bp, synthetic construct
  misc_feature 1..22: note = chemically synthesized
  source 1..22: mol_type = other DNA
aagccaagtgacatataatgat

SEQ ID NO: 157150 - DNA, 22 bp, synthetic construct
  misc_feature 1..22: note = chemically synthesized
  source 1..22: mol_type = other DNA
agccaagtgacatataatgata

SEQ ID NO: 157151 - DNA, 22 bp, synthetic construct
  misc_feature 1..22: note = chemically synthesized
  source 1..22: mol_type = other DNA
tttttctcatctaacagtgttg

SEQ ID NO: 157152 - DNA, 22 bp, synthetic construct
  misc_feature 1..22: note = chemically synthesized
  source 1..22: mol_type = other DNA
ttttctcatctaacagtgttgg

SEQ ID NO: 157153 - DNA, 22 bp, synthetic construct
  misc_feature 1..22: note = chemically synthesized
  source 1..22: mol_type = other DNA
tttctcatctaacagtgttggc

SEQ ID NO: 157154 - DNA, 22 bp, synthetic construct
  misc_feature 1..22: note = chemically synthesized
  source 1..22: mol_type = other DNA
ttctcatctaacagtgttggct

SEQ ID NO: 157155 - DNA, 22 bp, synthetic construct
  misc_feature 1..22: note = chemically synthesized
  source 1..22: mol_type = other DNA
tctcatctaacagtgttggcta

SEQ ID NO: 157156 - DNA, 22 bp, synthetic construct
  misc_feature 1..22: note = chemically synthesized
  source 1..22: mol_type = other DNA
ctcatctaacagtgttggctaa

SEQ ID NO: 157157 - DNA, 22 bp, synthetic construct
  misc_feature 1..22: note = chemically synthesized
  source 1..22: mol_type = other DNA
tcatctaacagtgttggctaaa

SEQ ID NO: 157158 - DNA, 22 bp, synthetic construct
  misc_feature 1..22: note = chemically synthesized
  source 1..22: mol_type = other DNA
atctaacagtgttggctaaaac

SEQ ID NO: 157159 - DNA, 22 bp, synthetic construct
  misc_feature 1..22: note = chemically synthesized
  source 1..22: mol_type = other DNA
acagtgttggctaaaacagtgt

SEQ ID NO: 157160 - DNA, 22 bp, synthetic construct
  misc_feature 1..22: note = chemically synthesized
  source 1..22: mol_type = other DNA
gctaaaacagtgttatttgagg

SEQ ID NO: 157161 - DNA, 22 bp, synthetic construct
  misc_feature 1..22: note = chemically synthesized
  source 1..22: mol_type = other DNA
aaacagtgttatttgaggatct

SEQ ID NO: 157162 - DNA, 22 bp, synthetic construct
  misc_feature 1..22: note = chemically synthesized
  source 1..22: mol_type = other DNA
tttgaggatctgttttacatca

SEQ ID NO: 157163 - DNA, 22 bp, synthetic construct
  misc_feature 1..22: note = chemically synthesized
  source 1..22: mol_type = other DNA
gaggatctgttttacatcattt

SEQ ID NO: 157164 - DNA, 22 bp, synthetic construct
  misc_feature 1..22: note = chemically synthesized
  source 1..22: mol_type = other DNA
aggatctgttttacatcatttc

SEQ ID NO: 157165 - DNA, 22 bp, synthetic construct
  misc_feature 1..22: note = chemically synthesized
  source 1..22: mol_type = other DNA
ttttacatcatttcacttaaag

SEQ ID NO: 157166 - DNA, 22 bp, synthetic construct
  misc_feature 1..22: note = chemically synthesized
  source 1..22: mol_type = other DNA
tacatcatttcacttaaagttg

SEQ ID NO: 157167 - DNA, 22 bp, synthetic construct
  misc_feature 1..22: note = chemically synthesized
  source 1..22: mol_type = other DNA
acatcatttcacttaaagttgc

SEQ ID NO: 157168 - DNA, 22 bp, synthetic construct
  misc_feature 1..22: note = chemically synthesized
  source 1..22: mol_type = other DNA
catcatttcacttaaagttgcc

SEQ ID NO: 157169 - DNA, 22 bp, synthetic construct
  misc_feature 1..22: note = chemically synthesized
  source 1..22: mol_type = other DNA
cacttaaagttgccatttccaa

SEQ ID NO: 157170 - DNA, 22 bp, synthetic construct
  misc_feature 1..22: note = chemically synthesized
  source 1..22: mol_type = other DNA
acttaaagttgccatttccaaa

SEQ ID NO: 157171 - DNA, 22 bp, synthetic construct
  misc_feature 1..22: note = chemically synthesized
  source 1..22: mol_type = other DNA
aaagttgccatttccaaaaacc

SEQ ID NO: 157172 - DNA, 22 bp, synthetic construct
  misc_feature 1..22: note = chemically synthesized
  source 1..22: mol_type = other DNA
aagttgccatttccaaaaacct

SEQ ID NO: 157173 - DNA, 22 bp, synthetic construct
  misc_feature 1..22: note = chemically synthesized
  source 1..22: mol_type = other DNA
ccatttccaaaaacctattcat

SEQ ID NO: 157174 - DNA, 22 bp, synthetic construct
  misc_feature 1..22: note = chemically synthesized
  source 1..22: mol_type = other DNA
ccaaaaacctattcatgacatt

SEQ ID NO: 157175 - DNA, 22 bp, synthetic construct
  misc_feature 1..22: note = chemically synthesized
  source 1..22: mol_type = other DNA
caaaaacctattcatgacatta

SEQ ID NO: 157176 - DNA, 22 bp, synthetic construct
  misc_feature 1..22: note = chemically synthesized
  source 1..22: mol_type = other DNA
ttcatgacattaaataaggact

SEQ ID NO: 157177 - DNA, 22 bp, synthetic construct
  misc_feature 1..22: note = chemically synthesized
  source 1..22: mol_type = other DNA
atgacattaaataaggacttac

SEQ ID NO: 157178 - DNA, 22 bp, synthetic construct
  misc_feature 1..22: note = chemically synthesized
  source 1..22: mol_type = other DNA
aataaggacttactgcatctgt

SEQ ID NO: 157179 - DNA, 22 bp, synthetic construct
  misc_feature 1..22: note = chemically synthesized
  source 1..22: mol_type = other DNA
actgcatctgtacttcattctt

SEQ ID NO: 157180 - DNA, 22 bp, synthetic construct
  misc_feature 1..22: note = chemically synthesized
  source 1..22: mol_type = other DNA
ctgcatctgtacttcattcttt

SEQ ID NO: 157181 - DNA, 22 bp, synthetic construct
  misc_feature 1..22: note = chemically synthesized
  source 1..22: mol_type = other DNA
catctgtacttcattctttttt

SEQ ID NO: 157182 - DNA, 22 bp, synthetic construct
  misc_feature 1..22: note = chemically synthesized
  source 1..22: mol_type = other DNA
tacttcattcttttttattgct

SEQ ID NO: 157183 - DNA, 22 bp, synthetic construct
  misc_feature 1..22: note = chemically synthesized
  source 1..22: mol_type = other DNA
cattcttttttattgctacata

SEQ ID NO: 157184 - DNA, 22 bp, synthetic construct
  misc_feature 1..22: note = chemically synthesized
  source 1..22: mol_type = other DNA
attcttttttattgctacataa

SEQ ID NO: 157185 - DNA, 22 bp, synthetic construct
  misc_feature 1..22: note = chemically synthesized
  source 1..22: mol_type = other DNA
ttttttattgctacataatatt

SEQ ID NO: 157186 - DNA, 22 bp, synthetic construct
  misc_feature 1..22: note = chemically synthesized
  source 1..22: mol_type = other DNA
ttttattgctacataatattcc

SEQ ID NO: 157187 - DNA, 22 bp, synthetic construct
  misc_feature 1..22: note = chemically synthesized
  source 1..22: mol_type = other DNA
tttattgctacataatattcca

SEQ ID NO: 157188 - DNA, 22 bp, synthetic construct
  misc_feature 1..22: note = chemically synthesized
  source 1..22: mol_type = other DNA
ttattgctacataatattccat

SEQ ID NO: 157189 - DNA, 22 bp, synthetic construct
  misc_feature 1..22: note = chemically synthesized
  source 1..22: mol_type = other DNA
tattgctacataatattccatt

SEQ ID NO: 157190 - DNA, 22 bp, synthetic construct
  misc_feature 1..22: note = chemically synthesized
  source 1..22: mol_type = other DNA
attgctacataatattccattg

SEQ ID NO: 157191 - DNA, 22 bp, synthetic construct
  misc_feature 1..22: note = chemically synthesized
  source 1..22: mol_type = other DNA
ttgctacataatattccattgt

SEQ ID NO: 157192 - DNA, 22 bp, synthetic construct
  misc_feature 1..22: note = chemically synthesized
  source 1..22: mol_type = other DNA
ctacataatattccattgtgtg

SEQ ID NO: 157193 - DNA, 22 bp, synthetic construct
  misc_feature 1..22: note = chemically synthesized
  source 1..22: mol_type = other DNA
cataatattccattgtgtgtat

SEQ ID NO: 157194 - DNA, 22 bp, synthetic construct
  misc_feature 1..22: note = chemically synthesized
  source 1..22: mol_type = other DNA
cattgtgtgtatatatcacatt

SEQ ID NO: 157195 - DNA, 22 bp, synthetic construct
  misc_feature 1..22: note = chemically synthesized
  source 1..22: mol_type = other DNA
tgtgtatatatcacatttgttt

SEQ ID NO: 157196 - DNA, 22 bp, synthetic construct
  misc_feature 1..22: note = chemically synthesized
  source 1..22: mol_type = other DNA
gtttattcattcatctgtttat

SEQ ID NO: 157197 - DNA, 22 bp, synthetic construct
  misc_feature 1..22: note = chemically synthesized
  source 1..22: mol_type = other DNA
tttattcattcatctgtttatg

SEQ ID NO: 157198 - DNA, 22 bp, synthetic construct
  misc_feature 1..22: note = chemically synthesized
  source 1..22: mol_type = other DNA
attcattcatctgtttatgtac

SEQ ID NO: 157199 - DNA, 22 bp, synthetic construct
  misc_feature 1..22: note = chemically synthesized
  source 1..22: mol_type = other DNA
ttcattcatctgtttatgtaca

SEQ ID NO: 157200 - DNA, 22 bp, synthetic construct
  misc_feature 1..22: note = chemically synthesized
  source 1..22: mol_type = other DNA
attcatctgtttatgtacattc

SEQ ID NO: 157201 - DNA, 22 bp, synthetic construct
  misc_feature 1..22: note = chemically synthesized
  source 1..22: mol_type = other DNA
atctgtttatgtacattctggt

SEQ ID NO: 157202 - DNA, 22 bp, synthetic construct
  misc_feature 1..22: note = chemically synthesized
  source 1..22: mol_type = other DNA
tttatgtacattctggttgttt

SEQ ID NO: 157203 - DNA, 22 bp, synthetic construct
  misc_feature 1..22: note = chemically synthesized
  source 1..22: mol_type = other DNA
atgtacattctggttgtttcca

SEQ ID NO: 157204 - DNA, 22 bp, synthetic construct
  misc_feature 1..22: note = chemically synthesized
  source 1..22: mol_type = other DNA
tgtacattctggttgtttccac

SEQ ID NO: 157205 - DNA, 22 bp, synthetic construct
  misc_feature 1..22: note = chemically synthesized
  source 1..22: mol_type = other DNA
tggttgtttccaccttttggct

SEQ ID NO: 157206 - DNA, 22 bp, synthetic construct
  misc_feature 1..22: note = chemically synthesized
  source 1..22: mol_type = other DNA
gttgtttccaccttttggctat

SEQ ID NO: 157207 - DNA, 22 bp, synthetic construct
  misc_feature 1..22: note = chemically synthesized
  source 1..22: mol_type = other DNA
tttccaccttttggctattgtg

SEQ ID NO: 157208 - DNA, 22 bp, synthetic construct
  misc_feature 1..22: note = chemically synthesized
  source 1..22: mol_type = other DNA
ccaccttttggctattgtgaat

SEQ ID NO: 157209 - DNA, 22 bp, synthetic construct
  misc_feature 1..22: note = chemically synthesized
  source 1..22: mol_type = other DNA
caccttttggctattgtgaata

SEQ ID NO: 157210 - DNA, 22 bp, synthetic construct
  misc_feature 1..22: note = chemically synthesized
  source 1..22: mol_type = other DNA
ttggctattgtgaataatgcta

SEQ ID NO: 157211 - DNA, 22 bp, synthetic construct
  misc_feature 1..22: note = chemically synthesized
  source 1..22: mol_type = other DNA
tggctattgtgaataatgctac

SEQ ID NO: 157212 - DNA, 22 bp, synthetic construct
  misc_feature 1..22: note = chemically synthesized
  source 1..22: mol_type = other DNA
ggctattgtgaataatgctaca

SEQ ID NO: 157213 - DNA, 22 bp, synthetic construct
  misc_feature 1..22: note = chemically synthesized
  source 1..22: mol_type = other DNA
gctattgtgaataatgctacaa

SEQ ID NO: 157214 - DNA, 22 bp, synthetic construct
  misc_feature 1..22: note = chemically synthesized
  source 1..22: mol_type = other DNA
ttgtgaataatgctacaatgaa

SEQ ID NO: 157215 - DNA, 22 bp, synthetic construct
  misc_feature 1..22: note = chemically synthesized
  source 1..22: mol_type = other DNA
tgaataatgctacaatgaacat

SEQ ID NO: 157216 - DNA, 22 bp, synthetic construct
  misc_feature 1..22: note = chemically synthesized
  source 1..22: mol_type = other DNA
caatgaacatttcagtacaagt

SEQ ID NO: 157217 - DNA, 22 bp, synthetic construct
  misc_feature 1..22: note = chemically synthesized
  source 1..22: mol_type = other DNA
cagtacaagtacctgtttaaat

SEQ ID NO: 157218 - DNA, 22 bp, synthetic construct
  misc_feature 1..22: note = chemically synthesized
  source 1..22: mol_type = other DNA
agtacaagtacctgtttaaatc

SEQ ID NO: 157219 - DNA, 22 bp, synthetic construct
  misc_feature 1..22: note = chemically synthesized
  source 1..22: mol_type = other DNA
tttaaatctttatatatatttt

SEQ ID NO: 157220 - DNA, 22 bp, synthetic construct
  misc_feature 1..22: note = chemically synthesized
  source 1..22: mol_type = other DNA
aaatctttatatatatttttaa

SEQ ID NO: 157221 - DNA, 22 bp, synthetic construct
  misc_feature 1..22: note = chemically synthesized
  source 1..22: mol_type = other DNA
aatctttatatatatttttaat

SEQ ID NO: 157222 - DNA, 22 bp, synthetic construct
  misc_feature 1..22: note = chemically synthesized
  source 1..22: mol_type = other DNA
tatatatatttttaatatatac

SEQ ID NO: 157223 - DNA, 22 bp, synthetic construct
  misc_feature 1..22: note = chemically synthesized
  source 1..22: mol_type = other DNA
atatatatttttaatatatacc

SEQ ID NO: 157224 - DNA, 22 bp, synthetic construct
  misc_feature 1..22: note = chemically synthesized
  source 1..22: mol_type = other DNA
tatatatttttaatatatacct

SEQ ID NO: 157225 - DNA, 22 bp, synthetic construct
  misc_feature 1..22: note = chemically synthesized
  source 1..22: mol_type = other DNA
ttaatatatacctaggagagga

SEQ ID NO: 157226 - DNA, 22 bp, synthetic construct
  misc_feature 1..22: note = chemically synthesized
  source 1..22: mol_type = other DNA
taatatatacctaggagaggaa

SEQ ID NO: 157227 - DNA, 22 bp, synthetic construct
  misc_feature 1..22: note = chemically synthesized
  source 1..22: mol_type = other DNA
aatatatacctaggagaggaat

SEQ ID NO: 157228 - DNA, 22 bp, synthetic construct
  misc_feature 1..22: note = chemically synthesized
  source 1..22: mol_type = other DNA
atatatacctaggagaggaatt

SEQ ID NO: 157229 - DNA, 22 bp, synthetic construct
  misc_feature 1..22: note = chemically synthesized
  source 1..22: mol_type = other DNA
ggagaggaattttggggtcata

SEQ ID NO: 157230 - DNA, 22 bp, synthetic construct
  misc_feature 1..22: note = chemically synthesized
  source 1..22: mol_type = other DNA
tggggtcatatgttattcagtg

SEQ ID NO: 157231 - DNA, 22 bp, synthetic construct
  misc_feature 1..22: note = chemically synthesized
  source 1..22: mol_type = other DNA
ggggtcatatgttattcagtgc

SEQ ID NO: 157232 - DNA, 22 bp, synthetic construct
  misc_feature 1..22: note = chemically synthesized
  source 1..22: mol_type = other DNA
gggtcatatgttattcagtgcc

SEQ ID NO: 157233 - DNA, 22 bp, synthetic construct
  misc_feature 1..22: note = chemically synthesized
  source 1..22: mol_type = other DNA
ttcagtgcctaagtttttgaag

SEQ ID NO: 157234 - DNA, 22 bp, synthetic construct
  misc_feature 1..22: note = chemically synthesized
  source 1..22: mol_type = other DNA
agtgcctaagtttttgaagaac

SEQ ID NO: 157235 - DNA, 22 bp, synthetic construct
  misc_feature 1..22: note = chemically synthesized
  source 1..22: mol_type = other DNA
agtttttgaagaactgtcaaaa

SEQ ID NO: 157236 - DNA, 22 bp, synthetic construct
  misc_feature 1..22: note = chemically synthesized
  source 1..22: mol_type = other DNA
ttgaagaactgtcaaaatattt

SEQ ID NO: 157237 - DNA, 22 bp, synthetic construct
  misc_feature 1..22: note = chemically synthesized
  source 1..22: mol_type = other DNA
tgaagaactgtcaaaatatttt

SEQ ID NO: 157238 - DNA, 22 bp, synthetic construct
  misc_feature 1..22: note = chemically synthesized
  source 1..22: mol_type = other DNA
gaagaactgtcaaaatattttc

SEQ ID NO: 157239 - DNA, 22 bp, synthetic construct
  misc_feature 1..22: note = chemically synthesized
  source 1..22: mol_type = other DNA
aagaactgtcaaaatattttct

SEQ ID NO: 157240 - DNA, 22 bp, synthetic construct
  misc_feature 1..22: note = chemically synthesized
  source 1..22: mol_type = other DNA
tcaaaatattttctacagaagt

SEQ ID NO: 157241 - DNA, 22 bp, synthetic construct
  misc_feature 1..22: note = chemically synthesized
  source 1..22: mol_type = other DNA
tctacagaagttgcaccactta

SEQ ID NO: 157242 - DNA, 22 bp, synthetic construct
  misc_feature 1..22: note = chemically synthesized
  source 1..22: mol_type = other DNA
ctacagaagttgcaccacttaa

SEQ ID NO: 157243 - DNA, 22 bp, synthetic construct
  misc_feature 1..22: note = chemically synthesized
  source 1..22: mol_type = other DNA
tacagaagttgcaccacttaac

SEQ ID NO: 157244 - DNA, 22 bp, synthetic construct
  misc_feature 1..22: note = chemically synthesized
  source 1..22: mol_type = other DNA
cagaagttgcaccacttaacat

SEQ ID NO: 157245 - DNA, 22 bp, synthetic construct
  misc_feature 1..22: note = chemically synthesized
  source 1..22: mol_type = other DNA
caccacttaacatttttagcag

SEQ ID NO: 157246 - DNA, 22 bp, synthetic construct
  misc_feature 1..22: note = chemically synthesized
  source 1..22: mol_type = other DNA
aacatttttagcagcaatatat

SEQ ID NO: 157247 - DNA, 22 bp, synthetic construct
  misc_feature 1..22: note = chemically synthesized
  source 1..22: mol_type = other DNA
acatttttagcagcaatatatg

SEQ ID NO: 157248 - DNA, 22 bp, synthetic construct
  misc_feature 1..22: note = chemically synthesized
  source 1..22: mol_type = other DNA
ttagcagcaatatatgaggatt

SEQ ID NO: 157249 - DNA, 22 bp, synthetic construct
  misc_feature 1..22: note = chemically synthesized
  source 1..22: mol_type = other DNA
tagcagcaatatatgaggattc

SEQ ID NO: 157250 - DNA, 22 bp, synthetic construct
  misc_feature 1..22: note = chemically synthesized
  source 1..22: mol_type = other DNA
agcagcaatatatgaggattcc

SEQ ID NO: 157251 - DNA, 22 bp, synthetic construct
  misc_feature 1..22: note = chemically synthesized
  source 1..22: mol_type = other DNA
gcagcaatatatgaggattcca

SEQ ID NO: 157252 - DNA, 22 bp, synthetic construct
  misc_feature 1..22: note = chemically synthesized
  source 1..22: mol_type = other DNA
caattttcttatatctttgtca

SEQ ID NO: 157253 - DNA, 22 bp, synthetic construct
  misc_feature 1..22: note = chemically synthesized
  source 1..22: mol_type = other DNA
tcttatatctttgtcaacactt

SEQ ID NO: 157254 - DNA, 22 bp, synthetic construct
  misc_feature 1..22: note = chemically synthesized
  source 1..22: mol_type = other DNA
cttatatctttgtcaacacttg

SEQ ID NO: 157255 - DNA, 22 bp, synthetic construct
  misc_feature 1..22: note = chemically synthesized
  source 1..22: mol_type = other DNA
ttatatctttgtcaacacttgt

SEQ ID NO: 157256 - DNA, 22 bp, synthetic construct
  misc_feature 1..22: note = chemically synthesized
  source 1..22: mol_type = other DNA
atatctttgtcaacacttgtta

SEQ ID NO: 157257 - DNA, 22 bp, synthetic construct
  misc_feature 1..22: note = chemically synthesized
  source 1..22: mol_type = other DNA
tatctttgtcaacacttgttac

SEQ ID NO: 157258 - DNA, 22 bp, synthetic construct
  misc_feature 1..22: note = chemically synthesized
  source 1..22: mol_type = other DNA
tgtcaacacttgttacttttca

SEQ ID NO: 157259 - DNA, 22 bp, synthetic construct
  misc_feature 1..22: note = chemically synthesized
  source 1..22: mol_type = other DNA
gtcaacacttgttacttttcat

SEQ ID NO: 157260 - DNA, 22 bp, synthetic construct
  misc_feature 1..22: note = chemically synthesized
  source 1..22: mol_type = other DNA
tcaacacttgttacttttcatt

SEQ ID NO: 157261 - DNA, 22 bp, synthetic construct
  misc_feature 1..22: note = chemically synthesized
  source 1..22: mol_type = other DNA
gttacttttcatttgttttgtt

SEQ ID NO: 157262 - DNA, 22 bp, synthetic construct
  misc_feature 1..22: note = chemically synthesized
  source 1..22: mol_type = other DNA
ttacttttcatttgttttgttt

SEQ ID NO: 157263 - DNA, 22 bp, synthetic construct
  misc_feature 1..22: note = chemically synthesized
  source 1..22: mol_type = other DNA
cttttcatttgttttgtttctc

SEQ ID NO: 157264 - DNA, 22 bp, synthetic construct
  misc_feature 1..22: note = chemically synthesized
  source 1..22: mol_type = other DNA
ttcatttgttttgtttctctta

SEQ ID NO: 157265 - DNA, 22 bp, synthetic construct
  misc_feature 1..22: note = chemically synthesized
  source 1..22: mol_type = other DNA
tcatttgttttgtttctcttaa

SEQ ID NO: 157266 - DNA, 22 bp, synthetic construct
  misc_feature 1..22: note = chemically synthesized
  source 1..22: mol_type = other DNA
catttgttttgtttctcttaaa

SEQ ID NO: 157267 - DNA, 22 bp, synthetic construct
  misc_feature 1..22: note = chemically synthesized
  source 1..22: mol_type = other DNA
atttgttttgtttctcttaaag

SEQ ID NO: 157268 - DNA, 22 bp, synthetic construct
  misc_feature 1..22: note = chemically synthesized
  source 1..22: mol_type = other DNA
gttttgtttctcttaaagtata

SEQ ID NO: 157269 - DNA, 22 bp, synthetic construct
  misc_feature 1..22: note = chemically synthesized
  source 1..22: mol_type = other DNA
ttttgtttctcttaaagtatag

SEQ ID NO: 157270 - DNA, 22 bp, synthetic construct
  misc_feature 1..22: note = chemically synthesized
  source 1..22: mol_type = other DNA
tgtttctcttaaagtatagaca

SEQ ID NO: 157271 - DNA, 22 bp, synthetic construct
  misc_feature 1..22: note = chemically synthesized
  source 1..22: mol_type = other DNA
gtttctcttaaagtatagacat

SEQ ID NO: 157272 - DNA, 22 bp, synthetic construct
  misc_feature 1..22: note = chemically synthesized
  source 1..22: mol_type = other DNA
tttctcttaaagtatagacatt

SEQ ID NO: 157273 - DNA, 22 bp, synthetic construct
  misc_feature 1..22: note = chemically synthesized
  source 1..22: mol_type = other DNA
ctcttaaagtatagacattcta

SEQ ID NO: 157274 - DNA, 22 bp, synthetic construct
  misc_feature 1..22: note = chemically synthesized
  source 1..22: mol_type = other DNA
tcttaaagtatagacattctag

SEQ ID NO: 157275 - DNA, 22 bp, synthetic construct
  misc_feature 1..22: note = chemically synthesized
  source 1..22: mol_type = other DNA
ttaaagtatagacattctagta

SEQ ID NO: 157276 - DNA, 22 bp, synthetic construct
  misc_feature 1..22: note = chemically synthesized
  source 1..22: mol_type = other DNA
aaagtatagacattctagtaag

SEQ ID NO: 157277 - DNA, 22 bp, synthetic construct
  misc_feature 1..22: note = chemically synthesized
  source 1..22: mol_type = other DNA
aagtatagacattctagtaagt

SEQ ID NO: 157278 - DNA, 22 bp, synthetic construct
  misc_feature 1..22: note = chemically synthesized
  source 1..22: mol_type = other DNA
tagtaagtttgaagtagtgtct

SEQ ID NO: 157279 - DNA, 22 bp, synthetic construct
  misc_feature 1..22: note = chemically synthesized
  source 1..22: mol_type = other DNA
gtaagtttgaagtagtgtctta

SEQ ID NO: 157280 - DNA, 22 bp, synthetic construct
  misc_feature 1..22: note = chemically synthesized
  source 1..22: mol_type = other DNA
gaagtagtgtcttattgtggtt

SEQ ID NO: 157281 - DNA, 22 bp, synthetic construct
  misc_feature 1..22: note = chemically synthesized
  source 1..22: mol_type = other DNA
aagtagtgtcttattgtggttt

SEQ ID NO: 157282 - DNA, 22 bp, synthetic construct
  misc_feature 1..22: note = chemically synthesized
  source 1..22: mol_type = other DNA
attgtggttttggtttgcattt

SEQ ID NO: 157283 - DNA, 22 bp, synthetic construct
  misc_feature 1..22: note = chemically synthesized
  source 1..22: mol_type = other DNA
ttgtggttttggtttgcatttt

SEQ ID NO: 157284 - DNA, 22 bp, synthetic construct
  misc_feature 1..22: note = chemically synthesized
  source 1..22: mol_type = other DNA
tggttttggtttgcattttatg

SEQ ID NO: 157285 - DNA, 22 bp, synthetic construct
  misc_feature 1..22: note = chemically synthesized
  source 1..22: mol_type = other DNA
tggtttgcattttatgtgccaa

SEQ ID NO: 157286 - DNA, 22 bp, synthetic construct
  misc_feature 1..22: note = chemically synthesized
  source 1..22: mol_type = other DNA
ggtttgcattttatgtgccaat

SEQ ID NO: 157287 - DNA, 22 bp, synthetic construct
  misc_feature 1..22: note = chemically synthesized
  source 1..22: mol_type = other DNA
gtttgcattttatgtgccaatg

SEQ ID NO: 157288 - DNA, 22 bp, synthetic construct
  misc_feature 1..22: note = chemically synthesized
  source 1..22: mol_type = other DNA
gcattttatgtgccaatgttca

SEQ ID NO: 157289 - DNA, 22 bp, synthetic construct
  misc_feature 1..22: note = chemically synthesized
  source 1..22: mol_type = other DNA
cattttatgtgccaatgttcat

SEQ ID NO: 157290 - DNA, 22 bp, synthetic construct
  misc_feature 1..22: note = chemically synthesized
  source 1..22: mol_type = other DNA
tatgtgccaatgttcatttgta

SEQ ID NO: 157291 - DNA, 22 bp, synthetic construct
  misc_feature 1..22: note = chemically synthesized
  source 1..22: mol_type = other DNA
atgtgccaatgttcatttgtat

SEQ ID NO: 157292 - DNA, 22 bp, synthetic construct
  misc_feature 1..22: note = chemically synthesized
  source 1..22: mol_type = other DNA
tgtgccaatgttcatttgtata

SEQ ID NO: 157293 - DNA, 22 bp, synthetic construct
  misc_feature 1..22: note = chemically synthesized
  source 1..22: mol_type = other DNA
atttgtatatcttctttctaga

SEQ ID NO: 157294 - DNA, 22 bp, synthetic construct
  misc_feature 1..22: note = chemically synthesized
  source 1..22: mol_type = other DNA
gtatatcttctttctagaaatt

SEQ ID NO: 157295 - DNA, 22 bp, synthetic construct
  misc_feature 1..22: note = chemically synthesized
  source 1..22: mol_type = other DNA
tatatcttctttctagaaatta

SEQ ID NO: 157296 - DNA, 22 bp, synthetic construct
  misc_feature 1..22: note = chemically synthesized
  source 1..22: mol_type = other DNA
ctttctagaaattactcattcc

SEQ ID NO: 157297 - DNA, 22 bp, synthetic construct
  misc_feature 1..22: note = chemically synthesized
  source 1..22: mol_type = other DNA
tttctagaaattactcattccc

SEQ ID NO: 157298 - DNA, 22 bp, synthetic construct
  misc_feature 1..22: note = chemically synthesized
  source 1..22: mol_type = other DNA
tctagaaattactcattcccat

SEQ ID NO: 157299 - DNA, 22 bp, synthetic construct
  misc_feature 1..22: note = chemically synthesized
  source 1..22: mol_type = other DNA
ctagaaattactcattcccatc

SEQ ID NO: 157300 - DNA, 22 bp, synthetic construct
  misc_feature 1..22: note = chemically synthesized
  source 1..22: mol_type = other DNA
tagaaattactcattcccatca

SEQ ID NO: 157301 - DNA, 22 bp, synthetic construct
  misc_feature 1..22: note = chemically synthesized
  source 1..22: mol_type = other DNA
gaaattactcattcccatcatt

SEQ ID NO: 157302 - DNA, 22 bp, synthetic construct
  misc_feature 1..22: note = chemically synthesized
  source 1..22: mol_type = other DNA
ctcattcccatcatttgcatat

SEQ ID NO: 157303 - DNA, 22 bp, synthetic construct
  misc_feature 1..22: note = chemically synthesized
  source 1..22: mol_type = other DNA
attcccatcatttgcatatttt

SEQ ID NO: 157304 - DNA, 22 bp, synthetic construct
  misc_feature 1..22: note = chemically synthesized
  source 1..22: mol_type = other DNA
ccatcatttgcatatttttaaa

SEQ ID NO: 157305 - DNA, 22 bp, synthetic construct
  misc_feature 1..22: note = chemically synthesized
  source 1..22: mol_type = other DNA
gcatatttttaaattgagttgt

SEQ ID NO: 157306 - DNA, 22 bp, synthetic construct
  misc_feature 1..22: note = chemically synthesized
  source 1..22: mol_type = other DNA
catatttttaaattgagttgtt

SEQ ID NO: 157307 - DNA, 22 bp, synthetic construct
  misc_feature 1..22: note = chemically synthesized
  source 1..22: mol_type = other DNA
ttaaattgagttgtttgtcttt

SEQ ID NO: 157308 - DNA, 22 bp, synthetic construct
  misc_feature 1..22: note = chemically synthesized
  source 1..22: mol_type = other DNA
taaattgagttgtttgtctttt

SEQ ID NO: 157309 - DNA, 22 bp, synthetic construct
  misc_feature 1..22: note = chemically synthesized
  source 1..22: mol_type = other DNA
aaattgagttgtttgtcttttt

SEQ ID NO: 157310 - DNA, 22 bp, synthetic construct
  misc_feature 1..22: note = chemically synthesized
  source 1..22: mol_type = other DNA
aattgagttgtttgtctttttg

SEQ ID NO: 157311 - DNA, 22 bp, synthetic construct
  misc_feature 1..22: note = chemically synthesized
  source 1..22: mol_type = other DNA
agttgtttgtctttttgttttt

SEQ ID NO: 157312 - DNA, 22 bp, synthetic construct
  misc_feature 1..22: note = chemically synthesized
  source 1..22: mol_type = other DNA
tttgtctttttgtttttgagtt

SEQ ID NO: 157313 - DNA, 22 bp, synthetic construct
  misc_feature 1..22: note = chemically synthesized
  source 1..22: mol_type = other DNA
gtctttttgtttttgagttgta

SEQ ID NO: 157314 - DNA, 22 bp, synthetic construct
  misc_feature 1..22: note = chemically synthesized
  source 1..22: mol_type = other DNA
tctttttgtttttgagttgtag

SEQ ID NO: 157315 - DNA, 22 bp, synthetic construct
  misc_feature 1..22: note = chemically synthesized
  source 1..22: mol_type = other DNA
tttgtttttgagttgtaggact

SEQ ID NO: 157316 - DNA, 22 bp, synthetic construct
  misc_feature 1..22: note = chemically synthesized
  source 1..22: mol_type = other DNA
ttgtttttgagttgtaggactt

SEQ ID NO: 157317 - DNA, 22 bp, synthetic construct
  misc_feature 1..22: note = chemically synthesized
  source 1..22: mol_type = other DNA
tgtttttgagttgtaggacttt

SEQ ID NO: 157318 - DNA, 22 bp, synthetic construct
  misc_feature 1..22: note = chemically synthesized
  source 1..22: mol_type = other DNA
gtttttgagttgtaggactttt

SEQ ID NO: 157319 - DNA, 22 bp, synthetic construct
  misc_feature 1..22: note = chemically synthesized
  source 1..22: mol_type = other DNA
tttttgagttgtaggacttttt

SEQ ID NO: 157320 - DNA, 22 bp, synthetic construct
  misc_feature 1..22: note = chemically synthesized
  source 1..22: mol_type = other DNA
ttgagttgtaggactttttcat

SEQ ID NO: 157321 - DNA, 22 bp, synthetic construct
  misc_feature 1..22: note = chemically synthesized
  source 1..22: mol_type = other DNA
tgagttgtaggactttttcata

SEQ ID NO: 157322 - DNA, 22 bp, synthetic construct
  misc_feature 1..22: note = chemically synthesized
  source 1..22: mol_type = other DNA
gagttgtaggactttttcatac

SEQ ID NO: 157323 - DNA, 22 bp, synthetic construct
  misc_feature 1..22: note = chemically synthesized
  source 1..22: mol_type = other DNA
agttgtaggactttttcataca

SEQ ID NO: 157324 - DNA, 22 bp, synthetic construct
  misc_feature 1..22: note = chemically synthesized
  source 1..22: mol_type = other DNA
taggactttttcatacattctg

SEQ ID NO: 157325 - DNA, 22 bp, synthetic construct
  misc_feature 1..22: note = chemically synthesized
  source 1..22: mol_type = other DNA
tttcatacattctggatattaa

SEQ ID NO: 157326 - DNA, 22 bp, synthetic construct
  misc_feature 1..22: note = chemically synthesized
  source 1..22: mol_type = other DNA
ttcatacattctggatattaaa

SEQ ID NO: 157327 - DNA, 22 bp, synthetic construct
  misc_feature 1..22: note = chemically synthesized
  source 1..22: mol_type = other DNA
tcatacattctggatattaaac

SEQ ID NO: 157328 - DNA, 22 bp, synthetic construct
  misc_feature 1..22: note = chemically synthesized
  source 1..22: mol_type = other DNA
catacattctggatattaaact

SEQ ID NO: 157329 - DNA, 22 bp, synthetic construct
  misc_feature 1..22: note = chemically synthesized
  source 1..22: mol_type = other DNA
atacattctggatattaaactt

SEQ ID NO: 157330 - DNA, 22 bp, synthetic construct
  misc_feature 1..22: note = chemically synthesized
  source 1..22: mol_type = other DNA
tggatattaaacttatgaaata

SEQ ID NO: 157331 - DNA, 22 bp, synthetic construct
  misc_feature 1..22: note = chemically synthesized
  source 1..22: mol_type = other DNA
gatattaaacttatgaaataca

SEQ ID NO: 157332 - DNA, 22 bp, synthetic construct
  misc_feature 1..22: note = chemically synthesized
  source 1..22: mol_type = other DNA
aacttatgaaatacataatttg

SEQ ID NO: 157333 - DNA, 22 bp, synthetic construct
  misc_feature 1..22: note = chemically synthesized
  source 1..22: mol_type = other DNA
atgaaatacataatttgcaaag

SEQ ID NO: 157334 - DNA, 22 bp, synthetic construct
  misc_feature 1..22: note = chemically synthesized
  source 1..22: mol_type = other DNA
tgaaatacataatttgcaaaga

SEQ ID NO: 157335 - DNA, 22 bp, synthetic construct
  misc_feature 1..22: note = chemically synthesized
  source 1..22: mol_type = other DNA
gcaaagatgttctctcatctta

SEQ ID NO: 157336 - DNA, 22 bp, synthetic construct
  misc_feature 1..22: note = chemically synthesized
  source 1..22: mol_type = other DNA
caaagatgttctctcatcttat

SEQ ID NO: 157337 - DNA, 22 bp, synthetic construct
  misc_feature 1..22: note = chemically synthesized
  source 1..22: mol_type = other DNA
tctcatcttataggttgtcttt

SEQ ID NO: 157338 - DNA, 22 bp, synthetic construct
  misc_feature 1..22: note = chemically synthesized
  source 1..22: mol_type = other DNA
tcatcttataggttgtcttttt

SEQ ID NO: 157339 - DNA, 22 bp, synthetic construct
  misc_feature 1..22: note = chemically synthesized
  source 1..22: mol_type = other DNA
atcttataggttgtctttttac

SEQ ID NO: 157340 - DNA, 22 bp, synthetic construct
  misc_feature 1..22: note = chemically synthesized
  source 1..22: mol_type = other DNA
ataggttgtctttttactttct

SEQ ID NO: 157341 - DNA, 22 bp, synthetic construct
  misc_feature 1..22: note = chemically synthesized
  source 1..22: mol_type = other DNA
taggttgtctttttactttctt

SEQ ID NO: 157342 - DNA, 22 bp, synthetic construct
  misc_feature 1..22: note = chemically synthesized
  source 1..22: mol_type = other DNA
tctttttactttcttaaagtcg

SEQ ID NO: 157343 - DNA, 22 bp, synthetic construct
  misc_feature 1..22: note = chemically synthesized
  source 1..22: mol_type = other DNA
tttactttcttaaagtcgtttg

SEQ ID NO: 157344 - DNA, 22 bp, synthetic construct
  misc_feature 1..22: note = chemically synthesized
  source 1..22: mol_type = other DNA
ttactttcttaaagtcgtttgt

SEQ ID NO: 157345 - DNA, 22 bp, synthetic construct
  misc_feature 1..22: note = chemically synthesized
  source 1..22: mol_type = other DNA
tactttcttaaagtcgtttgtt

SEQ ID NO: 157346 - DNA, 22 bp, synthetic construct
  misc_feature 1..22: note = chemically synthesized
  source 1..22: mol_type = other DNA
actttcttaaagtcgtttgttg

SEQ ID NO: 157347 - DNA, 22 bp, synthetic construct
  misc_feature 1..22: note = chemically synthesized
  source 1..22: mol_type = other DNA
ctttcttaaagtcgtttgttgc

SEQ ID NO: 157348 - DNA, 22 bp, synthetic construct
  misc_feature 1..22: note = chemically synthesized
  source 1..22: mol_type = other DNA
tcttaaagtcgtttgttgcatg

SEQ ID NO: 157349 - DNA, 22 bp, synthetic construct
  misc_feature 1..22: note = chemically synthesized
  source 1..22: mol_type = other DNA
cttaaagtcgtttgttgcatga

SEQ ID NO: 157350 - DNA, 22 bp, synthetic construct
  misc_feature 1..22: note = chemically synthesized
  source 1..22: mol_type = other DNA
ttaaagtcgtttgttgcatgaa

SEQ ID NO: 157351 - DNA, 22 bp, synthetic construct
  misc_feature 1..22: note = chemically synthesized
  source 1..22: mol_type = other DNA
aaagtcgtttgttgcatgaact

SEQ ID NO: 157352 - DNA, 22 bp, synthetic construct
  misc_feature 1..22: note = chemically synthesized
  source 1..22: mol_type = other DNA
aagtcgtttgttgcatgaactt

SEQ ID NO: 157353 - DNA, 22 bp, synthetic construct
  misc_feature 1..22: note = chemically synthesized
  source 1..22: mol_type = other DNA
gttgcatgaactttttaaatga

SEQ ID NO: 157354 - DNA, 22 bp, synthetic construct
  misc_feature 1..22: note = chemically synthesized
  source 1..22: mol_type = other DNA
ttgcatgaactttttaaatgaa

SEQ ID NO: 157355 - DNA, 22 bp, synthetic construct
  misc_feature 1..22: note = chemically synthesized
  source 1..22: mol_type = other DNA
catgaactttttaaatgaaatc

SEQ ID NO: 157356 - DNA, 22 bp, synthetic construct
  misc_feature 1..22: note = chemically synthesized
  source 1..22: mol_type = other DNA
tttaaatgaaatccaatttatg

SEQ ID NO: 157357 - DNA, 22 bp, synthetic construct
  misc_feature 1..22: note = chemically synthesized
  source 1..22: mol_type = other DNA
ttaaatgaaatccaatttatgt

SEQ ID NO: 157358 - DNA, 22 bp, synthetic construct
  misc_feature 1..22: note = chemically synthesized
  source 1..22: mol_type = other DNA
taaatgaaatccaatttatgta

SEQ ID NO: 157359 - DNA, 22 bp, synthetic construct
  misc_feature 1..22: note = chemically synthesized
  source 1..22: mol_type = other DNA
aaatgaaatccaatttatgtat

SEQ ID NO: 157360 - DNA, 22 bp, synthetic construct
  misc_feature 1..22: note = chemically synthesized
  source 1..22: mol_type = other DNA
aatgaaatccaatttatgtatt

SEQ ID NO: 157361 - DNA, 22 bp, synthetic construct
  misc_feature 1..22: note = chemically synthesized
  source 1..22: mol_type = other DNA
atgtatttattttttgttactc

SEQ ID NO: 157362 - DNA, 22 bp, synthetic construct
  misc_feature 1..22: note = chemically synthesized
  source 1..22: mol_type = other DNA
tgtatttattttttgttactca

SEQ ID NO: 157363 - DNA, 22 bp, synthetic construct
  misc_feature 1..22: note = chemically synthesized
  source 1..22: mol_type = other DNA
attttttgttactcatactttt

SEQ ID NO: 157364 - DNA, 22 bp, synthetic construct
  misc_feature 1..22: note = chemically synthesized
  source 1..22: mol_type = other DNA
ttttttgttactcatacttttt

SEQ ID NO: 157365 - DNA, 22 bp, synthetic construct
  misc_feature 1..22: note = chemically synthesized
  source 1..22: mol_type = other DNA
tttgttactcatactttttgtg

SEQ ID NO: 157366 - DNA, 22 bp, synthetic construct
  misc_feature 1..22: note = chemically synthesized
  source 1..22: mol_type = other DNA
ttgttactcatactttttgtgt

SEQ ID NO: 157367 - DNA, 22 bp, synthetic construct
  misc_feature 1..22: note = chemically synthesized
  source 1..22: mol_type = other DNA
tgttactcatactttttgtgtc

SEQ ID NO: 157368 - DNA, 22 bp, synthetic construct
  misc_feature 1..22: note = chemically synthesized
  source 1..22: mol_type = other DNA
gttactcatactttttgtgtca

SEQ ID NO: 157369 - DNA, 22 bp, synthetic construct
  misc_feature 1..22: note = chemically synthesized
  source 1..22: mol_type = other DNA
ttactcatactttttgtgtcat

SEQ ID NO: 157370 - DNA, 22 bp, synthetic construct
  misc_feature 1..22: note = chemically synthesized
  source 1..22: mol_type = other DNA
ctcatactttttgtgtcatatc

SEQ ID NO: 157371 - DNA, 22 bp, synthetic construct
  misc_feature 1..22: note = chemically synthesized
  source 1..22: mol_type = other DNA
atactttttgtgtcatatctaa

SEQ ID NO: 157372 - DNA, 22 bp, synthetic construct
  misc_feature 1..22: note = chemically synthesized
  source 1..22: mol_type = other DNA
tttgtgtcatatctaagaatct

SEQ ID NO: 157373 - DNA, 22 bp, synthetic construct
  misc_feature 1..22: note = chemically synthesized
  source 1..22: mol_type = other DNA
ttgtgtcatatctaagaatcta

SEQ ID NO: 157374 - DNA, 22 bp, synthetic construct
  misc_feature 1..22: note = chemically synthesized
  source 1..22: mol_type = other DNA
tgtgtcatatctaagaatctat

SEQ ID NO: 157375 - DNA, 22 bp, synthetic construct
  misc_feature 1..22: note = chemically synthesized
  source 1..22: mol_type = other DNA
gtgtcatatctaagaatctatt

SEQ ID NO: 157376 - DNA, 22 bp, synthetic construct
  misc_feature 1..22: note = chemically synthesized
  source 1..22: mol_type = other DNA
tgtcatatctaagaatctattg

SEQ ID NO: 157377 - DNA, 22 bp, synthetic construct
  misc_feature 1..22: note = chemically synthesized
  source 1..22: mol_type = other DNA
agaatctattgtaaaatcaaag

SEQ ID NO: 157378 - DNA, 22 bp, synthetic construct
  misc_feature 1..22: note = chemically synthesized
  source 1..22: mol_type = other DNA
ttgtaaaatcaaagttcatgaa

SEQ ID NO: 157379 - DNA, 22 bp, synthetic construct
  misc_feature 1..22: note = chemically synthesized
  source 1..22: mol_type = other DNA
taaaatcaaagttcatgaagat

SEQ ID NO: 157380 - DNA, 22 bp, synthetic construct
  misc_feature 1..22: note = chemically synthesized
  source 1..22: mol_type = other DNA
atgaagatttacccatgcttcc

SEQ ID NO: 157381 - DNA, 22 bp, synthetic construct
  misc_feature 1..22: note = chemically synthesized
  source 1..22: mol_type = other DNA
acccatgcttccttccgagggt

SEQ ID NO: 157382 - DNA, 22 bp, synthetic construct
  misc_feature 1..22: note = chemically synthesized
  source 1..22: mol_type = other DNA
cccatgcttccttccgagggtg

SEQ ID NO: 157383 - DNA, 22 bp, synthetic construct
  misc_feature 1..22: note = chemically synthesized
  source 1..22: mol_type = other DNA
ccttccgagggtgttatggctt

SEQ ID NO: 157384 - DNA, 22 bp, synthetic construct
  misc_feature 1..22: note = chemically synthesized
  source 1..22: mol_type = other DNA
cttccgagggtgttatggcttt

SEQ ID NO: 157385 - DNA, 22 bp, synthetic construct
  misc_feature 1..22: note = chemically synthesized
  source 1..22: mol_type = other DNA
ccgagggtgttatggctttagt

SEQ ID NO: 157386 - DNA, 22 bp, synthetic construct
  misc_feature 1..22: note = chemically synthesized
  source 1..22: mol_type = other DNA
cgagggtgttatggctttagtt

SEQ ID NO: 157387 - DNA, 22 bp, synthetic construct
  misc_feature 1..22: note = chemically synthesized
  source 1..22: mol_type = other DNA
tggctttagttcaatttaggtc

SEQ ID NO: 157388 - DNA, 22 bp, synthetic construct
  misc_feature 1..22: note = chemically synthesized
  source 1..22: mol_type = other DNA
tagttcaatttaggtcattaca

SEQ ID NO: 157389 - DNA, 22 bp, synthetic construct
  misc_feature 1..22: note = chemically synthesized
  source 1..22: mol_type = other DNA
agttcaatttaggtcattacac

SEQ ID NO: 157390 - DNA, 22 bp, synthetic construct
  misc_feature 1..22: note = chemically synthesized
  source 1..22: mol_type = other DNA
gttcaatttaggtcattacaca

SEQ ID NO: 157391 - DNA, 22 bp, synthetic construct
  misc_feature 1..22: note = chemically synthesized
  source 1..22: mol_type = other DNA
aatttaggtcattacacaattt

SEQ ID NO: 157392 - DNA, 22 bp, synthetic construct
  misc_feature 1..22: note = chemically synthesized
  source 1..22: mol_type = other DNA
aggtcattacacaatttttatg

SEQ ID NO: 157393 - DNA, 22 bp, synthetic construct
  misc_feature 1..22: note = chemically synthesized
  source 1..22: mol_type = other DNA
ggtcattacacaatttttatgc

SEQ ID NO: 157394 - DNA, 22 bp, synthetic construct
  misc_feature 1..22: note = chemically synthesized
  source 1..22: mol_type = other DNA
cacaatttttatgcatgctggc

SEQ ID NO: 157395 - DNA, 22 bp, synthetic construct
  misc_feature 1..22: note = chemically synthesized
  source 1..22: mol_type = other DNA
ttatgcatgctggcttttaatc

SEQ ID NO: 157396 - DNA, 22 bp, synthetic construct
  misc_feature 1..22: note = chemically synthesized
  source 1..22: mol_type = other DNA
tatgcatgctggcttttaatcc

SEQ ID NO: 157397 - DNA, 22 bp, synthetic construct
  misc_feature 1..22: note = chemically synthesized
  source 1..22: mol_type = other DNA
atgcatgctggcttttaatcct

SEQ ID NO: 157398 - DNA, 22 bp, synthetic construct
  misc_feature 1..22: note = chemically synthesized
  source 1..22: mol_type = other DNA
tgcatgctggcttttaatcctt

SEQ ID NO: 157399 - DNA, 22 bp, synthetic construct
  misc_feature 1..22: note = chemically synthesized
  source 1..22: mol_type = other DNA
gcttttaatccttatttgaaag

SEQ ID NO: 157400 - DNA, 22 bp, synthetic construct
  misc_feature 1..22: note = chemically synthesized
  source 1..22: mol_type = other DNA
ttaatccttatttgaaagaata

SEQ ID NO: 157401 - DNA, 22 bp, synthetic construct
  misc_feature 1..22: note = chemically synthesized
  source 1..22: mol_type = other DNA
taatccttatttgaaagaatac

SEQ ID NO: 157402 - DNA, 22 bp, synthetic construct
  misc_feature 1..22: note = chemically synthesized
  source 1..22: mol_type = other DNA
aatccttatttgaaagaataca

SEQ ID NO: 157403 - DNA, 22 bp, synthetic construct
  misc_feature 1..22: note = chemically synthesized
  source 1..22: mol_type = other DNA
atccttatttgaaagaatacaa

SEQ ID NO: 157404 - DNA, 22 bp, synthetic construct
  misc_feature 1..22: note = chemically synthesized
  source 1..22: mol_type = other DNA
atttgaaagaatacaaagttag

SEQ ID NO: 157405 - DNA, 22 bp, synthetic construct
  misc_feature 1..22: note = chemically synthesized
  source 1..22: mol_type = other DNA
tttgaaagaatacaaagttagc

SEQ ID NO: 157406 - DNA, 22 bp, synthetic construct
  misc_feature 1..22: note = chemically synthesized
  source 1..22: mol_type = other DNA
gaaagaatacaaagttagcatg

SEQ ID NO: 157407 - DNA, 22 bp, synthetic construct
  misc_feature 1..22: note = chemically synthesized
  source 1..22: mol_type = other DNA
aaagaatacaaagttagcatga

SEQ ID NO: 157408 - DNA, 22 bp, synthetic construct
  misc_feature 1..22: note = chemically synthesized
  source 1..22: mol_type = other DNA
gcatgacaacaaaaatatagct

SEQ ID NO: 157409 - DNA, 22 bp, synthetic construct
  misc_feature 1..22: note = chemically synthesized
  source 1..22: mol_type = other DNA
gaccaattgaatatgaagttgt

SEQ ID NO: 157410 - DNA, 22 bp, synthetic construct
  misc_feature 1..22: note = chemically synthesized
  source 1..22: mol_type = other DNA
accaattgaatatgaagttgta

SEQ ID NO: 157411 - DNA, 22 bp, synthetic construct
  misc_feature 1..22: note = chemically synthesized
  source 1..22: mol_type = other DNA
aatatgaagttgtatataaaaa

SEQ ID NO: 157412 - DNA, 22 bp, synthetic construct
  misc_feature 1..22: note = chemically synthesized
  source 1..22: mol_type = other DNA
tatataaaaacagaataagaac

SEQ ID NO: 157413 - DNA, 22 bp, synthetic construct
  misc_feature 1..22: note = chemically synthesized
  source 1..22: mol_type = other DNA
gaattagatccatatttatata

SEQ ID NO: 157414 - DNA, 22 bp, synthetic construct
  misc_feature 1..22: note = chemically synthesized
  source 1..22: mol_type = other DNA
gatccatatttatataaaaata

SEQ ID NO: 157415 - DNA, 22 bp, synthetic construct
  misc_feature 1..22: note = chemically synthesized
  source 1..22: mol_type = other DNA
atataaaaatataaaataaaat

SEQ ID NO: 157416 - DNA, 22 bp, synthetic construct
  misc_feature 1..22: note = chemically synthesized
  source 1..22: mol_type = other DNA
tataaaaatataaaataaaatg

SEQ ID NO: 157417 - DNA, 22 bp, synthetic construct
  misc_feature 1..22: note = chemically synthesized
  source 1..22: mol_type = other DNA
atcatgcttggagaccaaccct

SEQ ID NO: 157418 - DNA, 22 bp, synthetic construct
  misc_feature 1..22: note = chemically synthesized
  source 1..22: mol_type = other DNA
ggagaccaacccttgatcttat

SEQ ID NO: 157419 - DNA, 22 bp, synthetic construct
  misc_feature 1..22: note = chemically synthesized
  source 1..22: mol_type = other DNA
gagaccaacccttgatcttata

SEQ ID NO: 157420 - DNA, 22 bp, synthetic construct
  misc_feature 1..22: note = chemically synthesized
  source 1..22: mol_type = other DNA
gatcttatacttggtattagaa

SEQ ID NO: 157421 - DNA, 22 bp, synthetic construct
  misc_feature 1..22: note = chemically synthesized
  source 1..22: mol_type = other DNA
atcttatacttggtattagaaa

SEQ ID NO: 157422 - DNA, 22 bp, synthetic construct
  misc_feature 1..22: note = chemically synthesized
  source 1..22: mol_type = other DNA
atacttggtattagaaaaattg

SEQ ID NO: 157423 - DNA, 22 bp, synthetic construct
  misc_feature 1..22: note = chemically synthesized
  source 1..22: mol_type = other DNA
tacttggtattagaaaaattgt

SEQ ID NO: 157424 - DNA, 22 bp, synthetic construct
  misc_feature 1..22: note = chemically synthesized
  source 1..22: mol_type = other DNA
ggtattagaaaaattgtttata

SEQ ID NO: 157425 - DNA, 22 bp, synthetic construct
  misc_feature 1..22: note = chemically synthesized
  source 1..22: mol_type = other DNA
gtattagaaaaattgtttatat

SEQ ID NO: 157426 - DNA, 22 bp, synthetic construct
  misc_feature 1..22: note = chemically synthesized
  source 1..22: mol_type = other DNA
gaaaaattgtttatatgtttga

SEQ ID NO: 157427 - DNA, 22 bp, synthetic construct
  misc_feature 1..22: note = chemically synthesized
  source 1..22: mol_type = other DNA
tttatatgtttgagaatactta

SEQ ID NO: 157428 - DNA, 22 bp, synthetic construct
  misc_feature 1..22: note = chemically synthesized
  source 1..22: mol_type = other DNA
atatgtttgagaatacttaagt

SEQ ID NO: 157429 - DNA, 22 bp, synthetic construct
  misc_feature 1..22: note = chemically synthesized
  source 1..22: mol_type = other DNA
tatgtttgagaatacttaagta

SEQ ID NO: 157430 - DNA, 22 bp, synthetic construct
  misc_feature 1..22: note = chemically synthesized
  source 1..22: mol_type = other DNA
gagaatacttaagtaaaattct

SEQ ID NO: 157431 - DNA, 22 bp, synthetic construct
  misc_feature 1..22: note = chemically synthesized
  source 1..22: mol_type = other DNA
agaatacttaagtaaaattcta

SEQ ID NO: 157432 - DNA, 22 bp, synthetic construct
  misc_feature 1..22: note = chemically synthesized
  source 1..22: mol_type = other DNA
aagtaaaattctaattacccaa

SEQ ID NO: 157433 - DNA, 22 bp, synthetic construct
  misc_feature 1..22: note = chemically synthesized
  source 1..22: mol_type = other DNA
agtaaaattctaattacccaag

SEQ ID NO: 157434 - DNA, 22 bp, synthetic construct
  misc_feature 1..22: note = chemically synthesized
  source 1..22: mol_type = other DNA
taattacccaagtcccccaaac

SEQ ID NO: 157435 - DNA, 22 bp, synthetic construct
  misc_feature 1..22: note = chemically synthesized
  source 1..22: mol_type = other DNA
attacccaagtcccccaaacaa

SEQ ID NO: 157436 - DNA, 22 bp, synthetic construct
  misc_feature 1..22: note = chemically synthesized
  source 1..22: mol_type = other DNA
cccaagtcccccaaacaaattt

SEQ ID NO: 157437 - DNA, 22 bp, synthetic construct
  misc_feature 1..22: note = chemically synthesized
  source 1..22: mol_type = other DNA
caggtggaatcaagaatctcta

SEQ ID NO: 157438 - DNA, 22 bp, synthetic construct
  misc_feature 1..22: note = chemically synthesized
  source 1..22: mol_type = other DNA
aggtggaatcaagaatctctaa

SEQ ID NO: 157439 - DNA, 22 bp, synthetic construct
  misc_feature 1..22: note = chemically synthesized
  source 1..22: mol_type = other DNA
taacactattattacctgtctt

SEQ ID NO: 157440 - DNA, 22 bp, synthetic construct
  misc_feature 1..22: note = chemically synthesized
  source 1..22: mol_type = other DNA
acactattattacctgtcttta

SEQ ID NO: 157441 - DNA, 22 bp, synthetic construct
  misc_feature 1..22: note = chemically synthesized
  source 1..22: mol_type = other DNA
ttattacctgtctttatcatga

SEQ ID NO: 157442 - DNA, 22 bp, synthetic construct
  misc_feature 1..22: note = chemically synthesized
  source 1..22: mol_type = other DNA
ttacctgtctttatcatgatta

SEQ ID NO: 157443 - DNA, 22 bp, synthetic construct
  misc_feature 1..22: note = chemically synthesized
  source 1..22: mol_type = other DNA
cctgtctttatcatgattactg

SEQ ID NO: 157444 - DNA, 22 bp, synthetic construct
  misc_feature 1..22: note = chemically synthesized
  source 1..22: mol_type = other DNA
tctttatcatgattactgtctc

SEQ ID NO: 157445 - DNA, 22 bp, synthetic construct
  misc_feature 1..22: note = chemically synthesized
  source 1..22: mol_type = other DNA
tatcatgattactgtctctatc

SEQ ID NO: 157446 - DNA, 22 bp, synthetic construct
  misc_feature 1..22: note = chemically synthesized
  source 1..22: mol_type = other DNA
atcatgattactgtctctatcc

SEQ ID NO: 157447 - DNA, 22 bp, synthetic construct
  misc_feature 1..22: note = chemically synthesized
  source 1..22: mol_type = other DNA
tcatgattactgtctctatccc

SEQ ID NO: 157448 - DNA, 22 bp, synthetic construct
  misc_feature 1..22: note = chemically synthesized
  source 1..22: mol_type = other DNA
ctgtctctatccccctttatta

SEQ ID NO: 157449 - DNA, 22 bp, synthetic construct
  misc_feature 1..22: note = chemically synthesized
  source 1..22: mol_type = other DNA
tctctatccccctttattacta

SEQ ID NO: 157450 - DNA, 22 bp, synthetic construct
  misc_feature 1..22: note = chemically synthesized
  source 1..22: mol_type = other DNA
tatccccctttattactatcta

SEQ ID NO: 157451 - DNA, 22 bp, synthetic construct
  misc_feature 1..22: note = chemically synthesized
  source 1..22: mol_type = other DNA
tccccctttattactatctaca

SEQ ID NO: 157452 - DNA, 22 bp, synthetic construct
  misc_feature 1..22: note = chemically synthesized
  source 1..22: mol_type = other DNA
tattactatctacaccactatc

SEQ ID NO: 157453 - DNA, 22 bp, synthetic construct
  misc_feature 1..22: note = chemically synthesized
  source 1..22: mol_type = other DNA
attactatctacaccactatcc

SEQ ID NO: 157454 - DNA, 22 bp, synthetic construct
  misc_feature 1..22: note = chemically synthesized
  source 1..22: mol_type = other DNA
ttactatctacaccactatccc

SEQ ID NO: 157455 - DNA, 22 bp, synthetic construct
  misc_feature 1..22: note = chemically synthesized
  source 1..22: mol_type = other DNA
ctatctacaccactatccctat

SEQ ID NO: 157456 - DNA, 22 bp, synthetic construct
  misc_feature 1..22: note = chemically synthesized
  source 1..22: mol_type = other DNA
tctacaccactatccctatctg

SEQ ID NO: 157457 - DNA, 22 bp, synthetic construct
  misc_feature 1..22: note = chemically synthesized
  source 1..22: mol_type = other DNA
caccactatccctatctgcagt

SEQ ID NO: 157458 - DNA, 22 bp, synthetic construct
  misc_feature 1..22: note = chemically synthesized
  source 1..22: mol_type = other DNA
tccctatctgcagttccgtctc

SEQ ID NO: 157459 - DNA, 22 bp, synthetic construct
  misc_feature 1..22: note = chemically synthesized
  source 1..22: mol_type = other DNA
tctgcagttccgtctctagctc

SEQ ID NO: 157460 - DNA, 22 bp, synthetic construct
  misc_feature 1..22: note = chemically synthesized
  source 1..22: mol_type = other DNA
cagttccgtctctagctctaga

SEQ ID NO: 157461 - DNA, 22 bp, synthetic construct
  misc_feature 1..22: note = chemically synthesized
  source 1..22: mol_type = other DNA
cgtctctagctctagatccaac

SEQ ID NO: 157462 - DNA, 22 bp, synthetic construct
  misc_feature 1..22: note = chemically synthesized
  source 1..22: mol_type = other DNA
tagctctagatccaactctgca

SEQ ID NO: 157463 - DNA, 22 bp, synthetic construct
  misc_feature 1..22: note = chemically synthesized
  source 1..22: mol_type = other DNA
gctctagatccaactctgcatc

SEQ ID NO: 157464 - DNA, 22 bp, synthetic construct
  misc_feature 1..22: note = chemically synthesized
  source 1..22: mol_type = other DNA
tagatccaactctgcatctctc

SEQ ID NO: 157465 - DNA, 22 bp, synthetic construct
  misc_feature 1..22: note = chemically synthesized
  source 1..22: mol_type = other DNA
gatccaactctgcatctctcca

SEQ ID NO: 157466 - DNA, 22 bp, synthetic construct
  misc_feature 1..22: note = chemically synthesized
  source 1..22: mol_type = other DNA
tgcatctctccactttttactt

SEQ ID NO: 157467 - DNA, 22 bp, synthetic construct
  misc_feature 1..22: note = chemically synthesized
  source 1..22: mol_type = other DNA
catctctccactttttactttg

SEQ ID NO: 157468 - DNA, 22 bp, synthetic construct
  misc_feature 1..22: note = chemically synthesized
  source 1..22: mol_type = other DNA
tccactttttactttgtatatg

SEQ ID NO: 157469 - DNA, 22 bp, synthetic construct
  misc_feature 1..22: note = chemically synthesized
  source 1..22: mol_type = other DNA
cactttttactttgtatatgga

SEQ ID NO: 157470 - DNA, 22 bp, synthetic construct
  misc_feature 1..22: note = chemically synthesized
  source 1..22: mol_type = other DNA
tttactttgtatatggaatagc

SEQ ID NO: 157471 - DNA, 22 bp, synthetic construct
  misc_feature 1..22: note = chemically synthesized
  source 1..22: mol_type = other DNA
ttactttgtatatggaatagct

SEQ ID NO: 157472 - DNA, 22 bp, synthetic construct
  misc_feature 1..22: note = chemically synthesized
  source 1..22: mol_type = other DNA
tactttgtatatggaatagctt

SEQ ID NO: 157473 - DNA, 22 bp, synthetic construct
  misc_feature 1..22: note = chemically synthesized
  source 1..22: mol_type = other DNA
actttgtatatggaatagcttc

SEQ ID NO: 157474 - DNA, 22 bp, synthetic construct
  misc_feature 1..22: note = chemically synthesized
  source 1..22: mol_type = other DNA
ctttgtatatggaatagcttct

SEQ ID NO: 157475 - DNA, 22 bp, synthetic construct
  misc_feature 1..22: note = chemically synthesized
  source 1..22: mol_type = other DNA
tgtatatggaatagcttcttaa

SEQ ID NO: 157476 - DNA, 22 bp, synthetic construct
  misc_feature 1..22: note = chemically synthesized
  source 1..22: mol_type = other DNA
gtatatggaatagcttcttaag

SEQ ID NO: 157477 - DNA, 22 bp, synthetic construct
  misc_feature 1..22: note = chemically synthesized
  source 1..22: mol_type = other DNA
tatatggaatagcttcttaaga

SEQ ID NO: 157478 - DNA, 22 bp, synthetic construct
  misc_feature 1..22: note = chemically synthesized
  source 1..22: mol_type = other DNA
cttaagaatgaaaagtatataa

SEQ ID NO: 157479 - DNA, 22 bp, synthetic construct
  misc_feature 1..22: note = chemically synthesized
  source 1..22: mol_type = other DNA
ttaagaatgaaaagtatataat

SEQ ID NO: 157480 - DNA, 22 bp, synthetic construct
  misc_feature 1..22: note = chemically synthesized
  source 1..22: mol_type = other DNA
aagaatgaaaagtatataatat

SEQ ID NO: 157481 - DNA, 22 bp, synthetic construct
  misc_feature 1..22: note = chemically synthesized
  source 1..22: mol_type = other DNA
agaatgaaaagtatataatatt

SEQ ID NO: 157482 - DNA, 22 bp, synthetic construct
  misc_feature 1..22: note = chemically synthesized
  source 1..22: mol_type = other DNA
ataaaatgtatgttaacctgac

SEQ ID NO: 157483 - DNA, 22 bp, synthetic construct
  misc_feature 1..22: note = chemically synthesized
  source 1..22: mol_type = other DNA
acctgactacataaaagttttg

SEQ ID NO: 157484 - DNA, 22 bp, synthetic construct
  misc_feature 1..22: note = chemically synthesized
  source 1..22: mol_type = other DNA
actacataaaagttttgtaaat

SEQ ID NO: 157485 - DNA, 22 bp, synthetic construct
  misc_feature 1..22: note = chemically synthesized
  source 1..22: mol_type = other DNA
cataaaagttttgtaaatgatt

SEQ ID NO: 157486 - DNA, 22 bp, synthetic construct
  misc_feature 1..22: note = chemically synthesized
  source 1..22: mol_type = other DNA
tgtaaatgattgtgtatgaaaa

SEQ ID NO: 157487 - DNA, 22 bp, synthetic construct
  misc_feature 1..22: note = chemically synthesized
  source 1..22: mol_type = other DNA
gtaaatgattgtgtatgaaaaa

SEQ ID NO: 157488 - DNA, 22 bp, synthetic construct
  misc_feature 1..22: note = chemically synthesized
  source 1..22: mol_type = other DNA
taaatgattgtgtatgaaaaaa

SEQ ID NO: 157489 - DNA, 22 bp, synthetic construct
  misc_feature 1..22: note = chemically synthesized
  source 1..22: mol_type = other DNA
tgtatgaaaaaattaatgaaga

SEQ ID NO: 157490 - DNA, 22 bp, synthetic construct
  misc_feature 1..22: note = chemically synthesized
  source 1..22: mol_type = other DNA
atgaagataagatgcgggggaa

SEQ ID NO: 157491 - DNA, 22 bp, synthetic construct
  misc_feature 1..22: note = chemically synthesized
  source 1..22: mol_type = other DNA
atatttaaattataattaatga

SEQ ID NO: 157492 - DNA, 22 bp, synthetic construct
  misc_feature 1..22: note = chemically synthesized
  source 1..22: mol_type = other DNA
tatttaaattataattaatgat

SEQ ID NO: 157493 - DNA, 22 bp, synthetic construct
  misc_feature 1..22: note = chemically synthesized
  source 1..22: mol_type = other DNA
aaattataattaatgatattgt

SEQ ID NO: 157494 - DNA, 22 bp, synthetic construct
  misc_feature 1..22: note = chemically synthesized
  source 1..22: mol_type = other DNA
aattataattaatgatattgtg

SEQ ID NO: 157495 - DNA, 22 bp, synthetic construct
  misc_feature 1..22: note = chemically synthesized
  source 1..22: mol_type = other DNA
taattaatgatattgtgtaact

SEQ ID NO: 157496 - DNA, 22 bp, synthetic construct
  misc_feature 1..22: note = chemically synthesized
  source 1..22: mol_type = other DNA
atgatattgtgtaactatttta

SEQ ID NO: 157497 - DNA, 22 bp, synthetic construct
  misc_feature 1..22: note = chemically synthesized
  source 1..22: mol_type = other DNA
tgtaactattttatgtttattt

SEQ ID NO: 157498 - DNA, 22 bp, synthetic construct
  misc_feature 1..22: note = chemically synthesized
  source 1..22: mol_type = other DNA
ttttatgtttatttgggttttg

SEQ ID NO: 157499 - DNA, 22 bp, synthetic construct
  misc_feature 1..22: note = chemically synthesized
  source 1..22: mol_type = other DNA
tatgtttatttgggttttgcat

SEQ ID NO: 157500 - DNA, 22 bp, synthetic construct
  misc_feature 1..22: note = chemically synthesized
  source 1..22: mol_type = other DNA
atgtttatttgggttttgcatt

SEQ ID NO: 157501 - DNA, 22 bp, synthetic construct
  misc_feature 1..22: note = chemically synthesized
  source 1..22: mol_type = other DNA
tgtttatttgggttttgcattg

SEQ ID NO: 157502 - DNA, 22 bp, synthetic construct
  misc_feature 1..22: note = chemically synthesized
  source 1..22: mol_type = other DNA
atttgggttttgcattgacatt

SEQ ID NO: 157503 - DNA, 22 bp, synthetic construct
  misc_feature 1..22: note = chemically synthesized
  source 1..22: mol_type = other DNA
tttgggttttgcattgacattg

SEQ ID NO: 157504 - DNA, 22 bp, synthetic construct
  misc_feature 1..22: note = chemically synthesized
  source 1..22: mol_type = other DNA
gggttttgcattgacattggca

SEQ ID NO: 157505 - DNA, 22 bp, synthetic construct
  misc_feature 1..22: note = chemically synthesized
  source 1..22: mol_type = other DNA
ggttttgcattgacattggcat

SEQ ID NO: 157506 - DNA, 22 bp, synthetic construct
  misc_feature 1..22: note = chemically synthesized
  source 1..22: mol_type = other DNA
tgcattgacattggcatgttct

SEQ ID NO: 157507 - DNA, 22 bp, synthetic construct
  misc_feature 1..22: note = chemically synthesized
  source 1..22: mol_type = other DNA
gcattgacattggcatgttctt

SEQ ID NO: 157508 - DNA, 22 bp, synthetic construct
  misc_feature 1..22: note = chemically synthesized
  source 1..22: mol_type = other DNA
cattgacattggcatgttctta

SEQ ID NO: 157509 - DNA, 22 bp, synthetic construct
  misc_feature 1..22: note = chemically synthesized
  source 1..22: mol_type = other DNA
acattggcatgttcttatgtat

SEQ ID NO: 157510 - DNA, 22 bp, synthetic construct
  misc_feature 1..22: note = chemically synthesized
  source 1..22: mol_type = other DNA
gcatgttcttatgtatactctc

SEQ ID NO: 157511 - DNA, 22 bp, synthetic construct
  misc_feature 1..22: note = chemically synthesized
  source 1..22: mol_type = other DNA
ttatgtatactctctccagcat

SEQ ID NO: 157512 - DNA, 22 bp, synthetic construct
  misc_feature 1..22: note = chemically synthesized
  source 1..22: mol_type = other DNA
atgtatactctctccagcatgc

SEQ ID NO: 157513 - DNA, 22 bp, synthetic construct
  misc_feature 1..22: note = chemically synthesized
  source 1..22: mol_type = other DNA
tgtatactctctccagcatgct

SEQ ID NO: 157514 - DNA, 22 bp, synthetic construct
  misc_feature 1..22: note = chemically synthesized
  source 1..22: mol_type = other DNA
tctccagcatgcttctcaggaa

SEQ ID NO: 157515 - DNA, 22 bp, synthetic construct
  misc_feature 1..22: note = chemically synthesized
  source 1..22: mol_type = other DNA
tccagcatgcttctcaggaact

SEQ ID NO: 157516 - DNA, 22 bp, synthetic construct
  misc_feature 1..22: note = chemically synthesized
  source 1..22: mol_type = other DNA
cagcatgcttctcaggaactat

SEQ ID NO: 157517 - DNA, 22 bp, synthetic construct
  misc_feature 1..22: note = chemically synthesized
  source 1..22: mol_type = other DNA
ctcaggaactattccccccttt

SEQ ID NO: 157518 - DNA, 22 bp, synthetic construct
  misc_feature 1..22: note = chemically synthesized
  source 1..22: mol_type = other DNA
tcaggaactattcccccctttc

SEQ ID NO: 157519 - DNA, 22 bp, synthetic construct
  misc_feature 1..22: note = chemically synthesized
  source 1..22: mol_type = other DNA
aggaactattcccccctttctc

SEQ ID NO: 157520 - DNA, 22 bp, synthetic construct
  misc_feature 1..22: note = chemically synthesized
  source 1..22: mol_type = other DNA
ttcccccctttctctctaatac

SEQ ID NO: 157521 - DNA, 22 bp, synthetic construct
  misc_feature 1..22: note = chemically synthesized
  source 1..22: mol_type = other DNA
ccccctttctctctaatacacc

SEQ ID NO: 157522 - DNA, 22 bp, synthetic construct
  misc_feature 1..22: note = chemically synthesized
  source 1..22: mol_type = other DNA
tctctctaatacacccgaagtt

SEQ ID NO: 157523 - DNA, 22 bp, synthetic construct
  misc_feature 1..22: note = chemically synthesized
  source 1..22: mol_type = other DNA
ctctctaatacacccgaagttt

SEQ ID NO: 157524 - DNA, 22 bp, synthetic construct
  misc_feature 1..22: note = chemically synthesized
  source 1..22: mol_type = other DNA
tctctaatacacccgaagtttc

SEQ ID NO: 157525 - DNA, 22 bp, synthetic construct
  misc_feature 1..22: note = chemically synthesized
  source 1..22: mol_type = other DNA
tctaatacacccgaagtttctg

SEQ ID NO: 157526 - DNA, 22 bp, synthetic construct
  misc_feature 1..22: note = chemically synthesized
  source 1..22: mol_type = other DNA
taatacacccgaagtttctggg

SEQ ID NO: 157527 - DNA, 22 bp, synthetic construct
  misc_feature 1..22: note = chemically synthesized
  source 1..22: mol_type = other DNA
atacacccgaagtttctgggaa

SEQ ID NO: 157528 - DNA, 22 bp, synthetic construct
  misc_feature 1..22: note = chemically synthesized
  source 1..22: mol_type = other DNA
ctgggaataattattcttggtt

SEQ ID NO: 157529 - DNA, 22 bp, synthetic construct
  misc_feature 1..22: note = chemically synthesized
  source 1..22: mol_type = other DNA
tgggaataattattcttggtta

SEQ ID NO: 157530 - DNA, 22 bp, synthetic construct
  misc_feature 1..22: note = chemically synthesized
  source 1..22: mol_type = other DNA
ggaataattattcttggttaat

SEQ ID NO: 157531 - DNA, 22 bp, synthetic construct
  misc_feature 1..22: note = chemically synthesized
  source 1..22: mol_type = other DNA
ttcttggttaattgcttcttga

SEQ ID NO: 157532 - DNA, 22 bp, synthetic construct
  misc_feature 1..22: note = chemically synthesized
  source 1..22: mol_type = other DNA
ttggttaattgcttcttgaggg

SEQ ID NO: 157533 - DNA, 22 bp, synthetic construct
  misc_feature 1..22: note = chemically synthesized
  source 1..22: mol_type = other DNA
ggttaattgcttcttgagggat

SEQ ID NO: 157534 - DNA, 22 bp, synthetic construct
  misc_feature 1..22: note = chemically synthesized
  source 1..22: mol_type = other DNA
gttaattgcttcttgagggata

SEQ ID NO: 157535 - DNA, 22 bp, synthetic construct
  misc_feature 1..22: note = chemically synthesized
  source 1..22: mol_type = other DNA
attgcttcttgagggatactga

SEQ ID NO: 157536 - DNA, 22 bp, synthetic construct
  misc_feature 1..22: note = chemically synthesized
  source 1..22: mol_type = other DNA
cttcttgagggatactgaatca

SEQ ID NO: 157537 - DNA, 22 bp, synthetic construct
  misc_feature 1..22: note = chemically synthesized
  source 1..22: mol_type = other DNA
cttgagggatactgaatcattc

SEQ ID NO: 157538 - DNA, 22 bp, synthetic construct
  misc_feature 1..22: note = chemically synthesized
  source 1..22: mol_type = other DNA
ttgagggatactgaatcattct

SEQ ID NO: 157539 - DNA, 22 bp, synthetic construct
  misc_feature 1..22: note = chemically synthesized
  source 1..22: mol_type = other DNA
gagggatactgaatcattctgt

SEQ ID NO: 157540 - DNA, 22 bp, synthetic construct
  misc_feature 1..22: note = chemically synthesized
  source 1..22: mol_type = other DNA
agggatactgaatcattctgtc

SEQ ID NO: 157541 - DNA, 22 bp, synthetic construct
  misc_feature 1..22: note = chemically synthesized
  source 1..22: mol_type = other DNA
aatcattctgtctctatgtcct

SEQ ID NO: 157542 - DNA, 22 bp, synthetic construct
  misc_feature 1..22: note = chemically synthesized
  source 1..22: mol_type = other DNA
tgtctctatgtcctccagtcaa

SEQ ID NO: 157543 - DNA, 22 bp, synthetic construct
  misc_feature 1..22: note = chemically synthesized
  source 1..22: mol_type = other DNA
tctctatgtcctccagtcaact

SEQ ID NO: 157544 - DNA, 22 bp, synthetic construct
  misc_feature 1..22: note = chemically synthesized
  source 1..22: mol_type = other DNA
tatgtcctccagtcaactaagc

SEQ ID NO: 157545 - DNA, 22 bp, synthetic construct
  misc_feature 1..22: note = chemically synthesized
  source 1..22: mol_type = other DNA
tgtcctccagtcaactaagcac

SEQ ID NO: 157546 - DNA, 22 bp, synthetic construct
  misc_feature 1..22: note = chemically synthesized
  source 1..22: mol_type = other DNA
cagtcaactaagcacatataca

SEQ ID NO: 157547 - DNA, 22 bp, synthetic construct
  misc_feature 1..22: note = chemically synthesized
  source 1..22: mol_type = other DNA
agcacatatacagggaggtagt

SEQ ID NO: 157548 - DNA, 22 bp, synthetic construct
  misc_feature 1..22: note = chemically synthesized
  source 1..22: mol_type = other DNA
tgtccacagcccagttgaaagt

SEQ ID NO: 157549 - DNA, 22 bp, synthetic construct
  misc_feature 1..22: note = chemically synthesized
  source 1..22: mol_type = other DNA
aaagtaaacagtaacaaatagt

SEQ ID NO: 157550 - DNA, 22 bp, synthetic construct
  misc_feature 1..22: note = chemically synthesized
  source 1..22: mol_type = other DNA
atgtggtagctctcagttccac

SEQ ID NO: 157551 - DNA, 22 bp, synthetic construct
  misc_feature 1..22: note = chemically synthesized
  source 1..22: mol_type = other DNA
tcagttccacctaggtaagtat

SEQ ID NO: 157552 - DNA, 22 bp, synthetic construct
  misc_feature 1..22: note = chemically synthesized
  source 1..22: mol_type = other DNA
agttccacctaggtaagtatct

SEQ ID NO: 157553 - DNA, 22 bp, synthetic construct
  misc_feature 1..22: note = chemically synthesized
  source 1..22: mol_type = other DNA
cacctaggtaagtatctgaggt

SEQ ID NO: 157554 - DNA, 22 bp, synthetic construct
  misc_feature 1..22: note = chemically synthesized
  source 1..22: mol_type = other DNA
ggtaagtatctgaggtctagga

SEQ ID NO: 157555 - DNA, 22 bp, synthetic construct
  misc_feature 1..22: note = chemically synthesized
  source 1..22: mol_type = other DNA
aggtctaggatcaactatagtt

SEQ ID NO: 157556 - DNA, 22 bp, synthetic construct
  misc_feature 1..22: note = chemically synthesized
  source 1..22: mol_type = other DNA
ggatcaactatagttatgccta

SEQ ID NO: 157557 - DNA, 22 bp, synthetic construct
  misc_feature 1..22: note = chemically synthesized
  source 1..22: mol_type = other DNA
tagttatgcctaatggtataat

SEQ ID NO: 157558 - DNA, 22 bp, synthetic construct
  misc_feature 1..22: note = chemically synthesized
  source 1..22: mol_type = other DNA
tgcctaatggtataatgtgctg

SEQ ID NO: 157559 - DNA, 22 bp, synthetic construct
  misc_feature 1..22: note = chemically synthesized
  source 1..22: mol_type = other DNA
atggtataatgtgctggcttgc

SEQ ID NO: 157560 - DNA, 22 bp, synthetic construct
  misc_feature 1..22: note = chemically synthesized
  source 1..22: mol_type = other DNA
gcttgcaccagcttaggaaagc

SEQ ID NO: 157561 - DNA, 22 bp, synthetic construct
  misc_feature 1..22: note = chemically synthesized
  source 1..22: mol_type = other DNA
gcaccagcttaggaaagctgat

SEQ ID NO: 157562 - DNA, 22 bp, synthetic construct
  misc_feature 1..22: note = chemically synthesized
  source 1..22: mol_type = other DNA
caccagcttaggaaagctgatt

SEQ ID NO: 157563 - DNA, 22 bp, synthetic construct
  misc_feature 1..22: note = chemically synthesized
  source 1..22: mol_type = other DNA
aggaaagctgattatgctcatc

SEQ ID NO: 157564 - DNA, 22 bp, synthetic construct
  misc_feature 1..22: note = chemically synthesized
  source 1..22: mol_type = other DNA
ggaaagctgattatgctcatct

SEQ ID NO: 157565 - DNA, 22 bp, synthetic construct
  misc_feature 1..22: note = chemically synthesized
  source 1..22: mol_type = other DNA
attatgctcatctcagctctgc

SEQ ID NO: 157566 - DNA, 22 bp, synthetic construct
  misc_feature 1..22: note = chemically synthesized
  source 1..22: mol_type = other DNA
tgctcatctcagctctgcattt

SEQ ID NO: 157567 - DNA, 22 bp, synthetic construct
  misc_feature 1..22: note = chemically synthesized
  source 1..22: mol_type = other DNA
atctcagctctgcatttaatag

SEQ ID NO: 157568 - DNA, 22 bp, synthetic construct
  misc_feature 1..22: note = chemically synthesized
  source 1..22: mol_type = other DNA
agctctgcatttaatagcatct

SEQ ID NO: 157569 - DNA, 22 bp, synthetic construct
  misc_feature 1..22: note = chemically synthesized
  source 1..22: mol_type = other DNA
tgcatttaatagcatctctttg

SEQ ID NO: 157570 - DNA, 22 bp, synthetic construct
  misc_feature 1..22: note = chemically synthesized
  source 1..22: mol_type = other DNA
catttaatagcatctctttggt

SEQ ID NO: 157571 - DNA, 22 bp, synthetic construct
  misc_feature 1..22: note = chemically synthesized
  source 1..22: mol_type = other DNA
aatagcatctctttggtagtct

SEQ ID NO: 157572 - DNA, 22 bp, synthetic construct
  misc_feature 1..22: note = chemically synthesized
  source 1..22: mol_type = other DNA
atagcatctctttggtagtctg

SEQ ID NO: 157573 - DNA, 22 bp, synthetic construct
  misc_feature 1..22: note = chemically synthesized
  source 1..22: mol_type = other DNA
tttggtagtctgaaattgatca

SEQ ID NO: 157574 - DNA, 22 bp, synthetic construct
  misc_feature 1..22: note = chemically synthesized
  source 1..22: mol_type = other DNA
tggtagtctgaaattgatcatg

SEQ ID NO: 157575 - DNA, 22 bp, synthetic construct
  misc_feature 1..22: note = chemically synthesized
  source 1..22: mol_type = other DNA
ggtagtctgaaattgatcatgg

SEQ ID NO: 157576 - DNA, 22 bp, synthetic construct
  misc_feature 1..22: note = chemically synthesized
  source 1..22: mol_type = other DNA
gtagtctgaaattgatcatggt

SEQ ID NO: 157577 - DNA, 22 bp, synthetic construct
  misc_feature 1..22: note = chemically synthesized
  source 1..22: mol_type = other DNA
aaattgatcatggtaggagtca

SEQ ID NO: 157578 - DNA, 22 bp, synthetic construct
  misc_feature 1..22: note = chemically synthesized
  source 1..22: mol_type = other DNA
atcatggtaggagtcattaaaa

SEQ ID NO: 157579 - DNA, 22 bp, synthetic construct
  misc_feature 1..22: note = chemically synthesized
  source 1..22: mol_type = other DNA
aaacacaaaaaatcggtaactg

SEQ ID NO: 157580 - DNA, 22 bp, synthetic construct
  misc_feature 1..22: note = chemically synthesized
  source 1..22: mol_type = other DNA
gtaaaaatcagggcatttttat

SEQ ID NO: 157581 - DNA, 22 bp, synthetic construct
  misc_feature 1..22: note = chemically synthesized
  source 1..22: mol_type = other DNA
ttatttggaaatatttattact

SEQ ID NO: 157582 - DNA, 22 bp, synthetic construct
  misc_feature 1..22: note = chemically synthesized
  source 1..22: mol_type = other DNA
tatttggaaatatttattacta

SEQ ID NO: 157583 - DNA, 22 bp, synthetic construct
  misc_feature 1..22: note = chemically synthesized
  source 1..22: mol_type = other DNA
atttggaaatatttattactat

SEQ ID NO: 157584 - DNA, 22 bp, synthetic construct
  misc_feature 1..22: note = chemically synthesized
  source 1..22: mol_type = other DNA
tttggaaatatttattactatc

SEQ ID NO: 157585 - DNA, 22 bp, synthetic construct
  misc_feature 1..22: note = chemically synthesized
  source 1..22: mol_type = other DNA
ggaaatatttattactatccca

SEQ ID NO: 157586 - DNA, 22 bp, synthetic construct
  misc_feature 1..22: note = chemically synthesized
  source 1..22: mol_type = other DNA
gaaatatttattactatcccac

SEQ ID NO: 157587 - DNA, 22 bp, synthetic construct
  misc_feature 1..22: note = chemically synthesized
  source 1..22: mol_type = other DNA
attactatcccactgattatgc

SEQ ID NO: 157588 - DNA, 22 bp, synthetic construct
  misc_feature 1..22: note = chemically synthesized
  source 1..22: mol_type = other DNA
ttactatcccactgattatgcc

SEQ ID NO: 157589 - DNA, 22 bp, synthetic construct
  misc_feature 1..22: note = chemically synthesized
  source 1..22: mol_type = other DNA
ctatcccactgattatgcctaa

SEQ ID NO: 157590 - DNA, 22 bp, synthetic construct
  misc_feature 1..22: note = chemically synthesized
  source 1..22: mol_type = other DNA
tcccactgattatgcctaacga

SEQ ID NO: 157591 - DNA, 22 bp, synthetic construct
  misc_feature 1..22: note = chemically synthesized
  source 1..22: mol_type = other DNA
attatgcctaacgaagagccct

SEQ ID NO: 157592 - DNA, 22 bp, synthetic construct
  misc_feature 1..22: note = chemically synthesized
  source 1..22: mol_type = other DNA
tgcctaacgaagagccctggcc

SEQ ID NO: 157593 - DNA, 22 bp, synthetic construct
  misc_feature 1..22: note = chemically synthesized
  source 1..22: mol_type = other DNA
acgaagagccctggcccaacac

SEQ ID NO: 157594 - DNA, 22 bp, synthetic construct
  misc_feature 1..22: note = chemically synthesized
  source 1..22: mol_type = other DNA
gcccaacacgggaagaagagtt

SEQ ID NO: 157595 - DNA, 22 bp, synthetic construct
  misc_feature 1..22: note = chemically synthesized
  source 1..22: mol_type = other DNA
agccttggtcacattcttattt

SEQ ID NO: 157596 - DNA, 22 bp, synthetic construct
  misc_feature 1..22: note = chemically synthesized
  source 1..22: mol_type = other DNA
ggtcacattcttatttctgagc

SEQ ID NO: 157597 - DNA, 22 bp, synthetic construct
  misc_feature 1..22: note = chemically synthesized
  source 1..22: mol_type = other DNA
gtcacattcttatttctgagcc

SEQ ID NO: 157598 - DNA, 22 bp, synthetic construct
  misc_feature 1..22: note = chemically synthesized
  source 1..22: mol_type = other DNA
ttatttctgagccccatcctga

SEQ ID NO: 157599 - DNA, 22 bp, synthetic construct
  misc_feature 1..22: note = chemically synthesized
  source 1..22: mol_type = other DNA
atttctgagccccatcctgaat

SEQ ID NO: 157600 - DNA, 22 bp, synthetic construct
  misc_feature 1..22: note = chemically synthesized
  source 1..22: mol_type = other DNA
tttctgagccccatcctgaatt

SEQ ID NO: 157601 - DNA, 22 bp, synthetic construct
  misc_feature 1..22: note = chemically synthesized
  source 1..22: mol_type = other DNA
ctgagccccatcctgaattcca

SEQ ID NO: 157602 - DNA, 22 bp, synthetic construct
  misc_feature 1..22: note = chemically synthesized
  source 1..22: mol_type = other DNA
tgagccccatcctgaattccat

SEQ ID NO: 157603 - DNA, 22 bp, synthetic construct
  misc_feature 1..22: note = chemically synthesized
  source 1..22: mol_type = other DNA
agccccatcctgaattccattt

SEQ ID NO: 157604 - DNA, 22 bp, synthetic construct
  misc_feature 1..22: note = chemically synthesized
  source 1..22: mol_type = other DNA
aattccatttctggcctccaac

SEQ ID NO: 157605 - DNA, 22 bp, synthetic construct
  misc_feature 1..22: note = chemically synthesized
  source 1..22: mol_type = other DNA
catttctggcctccaacgttaa

SEQ ID NO: 157606 - DNA, 22 bp, synthetic construct
  misc_feature 1..22: note = chemically synthesized
  source 1..22: mol_type = other DNA
ctggcctccaacgttaatacct

SEQ ID NO: 157607 - DNA, 22 bp, synthetic construct
  misc_feature 1..22: note = chemically synthesized
  source 1..22: mol_type = other DNA
tggcctccaacgttaataccta

SEQ ID NO: 157608 - DNA, 22 bp, synthetic construct
  misc_feature 1..22: note = chemically synthesized
  source 1..22: mol_type = other DNA
gcctccaacgttaatacctaag

SEQ ID NO: 157609 - DNA, 22 bp, synthetic construct
  misc_feature 1..22: note = chemically synthesized
  source 1..22: mol_type = other DNA
caacgttaatacctaaggctct

SEQ ID NO: 157610 - DNA, 22 bp, synthetic construct
  misc_feature 1..22: note = chemically synthesized
  source 1..22: mol_type = other DNA
atacctaaggctctgctgcaga

SEQ ID NO: 157611 - DNA, 22 bp, synthetic construct
  misc_feature 1..22: note = chemically synthesized
  source 1..22: mol_type = other DNA
aggctctgctgcagataagtgg

SEQ ID NO: 157612 - DNA, 22 bp, synthetic construct
  misc_feature 1..22: note = chemically synthesized
  source 1..22: mol_type = other DNA
tgctgcagataagtggaacttt

SEQ ID NO: 157613 - DNA, 22 bp, synthetic construct
  misc_feature 1..22: note = chemically synthesized
  source 1..22: mol_type = other DNA
ctgcagataagtggaactttag

SEQ ID NO: 157614 - DNA, 22 bp, synthetic construct
  misc_feature 1..22: note = chemically synthesized
  source 1..22: mol_type = other DNA
cagataagtggaactttagtgt

SEQ ID NO: 157615 - DNA, 22 bp, synthetic construct
  misc_feature 1..22: note = chemically synthesized
  source 1..22: mol_type = other DNA
tagtgttaataaacttgttccc

SEQ ID NO: 157616 - DNA, 22 bp, synthetic construct
  misc_feature 1..22: note = chemically synthesized
  source 1..22: mol_type = other DNA
agtgttaataaacttgttccca

SEQ ID NO: 157617 - DNA, 22 bp, synthetic construct
  misc_feature 1..22: note = chemically synthesized
  source 1..22: mol_type = other DNA
gtgttaataaacttgttcccag

SEQ ID NO: 157618 - DNA, 22 bp, synthetic construct
  misc_feature 1..22: note = chemically synthesized
  source 1..22: mol_type = other DNA
ataaacttgttcccagataaat

SEQ ID NO: 157619 - DNA, 22 bp, synthetic construct
  misc_feature 1..22: note = chemically synthesized
  source 1..22: mol_type = other DNA
gttcccagataaatatctctaa

SEQ ID NO: 157620 - DNA, 22 bp, synthetic construct
  misc_feature 1..22: note = chemically synthesized
  source 1..22: mol_type = other DNA
ttcccagataaatatctctaag

SEQ ID NO: 157621 - DNA, 22 bp, synthetic construct
  misc_feature 1..22: note = chemically synthesized
  source 1..22: mol_type = other DNA
ccagataaatatctctaagcct

SEQ ID NO: 157622 - DNA, 22 bp, synthetic construct
  misc_feature 1..22: note = chemically synthesized
  source 1..22: mol_type = other DNA
taagcctgtaccctagccccac

SEQ ID NO: 157623 - DNA, 22 bp, synthetic construct
  misc_feature 1..22: note = chemically synthesized
  source 1..22: mol_type = other DNA
agcctgtaccctagccccacca

SEQ ID NO: 157624 - DNA, 22 bp, synthetic construct
  misc_feature 1..22: note = chemically synthesized
  source 1..22: mol_type = other DNA
taccctagccccaccatcacat

SEQ ID NO: 157625 - DNA, 22 bp, synthetic construct
  misc_feature 1..22: note = chemically synthesized
  source 1..22: mol_type = other DNA
gccccaccatcacatgtgactt

SEQ ID NO: 157626 - DNA, 22 bp, synthetic construct
  misc_feature 1..22: note = chemically synthesized
  source 1..22: mol_type = other DNA
gtgagatactgatgcttctgat

SEQ ID NO: 157627 - DNA, 22 bp, synthetic construct
  misc_feature 1..22: note = chemically synthesized
  source 1..22: mol_type = other DNA
tgagatactgatgcttctgatc

SEQ ID NO: 157628 - DNA, 22 bp, synthetic construct
  misc_feature 1..22: note = chemically synthesized
  source 1..22: mol_type = other DNA
atgcttctgatcttgctccctg

SEQ ID NO: 157629 - DNA, 22 bp, synthetic construct
  misc_feature 1..22: note = chemically synthesized
  source 1..22: mol_type = other DNA
ctgatcttgctccctgacccgg

SEQ ID NO: 157630 - DNA, 22 bp, synthetic construct
  misc_feature 1..22: note = chemically synthesized
  source 1..22: mol_type = other DNA
tgatcttgctccctgacccggt

SEQ ID NO: 157631 - DNA, 22 bp, synthetic construct
  misc_feature 1..22: note = chemically synthesized
  source 1..22: mol_type = other DNA
atcttgctccctgacccggttc

SEQ ID NO: 157632 - DNA, 22 bp, synthetic construct
  misc_feature 1..22: note = chemically synthesized
  source 1..22: mol_type = other DNA
gctccctgacccggttccagca

SEQ ID NO: 157633 - DNA, 22 bp, synthetic construct
  misc_feature 1..22: note = chemically synthesized
  source 1..22: mol_type = other DNA
ctccctgacccggttccagcag

SEQ ID NO: 157634 - DNA, 22 bp, synthetic construct
  misc_feature 1..22: note = chemically synthesized
  source 1..22: mol_type = other DNA
cctgacccggttccagcagaag

SEQ ID NO: 157635 - DNA, 22 bp, synthetic construct
  misc_feature 1..22: note = chemically synthesized
  source 1..22: mol_type = other DNA
acccggttccagcagaagactg

SEQ ID NO: 157636 - DNA, 22 bp, synthetic construct
  misc_feature 1..22: note = chemically synthesized
  source 1..22: mol_type = other DNA
cagcagaagactgacccttctg

SEQ ID NO: 157637 - DNA, 22 bp, synthetic construct
  misc_feature 1..22: note = chemically synthesized
  source 1..22: mol_type = other DNA
acccttctgcaaaatacagagg

SEQ ID NO: 157638 - DNA, 22 bp, synthetic construct
  misc_feature 1..22: note = chemically synthesized
  source 1..22: mol_type = other DNA
ctgcaaaatacagaggagcttt

SEQ ID NO: 157639 - DNA, 22 bp, synthetic construct
  misc_feature 1..22: note = chemically synthesized
  source 1..22: mol_type = other DNA
tgcaaaatacagaggagctttt

SEQ ID NO: 157640 - DNA, 22 bp, synthetic construct
  misc_feature 1..22: note = chemically synthesized
  source 1..22: mol_type = other DNA
caaaatacagaggagcttttct

SEQ ID NO: 157641 - DNA, 22 bp, synthetic construct
  misc_feature 1..22: note = chemically synthesized
  source 1..22: mol_type = other DNA
ttctaatctatggatagcaggt

SEQ ID NO: 157642 - DNA, 22 bp, synthetic construct
  misc_feature 1..22: note = chemically synthesized
  source 1..22: mol_type = other DNA
tctaatctatggatagcaggtg

SEQ ID NO: 157643 - DNA, 22 bp, synthetic construct
  misc_feature 1..22: note = chemically synthesized
  source 1..22: mol_type = other DNA
ctaatctatggatagcaggtgg

SEQ ID NO: 157644 - DNA, 22 bp, synthetic construct
  misc_feature 1..22: note = chemically synthesized
  source 1..22: mol_type = other DNA
taatctatggatagcaggtgga

SEQ ID NO: 157645 - DNA, 22 bp, synthetic construct
  misc_feature 1..22: note = chemically synthesized
  source 1..22: mol_type = other DNA
atctatggatagcaggtggaga

SEQ ID NO: 157646 - DNA, 22 bp, synthetic construct
  misc_feature 1..22: note = chemically synthesized
  source 1..22: mol_type = other DNA
tggatagcaggtggagaaagag

SEQ ID NO: 157647 - DNA, 22 bp, synthetic construct
  misc_feature 1..22: note = chemically synthesized
  source 1..22: mol_type = other DNA
gtaagttaaagaaaaaaatgga

SEQ ID NO: 157648 - DNA, 22 bp, synthetic construct
  misc_feature 1..22: note = chemically synthesized
  source 1..22: mol_type = other DNA
aagaaaaaaatggaaaatactt

SEQ ID NO: 157649 - DNA, 22 bp, synthetic construct
  misc_feature 1..22: note = chemically synthesized
  source 1..22: mol_type = other DNA
tattctaggagaaactatcctt

SEQ ID NO: 157650 - DNA, 22 bp, synthetic construct
  misc_feature 1..22: note = chemically synthesized
  source 1..22: mol_type = other DNA
attctaggagaaactatccttg

SEQ ID NO: 157651 - DNA, 22 bp, synthetic construct
  misc_feature 1..22: note = chemically synthesized
  source 1..22: mol_type = other DNA
ttctaggagaaactatccttgt

SEQ ID NO: 157652 - DNA, 22 bp, synthetic construct
  misc_feature 1..22: note = chemically synthesized
  source 1..22: mol_type = other DNA
taggagaaactatccttgtgtt

SEQ ID NO: 157653 - DNA, 22 bp, synthetic construct
  misc_feature 1..22: note = chemically synthesized
  source 1..22: mol_type = other DNA
ggagaaactatccttgtgttct

SEQ ID NO: 157654 - DNA, 22 bp, synthetic construct
  misc_feature 1..22: note = chemically synthesized
  source 1..22: mol_type = other DNA
tccttgtgttctaatatattaa

SEQ ID NO: 157655 - DNA, 22 bp, synthetic construct
  misc_feature 1..22: note = chemically synthesized
  source 1..22: mol_type = other DNA
gtgttctaatatattaaattgt

SEQ ID NO: 157656 - DNA, 22 bp, synthetic construct
  misc_feature 1..22: note = chemically synthesized
  source 1..22: mol_type = other DNA
tgttctaatatattaaattgtt

SEQ ID NO: 157657 - DNA, 22 bp, synthetic construct
  misc_feature 1..22: note = chemically synthesized
  source 1..22: mol_type = other DNA
taatatattaaattgttctttt

SEQ ID NO: 157658 - DNA, 22 bp, synthetic construct
  misc_feature 1..22: note = chemically synthesized
  source 1..22: mol_type = other DNA
atatattaaattgttcttttta

SEQ ID NO: 157659 - DNA, 22 bp, synthetic construct
  misc_feature 1..22: note = chemically synthesized
  source 1..22: mol_type = other DNA
aattgttctttttattctatac

SEQ ID NO: 157660 - DNA, 22 bp, synthetic construct
  misc_feature 1..22: note = chemically synthesized
  source 1..22: mol_type = other DNA
ttctttttattctatacattta

SEQ ID NO: 157661 - DNA, 22 bp, synthetic construct
  misc_feature 1..22: note = chemically synthesized
  source 1..22: mol_type = other DNA
tttttattctatacatttaata

SEQ ID NO: 157662 - DNA, 22 bp, synthetic construct
  misc_feature 1..22: note = chemically synthesized
  source 1..22: mol_type = other DNA
tttattctatacatttaatatt

SEQ ID NO: 157663 - DNA, 22 bp, synthetic construct
  misc_feature 1..22: note = chemically synthesized
  source 1..22: mol_type = other DNA
ttattctatacatttaatattt

SEQ ID NO: 157664 - DNA, 22 bp, synthetic construct
  misc_feature 1..22: note = chemically synthesized
  source 1..22: mol_type = other DNA
tattctatacatttaatattta

SEQ ID NO: 157665 - DNA, 22 bp, synthetic construct
  misc_feature 1..22: note = chemically synthesized
  source 1..22: mol_type = other DNA
attctatacatttaatatttac

SEQ ID NO: 157666 - DNA, 22 bp, synthetic construct
  misc_feature 1..22: note = chemically synthesized
  source 1..22: mol_type = other DNA
ttctatacatttaatatttact

SEQ ID NO: 157667 - DNA, 22 bp, synthetic construct
  misc_feature 1..22: note = chemically synthesized
  source 1..22: mol_type = other DNA
tatacatttaatatttactata

SEQ ID NO: 157668 - DNA, 22 bp, synthetic construct
  misc_feature 1..22: note = chemically synthesized
  source 1..22: mol_type = other DNA
tacatttaatatttactatatt

SEQ ID NO: 157669 - DNA, 22 bp, synthetic construct
  misc_feature 1..22: note = chemically synthesized
  source 1..22: mol_type = other DNA
aatatttactatattccacata

SEQ ID NO: 157670 - DNA, 22 bp, synthetic construct
  misc_feature 1..22: note = chemically synthesized
  source 1..22: mol_type = other DNA
atatttactatattccacatat

SEQ ID NO: 157671 - DNA, 22 bp, synthetic construct
  misc_feature 1..22: note = chemically synthesized
  source 1..22: mol_type = other DNA
actatattccacatataatgat

SEQ ID NO: 157672 - DNA, 22 bp, synthetic construct
  misc_feature 1..22: note = chemically synthesized
  source 1..22: mol_type = other DNA
ctatattccacatataatgata

SEQ ID NO: 157673 - DNA, 22 bp, synthetic construct
  misc_feature 1..22: note = chemically synthesized
  source 1..22: mol_type = other DNA
tattccacatataatgataaac

SEQ ID NO: 157674 - DNA, 22 bp, synthetic construct
  misc_feature 1..22: note = chemically synthesized
  source 1..22: mol_type = other DNA
cacatataatgataaacaatat

SEQ ID NO: 157675 - DNA, 22 bp, synthetic construct
  misc_feature 1..22: note = chemically synthesized
  source 1..22: mol_type = other DNA
ctttaaaatactattattgtct

SEQ ID NO: 157676 - DNA, 22 bp, synthetic construct
  misc_feature 1..22: note = chemically synthesized
  source 1..22: mol_type = other DNA
taaaatactattattgtcttta

SEQ ID NO: 157677 - DNA, 22 bp, synthetic construct
  misc_feature 1..22: note = chemically synthesized
  source 1..22: mol_type = other DNA
aaaatactattattgtctttat

SEQ ID NO: 157678 - DNA, 22 bp, synthetic construct
  misc_feature 1..22: note = chemically synthesized
  source 1..22: mol_type = other DNA
aaatactattattgtctttata

SEQ ID NO: 157679 - DNA, 22 bp, synthetic construct
  misc_feature 1..22: note = chemically synthesized
  source 1..22: mol_type = other DNA
ttattgtctttatagcaaatat

SEQ ID NO: 157680 - DNA, 22 bp, synthetic construct
  misc_feature 1..22: note = chemically synthesized
  source 1..22: mol_type = other DNA
ttgtctttatagcaaatatctg

SEQ ID NO: 157681 - DNA, 22 bp, synthetic construct
  misc_feature 1..22: note = chemically synthesized
  source 1..22: mol_type = other DNA
tctttatagcaaatatctgggt

SEQ ID NO: 157682 - DNA, 22 bp, synthetic construct
  misc_feature 1..22: note = chemically synthesized
  source 1..22: mol_type = other DNA
tatagcaaatatctgggtctca

SEQ ID NO: 157683 - DNA, 22 bp, synthetic construct
  misc_feature 1..22: note = chemically synthesized
  source 1..22: mol_type = other DNA
atagcaaatatctgggtctcag

SEQ ID NO: 157684 - DNA, 22 bp, synthetic construct
  misc_feature 1..22: note = chemically synthesized
  source 1..22: mol_type = other DNA
tagcaaatatctgggtctcaga

SEQ ID NO: 157685 - DNA, 22 bp, synthetic construct
  misc_feature 1..22: note = chemically synthesized
  source 1..22: mol_type = other DNA
ggtctcagataacttgcaatat

SEQ ID NO: 157686 - DNA, 22 bp, synthetic construct
  misc_feature 1..22: note = chemically synthesized
  source 1..22: mol_type = other DNA
agataacttgcaatataaatca

SEQ ID NO: 157687 - DNA, 22 bp, synthetic construct
  misc_feature 1..22: note = chemically synthesized
  source 1..22: mol_type = other DNA
gcaatataaatcaactttaata

SEQ ID NO: 157688 - DNA, 22 bp, synthetic construct
  misc_feature 1..22: note = chemically synthesized
  source 1..22: mol_type = other DNA
caatataaatcaactttaatat

SEQ ID NO: 157689 - DNA, 22 bp, synthetic construct
  misc_feature 1..22: note = chemically synthesized
  source 1..22: mol_type = other DNA
taatataatcccaagattacac

SEQ ID NO: 157690 - DNA, 22 bp, synthetic construct
  misc_feature 1..22: note = chemically synthesized
  source 1..22: mol_type = other DNA
aatataatcccaagattacacg

SEQ ID NO: 157691 - DNA, 22 bp, synthetic construct
  misc_feature 1..22: note = chemically synthesized
  source 1..22: mol_type = other DNA
atataatcccaagattacacgt

SEQ ID NO: 157692 - DNA, 22 bp, synthetic construct
  misc_feature 1..22: note = chemically synthesized
  source 1..22: mol_type = other DNA
cacgtcaattaaatgttagaac

SEQ ID NO: 157693 - DNA, 22 bp, synthetic construct
  misc_feature 1..22: note = chemically synthesized
  source 1..22: mol_type = other DNA
aatgttagaaccatcaatactc

SEQ ID NO: 157694 - DNA, 22 bp, synthetic construct
  misc_feature 1..22: note = chemically synthesized
  source 1..22: mol_type = other DNA
gaaccatcaatactctttatta

SEQ ID NO: 157695 - DNA, 22 bp, synthetic construct
  misc_feature 1..22: note = chemically synthesized
  source 1..22: mol_type = other DNA
tttattagtgttatattacttt

SEQ ID NO: 157696 - DNA, 22 bp, synthetic construct
  misc_feature 1..22: note = chemically synthesized
  source 1..22: mol_type = other DNA
tattagtgttatattactttag

SEQ ID NO: 157697 - DNA, 22 bp, synthetic construct
  misc_feature 1..22: note = chemically synthesized
  source 1..22: mol_type = other DNA
attagtgttatattactttagc

SEQ ID NO: 157698 - DNA, 22 bp, synthetic construct
  misc_feature 1..22: note = chemically synthesized
  source 1..22: mol_type = other DNA
ttagtgttatattactttagct

SEQ ID NO: 157699 - DNA, 22 bp, synthetic construct
  misc_feature 1..22: note = chemically synthesized
  source 1..22: mol_type = other DNA
gtgttatattactttagctatt

SEQ ID NO: 157700 - DNA, 22 bp, synthetic construct
  misc_feature 1..22: note = chemically synthesized
  source 1..22: mol_type = other DNA
tattactttagctattcatcta

SEQ ID NO: 157701 - DNA, 22 bp, synthetic construct
  misc_feature 1..22: note = chemically synthesized
  source 1..22: mol_type = other DNA
ctttagctattcatctactctc

SEQ ID NO: 157702 - DNA, 22 bp, synthetic construct
  misc_feature 1..22: note = chemically synthesized
  source 1..22: mol_type = other DNA
tagctattcatctactctcttt

SEQ ID NO: 157703 - DNA, 22 bp, synthetic construct
  misc_feature 1..22: note = chemically synthesized
  source 1..22: mol_type = other DNA
agctattcatctactctcttta

SEQ ID NO: 157704 - DNA, 22 bp, synthetic construct
  misc_feature 1..22: note = chemically synthesized
  source 1..22: mol_type = other DNA
gctattcatctactctctttat

SEQ ID NO: 157705 - DNA, 22 bp, synthetic construct
  misc_feature 1..22: note = chemically synthesized
  source 1..22: mol_type = other DNA
ttcatctactctctttataaac

SEQ ID NO: 157706 - DNA, 22 bp, synthetic construct
  misc_feature 1..22: note = chemically synthesized
  source 1..22: mol_type = other DNA
atctactctctttataaacact

SEQ ID NO: 157707 - DNA, 22 bp, synthetic construct
  misc_feature 1..22: note = chemically synthesized
  source 1..22: mol_type = other DNA
ctctctttataaacactacaag

SEQ ID NO: 157708 - DNA, 22 bp, synthetic construct
  misc_feature 1..22: note = chemically synthesized
  source 1..22: mol_type = other DNA
tctttataaacactacaagtta

SEQ ID NO: 157709 - DNA, 22 bp, synthetic construct
  misc_feature 1..22: note = chemically synthesized
  source 1..22: mol_type = other DNA
tttataaacactacaagttagc

SEQ ID NO: 157710 - DNA, 22 bp, synthetic construct
  misc_feature 1..22: note = chemically synthesized
  source 1..22: mol_type = other DNA
tataaacactacaagttagcag

SEQ ID NO: 157711 - DNA, 22 bp, synthetic construct
  misc_feature 1..22: note = chemically synthesized
  source 1..22: mol_type = other DNA
ataaacactacaagttagcagt

SEQ ID NO: 157712 - DNA, 22 bp, synthetic construct
  misc_feature 1..22: note = chemically synthesized
  source 1..22: mol_type = other DNA
taaacactacaagttagcagtt

SEQ ID NO: 157713 - DNA, 22 bp, synthetic construct
  misc_feature 1..22: note = chemically synthesized
  source 1..22: mol_type = other DNA
caagttagcagtttcttcagtc

SEQ ID NO: 157714 - DNA, 22 bp, synthetic construct
  misc_feature 1..22: note = chemically synthesized
  source 1..22: mol_type = other DNA
gcagtttcttcagtcataattt

SEQ ID NO: 157715 - DNA, 22 bp, synthetic construct
  misc_feature 1..22: note = chemically synthesized
  source 1..22: mol_type = other DNA
cttcagtcataatttccatgtg

SEQ ID NO: 157716 - DNA, 22 bp, synthetic construct
  misc_feature 1..22: note = chemically synthesized
  source 1..22: mol_type = other DNA
ttcagtcataatttccatgtga

SEQ ID NO: 157717 - DNA, 22 bp, synthetic construct
  misc_feature 1..22: note = chemically synthesized
  source 1..22: mol_type = other DNA
cagtcataatttccatgtgaat

SEQ ID NO: 157718 - DNA, 22 bp, synthetic construct
  misc_feature 1..22: note = chemically synthesized
  source 1..22: mol_type = other DNA
agtcataatttccatgtgaatc

SEQ ID NO: 157719 - DNA, 22 bp, synthetic construct
  misc_feature 1..22: note = chemically synthesized
  source 1..22: mol_type = other DNA
ccatgtgaatctgtcatctcta

SEQ ID NO: 157720 - DNA, 22 bp, synthetic construct
  misc_feature 1..22: note = chemically synthesized
  source 1..22: mol_type = other DNA
catgtgaatctgtcatctctat

SEQ ID NO: 157721 - DNA, 22 bp, synthetic construct
  misc_feature 1..22: note = chemically synthesized
  source 1..22: mol_type = other DNA
tcatctctatgcttattttaac

SEQ ID NO: 157722 - DNA, 22 bp, synthetic construct
  misc_feature 1..22: note = chemically synthesized
  source 1..22: mol_type = other DNA
tatgcttattttaactgttttt

SEQ ID NO: 157723 - DNA, 22 bp, synthetic construct
  misc_feature 1..22: note = chemically synthesized
  source 1..22: mol_type = other DNA
tgcttattttaactgtttttca

SEQ ID NO: 157724 - DNA, 22 bp, synthetic construct
  misc_feature 1..22: note = chemically synthesized
  source 1..22: mol_type = other DNA
attttaactgtttttcactgcc

SEQ ID NO: 157725 - DNA, 22 bp, synthetic construct
  misc_feature 1..22: note = chemically synthesized
  source 1..22: mol_type = other DNA
ttttaactgtttttcactgcca

SEQ ID NO: 157726 - DNA, 22 bp, synthetic construct
  misc_feature 1..22: note = chemically synthesized
  source 1..22: mol_type = other DNA
taactgtttttcactgccatag

SEQ ID NO: 157727 - DNA, 22 bp, synthetic construct
  misc_feature 1..22: note = chemically synthesized
  source 1..22: mol_type = other DNA
aactgtttttcactgccataga

SEQ ID NO: 157728 - DNA, 22 bp, synthetic construct
  misc_feature 1..22: note = chemically synthesized
  source 1..22: mol_type = other DNA
actgtttttcactgccatagat

SEQ ID NO: 157729 - DNA, 22 bp, synthetic construct
  misc_feature 1..22: note = chemically synthesized
  source 1..22: mol_type = other DNA
tttttcactgccatagatgacc

SEQ ID NO: 157730 - DNA, 22 bp, synthetic construct
  misc_feature 1..22: note = chemically synthesized
  source 1..22: mol_type = other DNA
ttcactgccatagatgacccaa

SEQ ID NO: 157731 - DNA, 22 bp, synthetic construct
  misc_feature 1..22: note = chemically synthesized
  source 1..22: mol_type = other DNA
tcactgccatagatgacccaac

SEQ ID NO: 157732 - DNA, 22 bp, synthetic construct
  misc_feature 1..22: note = chemically synthesized
  source 1..22: mol_type = other DNA
cactgccatagatgacccaact

SEQ ID NO: 157733 - DNA, 22 bp, synthetic construct
  misc_feature 1..22: note = chemically synthesized
  source 1..22: mol_type = other DNA
actgccatagatgacccaactt

SEQ ID NO: 157734 - DNA, 22 bp, synthetic construct
  misc_feature 1..22: note = chemically synthesized
  source 1..22: mol_type = other DNA
ccatagatgacccaacttgaga

SEQ ID NO: 157735 - DNA, 22 bp, synthetic construct
  misc_feature 1..22: note = chemically synthesized
  source 1..22: mol_type = other DNA
gagatttctattaatgccttat

SEQ ID NO: 157736 - DNA, 22 bp, synthetic construct
  misc_feature 1..22: note = chemically synthesized
  source 1..22: mol_type = other DNA
agatttctattaatgccttatc

SEQ ID NO: 157737 - DNA, 22 bp, synthetic construct
  misc_feature 1..22: note = chemically synthesized
  source 1..22: mol_type = other DNA
ctattaatgccttatctggcat

SEQ ID NO: 157738 - DNA, 22 bp, synthetic construct
  misc_feature 1..22: note = chemically synthesized
  source 1..22: mol_type = other DNA
tattaatgccttatctggcata

SEQ ID NO: 157739 - DNA, 22 bp, synthetic construct
  misc_feature 1..22: note = chemically synthesized
  source 1..22: mol_type = other DNA
ttaatgccttatctggcatata

SEQ ID NO: 157740 - DNA, 22 bp, synthetic construct
  misc_feature 1..22: note = chemically synthesized
  source 1..22: mol_type = other DNA
atgccttatctggcatataggc

SEQ ID NO: 157741 - DNA, 22 bp, synthetic construct
  misc_feature 1..22: note = chemically synthesized
  source 1..22: mol_type = other DNA
atctggcatataggctatgttg

SEQ ID NO: 157742 - DNA, 22 bp, synthetic construct
  misc_feature 1..22: note = chemically synthesized
  source 1..22: mol_type = other DNA
tctggcatataggctatgttgg

SEQ ID NO: 157743 - DNA, 22 bp, synthetic construct
  misc_feature 1..22: note = chemically synthesized
  source 1..22: mol_type = other DNA
gcatataggctatgttggaata

SEQ ID NO: 157744 - DNA, 22 bp, synthetic construct
  misc_feature 1..22: note = chemically synthesized
  source 1..22: mol_type = other DNA
tgttggaatacttttctgcatg

SEQ ID NO: 157745 - DNA, 22 bp, synthetic construct
  misc_feature 1..22: note = chemically synthesized
  source 1..22: mol_type = other DNA
gaatacttttctgcatgaccca

SEQ ID NO: 157746 - DNA, 22 bp, synthetic construct
  misc_feature 1..22: note = chemically synthesized
  source 1..22: mol_type = other DNA
ttctgcatgacccattaggttt

SEQ ID NO: 157747 - DNA, 22 bp, synthetic construct
  misc_feature 1..22: note = chemically synthesized
  source 1..22: mol_type = other DNA
tctgcatgacccattaggtttc

SEQ ID NO: 157748 - DNA, 22 bp, synthetic construct
  misc_feature 1..22: note = chemically synthesized
  source 1..22: mol_type = other DNA
ctgcatgacccattaggtttct

SEQ ID NO: 157749 - DNA, 22 bp, synthetic construct
  misc_feature 1..22: note = chemically synthesized
  source 1..22: mol_type = other DNA
tgcatgacccattaggtttctc

SEQ ID NO: 157750 - DNA, 22 bp, synthetic construct
  misc_feature 1..22: note = chemically synthesized
  source 1..22: mol_type = other DNA
catgacccattaggtttctctt

SEQ ID NO: 157751 - DNA, 22 bp, synthetic construct
  misc_feature 1..22: note = chemically synthesized
  source 1..22: mol_type = other DNA
ggtttctcttccactcactgtg

SEQ ID NO: 157752 - DNA, 22 bp, synthetic construct
  misc_feature 1..22: note = chemically synthesized
  source 1..22: mol_type = other DNA
ctcttccactcactgtggctta

SEQ ID NO: 157753 - DNA, 22 bp, synthetic construct
  misc_feature 1..22: note = chemically synthesized
  source 1..22: mol_type = other DNA
tcttccactcactgtggcttac

SEQ ID NO: 157754 - DNA, 22 bp, synthetic construct
  misc_feature 1..22: note = chemically synthesized
  source 1..22: mol_type = other DNA
ttccactcactgtggcttacct

SEQ ID NO: 157755 - DNA, 22 bp, synthetic construct
  misc_feature 1..22: note = chemically synthesized
  source 1..22: mol_type = other DNA
ccactcactgtggcttacctgt

SEQ ID NO: 157756 - DNA, 22 bp, synthetic construct
  misc_feature 1..22: note = chemically synthesized
  source 1..22: mol_type = other DNA
cactcactgtggcttacctgtg

SEQ ID NO: 157757 - DNA, 22 bp, synthetic construct
  misc_feature 1..22: note = chemically synthesized
  source 1..22: mol_type = other DNA
actgtggcttacctgtgccctt

SEQ ID NO: 157758 - DNA, 22 bp, synthetic construct
  misc_feature 1..22: note = chemically synthesized
  source 1..22: mol_type = other DNA
tggcttacctgtgcccttgttt

SEQ ID NO: 157759 - DNA, 22 bp, synthetic construct
  misc_feature 1..22: note = chemically synthesized
  source 1..22: mol_type = other DNA
acctgtgcccttgtttcagaaa

SEQ ID NO: 157760 - DNA, 22 bp, synthetic construct
  misc_feature 1..22: note = chemically synthesized
  source 1..22: mol_type = other DNA
cctgtgcccttgtttcagaaat

SEQ ID NO: 157761 - DNA, 22 bp, synthetic construct
  misc_feature 1..22: note = chemically synthesized
  source 1..22: mol_type = other DNA
tgcccttgtttcagaaataaat

SEQ ID NO: 157762 - DNA, 22 bp, synthetic construct
  misc_feature 1..22: note = chemically synthesized
  source 1..22: mol_type = other DNA
gtttcagaaataaattttttat

SEQ ID NO: 157763 - DNA, 22 bp, synthetic construct
  misc_feature 1..22: note = chemically synthesized
  source 1..22: mol_type = other DNA
tttcagaaataaattttttatc

SEQ ID NO: 157764 - DNA, 22 bp, synthetic construct
  misc_feature 1..22: note = chemically synthesized
  source 1..22: mol_type = other DNA
cagaaataaattttttatccct

SEQ ID NO: 157765 - DNA, 22 bp, synthetic construct
  misc_feature 1..22: note = chemically synthesized
  source 1..22: mol_type = other DNA
agaaataaattttttatccctt

SEQ ID NO: 157766 - DNA, 22 bp, synthetic construct
  misc_feature 1..22: note = chemically synthesized
  source 1..22: mol_type = other DNA
tttatccctttttctgaggaaa

SEQ ID NO: 157767 - DNA, 22 bp, synthetic construct
  misc_feature 1..22: note = chemically synthesized
  source 1..22: mol_type = other DNA
ttatccctttttctgaggaaat

SEQ ID NO: 157768 - DNA, 22 bp, synthetic construct
  misc_feature 1..22: note = chemically synthesized
  source 1..22: mol_type = other DNA
tatccctttttctgaggaaatg

SEQ ID NO: 157769 - DNA, 22 bp, synthetic construct
  misc_feature 1..22: note = chemically synthesized
  source 1..22: mol_type = other DNA
atccctttttctgaggaaatgt

SEQ ID NO: 157770 - DNA, 22 bp, synthetic construct
  misc_feature 1..22: note = chemically synthesized
  source 1..22: mol_type = other DNA
tccctttttctgaggaaatgtc

SEQ ID NO: 157771 - DNA, 22 bp, synthetic construct
  misc_feature 1..22: note = chemically synthesized
  source 1..22: mol_type = other DNA
tttctgaggaaatgtcttagat

SEQ ID NO: 157772 - DNA, 22 bp, synthetic construct
  misc_feature 1..22: note = chemically synthesized
  source 1..22: mol_type = other DNA
ttctgaggaaatgtcttagata

SEQ ID NO: 157773 - DNA, 22 bp, synthetic construct
  misc_feature 1..22: note = chemically synthesized
  source 1..22: mol_type = other DNA
tctgaggaaatgtcttagatat

SEQ ID NO: 157774 - DNA, 22 bp, synthetic construct
  misc_feature 1..22: note = chemically synthesized
  source 1..22: mol_type = other DNA
ctgaggaaatgtcttagatatg

SEQ ID NO: 157775 - DNA, 22 bp, synthetic construct
  misc_feature 1..22: note = chemically synthesized
  source 1..22: mol_type = other DNA
tgaggaaatgtcttagatatga

SEQ ID NO: 157776 - DNA, 22 bp, synthetic construct
  misc_feature 1..22: note = chemically synthesized
  source 1..22: mol_type = other DNA
aggaaatgtcttagatatgact

SEQ ID NO: 157777 - DNA, 22 bp, synthetic construct
  misc_feature 1..22: note = chemically synthesized
  source 1..22: mol_type = other DNA
agatatgactgttagctcagaa

SEQ ID NO: 157778 - DNA, 22 bp, synthetic construct
  misc_feature 1..22: note = chemically synthesized
  source 1..22: mol_type = other DNA
gatatgactgttagctcagaac

SEQ ID NO: 157779 - DNA, 22 bp, synthetic construct
  misc_feature 1..22: note = chemically synthesized
  source 1..22: mol_type = other DNA
ttagctcagaacttgatgtgca

SEQ ID NO: 157780 - DNA, 22 bp, synthetic construct
  misc_feature 1..22: note = chemically synthesized
  source 1..22: mol_type = other DNA
gctcagaacttgatgtgcaata

SEQ ID NO: 157781 - DNA, 22 bp, synthetic construct
  misc_feature 1..22: note = chemically synthesized
  source 1..22: mol_type = other DNA
agaacttgatgtgcaataactg

SEQ ID NO: 157782 - DNA, 22 bp, synthetic construct
  misc_feature 1..22: note = chemically synthesized
  source 1..22: mol_type = other DNA
gatgtgcaataactgagtagaa

SEQ ID NO: 157783 - DNA, 22 bp, synthetic construct
  misc_feature 1..22: note = chemically synthesized
  source 1..22: mol_type = other DNA
atgtgcaataactgagtagaaa

SEQ ID NO: 157784 - DNA, 22 bp, synthetic construct
  misc_feature 1..22: note = chemically synthesized
  source 1..22: mol_type = other DNA
agtagaaacttatatattccag

SEQ ID NO: 157785 - DNA, 22 bp, synthetic construct
  misc_feature 1..22: note = chemically synthesized
  source 1..22: mol_type = other DNA
atatattccagtctccatgtgc

SEQ ID NO: 157786 - DNA, 22 bp, synthetic construct
  misc_feature 1..22: note = chemically synthesized
  source 1..22: mol_type = other DNA
tatattccagtctccatgtgct

SEQ ID NO: 157787 - DNA, 22 bp, synthetic construct
  misc_feature 1..22: note = chemically synthesized
  source 1..22: mol_type = other DNA
cagtctccatgtgcttctcaat

SEQ ID NO: 157788 - DNA, 22 bp, synthetic construct
  misc_feature 1..22: note = chemically synthesized
  source 1..22: mol_type = other DNA
catgtgcttctcaatatcttca

SEQ ID NO: 157789 - DNA, 22 bp, synthetic construct
  misc_feature 1..22: note = chemically synthesized
  source 1..22: mol_type = other DNA
ctcaatatcttcagaggaagta

SEQ ID NO: 157790 - DNA, 22 bp, synthetic construct
  misc_feature 1..22: note = chemically synthesized
  source 1..22: mol_type = other DNA
tcaatatcttcagaggaagtat

SEQ ID NO: 157791 - DNA, 22 bp, synthetic construct
  misc_feature 1..22: note = chemically synthesized
  source 1..22: mol_type = other DNA
aatatcttcagaggaagtatca

SEQ ID NO: 157792 - DNA, 22 bp, synthetic construct
  misc_feature 1..22: note = chemically synthesized
  source 1..22: mol_type = other DNA
cagaggaagtatcaccatgacg

SEQ ID NO: 157793 - DNA, 22 bp, synthetic construct
  misc_feature 1..22: note = chemically synthesized
  source 1..22: mol_type = other DNA
agaggaagtatcaccatgacgt

SEQ ID NO: 157794 - DNA, 22 bp, synthetic construct
  misc_feature 1..22: note = chemically synthesized
  source 1..22: mol_type = other DNA
tcaaacgttccataacattcac

SEQ ID NO: 157795 - DNA, 22 bp, synthetic construct
  misc_feature 1..22: note = chemically synthesized
  source 1..22: mol_type = other DNA
caaacgttccataacattcaca

SEQ ID NO: 157796 - DNA, 22 bp, synthetic construct
  misc_feature 1..22: note = chemically synthesized
  source 1..22: mol_type = other DNA
aaacgttccataacattcacac

SEQ ID NO: 157797 - DNA, 22 bp, synthetic construct
  misc_feature 1..22: note = chemically synthesized
  source 1..22: mol_type = other DNA
cataacattcacacctacaaca

SEQ ID NO: 157798 - DNA, 22 bp, synthetic construct
  misc_feature 1..22: note = chemically synthesized
  source 1..22: mol_type = other DNA
acacctacaacattcactctcg

SEQ ID NO: 157799 - DNA, 22 bp, synthetic construct
  misc_feature 1..22: note = chemically synthesized
  source 1..22: mol_type = other DNA
caacattcactctcgttggcat

SEQ ID NO: 157800 - DNA, 22 bp, synthetic construct
  misc_feature 1..22: note = chemically synthesized
  source 1..22: mol_type = other DNA
actctcgttggcatcccgggac

SEQ ID NO: 157801 - DNA, 22 bp, synthetic construct
  misc_feature 1..22: note = chemically synthesized
  source 1..22: mol_type = other DNA
tcgttggcatcccgggactgga

SEQ ID NO: 157802 - DNA, 22 bp, synthetic construct
  misc_feature 1..22: note = chemically synthesized
  source 1..22: mol_type = other DNA
gttggcatcccgggactggagg

SEQ ID NO: 157803 - DNA, 22 bp, synthetic construct
  misc_feature 1..22: note = chemically synthesized
  source 1..22: mol_type = other DNA
gcatcccgggactggaggcaga

SEQ ID NO: 157804 - DNA, 22 bp, synthetic construct
  misc_feature 1..22: note = chemically synthesized
  source 1..22: mol_type = other DNA
gaggcagaacattatgtggata

SEQ ID NO: 157805 - DNA, 22 bp, synthetic construct
  misc_feature 1..22: note = chemically synthesized
  source 1..22: mol_type = other DNA
tgtggatatccatccccttctg

SEQ ID NO: 157806 - DNA, 22 bp, synthetic construct
  misc_feature 1..22: note = chemically synthesized
  source 1..22: mol_type = other DNA
ctgcctgatatacaccatcatc

SEQ ID NO: 157807 - DNA, 22 bp, synthetic construct
  misc_feature 1..22: note = chemically synthesized
  source 1..22: mol_type = other DNA
tgcctgatatacaccatcatct

SEQ ID NO: 157808 - DNA, 22 bp, synthetic construct
  misc_feature 1..22: note = chemically synthesized
  source 1..22: mol_type = other DNA
cctgatatacaccatcatcttt

SEQ ID NO: 157809 - DNA, 22 bp, synthetic construct
  misc_feature 1..22: note = chemically synthesized
  source 1..22: mol_type = other DNA
atatacaccatcatctttccgg

SEQ ID NO: 157810 - DNA, 22 bp, synthetic construct
  misc_feature 1..22: note = chemically synthesized
  source 1..22: mol_type = other DNA
tccgggaaatggcatcattctt

SEQ ID NO: 157811 - DNA, 22 bp, synthetic construct
  misc_feature 1..22: note = chemically synthesized
  source 1..22: mol_type = other DNA
ccgggaaatggcatcattcttc

SEQ ID NO: 157812 - DNA, 22 bp, synthetic construct
  misc_feature 1..22: note = chemically synthesized
  source 1..22: mol_type = other DNA
cgggaaatggcatcattcttca

SEQ ID NO: 157813 - DNA, 22 bp, synthetic construct
  misc_feature 1..22: note = chemically synthesized
  source 1..22: mol_type = other DNA
ttcacatcatccgaattgactc

SEQ ID NO: 157814 - DNA, 22 bp, synthetic construct
  misc_feature 1..22: note = chemically synthesized
  source 1..22: mol_type = other DNA
cacatcatccgaattgactctt

SEQ ID NO: 157815 - DNA, 22 bp, synthetic construct
  misc_feature 1..22: note = chemically synthesized
  source 1..22: mol_type = other DNA
acatcatccgaattgactcttc

SEQ ID NO: 157816 - DNA, 22 bp, synthetic construct
  misc_feature 1..22: note = chemically synthesized
  source 1..22: mol_type = other DNA
actcttccttgcaccaacccat

SEQ ID NO: 157817 - DNA, 22 bp, synthetic construct
  misc_feature 1..22: note = chemically synthesized
  source 1..22: mol_type = other DNA
ttccttgcaccaacccatgtac

SEQ ID NO: 157818 - DNA, 22 bp, synthetic construct
  misc_feature 1..22: note = chemically synthesized
  source 1..22: mol_type = other DNA
ccttgcaccaacccatgtacta

SEQ ID NO: 157819 - DNA, 22 bp, synthetic construct
  misc_feature 1..22: note = chemically synthesized
  source 1..22: mol_type = other DNA
cttgcaccaacccatgtactat

SEQ ID NO: 157820 - DNA, 22 bp, synthetic construct
  misc_feature 1..22: note = chemically synthesized
  source 1..22: mol_type = other DNA
gcaccaacccatgtactatttt

SEQ ID NO: 157821 - DNA, 22 bp, synthetic construct
  misc_feature 1..22: note = chemically synthesized
  source 1..22: mol_type = other DNA
caccaacccatgtactattttc

SEQ ID NO: 157822 - DNA, 22 bp, synthetic construct
  misc_feature 1..22: note = chemically synthesized
  source 1..22: mol_type = other DNA
ttttctggccatgccggccttt

SEQ ID NO: 157823 - DNA, 22 bp, synthetic construct
  misc_feature 1..22: note = chemically synthesized
  source 1..22: mol_type = other DNA
tctggccatgccggcctttgtt

SEQ ID NO: 157824 - DNA, 22 bp, synthetic construct
  misc_feature 1..22: note = chemically synthesized
  source 1..22: mol_type = other DNA
ctggccatgccggcctttgttg

SEQ ID NO: 157825 - DNA, 22 bp, synthetic construct
  misc_feature 1..22: note = chemically synthesized
  source 1..22: mol_type = other DNA
tggccatgccggcctttgttga

SEQ ID NO: 157826 - DNA, 22 bp, synthetic construct
  misc_feature 1..22: note = chemically synthesized
  source 1..22: mol_type = other DNA
gccatgccggcctttgttgaac

SEQ ID NO: 157827 - DNA, 22 bp, synthetic construct
  misc_feature 1..22: note = chemically synthesized
  source 1..22: mol_type = other DNA
tgttgaacttggtgtctctgct

SEQ ID NO: 157828 - DNA, 22 bp, synthetic construct
  misc_feature 1..22: note = chemically synthesized
  source 1..22: mol_type = other DNA
gttgaacttggtgtctctgctt

SEQ ID NO: 157829 - DNA, 22 bp, synthetic construct
  misc_feature 1..22: note = chemically synthesized
  source 1..22: mol_type = other DNA
ttgaacttggtgtctctgcttc

SEQ ID NO: 157830 - DNA, 22 bp, synthetic construct
  misc_feature 1..22: note = chemically synthesized
  source 1..22: mol_type = other DNA
aacttggtgtctctgcttccac

SEQ ID NO: 157831 - DNA, 22 bp, synthetic construct
  misc_feature 1..22: note = chemically synthesized
  source 1..22: mol_type = other DNA
ggtgtctctgcttccaccatgc

SEQ ID NO: 157832 - DNA, 22 bp, synthetic construct
  misc_feature 1..22: note = chemically synthesized
  source 1..22: mol_type = other DNA
gtgtctctgcttccaccatgcc

SEQ ID NO: 157833 - DNA, 22 bp, synthetic construct
  misc_feature 1..22: note = chemically synthesized
  source 1..22: mol_type = other DNA
tgcttccaccatgcccactgtg

SEQ ID NO: 157834 - DNA, 22 bp, synthetic construct
  misc_feature 1..22: note = chemically synthesized
  source 1..22: mol_type = other DNA
cttccaccatgcccactgtgtt

SEQ ID NO: 157835 - DNA, 22 bp, synthetic construct
  misc_feature 1..22: note = chemically synthesized
  source 1..22: mol_type = other DNA
ccaccatgcccactgtgttaag

SEQ ID NO: 157836 - DNA, 22 bp, synthetic construct
  misc_feature 1..22: note = chemically synthesized
  source 1..22: mol_type = other DNA
caccatgcccactgtgttaagc

SEQ ID NO: 157837 - DNA, 22 bp, synthetic construct
  misc_feature 1..22: note = chemically synthesized
  source 1..22: mol_type = other DNA
tgttaagcatattcctctttgg

SEQ ID NO: 157838 - DNA, 22 bp, synthetic construct
  misc_feature 1..22: note = chemically synthesized
  source 1..22: mol_type = other DNA
agcatattcctctttggcatta

SEQ ID NO: 157839 - DNA, 22 bp, synthetic construct
  misc_feature 1..22: note = chemically synthesized
  source 1..22: mol_type = other DNA
ctctttggcattaacgatgtca

SEQ ID NO: 157840 - DNA, 22 bp, synthetic construct
  misc_feature 1..22: note = chemically synthesized
  source 1..22: mol_type = other DNA
tttggcattaacgatgtcagtt

SEQ ID NO: 157841 - DNA, 22 bp, synthetic construct
  misc_feature 1..22: note = chemically synthesized
  source 1..22: mol_type = other DNA
tggcattaacgatgtcagtttt

SEQ ID NO: 157842 - DNA, 22 bp, synthetic construct
  misc_feature 1..22: note = chemically synthesized
  source 1..22: mol_type = other DNA
ggcattaacgatgtcagttttg

SEQ ID NO: 157843 - DNA, 22 bp, synthetic construct
  misc_feature 1..22: note = chemically synthesized
  source 1..22: mol_type = other DNA
gcattaacgatgtcagttttgg

SEQ ID NO: 157844 - DNA, 22 bp, synthetic construct
  misc_feature 1..22: note = chemically synthesized
  source 1..22: mol_type = other DNA
acgatgtcagttttggtggttg

SEQ ID NO: 157845 - DNA, 22 bp, synthetic construct
  misc_feature 1..22: note = chemically synthesized
  source 1..22: mol_type = other DNA
tggtggttgcctgctccagatg

SEQ ID NO: 157846 - DNA, 22 bp, synthetic construct
  misc_feature 1..22: note = chemically synthesized
  source 1..22: mol_type = other DNA
ggtggttgcctgctccagatgt

SEQ ID NO: 157847 - DNA, 22 bp, synthetic construct
  misc_feature 1..22: note = chemically synthesized
  source 1..22: mol_type = other DNA
gtggttgcctgctccagatgtt

SEQ ID NO: 157848 - DNA, 22 bp, synthetic construct
  misc_feature 1..22: note = chemically synthesized
  source 1..22: mol_type = other DNA
cctgctccagatgttttctatg

SEQ ID NO: 157849 - DNA, 22 bp, synthetic construct
  misc_feature 1..22: note = chemically synthesized
  source 1..22: mol_type = other DNA
ctccagatgttttctatgcact

SEQ ID NO: 157850 - DNA, 22 bp, synthetic construct
  misc_feature 1..22: note = chemically synthesized
  source 1..22: mol_type = other DNA
cagatgttttctatgcactctt

SEQ ID NO: 157851 - DNA, 22 bp, synthetic construct
  misc_feature 1..22: note = chemically synthesized
  source 1..22: mol_type = other DNA
tctatgcactctttcactctta

SEQ ID NO: 157852 - DNA, 22 bp, synthetic construct
  misc_feature 1..22: note = chemically synthesized
  source 1..22: mol_type = other DNA
ctatgcactctttcactcttat

SEQ ID NO: 157853 - DNA, 22 bp, synthetic construct
  misc_feature 1..22: note = chemically synthesized
  source 1..22: mol_type = other DNA
tatgcactctttcactcttatg

SEQ ID NO: 157854 - DNA, 22 bp, synthetic construct
  misc_feature 1..22: note = chemically synthesized
  source 1..22: mol_type = other DNA
tgcactctttcactcttatgga

SEQ ID NO: 157855 - DNA, 22 bp, synthetic construct
  misc_feature 1..22: note = chemically synthesized
  source 1..22: mol_type = other DNA
tttcactcttatggagtcaggt

SEQ ID NO: 157856 - DNA, 22 bp, synthetic construct
  misc_feature 1..22: note = chemically synthesized
  source 1..22: mol_type = other DNA
tcactcttatggagtcaggtgt

SEQ ID NO: 157857 - DNA, 22 bp, synthetic construct
  misc_feature 1..22: note = chemically synthesized
  source 1..22: mol_type = other DNA
cactcttatggagtcaggtgtc

SEQ ID NO: 157858 - DNA, 22 bp, synthetic construct
  misc_feature 1..22: note = chemically synthesized
  source 1..22: mol_type = other DNA
actcttatggagtcaggtgtcc

SEQ ID NO: 157859 - DNA, 22 bp, synthetic construct
  misc_feature 1..22: note = chemically synthesized
  source 1..22: mol_type = other DNA
ttatggagtcaggtgtccttct

SEQ ID NO: 157860 - DNA, 22 bp, synthetic construct
  misc_feature 1..22: note = chemically synthesized
  source 1..22: mol_type = other DNA
atggagtcaggtgtccttctgg

SEQ ID NO: 157861 - DNA, 22 bp, synthetic construct
  misc_feature 1..22: note = chemically synthesized
  source 1..22: mol_type = other DNA
tggagtcaggtgtccttctggc

SEQ ID NO: 157862 - DNA, 22 bp, synthetic construct
  misc_feature 1..22: note = chemically synthesized
  source 1..22: mol_type = other DNA
ctggcaatgtcagtggaccgct

SEQ ID NO: 157863 - DNA, 22 bp, synthetic construct
  misc_feature 1..22: note = chemically synthesized
  source 1..22: mol_type = other DNA
tggcaatgtcagtggaccgctt

SEQ ID NO: 157864 - DNA, 22 bp, synthetic construct
  misc_feature 1..22: note = chemically synthesized
  source 1..22: mol_type = other DNA
gcaatgtcagtggaccgctttg

SEQ ID NO: 157865 - DNA, 22 bp, synthetic construct
  misc_feature 1..22: note = chemically synthesized
  source 1..22: mol_type = other DNA
tgtggccatctacagcccactg

SEQ ID NO: 157866 - DNA, 22 bp, synthetic construct
  misc_feature 1..22: note = chemically synthesized
  source 1..22: mol_type = other DNA
gtggccatctacagcccactgc

SEQ ID NO: 157867 - DNA, 22 bp, synthetic construct
  misc_feature 1..22: note = chemically synthesized
  source 1..22: mol_type = other DNA
tggccatctacagcccactgcg

SEQ ID NO: 157868 - DNA, 22 bp, synthetic construct
  misc_feature 1..22: note = chemically synthesized
  source 1..22: mol_type = other DNA
cagcccactgcgctacacaacc

SEQ ID NO: 157869 - DNA, 22 bp, synthetic construct
  misc_feature 1..22: note = chemically synthesized
  source 1..22: mol_type = other DNA
cgctacacaaccattctgacaa

SEQ ID NO: 157870 - DNA, 22 bp, synthetic construct
  misc_feature 1..22: note = chemically synthesized
  source 1..22: mol_type = other DNA
cacaaccattctgacaattgcc

SEQ ID NO: 157871 - DNA, 22 bp, synthetic construct
  misc_feature 1..22: note = chemically synthesized
  source 1..22: mol_type = other DNA
tgacaattgcctgcatttctgg

SEQ ID NO: 157872 - DNA, 22 bp, synthetic construct
  misc_feature 1..22: note = chemically synthesized
  source 1..22: mol_type = other DNA
acaattgcctgcatttctggga

SEQ ID NO: 157873 - DNA, 22 bp, synthetic construct
  misc_feature 1..22: note = chemically synthesized
  source 1..22: mol_type = other DNA
cctgcatttctgggacgggtgc

SEQ ID NO: 157874 - DNA, 22 bp, synthetic construct
  misc_feature 1..22: note = chemically synthesized
  source 1..22: mol_type = other DNA
catttctgggacgggtgccgcc

SEQ ID NO: 157875 - DNA, 22 bp, synthetic construct
  misc_feature 1..22: note = chemically synthesized
  source 1..22: mol_type = other DNA
ctgggacgggtgccgccattgc

SEQ ID NO: 157876 - DNA, 22 bp, synthetic construct
  misc_feature 1..22: note = chemically synthesized
  source 1..22: mol_type = other DNA
tgggacgggtgccgccattgcc

SEQ ID NO: 157877 - DNA, 22 bp, synthetic construct
  misc_feature 1..22: note = chemically synthesized
  source 1..22: mol_type = other DNA
ggacgggtgccgccattgcctt

SEQ ID NO: 157878 - DNA, 22 bp, synthetic construct
  misc_feature 1..22: note = chemically synthesized
  source 1..22: mol_type = other DNA
ccttgcgcagtgtaatgcttat

SEQ ID NO: 157879 - DNA, 22 bp, synthetic construct
  misc_feature 1..22: note = chemically synthesized
  source 1..22: mol_type = other DNA
gcgcagtgtaatgcttatgctc

SEQ ID NO: 157880 - DNA, 22 bp, synthetic construct
  misc_feature 1..22: note = chemically synthesized
  source 1..22: mol_type = other DNA
cgcagtgtaatgcttatgctcc

SEQ ID NO: 157881 - DNA, 22 bp, synthetic construct
  misc_feature 1..22: note = chemically synthesized
  source 1..22: mol_type = other DNA
atgctcccactgctctttctcc

SEQ ID NO: 157882 - DNA, 22 bp, synthetic construct
  misc_feature 1..22: note = chemically synthesized
  source 1..22: mol_type = other DNA
tgctcccactgctctttctcct

SEQ ID NO: 157883 - DNA, 22 bp, synthetic construct
  misc_feature 1..22: note = chemically synthesized
  source 1..22: mol_type = other DNA
ccactgctctttctcctgaggc

SEQ ID NO: 157884 - DNA, 22 bp, synthetic construct
  misc_feature 1..22: note = chemically synthesized
  source 1..22: mol_type = other DNA
ctctttctcctgaggcgtctgc

SEQ ID NO: 157885 - DNA, 22 bp, synthetic construct
  misc_feature 1..22: note = chemically synthesized
  source 1..22: mol_type = other DNA
tttctcctgaggcgtctgcctt

SEQ ID NO: 157886 - DNA, 22 bp, synthetic construct
  misc_feature 1..22: note = chemically synthesized
  source 1..22: mol_type = other DNA
tctcctgaggcgtctgcctttc

SEQ ID NO: 157887 - DNA, 22 bp, synthetic construct
  misc_feature 1..22: note = chemically synthesized
  source 1..22: mol_type = other DNA
ctcctgaggcgtctgcctttct

SEQ ID NO: 157888 - DNA, 22 bp, synthetic construct
  misc_feature 1..22: note = chemically synthesized
  source 1..22: mol_type = other DNA
tcctgaggcgtctgcctttctg

SEQ ID NO: 157889 - DNA, 22 bp, synthetic construct
  misc_feature 1..22: note = chemically synthesized
  source 1..22: mol_type = other DNA
ctgaggcgtctgcctttctgtg

SEQ ID NO: 157890 - DNA, 22 bp, synthetic construct
  misc_feature 1..22: note = chemically synthesized
  source 1..22: mol_type = other DNA
aggcgtctgcctttctgtggcc

SEQ ID NO: 157891 - DNA, 22 bp, synthetic construct
  misc_feature 1..22: note = chemically synthesized
  source 1..22: mol_type = other DNA
cctttctgtggccacaataccc

SEQ ID NO: 157892 - DNA, 22 bp, synthetic construct
  misc_feature 1..22: note = chemically synthesized
  source 1..22: mol_type = other DNA
tctgtggccacaataccctcac

SEQ ID NO: 157893 - DNA, 22 bp, synthetic construct
  misc_feature 1..22: note = chemically synthesized
  source 1..22: mol_type = other DNA
ctgtggccacaataccctcaca

SEQ ID NO: 157894 - DNA, 22 bp, synthetic construct
  misc_feature 1..22: note = chemically synthesized
  source 1..22: mol_type = other DNA
tgtggccacaataccctcacac

SEQ ID NO: 157895 - DNA, 22 bp, synthetic construct
  misc_feature 1..22: note = chemically synthesized
  source 1..22: mol_type = other DNA
tggccacaataccctcacacac

SEQ ID NO: 157896 - DNA, 22 bp, synthetic construct
  misc_feature 1..22: note = chemically synthesized
  source 1..22: mol_type = other DNA
acacactcttattgcctccact

SEQ ID NO: 157897 - DNA, 22 bp, synthetic construct
  misc_feature 1..22: note = chemically synthesized
  source 1..22: mol_type = other DNA
ttattgcctccactcagatctg

SEQ ID NO: 157898 - DNA, 22 bp, synthetic construct
  misc_feature 1..22: note = chemically synthesized
  source 1..22: mol_type = other DNA
attgcctccactcagatctgat

SEQ ID NO: 157899 - DNA, 22 bp, synthetic construct
  misc_feature 1..22: note = chemically synthesized
  source 1..22: mol_type = other DNA
ttgcctccactcagatctgatc

SEQ ID NO: 157900 - DNA, 22 bp, synthetic construct
  misc_feature 1..22: note = chemically synthesized
  source 1..22: mol_type = other DNA
cctccactcagatctgatcaaa

SEQ ID NO: 157901 - DNA, 22 bp, synthetic construct
  misc_feature 1..22: note = chemically synthesized
  source 1..22: mol_type = other DNA
cactcagatctgatcaaattgc

SEQ ID NO: 157902 - DNA, 22 bp, synthetic construct
  misc_feature 1..22: note = chemically synthesized
  source 1..22: mol_type = other DNA
agatctgatcaaattgccctgt

SEQ ID NO: 157903 - DNA, 22 bp, synthetic construct
  misc_feature 1..22: note = chemically synthesized
  source 1..22: mol_type = other DNA
atcaaattgccctgtggagaca

SEQ ID NO: 157904 - DNA, 22 bp, synthetic construct
  misc_feature 1..22: note = chemically synthesized
  source 1..22: mol_type = other DNA
ccctgtggagacacacgtccca

SEQ ID NO: 157905 - DNA, 22 bp, synthetic construct
  misc_feature 1..22: note = chemically synthesized
  source 1..22: mol_type = other DNA
tggagacacacgtcccaatagc

SEQ ID NO: 157906 - DNA, 22 bp, synthetic construct
  misc_feature 1..22: note = chemically synthesized
  source 1..22: mol_type = other DNA
gctctatttgtcattaccttca

SEQ ID NO: 157907 - DNA, 22 bp, synthetic construct
  misc_feature 1..22: note = chemically synthesized
  source 1..22: mol_type = other DNA
tatttgtcattaccttcacatt

SEQ ID NO: 157908 - DNA, 22 bp, synthetic construct
  misc_feature 1..22: note = chemically synthesized
  source 1..22: mol_type = other DNA
tttgtcattaccttcacatttg

SEQ ID NO: 157909 - DNA, 22 bp, synthetic construct
  misc_feature 1..22: note = chemically synthesized
  source 1..22: mol_type = other DNA
gtcattaccttcacatttggac

SEQ ID NO: 157910 - DNA, 22 bp, synthetic construct
  misc_feature 1..22: note = chemically synthesized
  source 1..22: mol_type = other DNA
tcattaccttcacatttggact

SEQ ID NO: 157911 - DNA, 22 bp, synthetic construct
  misc_feature 1..22: note = chemically synthesized
  source 1..22: mol_type = other DNA
ccttcacatttggactggactt

SEQ ID NO: 157912 - DNA, 22 bp, synthetic construct
  misc_feature 1..22: note = chemically synthesized
  source 1..22: mol_type = other DNA
cacatttggactggacttattg

SEQ ID NO: 157913 - DNA, 22 bp, synthetic construct
  misc_feature 1..22: note = chemically synthesized
  source 1..22: mol_type = other DNA
acatttggactggacttattgt

SEQ ID NO: 157914 - DNA, 22 bp, synthetic construct
  misc_feature 1..22: note = chemically synthesized
  source 1..22: mol_type = other DNA
ggactggacttattgttcattg

SEQ ID NO: 157915 - DNA, 22 bp, synthetic construct
  misc_feature 1..22: note = chemically synthesized
  source 1..22: mol_type = other DNA
gactggacttattgttcattgt

SEQ ID NO: 157916 - DNA, 22 bp, synthetic construct
  misc_feature 1..22: note = chemically synthesized
  source 1..22: mol_type = other DNA
gacttattgttcattgtggttt

SEQ ID NO: 157917 - DNA, 22 bp, synthetic construct
  misc_feature 1..22: note = chemically synthesized
  source 1..22: mol_type = other DNA
attgttcattgtggtttcttat

SEQ ID NO: 157918 - DNA, 22 bp, synthetic construct
  misc_feature 1..22: note = chemically synthesized
  source 1..22: mol_type = other DNA
ttgttcattgtggtttcttatg

SEQ ID NO: 157919 - DNA, 22 bp, synthetic construct
  misc_feature 1..22: note = chemically synthesized
  source 1..22: mol_type = other DNA
ttcattgtggtttcttatgtgc

SEQ ID NO: 157920 - DNA, 22 bp, synthetic construct
  misc_feature 1..22: note = chemically synthesized
  source 1..22: mol_type = other DNA
attgtggtttcttatgtgctga

SEQ ID NO: 157921 - DNA, 22 bp, synthetic construct
  misc_feature 1..22: note = chemically synthesized
  source 1..22: mol_type = other DNA
tggtttcttatgtgctgattct

SEQ ID NO: 157922 - DNA, 22 bp, synthetic construct
  misc_feature 1..22: note = chemically synthesized
  source 1..22: mol_type = other DNA
cttatgtgctgattcttcatac

SEQ ID NO: 157923 - DNA, 22 bp, synthetic construct
  misc_feature 1..22: note = chemically synthesized
  source 1..22: mol_type = other DNA
ttatgtgctgattcttcataca

SEQ ID NO: 157924 - DNA, 22 bp, synthetic construct
  misc_feature 1..22: note = chemically synthesized
  source 1..22: mol_type = other DNA
atgtgctgattcttcatacagt

SEQ ID NO: 157925 - DNA, 22 bp, synthetic construct
  misc_feature 1..22: note = chemically synthesized
  source 1..22: mol_type = other DNA
tgtgctgattcttcatacagta

SEQ ID NO: 157926 - DNA, 22 bp, synthetic construct
  misc_feature 1..22: note = chemically synthesized
  source 1..22: mol_type = other DNA
attcttcatacagtactggaaa

SEQ ID NO: 157927 - DNA, 22 bp, synthetic construct
  misc_feature 1..22: note = chemically synthesized
  source 1..22: mol_type = other DNA
ttcatacagtactggaaatagc

SEQ ID NO: 157928 - DNA, 22 bp, synthetic construct
  misc_feature 1..22: note = chemically synthesized
  source 1..22: mol_type = other DNA
catacagtactggaaatagctt

SEQ ID NO: 157929 - DNA, 22 bp, synthetic construct
  misc_feature 1..22: note = chemically synthesized
  source 1..22: mol_type = other DNA
atacagtactggaaatagcttc

SEQ ID NO: 157930 - DNA, 22 bp, synthetic construct
  misc_feature 1..22: note = chemically synthesized
  source 1..22: mol_type = other DNA
gaaatagcttctggagcagggc

SEQ ID NO: 157931 - DNA, 22 bp, synthetic construct
  misc_feature 1..22: note = chemically synthesized
  source 1..22: mol_type = other DNA
ctggagcagggcggtggcaggc

SEQ ID NO: 157932 - DNA, 22 bp, synthetic construct
  misc_feature 1..22: note = chemically synthesized
  source 1..22: mol_type = other DNA
tggagcagggcggtggcaggca

SEQ ID NO: 157933 - DNA, 22 bp, synthetic construct
  misc_feature 1..22: note = chemically synthesized
  source 1..22: mol_type = other DNA
gagcagggcggtggcaggcact

SEQ ID NO: 157934 - DNA, 22 bp, synthetic construct
  misc_feature 1..22: note = chemically synthesized
  source 1..22: mol_type = other DNA
aacacatgtgtgtcgcacatat

SEQ ID NO: 157935 - DNA, 22 bp, synthetic construct
  misc_feature 1..22: note = chemically synthesized
  source 1..22: mol_type = other DNA
tgcttgtgtactatgtgcccat

SEQ ID NO: 157936 - DNA, 22 bp, synthetic construct
  misc_feature 1..22: note = chemically synthesized
  source 1..22: mol_type = other DNA
gtgtactatgtgcccatgatca

SEQ ID NO: 157937 - DNA, 22 bp, synthetic construct
  misc_feature 1..22: note = chemically synthesized
  source 1..22: mol_type = other DNA
tgtactatgtgcccatgatcag

SEQ ID NO: 157938 - DNA, 22 bp, synthetic construct
  misc_feature 1..22: note = chemically synthesized
  source 1..22: mol_type = other DNA
tgtgcccatgatcagcctctcc

SEQ ID NO: 157939 - DNA, 22 bp, synthetic construct
  misc_feature 1..22: note = chemically synthesized
  source 1..22: mol_type = other DNA
tccctgatgcaccgctttggac

SEQ ID NO: 157940 - DNA, 22 bp, synthetic construct
  misc_feature 1..22: note = chemically synthesized
  source 1..22: mol_type = other DNA
cctgatgcaccgctttggacgg

SEQ ID NO: 157941 - DNA, 22 bp, synthetic construct
  misc_feature 1..22: note = chemically synthesized
  source 1..22: mol_type = other DNA
atgcaccgctttggacggcatt

SEQ ID NO: 157942 - DNA, 22 bp, synthetic construct
  misc_feature 1..22: note = chemically synthesized
  source 1..22: mol_type = other DNA
tggacggcatttacctccactt

SEQ ID NO: 157943 - DNA, 22 bp, synthetic construct
  misc_feature 1..22: note = chemically synthesized
  source 1..22: mol_type = other DNA
ggacggcatttacctccacttt

SEQ ID NO: 157944 - DNA, 22 bp, synthetic construct
  misc_feature 1..22: note = chemically synthesized
  source 1..22: mol_type = other DNA
gacggcatttacctccactttt

SEQ ID NO: 157945 - DNA, 22 bp, synthetic construct
  misc_feature 1..22: note = chemically synthesized
  source 1..22: mol_type = other DNA
acctccacttttccagactgtc

SEQ ID NO: 157946 - DNA, 22 bp, synthetic construct
  misc_feature 1..22: note = chemically synthesized
  source 1..22: mol_type = other DNA
cctccacttttccagactgtca

SEQ ID NO: 157947 - DNA, 22 bp, synthetic construct
  misc_feature 1..22: note = chemically synthesized
  source 1..22: mol_type = other DNA
cacttttccagactgtcacggc

SEQ ID NO: 157948 - DNA, 22 bp, synthetic construct
  misc_feature 1..22: note = chemically synthesized
  source 1..22: mol_type = other DNA
ttccagactgtcacggccaatg

SEQ ID NO: 157949 - DNA, 22 bp, synthetic construct
  misc_feature 1..22: note = chemically synthesized
  source 1..22: mol_type = other DNA
tccagactgtcacggccaatgc

SEQ ID NO: 157950 - DNA, 22 bp, synthetic construct
  misc_feature 1..22: note = chemically synthesized
  source 1..22: mol_type = other DNA
ccagactgtcacggccaatgct

SEQ ID NO: 157951 - DNA, 22 bp, synthetic construct
  misc_feature 1..22: note = chemically synthesized
  source 1..22: mol_type = other DNA
cagactgtcacggccaatgctt

SEQ ID NO: 157952 - DNA, 22 bp, synthetic construct
  misc_feature 1..22: note = chemically synthesized
  source 1..22: mol_type = other DNA
tcacggccaatgcttacctctt

SEQ ID NO: 157953 - DNA, 22 bp, synthetic construct
  misc_feature 1..22: note = chemically synthesized
  source 1..22: mol_type = other DNA
acctcttttttcctcctgtggt

SEQ ID NO: 157954 - DNA, 22 bp, synthetic construct
  misc_feature 1..22: note = chemically synthesized
  source 1..22: mol_type = other DNA
cctcttttttcctcctgtggtc

SEQ ID NO: 157955 - DNA, 22 bp, synthetic construct
  misc_feature 1..22: note = chemically synthesized
  source 1..22: mol_type = other DNA
ttttttcctcctgtggtcaacc

SEQ ID NO: 157956 - DNA, 22 bp, synthetic construct
  misc_feature 1..22: note = chemically synthesized
  source 1..22: mol_type = other DNA
ttttcctcctgtggtcaacccc

SEQ ID NO: 157957 - DNA, 22 bp, synthetic construct
  misc_feature 1..22: note = chemically synthesized
  source 1..22: mol_type = other DNA
tttcctcctgtggtcaacccca

SEQ ID NO: 157958 - DNA, 22 bp, synthetic construct
  misc_feature 1..22: note = chemically synthesized
  source 1..22: mol_type = other DNA
ttcctcctgtggtcaaccccat

SEQ ID NO: 157959 - DNA, 22 bp, synthetic construct
  misc_feature 1..22: note = chemically synthesized
  source 1..22: mol_type = other DNA
tcctcctgtggtcaaccccatt

SEQ ID NO: 157960 - DNA, 22 bp, synthetic construct
  misc_feature 1..22: note = chemically synthesized
  source 1..22: mol_type = other DNA
cctcctgtggtcaaccccattg

SEQ ID NO: 157961 - DNA, 22 bp, synthetic construct
  misc_feature 1..22: note = chemically synthesized
  source 1..22: mol_type = other DNA
ctcctgtggtcaaccccattgt

SEQ ID NO: 157962 - DNA, 22 bp, synthetic construct
  misc_feature 1..22: note = chemically synthesized
  source 1..22: mol_type = other DNA
ctgtggtcaaccccattgtcta

SEQ ID NO: 157963 - DNA, 22 bp, synthetic construct
  misc_feature 1..22: note = chemically synthesized
  source 1..22: mol_type = other DNA
tggtcaaccccattgtctatag

SEQ ID NO: 157964 - DNA, 22 bp, synthetic construct
  misc_feature 1..22: note = chemically synthesized
  source 1..22: mol_type = other DNA
tctatagtatcaaaatcaaaga

SEQ ID NO: 157965 - DNA, 22 bp, synthetic construct
  misc_feature 1..22: note = chemically synthesized
  source 1..22: mol_type = other DNA
tagtatcaaaatcaaagaaatt

SEQ ID NO: 157966 - DNA, 22 bp, synthetic construct
  misc_feature 1..22: note = chemically synthesized
  source 1..22: mol_type = other DNA
gcaacagcgttgttcttacact

SEQ ID NO: 157967 - DNA, 22 bp, synthetic construct
  misc_feature 1..22: note = chemically synthesized
  source 1..22: mol_type = other DNA
ttcttacactatccaggaagag

SEQ ID NO: 157968 - DNA, 22 bp, synthetic construct
  misc_feature 1..22: note = chemically synthesized
  source 1..22: mol_type = other DNA
ttacactatccaggaagagggg

SEQ ID NO: 157969 - DNA, 22 bp, synthetic construct
  misc_feature 1..22: note = chemically synthesized
  source 1..22: mol_type = other DNA
acactatccaggaagaggggtg

SEQ ID NO: 157970 - DNA, 22 bp, synthetic construct
  misc_feature 1..22: note = chemically synthesized
  source 1..22: mol_type = other DNA
cactatccaggaagaggggtga

SEQ ID NO: 157971 - DNA, 22 bp, synthetic construct
  misc_feature 1..22: note = chemically synthesized
  source 1..22: mol_type = other DNA
tccaggaagaggggtgagttct

SEQ ID NO: 157972 - DNA, 22 bp, synthetic construct
  misc_feature 1..22: note = chemically synthesized
  source 1..22: mol_type = other DNA
taatggagactgaagataccct

SEQ ID NO: 157973 - DNA, 22 bp, synthetic construct
  misc_feature 1..22: note = chemically synthesized
  source 1..22: mol_type = other DNA
atggagactgaagataccctga

SEQ ID NO: 157974 - DNA, 22 bp, synthetic construct
  misc_feature 1..22: note = chemically synthesized
  source 1..22: mol_type = other DNA
aagataccctgacagcacaggc

SEQ ID NO: 157975 - DNA, 22 bp, synthetic construct
  misc_feature 1..22: note = chemically synthesized
  source 1..22: mol_type = other DNA
acagcacaggcacttagatcag

SEQ ID NO: 157976 - DNA, 22 bp, synthetic construct
  misc_feature 1..22: note = chemically synthesized
  source 1..22: mol_type = other DNA
agatcaggctttattacctgaa

SEQ ID NO: 157977 - DNA, 22 bp, synthetic construct
  misc_feature 1..22: note = chemically synthesized
  source 1..22: mol_type = other DNA
gatcaggctttattacctgaat

SEQ ID NO: 157978 - DNA, 22 bp, synthetic construct
  misc_feature 1..22: note = chemically synthesized
  source 1..22: mol_type = other DNA
tattacctgaatattagctttg

SEQ ID NO: 157979 - DNA, 22 bp, synthetic construct
  misc_feature 1..22: note = chemically synthesized
  source 1..22: mol_type = other DNA
attacctgaatattagctttgc

SEQ ID NO: 157980 - DNA, 22 bp, synthetic construct
  misc_feature 1..22: note = chemically synthesized
  source 1..22: mol_type = other DNA
ttacctgaatattagctttgca

SEQ ID NO: 157981 - DNA, 22 bp, synthetic construct
  misc_feature 1..22: note = chemically synthesized
  source 1..22: mol_type = other DNA
cctgaatattagctttgcaaat

SEQ ID NO: 157982 - DNA, 22 bp, synthetic construct
  misc_feature 1..22: note = chemically synthesized
  source 1..22: mol_type = other DNA
aatattagctttgcaaatatga

SEQ ID NO: 157983 - DNA, 22 bp, synthetic construct
  misc_feature 1..22: note = chemically synthesized
  source 1..22: mol_type = other DNA
gctttgcaaatatgaaaaattc

SEQ ID NO: 157984 - DNA, 22 bp, synthetic construct
  misc_feature 1..22: note = chemically synthesized
  source 1..22: mol_type = other DNA
tgcaaatatgaaaaattccatg

SEQ ID NO: 157985 - DNA, 22 bp, synthetic construct
  misc_feature 1..22: note = chemically synthesized
  source 1..22: mol_type = other DNA
gcaaatatgaaaaattccatgg

SEQ ID NO: 157986 - DNA, 22 bp, synthetic construct
  misc_feature 1..22: note = chemically synthesized
  source 1..22: mol_type = other DNA
caaatatgaaaaattccatggc

SEQ ID NO: 157987 - DNA, 22 bp, synthetic construct
  misc_feature 1..22: note = chemically synthesized
  source 1..22: mol_type = other DNA
catggcttattattgcttgtta

SEQ ID NO: 157988 - DNA, 22 bp, synthetic construct
  misc_feature 1..22: note = chemically synthesized
  source 1..22: mol_type = other DNA
attattgcttgttaatgagctt

SEQ ID NO: 157989 - DNA, 22 bp, synthetic construct
  misc_feature 1..22: note = chemically synthesized
  source 1..22: mol_type = other DNA
ttattgcttgttaatgagcttt

SEQ ID NO: 157990 - DNA, 22 bp, synthetic construct
  misc_feature 1..22: note = chemically synthesized
  source 1..22: mol_type = other DNA
ttgcttgttaatgagctttaac

SEQ ID NO: 157991 - DNA, 22 bp, synthetic construct
  misc_feature 1..22: note = chemically synthesized
  source 1..22: mol_type = other DNA
cttgttaatgagctttaacatt

SEQ ID NO: 157992 - DNA, 22 bp, synthetic construct
  misc_feature 1..22: note = chemically synthesized
  source 1..22: mol_type = other DNA
gttaatgagctttaacattttg

SEQ ID NO: 157993 - DNA, 22 bp, synthetic construct
  misc_feature 1..22: note = chemically synthesized
  source 1..22: mol_type = other DNA
ttaatgagctttaacattttgt

SEQ ID NO: 157994 - DNA, 22 bp, synthetic construct
  misc_feature 1..22: note = chemically synthesized
  source 1..22: mol_type = other DNA
atgagctttaacattttgtaga

SEQ ID NO: 157995 - DNA, 22 bp, synthetic construct
  misc_feature 1..22: note = chemically synthesized
  source 1..22: mol_type = other DNA
taacattttgtagatgaagaaa

SEQ ID NO: 157996 - DNA, 22 bp, synthetic construct
  misc_feature 1..22: note = chemically synthesized
  source 1..22: mol_type = other DNA
aacattttgtagatgaagaaaa

SEQ ID NO: 157997 - DNA, 22 bp, synthetic construct
  misc_feature 1..22: note = chemically synthesized
  source 1..22: mol_type = other DNA
acattttgtagatgaagaaaaa

SEQ ID NO: 157998 - DNA, 22 bp, synthetic construct
  misc_feature 1..22: note = chemically synthesized
  source 1..22: mol_type = other DNA
tgtagatgaagaaaaaaaacag

SEQ ID NO: 157999 - DNA, 22 bp, synthetic construct
  misc_feature 1..22: note = chemically synthesized
  source 1..22: mol_type = other DNA
gtagatgaagaaaaaaaacagt

SEQ ID NO: 158000 - DNA, 22 bp, synthetic construct
  misc_feature 1..22: note = chemically synthesized
  source 1..22: mol_type = other DNA
tagatgaagaaaaaaaacagtt

SEQ ID NO: 158001 - DNA, 22 bp, synthetic construct
  misc_feature 1..22: note = chemically synthesized
  source 1..22: mol_type = other DNA
tatatatttccctgagaatagg

SEQ ID NO: 158002 - DNA, 22 bp, synthetic construct
  misc_feature 1..22: note = chemically synthesized
  source 1..22: mol_type = other DNA
atatatttccctgagaatagga

SEQ ID NO: 158003 - DNA, 22 bp, synthetic construct
  misc_feature 1..22: note = chemically synthesized
  source 1..22: mol_type = other DNA
tatatttccctgagaataggaa

SEQ ID NO: 158004 - DNA, 22 bp, synthetic construct
  misc_feature 1..22: note = chemically synthesized
  source 1..22: mol_type = other DNA
ccctgagaataggaaatggcat

SEQ ID NO: 158005 - DNA, 22 bp, synthetic construct
  misc_feature 1..22: note = chemically synthesized
  source 1..22: mol_type = other DNA
cctgagaataggaaatggcatt

SEQ ID NO: 158006 - DNA, 22 bp, synthetic construct
  misc_feature 1..22: note = chemically synthesized
  source 1..22: mol_type = other DNA
agaataggaaatggcattactc

SEQ ID NO: 158007 - DNA, 22 bp, synthetic construct
  misc_feature 1..22: note = chemically synthesized
  source 1..22: mol_type = other DNA
ctctgaaataaaattgtgggag

SEQ ID NO: 158008 - DNA, 22 bp, synthetic construct
  misc_feature 1..22: note = chemically synthesized
  source 1..22: mol_type = other DNA
tgaaataaaattgtgggaggag

SEQ ID NO: 158009 - DNA, 22 bp, synthetic construct
  misc_feature 1..22: note = chemically synthesized
  source 1..22: mol_type = other DNA
aaataaaattgtgggaggaggc

SEQ ID NO: 158010 - DNA, 22 bp, synthetic construct
  misc_feature 1..22: note = chemically synthesized
  source 1..22: mol_type = other DNA
tgggaggaggcatagaacacag

SEQ ID NO: 158011 - DNA, 22 bp, synthetic construct
  misc_feature 1..22: note = chemically synthesized
  source 1..22: mol_type = other DNA
tgtcctggtgatgacacacttt

SEQ ID NO: 158012 - DNA, 22 bp, synthetic construct
  misc_feature 1..22: note = chemically synthesized
  source 1..22: mol_type = other DNA
gtcctggtgatgacacactttg

SEQ ID NO: 158013 - DNA, 22 bp, synthetic construct
  misc_feature 1..22: note = chemically synthesized
  source 1..22: mol_type = other DNA
tcctggtgatgacacactttgt

SEQ ID NO: 158014 - DNA, 22 bp, synthetic construct
  misc_feature 1..22: note = chemically synthesized
  source 1..22: mol_type = other DNA
gtgatgacacactttgtgtgct

SEQ ID NO: 158015 - DNA, 22 bp, synthetic construct
  misc_feature 1..22: note = chemically synthesized
  source 1..22: mol_type = other DNA
tgtgtgctgaatccttgaatac

SEQ ID NO: 158016 - DNA, 22 bp, synthetic construct
  misc_feature 1..22: note = chemically synthesized
  source 1..22: mol_type = other DNA
gtgtgctgaatccttgaatact

SEQ ID NO: 158017 - DNA, 22 bp, synthetic construct
  misc_feature 1..22: note = chemically synthesized
  source 1..22: mol_type = other DNA
tgtgctgaatccttgaatactc

SEQ ID NO: 158018 - DNA, 22 bp, synthetic construct
  misc_feature 1..22: note = chemically synthesized
  source 1..22: mol_type = other DNA
aatccttgaatactcaattcag

SEQ ID NO: 158019 - DNA, 22 bp, synthetic construct
  misc_feature 1..22: note = chemically synthesized
  source 1..22: mol_type = other DNA
gaatactcaattcagtgacatt

SEQ ID NO: 158020 - DNA, 22 bp, synthetic construct
  misc_feature 1..22: note = chemically synthesized
  source 1..22: mol_type = other DNA
aatactcaattcagtgacattt

SEQ ID NO: 158021 - DNA, 22 bp, synthetic construct
  misc_feature 1..22: note = chemically synthesized
  source 1..22: mol_type = other DNA
aattcagtgacatttggttctg

SEQ ID NO: 158022 - DNA, 22 bp, synthetic construct
  misc_feature 1..22: note = chemically synthesized
  source 1..22: mol_type = other DNA
agtgacatttggttctgggaat

SEQ ID NO: 158023 - DNA, 22 bp, synthetic construct
  misc_feature 1..22: note = chemically synthesized
  source 1..22: mol_type = other DNA
ggttctgggaatatgtagaaag

SEQ ID NO: 158024 - DNA, 22 bp, synthetic construct
  misc_feature 1..22: note = chemically synthesized
  source 1..22: mol_type = other DNA
gttctgggaatatgtagaaaga

SEQ ID NO: 158025 - DNA, 22 bp, synthetic construct
  misc_feature 1..22: note = chemically synthesized
  source 1..22: mol_type = other DNA
tgggaatatgtagaaagagtct

SEQ ID NO: 158026 - DNA, 22 bp, synthetic construct
  misc_feature 1..22: note = chemically synthesized
  source 1..22: mol_type = other DNA
ggaatatgtagaaagagtcttg

SEQ ID NO: 158027 - DNA, 22 bp, synthetic construct
  misc_feature 1..22: note = chemically synthesized
  source 1..22: mol_type = other DNA
ggggaggtttaagtttctggtt

SEQ ID NO: 158028 - DNA, 22 bp, synthetic construct
  misc_feature 1..22: note = chemically synthesized
  source 1..22: mol_type = other DNA
gggaggtttaagtttctggtta

SEQ ID NO: 158029 - DNA, 22 bp, synthetic construct
  misc_feature 1..22: note = chemically synthesized
  source 1..22: mol_type = other DNA
aagtttctggttatattaaaat

SEQ ID NO: 158030 - DNA, 22 bp, synthetic construct
  misc_feature 1..22: note = chemically synthesized
  source 1..22: mol_type = other DNA
agtttctggttatattaaaatt

SEQ ID NO: 158031 - DNA, 22 bp, synthetic construct
  misc_feature 1..22: note = chemically synthesized
  source 1..22: mol_type = other DNA
ctggttatattaaaattagtga

SEQ ID NO: 158032 - DNA, 22 bp, synthetic construct
  misc_feature 1..22: note = chemically synthesized
  source 1..22: mol_type = other DNA
tggttatattaaaattagtgat

SEQ ID NO: 158033 - DNA, 22 bp, synthetic construct
  misc_feature 1..22: note = chemically synthesized
  source 1..22: mol_type = other DNA
gttatattaaaattagtgatac

SEQ ID NO: 158034 - DNA, 22 bp, synthetic construct
  misc_feature 1..22: note = chemically synthesized
  source 1..22: mol_type = other DNA
tattaaaattagtgatacatac

SEQ ID NO: 158035 - DNA, 22 bp, synthetic construct
  misc_feature 1..22: note = chemically synthesized
  source 1..22: mol_type = other DNA
aaattagtgatacatacttgtg

SEQ ID NO: 158036 - DNA, 22 bp, synthetic construct
  misc_feature 1..22: note = chemically synthesized
  source 1..22: mol_type = other DNA
gtgatacatacttgtgaaggaa

SEQ ID NO: 158037 - DNA, 22 bp, synthetic construct
  misc_feature 1..22: note = chemically synthesized
  source 1..22: mol_type = other DNA
gtgaaggaaaataatcaggaca

SEQ ID NO: 158038 - DNA, 22 bp, synthetic construct
  misc_feature 1..22: note = chemically synthesized
  source 1..22: mol_type = other DNA
tgaaggaaaataatcaggacac

SEQ ID NO: 158039 - DNA, 22 bp, synthetic construct
  misc_feature 1..22: note = chemically synthesized
  source 1..22: mol_type = other DNA
tattattttgtttgtatagttt

SEQ ID NO: 158040 - DNA, 22 bp, synthetic construct
  misc_feature 1..22: note = chemically synthesized
  source 1..22: mol_type = other DNA
ttttgtttgtatagtttcagaa

SEQ ID NO: 158041 - DNA, 22 bp, synthetic construct
  misc_feature 1..22: note = chemically synthesized
  source 1..22: mol_type = other DNA
tgtttgtatagtttcagaacat

SEQ ID NO: 158042 - DNA, 22 bp, synthetic construct
  misc_feature 1..22: note = chemically synthesized
  source 1..22: mol_type = other DNA
gtttgtatagtttcagaacatg

SEQ ID NO: 158043 - DNA, 22 bp, synthetic construct
  misc_feature 1..22: note = chemically synthesized
  source 1..22: mol_type = other DNA
tttgtatagtttcagaacatgt

SEQ ID NO: 158044 - DNA, 22 bp, synthetic construct
  misc_feature 1..22: note = chemically synthesized
  source 1..22: mol_type = other DNA
gtatagtttcagaacatgtaca

SEQ ID NO: 158045 - DNA, 22 bp, synthetic construct
  misc_feature 1..22: note = chemically synthesized
  source 1..22: mol_type = other DNA
tatagtttcagaacatgtacat

SEQ ID NO: 158046 - DNA, 22 bp, synthetic construct
  misc_feature 1..22: note = chemically synthesized
  source 1..22: mol_type = other DNA
cagaacatgtacatctaattta

SEQ ID NO: 158047 - DNA, 22 bp, synthetic construct
  misc_feature 1..22: note = chemically synthesized
  source 1..22: mol_type = other DNA
agaacatgtacatctaatttaa

SEQ ID NO: 158048 - DNA, 22 bp, synthetic construct
  misc_feature 1..22: note = chemically synthesized
  source 1..22: mol_type = other DNA
atttaatgtcaaaaaatcagaa

SEQ ID NO: 158049 - DNA, 22 bp, synthetic construct
  misc_feature 1..22: note = chemically synthesized
  source 1..22: mol_type = other DNA
aatgtcaaaaaatcagaaccct

SEQ ID NO: 158050 - DNA, 22 bp, synthetic construct
  misc_feature 1..22: note = chemically synthesized
  source 1..22: mol_type = other DNA
atgtcaaaaaatcagaaccctg

SEQ ID NO: 158051 - DNA, 22 bp, synthetic construct
  misc_feature 1..22: note = chemically synthesized
  source 1..22: mol_type = other DNA
cttacctctgatggatataaag

SEQ ID NO: 158052 - DNA, 22 bp, synthetic construct
  misc_feature 1..22: note = chemically synthesized
  source 1..22: mol_type = other DNA
acctctgatggatataaagatg

SEQ ID NO: 158053 - DNA, 22 bp, synthetic construct
  misc_feature 1..22: note = chemically synthesized
  source 1..22: mol_type = other DNA
cctctgatggatataaagatgg

SEQ ID NO: 158054 - DNA, 22 bp, synthetic construct
  misc_feature 1..22: note = chemically synthesized
  source 1..22: mol_type = other DNA
tgatggatataaagatggaaga

SEQ ID NO: 158055 - DNA, 22 bp, synthetic construct
  misc_feature 1..22: note = chemically synthesized
  source 1..22: mol_type = other DNA
atggatataaagatggaagaat

SEQ ID NO: 158056 - DNA, 22 bp, synthetic construct
  misc_feature 1..22: note = chemically synthesized
  source 1..22: mol_type = other DNA
ctggggagatggaaatattttg

SEQ ID NO: 158057 - DNA, 22 bp, synthetic construct
  misc_feature 1..22: note = chemically synthesized
  source 1..22: mol_type = other DNA
tggggagatggaaatattttgt

SEQ ID NO: 158058 - DNA, 22 bp, synthetic construct
  misc_feature 1..22: note = chemically synthesized
  source 1..22: mol_type = other DNA
gggagatggaaatattttgttg

SEQ ID NO: 158059 - DNA, 22 bp, synthetic construct
  misc_feature 1..22: note = chemically synthesized
  source 1..22: mol_type = other DNA
tgttgtgttagggatgtggtga

SEQ ID NO: 158060 - DNA, 22 bp, synthetic construct
  misc_feature 1..22: note = chemically synthesized
  source 1..22: mol_type = other DNA
gttgtgttagggatgtggtgac

SEQ ID NO: 158061 - DNA, 22 bp, synthetic construct
  misc_feature 1..22: note = chemically synthesized
  source 1..22: mol_type = other DNA
ttgtgttagggatgtggtgaca

SEQ ID NO: 158062 - DNA, 22 bp, synthetic construct
  misc_feature 1..22: note = chemically synthesized
  source 1..22: mol_type = other DNA
tgttagggatgtggtgacattg

SEQ ID NO: 158063 - DNA, 22 bp, synthetic construct
  misc_feature 1..22: note = chemically synthesized
  source 1..22: mol_type = other DNA
gggatgtggtgacattgttttg

SEQ ID NO: 158064 - DNA, 22 bp, synthetic construct
  misc_feature 1..22: note = chemically synthesized
  source 1..22: mol_type = other DNA
ttttgtcaatttgtcaaaacgg

SEQ ID NO: 158065 - DNA, 22 bp, synthetic construct
  misc_feature 1..22: note = chemically synthesized
  source 1..22: mol_type = other DNA
tgtcaatttgtcaaaacggtac

SEQ ID NO: 158066 - DNA, 22 bp, synthetic construct
  misc_feature 1..22: note = chemically synthesized
  source 1..22: mol_type = other DNA
gtcaatttgtcaaaacggtaca

SEQ ID NO: 158067 - DNA, 22 bp, synthetic construct
  misc_feature 1..22: note = chemically synthesized
  source 1..22: mol_type = other DNA
tcaatttgtcaaaacggtacag

SEQ ID NO: 158068 - DNA, 22 bp, synthetic construct
  misc_feature 1..22: note = chemically synthesized
  source 1..22: mol_type = other DNA
gtcaaaacggtacagctaagat

SEQ ID NO: 158069 - DNA, 22 bp, synthetic construct
  misc_feature 1..22: note = chemically synthesized
  source 1..22: mol_type = other DNA
tcaaaacggtacagctaagatt

SEQ ID NO: 158070 - DNA, 22 bp, synthetic construct
  misc_feature 1..22: note = chemically synthesized
  source 1..22: mol_type = other DNA
agatttgcacatttctaggtac

SEQ ID NO: 158071 - DNA, 22 bp, synthetic construct
  misc_feature 1..22: note = chemically synthesized
  source 1..22: mol_type = other DNA
gcacatttctaggtacatcaat

SEQ ID NO: 158072 - DNA, 22 bp, synthetic construct
  misc_feature 1..22: note = chemically synthesized
  source 1..22: mol_type = other DNA
cacatttctaggtacatcaatt

SEQ ID NO: 158073 - DNA, 22 bp, synthetic construct
  misc_feature 1..22: note = chemically synthesized
  source 1..22: mol_type = other DNA
ctaggtacatcaattttacatc

SEQ ID NO: 158074 - DNA, 22 bp, synthetic construct
  misc_feature 1..22: note = chemically synthesized
  source 1..22: mol_type = other DNA
taggtacatcaattttacatca

SEQ ID NO: 158075 - DNA, 22 bp, synthetic construct
  misc_feature 1..22: note = chemically synthesized
  source 1..22: mol_type = other DNA
ggtacatcaattttacatcaaa

SEQ ID NO: 158076 - DNA, 22 bp, synthetic construct
  misc_feature 1..22: note = chemically synthesized
  source 1..22: mol_type = other DNA
tacatcaaaacttctgaatgat

SEQ ID NO: 158077 - DNA, 22 bp, synthetic construct
  misc_feature 1..22: note = chemically synthesized
  source 1..22: mol_type = other DNA
acatcaaaacttctgaatgata

SEQ ID NO: 158078 - DNA, 22 bp, synthetic construct
  misc_feature 1..22: note = chemically synthesized
  source 1..22: mol_type = other DNA
catcaaaacttctgaatgataa

SEQ ID NO: 158079 - DNA, 22 bp, synthetic construct
  misc_feature 1..22: note = chemically synthesized
  source 1..22: mol_type = other DNA
ctgaatgataataataacaaaa

SEQ ID NO: 158080 - DNA, 22 bp, synthetic construct
  misc_feature 1..22: note = chemically synthesized
  source 1..22: mol_type = other DNA
tgaatgataataataacaaaaa

SEQ ID NO: 158081 - DNA, 22 bp, synthetic construct
  misc_feature 1..22: note = chemically synthesized
  source 1..22: mol_type = other DNA
aatgataataataacaaaaagg

SEQ ID NO: 158082 - DNA, 22 bp, synthetic construct
  misc_feature 1..22: note = chemically synthesized
  source 1..22: mol_type = other DNA
gatttcatagtgaatacaagtg

SEQ ID NO: 158083 - DNA, 22 bp, synthetic construct
  misc_feature 1..22: note = chemically synthesized
  source 1..22: mol_type = other DNA
catagtgaatacaagtgtggaa

SEQ ID NO: 158084 - DNA, 22 bp, synthetic construct
  misc_feature 1..22: note = chemically synthesized
  source 1..22: mol_type = other DNA
atagtgaatacaagtgtggaaa

SEQ ID NO: 158085 - DNA, 22 bp, synthetic construct
  misc_feature 1..22: note = chemically synthesized
  source 1..22: mol_type = other DNA
ataattgttgaagttgtgtcat

SEQ ID NO: 158086 - DNA, 22 bp, synthetic construct
  misc_feature 1..22: note = chemically synthesized
  source 1..22: mol_type = other DNA
ttgaagttgtgtcatgggtgcc

SEQ ID NO: 158087 - DNA, 22 bp, synthetic construct
  misc_feature 1..22: note = chemically synthesized
  source 1..22: mol_type = other DNA
aagttgtgtcatgggtgcctgg

SEQ ID NO: 158088 - DNA, 22 bp, synthetic construct
  misc_feature 1..22: note = chemically synthesized
  source 1..22: mol_type = other DNA
tgtcatgggtgcctggaaatta

SEQ ID NO: 158089 - DNA, 22 bp, synthetic construct
  misc_feature 1..22: note = chemically synthesized
  source 1..22: mol_type = other DNA
gaaattaattataatattctgt

SEQ ID NO: 158090 - DNA, 22 bp, synthetic construct
  misc_feature 1..22: note = chemically synthesized
  source 1..22: mol_type = other DNA
attataatattctgtttacttt

SEQ ID NO: 158091 - DNA, 22 bp, synthetic construct
  misc_feature 1..22: note = chemically synthesized
  source 1..22: mol_type = other DNA
taatattctgtttactttgtgt

SEQ ID NO: 158092 - DNA, 22 bp, synthetic construct
  misc_feature 1..22: note = chemically synthesized
  source 1..22: mol_type = other DNA
tgtttactttgtgtagtttaca

SEQ ID NO: 158093 - DNA, 22 bp, synthetic construct
  misc_feature 1..22: note = chemically synthesized
  source 1..22: mol_type = other DNA
tttactttgtgtagtttacaat

SEQ ID NO: 158094 - DNA, 22 bp, synthetic construct
  misc_feature 1..22: note = chemically synthesized
  source 1..22: mol_type = other DNA
actttgtgtagtttacaatttc

SEQ ID NO: 158095 - DNA, 22 bp, synthetic construct
  misc_feature 1..22: note = chemically synthesized
  source 1..22: mol_type = other DNA
ctttgtgtagtttacaatttct

SEQ ID NO: 158096 - DNA, 22 bp, synthetic construct
  misc_feature 1..22: note = chemically synthesized
  source 1..22: mol_type = other DNA
tgtgtagtttacaatttctgta

SEQ ID NO: 158097 - DNA, 22 bp, synthetic construct
  misc_feature 1..22: note = chemically synthesized
  source 1..22: mol_type = other DNA
gtgtagtttacaatttctgtaa

SEQ ID NO: 158098 - DNA, 22 bp, synthetic construct
  misc_feature 1..22: note = chemically synthesized
  source 1..22: mol_type = other DNA
tgtagtttacaatttctgtaat

SEQ ID NO: 158099 - DNA, 22 bp, synthetic construct
  misc_feature 1..22: note = chemically synthesized
  source 1..22: mol_type = other DNA
acaatttctgtaataaaaagat

SEQ ID NO: 158100 - DNA, 22 bp, synthetic construct
  misc_feature 1..22: note = chemically synthesized
  source 1..22: mol_type = other DNA
caatttctgtaataaaaagatt

SEQ ID NO: 158101 - DNA, 22 bp, synthetic construct
  misc_feature 1..22: note = chemically synthesized
  source 1..22: mol_type = other DNA
ctgtaataaaaagattcttaaa

SEQ ID NO: 158102 - DNA, 22 bp, synthetic construct
  misc_feature 1..22: note = chemically synthesized
  source 1..22: mol_type = other DNA
tgtaataaaaagattcttaaaa

SEQ ID NO: 158103 - DNA, 22 bp, synthetic construct
  misc_feature 1..22: note = chemically synthesized
  source 1..22: mol_type = other DNA
taataaaaagattcttaaaaaa

SEQ ID NO: 158104 - DNA, 22 bp, synthetic construct
  misc_feature 1..22: note = chemically synthesized
  source 1..22: mol_type = other DNA
ttaaaaaaattatactcagtgt

SEQ ID NO: 158105 - DNA, 22 bp, synthetic construct
  misc_feature 1..22: note = chemically synthesized
  source 1..22: mol_type = other DNA
aaaaaaattatactcagtgtgc

SEQ ID NO: 158106 - DNA, 22 bp, synthetic construct
  misc_feature 1..22: note = chemically synthesized
  source 1..22: mol_type = other DNA
aaaaaattatactcagtgtgct

SEQ ID NO: 158107 - DNA, 22 bp, synthetic construct
  misc_feature 1..22: note = chemically synthesized
  source 1..22: mol_type = other DNA
tactcagtgtgctaatgttaaa

SEQ ID NO: 158108 - DNA, 22 bp, synthetic construct
  misc_feature 1..22: note = chemically synthesized
  source 1..22: mol_type = other DNA
agtgtgctaatgttaaatctta

SEQ ID NO: 158109 - DNA, 22 bp, synthetic construct
  misc_feature 1..22: note = chemically synthesized
  source 1..22: mol_type = other DNA
atgttaaatcttaattgaatat

SEQ ID NO: 158110 - DNA, 22 bp, synthetic construct
  misc_feature 1..22: note = chemically synthesized
  source 1..22: mol_type = other DNA
aatcttaattgaatatgcacca

SEQ ID NO: 158111 - DNA, 22 bp, synthetic construct
  misc_feature 1..22: note = chemically synthesized
  source 1..22: mol_type = other DNA
aattgaatatgcaccatgaagc

SEQ ID NO: 158112 - DNA, 22 bp, synthetic construct
  misc_feature 1..22: note = chemically synthesized
  source 1..22: mol_type = other DNA
attgaatatgcaccatgaagca

SEQ ID NO: 158113 - DNA, 22 bp, synthetic construct
  misc_feature 1..22: note = chemically synthesized
  source 1..22: mol_type = other DNA
aatatgcaccatgaagcagaga

SEQ ID NO: 158114 - DNA, 22 bp, synthetic construct
  misc_feature 1..22: note = chemically synthesized
  source 1..22: mol_type = other DNA
ttaactggtcaggaggaaactg

SEQ ID NO: 158115 - DNA, 22 bp, synthetic construct
  misc_feature 1..22: note = chemically synthesized
  source 1..22: mol_type = other DNA
taactggtcaggaggaaactgt

SEQ ID NO: 158116 - DNA, 22 bp, synthetic construct
  misc_feature 1..22: note = chemically synthesized
  source 1..22: mol_type = other DNA
aactggtcaggaggaaactgtt

SEQ ID NO: 158117 - DNA, 22 bp, synthetic construct
  misc_feature 1..22: note = chemically synthesized
  source 1..22: mol_type = other DNA
actggtcaggaggaaactgttt

SEQ ID NO: 158118 - DNA, 22 bp, synthetic construct
  misc_feature 1..22: note = chemically synthesized
  source 1..22: mol_type = other DNA
gtcaggaggaaactgtttggct

SEQ ID NO: 158119 - DNA, 22 bp, synthetic construct
  misc_feature 1..22: note = chemically synthesized
  source 1..22: mol_type = other DNA
tttggctttagaaagctatttt

SEQ ID NO: 158120 - DNA, 22 bp, synthetic construct
  misc_feature 1..22: note = chemically synthesized
  source 1..22: mol_type = other DNA
ggctttagaaagctattttatt

SEQ ID NO: 158121 - DNA, 22 bp, synthetic construct
  misc_feature 1..22: note = chemically synthesized
  source 1..22: mol_type = other DNA
gctttagaaagctattttattt

SEQ ID NO: 158122 - DNA, 22 bp, synthetic construct
  misc_feature 1..22: note = chemically synthesized
  source 1..22: mol_type = other DNA
tagaaagctattttatttttaa

SEQ ID NO: 158123 - DNA, 22 bp, synthetic construct
  misc_feature 1..22: note = chemically synthesized
  source 1..22: mol_type = other DNA
agaaagctattttatttttaat

SEQ ID NO: 158124 - DNA, 22 bp, synthetic construct
  misc_feature 1..22: note = chemically synthesized
  source 1..22: mol_type = other DNA
gaaagctattttatttttaatg

SEQ ID NO: 158125 - DNA, 22 bp, synthetic construct
  misc_feature 1..22: note = chemically synthesized
  source 1..22: mol_type = other DNA
ttttatttttaatgagttcaat

SEQ ID NO: 158126 - DNA, 22 bp, synthetic construct
  misc_feature 1..22: note = chemically synthesized
  source 1..22: mol_type = other DNA
tatttttaatgagttcaatact

SEQ ID NO: 158127 - DNA, 22 bp, synthetic construct
  misc_feature 1..22: note = chemically synthesized
  source 1..22: mol_type = other DNA
atttttaatgagttcaatacta

SEQ ID NO: 158128 - DNA, 22 bp, synthetic construct
  misc_feature 1..22: note = chemically synthesized
  source 1..22: mol_type = other DNA
tttttaatgagttcaatactag

SEQ ID NO: 158129 - DNA, 22 bp, synthetic construct
  misc_feature 1..22: note = chemically synthesized
  source 1..22: mol_type = other DNA
ttaatgagttcaatactagaaa

SEQ ID NO: 158130 - DNA, 22 bp, synthetic construct
  misc_feature 1..22: note = chemically synthesized
  source 1..22: mol_type = other DNA
taatgagttcaatactagaaag

SEQ ID NO: 158131 - DNA, 22 bp, synthetic construct
  misc_feature 1..22: note = chemically synthesized
  source 1..22: mol_type = other DNA
aatgagttcaatactagaaaga

SEQ ID NO: 158132 - DNA, 22 bp, synthetic construct
  misc_feature 1..22: note = chemically synthesized
  source 1..22: mol_type = other DNA
atgagttcaatactagaaagaa

SEQ ID NO: 158133 - DNA, 22 bp, synthetic construct
  misc_feature 1..22: note = chemically synthesized
  source 1..22: mol_type = other DNA
aatactagaaagaaaaaaaacc

SEQ ID NO: 158134 - DNA, 22 bp, synthetic construct
  misc_feature 1..22: note = chemically synthesized
  source 1..22: mol_type = other DNA
gaaagaaaaaaaaccacaacta

SEQ ID NO: 158135 - DNA, 22 bp, synthetic construct
  misc_feature 1..22: note = chemically synthesized
  source 1..22: mol_type = other DNA
cttgaaaatactgttttagaag

SEQ ID NO: 158136 - DNA, 22 bp, synthetic construct
  misc_feature 1..22: note = chemically synthesized
  source 1..22: mol_type = other DNA
gaaaatactgttttagaagaaa

SEQ ID NO: 158137 - DNA, 22 bp, synthetic construct
  misc_feature 1..22: note = chemically synthesized
  source 1..22: mol_type = other DNA
aaaatactgttttagaagaaaa

SEQ ID NO: 158138 - DNA, 22 bp, synthetic construct
  misc_feature 1..22: note = chemically synthesized
  source 1..22: mol_type = other DNA
ttttagaagaaaataactaaaa

SEQ ID NO: 158139 - DNA, 22 bp, synthetic construct
  misc_feature 1..22: note = chemically synthesized
  source 1..22: mol_type = other DNA
tagaagaaaataactaaaaaac

SEQ ID NO: 158140 - DNA, 22 bp, synthetic construct
  misc_feature 1..22: note = chemically synthesized
  source 1..22: mol_type = other DNA
agaagaaaataactaaaaaaca

SEQ ID NO: 158141 - DNA, 22 bp, synthetic construct
  misc_feature 1..22: note = chemically synthesized
  source 1..22: mol_type = other DNA
gaagaaaataactaaaaaacag

SEQ ID NO: 158142 - DNA, 22 bp, synthetic construct
  misc_feature 1..22: note = chemically synthesized
  source 1..22: mol_type = other DNA
aaaaacagaaaaagcaaggcct

SEQ ID NO: 158143 - DNA, 22 bp, synthetic construct
  misc_feature 1..22: note = chemically synthesized
  source 1..22: mol_type = other DNA
ctcctgcaatagtctttggtga

SEQ ID NO: 158144 - DNA, 22 bp, synthetic construct
  misc_feature 1..22: note = chemically synthesized
  source 1..22: mol_type = other DNA
ctgcaatagtctttggtgacat

SEQ ID NO: 158145 - DNA, 22 bp, synthetic construct
  misc_feature 1..22: note = chemically synthesized
  source 1..22: mol_type = other DNA
caatagtctttggtgacatcaa

SEQ ID NO: 158146 - DNA, 22 bp, synthetic construct
  misc_feature 1..22: note = chemically synthesized
  source 1..22: mol_type = other DNA
tggtgacatcaatcactcggta

SEQ ID NO: 158147 - DNA, 22 bp, synthetic construct
  misc_feature 1..22: note = chemically synthesized
  source 1..22: mol_type = other DNA
ggtgacatcaatcactcggtag

SEQ ID NO: 158148 - DNA, 22 bp, synthetic construct
  misc_feature 1..22: note = chemically synthesized
  source 1..22: mol_type = other DNA
gtgacatcaatcactcggtagt

SEQ ID NO: 158149 - DNA, 22 bp, synthetic construct
  misc_feature 1..22: note = chemically synthesized
  source 1..22: mol_type = other DNA
ggtagtagacaagcttctgaca

SEQ ID NO: 158150 - DNA, 22 bp, synthetic construct
  misc_feature 1..22: note = chemically synthesized
  source 1..22: mol_type = other DNA
ctgacaaacaaaaaggtaggga

SEQ ID NO: 158151 - DNA, 22 bp, synthetic construct
  misc_feature 1..22: note = chemically synthesized
  source 1..22: mol_type = other DNA
tgacaaacaaaaaggtagggag

SEQ ID NO: 158152 - DNA, 22 bp, synthetic construct
  misc_feature 1..22: note = chemically synthesized
  source 1..22: mol_type = other DNA
acaaacaaaaaggtagggagga

SEQ ID NO: 158153 - DNA, 22 bp, synthetic construct
  misc_feature 1..22: note = chemically synthesized
  source 1..22: mol_type = other DNA
tagaaaatccctcagacaggga

SEQ ID NO: 158154 - DNA, 22 bp, synthetic construct
  misc_feature 1..22: note = chemically synthesized
  source 1..22: mol_type = other DNA
gaaaatccctcagacagggatt

SEQ ID NO: 158155 - DNA, 22 bp, synthetic construct
  misc_feature 1..22: note = chemically synthesized
  source 1..22: mol_type = other DNA
agacagggattgcagagcccaa

SEQ ID NO: 158156 - DNA, 22 bp, synthetic construct
  misc_feature 1..22: note = chemically synthesized
  source 1..22: mol_type = other DNA
cagagcccaactttttgttttc

SEQ ID NO: 158157 - DNA, 22 bp, synthetic construct
  misc_feature 1..22: note = chemically synthesized
  source 1..22: mol_type = other DNA
tttgttttcttcagataatttt

SEQ ID NO: 158158 - DNA, 22 bp, synthetic construct
  misc_feature 1..22: note = chemically synthesized
  source 1..22: mol_type = other DNA
ttgttttcttcagataattttg

SEQ ID NO: 158159 - DNA, 22 bp, synthetic construct
  misc_feature 1..22: note = chemically synthesized
  source 1..22: mol_type = other DNA
tgttttcttcagataattttga

SEQ ID NO: 158160 - DNA, 22 bp, synthetic construct
  misc_feature 1..22: note = chemically synthesized
  source 1..22: mol_type = other DNA
gttttcttcagataattttgaa

SEQ ID NO: 158161 - DNA, 22 bp, synthetic construct
  misc_feature 1..22: note = chemically synthesized
  source 1..22: mol_type = other DNA
ttttcttcagataattttgaat

SEQ ID NO: 158162 - DNA, 22 bp, synthetic construct
  misc_feature 1..22: note = chemically synthesized
  source 1..22: mol_type = other DNA
tcttcagataattttgaatttc

SEQ ID NO: 158163 - DNA, 22 bp, synthetic construct
  misc_feature 1..22: note = chemically synthesized
  source 1..22: mol_type = other DNA
cttcagataattttgaatttcc

SEQ ID NO: 158164 - DNA, 22 bp, synthetic construct
  misc_feature 1..22: note = chemically synthesized
  source 1..22: mol_type = other DNA
ttcagataattttgaatttcca

SEQ ID NO: 158165 - DNA, 22 bp, synthetic construct
  misc_feature 1..22: note = chemically synthesized
  source 1..22: mol_type = other DNA
cagataattttgaatttccatg

SEQ ID NO: 158166 - DNA, 22 bp, synthetic construct
  misc_feature 1..22: note = chemically synthesized
  source 1..22: mol_type = other DNA
agataattttgaatttccatga

SEQ ID NO: 158167 - DNA, 22 bp, synthetic construct
  misc_feature 1..22: note = chemically synthesized
  source 1..22: mol_type = other DNA
tgaatttccatgaaccacagtg

SEQ ID NO: 158168 - DNA, 22 bp, synthetic construct
  misc_feature 1..22: note = chemically synthesized
  source 1..22: mol_type = other DNA
gaatttccatgaaccacagtga

SEQ ID NO: 158169 - DNA, 22 bp, synthetic construct
  misc_feature 1..22: note = chemically synthesized
  source 1..22: mol_type = other DNA
aatttccatgaaccacagtgaa

SEQ ID NO: 158170 - DNA, 22 bp, synthetic construct
  misc_feature 1..22: note = chemically synthesized
  source 1..22: mol_type = other DNA
ccatgaaccacagtgaatatcc

SEQ ID NO: 158171 - DNA, 22 bp, synthetic construct
  misc_feature 1..22: note = chemically synthesized
  source 1..22: mol_type = other DNA
catgaaccacagtgaatatcct

SEQ ID NO: 158172 - DNA, 22 bp, synthetic construct
  misc_feature 1..22: note = chemically synthesized
  source 1..22: mol_type = other DNA
ttaaaccacacagtcttgagtg

SEQ ID NO: 158173 - DNA, 22 bp, synthetic construct
  misc_feature 1..22: note = chemically synthesized
  source 1..22: mol_type = other DNA
aaccacacagtcttgagtgatt

SEQ ID NO: 158174 - DNA, 22 bp, synthetic construct
  misc_feature 1..22: note = chemically synthesized
  source 1..22: mol_type = other DNA
gagtgattatcagccaaccaag

SEQ ID NO: 158175 - DNA, 22 bp, synthetic construct
  misc_feature 1..22: note = chemically synthesized
  source 1..22: mol_type = other DNA
agtgattatcagccaaccaagt

SEQ ID NO: 158176 - DNA, 22 bp, synthetic construct
  misc_feature 1..22: note = chemically synthesized
  source 1..22: mol_type = other DNA
tcagccaaccaagtaactaata

SEQ ID NO: 158177 - DNA, 22 bp, synthetic construct
  misc_feature 1..22: note = chemically synthesized
  source 1..22: mol_type = other DNA
atagaaggtttggtcaaataaa

SEQ ID NO: 158178 - DNA, 22 bp, synthetic construct
  misc_feature 1..22: note = chemically synthesized
  source 1..22: mol_type = other DNA
ggtcaaataaaaatatgtatca

SEQ ID NO: 158179 - DNA, 22 bp, synthetic construct
  misc_feature 1..22: note = chemically synthesized
  source 1..22: mol_type = other DNA
gtcaaataaaaatatgtatcaa

SEQ ID NO: 158180 - DNA, 22 bp, synthetic construct
  misc_feature 1..22: note = chemically synthesized
  source 1..22: mol_type = other DNA
atatttttttctgttttcctcg

SEQ ID NO: 158181 - DNA, 22 bp, synthetic construct
  misc_feature 1..22: note = chemically synthesized
  source 1..22: mol_type = other DNA
tatttttttctgttttcctcga

SEQ ID NO: 158182 - DNA, 22 bp, synthetic construct
  misc_feature 1..22: note = chemically synthesized
  source 1..22: mol_type = other DNA
ttttctgttttcctcgaaatta

SEQ ID NO: 158183 - DNA, 22 bp, synthetic construct
  misc_feature 1..22: note = chemically synthesized
  source 1..22: mol_type = other DNA
tttctgttttcctcgaaattaa

SEQ ID NO: 158184 - DNA, 22 bp, synthetic construct
  misc_feature 1..22: note = chemically synthesized
  source 1..22: mol_type = other DNA
ttctgttttcctcgaaattaat

SEQ ID NO: 158185 - DNA, 22 bp, synthetic construct
  misc_feature 1..22: note = chemically synthesized
  source 1..22: mol_type = other DNA
tctgttttcctcgaaattaatt

SEQ ID NO: 158186 - DNA, 22 bp, synthetic construct
  misc_feature 1..22: note = chemically synthesized
  source 1..22: mol_type = other DNA
ctgttttcctcgaaattaattt

SEQ ID NO: 158187 - DNA, 22 bp, synthetic construct
  misc_feature 1..22: note = chemically synthesized
  source 1..22: mol_type = other DNA
tgttttcctcgaaattaattta

SEQ ID NO: 158188 - DNA, 22 bp, synthetic construct
  misc_feature 1..22: note = chemically synthesized
  source 1..22: mol_type = other DNA
ttttcctcgaaattaatttatg

SEQ ID NO: 158189 - DNA, 22 bp, synthetic construct
  misc_feature 1..22: note = chemically synthesized
  source 1..22: mol_type = other DNA
tcctcgaaattaatttatggac

SEQ ID NO: 158190 - DNA, 22 bp, synthetic construct
  misc_feature 1..22: note = chemically synthesized
  source 1..22: mol_type = other DNA
cctcgaaattaatttatggact

SEQ ID NO: 158191 - DNA, 22 bp, synthetic construct
  misc_feature 1..22: note = chemically synthesized
  source 1..22: mol_type = other DNA
ctcgaaattaatttatggactt

SEQ ID NO: 158192 - DNA, 22 bp, synthetic construct
  misc_feature 1..22: note = chemically synthesized
  source 1..22: mol_type = other DNA
gaaattaatttatggacttaaa

SEQ ID NO: 158193 - DNA, 22 bp, synthetic construct
  misc_feature 1..22: note = chemically synthesized
  source 1..22: mol_type = other DNA
atttatggacttaaaaaatttt

SEQ ID NO: 158194 - DNA, 22 bp, synthetic construct
  misc_feature 1..22: note = chemically synthesized
  source 1..22: mol_type = other DNA
atggacttaaaaaatttttaat

SEQ ID NO: 158195 - DNA, 22 bp, synthetic construct
  misc_feature 1..22: note = chemically synthesized
  source 1..22: mol_type = other DNA
tggacttaaaaaatttttaatg

SEQ ID NO: 158196 - DNA, 22 bp, synthetic construct
  misc_feature 1..22: note = chemically synthesized
  source 1..22: mol_type = other DNA
aaaaaatttttaatgtatgaaa

SEQ ID NO: 158197 - DNA, 22 bp, synthetic construct
  misc_feature 1..22: note = chemically synthesized
  source 1..22: mol_type = other DNA
aaaaatttttaatgtatgaaac

SEQ ID NO: 158198 - DNA, 22 bp, synthetic construct
  misc_feature 1..22: note = chemically synthesized
  source 1..22: mol_type = other DNA
ttaatgtatgaaacacctttga

SEQ ID NO: 158199 - DNA, 22 bp, synthetic construct
  misc_feature 1..22: note = chemically synthesized
  source 1..22: mol_type = other DNA
taatgtatgaaacacctttgaa

SEQ ID NO: 158200 - DNA, 22 bp, synthetic construct
  misc_feature 1..22: note = chemically synthesized
  source 1..22: mol_type = other DNA
aatgtatgaaacacctttgaaa

SEQ ID NO: 158201 - DNA, 22 bp, synthetic construct
  misc_feature 1..22: note = chemically synthesized
  source 1..22: mol_type = other DNA
atgtatgaaacacctttgaaag

SEQ ID NO: 158202 - DNA, 22 bp, synthetic construct
  misc_feature 1..22: note = chemically synthesized
  source 1..22: mol_type = other DNA
tgaaagtgttcaatgtagtgaa

SEQ ID NO: 158203 - DNA, 22 bp, synthetic construct
  misc_feature 1..22: note = chemically synthesized
  source 1..22: mol_type = other DNA
gaaagtgttcaatgtagtgaag

SEQ ID NO: 158204 - DNA, 22 bp, synthetic construct
  misc_feature 1..22: note = chemically synthesized
  source 1..22: mol_type = other DNA
aaagtgttcaatgtagtgaagt

SEQ ID NO: 158205 - DNA, 22 bp, synthetic construct
  misc_feature 1..22: note = chemically synthesized
  source 1..22: mol_type = other DNA
aatgtagtgaagtcataaaaac

SEQ ID NO: 158206 - DNA, 22 bp, synthetic construct
  misc_feature 1..22: note = chemically synthesized
  source 1..22: mol_type = other DNA
aaaaaaaaattctcaaaatttc

SEQ ID NO: 158207 - DNA, 22 bp, synthetic construct
  misc_feature 1..22: note = chemically synthesized
  source 1..22: mol_type = other DNA
aaaaaaaattctcaaaatttca

SEQ ID NO: 158208 - DNA, 22 bp, synthetic construct
  misc_feature 1..22: note = chemically synthesized
  source 1..22: mol_type = other DNA
tcaaaatttcagagtaatttag

SEQ ID NO: 158209 - DNA, 22 bp, synthetic construct
  misc_feature 1..22: note = chemically synthesized
  source 1..22: mol_type = other DNA
aaaatttcagagtaatttagaa

SEQ ID NO: 158210 - DNA, 22 bp, synthetic construct
  misc_feature 1..22: note = chemically synthesized
  source 1..22: mol_type = other DNA
cagagtaatttagaagcccttc

SEQ ID NO: 158211 - DNA, 22 bp, synthetic construct
  misc_feature 1..22: note = chemically synthesized
  source 1..22: mol_type = other DNA
agagtaatttagaagcccttcc

SEQ ID NO: 158212 - DNA, 22 bp, synthetic construct
  misc_feature 1..22: note = chemically synthesized
  source 1..22: mol_type = other DNA
agaagcccttccttaacaataa

SEQ ID NO: 158213 - DNA, 22 bp, synthetic construct
  misc_feature 1..22: note = chemically synthesized
  source 1..22: mol_type = other DNA
gaagcccttccttaacaataat

SEQ ID NO: 158214 - DNA, 22 bp, synthetic construct
  misc_feature 1..22: note = chemically synthesized
  source 1..22: mol_type = other DNA
ccttaacaataattattggtaa

SEQ ID NO: 158215 - DNA, 22 bp, synthetic construct
  misc_feature 1..22: note = chemically synthesized
  source 1..22: mol_type = other DNA
cttaacaataattattggtaac

SEQ ID NO: 158216 - DNA, 22 bp, synthetic construct
  misc_feature 1..22: note = chemically synthesized
  source 1..22: mol_type = other DNA
aacaataattattggtaacctc

SEQ ID NO: 158217 - DNA, 22 bp, synthetic construct
  misc_feature 1..22: note = chemically synthesized
  source 1..22: mol_type = other DNA
acaataattattggtaacctcc

SEQ ID NO: 158218 - DNA, 22 bp, synthetic construct
  misc_feature 1..22: note = chemically synthesized
  source 1..22: mol_type = other DNA
ttggtaacctccattacagtcc

SEQ ID NO: 158219 - DNA, 22 bp, synthetic construct
  misc_feature 1..22: note = chemically synthesized
  source 1..22: mol_type = other DNA
gtaacctccattacagtcctgt

SEQ ID NO: 158220 - DNA, 22 bp, synthetic construct
  misc_feature 1..22: note = chemically synthesized
  source 1..22: mol_type = other DNA
cattacagtcctgtattactat

SEQ ID NO: 158221 - DNA, 22 bp, synthetic construct
  misc_feature 1..22: note = chemically synthesized
  source 1..22: mol_type = other DNA
cagtcctgtattactattctta

SEQ ID NO: 158222 - DNA, 22 bp, synthetic construct
  misc_feature 1..22: note = chemically synthesized
  source 1..22: mol_type = other DNA
tattactattcttatggtatac

SEQ ID NO: 158223 - DNA, 22 bp, synthetic construct
  misc_feature 1..22: note = chemically synthesized
  source 1..22: mol_type = other DNA
ctattcttatggtatacatgaa

SEQ ID NO: 158224 - DNA, 22 bp, synthetic construct
  misc_feature 1..22: note = chemically synthesized
  source 1..22: mol_type = other DNA
ttcttatggtatacatgaaaaa

SEQ ID NO: 158225 - DNA, 22 bp, synthetic construct
  misc_feature 1..22: note = chemically synthesized
  source 1..22: mol_type = other DNA
ttatggtatacatgaaaaaact

SEQ ID NO: 158226 - DNA, 22 bp, synthetic construct
  misc_feature 1..22: note = chemically synthesized
  source 1..22: mol_type = other DNA
atggtatacatgaaaaaactaa

SEQ ID NO: 158227 - DNA, 22 bp, synthetic construct
  misc_feature 1..22: note = chemically synthesized
  source 1..22: mol_type = other DNA
tggtatacatgaaaaaactaag

SEQ ID NO: 158228 - DNA, 22 bp, synthetic construct
  misc_feature 1..22: note = chemically synthesized
  source 1..22: mol_type = other DNA
agagataatttttgtaacttta

SEQ ID NO: 158229 - DNA, 22 bp, synthetic construct
  misc_feature 1..22: note = chemically synthesized
  source 1..22: mol_type = other DNA
ttgtaactttatcaagttcaca

SEQ ID NO: 158230 - DNA, 22 bp, synthetic construct
  misc_feature 1..22: note = chemically synthesized
  source 1..22: mol_type = other DNA
tgtaactttatcaagttcacac

SEQ ID NO: 158231 - DNA, 22 bp, synthetic construct
  misc_feature 1..22: note = chemically synthesized
  source 1..22: mol_type = other DNA
gtaactttatcaagttcacaca

SEQ ID NO: 158232 - DNA, 22 bp, synthetic construct
  misc_feature 1..22: note = chemically synthesized
  source 1..22: mol_type = other DNA
taactttatcaagttcacacaa

SEQ ID NO: 158233 - DNA, 22 bp, synthetic construct
  misc_feature 1..22: note = chemically synthesized
  source 1..22: mol_type = other DNA
tatcaagttcacacaatggaaa

SEQ ID NO: 158234 - DNA, 22 bp, synthetic construct
  misc_feature 1..22: note = chemically synthesized
  source 1..22: mol_type = other DNA
atcaagttcacacaatggaaaa

SEQ ID NO: 158235 - DNA, 22 bp, synthetic construct
  misc_feature 1..22: note = chemically synthesized
  source 1..22: mol_type = other DNA
tcaagttcacacaatggaaaac

SEQ ID NO: 158236 - DNA, 22 bp, synthetic construct
  misc_feature 1..22: note = chemically synthesized
  source 1..22: mol_type = other DNA
acacaatggaaaacttgtacac

SEQ ID NO: 158237 - DNA, 22 bp, synthetic construct
  misc_feature 1..22: note = chemically synthesized
  source 1..22: mol_type = other DNA
gtacacccaagagccaagtcct

SEQ ID NO: 158238 - DNA, 22 bp, synthetic construct
  misc_feature 1..22: note = chemically synthesized
  source 1..22: mol_type = other DNA
tacacccaagagccaagtcctc

SEQ ID NO: 158239 - DNA, 22 bp, synthetic construct
  misc_feature 1..22: note = chemically synthesized
  source 1..22: mol_type = other DNA
agtgtgatgttatacacttgaa

SEQ ID NO: 158240 - DNA, 22 bp, synthetic construct
  misc_feature 1..22: note = chemically synthesized
  source 1..22: mol_type = other DNA
tacacttgaaccagatgtacct

SEQ ID NO: 158241 - DNA, 22 bp, synthetic construct
  misc_feature 1..22: note = chemically synthesized
  source 1..22: mol_type = other DNA
gaaccagatgtacctaggttga

SEQ ID NO: 158242 - DNA, 22 bp, synthetic construct
  misc_feature 1..22: note = chemically synthesized
  source 1..22: mol_type = other DNA
aaccagatgtacctaggttgaa

SEQ ID NO: 158243 - DNA, 22 bp, synthetic construct
  misc_feature 1..22: note = chemically synthesized
  source 1..22: mol_type = other DNA
ggttgaaatcttagctatcttg

SEQ ID NO: 158244 - DNA, 22 bp, synthetic construct
  misc_feature 1..22: note = chemically synthesized
  source 1..22: mol_type = other DNA
aaatcttagctatcttgctatt

SEQ ID NO: 158245 - DNA, 22 bp, synthetic construct
  misc_feature 1..22: note = chemically synthesized
  source 1..22: mol_type = other DNA
agctatcttgctattagtaatt

SEQ ID NO: 158246 - DNA, 22 bp, synthetic construct
  misc_feature 1..22: note = chemically synthesized
  source 1..22: mol_type = other DNA
gctatcttgctattagtaattg

SEQ ID NO: 158247 - DNA, 22 bp, synthetic construct
  misc_feature 1..22: note = chemically synthesized
  source 1..22: mol_type = other DNA
tcttgctattagtaattgtggg

SEQ ID NO: 158248 - DNA, 22 bp, synthetic construct
  misc_feature 1..22: note = chemically synthesized
  source 1..22: mol_type = other DNA
gctattagtaattgtgggatct

SEQ ID NO: 158249 - DNA, 22 bp, synthetic construct
  misc_feature 1..22: note = chemically synthesized
  source 1..22: mol_type = other DNA
ctattagtaattgtgggatctt

SEQ ID NO: 158250 - DNA, 22 bp, synthetic construct
  misc_feature 1..22: note = chemically synthesized
  source 1..22: mol_type = other DNA
ttagtaattgtgggatcttgct

SEQ ID NO: 158251 - DNA, 22 bp, synthetic construct
  misc_feature 1..22: note = chemically synthesized
  source 1..22: mol_type = other DNA
gtaattgtgggatcttgctagt

SEQ ID NO: 158252 - DNA, 22 bp, synthetic construct
  misc_feature 1..22: note = chemically synthesized
  source 1..22: mol_type = other DNA
tgggatcttgctagtagtatga

SEQ ID NO: 158253 - DNA, 22 bp, synthetic construct
  misc_feature 1..22: note = chemically synthesized
  source 1..22: mol_type = other DNA
gctagtagtatgacctgtttga

SEQ ID NO: 158254 - DNA, 22 bp, synthetic construct
  misc_feature 1..22: note = chemically synthesized
  source 1..22: mol_type = other DNA
ctagtagtatgacctgtttgaa

SEQ ID NO: 158255 - DNA, 22 bp, synthetic construct
  misc_feature 1..22: note = chemically synthesized
  source 1..22: mol_type = other DNA
gtagtatgacctgtttgaatat

SEQ ID NO: 158256 - DNA, 22 bp, synthetic construct
  misc_feature 1..22: note = chemically synthesized
  source 1..22: mol_type = other DNA
tttgaatataatttattcattt

SEQ ID NO: 158257 - DNA, 22 bp, synthetic construct
  misc_feature 1..22: note = chemically synthesized
  source 1..22: mol_type = other DNA
gaatataatttattcatttata

SEQ ID NO: 158258 - DNA, 22 bp, synthetic construct
  misc_feature 1..22: note = chemically synthesized
  source 1..22: mol_type = other DNA
aatataatttattcatttataa

SEQ ID NO: 158259 - DNA, 22 bp, synthetic construct
  misc_feature 1..22: note = chemically synthesized
  source 1..22: mol_type = other DNA
attcatttataaatgaataaga

SEQ ID NO: 158260 - DNA, 22 bp, synthetic construct
  misc_feature 1..22: note = chemically synthesized
  source 1..22: mol_type = other DNA
ttcatttataaatgaataagaa

SEQ ID NO: 158261 - DNA, 22 bp, synthetic construct
  misc_feature 1..22: note = chemically synthesized
  source 1..22: mol_type = other DNA
atttataaatgaataagaaaat

SEQ ID NO: 158262 - DNA, 22 bp, synthetic construct
  misc_feature 1..22: note = chemically synthesized
  source 1..22: mol_type = other DNA
ataaatgaataagaaaataaaa

SEQ ID NO: 158263 - DNA, 22 bp, synthetic construct
  misc_feature 1..22: note = chemically synthesized
  source 1..22: mol_type = other DNA
taaatgaataagaaaataaaat

SEQ ID NO: 158264 - DNA, 22 bp, synthetic construct
  misc_feature 1..22: note = chemically synthesized
  source 1..22: mol_type = other DNA
ttatgatcttgaagattaaatg

SEQ ID NO: 158265 - DNA, 22 bp, synthetic construct
  misc_feature 1..22: note = chemically synthesized
  source 1..22: mol_type = other DNA
tatgatcttgaagattaaatga

SEQ ID NO: 158266 - DNA, 22 bp, synthetic construct
  misc_feature 1..22: note = chemically synthesized
  source 1..22: mol_type = other DNA
atgatcttgaagattaaatgaa

SEQ ID NO: 158267 - DNA, 22 bp, synthetic construct
  misc_feature 1..22: note = chemically synthesized
  source 1..22: mol_type = other DNA
tgatcttgaagattaaatgaaa

SEQ ID NO: 158268 - DNA, 22 bp, synthetic construct
  misc_feature 1..22: note = chemically synthesized
  source 1..22: mol_type = other DNA
gaagattaaatgaaatggtgca

SEQ ID NO: 158269 - DNA, 22 bp, synthetic construct
  misc_feature 1..22: note = chemically synthesized
  source 1..22: mol_type = other DNA
aagattaaatgaaatggtgcac

SEQ ID NO: 158270 - DNA, 22 bp, synthetic construct
  misc_feature 1..22: note = chemically synthesized
  source 1..22: mol_type = other DNA
aatgaaatggtgcacattaagc

SEQ ID NO: 158271 - DNA, 22 bp, synthetic construct
  misc_feature 1..22: note = chemically synthesized
  source 1..22: mol_type = other DNA
agcaattagcaaagttcctagt

SEQ ID NO: 158272 - DNA, 22 bp, synthetic construct
  misc_feature 1..22: note = chemically synthesized
  source 1..22: mol_type = other DNA
gcaaagttcctagtaaaatttg

SEQ ID NO: 158273 - DNA, 22 bp, synthetic construct
  misc_feature 1..22: note = chemically synthesized
  source 1..22: mol_type = other DNA
ctagtaaaatttgctcaataag

SEQ ID NO: 158274 - DNA, 22 bp, synthetic construct
  misc_feature 1..22: note = chemically synthesized
  source 1..22: mol_type = other DNA
gtaaaatttgctcaataagtaa

SEQ ID NO: 158275 - DNA, 22 bp, synthetic construct
  misc_feature 1..22: note = chemically synthesized
  source 1..22: mol_type = other DNA
gctcaataagtaattatatttt

SEQ ID NO: 158276 - DNA, 22 bp, synthetic construct
  misc_feature 1..22: note = chemically synthesized
  source 1..22: mol_type = other DNA
ctcaataagtaattatatttta

SEQ ID NO: 158277 - DNA, 22 bp, synthetic construct
  misc_feature 1..22: note = chemically synthesized
  source 1..22: mol_type = other DNA
aataagtaattatattttatta

SEQ ID NO: 158278 - DNA, 22 bp, synthetic construct
  misc_feature 1..22: note = chemically synthesized
  source 1..22: mol_type = other DNA
tattttattaagtaattacttt

SEQ ID NO: 158279 - DNA, 22 bp, synthetic construct
  misc_feature 1..22: note = chemically synthesized
  source 1..22: mol_type = other DNA
tattaagtaattactttttcac

SEQ ID NO: 158280 - DNA, 22 bp, synthetic construct
  misc_feature 1..22: note = chemically synthesized
  source 1..22: mol_type = other DNA
attaagtaattactttttcacc

SEQ ID NO: 158281 - DNA, 22 bp, synthetic construct
  misc_feature 1..22: note = chemically synthesized
  source 1..22: mol_type = other DNA
ttaagtaattactttttcacca

SEQ ID NO: 158282 - DNA, 22 bp, synthetic construct
  misc_feature 1..22: note = chemically synthesized
  source 1..22: mol_type = other DNA
agtaattactttttcaccaaat

SEQ ID NO: 158283 - DNA, 22 bp, synthetic construct
  misc_feature 1..22: note = chemically synthesized
  source 1..22: mol_type = other DNA
ctttttcaccaaatctgactac

SEQ ID NO: 158284 - DNA, 22 bp, synthetic construct
  misc_feature 1..22: note = chemically synthesized
  source 1..22: mol_type = other DNA
tttcaccaaatctgactacaat

SEQ ID NO: 158285 - DNA, 22 bp, synthetic construct
  misc_feature 1..22: note = chemically synthesized
  source 1..22: mol_type = other DNA
ttcaccaaatctgactacaata

SEQ ID NO: 158286 - DNA, 22 bp, synthetic construct
  misc_feature 1..22: note = chemically synthesized
  source 1..22: mol_type = other DNA
tcaccaaatctgactacaatac

SEQ ID NO: 158287 - DNA, 22 bp, synthetic construct
  misc_feature 1..22: note = chemically synthesized
  source 1..22: mol_type = other DNA
caccaaatctgactacaatacg

SEQ ID NO: 158288 - DNA, 22 bp, synthetic construct
  misc_feature 1..22: note = chemically synthesized
  source 1..22: mol_type = other DNA
accaaatctgactacaatacgt

SEQ ID NO: 158289 - DNA, 22 bp, synthetic construct
  misc_feature 1..22: note = chemically synthesized
  source 1..22: mol_type = other DNA
actacaatacgtgaatacacag

SEQ ID NO: 158290 - DNA, 22 bp, synthetic construct
  misc_feature 1..22: note = chemically synthesized
  source 1..22: mol_type = other DNA
caatacgtgaatacacagtcaa

SEQ ID NO: 158291 - DNA, 22 bp, synthetic construct
  misc_feature 1..22: note = chemically synthesized
  source 1..22: mol_type = other DNA
cacaattcctgacagtctctct

SEQ ID NO: 158292 - DNA, 22 bp, synthetic construct
  misc_feature 1..22: note = chemically synthesized
  source 1..22: mol_type = other DNA
acaattcctgacagtctctcta

SEQ ID NO: 158293 - DNA, 22 bp, synthetic construct
  misc_feature 1..22: note = chemically synthesized
  source 1..22: mol_type = other DNA
ctgacagtctctctaaatgcta

SEQ ID NO: 158294 - DNA, 22 bp, synthetic construct
  misc_feature 1..22: note = chemically synthesized
  source 1..22: mol_type = other DNA
acagtctctctaaatgctaatt

SEQ ID NO: 158295 - DNA, 22 bp, synthetic construct
  misc_feature 1..22: note = chemically synthesized
  source 1..22: mol_type = other DNA
tctaaatgctaattttaaactc

SEQ ID NO: 158296 - DNA, 22 bp, synthetic construct
  misc_feature 1..22: note = chemically synthesized
  source 1..22: mol_type = other DNA
taaatgctaattttaaactcaa

SEQ ID NO: 158297 - DNA, 22 bp, synthetic construct
  misc_feature 1..22: note = chemically synthesized
  source 1..22: mol_type = other DNA
aatgctaattttaaactcaagt

SEQ ID NO: 158298 - DNA, 22 bp, synthetic construct
  misc_feature 1..22: note = chemically synthesized
  source 1..22: mol_type = other DNA
attttaaactcaagtacataaa

SEQ ID NO: 158299 - DNA, 22 bp, synthetic construct
  misc_feature 1..22: note = chemically synthesized
  source 1..22: mol_type = other DNA
taaactcaagtacataaaaatt

SEQ ID NO: 158300 - DNA, 22 bp, synthetic construct
  misc_feature 1..22: note = chemically synthesized
  source 1..22: mol_type = other DNA
aaactcaagtacataaaaatta

SEQ ID NO: 158301 - DNA, 22 bp, synthetic construct
  misc_feature 1..22: note = chemically synthesized
  source 1..22: mol_type = other DNA
aactcaagtacataaaaattaa

SEQ ID NO: 158302 - DNA, 22 bp, synthetic construct
  misc_feature 1..22: note = chemically synthesized
  source 1..22: mol_type = other DNA
aagtacataaaaattaaagtca

SEQ ID NO: 158303 - DNA, 22 bp, synthetic construct
  misc_feature 1..22: note = chemically synthesized
  source 1..22: mol_type = other DNA
aagtcacaaatttctctgtcac

SEQ ID NO: 158304 - DNA, 22 bp, synthetic construct
  misc_feature 1..22: note = chemically synthesized
  source 1..22: mol_type = other DNA
ctctgtcacgagctatagtgta

SEQ ID NO: 158305 - DNA, 22 bp, synthetic construct
  misc_feature 1..22: note = chemically synthesized
  source 1..22: mol_type = other DNA
tctgtcacgagctatagtgtac

SEQ ID NO: 158306 - DNA, 22 bp, synthetic construct
  misc_feature 1..22: note = chemically synthesized
  source 1..22: mol_type = other DNA
tgtcacgagctatagtgtacca

SEQ ID NO: 158307 - DNA, 22 bp, synthetic construct
  misc_feature 1..22: note = chemically synthesized
  source 1..22: mol_type = other DNA
tcacgagctatagtgtaccata

SEQ ID NO: 158308 - DNA, 22 bp, synthetic construct
  misc_feature 1..22: note = chemically synthesized
  source 1..22: mol_type = other DNA
tagtgtaccatactaagtgatt

SEQ ID NO: 158309 - DNA, 22 bp, synthetic construct
  misc_feature 1..22: note = chemically synthesized
  source 1..22: mol_type = other DNA
agtgatttatatagattagttc

SEQ ID NO: 158310 - DNA, 22 bp, synthetic construct
  misc_feature 1..22: note = chemically synthesized
  source 1..22: mol_type = other DNA
atatagattagttcatttaatc

SEQ ID NO: 158311 - DNA, 22 bp, synthetic construct
  misc_feature 1..22: note = chemically synthesized
  source 1..22: mol_type = other DNA
tatagattagttcatttaatcc

SEQ ID NO: 158312 - DNA, 22 bp, synthetic construct
  misc_feature 1..22: note = chemically synthesized
  source 1..22: mol_type = other DNA
gttcatttaatccacggaacaa

SEQ ID NO: 158313 - DNA, 22 bp, synthetic construct
  misc_feature 1..22: note = chemically synthesized
  source 1..22: mol_type = other DNA
atttaatccacggaacaaatat

SEQ ID NO: 158314 - DNA, 22 bp, synthetic construct
  misc_feature 1..22: note = chemically synthesized
  source 1..22: mol_type = other DNA
aatccacggaacaaatatatga

SEQ ID NO: 158315 - DNA, 22 bp, synthetic construct
  misc_feature 1..22: note = chemically synthesized
  source 1..22: mol_type = other DNA
atccacggaacaaatatatgaa

SEQ ID NO: 158316 - DNA, 22 bp, synthetic construct
  misc_feature 1..22: note = chemically synthesized
  source 1..22: mol_type = other DNA
tcagtttgtctacatgttacaa

SEQ ID NO: 158317 - DNA, 22 bp, synthetic construct
  misc_feature 1..22: note = chemically synthesized
  source 1..22: mol_type = other DNA
gtctacatgttacaaatgtaga

SEQ ID NO: 158318 - DNA, 22 bp, synthetic construct
  misc_feature 1..22: note = chemically synthesized
  source 1..22: mol_type = other DNA
tctacatgttacaaatgtagaa

SEQ ID NO: 158319 - DNA, 22 bp, synthetic construct
  misc_feature 1..22: note = chemically synthesized
  source 1..22: mol_type = other DNA
catgttacaaatgtagaaacag

SEQ ID NO: 158320 - DNA, 22 bp, synthetic construct
  misc_feature 1..22: note = chemically synthesized
  source 1..22: mol_type = other DNA
caaatgtagaaacagaaacata

SEQ ID NO: 158321 - DNA, 22 bp, synthetic construct
  misc_feature 1..22: note = chemically synthesized
  source 1..22: mol_type = other DNA
ataagtggcagaatcacaactc

SEQ ID NO: 158322 - DNA, 22 bp, synthetic construct
  misc_feature 1..22: note = chemically synthesized
  source 1..22: mol_type = other DNA
aaaaccagacaatccaactaaa

SEQ ID NO: 158323 - DNA, 22 bp, synthetic construct
  misc_feature 1..22: note = chemically synthesized
  source 1..22: mol_type = other DNA
aaaacctgattctttagcccac

SEQ ID NO: 158324 - DNA, 22 bp, synthetic construct
  misc_feature 1..22: note = chemically synthesized
  source 1..22: mol_type = other DNA
attctttagcccaccatattat

SEQ ID NO: 158325 - DNA, 22 bp, synthetic construct
  misc_feature 1..22: note = chemically synthesized
  source 1..22: mol_type = other DNA
tttagcccaccatattatcagt

SEQ ID NO: 158326 - DNA, 22 bp, synthetic construct
  misc_feature 1..22: note = chemically synthesized
  source 1..22: mol_type = other DNA
tagcccaccatattatcagtgg

SEQ ID NO: 158327 - DNA, 22 bp, synthetic construct
  misc_feature 1..22: note = chemically synthesized
  source 1..22: mol_type = other DNA
agcccaccatattatcagtggt

SEQ ID NO: 158328 - DNA, 22 bp, synthetic construct
  misc_feature 1..22: note = chemically synthesized
  source 1..22: mol_type = other DNA
gcccaccatattatcagtggtc

SEQ ID NO: 158329 - DNA, 22 bp, synthetic construct
  misc_feature 1..22: note = chemically synthesized
  source 1..22: mol_type = other DNA
tcagtggtcccataacttaaaa

SEQ ID NO: 158330 - DNA, 22 bp, synthetic construct
  misc_feature 1..22: note = chemically synthesized
  source 1..22: mol_type = other DNA
aaaattcagatttgactttaaa

SEQ ID NO: 158331 - DNA, 22 bp, synthetic construct
  misc_feature 1..22: note = chemically synthesized
  source 1..22: mol_type = other DNA
aaattcagatttgactttaaaa

SEQ ID NO: 158332 - DNA, 22 bp, synthetic construct
  misc_feature 1..22: note = chemically synthesized
  source 1..22: mol_type = other DNA
agatttgactttaaaattggaa

SEQ ID NO: 158333 - DNA, 22 bp, synthetic construct
  misc_feature 1..22: note = chemically synthesized
  source 1..22: mol_type = other DNA
gactttaaaattggaatctgaa

SEQ ID NO: 158334 - DNA, 22 bp, synthetic construct
  misc_feature 1..22: note = chemically synthesized
  source 1..22: mol_type = other DNA
actttaaaattggaatctgaag

SEQ ID NO: 158335 - DNA, 22 bp, synthetic construct
  misc_feature 1..22: note = chemically synthesized
  source 1..22: mol_type = other DNA
taaaattggaatctgaagaaca

SEQ ID NO: 158336 - DNA, 22 bp, synthetic construct
  misc_feature 1..22: note = chemically synthesized
  source 1..22: mol_type = other DNA
aaaattggaatctgaagaacac

SEQ ID NO: 158337 - DNA, 22 bp, synthetic construct
  misc_feature 1..22: note = chemically synthesized
  source 1..22: mol_type = other DNA
aaattggaatctgaagaacacc

SEQ ID NO: 158338 - DNA, 22 bp, synthetic construct
  misc_feature 1..22: note = chemically synthesized
  source 1..22: mol_type = other DNA
gaatctgaagaacaccaagcaa

SEQ ID NO: 158339 - DNA, 22 bp, synthetic construct
  misc_feature 1..22: note = chemically synthesized
  source 1..22: mol_type = other DNA
aagaacaccaagcaattctgta

SEQ ID NO: 158340 - DNA, 22 bp, synthetic construct
  misc_feature 1..22: note = chemically synthesized
  source 1..22: mol_type = other DNA
tgtaaaccattttctcctttga

SEQ ID NO: 158341 - DNA, 22 bp, synthetic construct
  misc_feature 1..22: note = chemically synthesized
  source 1..22: mol_type = other DNA
taaaccattttctcctttgaga

SEQ ID NO: 158342 - DNA, 22 bp, synthetic construct
  misc_feature 1..22: note = chemically synthesized
  source 1..22: mol_type = other DNA
tctcctttgagattcatgagga

SEQ ID NO: 158343 - DNA, 22 bp, synthetic construct
  misc_feature 1..22: note = chemically synthesized
  source 1..22: mol_type = other DNA
ctcctttgagattcatgaggac

SEQ ID NO: 158344 - DNA, 22 bp, synthetic construct
  misc_feature 1..22: note = chemically synthesized
  source 1..22: mol_type = other DNA
tcctttgagattcatgaggaca

SEQ ID NO: 158345 - DNA, 22 bp, synthetic construct
  misc_feature 1..22: note = chemically synthesized
  source 1..22: mol_type = other DNA
ctttgagattcatgaggacaaa

SEQ ID NO: 158346 - DNA, 22 bp, synthetic construct
  misc_feature 1..22: note = chemically synthesized
  source 1..22: mol_type = other DNA
tgagattcatgaggacaaaatt

SEQ ID NO: 158347 - DNA, 22 bp, synthetic construct
  misc_feature 1..22: note = chemically synthesized
  source 1..22: mol_type = other DNA
gagattcatgaggacaaaattc

SEQ ID NO: 158348 - DNA, 22 bp, synthetic construct
  misc_feature 1..22: note = chemically synthesized
  source 1..22: mol_type = other DNA
agattcatgaggacaaaattca

SEQ ID NO: 158349 - DNA, 22 bp, synthetic construct
  misc_feature 1..22: note = chemically synthesized
  source 1..22: mol_type = other DNA
atgaggacaaaattcactcacc

SEQ ID NO: 158350 - DNA, 22 bp, synthetic construct
  misc_feature 1..22: note = chemically synthesized
  source 1..22: mol_type = other DNA
actcacctctgtttcctctaat

SEQ ID NO: 158351 - DNA, 22 bp, synthetic construct
  misc_feature 1..22: note = chemically synthesized
  source 1..22: mol_type = other DNA
acctctgtttcctctaattata

SEQ ID NO: 158352 - DNA, 22 bp, synthetic construct
  misc_feature 1..22: note = chemically synthesized
  source 1..22: mol_type = other DNA
tgtttcctctaattatagtcat

SEQ ID NO: 158353 - DNA, 22 bp, synthetic construct
  misc_feature 1..22: note = chemically synthesized
  source 1..22: mol_type = other DNA
tttcctctaattatagtcatat

SEQ ID NO: 158354 - DNA, 22 bp, synthetic construct
  misc_feature 1..22: note = chemically synthesized
  source 1..22: mol_type = other DNA
cctctaattatagtcatatatt

SEQ ID NO: 158355 - DNA, 22 bp, synthetic construct
  misc_feature 1..22: note = chemically synthesized
  source 1..22: mol_type = other DNA
ctctaattatagtcatatatta

SEQ ID NO: 158356 - DNA, 22 bp, synthetic construct
  misc_feature 1..22: note = chemically synthesized
  source 1..22: mol_type = other DNA
taattatagtcatatattaata

SEQ ID NO: 158357 - DNA, 22 bp, synthetic construct
  misc_feature 1..22: note = chemically synthesized
  source 1..22: mol_type = other DNA
attatagtcatatattaataat

SEQ ID NO: 158358 - DNA, 22 bp, synthetic construct
  misc_feature 1..22: note = chemically synthesized
  source 1..22: mol_type = other DNA
tagtcatatattaataatgtat

SEQ ID NO: 158359 - DNA, 22 bp, synthetic construct
  misc_feature 1..22: note = chemically synthesized
  source 1..22: mol_type = other DNA
ataatgtataaaggttttctca

SEQ ID NO: 158360 - DNA, 22 bp, synthetic construct
  misc_feature 1..22: note = chemically synthesized
  source 1..22: mol_type = other DNA
tctcaagaggatctttataaaa

SEQ ID NO: 158361 - DNA, 22 bp, synthetic construct
  misc_feature 1..22: note = chemically synthesized
  source 1..22: mol_type = other DNA
ctcaagaggatctttataaaag

SEQ ID NO: 158362 - DNA, 22 bp, synthetic construct
  misc_feature 1..22: note = chemically synthesized
  source 1..22: mol_type = other DNA
tcaagaggatctttataaaagg

SEQ ID NO: 158363 - DNA, 22 bp, synthetic construct
  misc_feature 1..22: note = chemically synthesized
  source 1..22: mol_type = other DNA
aagaggatctttataaaagggg

SEQ ID NO: 158364 - DNA, 22 bp, synthetic construct
  misc_feature 1..22: note = chemically synthesized
  source 1..22: mol_type = other DNA
tataaaaggggccttcccacat

SEQ ID NO: 158365 - DNA, 22 bp, synthetic construct
  misc_feature 1..22: note = chemically synthesized
  source 1..22: mol_type = other DNA
ataaaaggggccttcccacatt

SEQ ID NO: 158366 - DNA, 22 bp, synthetic construct
  misc_feature 1..22: note = chemically synthesized
  source 1..22: mol_type = other DNA
taaaaggggccttcccacatta

SEQ ID NO: 158367 - DNA, 22 bp, synthetic construct
  misc_feature 1..22: note = chemically synthesized
  source 1..22: mol_type = other DNA
cccacattagtttaactgctta

SEQ ID NO: 158368 - DNA, 22 bp, synthetic construct
  misc_feature 1..22: note = chemically synthesized
  source 1..22: mol_type = other DNA
ccacattagtttaactgcttag

SEQ ID NO: 158369 - DNA, 22 bp, synthetic construct
  misc_feature 1..22: note = chemically synthesized
  source 1..22: mol_type = other DNA
gtttaactgcttaggtactgat

SEQ ID NO: 158370 - DNA, 22 bp, synthetic construct
  misc_feature 1..22: note = chemically synthesized
  source 1..22: mol_type = other DNA
aactgcttaggtactgattctc

SEQ ID NO: 158371 - DNA, 22 bp, synthetic construct
  misc_feature 1..22: note = chemically synthesized
  source 1..22: mol_type = other DNA
actgcttaggtactgattctct

SEQ ID NO: 158372 - DNA, 22 bp, synthetic construct
  misc_feature 1..22: note = chemically synthesized
  source 1..22: mol_type = other DNA
cttaggtactgattctcttcta

SEQ ID NO: 158373 - DNA, 22 bp, synthetic construct
  misc_feature 1..22: note = chemically synthesized
  source 1..22: mol_type = other DNA
aggtactgattctcttctactt

SEQ ID NO: 158374 - DNA, 22 bp, synthetic construct
  misc_feature 1..22: note = chemically synthesized
  source 1..22: mol_type = other DNA
ggtactgattctcttctacttc

SEQ ID NO: 158375 - DNA, 22 bp, synthetic construct
  misc_feature 1..22: note = chemically synthesized
  source 1..22: mol_type = other DNA
attctcttctacttcctcaacc

SEQ ID NO: 158376 - DNA, 22 bp, synthetic construct
  misc_feature 1..22: note = chemically synthesized
  source 1..22: mol_type = other DNA
tcttctacttcctcaaccaaca

SEQ ID NO: 158377 - DNA, 22 bp, synthetic construct
  misc_feature 1..22: note = chemically synthesized
  source 1..22: mol_type = other DNA
ttctacttcctcaaccaacact

SEQ ID NO: 158378 - DNA, 22 bp, synthetic construct
  misc_feature 1..22: note = chemically synthesized
  source 1..22: mol_type = other DNA
ctacttcctcaaccaacacttt

SEQ ID NO: 158379 - DNA, 22 bp, synthetic construct
  misc_feature 1..22: note = chemically synthesized
  source 1..22: mol_type = other DNA
tacttcctcaaccaacactttt

SEQ ID NO: 158380 - DNA, 22 bp, synthetic construct
  misc_feature 1..22: note = chemically synthesized
  source 1..22: mol_type = other DNA
cttcctcaaccaacacttttag

SEQ ID NO: 158381 - DNA, 22 bp, synthetic construct
  misc_feature 1..22: note = chemically synthesized
  source 1..22: mol_type = other DNA
cctcaaccaacacttttagaac

SEQ ID NO: 158382 - DNA, 22 bp, synthetic construct
  misc_feature 1..22: note = chemically synthesized
  source 1..22: mol_type = other DNA
ctcaaccaacacttttagaact

SEQ ID NO: 158383 - DNA, 22 bp, synthetic construct
  misc_feature 1..22: note = chemically synthesized
  source 1..22: mol_type = other DNA
aaccaacacttttagaactatc

SEQ ID NO: 158384 - DNA, 22 bp, synthetic construct
  misc_feature 1..22: note = chemically synthesized
  source 1..22: mol_type = other DNA
ttagaactatcatctaagatta

SEQ ID NO: 158385 - DNA, 22 bp, synthetic construct
  misc_feature 1..22: note = chemically synthesized
  source 1..22: mol_type = other DNA
tagaactatcatctaagattac

SEQ ID NO: 158386 - DNA, 22 bp, synthetic construct
  misc_feature 1..22: note = chemically synthesized
  source 1..22: mol_type = other DNA
agaactatcatctaagattaca

SEQ ID NO: 158387 - DNA, 22 bp, synthetic construct
  misc_feature 1..22: note = chemically synthesized
  source 1..22: mol_type = other DNA
gaactatcatctaagattacat

SEQ ID NO: 158388 - DNA, 22 bp, synthetic construct
  misc_feature 1..22: note = chemically synthesized
  source 1..22: mol_type = other DNA
tcatctaagattacatcggtca

SEQ ID NO: 158389 - DNA, 22 bp, synthetic construct
  misc_feature 1..22: note = chemically synthesized
  source 1..22: mol_type = other DNA
agattacatcggtcaaattttc

SEQ ID NO: 158390 - DNA, 22 bp, synthetic construct
  misc_feature 1..22: note = chemically synthesized
  source 1..22: mol_type = other DNA
catcggtcaaattttcttatgc

SEQ ID NO: 158391 - DNA, 22 bp, synthetic construct
  misc_feature 1..22: note = chemically synthesized
  source 1..22: mol_type = other DNA
tcttatgcttacaataaataaa

SEQ ID NO: 158392 - DNA, 22 bp, synthetic construct
  misc_feature 1..22: note = chemically synthesized
  source 1..22: mol_type = other DNA
cttatgcttacaataaataaat

SEQ ID NO: 158393 - DNA, 22 bp, synthetic construct
  misc_feature 1..22: note = chemically synthesized
  source 1..22: mol_type = other DNA
ttatgcttacaataaataaata

SEQ ID NO: 158394 - DNA, 22 bp, synthetic construct
  misc_feature 1..22: note = chemically synthesized
  source 1..22: mol_type = other DNA
atgcttacaataaataaatact

SEQ ID NO: 158395 - DNA, 22 bp, synthetic construct
  misc_feature 1..22: note = chemically synthesized
  source 1..22: mol_type = other DNA
tgcttacaataaataaatactt

SEQ ID NO: 158396 - DNA, 22 bp, synthetic construct
  misc_feature 1..22: note = chemically synthesized
  source 1..22: mol_type = other DNA
acaataaataaatactttttaa

SEQ ID NO: 158397 - DNA, 22 bp, synthetic construct
  misc_feature 1..22: note = chemically synthesized
  source 1..22: mol_type = other DNA
caataaataaatactttttaag

SEQ ID NO: 158398 - DNA, 22 bp, synthetic construct
  misc_feature 1..22: note = chemically synthesized
  source 1..22: mol_type = other DNA
tttaagccagcaacttcacttc

SEQ ID NO: 158399 - DNA, 22 bp, synthetic construct
  misc_feature 1..22: note = chemically synthesized
  source 1..22: mol_type = other DNA
ttaagccagcaacttcacttca

SEQ ID NO: 158400 - DNA, 22 bp, synthetic construct
  misc_feature 1..22: note = chemically synthesized
  source 1..22: mol_type = other DNA
taagccagcaacttcacttcac

SEQ ID NO: 158401 - DNA, 22 bp, synthetic construct
  misc_feature 1..22: note = chemically synthesized
  source 1..22: mol_type = other DNA
aagccagcaacttcacttcact

SEQ ID NO: 158402 - DNA, 22 bp, synthetic construct
  misc_feature 1..22: note = chemically synthesized
  source 1..22: mol_type = other DNA
agccagcaacttcacttcactt

SEQ ID NO: 158403 - DNA, 22 bp, synthetic construct
  misc_feature 1..22: note = chemically synthesized
  source 1..22: mol_type = other DNA
cacttcacttactatgttttat

SEQ ID NO: 158404 - DNA, 22 bp, synthetic construct
  misc_feature 1..22: note = chemically synthesized
  source 1..22: mol_type = other DNA
acttcacttactatgttttatt

SEQ ID NO: 158405 - DNA, 22 bp, synthetic construct
  misc_feature 1..22: note = chemically synthesized
  source 1..22: mol_type = other DNA
cacttactatgttttattacat

SEQ ID NO: 158406 - DNA, 22 bp, synthetic construct
  misc_feature 1..22: note = chemically synthesized
  source 1..22: mol_type = other DNA
acttactatgttttattacata

SEQ ID NO: 158407 - DNA, 22 bp, synthetic construct
  misc_feature 1..22: note = chemically synthesized
  source 1..22: mol_type = other DNA
actatgttttattacatattat

SEQ ID NO: 158408 - DNA, 22 bp, synthetic construct
  misc_feature 1..22: note = chemically synthesized
  source 1..22: mol_type = other DNA
ctatgttttattacatattatt

SEQ ID NO: 158409 - DNA, 22 bp, synthetic construct
  misc_feature 1..22: note = chemically synthesized
  source 1..22: mol_type = other DNA
tgttttattacatattattcat

SEQ ID NO: 158410 - DNA, 22 bp, synthetic construct
  misc_feature 1..22: note = chemically synthesized
  source 1..22: mol_type = other DNA
tattacatattattcattctaa

SEQ ID NO: 158411 - DNA, 22 bp, synthetic construct
  misc_feature 1..22: note = chemically synthesized
  source 1..22: mol_type = other DNA
attacatattattcattctaag

SEQ ID NO: 158412 - DNA, 22 bp, synthetic construct
  misc_feature 1..22: note = chemically synthesized
  source 1..22: mol_type = other DNA
ttacatattattcattctaagt

SEQ ID NO: 158413 - DNA, 22 bp, synthetic construct
  misc_feature 1..22: note = chemically synthesized
  source 1..22: mol_type = other DNA
catattattcattctaagtgta

SEQ ID NO: 158414 - DNA, 22 bp, synthetic construct
  misc_feature 1..22: note = chemically synthesized
  source 1..22: mol_type = other DNA
ttcattctaagtgtagtcctag

SEQ ID NO: 158415 - DNA, 22 bp, synthetic construct
  misc_feature 1..22: note = chemically synthesized
  source 1..22: mol_type = other DNA
attctaagtgtagtcctagata

SEQ ID NO: 158416 - DNA, 22 bp, synthetic construct
  misc_feature 1..22: note = chemically synthesized
  source 1..22: mol_type = other DNA
taagtgtagtcctagatatagt

SEQ ID NO: 158417 - DNA, 22 bp, synthetic construct
  misc_feature 1..22: note = chemically synthesized
  source 1..22: mol_type = other DNA
agtgtagtcctagatatagtag

SEQ ID NO: 158418 - DNA, 22 bp, synthetic construct
  misc_feature 1..22: note = chemically synthesized
  source 1..22: mol_type = other DNA
gatatagtagagtactacgcca

SEQ ID NO: 158419 - DNA, 22 bp, synthetic construct
  misc_feature 1..22: note = chemically synthesized
  source 1..22: mol_type = other DNA
cgccaagacatcaggtcaagga

SEQ ID NO: 158420 - DNA, 22 bp, synthetic construct
  misc_feature 1..22: note = chemically synthesized
  source 1..22: mol_type = other DNA
aaagcagaagagatgagaaaca

SEQ ID NO: 158421 - DNA, 22 bp, synthetic construct
  misc_feature 1..22: note = chemically synthesized
  source 1..22: mol_type = other DNA
caaatcctgtgacaacaaacat

SEQ ID NO: 158422 - DNA, 22 bp, synthetic construct
  misc_feature 1..22: note = chemically synthesized
  source 1..22: mol_type = other DNA
tgacaacaaacatctcaataga

SEQ ID NO: 158423 - DNA, 22 bp, synthetic construct
  misc_feature 1..22: note = chemically synthesized
  source 1..22: mol_type = other DNA
aatagaaatcacacagtccaag

SEQ ID NO: 158424 - DNA, 22 bp, synthetic construct
  misc_feature 1..22: note = chemically synthesized
  source 1..22: mol_type = other DNA
tcaaagcgctcagggataaaag

SEQ ID NO: 158425 - DNA, 22 bp, synthetic construct
  misc_feature 1..22: note = chemically synthesized
  source 1..22: mol_type = other DNA
caaagcgctcagggataaaaga

SEQ ID NO: 158426 - DNA, 22 bp, synthetic construct
  misc_feature 1..22: note = chemically synthesized
  source 1..22: mol_type = other DNA
aaagcgctcagggataaaagaa

SEQ ID NO: 158427 - DNA, 22 bp, synthetic construct
  misc_feature 1..22: note = chemically synthesized
  source 1..22: mol_type = other DNA
agggataaaagaaaactgatat

SEQ ID NO: 158428 - DNA, 22 bp, synthetic construct
  misc_feature 1..22: note = chemically synthesized
  source 1..22: mol_type = other DNA
atattcaagaatattttatagg

SEQ ID NO: 158429 - DNA, 22 bp, synthetic construct
  misc_feature 1..22: note = chemically synthesized
  source 1..22: mol_type = other DNA
aagaatattttatagggtaaaa

SEQ ID NO: 158430 - DNA, 22 bp, synthetic construct
  misc_feature 1..22: note = chemically synthesized
  source 1..22: mol_type = other DNA
tatagggtaaaactgttattca

SEQ ID NO: 158431 - DNA, 22 bp, synthetic construct
  misc_feature 1..22: note = chemically synthesized
  source 1..22: mol_type = other DNA
atagggtaaaactgttattcaa

SEQ ID NO: 158432 - DNA, 22 bp, synthetic construct
  misc_feature 1..22: note = chemically synthesized
  source 1..22: mol_type = other DNA
tagggtaaaactgttattcaaa

SEQ ID NO: 158433 - DNA, 22 bp, synthetic construct
  misc_feature 1..22: note = chemically synthesized
  source 1..22: mol_type = other DNA
ttattcaaatataagcaatata

SEQ ID NO: 158434 - DNA, 22 bp, synthetic construct
  misc_feature 1..22: note = chemically synthesized
  source 1..22: mol_type = other DNA
ttcaaatataagcaatatataa

SEQ ID NO: 158435 - DNA, 22 bp, synthetic construct
  misc_feature 1..22: note = chemically synthesized
  source 1..22: mol_type = other DNA
aaatataagcaatatataaagt

SEQ ID NO: 158436 - DNA, 22 bp, synthetic construct
  misc_feature 1..22: note = chemically synthesized
  source 1..22: mol_type = other DNA
tcccagacaaacaaaagttgag

SEQ ID NO: 158437 - DNA, 22 bp, synthetic construct
  misc_feature 1..22: note = chemically synthesized
  source 1..22: mol_type = other DNA
cccagacaaacaaaagttgaga

SEQ ID NO: 158438 - DNA, 22 bp, synthetic construct
  misc_feature 1..22: note = chemically synthesized
  source 1..22: mol_type = other DNA
ccagacaaacaaaagttgagag

SEQ ID NO: 158439 - DNA, 22 bp, synthetic construct
  misc_feature 1..22: note = chemically synthesized
  source 1..22: mol_type = other DNA
agagaattcaccaacaccagac

SEQ ID NO: 158440 - DNA, 22 bp, synthetic construct
  misc_feature 1..22: note = chemically synthesized
  source 1..22: mol_type = other DNA
accaacaccagaccatcttgca

SEQ ID NO: 158441 - DNA, 22 bp, synthetic construct
  misc_feature 1..22: note = chemically synthesized
  source 1..22: mol_type = other DNA
gcaaaaaatgctaaagggagtt

SEQ ID NO: 158442 - DNA, 22 bp, synthetic construct
  misc_feature 1..22: note = chemically synthesized
  source 1..22: mol_type = other DNA
caaaaaatgctaaagggagtta

SEQ ID NO: 158443 - DNA, 22 bp, synthetic construct
  misc_feature 1..22: note = chemically synthesized
  source 1..22: mol_type = other DNA
aagggagttatgcaatctgaaa

SEQ ID NO: 158444 - DNA, 22 bp, synthetic construct
  misc_feature 1..22: note = chemically synthesized
  source 1..22: mol_type = other DNA
tgcaatctgaaagaaaaaagac

SEQ ID NO: 158445 - DNA, 22 bp, synthetic construct
  misc_feature 1..22: note = chemically synthesized
  source 1..22: mol_type = other DNA
aaagaaaaaagacattaacatg

SEQ ID NO: 158446 - DNA, 22 bp, synthetic construct
  misc_feature 1..22: note = chemically synthesized
  source 1..22: mol_type = other DNA
acatgcaaaagaaaacttttca

SEQ ID NO: 158447 - DNA, 22 bp, synthetic construct
  misc_feature 1..22: note = chemically synthesized
  source 1..22: mol_type = other DNA
ttcaaagtatgaaacccactgg

SEQ ID NO: 158448 - DNA, 22 bp, synthetic construct
  misc_feature 1..22: note = chemically synthesized
  source 1..22: mol_type = other DNA
tcaaagtatgaaacccactggt

SEQ ID NO: 158449 - DNA, 22 bp, synthetic construct
  misc_feature 1..22: note = chemically synthesized
  source 1..22: mol_type = other DNA
caaagtatgaaacccactggta

SEQ ID NO: 158450 - DNA, 22 bp, synthetic construct
  misc_feature 1..22: note = chemically synthesized
  source 1..22: mol_type = other DNA
aaagtatgaaacccactggtaa

SEQ ID NO: 158451 - DNA, 22 bp, synthetic construct
  misc_feature 1..22: note = chemically synthesized
  source 1..22: mol_type = other DNA
gtaaaattaagtacatagacaa

SEQ ID NO: 158452 - DNA, 22 bp, synthetic construct
  misc_feature 1..22: note = chemically synthesized
  source 1..22: mol_type = other DNA
agtacatagacaaacctagaat

SEQ ID NO: 158453 - DNA, 22 bp, synthetic construct
  misc_feature 1..22: note = chemically synthesized
  source 1..22: mol_type = other DNA
gaataccccattactgtatttt

SEQ ID NO: 158454 - DNA, 22 bp, synthetic construct
  misc_feature 1..22: note = chemically synthesized
  source 1..22: mol_type = other DNA
ctgtattttttggtgtgcaatc

SEQ ID NO: 158455 - DNA, 22 bp, synthetic construct
  misc_feature 1..22: note = chemically synthesized
  source 1..22: mol_type = other DNA
tattttttggtgtgcaatccac

SEQ ID NO: 158456 - DNA, 22 bp, synthetic construct
  misc_feature 1..22: note = chemically synthesized
  source 1..22: mol_type = other DNA
tttggtgtgcaatccacacaga

SEQ ID NO: 158457 - DNA, 22 bp, synthetic construct
  misc_feature 1..22: note = chemically synthesized
  source 1..22: mol_type = other DNA
ttggtgtgcaatccacacagaa

SEQ ID NO: 158458 - DNA, 22 bp, synthetic construct
  misc_feature 1..22: note = chemically synthesized
  source 1..22: mol_type = other DNA
tggtgtgcaatccacacagaac

SEQ ID NO: 158459 - DNA, 22 bp, synthetic construct
  misc_feature 1..22: note = chemically synthesized
  source 1..22: mol_type = other DNA
ggtgtgcaatccacacagaact

SEQ ID NO: 158460 - DNA, 22 bp, synthetic construct
  misc_feature 1..22: note = chemically synthesized
  source 1..22: mol_type = other DNA
gtgtgcaatccacacagaactc

SEQ ID NO: 158461 - DNA, 22 bp, synthetic construct
  misc_feature 1..22: note = chemically synthesized
  source 1..22: mol_type = other DNA
cagtatgaaacccaaaaaacaa

SEQ ID NO: 158462 - DNA, 22 bp, synthetic construct
  misc_feature 1..22: note = chemically synthesized
  source 1..22: mol_type = other DNA
tcaaaaacagtaatagctatag

SEQ ID NO: 158463 - DNA, 22 bp, synthetic construct
  misc_feature 1..22: note = chemically synthesized
  source 1..22: mol_type = other DNA
caaaaacagtaatagctatagc

SEQ ID NO: 158464 - DNA, 22 bp, synthetic construct
  misc_feature 1..22: note = chemically synthesized
  source 1..22: mol_type = other DNA
aaaaacagtaatagctatagca

SEQ ID NO: 158465 - DNA, 22 bp, synthetic construct
  misc_feature 1..22: note = chemically synthesized
  source 1..22: mol_type = other DNA
tagcaaccttttaagatgtagg

SEQ ID NO: 158466 - DNA, 22 bp, synthetic construct
  misc_feature 1..22: note = chemically synthesized
  source 1..22: mol_type = other DNA
ttaagatgtaggtaatataaaa

SEQ ID NO: 158467 - DNA, 22 bp, synthetic construct
  misc_feature 1..22: note = chemically synthesized
  source 1..22: mol_type = other DNA
taagatgtaggtaatataaaat

SEQ ID NO: 158468 - DNA, 22 bp, synthetic construct
  misc_feature 1..22: note = chemically synthesized
  source 1..22: mol_type = other DNA
aagatgtaggtaatataaaata

SEQ ID NO: 158469 - DNA, 22 bp, synthetic construct
  misc_feature 1..22: note = chemically synthesized
  source 1..22: mol_type = other DNA
agatgtaggtaatataaaatat

SEQ ID NO: 158470 - DNA, 22 bp, synthetic construct
  misc_feature 1..22: note = chemically synthesized
  source 1..22: mol_type = other DNA
aagtgtagaatttttttgcctg

SEQ ID NO: 158471 - DNA, 22 bp, synthetic construct
  misc_feature 1..22: note = chemically synthesized
  source 1..22: mol_type = other DNA
ttttgcctgtttttgcccttgt

SEQ ID NO: 158472 - DNA, 22 bp, synthetic construct
  misc_feature 1..22: note = chemically synthesized
  source 1..22: mol_type = other DNA
tttgcctgtttttgcccttgtt

SEQ ID NO: 158473 - DNA, 22 bp, synthetic construct
  misc_feature 1..22: note = chemically synthesized
  source 1..22: mol_type = other DNA
ttgcctgtttttgcccttgttt

SEQ ID NO: 158474 - DNA, 22 bp, synthetic construct
  misc_feature 1..22: note = chemically synthesized
  source 1..22: mol_type = other DNA
tgcctgtttttgcccttgttta

SEQ ID NO: 158475 - DNA, 22 bp, synthetic construct
  misc_feature 1..22: note = chemically synthesized
  source 1..22: mol_type = other DNA
gcctgtttttgcccttgtttat

SEQ ID NO: 158476 - DNA, 22 bp, synthetic construct
  misc_feature 1..22: note = chemically synthesized
  source 1..22: mol_type = other DNA
cctgtttttgcccttgtttata

SEQ ID NO: 158477 - DNA, 22 bp, synthetic construct
  misc_feature 1..22: note = chemically synthesized
  source 1..22: mol_type = other DNA
tttttgcccttgtttatattcc

SEQ ID NO: 158478 - DNA, 22 bp, synthetic construct
  misc_feature 1..22: note = chemically synthesized
  source 1..22: mol_type = other DNA
ttgcccttgtttatattccttt

SEQ ID NO: 158479 - DNA, 22 bp, synthetic construct
  misc_feature 1..22: note = chemically synthesized
  source 1..22: mol_type = other DNA
tgcccttgtttatattccttta

SEQ ID NO: 158480 - DNA, 22 bp, synthetic construct
  misc_feature 1..22: note = chemically synthesized
  source 1..22: mol_type = other DNA
gcccttgtttatattcctttat

SEQ ID NO: 158481 - DNA, 22 bp, synthetic construct
  misc_feature 1..22: note = chemically synthesized
  source 1..22: mol_type = other DNA
cccttgtttatattcctttatt

SEQ ID NO: 158482 - DNA, 22 bp, synthetic construct
  misc_feature 1..22: note = chemically synthesized
  source 1..22: mol_type = other DNA
gtttatattcctttatttgcga

SEQ ID NO: 158483 - DNA, 22 bp, synthetic construct
  misc_feature 1..22: note = chemically synthesized
  source 1..22: mol_type = other DNA
tttatattcctttatttgcgat

SEQ ID NO: 158484 - DNA, 22 bp, synthetic construct
  misc_feature 1..22: note = chemically synthesized
  source 1..22: mol_type = other DNA
atattcctttatttgcgatcta

SEQ ID NO: 158485 - DNA, 22 bp, synthetic construct
  misc_feature 1..22: note = chemically synthesized
  source 1..22: mol_type = other DNA
tattcctttatttgcgatctaa

SEQ ID NO: 158486 - DNA, 22 bp, synthetic construct
  misc_feature 1..22: note = chemically synthesized
  source 1..22: mol_type = other DNA
ctttatttgcgatctaagataa

SEQ ID NO: 158487 - DNA, 22 bp, synthetic construct
  misc_feature 1..22: note = chemically synthesized
  source 1..22: mol_type = other DNA
tatttgcgatctaagataattc

SEQ ID NO: 158488 - DNA, 22 bp, synthetic construct
  misc_feature 1..22: note = chemically synthesized
  source 1..22: mol_type = other DNA
atttgcgatctaagataattcg

SEQ ID NO: 158489 - DNA, 22 bp, synthetic construct
  misc_feature 1..22: note = chemically synthesized
  source 1..22: mol_type = other DNA
tttgcgatctaagataattcgt

SEQ ID NO: 158490 - DNA, 22 bp, synthetic construct
  misc_feature 1..22: note = chemically synthesized
  source 1..22: mol_type = other DNA
gcgatctaagataattcgtcat

SEQ ID NO: 158491 - DNA, 22 bp, synthetic construct
  misc_feature 1..22: note = chemically synthesized
  source 1..22: mol_type = other DNA
cgatctaagataattcgtcatc

SEQ ID NO: 158492 - DNA, 22 bp, synthetic construct
  misc_feature 1..22: note = chemically synthesized
  source 1..22: mol_type = other DNA
agataattcgtcatcctttaaa

SEQ ID NO: 158493 - DNA, 22 bp, synthetic construct
  misc_feature 1..22: note = chemically synthesized
  source 1..22: mol_type = other DNA
gtcatcctttaaaataacttgc

SEQ ID NO: 158494 - DNA, 22 bp, synthetic construct
  misc_feature 1..22: note = chemically synthesized
  source 1..22: mol_type = other DNA
taaaataacttgctatatttat

SEQ ID NO: 158495 - DNA, 22 bp, synthetic construct
  misc_feature 1..22: note = chemically synthesized
  source 1..22: mol_type = other DNA
aaaataacttgctatatttata

SEQ ID NO: 158496 - DNA, 22 bp, synthetic construct
  misc_feature 1..22: note = chemically synthesized
  source 1..22: mol_type = other DNA
aaataacttgctatatttataa

SEQ ID NO: 158497 - DNA, 22 bp, synthetic construct
  misc_feature 1..22: note = chemically synthesized
  source 1..22: mol_type = other DNA
gctatatttataagatgtttct

SEQ ID NO: 158498 - DNA, 22 bp, synthetic construct
  misc_feature 1..22: note = chemically synthesized
  source 1..22: mol_type = other DNA
ctatatttataagatgtttctt

SEQ ID NO: 158499 - DNA, 22 bp, synthetic construct
  misc_feature 1..22: note = chemically synthesized
  source 1..22: mol_type = other DNA
tatttataagatgtttcttgta

SEQ ID NO: 158500 - DNA, 22 bp, synthetic construct
  misc_feature 1..22: note = chemically synthesized
  source 1..22: mol_type = other DNA
ataagatgtttcttgtaagccc

SEQ ID NO: 158501 - DNA, 22 bp, synthetic construct
  misc_feature 1..22: note = chemically synthesized
  source 1..22: mol_type = other DNA
taagatgtttcttgtaagcccc

SEQ ID NO: 158502 - DNA, 22 bp, synthetic construct
  misc_feature 1..22: note = chemically synthesized
  source 1..22: mol_type = other DNA
cttgtaagccccatggtaacca

SEQ ID NO: 158503 - DNA, 22 bp, synthetic construct
  misc_feature 1..22: note = chemically synthesized
  source 1..22: mol_type = other DNA
ttgtaagccccatggtaaccac

SEQ ID NO: 158504 - DNA, 22 bp, synthetic construct
  misc_feature 1..22: note = chemically synthesized
  source 1..22: mol_type = other DNA
gtaagccccatggtaaccacag

SEQ ID NO: 158505 - DNA, 22 bp, synthetic construct
  misc_feature 1..22: note = chemically synthesized
  source 1..22: mol_type = other DNA
taagccccatggtaaccacagc

SEQ ID NO: 158506 - DNA, 22 bp, synthetic construct
  misc_feature 1..22: note = chemically synthesized
  source 1..22: mol_type = other DNA
taatagatttactaaaaataaa

SEQ ID NO: 158507 - DNA, 22 bp, synthetic construct
  misc_feature 1..22: note = chemically synthesized
  source 1..22: mol_type = other DNA
actaaaaataaaaagtaacaaa

SEQ ID NO: 158508 - DNA, 22 bp, synthetic construct
  misc_feature 1..22: note = chemically synthesized
  source 1..22: mol_type = other DNA
ctaaaaataaaaagtaacaaat

SEQ ID NO: 158509 - DNA, 22 bp, synthetic construct
  misc_feature 1..22: note = chemically synthesized
  source 1..22: mol_type = other DNA
aaaataaaaagtaacaaattaa

SEQ ID NO: 158510 - DNA, 22 bp, synthetic construct
  misc_feature 1..22: note = chemically synthesized
  source 1..22: mol_type = other DNA
aaatatgctaccagagataatc

SEQ ID NO: 158511 - DNA, 22 bp, synthetic construct
  misc_feature 1..22: note = chemically synthesized
  source 1..22: mol_type = other DNA
ccagagataatcacataaccat

SEQ ID NO: 158512 - DNA, 22 bp, synthetic construct
  misc_feature 1..22: note = chemically synthesized
  source 1..22: mol_type = other DNA
catacagccaaaaataagcaaa

SEQ ID NO: 158513 - DNA, 22 bp, synthetic construct
  misc_feature 1..22: note = chemically synthesized
  source 1..22: mol_type = other DNA
acttagtaactacactgagtgt

SEQ ID NO: 158514 - DNA, 22 bp, synthetic construct
  misc_feature 1..22: note = chemically synthesized
  source 1..22: mol_type = other DNA
cttagtaactacactgagtgta

SEQ ID NO: 158515 - DNA, 22 bp, synthetic construct
  misc_feature 1..22: note = chemically synthesized
  source 1..22: mol_type = other DNA
agtaactacactgagtgtaaat

SEQ ID NO: 158516 - DNA, 22 bp, synthetic construct
  misc_feature 1..22: note = chemically synthesized
  source 1..22: mol_type = other DNA
gtaactacactgagtgtaaata

SEQ ID NO: 158517 - DNA, 22 bp, synthetic construct
  misc_feature 1..22: note = chemically synthesized
  source 1..22: mol_type = other DNA
cactgagtgtaaatagtctcag

SEQ ID NO: 158518 - DNA, 22 bp, synthetic construct
  misc_feature 1..22: note = chemically synthesized
  source 1..22: mol_type = other DNA
agtgtaaatagtctcagttccc

SEQ ID NO: 158519 - DNA, 22 bp, synthetic construct
  misc_feature 1..22: note = chemically synthesized
  source 1..22: mol_type = other DNA
agttccccaattaaaagtaata

SEQ ID NO: 158520 - DNA, 22 bp, synthetic construct
  misc_feature 1..22: note = chemically synthesized
  source 1..22: mol_type = other DNA
cccaattaaaagtaatagaatg

SEQ ID NO: 158521 - DNA, 22 bp, synthetic construct
  misc_feature 1..22: note = chemically synthesized
  source 1..22: mol_type = other DNA
aaagtaatagaatggtaaatgg

SEQ ID NO: 158522 - DNA, 22 bp, synthetic construct
  misc_feature 1..22: note = chemically synthesized
  source 1..22: mol_type = other DNA
tatgcgatcttcaagaaaccca

SEQ ID NO: 158523 - DNA, 22 bp, synthetic construct
  misc_feature 1..22: note = chemically synthesized
  source 1..22: mol_type = other DNA
atgcgatcttcaagaaacccac

SEQ ID NO: 158524 - DNA, 22 bp, synthetic construct
  misc_feature 1..22: note = chemically synthesized
  source 1..22: mol_type = other DNA
tgcgatcttcaagaaacccact

SEQ ID NO: 158525 - DNA, 22 bp, synthetic construct
  misc_feature 1..22: note = chemically synthesized
  source 1..22: mol_type = other DNA
caagaaacccacttcacctata

SEQ ID NO: 158526 - DNA, 22 bp, synthetic construct
  misc_feature 1..22: note = chemically synthesized
  source 1..22: mol_type = other DNA
aagaaacccacttcacctataa

SEQ ID NO: 158527 - DNA, 22 bp, synthetic construct
  misc_feature 1..22: note = chemically synthesized
  source 1..22: mol_type = other DNA
cacctataaaggcacacataaa

SEQ ID NO: 158528 - DNA, 22 bp, synthetic construct
  misc_feature 1..22: note = chemically synthesized
  source 1..22: mol_type = other DNA
acctataaaggcacacataaat

SEQ ID NO: 158529 - DNA, 22 bp, synthetic construct
  misc_feature 1..22: note = chemically synthesized
  source 1..22: mol_type = other DNA
taaaggcacacataaatgaaag

SEQ ID NO: 158530 - DNA, 22 bp, synthetic construct
  misc_feature 1..22: note = chemically synthesized
  source 1..22: mol_type = other DNA
gaaaaaaattccatgaactgga

SEQ ID NO: 158531 - DNA, 22 bp, synthetic construct
  misc_feature 1..22: note = chemically synthesized
  source 1..22: mol_type = other DNA
catgaactggaaaccagaaaga

SEQ ID NO: 158532 - DNA, 22 bp, synthetic construct
  misc_feature 1..22: note = chemically synthesized
  source 1..22: mol_type = other DNA
gaaaccagaaagagcagtagta

SEQ ID NO: 158533 - DNA, 22 bp, synthetic construct
  misc_feature 1..22: note = chemically synthesized
  source 1..22: mol_type = other DNA
tacttaaatcagataaaataga

SEQ ID NO: 158534 - DNA, 22 bp, synthetic construct
  misc_feature 1..22: note = chemically synthesized
  source 1..22: mol_type = other DNA
aaatcagataaaatagactaca

SEQ ID NO: 158535 - DNA, 22 bp, synthetic construct
  misc_feature 1..22: note = chemically synthesized
  source 1..22: mol_type = other DNA
aatcagataaaatagactacaa

SEQ ID NO: 158536 - DNA, 22 bp, synthetic construct
  misc_feature 1..22: note = chemically synthesized
  source 1..22: mol_type = other DNA
caaatttaaaaactgtaagaaa

SEQ ID NO: 158537 - DNA, 22 bp, synthetic construct
  misc_feature 1..22: note = chemically synthesized
  source 1..22: mol_type = other DNA
aaaaactgtaagaaaagataag

SEQ ID NO: 158538 - DNA, 22 bp, synthetic construct
  misc_feature 1..22: note = chemically synthesized
  source 1..22: mol_type = other DNA
aaaactgtaagaaaagataagg

SEQ ID NO: 158539 - DNA, 22 bp, synthetic construct
  misc_feature 1..22: note = chemically synthesized
  source 1..22: mol_type = other DNA
taagaaaagataaggagggtca

SEQ ID NO: 158540 - DNA, 22 bp, synthetic construct
  misc_feature 1..22: note = chemically synthesized
  source 1..22: mol_type = other DNA
tataataataaaggggtcaatt

SEQ ID NO: 158541 - DNA, 22 bp, synthetic construct
  misc_feature 1..22: note = chemically synthesized
  source 1..22: mol_type = other DNA
agcaagaggatacaattataaa

SEQ ID NO: 158542 - DNA, 22 bp, synthetic construct
  misc_feature 1..22: note = chemically synthesized
  source 1..22: mol_type = other DNA
taaatattgatgtatccaacat

SEQ ID NO: 158543 - DNA, 22 bp, synthetic construct
  misc_feature 1..22: note = chemically synthesized
  source 1..22: mol_type = other DNA
atgtatccaacatcaaagttcc

SEQ ID NO: 158544 - DNA, 22 bp, synthetic construct
  misc_feature 1..22: note = chemically synthesized
  source 1..22: mol_type = other DNA
ccaagtatataaggaaaacatt

SEQ ID NO: 158545 - DNA, 22 bp, synthetic construct
  misc_feature 1..22: note = chemically synthesized
  source 1..22: mol_type = other DNA
atagtcctaaagggcgagacag

SEQ ID NO: 158546 - DNA, 22 bp, synthetic construct
  misc_feature 1..22: note = chemically synthesized
  source 1..22: mol_type = other DNA
aagggcgagacagactgcaata

SEQ ID NO: 158547 - DNA, 22 bp, synthetic construct
  misc_feature 1..22: note = chemically synthesized
  source 1..22: mol_type = other DNA
caatacaataatagtagggaac

SEQ ID NO: 158548 - DNA, 22 bp, synthetic construct
  misc_feature 1..22: note = chemically synthesized
  source 1..22: mol_type = other DNA
taaacacttcagtctcagtaat

SEQ ID NO: 158549 - DNA, 22 bp, synthetic construct
  misc_feature 1..22: note = chemically synthesized
  source 1..22: mol_type = other DNA
aaacacttcagtctcagtaatg

SEQ ID NO: 158550 - DNA, 22 bp, synthetic construct
  misc_feature 1..22: note = chemically synthesized
  source 1..22: mol_type = other DNA
aacacttcagtctcagtaatga

SEQ ID NO: 158551 - DNA, 22 bp, synthetic construct
  misc_feature 1..22: note = chemically synthesized
  source 1..22: mol_type = other DNA
cagtctcagtaatgaacagatc

SEQ ID NO: 158552 - DNA, 22 bp, synthetic construct
  misc_feature 1..22: note = chemically synthesized
  source 1..22: mol_type = other DNA
agtctcagtaatgaacagatcg

SEQ ID NO: 158553 - DNA, 22 bp, synthetic construct
  misc_feature 1..22: note = chemically synthesized
  source 1..22: mol_type = other DNA
agtaatgaacagatcggccaga

SEQ ID NO: 158554 - DNA, 22 bp, synthetic construct
  misc_feature 1..22: note = chemically synthesized
  source 1..22: mol_type = other DNA
aaaatcaacaaatgaacaacac

SEQ ID NO: 158555 - DNA, 22 bp, synthetic construct
  misc_feature 1..22: note = chemically synthesized
  source 1..22: mol_type = other DNA
atgtacccactatatctaatag

SEQ ID NO: 158556 - DNA, 22 bp, synthetic construct
  misc_feature 1..22: note = chemically synthesized
  source 1..22: mol_type = other DNA
tatctaatagacccaactgaca

SEQ ID NO: 158557 - DNA, 22 bp, synthetic construct
  misc_feature 1..22: note = chemically synthesized
  source 1..22: mol_type = other DNA
atagacccaactgacattaaca

SEQ ID NO: 158558 - DNA, 22 bp, synthetic construct
  misc_feature 1..22: note = chemically synthesized
  source 1..22: mol_type = other DNA
acattaacagaacttgtccccc

SEQ ID NO: 158559 - DNA, 22 bp, synthetic construct
  misc_feature 1..22: note = chemically synthesized
  source 1..22: mol_type = other DNA
acagaacttgtcccccaactgc

SEQ ID NO: 158560 - DNA, 22 bp, synthetic construct
  misc_feature 1..22: note = chemically synthesized
  source 1..22: mol_type = other DNA
gtcccccaactgctgaagaaga

SEQ ID NO: 158561 - DNA, 22 bp, synthetic construct
  misc_feature 1..22: note = chemically synthesized
  source 1..22: mol_type = other DNA
tcccccaactgctgaagaagat

SEQ ID NO: 158562 - DNA, 22 bp, synthetic construct
  misc_feature 1..22: note = chemically synthesized
  source 1..22: mol_type = other DNA
ctgaagaagatacatttcttta

SEQ ID NO: 158563 - DNA, 22 bp, synthetic construct
  misc_feature 1..22: note = chemically synthesized
  source 1..22: mol_type = other DNA
aagaagatacatttctttaaag

SEQ ID NO: 158564 - DNA, 22 bp, synthetic construct
  misc_feature 1..22: note = chemically synthesized
  source 1..22: mol_type = other DNA
ctttaaagcagcatgtacaaca

SEQ ID NO: 158565 - DNA, 22 bp, synthetic construct
  misc_feature 1..22: note = chemically synthesized
  source 1..22: mol_type = other DNA
tttaaagcagcatgtacaacat

SEQ ID NO: 158566 - DNA, 22 bp, synthetic construct
  misc_feature 1..22: note = chemically synthesized
  source 1..22: mol_type = other DNA
taaagcagcatgtacaacattt

SEQ ID NO: 158567 - DNA, 22 bp, synthetic construct
  misc_feature 1..22: note = chemically synthesized
  source 1..22: mol_type = other DNA
aaagcagcatgtacaacatttt

SEQ ID NO: 158568 - DNA, 22 bp, synthetic construct
  misc_feature 1..22: note = chemically synthesized
  source 1..22: mol_type = other DNA
aagcagcatgtacaacattttc

SEQ ID NO: 158569 - DNA, 22 bp, synthetic construct
  misc_feature 1..22: note = chemically synthesized
  source 1..22: mol_type = other DNA
tcctaaataaggccatatgtta

SEQ ID NO: 158570 - DNA, 22 bp, synthetic construct
  misc_feature 1..22: note = chemically synthesized
  source 1..22: mol_type = other DNA
cctaaataaggccatatgttag

SEQ ID NO: 158571 - DNA, 22 bp, synthetic construct
  misc_feature 1..22: note = chemically synthesized
  source 1..22: mol_type = other DNA
ctaaataaggccatatgttagg

SEQ ID NO: 158572 - DNA, 22 bp, synthetic construct
  misc_feature 1..22: note = chemically synthesized
  source 1..22: mol_type = other DNA
aataaggccatatgttaggcca

SEQ ID NO: 158573 - DNA, 22 bp, synthetic construct
  misc_feature 1..22: note = chemically synthesized
  source 1..22: mol_type = other DNA
ggccacaaggtaagtttgtaca

SEQ ID NO: 158574 - DNA, 22 bp, synthetic construct
  misc_feature 1..22: note = chemically synthesized
  source 1..22: mol_type = other DNA
gtacaaatttttcagaagtaga

SEQ ID NO: 158575 - DNA, 22 bp, synthetic construct
  misc_feature 1..22: note = chemically synthesized
  source 1..22: mol_type = other DNA
tacaaatttttcagaagtagaa

SEQ ID NO: 158576 - DNA, 22 bp, synthetic construct
  misc_feature 1..22: note = chemically synthesized
  source 1..22: mol_type = other DNA
ttcagaagtagaaattttatca

SEQ ID NO: 158577 - DNA, 22 bp, synthetic construct
  misc_feature 1..22: note = chemically synthesized
  source 1..22: mol_type = other DNA
tcagaagtagaaattttatcaa

SEQ ID NO: 158578 - DNA, 22 bp, synthetic construct
  misc_feature 1..22: note = chemically synthesized
  source 1..22: mol_type = other DNA
cagaagtagaaattttatcaag

SEQ ID NO: 158579 - DNA, 22 bp, synthetic construct
  misc_feature 1..22: note = chemically synthesized
  source 1..22: mol_type = other DNA
agaagtagaaattttatcaagt

SEQ ID NO: 158580 - DNA, 22 bp, synthetic construct
  misc_feature 1..22: note = chemically synthesized
  source 1..22: mol_type = other DNA
tatcaagtatattttctgacca

SEQ ID NO: 158581 - DNA, 22 bp, synthetic construct
  misc_feature 1..22: note = chemically synthesized
  source 1..22: mol_type = other DNA
atcaagtatattttctgaccac

SEQ ID NO: 158582 - DNA, 22 bp, synthetic construct
  misc_feature 1..22: note = chemically synthesized
  source 1..22: mol_type = other DNA
tcaagtatattttctgaccaca

SEQ ID NO: 158583 - DNA, 22 bp, synthetic construct
  misc_feature 1..22: note = chemically synthesized
  source 1..22: mol_type = other DNA
tctgaccacagtggaataaaac

SEQ ID NO: 158584 - DNA, 22 bp, synthetic construct
  misc_feature 1..22: note = chemically synthesized
  source 1..22: mol_type = other DNA
ctgaccacagtggaataaaact

SEQ ID NO: 158585 - DNA, 22 bp, synthetic construct
  misc_feature 1..22: note = chemically synthesized
  source 1..22: mol_type = other DNA
tgaccacagtggaataaaacta

SEQ ID NO: 158586 - DNA, 22 bp, synthetic construct
  misc_feature 1..22: note = chemically synthesized
  source 1..22: mol_type = other DNA
accacagtggaataaaactaga

SEQ ID NO: 158587 - DNA, 22 bp, synthetic construct
  misc_feature 1..22: note = chemically synthesized
  source 1..22: mol_type = other DNA
gaaatgaataacaagaagatca

SEQ ID NO: 158588 - DNA, 22 bp, synthetic construct
  misc_feature 1..22: note = chemically synthesized
  source 1..22: mol_type = other DNA
ctgaatgtcaggcctctgagcc

SEQ ID NO: 158589 - DNA, 22 bp, synthetic construct
  misc_feature 1..22: note = chemically synthesized
  source 1..22: mol_type = other DNA
aatgtcaggcctctgagcccaa

SEQ ID NO: 158590 - DNA, 22 bp, synthetic construct
  misc_feature 1..22: note = chemically synthesized
  source 1..22: mol_type = other DNA
tgagcccaagctaagccatcat

SEQ ID NO: 158591 - DNA, 22 bp, synthetic construct
  misc_feature 1..22: note = chemically synthesized
  source 1..22: mol_type = other DNA
agcccaagctaagccatcatgt

SEQ ID NO: 158592 - DNA, 22 bp, synthetic construct
  misc_feature 1..22: note = chemically synthesized
  source 1..22: mol_type = other DNA
agccatcatgtcccctgtgacc

SEQ ID NO: 158593 - DNA, 22 bp, synthetic construct
  misc_feature 1..22: note = chemically synthesized
  source 1..22: mol_type = other DNA
tgacctgcatatacacatacag

SEQ ID NO: 158594 - DNA, 22 bp, synthetic construct
  misc_feature 1..22: note = chemically synthesized
  source 1..22: mol_type = other DNA
catatacacatacagatggcca

SEQ ID NO: 158595 - DNA, 22 bp, synthetic construct
  misc_feature 1..22: note = chemically synthesized
  source 1..22: mol_type = other DNA
ctgccttaactgatgacattcc

SEQ ID NO: 158596 - DNA, 22 bp, synthetic construct
  misc_feature 1..22: note = chemically synthesized
  source 1..22: mol_type = other DNA
tgccttaactgatgacattcca

SEQ ID NO: 158597 - DNA, 22 bp, synthetic construct
  misc_feature 1..22: note = chemically synthesized
  source 1..22: mol_type = other DNA
ccttaactgatgacattccacc

SEQ ID NO: 158598 - DNA, 22 bp, synthetic construct
  misc_feature 1..22: note = chemically synthesized
  source 1..22: mol_type = other DNA
aactgatgacattccaccacaa

SEQ ID NO: 158599 - DNA, 22 bp, synthetic construct
  misc_feature 1..22: note = chemically synthesized
  source 1..22: mol_type = other DNA
actgatgacattccaccacaaa

SEQ ID NO: 158600 - DNA, 22 bp, synthetic construct
  misc_feature 1..22: note = chemically synthesized
  source 1..22: mol_type = other DNA
atgacattccaccacaaaagaa

SEQ ID NO: 158601 - DNA, 22 bp, synthetic construct
  misc_feature 1..22: note = chemically synthesized
  source 1..22: mol_type = other DNA
caccacaaaagaagtgaaaatg

SEQ ID NO: 158602 - DNA, 22 bp, synthetic construct
  misc_feature 1..22: note = chemically synthesized
  source 1..22: mol_type = other DNA
ttcctgccttaactgatgacat

SEQ ID NO: 158603 - DNA, 22 bp, synthetic construct
  misc_feature 1..22: note = chemically synthesized
  source 1..22: mol_type = other DNA
ctgccttaactgatgacattgt

SEQ ID NO: 158604 - DNA, 22 bp, synthetic construct
  misc_feature 1..22: note = chemically synthesized
  source 1..22: mol_type = other DNA
ccttaactgatgacattgtctt

SEQ ID NO: 158605 - DNA, 22 bp, synthetic construct
  misc_feature 1..22: note = chemically synthesized
  source 1..22: mol_type = other DNA
aactgatgacattgtcttgtga

SEQ ID NO: 158606 - DNA, 22 bp, synthetic construct
  misc_feature 1..22: note = chemically synthesized
  source 1..22: mol_type = other DNA
actgatgacattgtcttgtgaa

SEQ ID NO: 158607 - DNA, 22 bp, synthetic construct
  misc_feature 1..22: note = chemically synthesized
  source 1..22: mol_type = other DNA
atgacattgtcttgtgaaattc

SEQ ID NO: 158608 - DNA, 22 bp, synthetic construct
  misc_feature 1..22: note = chemically synthesized
  source 1..22: mol_type = other DNA
tcttgtgaaattccttctcctg

SEQ ID NO: 158609 - DNA, 22 bp, synthetic construct
  misc_feature 1..22: note = chemically synthesized
  source 1..22: mol_type = other DNA
gtgaaattccttctcctggctc

SEQ ID NO: 158610 - DNA, 22 bp, synthetic construct
  misc_feature 1..22: note = chemically synthesized
  source 1..22: mol_type = other DNA
tgaaattccttctcctggctca

SEQ ID NO: 158611 - DNA, 22 bp, synthetic construct
  misc_feature 1..22: note = chemically synthesized
  source 1..22: mol_type = other DNA
cttctcctggctcatcctggct

SEQ ID NO: 158612 - DNA, 22 bp, synthetic construct
  misc_feature 1..22: note = chemically synthesized
  source 1..22: mol_type = other DNA
ctcctggctcatcctggctcaa

SEQ ID NO: 158613 - DNA, 22 bp, synthetic construct
  misc_feature 1..22: note = chemically synthesized
  source 1..22: mol_type = other DNA
tcctggctcatcctggctcaaa

SEQ ID NO: 158614 - DNA, 22 bp, synthetic construct
  misc_feature 1..22: note = chemically synthesized
  source 1..22: mol_type = other DNA
ctggctcatcctggctcaaaag

SEQ ID NO: 158615 - DNA, 22 bp, synthetic construct
  misc_feature 1..22: note = chemically synthesized
  source 1..22: mol_type = other DNA
gctcatcctggctcaaaagctc

SEQ ID NO: 158616 - DNA, 22 bp, synthetic construct
  misc_feature 1..22: note = chemically synthesized
  source 1..22: mol_type = other DNA
atcctggctcaaaagctcccct

SEQ ID NO: 158617 - DNA, 22 bp, synthetic construct
  misc_feature 1..22: note = chemically synthesized
  source 1..22: mol_type = other DNA
gctcaaaagctcccctactgag

SEQ ID NO: 158618 - DNA, 22 bp, synthetic construct
  misc_feature 1..22: note = chemically synthesized
  source 1..22: mol_type = other DNA
aaaagctcccctactgagcacc

SEQ ID NO: 158619 - DNA, 22 bp, synthetic construct
  misc_feature 1..22: note = chemically synthesized
  source 1..22: mol_type = other DNA
ccctactgagcaccttgtgacc

SEQ ID NO: 158620 - DNA, 22 bp, synthetic construct
  misc_feature 1..22: note = chemically synthesized
  source 1..22: mol_type = other DNA
ctgagcaccttgtgacccccac

SEQ ID NO: 158621 - DNA, 22 bp, synthetic construct
  misc_feature 1..22: note = chemically synthesized
  source 1..22: mol_type = other DNA
agcaccttgtgacccccactcc

SEQ ID NO: 158622 - DNA, 22 bp, synthetic construct
  misc_feature 1..22: note = chemically synthesized
  source 1..22: mol_type = other DNA
gtgacccccactcctgcccgcc

SEQ ID NO: 158623 - DNA, 22 bp, synthetic construct
  misc_feature 1..22: note = chemically synthesized
  source 1..22: mol_type = other DNA
tgacccccactcctgcccgcca

SEQ ID NO: 158624 - DNA, 22 bp, synthetic construct
  misc_feature 1..22: note = chemically synthesized
  source 1..22: mol_type = other DNA
ctgcccgccagagaacaacccc

SEQ ID NO: 158625 - DNA, 22 bp, synthetic construct
  misc_feature 1..22: note = chemically synthesized
  source 1..22: mol_type = other DNA
cccgccagagaacaacccccct

SEQ ID NO: 158626 - DNA, 22 bp, synthetic construct
  misc_feature 1..22: note = chemically synthesized
  source 1..22: mol_type = other DNA
tgactgtaattttcctttacct

SEQ ID NO: 158627 - DNA, 22 bp, synthetic construct
  misc_feature 1..22: note = chemically synthesized
  source 1..22: mol_type = other DNA
gactgtaattttcctttaccta

SEQ ID NO: 158628 - DNA, 22 bp, synthetic construct
  misc_feature 1..22: note = chemically synthesized
  source 1..22: mol_type = other DNA
actgtaattttcctttacctac

SEQ ID NO: 158629 - DNA, 22 bp, synthetic construct
  misc_feature 1..22: note = chemically synthesized
  source 1..22: mol_type = other DNA
taattttcctttacctacccaa

SEQ ID NO: 158630 - DNA, 22 bp, synthetic construct
  misc_feature 1..22: note = chemically synthesized
  source 1..22: mol_type = other DNA
tcctttacctacccaaatctta

SEQ ID NO: 158631 - DNA, 22 bp, synthetic construct
  misc_feature 1..22: note = chemically synthesized
  source 1..22: mol_type = other DNA
cctttacctacccaaatcttat

SEQ ID NO: 158632 - DNA, 22 bp, synthetic construct
  misc_feature 1..22: note = chemically synthesized
  source 1..22: mol_type = other DNA
ctttacctacccaaatcttata

SEQ ID NO: 158633 - DNA, 22 bp, synthetic construct
  misc_feature 1..22: note = chemically synthesized
  source 1..22: mol_type = other DNA
tacctacccaaatcttataaaa

SEQ ID NO: 158634 - DNA, 22 bp, synthetic construct
  misc_feature 1..22: note = chemically synthesized
  source 1..22: mol_type = other DNA
acctacccaaatcttataaaac

SEQ ID NO: 158635 - DNA, 22 bp, synthetic construct
  misc_feature 1..22: note = chemically synthesized
  source 1..22: mol_type = other DNA
cctacccaaatcttataaaaca

SEQ ID NO: 158636 - DNA, 22 bp, synthetic construct
  misc_feature 1..22: note = chemically synthesized
  source 1..22: mol_type = other DNA
cccaaatcttataaaacagccc

SEQ ID NO: 158637 - DNA, 22 bp, synthetic construct
  misc_feature 1..22: note = chemically synthesized
  source 1..22: mol_type = other DNA
ataaaacagccccactcctatc

SEQ ID NO: 158638 - DNA, 22 bp, synthetic construct
  misc_feature 1..22: note = chemically synthesized
  source 1..22: mol_type = other DNA
taaaacagccccactcctatct

SEQ ID NO: 158639 - DNA, 22 bp, synthetic construct
  misc_feature 1..22: note = chemically synthesized
  source 1..22: mol_type = other DNA
ctatctccctttgctgactctc

SEQ ID NO: 158640 - DNA, 22 bp, synthetic construct
  misc_feature 1..22: note = chemically synthesized
  source 1..22: mol_type = other DNA
tctccctttgctgactctcttt

SEQ ID NO: 158641 - DNA, 22 bp, synthetic construct
  misc_feature 1..22: note = chemically synthesized
  source 1..22: mol_type = other DNA
cctttgctgactctctttttgg

SEQ ID NO: 158642 - DNA, 22 bp, synthetic construct
  misc_feature 1..22: note = chemically synthesized
  source 1..22: mol_type = other DNA
tgctgactctctttttggactc

SEQ ID NO: 158643 - DNA, 22 bp, synthetic construct
  misc_feature 1..22: note = chemically synthesized
  source 1..22: mol_type = other DNA
gctgactctctttttggactca

SEQ ID NO: 158644 - DNA, 22 bp, synthetic construct
  misc_feature 1..22: note = chemically synthesized
  source 1..22: mol_type = other DNA
ctgactctctttttggactcag

SEQ ID NO: 158645 - DNA, 22 bp, synthetic construct
  misc_feature 1..22: note = chemically synthesized
  source 1..22: mol_type = other DNA
actctctttttggactcagcct

SEQ ID NO: 158646 - DNA, 22 bp, synthetic construct
  misc_feature 1..22: note = chemically synthesized
  source 1..22: mol_type = other DNA
tctttttggactcagcctgcct

SEQ ID NO: 158647 - DNA, 22 bp, synthetic construct
  misc_feature 1..22: note = chemically synthesized
  source 1..22: mol_type = other DNA
tttttggactcagcctgcctgc

SEQ ID NO: 158648 - DNA, 22 bp, synthetic construct
  misc_feature 1..22: note = chemically synthesized
  source 1..22: mol_type = other DNA
tttggactcagcctgcctgcac

SEQ ID NO: 158649 - DNA, 22 bp, synthetic construct
  misc_feature 1..22: note = chemically synthesized
  source 1..22: mol_type = other DNA
ttggactcagcctgcctgcacc

SEQ ID NO: 158650 - DNA, 22 bp, synthetic construct
  misc_feature 1..22: note = chemically synthesized
  source 1..22: mol_type = other DNA
tggactcagcctgcctgcaccc

SEQ ID NO: 158651 - DNA, 22 bp, synthetic construct
  misc_feature 1..22: note = chemically synthesized
  source 1..22: mol_type = other DNA
ggactcagcctgcctgcaccca

SEQ ID NO: 158652 - DNA, 22 bp, synthetic construct
  misc_feature 1..22: note = chemically synthesized
  source 1..22: mol_type = other DNA
gactcagcctgcctgcacccag

SEQ ID NO: 158653 - DNA, 22 bp, synthetic construct
  misc_feature 1..22: note = chemically synthesized
  source 1..22: mol_type = other DNA
agcctgcctgcacccaggtgaa

SEQ ID NO: 158654 - DNA, 22 bp, synthetic construct
  misc_feature 1..22: note = chemically synthesized
  source 1..22: mol_type = other DNA
cctgcacccaggtgaaataaac

SEQ ID NO: 158655 - DNA, 22 bp, synthetic construct
  misc_feature 1..22: note = chemically synthesized
  source 1..22: mol_type = other DNA
cacccaggtgaaataaacagcc

SEQ ID NO: 158656 - DNA, 22 bp, synthetic construct
  misc_feature 1..22: note = chemically synthesized
  source 1..22: mol_type = other DNA
gttgcttacacaaagcctgttt

SEQ ID NO: 158657 - DNA, 22 bp, synthetic construct
  misc_feature 1..22: note = chemically synthesized
  source 1..22: mol_type = other DNA
ttgcttacacaaagcctgtttg

SEQ ID NO: 158658 - DNA, 22 bp, synthetic construct
  misc_feature 1..22: note = chemically synthesized
  source 1..22: mol_type = other DNA
cttacacaaagcctgtttggta

SEQ ID NO: 158659 - DNA, 22 bp, synthetic construct
  misc_feature 1..22: note = chemically synthesized
  source 1..22: mol_type = other DNA
acacaaagcctgtttggtagtc

SEQ ID NO: 158660 - DNA, 22 bp, synthetic construct
  misc_feature 1..22: note = chemically synthesized
  source 1..22: mol_type = other DNA
cacaaagcctgtttggtagtct

SEQ ID NO: 158661 - DNA, 22 bp, synthetic construct
  misc_feature 1..22: note = chemically synthesized
  source 1..22: mol_type = other DNA
tttggtagtctcttcatatgga

SEQ ID NO: 158662 - DNA, 22 bp, synthetic construct
  misc_feature 1..22: note = chemically synthesized
  source 1..22: mol_type = other DNA
ggtagtctcttcatatggacgc

SEQ ID NO: 158663 - DNA, 22 bp, synthetic construct
  misc_feature 1..22: note = chemically synthesized
  source 1..22: mol_type = other DNA
gtagtctcttcatatggacgcg

SEQ ID NO: 158664 - DNA, 22 bp, synthetic construct
  misc_feature 1..22: note = chemically synthesized
  source 1..22: mol_type = other DNA
ttcatatggacgcgcatgaaat

SEQ ID NO: 158665 - DNA, 22 bp, synthetic construct
  misc_feature 1..22: note = chemically synthesized
  source 1..22: mol_type = other DNA
catatggacgcgcatgaaattt

SEQ ID NO: 158666 - DNA, 22 bp, synthetic construct
  misc_feature 1..22: note = chemically synthesized
  source 1..22: mol_type = other DNA
atatggacgcgcatgaaatttg

SEQ ID NO: 158667 - DNA, 22 bp, synthetic construct
  misc_feature 1..22: note = chemically synthesized
  source 1..22: mol_type = other DNA
ggtgccgtgactcagattgggg

SEQ ID NO: 158668 - DNA, 22 bp, synthetic construct
  misc_feature 1..22: note = chemically synthesized
  source 1..22: mol_type = other DNA
gtgccgtgactcagattggggg

SEQ ID NO: 158669 - DNA, 22 bp, synthetic construct
  misc_feature 1..22: note = chemically synthesized
  source 1..22: mol_type = other DNA
agattgggggacctcccttggg

SEQ ID NO: 158670 - DNA, 22 bp, synthetic construct
  misc_feature 1..22: note = chemically synthesized
  source 1..22: mol_type = other DNA
ggggacctcccttgggagatca

SEQ ID NO: 158671 - DNA, 22 bp, synthetic construct
  misc_feature 1..22: note = chemically synthesized
  source 1..22: mol_type = other DNA
ccttgggagatcaatcccctgt

SEQ ID NO: 158672 - DNA, 22 bp, synthetic construct
  misc_feature 1..22: note = chemically synthesized
  source 1..22: mol_type = other DNA
gggagatcaatcccctgtcctc

SEQ ID NO: 158673 - DNA, 22 bp, synthetic construct
  misc_feature 1..22: note = chemically synthesized
  source 1..22: mol_type = other DNA
ggagatcaatcccctgtcctcc

SEQ ID NO: 158674 - DNA, 22 bp, synthetic construct
  misc_feature 1..22: note = chemically synthesized
  source 1..22: mol_type = other DNA
tcctcctgctctttgctccgtg

SEQ ID NO: 158675 - DNA, 22 bp, synthetic construct
  misc_feature 1..22: note = chemically synthesized
  source 1..22: mol_type = other DNA
ctgctctttgctccgtgagaaa

SEQ ID NO: 158676 - DNA, 22 bp, synthetic construct
  misc_feature 1..22: note = chemically synthesized
  source 1..22: mol_type = other DNA
ctctttgctccgtgagaaagat

SEQ ID NO: 158677 - DNA, 22 bp, synthetic construct
  misc_feature 1..22: note = chemically synthesized
  source 1..22: mol_type = other DNA
tttgctccgtgagaaagatcca

SEQ ID NO: 158678 - DNA, 22 bp, synthetic construct
  misc_feature 1..22: note = chemically synthesized
  source 1..22: mol_type = other DNA
tgctccgtgagaaagatccacc

SEQ ID NO: 158679 - DNA, 22 bp, synthetic construct
  misc_feature 1..22: note = chemically synthesized
  source 1..22: mol_type = other DNA
gctccgtgagaaagatccacct

SEQ ID NO: 158680 - DNA, 22 bp, synthetic construct
  misc_feature 1..22: note = chemically synthesized
  source 1..22: mol_type = other DNA
ctccgtgagaaagatccaccta

SEQ ID NO: 158681 - DNA, 22 bp, synthetic construct
  misc_feature 1..22: note = chemically synthesized
  source 1..22: mol_type = other DNA
cgtgagaaagatccacctacga

SEQ ID NO: 158682 - DNA, 22 bp, synthetic construct
  misc_feature 1..22: note = chemically synthesized
  source 1..22: mol_type = other DNA
cgacctcaggtcctcaaactga

SEQ ID NO: 158683 - DNA, 22 bp, synthetic construct
  misc_feature 1..22: note = chemically synthesized
  source 1..22: mol_type = other DNA
aggtcctcaaactgaccagccc

SEQ ID NO: 158684 - DNA, 22 bp, synthetic construct
  misc_feature 1..22: note = chemically synthesized
  source 1..22: mol_type = other DNA
aaactgaccagcccaagaaaca

SEQ ID NO: 158685 - DNA, 22 bp, synthetic construct
  misc_feature 1..22: note = chemically synthesized
  source 1..22: mol_type = other DNA
accagcccaagaaacatttcac

SEQ ID NO: 158686 - DNA, 22 bp, synthetic construct
  misc_feature 1..22: note = chemically synthesized
  source 1..22: mol_type = other DNA
caccaatttcaaatccggtaag

SEQ ID NO: 158687 - DNA, 22 bp, synthetic construct
  misc_feature 1..22: note = chemically synthesized
  source 1..22: mol_type = other DNA
accaatttcaaatccggtaagt

SEQ ID NO: 158688 - DNA, 22 bp, synthetic construct
  misc_feature 1..22: note = chemically synthesized
  source 1..22: mol_type = other DNA
caaatccggtaagtggcctctt

SEQ ID NO: 158689 - DNA, 22 bp, synthetic construct
  misc_feature 1..22: note = chemically synthesized
  source 1..22: mol_type = other DNA
aaatccggtaagtggcctcttt

SEQ ID NO: 158690 - DNA, 22 bp, synthetic construct
  misc_feature 1..22: note = chemically synthesized
  source 1..22: mol_type = other DNA
tttttactgtcttctccaacct

SEQ ID NO: 158691 - DNA, 22 bp, synthetic construct
  misc_feature 1..22: note = chemically synthesized
  source 1..22: mol_type = other DNA
tttactgtcttctccaacctcc

SEQ ID NO: 158692 - DNA, 22 bp, synthetic construct
  misc_feature 1..22: note = chemically synthesized
  source 1..22: mol_type = other DNA
ttactgtcttctccaacctccc

SEQ ID NO: 158693 - DNA, 22 bp, synthetic construct
  misc_feature 1..22: note = chemically synthesized
  source 1..22: mol_type = other DNA
tactgtcttctccaacctccct

SEQ ID NO: 158694 - DNA, 22 bp, synthetic construct
  misc_feature 1..22: note = chemically synthesized
  source 1..22: mol_type = other DNA
actgtcttctccaacctccctc

SEQ ID NO: 158695 - DNA, 22 bp, synthetic construct
  misc_feature 1..22: note = chemically synthesized
  source 1..22: mol_type = other DNA
ctgtcttctccaacctccctca

SEQ ID NO: 158696 - DNA, 22 bp, synthetic construct
  misc_feature 1..22: note = chemically synthesized
  source 1..22: mol_type = other DNA
tcttctccaacctccctcacta

SEQ ID NO: 158697 - DNA, 22 bp, synthetic construct
  misc_feature 1..22: note = chemically synthesized
  source 1..22: mol_type = other DNA
ctccaacctccctcactatccc

SEQ ID NO: 158698 - DNA, 22 bp, synthetic construct
  misc_feature 1..22: note = chemically synthesized
  source 1..22: mol_type = other DNA
tccaacctccctcactatccct

SEQ ID NO: 158699 - DNA, 22 bp, synthetic construct
  misc_feature 1..22: note = chemically synthesized
  source 1..22: mol_type = other DNA
caacctccctcactatccctca

SEQ ID NO: 158700 - DNA, 22 bp, synthetic construct
  misc_feature 1..22: note = chemically synthesized
  source 1..22: mol_type = other DNA
cctcactatccctcaacttctt

SEQ ID NO: 158701 - DNA, 22 bp, synthetic construct
  misc_feature 1..22: note = chemically synthesized
  source 1..22: mol_type = other DNA
actatccctcaacttctttctc

SEQ ID NO: 158702 - DNA, 22 bp, synthetic construct
  misc_feature 1..22: note = chemically synthesized
  source 1..22: mol_type = other DNA
tccctcaacttctttctccttt

SEQ ID NO: 158703 - DNA, 22 bp, synthetic construct
  misc_feature 1..22: note = chemically synthesized
  source 1..22: mol_type = other DNA
aacttctttctcctttcaatct

SEQ ID NO: 158704 - DNA, 22 bp, synthetic construct
  misc_feature 1..22: note = chemically synthesized
  source 1..22: mol_type = other DNA
ctttctcctttcaatcttggca

SEQ ID NO: 158705 - DNA, 22 bp, synthetic construct
  misc_feature 1..22: note = chemically synthesized
  source 1..22: mol_type = other DNA
tttctcctttcaatcttggcac

SEQ ID NO: 158706 - DNA, 22 bp, synthetic construct
  misc_feature 1..22: note = chemically synthesized
  source 1..22: mol_type = other DNA
tctcctttcaatcttggcacca

SEQ ID NO: 158707 - DNA, 22 bp, synthetic construct
  misc_feature 1..22: note = chemically synthesized
  source 1..22: mol_type = other DNA
ctcctttcaatcttggcaccac

SEQ ID NO: 158708 - DNA, 22 bp, synthetic construct
  misc_feature 1..22: note = chemically synthesized
  source 1..22: mol_type = other DNA
tcctttcaatcttggcaccaca

SEQ ID NO: 158709 - DNA, 22 bp, synthetic construct
  misc_feature 1..22: note = chemically synthesized
  source 1..22: mol_type = other DNA
ctttcaatcttggcaccacact

SEQ ID NO: 158710 - DNA, 22 bp, synthetic construct
  misc_feature 1..22: note = chemically synthesized
  source 1..22: mol_type = other DNA
tcaatcttggcaccacacttca

SEQ ID NO: 158711 - DNA, 22 bp, synthetic construct
  misc_feature 1..22: note = chemically synthesized
  source 1..22: mol_type = other DNA
caatcttggcaccacacttcaa

SEQ ID NO: 158712 - DNA, 22 bp, synthetic construct
  misc_feature 1..22: note = chemically synthesized
  source 1..22: mol_type = other DNA
aatcttggcaccacacttcaat

SEQ ID NO: 158713 - DNA, 22 bp, synthetic construct
  misc_feature 1..22: note = chemically synthesized
  source 1..22: mol_type = other DNA
ggcaccacacttcaatttctcc

SEQ ID NO: 158714 - DNA, 22 bp, synthetic construct
  misc_feature 1..22: note = chemically synthesized
  source 1..22: mol_type = other DNA
gcaccacacttcaatttctccc

SEQ ID NO: 158715 - DNA, 22 bp, synthetic construct
  misc_feature 1..22: note = chemically synthesized
  source 1..22: mol_type = other DNA
caatttctcccttctcttaatt

SEQ ID NO: 158716 - DNA, 22 bp, synthetic construct
  misc_feature 1..22: note = chemically synthesized
  source 1..22: mol_type = other DNA
aatttctcccttctcttaattt

SEQ ID NO: 158717 - DNA, 22 bp, synthetic construct
  misc_feature 1..22: note = chemically synthesized
  source 1..22: mol_type = other DNA
ctcccttctcttaatttcaatt

SEQ ID NO: 158718 - DNA, 22 bp, synthetic construct
  misc_feature 1..22: note = chemically synthesized
  source 1..22: mol_type = other DNA
tcccttctcttaatttcaattc

SEQ ID NO: 158719 - DNA, 22 bp, synthetic construct
  misc_feature 1..22: note = chemically synthesized
  source 1..22: mol_type = other DNA
ccttctcttaatttcaattcct

SEQ ID NO: 158720 - DNA, 22 bp, synthetic construct
  misc_feature 1..22: note = chemically synthesized
  source 1..22: mol_type = other DNA
ctcttaatttcaattcctttca

SEQ ID NO: 158721 - DNA, 22 bp, synthetic construct
  misc_feature 1..22: note = chemically synthesized
  source 1..22: mol_type = other DNA
tcttaatttcaattcctttcat

SEQ ID NO: 158722 - DNA, 22 bp, synthetic construct
  misc_feature 1..22: note = chemically synthesized
  source 1..22: mol_type = other DNA
ttaatttcaattcctttcattt

SEQ ID NO: 158723 - DNA, 22 bp, synthetic construct
  misc_feature 1..22: note = chemically synthesized
  source 1..22: mol_type = other DNA
aatttcaattcctttcattttc

SEQ ID NO: 158724 - DNA, 22 bp, synthetic construct
  misc_feature 1..22: note = chemically synthesized
  source 1..22: mol_type = other DNA
atttcaattcctttcattttcc

SEQ ID NO: 158725 - DNA, 22 bp, synthetic construct
  misc_feature 1..22: note = chemically synthesized
  source 1..22: mol_type = other DNA
caattcctttcattttccagta

SEQ ID NO: 158726 - DNA, 22 bp, synthetic construct
  misc_feature 1..22: note = chemically synthesized
  source 1..22: mol_type = other DNA
aattcctttcattttccagtag

SEQ ID NO: 158727 - DNA, 22 bp, synthetic construct
  misc_feature 1..22: note = chemically synthesized
  source 1..22: mol_type = other DNA
ctttcattttccagtagagaca

SEQ ID NO: 158728 - DNA, 22 bp, synthetic construct
  misc_feature 1..22: note = chemically synthesized
  source 1..22: mol_type = other DNA
tcattttccagtagagacaaag

SEQ ID NO: 158729 - DNA, 22 bp, synthetic construct
  misc_feature 1..22: note = chemically synthesized
  source 1..22: mol_type = other DNA
cattttccagtagagacaaagg

SEQ ID NO: 158730 - DNA, 22 bp, synthetic construct
  misc_feature 1..22: note = chemically synthesized
  source 1..22: mol_type = other DNA
attttccagtagagacaaagga

SEQ ID NO: 158731 - DNA, 22 bp, synthetic construct
  misc_feature 1..22: note = chemically synthesized
  source 1..22: mol_type = other DNA
tccagtagagacaaaggagaca

SEQ ID NO: 158732 - DNA, 22 bp, synthetic construct
  misc_feature 1..22: note = chemically synthesized
  source 1..22: mol_type = other DNA
ccagtagagacaaaggagacat

SEQ ID NO: 158733 - DNA, 22 bp, synthetic construct
  misc_feature 1..22: note = chemically synthesized
  source 1..22: mol_type = other DNA
cagtagagacaaaggagacatg

SEQ ID NO: 158734 - DNA, 22 bp, synthetic construct
  misc_feature 1..22: note = chemically synthesized
  source 1..22: mol_type = other DNA
tatccgtggacccaaaactccg

SEQ ID NO: 158735 - DNA, 22 bp, synthetic construct
  misc_feature 1..22: note = chemically synthesized
  source 1..22: mol_type = other DNA
atccgtggacccaaaactccgg

SEQ ID NO: 158736 - DNA, 22 bp, synthetic construct
  misc_feature 1..22: note = chemically synthesized
  source 1..22: mol_type = other DNA
tccgtggacccaaaactccggt

SEQ ID NO: 158737 - DNA, 22 bp, synthetic construct
  misc_feature 1..22: note = chemically synthesized
  source 1..22: mol_type = other DNA
cggtgccagtcacggactggga

SEQ ID NO: 158738 - DNA, 22 bp, synthetic construct
  misc_feature 1..22: note = chemically synthesized
  source 1..22: mol_type = other DNA
ggaaggcagccttcccttggtg

SEQ ID NO: 158739 - DNA, 22 bp, synthetic construct
  misc_feature 1..22: note = chemically synthesized
  source 1..22: mol_type = other DNA
cccttggtgtttaatcattgca

SEQ ID NO: 158740 - DNA, 22 bp, synthetic construct
  misc_feature 1..22: note = chemically synthesized
  source 1..22: mol_type = other DNA
ccttggtgtttaatcattgcag

SEQ ID NO: 158741 - DNA, 22 bp, synthetic construct
  misc_feature 1..22: note = chemically synthesized
  source 1..22: mol_type = other DNA
ggtgtttaatcattgcagggac

SEQ ID NO: 158742 - DNA, 22 bp, synthetic construct
  misc_feature 1..22: note = chemically synthesized
  source 1..22: mol_type = other DNA
gtgtttaatcattgcagggaca

SEQ ID NO: 158743 - DNA, 22 bp, synthetic construct
  misc_feature 1..22: note = chemically synthesized
  source 1..22: mol_type = other DNA
aatcattgcagggacacctctc

SEQ ID NO: 158744 - DNA, 22 bp, synthetic construct
  misc_feature 1..22: note = chemically synthesized
  source 1..22: mol_type = other DNA
atcattgcagggacacctctct

SEQ ID NO: 158745 - DNA, 22 bp, synthetic construct
  misc_feature 1..22: note = chemically synthesized
  source 1..22: mol_type = other DNA
cagggacacctctctgattatt

SEQ ID NO: 158746 - DNA, 22 bp, synthetic construct
  misc_feature 1..22: note = chemically synthesized
  source 1..22: mol_type = other DNA
tctgattattaaaccatgtttc

SEQ ID NO: 158747 - DNA, 22 bp, synthetic construct
  misc_feature 1..22: note = chemically synthesized
  source 1..22: mol_type = other DNA
tgattattaaaccatgtttcag

SEQ ID NO: 158748 - DNA, 22 bp, synthetic construct
  misc_feature 1..22: note = chemically synthesized
  source 1..22: mol_type = other DNA
attattaaaccatgtttcagag

SEQ ID NO: 158749 - DNA, 22 bp, synthetic construct
  misc_feature 1..22: note = chemically synthesized
  source 1..22: mol_type = other DNA
ttaaaccatgtttcagaggtgt

SEQ ID NO: 158750 - DNA, 22 bp, synthetic construct
  misc_feature 1..22: note = chemically synthesized
  source 1..22: mol_type = other DNA
aaccatgtttcagaggtgtcag

SEQ ID NO: 158751 - DNA, 22 bp, synthetic construct
  misc_feature 1..22: note = chemically synthesized
  source 1..22: mol_type = other DNA
cagaggtgtcagaccacgcagg

SEQ ID NO: 158752 - DNA, 22 bp, synthetic construct
  misc_feature 1..22: note = chemically synthesized
  source 1..22: mol_type = other DNA
agaggtgtcagaccacgcaggg

SEQ ID NO: 158753 - DNA, 22 bp, synthetic construct
  misc_feature 1..22: note = chemically synthesized
  source 1..22: mol_type = other DNA
ccttggtccttcacccttagcg

SEQ ID NO: 158754 - DNA, 22 bp, synthetic construct
  misc_feature 1..22: note = chemically synthesized
  source 1..22: mol_type = other DNA
ggtccttcacccttagcggcaa

SEQ ID NO: 158755 - DNA, 22 bp, synthetic construct
  misc_feature 1..22: note = chemically synthesized
  source 1..22: mol_type = other DNA
gtccttcacccttagcggcaaa

SEQ ID NO: 158756 - DNA, 22 bp, synthetic construct
  misc_feature 1..22: note = chemically synthesized
  source 1..22: mol_type = other DNA
cacccttagcggcaaatcccac

SEQ ID NO: 158757 - DNA, 22 bp, synthetic construct
  misc_feature 1..22: note = chemically synthesized
  source 1..22: mol_type = other DNA
acccttagcggcaaatcccact

SEQ ID NO: 158758 - DNA, 22 bp, synthetic construct
  misc_feature 1..22: note = chemically synthesized
  source 1..22: mol_type = other DNA
agcggcaaatcccacttttctg

SEQ ID NO: 158759 - DNA, 22 bp, synthetic construct
  misc_feature 1..22: note = chemically synthesized
  source 1..22: mol_type = other DNA
gcggcaaatcccacttttctgg

SEQ ID NO: 158760 - DNA, 22 bp, synthetic construct
  misc_feature 1..22: note = chemically synthesized
  source 1..22: mol_type = other DNA
ttctggaggggggtaagtaccc

SEQ ID NO: 158761 - DNA, 22 bp, synthetic construct
  misc_feature 1..22: note = chemically synthesized
  source 1..22: mol_type = other DNA
tctggaggggggtaagtacccc

SEQ ID NO: 158762 - DNA, 22 bp, synthetic construct
  misc_feature 1..22: note = chemically synthesized
  source 1..22: mol_type = other DNA
ctggaggggggtaagtacccca

SEQ ID NO: 158763 - DNA, 22 bp, synthetic construct
  misc_feature 1..22: note = chemically synthesized
  source 1..22: mol_type = other DNA
tggaggggggtaagtaccccaa

SEQ ID NO: 158764 - DNA, 22 bp, synthetic construct
  misc_feature 1..22: note = chemically synthesized
  source 1..22: mol_type = other DNA
gaggggggtaagtaccccaacc

SEQ ID NO: 158765 - DNA, 22 bp, synthetic construct
  misc_feature 1..22: note = chemically synthesized
  source 1..22: mol_type = other DNA
ctctccatgtctctgccccttc

SEQ ID NO: 158766 - DNA, 22 bp, synthetic construct
  misc_feature 1..22: note = chemically synthesized
  source 1..22: mol_type = other DNA
tctccatgtctctgccccttca

SEQ ID NO: 158767 - DNA, 22 bp, synthetic construct
  misc_feature 1..22: note = chemically synthesized
  source 1..22: mol_type = other DNA
tccatgtctctgccccttcact

SEQ ID NO: 158768 - DNA, 22 bp, synthetic construct
  misc_feature 1..22: note = chemically synthesized
  source 1..22: mol_type = other DNA
catgtctctgccccttcactgc

SEQ ID NO: 158769 - DNA, 22 bp, synthetic construct
  misc_feature 1..22: note = chemically synthesized
  source 1..22: mol_type = other DNA
tgccccttcactgcttttctgg

SEQ ID NO: 158770 - DNA, 22 bp, synthetic construct
  misc_feature 1..22: note = chemically synthesized
  source 1..22: mol_type = other DNA
ccccttcactgcttttctgggg

SEQ ID NO: 158771 - DNA, 22 bp, synthetic construct
  misc_feature 1..22: note = chemically synthesized
  source 1..22: mol_type = other DNA
cactgcttttctgggggcaaga

SEQ ID NO: 158772 - DNA, 22 bp, synthetic construct
  misc_feature 1..22: note = chemically synthesized
  source 1..22: mol_type = other DNA
actgcttttctgggggcaagaa

SEQ ID NO: 158773 - DNA, 22 bp, synthetic construct
  misc_feature 1..22: note = chemically synthesized
  source 1..22: mol_type = other DNA
cttttctgggggcaagaacccc

SEQ ID NO: 158774 - DNA, 22 bp, synthetic construct
  misc_feature 1..22: note = chemically synthesized
  source 1..22: mol_type = other DNA
ttctgggggcaagaaccccaat

SEQ ID NO: 158775 - DNA, 22 bp, synthetic construct
  misc_feature 1..22: note = chemically synthesized
  source 1..22: mol_type = other DNA
tctgggggcaagaaccccaatc

SEQ ID NO: 158776 - DNA, 22 bp, synthetic construct
  misc_feature 1..22: note = chemically synthesized
  source 1..22: mol_type = other DNA
ctgggggcaagaaccccaatcc

SEQ ID NO: 158777 - DNA, 22 bp, synthetic construct
  misc_feature 1..22: note = chemically synthesized
  source 1..22: mol_type = other DNA
tgggggcaagaaccccaatccc

SEQ ID NO: 158778 - DNA, 22 bp, synthetic construct
  misc_feature 1..22: note = chemically synthesized
  source 1..22: mol_type = other DNA
ggggcaagaaccccaatccctt

SEQ ID NO: 158779 - DNA, 22 bp, synthetic construct
  misc_feature 1..22: note = chemically synthesized
  source 1..22: mol_type = other DNA
atttctgtgccccaacctctta

SEQ ID NO: 158780 - DNA, 22 bp, synthetic construct
  misc_feature 1..22: note = chemically synthesized
  source 1..22: mol_type = other DNA
tttctgtgccccaacctcttat

SEQ ID NO: 158781 - DNA, 22 bp, synthetic construct
  misc_feature 1..22: note = chemically synthesized
  source 1..22: mol_type = other DNA
ctgtgccccaacctcttatctc

SEQ ID NO: 158782 - DNA, 22 bp, synthetic construct
  misc_feature 1..22: note = chemically synthesized
  source 1..22: mol_type = other DNA
tgtgccccaacctcttatctca

SEQ ID NO: 158783 - DNA, 22 bp, synthetic construct
  misc_feature 1..22: note = chemically synthesized
  source 1..22: mol_type = other DNA
tgccccaacctcttatctcagc

SEQ ID NO: 158784 - DNA, 22 bp, synthetic construct
  misc_feature 1..22: note = chemically synthesized
  source 1..22: mol_type = other DNA
ttatctcagcaccccatccctt

SEQ ID NO: 158785 - DNA, 22 bp, synthetic construct
  misc_feature 1..22: note = chemically synthesized
  source 1..22: mol_type = other DNA
atctcagcaccccatcccttat

SEQ ID NO: 158786 - DNA, 22 bp, synthetic construct
  misc_feature 1..22: note = chemically synthesized
  source 1..22: mol_type = other DNA
tctcagcaccccatcccttatt

SEQ ID NO: 158787 - DNA, 22 bp, synthetic construct
  misc_feature 1..22: note = chemically synthesized
  source 1..22: mol_type = other DNA
agcaccccatcccttatttcca

SEQ ID NO: 158788 - DNA, 22 bp, synthetic construct
  misc_feature 1..22: note = chemically synthesized
  source 1..22: mol_type = other DNA
atttccacgccccatcctctta

SEQ ID NO: 158789 - DNA, 22 bp, synthetic construct
  misc_feature 1..22: note = chemically synthesized
  source 1..22: mol_type = other DNA
tttccacgccccatcctcttat

SEQ ID NO: 158790 - DNA, 22 bp, synthetic construct
  misc_feature 1..22: note = chemically synthesized
  source 1..22: mol_type = other DNA
ccacgccccatcctcttatctc

SEQ ID NO: 158791 - DNA, 22 bp, synthetic construct
  misc_feature 1..22: note = chemically synthesized
  source 1..22: mol_type = other DNA
cacgccccatcctcttatctct

SEQ ID NO: 158792 - DNA, 22 bp, synthetic construct
  misc_feature 1..22: note = chemically synthesized
  source 1..22: mol_type = other DNA
ttatctctgcaccccaatccct

SEQ ID NO: 158793 - DNA, 22 bp, synthetic construct
  misc_feature 1..22: note = chemically synthesized
  source 1..22: mol_type = other DNA
atctctgcaccccaatccctta

SEQ ID NO: 158794 - DNA, 22 bp, synthetic construct
  misc_feature 1..22: note = chemically synthesized
  source 1..22: mol_type = other DNA
tctctgcaccccaatcccttat

SEQ ID NO: 158795 - DNA, 22 bp, synthetic construct
  misc_feature 1..22: note = chemically synthesized
  source 1..22: mol_type = other DNA
tgcaccccaatcccttatttct

SEQ ID NO: 158796 - DNA, 22 bp, synthetic construct
  misc_feature 1..22: note = chemically synthesized
  source 1..22: mol_type = other DNA
caccccaatcccttatttctgc

SEQ ID NO: 158797 - DNA, 22 bp, synthetic construct
  misc_feature 1..22: note = chemically synthesized
  source 1..22: mol_type = other DNA
atttctgcaccccgacctctta

SEQ ID NO: 158798 - DNA, 22 bp, synthetic construct
  misc_feature 1..22: note = chemically synthesized
  source 1..22: mol_type = other DNA
tttctgcaccccgacctcttat

SEQ ID NO: 158799 - DNA, 22 bp, synthetic construct
  misc_feature 1..22: note = chemically synthesized
  source 1..22: mol_type = other DNA
ctgcaccccgacctcttatctc

SEQ ID NO: 158800 - DNA, 22 bp, synthetic construct
  misc_feature 1..22: note = chemically synthesized
  source 1..22: mol_type = other DNA
tgcaccccgacctcttatctct

SEQ ID NO: 158801 - DNA, 22 bp, synthetic construct
  misc_feature 1..22: note = chemically synthesized
  source 1..22: mol_type = other DNA
caccccgacctcttatctctgc

SEQ ID NO: 158802 - DNA, 22 bp, synthetic construct
  misc_feature 1..22: note = chemically synthesized
  source 1..22: mol_type = other DNA
ttatctctgcaccctgatccct

SEQ ID NO: 158803 - DNA, 22 bp, synthetic construct
  misc_feature 1..22: note = chemically synthesized
  source 1..22: mol_type = other DNA
atctctgcaccctgatccctta

SEQ ID NO: 158804 - DNA, 22 bp, synthetic construct
  misc_feature 1..22: note = chemically synthesized
  source 1..22: mol_type = other DNA
tctctgcaccctgatcccttat

SEQ ID NO: 158805 - DNA, 22 bp, synthetic construct
  misc_feature 1..22: note = chemically synthesized
  source 1..22: mol_type = other DNA
tgcaccctgatcccttatttct

SEQ ID NO: 158806 - DNA, 22 bp, synthetic construct
  misc_feature 1..22: note = chemically synthesized
  source 1..22: mol_type = other DNA
caccctgatcccttatttctgc

SEQ ID NO: 158807 - DNA, 22 bp, synthetic construct
  misc_feature 1..22: note = chemically synthesized
  source 1..22: mol_type = other DNA
atcccttatttctgcaccccaa

SEQ ID NO: 158808 - DNA, 22 bp, synthetic construct
  misc_feature 1..22: note = chemically synthesized
  source 1..22: mol_type = other DNA
atttctgcaccccaacctctta

SEQ ID NO: 158809 - DNA, 22 bp, synthetic construct
  misc_feature 1..22: note = chemically synthesized
  source 1..22: mol_type = other DNA
tttctgcaccccaacctcttat

SEQ ID NO: 158810 - DNA, 22 bp, synthetic construct
  misc_feature 1..22: note = chemically synthesized
  source 1..22: mol_type = other DNA
ctgcaccccaacctcttatctc

SEQ ID NO: 158811 - DNA, 22 bp, synthetic construct
  misc_feature 1..22: note = chemically synthesized
  source 1..22: mol_type = other DNA
tgcaccccaacctcttatctct

SEQ ID NO: 158812 - DNA, 22 bp, synthetic construct
  misc_feature 1..22: note = chemically synthesized
  source 1..22: mol_type = other DNA
caccccaacctcttatctctgc

SEQ ID NO: 158813 - DNA, 22 bp, synthetic construct
  misc_feature 1..22: note = chemically synthesized
  source 1..22: mol_type = other DNA
ttatctctgcaccccgatccct

SEQ ID NO: 158814 - DNA, 22 bp, synthetic construct
  misc_feature 1..22: note = chemically synthesized
  source 1..22: mol_type = other DNA
atctctgcaccccgatccctta

SEQ ID NO: 158815 - DNA, 22 bp, synthetic construct
  misc_feature 1..22: note = chemically synthesized
  source 1..22: mol_type = other DNA
tctctgcaccccgatcccttat

SEQ ID NO: 158816 - DNA, 22 bp, synthetic construct
  misc_feature 1..22: note = chemically synthesized
  source 1..22: mol_type = other DNA
tgcaccccgatcccttatttct

SEQ ID NO: 158817 - DNA, 22 bp, synthetic construct
  misc_feature 1..22: note = chemically synthesized
  source 1..22: mol_type = other DNA
caccccgatcccttatttctgt

SEQ ID NO: 158818 - DNA, 22 bp, synthetic construct
  misc_feature 1..22: note = chemically synthesized
  source 1..22: mol_type = other DNA
atttctgtgccccaacctctta

SEQ ID NO: 158819 - DNA, 22 bp, synthetic construct
  misc_feature 1..22: note = chemically synthesized
  source 1..22: mol_type = other DNA
tttctgtgccccaacctcttat

SEQ ID NO: 158820 - DNA, 22 bp, synthetic construct
  misc_feature 1..22: note = chemically synthesized
  source 1..22: mol_type = other DNA
ctgtgccccaacctcttatctc

SEQ ID NO: 158821 - DNA, 22 bp, synthetic construct
  misc_feature 1..22: note = chemically synthesized
  source 1..22: mol_type = other DNA
tgtgccccaacctcttatctct

SEQ ID NO: 158822 - DNA, 22 bp, synthetic construct
  misc_feature 1..22: note = chemically synthesized
  source 1..22: mol_type = other DNA
tgccccaacctcttatctctgc

SEQ ID NO: 158823 - DNA, 22 bp, synthetic construct
  misc_feature 1..22: note = chemically synthesized
  source 1..22: mol_type = other DNA
ttatctctgcaccccaacccct

SEQ ID NO: 158824 - DNA, 22 bp, synthetic construct
  misc_feature 1..22: note = chemically synthesized
  source 1..22: mol_type = other DNA
atctctgcaccccaacccctta

SEQ ID NO: 158825 - DNA, 22 bp, synthetic construct
  misc_feature 1..22: note = chemically synthesized
  source 1..22: mol_type = other DNA
tctctgcaccccaaccccttat

SEQ ID NO: 158826 - DNA, 22 bp, synthetic construct
  misc_feature 1..22: note = chemically synthesized
  source 1..22: mol_type = other DNA
tgcaccccaaccccttatttct

SEQ ID NO: 158827 - DNA, 22 bp, synthetic construct
  misc_feature 1..22: note = chemically synthesized
  source 1..22: mol_type = other DNA
caccccaaccccttatttctgt

SEQ ID NO: 158828 - DNA, 22 bp, synthetic construct
  misc_feature 1..22: note = chemically synthesized
  source 1..22: mol_type = other DNA
atttctgtgccctgacctctta

SEQ ID NO: 158829 - DNA, 22 bp, synthetic construct
  misc_feature 1..22: note = chemically synthesized
  source 1..22: mol_type = other DNA
tttctgtgccctgacctcttat

SEQ ID NO: 158830 - DNA, 22 bp, synthetic construct
  misc_feature 1..22: note = chemically synthesized
  source 1..22: mol_type = other DNA
ctgtgccctgacctcttatctc

SEQ ID NO: 158831 - DNA, 22 bp, synthetic construct
  misc_feature 1..22: note = chemically synthesized
  source 1..22: mol_type = other DNA
tgtgccctgacctcttatctct

SEQ ID NO: 158832 - DNA, 22 bp, synthetic construct
  misc_feature 1..22: note = chemically synthesized
  source 1..22: mol_type = other DNA
tgccctgacctcttatctctgc

SEQ ID NO: 158833 - DNA, 22 bp, synthetic construct
  misc_feature 1..22: note = chemically synthesized
  source 1..22: mol_type = other DNA
acctcttatctctgcaccccaa

SEQ ID NO: 158834 - DNA, 22 bp, synthetic construct
  misc_feature 1..22: note = chemically synthesized
  source 1..22: mol_type = other DNA
ttatctctgcaccccaacccct

SEQ ID NO: 158835 - DNA, 22 bp, synthetic construct
  misc_feature 1..22: note = chemically synthesized
  source 1..22: mol_type = other DNA
atctctgcaccccaacccctta

SEQ ID NO: 158836 - DNA, 22 bp, synthetic construct
  misc_feature 1..22: note = chemically synthesized
  source 1..22: mol_type = other DNA
tctctgcaccccaaccccttat

SEQ ID NO: 158837 - DNA, 22 bp, synthetic construct
  misc_feature 1..22: note = chemically synthesized
  source 1..22: mol_type = other DNA
tgcaccccaaccccttatttcc

SEQ ID NO: 158838 - DNA, 22 bp, synthetic construct
  misc_feature 1..22: note = chemically synthesized
  source 1..22: mol_type = other DNA
caccccaaccccttatttccgt

SEQ ID NO: 158839 - DNA, 22 bp, synthetic construct
  misc_feature 1..22: note = chemically synthesized
  source 1..22: mol_type = other DNA
atttccgtgccccaaccccttg

SEQ ID NO: 158840 - DNA, 22 bp, synthetic construct
  misc_feature 1..22: note = chemically synthesized
  source 1..22: mol_type = other DNA
tttccgtgccccaaccccttgc

SEQ ID NO: 158841 - DNA, 22 bp, synthetic construct
  misc_feature 1..22: note = chemically synthesized
  source 1..22: mol_type = other DNA
ccgtgccccaaccccttgccca

SEQ ID NO: 158842 - DNA, 22 bp, synthetic construct
  misc_feature 1..22: note = chemically synthesized
  source 1..22: mol_type = other DNA
cgtgccccaaccccttgcccat

SEQ ID NO: 158843 - DNA, 22 bp, synthetic construct
  misc_feature 1..22: note = chemically synthesized
  source 1..22: mol_type = other DNA
gcccatttttctggtgagtaag

SEQ ID NO: 158844 - DNA, 22 bp, synthetic construct
  misc_feature 1..22: note = chemically synthesized
  source 1..22: mol_type = other DNA
cccatttttctggtgagtaaga

SEQ ID NO: 158845 - DNA, 22 bp, synthetic construct
  misc_feature 1..22: note = chemically synthesized
  source 1..22: mol_type = other DNA
ttctggtgagtaagaacccccg

SEQ ID NO: 158846 - DNA, 22 bp, synthetic construct
  misc_feature 1..22: note = chemically synthesized
  source 1..22: mol_type = other DNA
tctggtgagtaagaacccccga

SEQ ID NO: 158847 - DNA, 22 bp, synthetic construct
  misc_feature 1..22: note = chemically synthesized
  source 1..22: mol_type = other DNA
ctggtgagtaagaacccccgaa

SEQ ID NO: 158848 - DNA, 22 bp, synthetic construct
  misc_feature 1..22: note = chemically synthesized
  source 1..22: mol_type = other DNA
tggtgagtaagaacccccgaac

SEQ ID NO: 158849 - DNA, 22 bp, synthetic construct
  misc_feature 1..22: note = chemically synthesized
  source 1..22: mol_type = other DNA
gtgagtaagaacccccgaaccc

SEQ ID NO: 158850 - DNA, 22 bp, synthetic construct
  misc_feature 1..22: note = chemically synthesized
  source 1..22: mol_type = other DNA
ccctccgtgtctgtactctttc

SEQ ID NO: 158851 - DNA, 22 bp, synthetic construct
  misc_feature 1..22: note = chemically synthesized
  source 1..22: mol_type = other DNA
cctccgtgtctgtactctttct

SEQ ID NO: 158852 - DNA, 22 bp, synthetic construct
  misc_feature 1..22: note = chemically synthesized
  source 1..22: mol_type = other DNA
cgtgtctgtactctttcttttc

SEQ ID NO: 158853 - DNA, 22 bp, synthetic construct
  misc_feature 1..22: note = chemically synthesized
  source 1..22: mol_type = other DNA
tactctttcttttctctgggct

SEQ ID NO: 158854 - DNA, 22 bp, synthetic construct
  misc_feature 1..22: note = chemically synthesized
  source 1..22: mol_type = other DNA
tttcttttctctgggcttgcct

SEQ ID NO: 158855 - DNA, 22 bp, synthetic construct
  misc_feature 1..22: note = chemically synthesized
  source 1..22: mol_type = other DNA
tcttttctctgggcttgcctcc

SEQ ID NO: 158856 - DNA, 22 bp, synthetic construct
  misc_feature 1..22: note = chemically synthesized
  source 1..22: mol_type = other DNA
cttttctctgggcttgcctcct

SEQ ID NO: 158857 - DNA, 22 bp, synthetic construct
  misc_feature 1..22: note = chemically synthesized
  source 1..22: mol_type = other DNA
ttttctctgggcttgcctcctt

SEQ ID NO: 158858 - DNA, 22 bp, synthetic construct
  misc_feature 1..22: note = chemically synthesized
  source 1..22: mol_type = other DNA
ttctctgggcttgcctccttca

SEQ ID NO: 158859 - DNA, 22 bp, synthetic construct
  misc_feature 1..22: note = chemically synthesized
  source 1..22: mol_type = other DNA
tctctgggcttgcctccttcac

SEQ ID NO: 158860 - DNA, 22 bp, synthetic construct
  misc_feature 1..22: note = chemically synthesized
  source 1..22: mol_type = other DNA
ctctgggcttgcctccttcact

SEQ ID NO: 158861 - DNA, 22 bp, synthetic construct
  misc_feature 1..22: note = chemically synthesized
  source 1..22: mol_type = other DNA
tctgggcttgcctccttcacta

SEQ ID NO: 158862 - DNA, 22 bp, synthetic construct
  misc_feature 1..22: note = chemically synthesized
  source 1..22: mol_type = other DNA
tgggcttgcctccttcactagg

SEQ ID NO: 158863 - DNA, 22 bp, synthetic construct
  misc_feature 1..22: note = chemically synthesized
  source 1..22: mol_type = other DNA
ggcttgcctccttcactagggg

SEQ ID NO: 158864 - DNA, 22 bp, synthetic construct
  misc_feature 1..22: note = chemically synthesized
  source 1..22: mol_type = other DNA
gcctccttcactaggggcaacc

SEQ ID NO: 158865 - DNA, 22 bp, synthetic construct
  misc_feature 1..22: note = chemically synthesized
  source 1..22: mol_type = other DNA
cctccttcactaggggcaacct

SEQ ID NO: 158866 - DNA, 22 bp, synthetic construct
  misc_feature 1..22: note = chemically synthesized
  source 1..22: mol_type = other DNA
cttcactaggggcaaccttcca

SEQ ID NO: 158867 - DNA, 22 bp, synthetic construct
  misc_feature 1..22: note = chemically synthesized
  source 1..22: mol_type = other DNA
cactaggggcaaccttccaccc

SEQ ID NO: 158868 - DNA, 22 bp, synthetic construct
  misc_feature 1..22: note = chemically synthesized
  source 1..22: mol_type = other DNA
actaggggcaaccttccaccct

SEQ ID NO: 158869 - DNA, 22 bp, synthetic construct
  misc_feature 1..22: note = chemically synthesized
  source 1..22: mol_type = other DNA
ggggcaaccttccaccctccat

SEQ ID NO: 158870 - DNA, 22 bp, synthetic construct
  misc_feature 1..22: note = chemically synthesized
  source 1..22: mol_type = other DNA
ccaccctccattcctccctctc

SEQ ID NO: 158871 - DNA, 22 bp, synthetic construct
  misc_feature 1..22: note = chemically synthesized
  source 1..22: mol_type = other DNA
caccctccattcctccctctcc

SEQ ID NO: 158872 - DNA, 22 bp, synthetic construct
  misc_feature 1..22: note = chemically synthesized
  source 1..22: mol_type = other DNA
cattcctccctctcccttagcc

SEQ ID NO: 158873 - DNA, 22 bp, synthetic construct
  misc_feature 1..22: note = chemically synthesized
  source 1..22: mol_type = other DNA
ctccctctcccttagcctgtgc

SEQ ID NO: 158874 - DNA, 22 bp, synthetic construct
  misc_feature 1..22: note = chemically synthesized
  source 1..22: mol_type = other DNA
cctctcccttagcctgtgctct

SEQ ID NO: 158875 - DNA, 22 bp, synthetic construct
  misc_feature 1..22: note = chemically synthesized
  source 1..22: mol_type = other DNA
tcccttagcctgtgctctcaag

SEQ ID NO: 158876 - DNA, 22 bp, synthetic construct
  misc_feature 1..22: note = chemically synthesized
  source 1..22: mol_type = other DNA
ccttagcctgtgctctcaagaa

SEQ ID NO: 158877 - DNA, 22 bp, synthetic construct
  misc_feature 1..22: note = chemically synthesized
  source 1..22: mol_type = other DNA
agcctgtgctctcaagaactta

SEQ ID NO: 158878 - DNA, 22 bp, synthetic construct
  misc_feature 1..22: note = chemically synthesized
  source 1..22: mol_type = other DNA
gcctgtgctctcaagaacttaa

SEQ ID NO: 158879 - DNA, 22 bp, synthetic construct
  misc_feature 1..22: note = chemically synthesized
  source 1..22: mol_type = other DNA
tgctctcaagaacttaaaacct

SEQ ID NO: 158880 - DNA, 22 bp, synthetic construct
  misc_feature 1..22: note = chemically synthesized
  source 1..22: mol_type = other DNA
tcaagaacttaaaacctcttca

SEQ ID NO: 158881 - DNA, 22 bp, synthetic construct
  misc_feature 1..22: note = chemically synthesized
  source 1..22: mol_type = other DNA
aagaacttaaaacctcttcaac

SEQ ID NO: 158882 - DNA, 22 bp, synthetic construct
  misc_feature 1..22: note = chemically synthesized
  source 1..22: mol_type = other DNA
aaaacctcttcaactcacacct

SEQ ID NO: 158883 - DNA, 22 bp, synthetic construct
  misc_feature 1..22: note = chemically synthesized
  source 1..22: mol_type = other DNA
aaacctcttcaactcacacctg

SEQ ID NO: 158884 - DNA, 22 bp, synthetic construct
  misc_feature 1..22: note = chemically synthesized
  source 1..22: mol_type = other DNA
ttcaactcacacctgacctaaa

SEQ ID NO: 158885 - DNA, 22 bp, synthetic construct
  misc_feature 1..22: note = chemically synthesized
  source 1..22: mol_type = other DNA
caactcacacctgacctaaaac

SEQ ID NO: 158886 - DNA, 22 bp, synthetic construct
  misc_feature 1..22: note = chemically synthesized
  source 1..22: mol_type = other DNA
aactcacacctgacctaaaacc

SEQ ID NO: 158887 - DNA, 22 bp, synthetic construct
  misc_feature 1..22: note = chemically synthesized
  source 1..22: mol_type = other DNA
acacctgacctaaaacctaaat

SEQ ID NO: 158888 - DNA, 22 bp, synthetic construct
  misc_feature 1..22: note = chemically synthesized
  source 1..22: mol_type = other DNA
acctaaaacctaaatgccttat

SEQ ID NO: 158889 - DNA, 22 bp, synthetic construct
  misc_feature 1..22: note = chemically synthesized
  source 1..22: mol_type = other DNA
aaacctaaatgccttattttct

SEQ ID NO: 158890 - DNA, 22 bp, synthetic construct
  misc_feature 1..22: note = chemically synthesized
  source 1..22: mol_type = other DNA
aatgccttattttcttctgcaa

SEQ ID NO: 158891 - DNA, 22 bp, synthetic construct
  misc_feature 1..22: note = chemically synthesized
  source 1..22: mol_type = other DNA
attttcttctgcaaggccgctt

SEQ ID NO: 158892 - DNA, 22 bp, synthetic construct
  misc_feature 1..22: note = chemically synthesized
  source 1..22: mol_type = other DNA
ttttcttctgcaaggccgcttg

SEQ ID NO: 158893 - DNA, 22 bp, synthetic construct
  misc_feature 1..22: note = chemically synthesized
  source 1..22: mol_type = other DNA
tcttctgcaaggccgcttgact

SEQ ID NO: 158894 - DNA, 22 bp, synthetic construct
  misc_feature 1..22: note = chemically synthesized
  source 1..22: mol_type = other DNA
cttctgcaaggccgcttgactc

SEQ ID NO: 158895 - DNA, 22 bp, synthetic construct
  misc_feature 1..22: note = chemically synthesized
  source 1..22: mol_type = other DNA
ttctgcaaggccgcttgactcc

SEQ ID NO: 158896 - DNA, 22 bp, synthetic construct
  misc_feature 1..22: note = chemically synthesized
  source 1..22: mol_type = other DNA
ctgcaaggccgcttgactccaa

SEQ ID NO: 158897 - DNA, 22 bp, synthetic construct
  misc_feature 1..22: note = chemically synthesized
  source 1..22: mol_type = other DNA
tgcaaggccgcttgactccaat

SEQ ID NO: 158898 - DNA, 22 bp, synthetic construct
  misc_feature 1..22: note = chemically synthesized
  source 1..22: mol_type = other DNA
caaggccgcttgactccaatac

SEQ ID NO: 158899 - DNA, 22 bp, synthetic construct
  misc_feature 1..22: note = chemically synthesized
  source 1..22: mol_type = other DNA
gactccaatacaaactcgacag

SEQ ID NO: 158900 - DNA, 22 bp, synthetic construct
  misc_feature 1..22: note = chemically synthesized
  source 1..22: mol_type = other DNA
actccaatacaaactcgacagt

SEQ ID NO: 158901 - DNA, 22 bp, synthetic construct
  misc_feature 1..22: note = chemically synthesized
  source 1..22: mol_type = other DNA
caatacaaactcgacagtggtt

SEQ ID NO: 158902 - DNA, 22 bp, synthetic construct
  misc_feature 1..22: note = chemically synthesized
  source 1..22: mol_type = other DNA
gacagtggttccaaatagccag

SEQ ID NO: 158903 - DNA, 22 bp, synthetic construct
  misc_feature 1..22: note = chemically synthesized
  source 1..22: mol_type = other DNA
caaatagccagaaaatggcact

SEQ ID NO: 158904 - DNA, 22 bp, synthetic construct
  misc_feature 1..22: note = chemically synthesized
  source 1..22: mol_type = other DNA
tcaatttttccattcttcaaga

SEQ ID NO: 158905 - DNA, 22 bp, synthetic construct
  misc_feature 1..22: note = chemically synthesized
  source 1..22: mol_type = other DNA
caatttttccattcttcaagat

SEQ ID NO: 158906 - DNA, 22 bp, synthetic construct
  misc_feature 1..22: note = chemically synthesized
  source 1..22: mol_type = other DNA
aatttttccattcttcaagatc

SEQ ID NO: 158907 - DNA, 22 bp, synthetic construct
  misc_feature 1..22: note = chemically synthesized
  source 1..22: mol_type = other DNA
ttccattcttcaagatctaaat

SEQ ID NO: 158908 - DNA, 22 bp, synthetic construct
  misc_feature 1..22: note = chemically synthesized
  source 1..22: mol_type = other DNA
tccattcttcaagatctaaata

SEQ ID NO: 158909 - DNA, 22 bp, synthetic construct
  misc_feature 1..22: note = chemically synthesized
  source 1..22: mol_type = other DNA
ccattcttcaagatctaaataa

SEQ ID NO: 158910 - DNA, 22 bp, synthetic construct
  misc_feature 1..22: note = chemically synthesized
  source 1..22: mol_type = other DNA
cattcttcaagatctaaataat

SEQ ID NO: 158911 - DNA, 22 bp, synthetic construct
  misc_feature 1..22: note = chemically synthesized
  source 1..22: mol_type = other DNA
ttcaagatctaaataatttttg

SEQ ID NO: 158912 - DNA, 22 bp, synthetic construct
  misc_feature 1..22: note = chemically synthesized
  source 1..22: mol_type = other DNA
caagatctaaataatttttgtc

SEQ ID NO: 158913 - DNA, 22 bp, synthetic construct
  misc_feature 1..22: note = chemically synthesized
  source 1..22: mol_type = other DNA
aagatctaaataatttttgtcg

SEQ ID NO: 158914 - DNA, 22 bp, synthetic construct
  misc_feature 1..22: note = chemically synthesized
  source 1..22: mol_type = other DNA
aataatttttgtcgtaaaacag

SEQ ID NO: 158915 - DNA, 22 bp, synthetic construct
  misc_feature 1..22: note = chemically synthesized
  source 1..22: mol_type = other DNA
ttgtcgtaaaacaggcaaacag

SEQ ID NO: 158916 - DNA, 22 bp, synthetic construct
  misc_feature 1..22: note = chemically synthesized
  source 1..22: mol_type = other DNA
tgtcgtaaaacaggcaaacagt

SEQ ID NO: 158917 - DNA, 22 bp, synthetic construct
  misc_feature 1..22: note = chemically synthesized
  source 1..22: mol_type = other DNA
gtcgtaaaacaggcaaacagtc

SEQ ID NO: 158918 - DNA, 22 bp, synthetic construct
  misc_feature 1..22: note = chemically synthesized
  source 1..22: mol_type = other DNA
tcgtaaaacaggcaaacagtct

SEQ ID NO: 158919 - DNA, 22 bp, synthetic construct
  misc_feature 1..22: note = chemically synthesized
  source 1..22: mol_type = other DNA
aggtgcctgacgtccaggcatt

SEQ ID NO: 158920 - DNA, 22 bp, synthetic construct
  misc_feature 1..22: note = chemically synthesized
  source 1..22: mol_type = other DNA
acgtccaggcattcttttacac

SEQ ID NO: 158921 - DNA, 22 bp, synthetic construct
  misc_feature 1..22: note = chemically synthesized
  source 1..22: mol_type = other DNA
ttttacacattggtccctccct

SEQ ID NO: 158922 - DNA, 22 bp, synthetic construct
  misc_feature 1..22: note = chemically synthesized
  source 1..22: mol_type = other DNA
ttacacattggtccctccctag

SEQ ID NO: 158923 - DNA, 22 bp, synthetic construct
  misc_feature 1..22: note = chemically synthesized
  source 1..22: mol_type = other DNA
tacacattggtccctccctagt

SEQ ID NO: 158924 - DNA, 22 bp, synthetic construct
  misc_feature 1..22: note = chemically synthesized
  source 1..22: mol_type = other DNA
acacattggtccctccctagtc

SEQ ID NO: 158925 - DNA, 22 bp, synthetic construct
  misc_feature 1..22: note = chemically synthesized
  source 1..22: mol_type = other DNA
cacattggtccctccctagtct

SEQ ID NO: 158926 - DNA, 22 bp, synthetic construct
  misc_feature 1..22: note = chemically synthesized
  source 1..22: mol_type = other DNA
gtccctccctagtctcttccca

SEQ ID NO: 158927 - DNA, 22 bp, synthetic construct
  misc_feature 1..22: note = chemically synthesized
  source 1..22: mol_type = other DNA
cctagtctcttcccaatgcaac

SEQ ID NO: 158928 - DNA, 22 bp, synthetic construct
  misc_feature 1..22: note = chemically synthesized
  source 1..22: mol_type = other DNA
gtctcttcccaatgcaacttgt

SEQ ID NO: 158929 - DNA, 22 bp, synthetic construct
  misc_feature 1..22: note = chemically synthesized
  source 1..22: mol_type = other DNA
ttcccaatgcaacttgtcccaa

SEQ ID NO: 158930 - DNA, 22 bp, synthetic construct
  misc_feature 1..22: note = chemically synthesized
  source 1..22: mol_type = other DNA
cccaatgcaacttgtcccaaat

SEQ ID NO: 158931 - DNA, 22 bp, synthetic construct
  misc_feature 1..22: note = chemically synthesized
  source 1..22: mol_type = other DNA
ccaatgcaacttgtcccaaatc

SEQ ID NO: 158932 - DNA, 22 bp, synthetic construct
  misc_feature 1..22: note = chemically synthesized
  source 1..22: mol_type = other DNA
gtcccaaatcttccttctttcc

SEQ ID NO: 158933 - DNA, 22 bp, synthetic construct
  misc_feature 1..22: note = chemically synthesized
  source 1..22: mol_type = other DNA
tcccaaatcttccttctttccc

SEQ ID NO: 158934 - DNA, 22 bp, synthetic construct
  misc_feature 1..22: note = chemically synthesized
  source 1..22: mol_type = other DNA
ccttctttccctcccgcctgtc

SEQ ID NO: 158935 - DNA, 22 bp, synthetic construct
  misc_feature 1..22: note = chemically synthesized
  source 1..22: mol_type = other DNA
cttctttccctcccgcctgtcc

SEQ ID NO: 158936 - DNA, 22 bp, synthetic construct
  misc_feature 1..22: note = chemically synthesized
  source 1..22: mol_type = other DNA
ctttccctcccgcctgtcccct

SEQ ID NO: 158937 - DNA, 22 bp, synthetic construct
  misc_feature 1..22: note = chemically synthesized
  source 1..22: mol_type = other DNA
tttccctcccgcctgtcccctc

SEQ ID NO: 158938 - DNA, 22 bp, synthetic construct
  misc_feature 1..22: note = chemically synthesized
  source 1..22: mol_type = other DNA
tccctcccgcctgtcccctcag

SEQ ID NO: 158939 - DNA, 22 bp, synthetic construct
  misc_feature 1..22: note = chemically synthesized
  source 1..22: mol_type = other DNA
ccctcccgcctgtcccctcagt

SEQ ID NO: 158940 - DNA, 22 bp, synthetic construct
  misc_feature 1..22: note = chemically synthesized
  source 1..22: mol_type = other DNA
cctcccgcctgtcccctcagtc

SEQ ID NO: 158941 - DNA, 22 bp, synthetic construct
  misc_feature 1..22: note = chemically synthesized
  source 1..22: mol_type = other DNA
ccgcctgtcccctcagtcccaa

SEQ ID NO: 158942 - DNA, 22 bp, synthetic construct
  misc_feature 1..22: note = chemically synthesized
  source 1..22: mol_type = other DNA
tcccctcagtcccaactccaag

SEQ ID NO: 158943 - DNA, 22 bp, synthetic construct
  misc_feature 1..22: note = chemically synthesized
  source 1..22: mol_type = other DNA
agtcccaactccaagcgtcgct

SEQ ID NO: 158944 - DNA, 22 bp, synthetic construct
  misc_feature 1..22: note = chemically synthesized
  source 1..22: mol_type = other DNA
caagcgtcgctgagtctttcta

SEQ ID NO: 158945 - DNA, 22 bp, synthetic construct
  misc_feature 1..22: note = chemically synthesized
  source 1..22: mol_type = other DNA
agtctttctaatcttccttttc

SEQ ID NO: 158946 - DNA, 22 bp, synthetic construct
  misc_feature 1..22: note = chemically synthesized
  source 1..22: mol_type = other DNA
tctaatcttccttttctacaga

SEQ ID NO: 158947 - DNA, 22 bp, synthetic construct
  misc_feature 1..22: note = chemically synthesized
  source 1..22: mol_type = other DNA
ctaatcttccttttctacagac

SEQ ID NO: 158948 - DNA, 22 bp, synthetic construct
  misc_feature 1..22: note = chemically synthesized
  source 1..22: mol_type = other DNA
taatcttccttttctacagacc

SEQ ID NO: 158949 - DNA, 22 bp, synthetic construct
  misc_feature 1..22: note = chemically synthesized
  source 1..22: mol_type = other DNA
atcttccttttctacagaccca

SEQ ID NO: 158950 - DNA, 22 bp, synthetic construct
  misc_feature 1..22: note = chemically synthesized
  source 1..22: mol_type = other DNA
ccttttctacagacccatctga

SEQ ID NO: 158951 - DNA, 22 bp, synthetic construct
  misc_feature 1..22: note = chemically synthesized
  source 1..22: mol_type = other DNA
cttttctacagacccatctgac

SEQ ID NO: 158952 - DNA, 22 bp, synthetic construct
  misc_feature 1..22: note = chemically synthesized
  source 1..22: mol_type = other DNA
ttctacagacccatctgacgtc

SEQ ID NO: 158953 - DNA, 22 bp, synthetic construct
  misc_feature 1..22: note = chemically synthesized
  source 1..22: mol_type = other DNA
tctacagacccatctgacgtct

SEQ ID NO: 158954 - DNA, 22 bp, synthetic construct
  misc_feature 1..22: note = chemically synthesized
  source 1..22: mol_type = other DNA
ctacagacccatctgacgtctc

SEQ ID NO: 158955 - DNA, 22 bp, synthetic construct
  misc_feature 1..22: note = chemically synthesized
  source 1..22: mol_type = other DNA
tacagacccatctgacgtctcc

SEQ ID NO: 158956 - DNA, 22 bp, synthetic construct
  misc_feature 1..22: note = chemically synthesized
  source 1..22: mol_type = other DNA
cagacccatctgacgtctcccc

SEQ ID NO: 158957 - DNA, 22 bp, synthetic construct
  misc_feature 1..22: note = chemically synthesized
  source 1..22: mol_type = other DNA
acgtctcccctcctccccaggc

SEQ ID NO: 158958 - DNA, 22 bp, synthetic construct
  misc_feature 1..22: note = chemically synthesized
  source 1..22: mol_type = other DNA
ccctcctccccaggctgctcct

SEQ ID NO: 158959 - DNA, 22 bp, synthetic construct
  misc_feature 1..22: note = chemically synthesized
  source 1..22: mol_type = other DNA
ctccccaggctgctccttgcca

SEQ ID NO: 158960 - DNA, 22 bp, synthetic construct
  misc_feature 1..22: note = chemically synthesized
  source 1..22: mol_type = other DNA
cccaggctgctccttgccaggc

SEQ ID NO: 158961 - DNA, 22 bp, synthetic construct
  misc_feature 1..22: note = chemically synthesized
  source 1..22: mol_type = other DNA
ctccttgccaggccgagctagg

SEQ ID NO: 158962 - DNA, 22 bp, synthetic construct
  misc_feature 1..22: note = chemically synthesized
  source 1..22: mol_type = other DNA
cttgccaggccgagctaggtcc

SEQ ID NO: 158963 - DNA, 22 bp, synthetic construct
  misc_feature 1..22: note = chemically synthesized
  source 1..22: mol_type = other DNA
gccaggccgagctaggtcccaa

SEQ ID NO: 158964 - DNA, 22 bp, synthetic construct
  misc_feature 1..22: note = chemically synthesized
  source 1..22: mol_type = other DNA
ccaggccgagctaggtcccaaa

SEQ ID NO: 158965 - DNA, 22 bp, synthetic construct
  misc_feature 1..22: note = chemically synthesized
  source 1..22: mol_type = other DNA
ggtcccaaatcttcctcagcct

SEQ ID NO: 158966 - DNA, 22 bp, synthetic construct
  misc_feature 1..22: note = chemically synthesized
  source 1..22: mol_type = other DNA
cctcagcctcagctcctccacc

SEQ ID NO: 158967 - DNA, 22 bp, synthetic construct
  misc_feature 1..22: note = chemically synthesized
  source 1..22: mol_type = other DNA
ctcagcctcagctcctccaccc

SEQ ID NO: 158968 - DNA, 22 bp, synthetic construct
  misc_feature 1..22: note = chemically synthesized
  source 1..22: mol_type = other DNA
agcctcagctcctccaccctgt

SEQ ID NO: 158969 - DNA, 22 bp, synthetic construct
  misc_feature 1..22: note = chemically synthesized
  source 1..22: mol_type = other DNA
agctcctccaccctgtaatctt

SEQ ID NO: 158970 - DNA, 22 bp, synthetic construct
  misc_feature 1..22: note = chemically synthesized
  source 1..22: mol_type = other DNA
ctccaccctgtaatctttttat

SEQ ID NO: 158971 - DNA, 22 bp, synthetic construct
  misc_feature 1..22: note = chemically synthesized
  source 1..22: mol_type = other DNA
caccctgtaatctttttatcac

SEQ ID NO: 158972 - DNA, 22 bp, synthetic construct
  misc_feature 1..22: note = chemically synthesized
  source 1..22: mol_type = other DNA
taatctttttatcacctcccct

SEQ ID NO: 158973 - DNA, 22 bp, synthetic construct
  misc_feature 1..22: note = chemically synthesized
  source 1..22: mol_type = other DNA
tttatcacctcccctcctcaca

SEQ ID NO: 158974 - DNA, 22 bp, synthetic construct
  misc_feature 1..22: note = chemically synthesized
  source 1..22: mol_type = other DNA
ttatcacctcccctcctcacac

SEQ ID NO: 158975 - DNA, 22 bp, synthetic construct
  misc_feature 1..22: note = chemically synthesized
  source 1..22: mol_type = other DNA
tatcacctcccctcctcacacc

SEQ ID NO: 158976 - DNA, 22 bp, synthetic construct
  misc_feature 1..22: note = chemically synthesized
  source 1..22: mol_type = other DNA
atcacctcccctcctcacaccc

SEQ ID NO: 158977 - DNA, 22 bp, synthetic construct
  misc_feature 1..22: note = chemically synthesized
  source 1..22: mol_type = other DNA
tcacctcccctcctcacacccg

SEQ ID NO: 158978 - DNA, 22 bp, synthetic construct
  misc_feature 1..22: note = chemically synthesized
  source 1..22: mol_type = other DNA
ccctcctcacacccggtccggt

SEQ ID NO: 158979 - DNA, 22 bp, synthetic construct
  misc_feature 1..22: note = chemically synthesized
  source 1..22: mol_type = other DNA
ctcacacccggtccggtttaca

SEQ ID NO: 158980 - DNA, 22 bp, synthetic construct
  misc_feature 1..22: note = chemically synthesized
  source 1..22: mol_type = other DNA
acacccggtccggtttacagtt

SEQ ID NO: 158981 - DNA, 22 bp, synthetic construct
  misc_feature 1..22: note = chemically synthesized
  source 1..22: mol_type = other DNA
acagtttcattccgtgactagc

SEQ ID NO: 158982 - DNA, 22 bp, synthetic construct
  misc_feature 1..22: note = chemically synthesized
  source 1..22: mol_type = other DNA
cagtttcattccgtgactagcc

SEQ ID NO: 158983 - DNA, 22 bp, synthetic construct
  misc_feature 1..22: note = chemically synthesized
  source 1..22: mol_type = other DNA
cattccgtgactagccctcccc

SEQ ID NO: 158984 - DNA, 22 bp, synthetic construct
  misc_feature 1..22: note = chemically synthesized
  source 1..22: mol_type = other DNA
attccgtgactagccctcccca

SEQ ID NO: 158985 - DNA, 22 bp, synthetic construct
  misc_feature 1..22: note = chemically synthesized
  source 1..22: mol_type = other DNA
cgtgactagccctccccaacct

SEQ ID NO: 158986 - DNA, 22 bp, synthetic construct
  misc_feature 1..22: note = chemically synthesized
  source 1..22: mol_type = other DNA
gccctccccaacctgcccagca

SEQ ID NO: 158987 - DNA, 22 bp, synthetic construct
  misc_feature 1..22: note = chemically synthesized
  source 1..22: mol_type = other DNA
cccaacctgcccagcaatttcc

SEQ ID NO: 158988 - DNA, 22 bp, synthetic construct
  misc_feature 1..22: note = chemically synthesized
  source 1..22: mol_type = other DNA
cccagcaatttcctattaagaa

SEQ ID NO: 158989 - DNA, 22 bp, synthetic construct
  misc_feature 1..22: note = chemically synthesized
  source 1..22: mol_type = other DNA
cctattaagaaggtggctgaag

SEQ ID NO: 158990 - DNA, 22 bp, synthetic construct
  misc_feature 1..22: note = chemically synthesized
  source 1..22: mol_type = other DNA
ctattaagaaggtggctgaagc

SEQ ID NO: 158991 - DNA, 22 bp, synthetic construct
  misc_feature 1..22: note = chemically synthesized
  source 1..22: mol_type = other DNA
ttaagaaggtggctgaagctaa

SEQ ID NO: 158992 - DNA, 22 bp, synthetic construct
  misc_feature 1..22: note = chemically synthesized
  source 1..22: mol_type = other DNA
agaaggtggctgaagctaaagg

SEQ ID NO: 158993 - DNA, 22 bp, synthetic construct
  misc_feature 1..22: note = chemically synthesized
  source 1..22: mol_type = other DNA
aagctaaaggcgtagtcaaggt

SEQ ID NO: 158994 - DNA, 22 bp, synthetic construct
  misc_feature 1..22: note = chemically synthesized
  source 1..22: mol_type = other DNA
aaggcgtagtcaaggttaatgc

SEQ ID NO: 158995 - DNA, 22 bp, synthetic construct
  misc_feature 1..22: note = chemically synthesized
  source 1..22: mol_type = other DNA
atgctcctttttctttatccga

SEQ ID NO: 158996 - DNA, 22 bp, synthetic construct
  misc_feature 1..22: note = chemically synthesized
  source 1..22: mol_type = other DNA
ctttttctttatccgacctctc

SEQ ID NO: 158997 - DNA, 22 bp, synthetic construct
  misc_feature 1..22: note = chemically synthesized
  source 1..22: mol_type = other DNA
tttctttatccgacctctcccg

SEQ ID NO: 158998 - DNA, 22 bp, synthetic construct
  misc_feature 1..22: note = chemically synthesized
  source 1..22: mol_type = other DNA
ttctttatccgacctctcccga

SEQ ID NO: 158999 - DNA, 22 bp, synthetic construct
  misc_feature 1..22: note = chemically synthesized
  source 1..22: mol_type = other DNA
tctttatccgacctctcccgaa

SEQ ID NO: 159000 - DNA, 22 bp, synthetic construct
  misc_feature 1..22: note = chemically synthesized
  source 1..22: mol_type = other DNA
ctttatccgacctctcccgaat

SEQ ID NO: 159001 - DNA, 22 bp, synthetic construct
  misc_feature 1..22: note = chemically synthesized
  source 1..22: mol_type = other DNA
tttatccgacctctcccgaatc

SEQ ID NO: 159002 - DNA, 22 bp, synthetic construct
  misc_feature 1..22: note = chemically synthesized
  source 1..22: mol_type = other DNA
tatccgacctctcccgaatcag

SEQ ID NO: 159003 - DNA, 22 bp, synthetic construct
  misc_feature 1..22: note = chemically synthesized
  source 1..22: mol_type = other DNA
atccgacctctcccgaatcaga

SEQ ID NO: 159004 - DNA, 22 bp, synthetic construct
  misc_feature 1..22: note = chemically synthesized
  source 1..22: mol_type = other DNA
tccgacctctcccgaatcagag

SEQ ID NO: 159005 - DNA, 22 bp, synthetic construct
  misc_feature 1..22: note = chemically synthesized
  source 1..22: mol_type = other DNA
tcccgaatcagagcgtttaggc

SEQ ID NO: 159006 - DNA, 22 bp, synthetic construct
  misc_feature 1..22: note = chemically synthesized
  source 1..22: mol_type = other DNA
ccgaatcagagcgtttaggctc

SEQ ID NO: 159007 - DNA, 22 bp, synthetic construct
  misc_feature 1..22: note = chemically synthesized
  source 1..22: mol_type = other DNA
aggctctttcatcaaatatgaa

SEQ ID NO: 159008 - DNA, 22 bp, synthetic construct
  misc_feature 1..22: note = chemically synthesized
  source 1..22: mol_type = other DNA
ggctctttcatcaaatatgaaa

SEQ ID NO: 159009 - DNA, 22 bp, synthetic construct
  misc_feature 1..22: note = chemically synthesized
  source 1..22: mol_type = other DNA
tttcatcaaatatgaaaaaccc

SEQ ID NO: 159010 - DNA, 22 bp, synthetic construct
  misc_feature 1..22: note = chemically synthesized
  source 1..22: mol_type = other DNA
tcatcaaatatgaaaaacccag

SEQ ID NO: 159011 - DNA, 22 bp, synthetic construct
  misc_feature 1..22: note = chemically synthesized
  source 1..22: mol_type = other DNA
catcaaatatgaaaaacccagc

SEQ ID NO: 159012 - DNA, 22 bp, synthetic construct
  misc_feature 1..22: note = chemically synthesized
  source 1..22: mol_type = other DNA
atcaaatatgaaaaacccagcc

SEQ ID NO: 159013 - DNA, 22 bp, synthetic construct
  misc_feature 1..22: note = chemically synthesized
  source 1..22: mol_type = other DNA
atggctcgttcggcagcaaccc

SEQ ID NO: 159014 - DNA, 22 bp, synthetic construct
  misc_feature 1..22: note = chemically synthesized
  source 1..22: mol_type = other DNA
gttcggcagcaaccctgagacg

SEQ ID NO: 159015 - DNA, 22 bp, synthetic construct
  misc_feature 1..22: note = chemically synthesized
  source 1..22: mol_type = other DNA
ggcagcaaccctgagacgcttt

SEQ ID NO: 159016 - DNA, 22 bp, synthetic construct
  misc_feature 1..22: note = chemically synthesized
  source 1..22: mol_type = other DNA
agacgctttacagccctagacc

SEQ ID NO: 159017 - DNA, 22 bp, synthetic construct
  misc_feature 1..22: note = chemically synthesized
  source 1..22: mol_type = other DNA
tacagccctagaccctaaaagg

SEQ ID NO: 159018 - DNA, 22 bp, synthetic construct
  misc_feature 1..22: note = chemically synthesized
  source 1..22: mol_type = other DNA
acagccctagaccctaaaagga

SEQ ID NO: 159019 - DNA, 22 bp, synthetic construct
  misc_feature 1..22: note = chemically synthesized
  source 1..22: mol_type = other DNA
cagccctagaccctaaaaggac

SEQ ID NO: 159020 - DNA, 22 bp, synthetic construct
  misc_feature 1..22: note = chemically synthesized
  source 1..22: mol_type = other DNA
gaccctaaaaggacaaaaggcc

SEQ ID NO: 159021 - DNA, 22 bp, synthetic construct
  misc_feature 1..22: note = chemically synthesized
  source 1..22: mol_type = other DNA
aaaggacaaaaggccactttat

SEQ ID NO: 159022 - DNA, 22 bp, synthetic construct
  misc_feature 1..22: note = chemically synthesized
  source 1..22: mol_type = other DNA
tattctcaatatacattttatt

SEQ ID NO: 159023 - DNA, 22 bp, synthetic construct
  misc_feature 1..22: note = chemically synthesized
  source 1..22: mol_type = other DNA
attctcaatatacattttatta

SEQ ID NO: 159024 - DNA, 22 bp, synthetic construct
  misc_feature 1..22: note = chemically synthesized
  source 1..22: mol_type = other DNA
ttctcaatatacattttattac

SEQ ID NO: 159025 - DNA, 22 bp, synthetic construct
  misc_feature 1..22: note = chemically synthesized
  source 1..22: mol_type = other DNA
tcaatatacattttattaccca

SEQ ID NO: 159026 - DNA, 22 bp, synthetic construct
  misc_feature 1..22: note = chemically synthesized
  source 1..22: mol_type = other DNA
aatatacattttattacccaat

SEQ ID NO: 159027 - DNA, 22 bp, synthetic construct
  misc_feature 1..22: note = chemically synthesized
  source 1..22: mol_type = other DNA
tattacccaatctgctcctgac

SEQ ID NO: 159028 - DNA, 22 bp, synthetic construct
  misc_feature 1..22: note = chemically synthesized
  source 1..22: mol_type = other DNA
attacccaatctgctcctgaca

SEQ ID NO: 159029 - DNA, 22 bp, synthetic construct
  misc_feature 1..22: note = chemically synthesized
  source 1..22: mol_type = other DNA
ttacccaatctgctcctgacat

SEQ ID NO: 159030 - DNA, 22 bp, synthetic construct
  misc_feature 1..22: note = chemically synthesized
  source 1..22: mol_type = other DNA
cccaatctgctcctgacattaa

SEQ ID NO: 159031 - DNA, 22 bp, synthetic construct
  misc_feature 1..22: note = chemically synthesized
  source 1..22: mol_type = other DNA
ctcctgacattaaataaaactc

SEQ ID NO: 159032 - DNA, 22 bp, synthetic construct
  misc_feature 1..22: note = chemically synthesized
  source 1..22: mol_type = other DNA
ctgacattaaataaaactccaa

SEQ ID NO: 159033 - DNA, 22 bp, synthetic construct
  misc_feature 1..22: note = chemically synthesized
  source 1..22: mol_type = other DNA
acattaaataaaactccaaaaa

SEQ ID NO: 159034 - DNA, 22 bp, synthetic construct
  misc_feature 1..22: note = chemically synthesized
  source 1..22: mol_type = other DNA
aataaaactccaaaaattaaat

SEQ ID NO: 159035 - DNA, 22 bp, synthetic construct
  misc_feature 1..22: note = chemically synthesized
  source 1..22: mol_type = other DNA
caaaaattaaattctggacctc

SEQ ID NO: 159036 - DNA, 22 bp, synthetic construct
  misc_feature 1..22: note = chemically synthesized
  source 1..22: mol_type = other DNA
aattctggacctcaaaccccac

SEQ ID NO: 159037 - DNA, 22 bp, synthetic construct
  misc_feature 1..22: note = chemically synthesized
  source 1..22: mol_type = other DNA
tggacctcaaaccccacaacag

SEQ ID NO: 159038 - DNA, 22 bp, synthetic construct
  misc_feature 1..22: note = chemically synthesized
  source 1..22: mol_type = other DNA
gacctcaaaccccacaacagga

SEQ ID NO: 159039 - DNA, 22 bp, synthetic construct
  misc_feature 1..22: note = chemically synthesized
  source 1..22: mol_type = other DNA
aaaccccacaacaggactcaat

SEQ ID NO: 159040 - DNA, 22 bp, synthetic construct
  misc_feature 1..22: note = chemically synthesized
  source 1..22: mol_type = other DNA
aattaacctcaccttcaaggtg

SEQ ID NO: 159041 - DNA, 22 bp, synthetic construct
  misc_feature 1..22: note = chemically synthesized
  source 1..22: mol_type = other DNA
acctcaccttcaaggtgtacaa

SEQ ID NO: 159042 - DNA, 22 bp, synthetic construct
  misc_feature 1..22: note = chemically synthesized
  source 1..22: mol_type = other DNA
accttcaaggtgtacaataata

SEQ ID NO: 159043 - DNA, 22 bp, synthetic construct
  misc_feature 1..22: note = chemically synthesized
  source 1..22: mol_type = other DNA
caaggtgtacaataatagagta

SEQ ID NO: 159044 - DNA, 22 bp, synthetic construct
  misc_feature 1..22: note = chemically synthesized
  source 1..22: mol_type = other DNA
aaggtgtacaataatagagtag

SEQ ID NO: 159045 - DNA, 22 bp, synthetic construct
  misc_feature 1..22: note = chemically synthesized
  source 1..22: mol_type = other DNA
ttgagttgcaattccttgcctc

SEQ ID NO: 159046 - DNA, 22 bp, synthetic construct
  misc_feature 1..22: note = chemically synthesized
  source 1..22: mol_type = other DNA
tgagttgcaattccttgcctcc

SEQ ID NO: 159047 - DNA, 22 bp, synthetic construct
  misc_feature 1..22: note = chemically synthesized
  source 1..22: mol_type = other DNA
gagttgcaattccttgcctcca

SEQ ID NO: 159048 - DNA, 22 bp, synthetic construct
  misc_feature 1..22: note = chemically synthesized
  source 1..22: mol_type = other DNA
agttgcaattccttgcctccac

SEQ ID NO: 159049 - DNA, 22 bp, synthetic construct
  misc_feature 1..22: note = chemically synthesized
  source 1..22: mol_type = other DNA
caattccttgcctccactgtga

SEQ ID NO: 159050 - DNA, 22 bp, synthetic construct
  misc_feature 1..22: note = chemically synthesized
  source 1..22: mol_type = other DNA
cttgcctccactgtgagacaaa

SEQ ID NO: 159051 - DNA, 22 bp, synthetic construct
  misc_feature 1..22: note = chemically synthesized
  source 1..22: mol_type = other DNA
gcctccactgtgagacaaaccc

SEQ ID NO: 159052 - DNA, 22 bp, synthetic construct
  misc_feature 1..22: note = chemically synthesized
  source 1..22: mol_type = other DNA
cctccactgtgagacaaacccc

SEQ ID NO: 159053 - DNA, 22 bp, synthetic construct
  misc_feature 1..22: note = chemically synthesized
  source 1..22: mol_type = other DNA
cactgtgagacaaaccccagcc

SEQ ID NO: 159054 - DNA, 22 bp, synthetic construct
  misc_feature 1..22: note = chemically synthesized
  source 1..22: mol_type = other DNA
tgagacaaaccccagccacatc

SEQ ID NO: 159055 - DNA, 22 bp, synthetic construct
  misc_feature 1..22: note = chemically synthesized
  source 1..22: mol_type = other DNA
cagcacacaagaacttccaaat

SEQ ID NO: 159056 - DNA, 22 bp, synthetic construct
  misc_feature 1..22: note = chemically synthesized
  source 1..22: mol_type = other DNA
ccaaatgcctaaaccgcagtgg

SEQ ID NO: 159057 - DNA, 22 bp, synthetic construct
  misc_feature 1..22: note = chemically synthesized
  source 1..22: mol_type = other DNA
caaatgcctaaaccgcagtggc

SEQ ID NO: 159058 - DNA, 22 bp, synthetic construct
  misc_feature 1..22: note = chemically synthesized
  source 1..22: mol_type = other DNA
aaccgcagtggccaggcgttcc

SEQ ID NO: 159059 - DNA, 22 bp, synthetic construct
  misc_feature 1..22: note = chemically synthesized
  source 1..22: mol_type = other DNA
ctccggaaccacctcccccagg

SEQ ID NO: 159060 - DNA, 22 bp, synthetic construct
  misc_feature 1..22: note = chemically synthesized
  source 1..22: mol_type = other DNA
cggaaccacctcccccaggagc

SEQ ID NO: 159061 - DNA, 22 bp, synthetic construct
  misc_feature 1..22: note = chemically synthesized
  source 1..22: mol_type = other DNA
ccccaggagcttgctacaagtg

SEQ ID NO: 159062 - DNA, 22 bp, synthetic construct
  misc_feature 1..22: note = chemically synthesized
  source 1..22: mol_type = other DNA
gctacaagtgccagaaatctgg

SEQ ID NO: 159063 - DNA, 22 bp, synthetic construct
  misc_feature 1..22: note = chemically synthesized
  source 1..22: mol_type = other DNA
ctacaagtgccagaaatctggc

SEQ ID NO: 159064 - DNA, 22 bp, synthetic construct
  misc_feature 1..22: note = chemically synthesized
  source 1..22: mol_type = other DNA
caagtgccagaaatctggccac

SEQ ID NO: 159065 - DNA, 22 bp, synthetic construct
  misc_feature 1..22: note = chemically synthesized
  source 1..22: mol_type = other DNA
gccaccaggccaaggaatgccc

SEQ ID NO: 159066 - DNA, 22 bp, synthetic construct
  misc_feature 1..22: note = chemically synthesized
  source 1..22: mol_type = other DNA
ctcctaagccgtgtcccatctg

SEQ ID NO: 159067 - DNA, 22 bp, synthetic construct
  misc_feature 1..22: note = chemically synthesized
  source 1..22: mol_type = other DNA
ctaagccgtgtcccatctgtgc

SEQ ID NO: 159068 - DNA, 22 bp, synthetic construct
  misc_feature 1..22: note = chemically synthesized
  source 1..22: mol_type = other DNA
agccgtgtcccatctgtgcagg

SEQ ID NO: 159069 - DNA, 22 bp, synthetic construct
  misc_feature 1..22: note = chemically synthesized
  source 1..22: mol_type = other DNA
tgcaggaccccactagaaatcg

SEQ ID NO: 159070 - DNA, 22 bp, synthetic construct
  misc_feature 1..22: note = chemically synthesized
  source 1..22: mol_type = other DNA
gaaatcggactgttcaactcac

SEQ ID NO: 159071 - DNA, 22 bp, synthetic construct
  misc_feature 1..22: note = chemically synthesized
  source 1..22: mol_type = other DNA
ttcaactcacctggcagccact

SEQ ID NO: 159072 - DNA, 22 bp, synthetic construct
  misc_feature 1..22: note = chemically synthesized
  source 1..22: mol_type = other DNA
aactcacctggcagccactcct

SEQ ID NO: 159073 - DNA, 22 bp, synthetic construct
  misc_feature 1..22: note = chemically synthesized
  source 1..22: mol_type = other DNA
acctggcagccactcctagagc

SEQ ID NO: 159074 - DNA, 22 bp, synthetic construct
  misc_feature 1..22: note = chemically synthesized
  source 1..22: mol_type = other DNA
gcagccactcctagagcccctg

SEQ ID NO: 159075 - DNA, 22 bp, synthetic construct
  misc_feature 1..22: note = chemically synthesized
  source 1..22: mol_type = other DNA
ctagagcccctggaactctggc

SEQ ID NO: 159076 - DNA, 22 bp, synthetic construct
  misc_feature 1..22: note = chemically synthesized
  source 1..22: mol_type = other DNA
gagcccctggaactctggccca

SEQ ID NO: 159077 - DNA, 22 bp, synthetic construct
  misc_feature 1..22: note = chemically synthesized
  source 1..22: mol_type = other DNA
gaactctggcccaaggctccct

SEQ ID NO: 159078 - DNA, 22 bp, synthetic construct
  misc_feature 1..22: note = chemically synthesized
  source 1..22: mol_type = other DNA
tggcccaaggctccctgactga

SEQ ID NO: 159079 - DNA, 22 bp, synthetic construct
  misc_feature 1..22: note = chemically synthesized
  source 1..22: mol_type = other DNA
gcccaaggctccctgactgact

SEQ ID NO: 159080 - DNA, 22 bp, synthetic construct
  misc_feature 1..22: note = chemically synthesized
  source 1..22: mol_type = other DNA
cctgactgactccttcccagat

SEQ ID NO: 159081 - DNA, 22 bp, synthetic construct
  misc_feature 1..22: note = chemically synthesized
  source 1..22: mol_type = other DNA
actgactccttcccagatcttc

SEQ ID NO: 159082 - DNA, 22 bp, synthetic construct
  misc_feature 1..22: note = chemically synthesized
  source 1..22: mol_type = other DNA
actccttcccagatcttctcgg

SEQ ID NO: 159083 - DNA, 22 bp, synthetic construct
  misc_feature 1..22: note = chemically synthesized
  source 1..22: mol_type = other DNA
cttcccagatcttctcggcttt

SEQ ID NO: 159084 - DNA, 22 bp, synthetic construct
  misc_feature 1..22: note = chemically synthesized
  source 1..22: mol_type = other DNA
cccagatcttctcggctttgca

SEQ ID NO: 159085 - DNA, 22 bp, synthetic construct
  misc_feature 1..22: note = chemically synthesized
  source 1..22: mol_type = other DNA
ccagatcttctcggctttgcag

SEQ ID NO: 159086 - DNA, 22 bp, synthetic construct
  misc_feature 1..22: note = chemically synthesized
  source 1..22: mol_type = other DNA
ctcggctttgcagctgaagact

SEQ ID NO: 159087 - DNA, 22 bp, synthetic construct
  misc_feature 1..22: note = chemically synthesized
  source 1..22: mol_type = other DNA
tcggctttgcagctgaagactg

SEQ ID NO: 159088 - DNA, 22 bp, synthetic construct
  misc_feature 1..22: note = chemically synthesized
  source 1..22: mol_type = other DNA
ggctttgcagctgaagactgcc

SEQ ID NO: 159089 - DNA, 22 bp, synthetic construct
  misc_feature 1..22: note = chemically synthesized
  source 1..22: mol_type = other DNA
tgcagctgaagactgccactgc

SEQ ID NO: 159090 - DNA, 22 bp, synthetic construct
  misc_feature 1..22: note = chemically synthesized
  source 1..22: mol_type = other DNA
gcagctgaagactgccactgcc

SEQ ID NO: 159091 - DNA, 22 bp, synthetic construct
  misc_feature 1..22: note = chemically synthesized
  source 1..22: mol_type = other DNA
cagctgaagactgccactgcct

SEQ ID NO: 159092 - DNA, 22 bp, synthetic construct
  misc_feature 1..22: note = chemically synthesized
  source 1..22: mol_type = other DNA
aagactgccactgcctgatcgc

SEQ ID NO: 159093 - DNA, 22 bp, synthetic construct
  misc_feature 1..22: note = chemically synthesized
  source 1..22: mol_type = other DNA
ccactgcctgatcgcctcggaa

SEQ ID NO: 159094 - DNA, 22 bp, synthetic construct
  misc_feature 1..22: note = chemically synthesized
  source 1..22: mol_type = other DNA
cctgatcgcctcggaagccctg

SEQ ID NO: 159095 - DNA, 22 bp, synthetic construct
  misc_feature 1..22: note = chemically synthesized
  source 1..22: mol_type = other DNA
atcgcctcggaagccctgtaga

SEQ ID NO: 159096 - DNA, 22 bp, synthetic construct
  misc_feature 1..22: note = chemically synthesized
  source 1..22: mol_type = other DNA
ggaagccctgtagaccatcaca

SEQ ID NO: 159097 - DNA, 22 bp, synthetic construct
  misc_feature 1..22: note = chemically synthesized
  source 1..22: mol_type = other DNA
tagaccatcacagacaccgagc

SEQ ID NO: 159098 - DNA, 22 bp, synthetic construct
  misc_feature 1..22: note = chemically synthesized
  source 1..22: mol_type = other DNA
taggtaattctcacagtggagg

SEQ ID NO: 159099 - DNA, 22 bp, synthetic construct
  misc_feature 1..22: note = chemically synthesized
  source 1..22: mol_type = other DNA
aggtaattctcacagtggaggg

SEQ ID NO: 159100 - DNA, 22 bp, synthetic construct
  misc_feature 1..22: note = chemically synthesized
  source 1..22: mol_type = other DNA
ggtaattctcacagtggagggt

SEQ ID NO: 159101 - DNA, 22 bp, synthetic construct
  misc_feature 1..22: note = chemically synthesized
  source 1..22: mol_type = other DNA
tcacagtggagggtaagtctgt

SEQ ID NO: 159102 - DNA, 22 bp, synthetic construct
  misc_feature 1..22: note = chemically synthesized
  source 1..22: mol_type = other DNA
acagtggagggtaagtctgtac

SEQ ID NO: 159103 - DNA, 22 bp, synthetic construct
  misc_feature 1..22: note = chemically synthesized
  source 1..22: mol_type = other DNA
tacccttcttaatcagtatgga

SEQ ID NO: 159104 - DNA, 22 bp, synthetic construct
  misc_feature 1..22: note = chemically synthesized
  source 1..22: mol_type = other DNA
cttaatcagtatggaggctacc

SEQ ID NO: 159105 - DNA, 22 bp, synthetic construct
  misc_feature 1..22: note = chemically synthesized
  source 1..22: mol_type = other DNA
ttaatcagtatggaggctaccc

SEQ ID NO: 159106 - DNA, 22 bp, synthetic construct
  misc_feature 1..22: note = chemically synthesized
  source 1..22: mol_type = other DNA
aatcagtatggaggctacccac

SEQ ID NO: 159107 - DNA, 22 bp, synthetic construct
  misc_feature 1..22: note = chemically synthesized
  source 1..22: mol_type = other DNA
atcagtatggaggctacccact

SEQ ID NO: 159108 - DNA, 22 bp, synthetic construct
  misc_feature 1..22: note = chemically synthesized
  source 1..22: mol_type = other DNA
cccactccacattaccttcttt

SEQ ID NO: 159109 - DNA, 22 bp, synthetic construct
  misc_feature 1..22: note = chemically synthesized
  source 1..22: mol_type = other DNA
cacattaccttcttttcaaagg

SEQ ID NO: 159110 - DNA, 22 bp, synthetic construct
  misc_feature 1..22: note = chemically synthesized
  source 1..22: mol_type = other DNA
ccttcttttcaaaggcctgttt

SEQ ID NO: 159111 - DNA, 22 bp, synthetic construct
  misc_feature 1..22: note = chemically synthesized
  source 1..22: mol_type = other DNA
cttttcaaaggcctgtttccct

SEQ ID NO: 159112 - DNA, 22 bp, synthetic construct
  misc_feature 1..22: note = chemically synthesized
  source 1..22: mol_type = other DNA
ttttcaaaggcctgtttccctt

SEQ ID NO: 159113 - DNA, 22 bp, synthetic construct
  misc_feature 1..22: note = chemically synthesized
  source 1..22: mol_type = other DNA
ttcaaaggcctgtttcccttgc

SEQ ID NO: 159114 - DNA, 22 bp, synthetic construct
  misc_feature 1..22: note = chemically synthesized
  source 1..22: mol_type = other DNA
tcaaaggcctgtttcccttgcc

SEQ ID NO: 159115 - DNA, 22 bp, synthetic construct
  misc_feature 1..22: note = chemically synthesized
  source 1..22: mol_type = other DNA
caaaggcctgtttcccttgcct

SEQ ID NO: 159116 - DNA, 22 bp, synthetic construct
  misc_feature 1..22: note = chemically synthesized
  source 1..22: mol_type = other DNA
aaaggcctgtttcccttgcctc

SEQ ID NO: 159117 - DNA, 22 bp, synthetic construct
  misc_feature 1..22: note = chemically synthesized
  source 1..22: mol_type = other DNA
tttcccttgcctccataactgt

SEQ ID NO: 159118 - DNA, 22 bp, synthetic construct
  misc_feature 1..22: note = chemically synthesized
  source 1..22: mol_type = other DNA
cccttgcctccataactgttgt

SEQ ID NO: 159119 - DNA, 22 bp, synthetic construct
  misc_feature 1..22: note = chemically synthesized
  source 1..22: mol_type = other DNA
ccttgcctccataactgttgta

SEQ ID NO: 159120 - DNA, 22 bp, synthetic construct
  misc_feature 1..22: note = chemically synthesized
  source 1..22: mol_type = other DNA
gcctccataactgttgtaggta

SEQ ID NO: 159121 - DNA, 22 bp, synthetic construct
  misc_feature 1..22: note = chemically synthesized
  source 1..22: mol_type = other DNA
cctccataactgttgtaggtat

SEQ ID NO: 159122 - DNA, 22 bp, synthetic construct
  misc_feature 1..22: note = chemically synthesized
  source 1..22: mol_type = other DNA
cataactgttgtaggtattgat

SEQ ID NO: 159123 - DNA, 22 bp, synthetic construct
  misc_feature 1..22: note = chemically synthesized
  source 1..22: mol_type = other DNA
ttgtaggtattgatggccaggc

SEQ ID NO: 159124 - DNA, 22 bp, synthetic construct
  misc_feature 1..22: note = chemically synthesized
  source 1..22: mol_type = other DNA
taggtattgatggccaggcttc

SEQ ID NO: 159125 - DNA, 22 bp, synthetic construct
  misc_feature 1..22: note = chemically synthesized
  source 1..22: mol_type = other DNA
atggccaggcttctaaacctct

SEQ ID NO: 159126 - DNA, 22 bp, synthetic construct
  misc_feature 1..22: note = chemically synthesized
  source 1..22: mol_type = other DNA
ctaaacctcttaaaattcccca

SEQ ID NO: 159127 - DNA, 22 bp, synthetic construct
  misc_feature 1..22: note = chemically synthesized
  source 1..22: mol_type = other DNA
taaacctcttaaaattccccaa

SEQ ID NO: 159128 - DNA, 22 bp, synthetic construct
  misc_feature 1..22: note = chemically synthesized
  source 1..22: mol_type = other DNA
aacctcttaaaattccccaact

SEQ ID NO: 159129 - DNA, 22 bp, synthetic construct
  misc_feature 1..22: note = chemically synthesized
  source 1..22: mol_type = other DNA
ttaaaattccccaactctggtg

SEQ ID NO: 159130 - DNA, 22 bp, synthetic construct
  misc_feature 1..22: note = chemically synthesized
  source 1..22: mol_type = other DNA
aaaattccccaactctggtgct

SEQ ID NO: 159131 - DNA, 22 bp, synthetic construct
  misc_feature 1..22: note = chemically synthesized
  source 1..22: mol_type = other DNA
aaattccccaactctggtgcta

SEQ ID NO: 159132 - DNA, 22 bp, synthetic construct
  misc_feature 1..22: note = chemically synthesized
  source 1..22: mol_type = other DNA
cccaactctggtgctaaccgag

SEQ ID NO: 159133 - DNA, 22 bp, synthetic construct
  misc_feature 1..22: note = chemically synthesized
  source 1..22: mol_type = other DNA
tggtgctaaccgagacgatact

SEQ ID NO: 159134 - DNA, 22 bp, synthetic construct
  misc_feature 1..22: note = chemically synthesized
  source 1..22: mol_type = other DNA
gtgctaaccgagacgatactct

SEQ ID NO: 159135 - DNA, 22 bp, synthetic construct
  misc_feature 1..22: note = chemically synthesized
  source 1..22: mol_type = other DNA
accgagacgatactcttttaag

SEQ ID NO: 159136 - DNA, 22 bp, synthetic construct
  misc_feature 1..22: note = chemically synthesized
  source 1..22: mol_type = other DNA
ttttaagcactcctttttcatt

SEQ ID NO: 159137 - DNA, 22 bp, synthetic construct
  misc_feature 1..22: note = chemically synthesized
  source 1..22: mol_type = other DNA
ttaagcactcctttttcattat

SEQ ID NO: 159138 - DNA, 22 bp, synthetic construct
  misc_feature 1..22: note = chemically synthesized
  source 1..22: mol_type = other DNA
taagcactcctttttcattatc

SEQ ID NO: 159139 - DNA, 22 bp, synthetic construct
  misc_feature 1..22: note = chemically synthesized
  source 1..22: mol_type = other DNA
aagcactcctttttcattatcc

SEQ ID NO: 159140 - DNA, 22 bp, synthetic construct
  misc_feature 1..22: note = chemically synthesized
  source 1..22: mol_type = other DNA
agcactcctttttcattatccc

SEQ ID NO: 159141 - DNA, 22 bp, synthetic construct
  misc_feature 1..22: note = chemically synthesized
  source 1..22: mol_type = other DNA
ctttttcattatccccacctgc

SEQ ID NO: 159142 - DNA, 22 bp, synthetic construct
  misc_feature 1..22: note = chemically synthesized
  source 1..22: mol_type = other DNA
tttcattatccccacctgccag

SEQ ID NO: 159143 - DNA, 22 bp, synthetic construct
  misc_feature 1..22: note = chemically synthesized
  source 1..22: mol_type = other DNA
ttcattatccccacctgccagt

SEQ ID NO: 159144 - DNA, 22 bp, synthetic construct
  misc_feature 1..22: note = chemically synthesized
  source 1..22: mol_type = other DNA
tcattatccccacctgccagtt

SEQ ID NO: 159145 - DNA, 22 bp, synthetic construct
  misc_feature 1..22: note = chemically synthesized
  source 1..22: mol_type = other DNA
cattatccccacctgccagttc

SEQ ID NO: 159146 - DNA, 22 bp, synthetic construct
  misc_feature 1..22: note = chemically synthesized
  source 1..22: mol_type = other DNA
attatccccacctgccagttcc

SEQ ID NO: 159147 - DNA, 22 bp, synthetic construct
  misc_feature 1..22: note = chemically synthesized
  source 1..22: mol_type = other DNA
tccccacctgccagttccctta

SEQ ID NO: 159148 - DNA, 22 bp, synthetic construct
  misc_feature 1..22: note = chemically synthesized
  source 1..22: mol_type = other DNA
ccagttcccttattaggccgag

SEQ ID NO: 159149 - DNA, 22 bp, synthetic construct
  misc_feature 1..22: note = chemically synthesized
  source 1..22: mol_type = other DNA
ccttattaggccgagacacttt

SEQ ID NO: 159150 - DNA, 22 bp, synthetic construct
  misc_feature 1..22: note = chemically synthesized
  source 1..22: mol_type = other DNA
attaggccgagacactttaact

SEQ ID NO: 159151 - DNA, 22 bp, synthetic construct
  misc_feature 1..22: note = chemically synthesized
  source 1..22: mol_type = other DNA
ttaggccgagacactttaacta

SEQ ID NO: 159152 - DNA, 22 bp, synthetic construct
  misc_feature 1..22: note = chemically synthesized
  source 1..22: mol_type = other DNA
ggccgagacactttaactaaat

SEQ ID NO: 159153 - DNA, 22 bp, synthetic construct
  misc_feature 1..22: note = chemically synthesized
  source 1..22: mol_type = other DNA
taactaaattatctgcttccct

SEQ ID NO: 159154 - DNA, 22 bp, synthetic construct
  misc_feature 1..22: note = chemically synthesized
  source 1..22: mol_type = other DNA
aactaaattatctgcttccctg

SEQ ID NO: 159155 - DNA, 22 bp, synthetic construct
  misc_feature 1..22: note = chemically synthesized
  source 1..22: mol_type = other DNA
actaaattatctgcttccctga

SEQ ID NO: 159156 - DNA, 22 bp, synthetic construct
  misc_feature 1..22: note = chemically synthesized
  source 1..22: mol_type = other DNA
aattatctgcttccctgactat

SEQ ID NO: 159157 - DNA, 22 bp, synthetic construct
  misc_feature 1..22: note = chemically synthesized
  source 1..22: mol_type = other DNA
tctgcttccctgactattcctg

SEQ ID NO: 159158 - DNA, 22 bp, synthetic construct
  misc_feature 1..22: note = chemically synthesized
  source 1..22: mol_type = other DNA
cttccctgactattcctgggct

SEQ ID NO: 159159 - DNA, 22 bp, synthetic construct
  misc_feature 1..22: note = chemically synthesized
  source 1..22: mol_type = other DNA
ccctgactattcctgggctaca

SEQ ID NO: 159160 - DNA, 22 bp, synthetic construct
  misc_feature 1..22: note = chemically synthesized
  source 1..22: mol_type = other DNA
cctgactattcctgggctacag

SEQ ID NO: 159161 - DNA, 22 bp, synthetic construct
  misc_feature 1..22: note = chemically synthesized
  source 1..22: mol_type = other DNA
actattcctgggctacagccat

SEQ ID NO: 159162 - DNA, 22 bp, synthetic construct
  misc_feature 1..22: note = chemically synthesized
  source 1..22: mol_type = other DNA
ttcctgggctacagccatacct

SEQ ID NO: 159163 - DNA, 22 bp, synthetic construct
  misc_feature 1..22: note = chemically synthesized
  source 1..22: mol_type = other DNA
ctgggctacagccatacctcat

SEQ ID NO: 159164 - DNA, 22 bp, synthetic construct
  misc_feature 1..22: note = chemically synthesized
  source 1..22: mol_type = other DNA
ggctacagccatacctcattgc

SEQ ID NO: 159165 - DNA, 22 bp, synthetic construct
  misc_feature 1..22: note = chemically synthesized
  source 1..22: mol_type = other DNA
cagccatacctcattgccatgt

SEQ ID NO: 159166 - DNA, 22 bp, synthetic construct
  misc_feature 1..22: note = chemically synthesized
  source 1..22: mol_type = other DNA
attgccatgttttcccccagtt

SEQ ID NO: 159167 - DNA, 22 bp, synthetic construct
  misc_feature 1..22: note = chemically synthesized
  source 1..22: mol_type = other DNA
ccatgttttcccccagttcaaa

SEQ ID NO: 159168 - DNA, 22 bp, synthetic construct
  misc_feature 1..22: note = chemically synthesized
  source 1..22: mol_type = other DNA
tcccccagttcaaagcctcctt

SEQ ID NO: 159169 - DNA, 22 bp, synthetic construct
  misc_feature 1..22: note = chemically synthesized
  source 1..22: mol_type = other DNA
cccccagttcaaagcctccttc

SEQ ID NO: 159170 - DNA, 22 bp, synthetic construct
  misc_feature 1..22: note = chemically synthesized
  source 1..22: mol_type = other DNA
ccccagttcaaagcctccttca

SEQ ID NO: 159171 - DNA, 22 bp, synthetic construct
  misc_feature 1..22: note = chemically synthesized
  source 1..22: mol_type = other DNA
aaagcctccttcacatcctccc

SEQ ID NO: 159172 - DNA, 22 bp, synthetic construct
  misc_feature 1..22: note = chemically synthesized
  source 1..22: mol_type = other DNA
cttcacatcctccccttgtatc

SEQ ID NO: 159173 - DNA, 22 bp, synthetic construct
  misc_feature 1..22: note = chemically synthesized
  source 1..22: mol_type = other DNA
cacatcctccccttgtatctcc

SEQ ID NO: 159174 - DNA, 22 bp, synthetic construct
  misc_feature 1..22: note = chemically synthesized
  source 1..22: mol_type = other DNA
acatcctccccttgtatctccc

SEQ ID NO: 159175 - DNA, 22 bp, synthetic construct
  misc_feature 1..22: note = chemically synthesized
  source 1..22: mol_type = other DNA
cccttgtatctccccaccttaa

SEQ ID NO: 159176 - DNA, 22 bp, synthetic construct
  misc_feature 1..22: note = chemically synthesized
  source 1..22: mol_type = other DNA
gtatctccccaccttaatccac

SEQ ID NO: 159177 - DNA, 22 bp, synthetic construct
  misc_feature 1..22: note = chemically synthesized
  source 1..22: mol_type = other DNA
tatctccccaccttaatccaca

SEQ ID NO: 159178 - DNA, 22 bp, synthetic construct
  misc_feature 1..22: note = chemically synthesized
  source 1..22: mol_type = other DNA
cccaccttaatccacaagtata

SEQ ID NO: 159179 - DNA, 22 bp, synthetic construct
  misc_feature 1..22: note = chemically synthesized
  source 1..22: mol_type = other DNA
aatccacaagtataagacacct

SEQ ID NO: 159180 - DNA, 22 bp, synthetic construct
  misc_feature 1..22: note = chemically synthesized
  source 1..22: mol_type = other DNA
atccacaagtataagacacctc

SEQ ID NO: 159181 - DNA, 22 bp, synthetic construct
  misc_feature 1..22: note = chemically synthesized
  source 1..22: mol_type = other DNA
tacttcctccttcgcgaccgat

SEQ ID NO: 159182 - DNA, 22 bp, synthetic construct
  misc_feature 1..22: note = chemically synthesized
  source 1..22: mol_type = other DNA
cttcctccttcgcgaccgatca

SEQ ID NO: 159183 - DNA, 22 bp, synthetic construct
  misc_feature 1..22: note = chemically synthesized
  source 1..22: mol_type = other DNA
cctccttcgcgaccgatcatgc

SEQ ID NO: 159184 - DNA, 22 bp, synthetic construct
  misc_feature 1..22: note = chemically synthesized
  source 1..22: mol_type = other DNA
ctccttcgcgaccgatcatgcg

SEQ ID NO: 159185 - DNA, 22 bp, synthetic construct
  misc_feature 1..22: note = chemically synthesized
  source 1..22: mol_type = other DNA
cttcgcgaccgatcatgcgccc

SEQ ID NO: 159186 - DNA, 22 bp, synthetic construct
  misc_feature 1..22: note = chemically synthesized
  source 1..22: mol_type = other DNA
cgcgaccgatcatgcgcccctt

SEQ ID NO: 159187 - DNA, 22 bp, synthetic construct
  misc_feature 1..22: note = chemically synthesized
  source 1..22: mol_type = other DNA
gcgaccgatcatgcgcccctta

SEQ ID NO: 159188 - DNA, 22 bp, synthetic construct
  misc_feature 1..22: note = chemically synthesized
  source 1..22: mol_type = other DNA
accatcccattaaaacctaatc

SEQ ID NO: 159189 - DNA, 22 bp, synthetic construct
  misc_feature 1..22: note = chemically synthesized
  source 1..22: mol_type = other DNA
ccatcccattaaaacctaatca

SEQ ID NO: 159190 - DNA, 22 bp, synthetic construct
  misc_feature 1..22: note = chemically synthesized
  source 1..22: mol_type = other DNA
aaacctaatcactcttaccccg

SEQ ID NO: 159191 - DNA, 22 bp, synthetic construct
  misc_feature 1..22: note = chemically synthesized
  source 1..22: mol_type = other DNA
atcactcttaccccgctcaatg

SEQ ID NO: 159192 - DNA, 22 bp, synthetic construct
  misc_feature 1..22: note = chemically synthesized
  source 1..22: mol_type = other DNA
ttaccccgctcaatgccagtat

SEQ ID NO: 159193 - DNA, 22 bp, synthetic construct
  misc_feature 1..22: note = chemically synthesized
  source 1..22: mol_type = other DNA
accccgctcaatgccagtatcc

SEQ ID NO: 159194 - DNA, 22 bp, synthetic construct
  misc_feature 1..22: note = chemically synthesized
  source 1..22: mol_type = other DNA
ccccgctcaatgccagtatccc

SEQ ID NO: 159195 - DNA, 22 bp, synthetic construct
  misc_feature 1..22: note = chemically synthesized
  source 1..22: mol_type = other DNA
aatgccagtatcccatcccaca

SEQ ID NO: 159196 - DNA, 22 bp, synthetic construct
  misc_feature 1..22: note = chemically synthesized
  source 1..22: mol_type = other DNA
tgaaaggattaaagcctgttat

SEQ ID NO: 159197 - DNA, 22 bp, synthetic construct
  misc_feature 1..22: note = chemically synthesized
  source 1..22: mol_type = other DNA
gaaaggattaaagcctgttatt

SEQ ID NO: 159198 - DNA, 22 bp, synthetic construct
  misc_feature 1..22: note = chemically synthesized
  source 1..22: mol_type = other DNA
aaaggattaaagcctgttatta

SEQ ID NO: 159199 - DNA, 22 bp, synthetic construct
  misc_feature 1..22: note = chemically synthesized
  source 1..22: mol_type = other DNA
aagcctgttattacttgcctgt

SEQ ID NO: 159200 - DNA, 22 bp, synthetic construct
  misc_feature 1..22: note = chemically synthesized
  source 1..22: mol_type = other DNA
ttattacttgcctgttacagca

SEQ ID NO: 159201 - DNA, 22 bp, synthetic construct
  misc_feature 1..22: note = chemically synthesized
  source 1..22: mol_type = other DNA
ttacttgcctgttacagcatgg

SEQ ID NO: 159202 - DNA, 22 bp, synthetic construct
  misc_feature 1..22: note = chemically synthesized
  source 1..22: mol_type = other DNA
cttgcctgttacagcatggcct

SEQ ID NO: 159203 - DNA, 22 bp, synthetic construct
  misc_feature 1..22: note = chemically synthesized
  source 1..22: mol_type = other DNA
gcctgttacagcatggcctttt

SEQ ID NO: 159204 - DNA, 22 bp, synthetic construct
  misc_feature 1..22: note = chemically synthesized
  source 1..22: mol_type = other DNA
cctgttacagcatggcctttta

SEQ ID NO: 159205 - DNA, 22 bp, synthetic construct
  misc_feature 1..22: note = chemically synthesized
  source 1..22: mol_type = other DNA
ttacagcatggccttttaaagc

SEQ ID NO: 159206 - DNA, 22 bp, synthetic construct
  misc_feature 1..22: note = chemically synthesized
  source 1..22: mol_type = other DNA
cagcatggccttttaaagccta

SEQ ID NO: 159207 - DNA, 22 bp, synthetic construct
  misc_feature 1..22: note = chemically synthesized
  source 1..22: mol_type = other DNA
ttaaagcctataaactctcctt

SEQ ID NO: 159208 - DNA, 22 bp, synthetic construct
  misc_feature 1..22: note = chemically synthesized
  source 1..22: mol_type = other DNA
taaagcctataaactctcctta

SEQ ID NO: 159209 - DNA, 22 bp, synthetic construct
  misc_feature 1..22: note = chemically synthesized
  source 1..22: mol_type = other DNA
aaagcctataaactctccttac

SEQ ID NO: 159210 - DNA, 22 bp, synthetic construct
  misc_feature 1..22: note = chemically synthesized
  source 1..22: mol_type = other DNA
aagcctataaactctccttacc

SEQ ID NO: 159211 - DNA, 22 bp, synthetic construct
  misc_feature 1..22: note = chemically synthesized
  source 1..22: mol_type = other DNA
taaactctccttaccattcccc

SEQ ID NO: 159212 - DNA, 22 bp, synthetic construct
  misc_feature 1..22: note = chemically synthesized
  source 1..22: mol_type = other DNA
tccttaccattcccccatttta

SEQ ID NO: 159213 - DNA, 22 bp, synthetic construct
  misc_feature 1..22: note = chemically synthesized
  source 1..22: mol_type = other DNA
cttaccattcccccattttacc

SEQ ID NO: 159214 - DNA, 22 bp, synthetic construct
  misc_feature 1..22: note = chemically synthesized
  source 1..22: mol_type = other DNA
accattcccccattttacctgt

SEQ ID NO: 159215 - DNA, 22 bp, synthetic construct
  misc_feature 1..22: note = chemically synthesized
  source 1..22: mol_type = other DNA
ccattcccccattttacctgtc

SEQ ID NO: 159216 - DNA, 22 bp, synthetic construct
  misc_feature 1..22: note = chemically synthesized
  source 1..22: mol_type = other DNA
ccccattttacctgtcctaaaa

SEQ ID NO: 159217 - DNA, 22 bp, synthetic construct
  misc_feature 1..22: note = chemically synthesized
  source 1..22: mol_type = other DNA
tacctgtcctaaaaccagacaa

SEQ ID NO: 159218 - DNA, 22 bp, synthetic construct
  misc_feature 1..22: note = chemically synthesized
  source 1..22: mol_type = other DNA
acctgtcctaaaaccagacaag

SEQ ID NO: 159219 - DNA, 22 bp, synthetic construct
  misc_feature 1..22: note = chemically synthesized
  source 1..22: mol_type = other DNA
cctgtcctaaaaccagacaagc

SEQ ID NO: 159220 - DNA, 22 bp, synthetic construct
  misc_feature 1..22: note = chemically synthesized
  source 1..22: mol_type = other DNA
tcctaaaaccagacaagcctta

SEQ ID NO: 159221 - DNA, 22 bp, synthetic construct
  misc_feature 1..22: note = chemically synthesized
  source 1..22: mol_type = other DNA
aaaccagacaagccttacaggt

SEQ ID NO: 159222 - DNA, 22 bp, synthetic construct
  misc_feature 1..22: note = chemically synthesized
  source 1..22: mol_type = other DNA
acaggttagttcagaatctgca

SEQ ID NO: 159223 - DNA, 22 bp, synthetic construct
  misc_feature 1..22: note = chemically synthesized
  source 1..22: mol_type = other DNA
caggttagttcagaatctgcat

SEQ ID NO: 159224 - DNA, 22 bp, synthetic construct
  misc_feature 1..22: note = chemically synthesized
  source 1..22: mol_type = other DNA
gttcagaatctgcatcttatca

SEQ ID NO: 159225 - DNA, 22 bp, synthetic construct
  misc_feature 1..22: note = chemically synthesized
  source 1..22: mol_type = other DNA
agaatctgcatcttatcaacca

SEQ ID NO: 159226 - DNA, 22 bp, synthetic construct
  misc_feature 1..22: note = chemically synthesized
  source 1..22: mol_type = other DNA
catcttatcaaccaaattgttt

SEQ ID NO: 159227 - DNA, 22 bp, synthetic construct
  misc_feature 1..22: note = chemically synthesized
  source 1..22: mol_type = other DNA
atcaaccaaattgttttgccta

SEQ ID NO: 159228 - DNA, 22 bp, synthetic construct
  misc_feature 1..22: note = chemically synthesized
  source 1..22: mol_type = other DNA
tcaaccaaattgttttgcctat

SEQ ID NO: 159229 - DNA, 22 bp, synthetic construct
  misc_feature 1..22: note = chemically synthesized
  source 1..22: mol_type = other DNA
ttttgcctatccaccccatggt

SEQ ID NO: 159230 - DNA, 22 bp, synthetic construct
  misc_feature 1..22: note = chemically synthesized
  source 1..22: mol_type = other DNA
tgcctatccaccccatggtgcc

SEQ ID NO: 159231 - DNA, 22 bp, synthetic construct
  misc_feature 1..22: note = chemically synthesized
  source 1..22: mol_type = other DNA
gcctatccaccccatggtgcca

SEQ ID NO: 159232 - DNA, 22 bp, synthetic construct
  misc_feature 1..22: note = chemically synthesized
  source 1..22: mol_type = other DNA
cctatccaccccatggtgccaa

SEQ ID NO: 159233 - DNA, 22 bp, synthetic construct
  misc_feature 1..22: note = chemically synthesized
  source 1..22: mol_type = other DNA
tccaccccatggtgccaaaccc

SEQ ID NO: 159234 - DNA, 22 bp, synthetic construct
  misc_feature 1..22: note = chemically synthesized
  source 1..22: mol_type = other DNA
tcctatcctcaatacctccatc

SEQ ID NO: 159235 - DNA, 22 bp, synthetic construct
  misc_feature 1..22: note = chemically synthesized
  source 1..22: mol_type = other DNA
ctatcctcaatacctccatcta

SEQ ID NO: 159236 - DNA, 22 bp, synthetic construct
  misc_feature 1..22: note = chemically synthesized
  source 1..22: mol_type = other DNA
tcctcaatacctccatctataa

SEQ ID NO: 159237 - DNA, 22 bp, synthetic construct
  misc_feature 1..22: note = chemically synthesized
  source 1..22: mol_type = other DNA
aatacctccatctataacccat

SEQ ID NO: 159238 - DNA, 22 bp, synthetic construct
  misc_feature 1..22: note = chemically synthesized
  source 1..22: mol_type = other DNA
catctataacccattattctgt

SEQ ID NO: 159239 - DNA, 22 bp, synthetic construct
  misc_feature 1..22: note = chemically synthesized
  source 1..22: mol_type = other DNA
taacccattattctgttctgga

SEQ ID NO: 159240 - DNA, 22 bp, synthetic construct
  misc_feature 1..22: note = chemically synthesized
  source 1..22: mol_type = other DNA
ttctgttctggatctcaaacat

SEQ ID NO: 159241 - DNA, 22 bp, synthetic construct
  misc_feature 1..22: note = chemically synthesized
  source 1..22: mol_type = other DNA
tgttctggatctcaaacatgct

SEQ ID NO: 159242 - DNA, 22 bp, synthetic construct
  misc_feature 1..22: note = chemically synthesized
  source 1..22: mol_type = other DNA
ttctggatctcaaacatgcttt

SEQ ID NO: 159243 - DNA, 22 bp, synthetic construct
  misc_feature 1..22: note = chemically synthesized
  source 1..22: mol_type = other DNA
tggatctcaaacatgctttctt

SEQ ID NO: 159244 - DNA, 22 bp, synthetic construct
  misc_feature 1..22: note = chemically synthesized
  source 1..22: mol_type = other DNA
gatctcaaacatgctttcttta

SEQ ID NO: 159245 - DNA, 22 bp, synthetic construct
  misc_feature 1..22: note = chemically synthesized
  source 1..22: mol_type = other DNA
aaacatgctttctttactattc

SEQ ID NO: 159246 - DNA, 22 bp, synthetic construct
  misc_feature 1..22: note = chemically synthesized
  source 1..22: mol_type = other DNA
tctttactattcctttgcaccc

SEQ ID NO: 159247 - DNA, 22 bp, synthetic construct
  misc_feature 1..22: note = chemically synthesized
  source 1..22: mol_type = other DNA
ctttactattcctttgcaccct

SEQ ID NO: 159248 - DNA, 22 bp, synthetic construct
  misc_feature 1..22: note = chemically synthesized
  source 1..22: mol_type = other DNA
tttactattcctttgcaccctt

SEQ ID NO: 159249 - DNA, 22 bp, synthetic construct
  misc_feature 1..22: note = chemically synthesized
  source 1..22: mol_type = other DNA
tactattcctttgcacccttca

SEQ ID NO: 159250 - DNA, 22 bp, synthetic construct
  misc_feature 1..22: note = chemically synthesized
  source 1..22: mol_type = other DNA
actattcctttgcacccttcat

SEQ ID NO: 159251 - DNA, 22 bp, synthetic construct
  misc_feature 1..22: note = chemically synthesized
  source 1..22: mol_type = other DNA
ctattcctttgcacccttcatt

SEQ ID NO: 159252 - DNA, 22 bp, synthetic construct
  misc_feature 1..22: note = chemically synthesized
  source 1..22: mol_type = other DNA
ttcctttgcacccttcattcca

SEQ ID NO: 159253 - DNA, 22 bp, synthetic construct
  misc_feature 1..22: note = chemically synthesized
  source 1..22: mol_type = other DNA
ctttgcacccttcattccagcc

SEQ ID NO: 159254 - DNA, 22 bp, synthetic construct
  misc_feature 1..22: note = chemically synthesized
  source 1..22: mol_type = other DNA
tgcacccttcattccagcctct

SEQ ID NO: 159255 - DNA, 22 bp, synthetic construct
  misc_feature 1..22: note = chemically synthesized
  source 1..22: mol_type = other DNA
gcacccttcattccagcctctc

SEQ ID NO: 159256 - DNA, 22 bp, synthetic construct
  misc_feature 1..22: note = chemically synthesized
  source 1..22: mol_type = other DNA
cacccttcattccagcctctct

SEQ ID NO: 159257 - DNA, 22 bp, synthetic construct
  misc_feature 1..22: note = chemically synthesized
  source 1..22: mol_type = other DNA
cattccagcctctcttcgcttt

SEQ ID NO: 159258 - DNA, 22 bp, synthetic construct
  misc_feature 1..22: note = chemically synthesized
  source 1..22: mol_type = other DNA
attccagcctctcttcgctttc

SEQ ID NO: 159259 - DNA, 22 bp, synthetic construct
  misc_feature 1..22: note = chemically synthesized
  source 1..22: mol_type = other DNA
cagcctctcttcgctttcactt

SEQ ID NO: 159260 - DNA, 22 bp, synthetic construct
  misc_feature 1..22: note = chemically synthesized
  source 1..22: mol_type = other DNA
tcttcgctttcacttggactga

SEQ ID NO: 159261 - DNA, 22 bp, synthetic construct
  misc_feature 1..22: note = chemically synthesized
  source 1..22: mol_type = other DNA
ttcgctttcacttggactgaca

SEQ ID NO: 159262 - DNA, 22 bp, synthetic construct
  misc_feature 1..22: note = chemically synthesized
  source 1..22: mol_type = other DNA
cgctttcacttggactgacact

SEQ ID NO: 159263 - DNA, 22 bp, synthetic construct
  misc_feature 1..22: note = chemically synthesized
  source 1..22: mol_type = other DNA
gctttcacttggactgacactg

SEQ ID NO: 159264 - DNA, 22 bp, synthetic construct
  misc_feature 1..22: note = chemically synthesized
  source 1..22: mol_type = other DNA
tcacttggactgacactgacac

SEQ ID NO: 159265 - DNA, 22 bp, synthetic construct
  misc_feature 1..22: note = chemically synthesized
  source 1..22: mol_type = other DNA
cacttggactgacactgacacc

SEQ ID NO: 159266 - DNA, 22 bp, synthetic construct
  misc_feature 1..22: note = chemically synthesized
  source 1..22: mol_type = other DNA
acttggactgacactgacaccc

SEQ ID NO: 159267 - DNA, 22 bp, synthetic construct
  misc_feature 1..22: note = chemically synthesized
  source 1..22: mol_type = other DNA
ggactgacactgacacccatta

SEQ ID NO: 159268 - DNA, 22 bp, synthetic construct
  misc_feature 1..22: note = chemically synthesized
  source 1..22: mol_type = other DNA
gactgacactgacacccattag

SEQ ID NO: 159269 - DNA, 22 bp, synthetic construct
  misc_feature 1..22: note = chemically synthesized
  source 1..22: mol_type = other DNA
acactgacacccattaggctca

SEQ ID NO: 159270 - DNA, 22 bp, synthetic construct
  misc_feature 1..22: note = chemically synthesized
  source 1..22: mol_type = other DNA
acacccattaggctcagcaaat

SEQ ID NO: 159271 - DNA, 22 bp, synthetic construct
  misc_feature 1..22: note = chemically synthesized
  source 1..22: mol_type = other DNA
ggctcagcaaattacctgggct

SEQ ID NO: 159272 - DNA, 22 bp, synthetic construct
  misc_feature 1..22: note = chemically synthesized
  source 1..22: mol_type = other DNA
agcaaattacctgggctgtact

SEQ ID NO: 159273 - DNA, 22 bp, synthetic construct
  misc_feature 1..22: note = chemically synthesized
  source 1..22: mol_type = other DNA
cctgggctgtactgctgcaagg

SEQ ID NO: 159274 - DNA, 22 bp, synthetic construct
  misc_feature 1..22: note = chemically synthesized
  source 1..22: mol_type = other DNA
ggctgtactgctgcaaggcttc

SEQ ID NO: 159275 - DNA, 22 bp, synthetic construct
  misc_feature 1..22: note = chemically synthesized
  source 1..22: mol_type = other DNA
tactgctgcaaggcttcacaga

SEQ ID NO: 159276 - DNA, 22 bp, synthetic construct
  misc_feature 1..22: note = chemically synthesized
  source 1..22: mol_type = other DNA
ctgcaaggcttcacagacagac

SEQ ID NO: 159277 - DNA, 22 bp, synthetic construct
  misc_feature 1..22: note = chemically synthesized
  source 1..22: mol_type = other DNA
caaggcttcacagacagacccc

SEQ ID NO: 159278 - DNA, 22 bp, synthetic construct
  misc_feature 1..22: note = chemically synthesized
  source 1..22: mol_type = other DNA
cacagacagaccccattacttc

SEQ ID NO: 159279 - DNA, 22 bp, synthetic construct
  misc_feature 1..22: note = chemically synthesized
  source 1..22: mol_type = other DNA
acagacagaccccattacttca

SEQ ID NO: 159280 - DNA, 22 bp, synthetic construct
  misc_feature 1..22: note = chemically synthesized
  source 1..22: mol_type = other DNA
cttcagtcaagcccaaatttca

SEQ ID NO: 159281 - DNA, 22 bp, synthetic construct
  misc_feature 1..22: note = chemically synthesized
  source 1..22: mol_type = other DNA
cagtcaagcccaaatttcatcc

SEQ ID NO: 159282 - DNA, 22 bp, synthetic construct
  misc_feature 1..22: note = chemically synthesized
  source 1..22: mol_type = other DNA
agtcaagcccaaatttcatcct

SEQ ID NO: 159283 - DNA, 22 bp, synthetic construct
  misc_feature 1..22: note = chemically synthesized
  source 1..22: mol_type = other DNA
catcctcatgtgttacctatct

SEQ ID NO: 159284 - DNA, 22 bp, synthetic construct
  misc_feature 1..22: note = chemically synthesized
  source 1..22: mol_type = other DNA
atcctcatgtgttacctatctc

SEQ ID NO: 159285 - DNA, 22 bp, synthetic construct
  misc_feature 1..22: note = chemically synthesized
  source 1..22: mol_type = other DNA
atgtgttacctatctcggcata

SEQ ID NO: 159286 - DNA, 22 bp, synthetic construct
  misc_feature 1..22: note = chemically synthesized
  source 1..22: mol_type = other DNA
cctatctcggcataattctcat

SEQ ID NO: 159287 - DNA, 22 bp, synthetic construct
  misc_feature 1..22: note = chemically synthesized
  source 1..22: mol_type = other DNA
tctcggcataattctcataaaa

SEQ ID NO: 159288 - DNA, 22 bp, synthetic construct
  misc_feature 1..22: note = chemically synthesized
  source 1..22: mol_type = other DNA
ggcataattctcataaaaacac

SEQ ID NO: 159289 - DNA, 22 bp, synthetic construct
  misc_feature 1..22: note = chemically synthesized
  source 1..22: mol_type = other DNA
tcataaaaacacacgtgctctc

SEQ ID NO: 159290 - DNA, 22 bp, synthetic construct
  misc_feature 1..22: note = chemically synthesized
  source 1..22: mol_type = other DNA
ataaaaacacacgtgctctccc

SEQ ID NO: 159291 - DNA, 22 bp, synthetic construct
  misc_feature 1..22: note = chemically synthesized
  source 1..22: mol_type = other DNA
tccctgctgattgtgtccgatt

SEQ ID NO: 159292 - DNA, 22 bp, synthetic construct
  misc_feature 1..22: note = chemically synthesized
  source 1..22: mol_type = other DNA
cctgctgattgtgtccgattaa

SEQ ID NO: 159293 - DNA, 22 bp, synthetic construct
  misc_feature 1..22: note = chemically synthesized
  source 1..22: mol_type = other DNA
ctgattgtgtccgattaatctc

SEQ ID NO: 159294 - DNA, 22 bp, synthetic construct
  misc_feature 1..22: note = chemically synthesized
  source 1..22: mol_type = other DNA
attgtgtccgattaatctccca

SEQ ID NO: 159295 - DNA, 22 bp, synthetic construct
  misc_feature 1..22: note = chemically synthesized
  source 1..22: mol_type = other DNA
tgtccgattaatctcccaaacc

SEQ ID NO: 159296 - DNA, 22 bp, synthetic construct
  misc_feature 1..22: note = chemically synthesized
  source 1..22: mol_type = other DNA
atctcccaaacctcaatccctt

SEQ ID NO: 159297 - DNA, 22 bp, synthetic construct
  misc_feature 1..22: note = chemically synthesized
  source 1..22: mol_type = other DNA
ccaaacctcaatcccttctaca

SEQ ID NO: 159298 - DNA, 22 bp, synthetic construct
  misc_feature 1..22: note = chemically synthesized
  source 1..22: mol_type = other DNA
aatcccttctacaaaacaacaa

SEQ ID NO: 159299 - DNA, 22 bp, synthetic construct
  misc_feature 1..22: note = chemically synthesized
  source 1..22: mol_type = other DNA
ctacaaaacaacaactcctttc

SEQ ID NO: 159300 - DNA, 22 bp, synthetic construct
  misc_feature 1..22: note = chemically synthesized
  source 1..22: mol_type = other DNA
tacaaaacaacaactcctttcc

SEQ ID NO: 159301 - DNA, 22 bp, synthetic construct
  misc_feature 1..22: note = chemically synthesized
  source 1..22: mol_type = other DNA
caaaacaacaactcctttcctt

SEQ ID NO: 159302 - DNA, 22 bp, synthetic construct
  misc_feature 1..22: note = chemically synthesized
  source 1..22: mol_type = other DNA
ctttccttcctaggcatagtta

SEQ ID NO: 159303 - DNA, 22 bp, synthetic construct
  misc_feature 1..22: note = chemically synthesized
  source 1..22: mol_type = other DNA
tccttcctaggcatagttagtg

SEQ ID NO: 159304 - DNA, 22 bp, synthetic construct
  misc_feature 1..22: note = chemically synthesized
  source 1..22: mol_type = other DNA
ccttcctaggcatagttagtgc

SEQ ID NO: 159305 - DNA, 22 bp, synthetic construct
  misc_feature 1..22: note = chemically synthesized
  source 1..22: mol_type = other DNA
cttcctaggcatagttagtgcg

SEQ ID NO: 159306 - DNA, 22 bp, synthetic construct
  misc_feature 1..22: note = chemically synthesized
  source 1..22: mol_type = other DNA
cctaggcatagttagtgcggtc

SEQ ID NO: 159307 - DNA, 22 bp, synthetic construct
  misc_feature 1..22: note = chemically synthesized
  source 1..22: mol_type = other DNA
ctaggcatagttagtgcggtca

SEQ ID NO: 159308 - DNA, 22 bp, synthetic construct
  misc_feature 1..22: note = chemically synthesized
  source 1..22: mol_type = other DNA
ggcatagttagtgcggtcagaa

SEQ ID NO: 159309 - DNA, 22 bp, synthetic construct
  misc_feature 1..22: note = chemically synthesized
  source 1..22: mol_type = other DNA
gtgcggtcagaattcttacaca

SEQ ID NO: 159310 - DNA, 22 bp, synthetic construct
  misc_feature 1..22: note = chemically synthesized
  source 1..22: mol_type = other DNA
ttacacaagatccaggactgca

SEQ ID NO: 159311 - DNA, 22 bp, synthetic construct
  misc_feature 1..22: note = chemically synthesized
  source 1..22: mol_type = other DNA
acacaagatccaggactgcacc

SEQ ID NO: 159312 - DNA, 22 bp, synthetic construct
  misc_feature 1..22: note = chemically synthesized
  source 1..22: mol_type = other DNA
cacaagatccaggactgcaccc

SEQ ID NO: 159313 - DNA, 22 bp, synthetic construct
  misc_feature 1..22: note = chemically synthesized
  source 1..22: mol_type = other DNA
caccctgtagcctttctgtcca

SEQ ID NO: 159314 - DNA, 22 bp, synthetic construct
  misc_feature 1..22: note = chemically synthesized
  source 1..22: mol_type = other DNA
tagcctttctgtccaaataact

SEQ ID NO: 159315 - DNA, 22 bp, synthetic construct
  misc_feature 1..22: note = chemically synthesized
  source 1..22: mol_type = other DNA
tctgtccaaataacttgacctt

SEQ ID NO: 159316 - DNA, 22 bp, synthetic construct
  misc_feature 1..22: note = chemically synthesized
  source 1..22: mol_type = other DNA
ctgtccaaataacttgacctta

SEQ ID NO: 159317 - DNA, 22 bp, synthetic construct
  misc_feature 1..22: note = chemically synthesized
  source 1..22: mol_type = other DNA
tgtccaaataacttgaccttac

SEQ ID NO: 159318 - DNA, 22 bp, synthetic construct
  misc_feature 1..22: note = chemically synthesized
  source 1..22: mol_type = other DNA
tccaaataacttgaccttactg

SEQ ID NO: 159319 - DNA, 22 bp, synthetic construct
  misc_feature 1..22: note = chemically synthesized
  source 1..22: mol_type = other DNA
gaccttactgttttagcctagc

SEQ ID NO: 159320 - DNA, 22 bp, synthetic construct
  misc_feature 1..22: note = chemically synthesized
  source 1..22: mol_type = other DNA
accttactgttttagcctagcc

SEQ ID NO: 159321 - DNA, 22 bp, synthetic construct
  misc_feature 1..22: note = chemically synthesized
  source 1..22: mol_type = other DNA
actgttttagcctagccctcag

SEQ ID NO: 159322 - DNA, 22 bp, synthetic construct
  misc_feature 1..22: note = chemically synthesized
  source 1..22: mol_type = other DNA
ctgttttagcctagccctcagg

SEQ ID NO: 159323 - DNA, 22 bp, synthetic construct
  misc_feature 1..22: note = chemically synthesized
  source 1..22: mol_type = other DNA
ttttagcctagccctcaggtct

SEQ ID NO: 159324 - DNA, 22 bp, synthetic construct
  misc_feature 1..22: note = chemically synthesized
  source 1..22: mol_type = other DNA
tagcctagccctcaggtctgca

SEQ ID NO: 159325 - DNA, 22 bp, synthetic construct
  misc_feature 1..22: note = chemically synthesized
  source 1..22: mol_type = other DNA
agcctagccctcaggtctgcat

SEQ ID NO: 159326 - DNA, 22 bp, synthetic construct
  misc_feature 1..22: note = chemically synthesized
  source 1..22: mol_type = other DNA
gcctagccctcaggtctgcatg

SEQ ID NO: 159327 - DNA, 22 bp, synthetic construct
  misc_feature 1..22: note = chemically synthesized
  source 1..22: mol_type = other DNA
gccctcaggtctgcatgcagtg

SEQ ID NO: 159328 - DNA, 22 bp, synthetic construct
  misc_feature 1..22: note = chemically synthesized
  source 1..22: mol_type = other DNA
aggtctgcatgcagtggctgcc

SEQ ID NO: 159329 - DNA, 22 bp, synthetic construct
  misc_feature 1..22: note = chemically synthesized
  source 1..22: mol_type = other DNA
catgcagtggctgccgctgctt

SEQ ID NO: 159330 - DNA, 22 bp, synthetic construct
  misc_feature 1..22: note = chemically synthesized
  source 1..22: mol_type = other DNA
ccgctgctttaatacttttaga

SEQ ID NO: 159331 - DNA, 22 bp, synthetic construct
  misc_feature 1..22: note = chemically synthesized
  source 1..22: mol_type = other DNA
ctttaatacttttagaggccct

SEQ ID NO: 159332 - DNA, 22 bp, synthetic construct
  misc_feature 1..22: note = chemically synthesized
  source 1..22: mol_type = other DNA
taatacttttagaggccctaaa

SEQ ID NO: 159333 - DNA, 22 bp, synthetic construct
  misc_feature 1..22: note = chemically synthesized
  source 1..22: mol_type = other DNA
aatacttttagaggccctaaaa

SEQ ID NO: 159334 - DNA, 22 bp, synthetic construct
  misc_feature 1..22: note = chemically synthesized
  source 1..22: mol_type = other DNA
atacttttagaggccctaaaaa

SEQ ID NO: 159335 - DNA, 22 bp, synthetic construct
  misc_feature 1..22: note = chemically synthesized
  source 1..22: mol_type = other DNA
ttagaggccctaaaaatcacaa

SEQ ID NO: 159336 - DNA, 22 bp, synthetic construct
  misc_feature 1..22: note = chemically synthesized
  source 1..22: mol_type = other DNA
tagaggccctaaaaatcacaaa

SEQ ID NO: 159337 - DNA, 22 bp, synthetic construct
  misc_feature 1..22: note = chemically synthesized
  source 1..22: mol_type = other DNA
agaggccctaaaaatcacaaac

SEQ ID NO: 159338 - DNA, 22 bp, synthetic construct
  misc_feature 1..22: note = chemically synthesized
  source 1..22: mol_type = other DNA
gaggccctaaaaatcacaaact

SEQ ID NO: 159339 - DNA, 22 bp, synthetic construct
  misc_feature 1..22: note = chemically synthesized
  source 1..22: mol_type = other DNA
aaaatcacaaactatgcttagc

SEQ ID NO: 159340 - DNA, 22 bp, synthetic construct
  misc_feature 1..22: note = chemically synthesized
  source 1..22: mol_type = other DNA
tgcttagctcactcttcacatt

SEQ ID NO: 159341 - DNA, 22 bp, synthetic construct
  misc_feature 1..22: note = chemically synthesized
  source 1..22: mol_type = other DNA
agctcactcttcacatttctca

SEQ ID NO: 159342 - DNA, 22 bp, synthetic construct
  misc_feature 1..22: note = chemically synthesized
  source 1..22: mol_type = other DNA
gctcactcttcacatttctcat

SEQ ID NO: 159343 - DNA, 22 bp, synthetic construct
  misc_feature 1..22: note = chemically synthesized
  source 1..22: mol_type = other DNA
actcttcacatttctcataact

SEQ ID NO: 159344 - DNA, 22 bp, synthetic construct
  misc_feature 1..22: note = chemically synthesized
  source 1..22: mol_type = other DNA
ttcacatttctcataacttcta

SEQ ID NO: 159345 - DNA, 22 bp, synthetic construct
  misc_feature 1..22: note = chemically synthesized
  source 1..22: mol_type = other DNA
cacatttctcataacttctaaa

SEQ ID NO: 159346 - DNA, 22 bp, synthetic construct
  misc_feature 1..22: note = chemically synthesized
  source 1..22: mol_type = other DNA
acatttctcataacttctaaaa

SEQ ID NO: 159347 - DNA, 22 bp, synthetic construct
  misc_feature 1..22: note = chemically synthesized
  source 1..22: mol_type = other DNA
ctcataacttctaaaatctatt

SEQ ID NO: 159348 - DNA, 22 bp, synthetic construct
  misc_feature 1..22: note = chemically synthesized
  source 1..22: mol_type = other DNA
tcataacttctaaaatctattt

SEQ ID NO: 159349 - DNA, 22 bp, synthetic construct
  misc_feature 1..22: note = chemically synthesized
  source 1..22: mol_type = other DNA
ataacttctaaaatctattttc

SEQ ID NO: 159350 - DNA, 22 bp, synthetic construct
  misc_feature 1..22: note = chemically synthesized
  source 1..22: mol_type = other DNA
ctaaaatctattttcttcctca

SEQ ID NO: 159351 - DNA, 22 bp, synthetic construct
  misc_feature 1..22: note = chemically synthesized
  source 1..22: mol_type = other DNA
taaaatctattttcttcctcat

SEQ ID NO: 159352 - DNA, 22 bp, synthetic construct
  misc_feature 1..22: note = chemically synthesized
  source 1..22: mol_type = other DNA
aaatctattttcttcctcatac

SEQ ID NO: 159353 - DNA, 22 bp, synthetic construct
  misc_feature 1..22: note = chemically synthesized
  source 1..22: mol_type = other DNA
ttttcttcctcatacctgatgc

SEQ ID NO: 159354 - DNA, 22 bp, synthetic construct
  misc_feature 1..22: note = chemically synthesized
  source 1..22: mol_type = other DNA
tcttcctcatacctgatgcata

SEQ ID NO: 159355 - DNA, 22 bp, synthetic construct
  misc_feature 1..22: note = chemically synthesized
  source 1..22: mol_type = other DNA
cttcctcatacctgatgcatat

SEQ ID NO: 159356 - DNA, 22 bp, synthetic construct
  misc_feature 1..22: note = chemically synthesized
  source 1..22: mol_type = other DNA
ttcctcatacctgatgcatata

SEQ ID NO: 159357 - DNA, 22 bp, synthetic construct
  misc_feature 1..22: note = chemically synthesized
  source 1..22: mol_type = other DNA
cctcatacctgatgcatatact

SEQ ID NO: 159358 - DNA, 22 bp, synthetic construct
  misc_feature 1..22: note = chemically synthesized
  source 1..22: mol_type = other DNA
ctcatacctgatgcatatactt

SEQ ID NO: 159359 - DNA, 22 bp, synthetic construct
  misc_feature 1..22: note = chemically synthesized
  source 1..22: mol_type = other DNA
atacctgatgcatatactttct

SEQ ID NO: 159360 - DNA, 22 bp, synthetic construct
  misc_feature 1..22: note = chemically synthesized
  source 1..22: mol_type = other DNA
atgcatatactttctgatcccc

SEQ ID NO: 159361 - DNA, 22 bp, synthetic construct
  misc_feature 1..22: note = chemically synthesized
  source 1..22: mol_type = other DNA
tctgatccccggctccttcagc

SEQ ID NO: 159362 - DNA, 22 bp, synthetic construct
  misc_feature 1..22: note = chemically synthesized
  source 1..22: mol_type = other DNA
ctgatccccggctccttcagct

SEQ ID NO: 159363 - DNA, 22 bp, synthetic construct
  misc_feature 1..22: note = chemically synthesized
  source 1..22: mol_type = other DNA
tgatccccggctccttcagctg

SEQ ID NO: 159364 - DNA, 22 bp, synthetic construct
  misc_feature 1..22: note = chemically synthesized
  source 1..22: mol_type = other DNA
atccccggctccttcagctgta

SEQ ID NO: 159365 - DNA, 22 bp, synthetic construct
  misc_feature 1..22: note = chemically synthesized
  source 1..22: mol_type = other DNA
cttcagctgtactcactctttg

SEQ ID NO: 159366 - DNA, 22 bp, synthetic construct
  misc_feature 1..22: note = chemically synthesized
  source 1..22: mol_type = other DNA
cagctgtactcactctttgtta

SEQ ID NO: 159367 - DNA, 22 bp, synthetic construct
  misc_feature 1..22: note = chemically synthesized
  source 1..22: mol_type = other DNA
agctgtactcactctttgttaa

SEQ ID NO: 159368 - DNA, 22 bp, synthetic construct
  misc_feature 1..22: note = chemically synthesized
  source 1..22: mol_type = other DNA
tactcactctttgttaagtccc

SEQ ID NO: 159369 - DNA, 22 bp, synthetic construct
  misc_feature 1..22: note = chemically synthesized
  source 1..22: mol_type = other DNA
actctttgttaagtcccacaat

SEQ ID NO: 159370 - DNA, 22 bp, synthetic construct
  misc_feature 1..22: note = chemically synthesized
  source 1..22: mol_type = other DNA
tttgttaagtcccacaattacc

SEQ ID NO: 159371 - DNA, 22 bp, synthetic construct
  misc_feature 1..22: note = chemically synthesized
  source 1..22: mol_type = other DNA
tgttaagtcccacaattaccat

SEQ ID NO: 159372 - DNA, 22 bp, synthetic construct
  misc_feature 1..22: note = chemically synthesized
  source 1..22: mol_type = other DNA
gttaagtcccacaattaccatt

SEQ ID NO: 159373 - DNA, 22 bp, synthetic construct
  misc_feature 1..22: note = chemically synthesized
  source 1..22: mol_type = other DNA
ttaagtcccacaattaccattg

SEQ ID NO: 159374 - DNA, 22 bp, synthetic construct
  misc_feature 1..22: note = chemically synthesized
  source 1..22: mol_type = other DNA
agtcccacaattaccattggtc

SEQ ID NO: 159375 - DNA, 22 bp, synthetic construct
  misc_feature 1..22: note = chemically synthesized
  source 1..22: mol_type = other DNA
ccattggtcctggcccggactt

SEQ ID NO: 159376 - DNA, 22 bp, synthetic construct
  misc_feature 1..22: note = chemically synthesized
  source 1..22: mol_type = other DNA
gtcctggcccggacttcaatcc

SEQ ID NO: 159377 - DNA, 22 bp, synthetic construct
  misc_feature 1..22: note = chemically synthesized
  source 1..22: mol_type = other DNA
gcccggacttcaatccggcctc

SEQ ID NO: 159378 - DNA, 22 bp, synthetic construct
  misc_feature 1..22: note = chemically synthesized
  source 1..22: mol_type = other DNA
caatccggcctcccacattatt

SEQ ID NO: 159379 - DNA, 22 bp, synthetic construct
  misc_feature 1..22: note = chemically synthesized
  source 1..22: mol_type = other DNA
aatccggcctcccacattattc

SEQ ID NO: 159380 - DNA, 22 bp, synthetic construct
  misc_feature 1..22: note = chemically synthesized
  source 1..22: mol_type = other DNA
ccacattattcctgataccaca

SEQ ID NO: 159381 - DNA, 22 bp, synthetic construct
  misc_feature 1..22: note = chemically synthesized
  source 1..22: mol_type = other DNA
ttcctgataccacacctgaccc

SEQ ID NO: 159382 - DNA, 22 bp, synthetic construct
  misc_feature 1..22: note = chemically synthesized
  source 1..22: mol_type = other DNA
ctgataccacacctgaccccca

SEQ ID NO: 159383 - DNA, 22 bp, synthetic construct
  misc_feature 1..22: note = chemically synthesized
  source 1..22: mol_type = other DNA
ataccacacctgacccccatga

SEQ ID NO: 159384 - DNA, 22 bp, synthetic construct
  misc_feature 1..22: note = chemically synthesized
  source 1..22: mol_type = other DNA
acccccatgattgtatctctct

SEQ ID NO: 159385 - DNA, 22 bp, synthetic construct
  misc_feature 1..22: note = chemically synthesized
  source 1..22: mol_type = other DNA
tatctctctgatccacctgaca

SEQ ID NO: 159386 - DNA, 22 bp, synthetic construct
  misc_feature 1..22: note = chemically synthesized
  source 1..22: mol_type = other DNA
tctgatccacctgacattcacc

SEQ ID NO: 159387 - DNA, 22 bp, synthetic construct
  misc_feature 1..22: note = chemically synthesized
  source 1..22: mol_type = other DNA
tgatccacctgacattcacccc

SEQ ID NO: 159388 - DNA, 22 bp, synthetic construct
  misc_feature 1..22: note = chemically synthesized
  source 1..22: mol_type = other DNA
atccacctgacattcaccccat

SEQ ID NO: 159389 - DNA, 22 bp, synthetic construct
  misc_feature 1..22: note = chemically synthesized
  source 1..22: mol_type = other DNA
acattcaccccatttccccata

SEQ ID NO: 159390 - DNA, 22 bp, synthetic construct
  misc_feature 1..22: note = chemically synthesized
  source 1..22: mol_type = other DNA
accccatttccccatatttcct

SEQ ID NO: 159391 - DNA, 22 bp, synthetic construct
  misc_feature 1..22: note = chemically synthesized
  source 1..22: mol_type = other DNA
ccccatatttccttctttcctt

SEQ ID NO: 159392 - DNA, 22 bp, synthetic construct
  misc_feature 1..22: note = chemically synthesized
  source 1..22: mol_type = other DNA
cccatatttccttctttccttc

SEQ ID NO: 159393 - DNA, 22 bp, synthetic construct
  misc_feature 1..22: note = chemically synthesized
  source 1..22: mol_type = other DNA
ccttctttccttctttcctgtt

SEQ ID NO: 159394 - DNA, 22 bp, synthetic construct
  misc_feature 1..22: note = chemically synthesized
  source 1..22: mol_type = other DNA
cttctttccttctttcctgttc

SEQ ID NO: 159395 - DNA, 22 bp, synthetic construct
  misc_feature 1..22: note = chemically synthesized
  source 1..22: mol_type = other DNA
ctttccttctttcctgttcctc

SEQ ID NO: 159396 - DNA, 22 bp, synthetic construct
  misc_feature 1..22: note = chemically synthesized
  source 1..22: mol_type = other DNA
tttccttctttcctgttcctca

SEQ ID NO: 159397 - DNA, 22 bp, synthetic construct
  misc_feature 1..22: note = chemically synthesized
  source 1..22: mol_type = other DNA
tccttctttcctgttcctcacc

SEQ ID NO: 159398 - DNA, 22 bp, synthetic construct
  misc_feature 1..22: note = chemically synthesized
  source 1..22: mol_type = other DNA
ccttctttcctgttcctcaccc

SEQ ID NO: 159399 - DNA, 22 bp, synthetic construct
  misc_feature 1..22: note = chemically synthesized
  source 1..22: mol_type = other DNA
cttctttcctgttcctcaccct

SEQ ID NO: 159400 - DNA, 22 bp, synthetic construct
  misc_feature 1..22: note = chemically synthesized
  source 1..22: mol_type = other DNA
ctttcctgttcctcaccctgat

SEQ ID NO: 159401 - DNA, 22 bp, synthetic construct
  misc_feature 1..22: note = chemically synthesized
  source 1..22: mol_type = other DNA
tttcctgttcctcaccctgatc

SEQ ID NO: 159402 - DNA, 22 bp, synthetic construct
  misc_feature 1..22: note = chemically synthesized
  source 1..22: mol_type = other DNA
tcctgttcctcaccctgatcac

SEQ ID NO: 159403 - DNA, 22 bp, synthetic construct
  misc_feature 1..22: note = chemically synthesized
  source 1..22: mol_type = other DNA
cctgttcctcaccctgatcaca

SEQ ID NO: 159404 - DNA, 22 bp, synthetic construct
  misc_feature 1..22: note = chemically synthesized
  source 1..22: mol_type = other DNA
ctgttcctcaccctgatcacac

SEQ ID NO: 159405 - DNA, 22 bp, synthetic construct
  misc_feature 1..22: note = chemically synthesized
  source 1..22: mol_type = other DNA
ttcctcaccctgatcacacttg

SEQ ID NO: 159406 - DNA, 22 bp, synthetic construct
  misc_feature 1..22: note = chemically synthesized
  source 1..22: mol_type = other DNA
ctcaccctgatcacacttgatt

SEQ ID NO: 159407 - DNA, 22 bp, synthetic construct
  misc_feature 1..22: note = chemically synthesized
  source 1..22: mol_type = other DNA
accctgatcacacttgatttat

SEQ ID NO: 159408 - DNA, 22 bp, synthetic construct
  misc_feature 1..22: note = chemically synthesized
  source 1..22: mol_type = other DNA
atcacacttgatttattgatgg

SEQ ID NO: 159409 - DNA, 22 bp, synthetic construct
  misc_feature 1..22: note = chemically synthesized
  source 1..22: mol_type = other DNA
gatttattgatggccgttccac

SEQ ID NO: 159410 - DNA, 22 bp, synthetic construct
  misc_feature 1..22: note = chemically synthesized
  source 1..22: mol_type = other DNA
atttattgatggccgttccacc

SEQ ID NO: 159411 - DNA, 22 bp, synthetic construct
  misc_feature 1..22: note = chemically synthesized
  source 1..22: mol_type = other DNA
attgatggccgttccaccaggc

SEQ ID NO: 159412 - DNA, 22 bp, synthetic construct
  misc_feature 1..22: note = chemically synthesized
  source 1..22: mol_type = other DNA
ttgatggccgttccaccaggcc

SEQ ID NO: 159413 - DNA, 22 bp, synthetic construct
  misc_feature 1..22: note = chemically synthesized
  source 1..22: mol_type = other DNA
atggccgttccaccaggcctaa

SEQ ID NO: 159414 - DNA, 22 bp, synthetic construct
  misc_feature 1..22: note = chemically synthesized
  source 1..22: mol_type = other DNA
caccaggcctaatagccacaca

SEQ ID NO: 159415 - DNA, 22 bp, synthetic construct
  misc_feature 1..22: note = chemically synthesized
  source 1..22: mol_type = other DNA
atagccacacaccagcaaaggc

SEQ ID NO: 159416 - DNA, 22 bp, synthetic construct
  misc_feature 1..22: note = chemically synthesized
  source 1..22: mol_type = other DNA
tgctatagtacaaaccactagc

SEQ ID NO: 159417 - DNA, 22 bp, synthetic construct
  misc_feature 1..22: note = chemically synthesized
  source 1..22: mol_type = other DNA
tagtacaaaccactagcctgcc

SEQ ID NO: 159418 - DNA, 22 bp, synthetic construct
  misc_feature 1..22: note = chemically synthesized
  source 1..22: mol_type = other DNA
gcctgcctcttcgaacctctca

SEQ ID NO: 159419 - DNA, 22 bp, synthetic construct
  misc_feature 1..22: note = chemically synthesized
  source 1..22: mol_type = other DNA
cctcttcgaacctctcatttcc

SEQ ID NO: 159420 - DNA, 22 bp, synthetic construct
  misc_feature 1..22: note = chemically synthesized
  source 1..22: mol_type = other DNA
ttcgaacctctcatttcctttc

SEQ ID NO: 159421 - DNA, 22 bp, synthetic construct
  misc_feature 1..22: note = chemically synthesized
  source 1..22: mol_type = other DNA
cgaacctctcatttcctttcca

SEQ ID NO: 159422 - DNA, 22 bp, synthetic construct
  misc_feature 1..22: note = chemically synthesized
  source 1..22: mol_type = other DNA
gaacctctcatttcctttccat

SEQ ID NO: 159423 - DNA, 22 bp, synthetic construct
  misc_feature 1..22: note = chemically synthesized
  source 1..22: mol_type = other DNA
tcatttcctttccatcgtagaa

SEQ ID NO: 159424 - DNA, 22 bp, synthetic construct
  misc_feature 1..22: note = chemically synthesized
  source 1..22: mol_type = other DNA
atttcctttccatcgtagaaat

SEQ ID NO: 159425 - DNA, 22 bp, synthetic construct
  misc_feature 1..22: note = chemically synthesized
  source 1..22: mol_type = other DNA
cctttccatcgtagaaatctat

SEQ ID NO: 159426 - DNA, 22 bp, synthetic construct
  misc_feature 1..22: note = chemically synthesized
  source 1..22: mol_type = other DNA
ctttccatcgtagaaatctatc

SEQ ID NO: 159427 - DNA, 22 bp, synthetic construct
  misc_feature 1..22: note = chemically synthesized
  source 1..22: mol_type = other DNA
tccatcgtagaaatctatcctc

SEQ ID NO: 159428 - DNA, 22 bp, synthetic construct
  misc_feature 1..22: note = chemically synthesized
  source 1..22: mol_type = other DNA
ccatcgtagaaatctatcctca

SEQ ID NO: 159429 - DNA, 22 bp, synthetic construct
  misc_feature 1..22: note = chemically synthesized
  source 1..22: mol_type = other DNA
catcgtagaaatctatcctcaa

SEQ ID NO: 159430 - DNA, 22 bp, synthetic construct
  misc_feature 1..22: note = chemically synthesized
  source 1..22: mol_type = other DNA
tcctcaaagaaataacttctca

SEQ ID NO: 159431 - DNA, 22 bp, synthetic construct
  misc_feature 1..22: note = chemically synthesized
  source 1..22: mol_type = other DNA
aaagaaataacttctcagtgtt

SEQ ID NO: 159432 - DNA, 22 bp, synthetic construct
  misc_feature 1..22: note = chemically synthesized
  source 1..22: mol_type = other DNA
ctcagtgttccatctgctattc

SEQ ID NO: 159433 - DNA, 22 bp, synthetic construct
  misc_feature 1..22: note = chemically synthesized
  source 1..22: mol_type = other DNA
tcagtgttccatctgctattct

SEQ ID NO: 159434 - DNA, 22 bp, synthetic construct
  misc_feature 1..22: note = chemically synthesized
  source 1..22: mol_type = other DNA
agtgttccatctgctattctgc

SEQ ID NO: 159435 - DNA, 22 bp, synthetic construct
  misc_feature 1..22: note = chemically synthesized
  source 1..22: mol_type = other DNA
catctgctattctgctactcct

SEQ ID NO: 159436 - DNA, 22 bp, synthetic construct
  misc_feature 1..22: note = chemically synthesized
  source 1..22: mol_type = other DNA
ctattctgctactcctcaggga

SEQ ID NO: 159437 - DNA, 22 bp, synthetic construct
  misc_feature 1..22: note = chemically synthesized
  source 1..22: mol_type = other DNA
ttctgctactcctcagggatta

SEQ ID NO: 159438 - DNA, 22 bp, synthetic construct
  misc_feature 1..22: note = chemically synthesized
  source 1..22: mol_type = other DNA
tgctactcctcagggattattc

SEQ ID NO: 159439 - DNA, 22 bp, synthetic construct
  misc_feature 1..22: note = chemically synthesized
  source 1..22: mol_type = other DNA
ctactcctcagggattattcag

SEQ ID NO: 159440 - DNA, 22 bp, synthetic construct
  misc_feature 1..22: note = chemically synthesized
  source 1..22: mol_type = other DNA
ctcctcagggattattcaggcc

SEQ ID NO: 159441 - DNA, 22 bp, synthetic construct
  misc_feature 1..22: note = chemically synthesized
  source 1..22: mol_type = other DNA
ctcagggattattcaggccccc

SEQ ID NO: 159442 - DNA, 22 bp, synthetic construct
  misc_feature 1..22: note = chemically synthesized
  source 1..22: mol_type = other DNA
agggattattcaggccccctcc

SEQ ID NO: 159443 - DNA, 22 bp, synthetic construct
  misc_feature 1..22: note = chemically synthesized
  source 1..22: mol_type = other DNA
ttcaggccccctcccttcccta

SEQ ID NO: 159444 - DNA, 22 bp, synthetic construct
  misc_feature 1..22: note = chemically synthesized
  source 1..22: mol_type = other DNA
aggccccctcccttccctacac

SEQ ID NO: 159445 - DNA, 22 bp, synthetic construct
  misc_feature 1..22: note = chemically synthesized
  source 1..22: mol_type = other DNA
ccttccctacacatcaagctcg

SEQ ID NO: 159446 - DNA, 22 bp, synthetic construct
  misc_feature 1..22: note = chemically synthesized
  source 1..22: mol_type = other DNA
ccctacacatcaagctcgagga

SEQ ID NO: 159447 - DNA, 22 bp, synthetic construct
  misc_feature 1..22: note = chemically synthesized
  source 1..22: mol_type = other DNA
cctacacatcaagctcgaggat

SEQ ID NO: 159448 - DNA, 22 bp, synthetic construct
  misc_feature 1..22: note = chemically synthesized
  source 1..22: mol_type = other DNA
cacatcaagctcgaggatttgc

SEQ ID NO: 159449 - DNA, 22 bp, synthetic construct
  misc_feature 1..22: note = chemically synthesized
  source 1..22: mol_type = other DNA
gaggatttgcccccacccagga

SEQ ID NO: 159450 - DNA, 22 bp, synthetic construct
  misc_feature 1..22: note = chemically synthesized
  source 1..22: mol_type = other DNA
gcccccacccaggactggcaaa

SEQ ID NO: 159451 - DNA, 22 bp, synthetic construct
  misc_feature 1..22: note = chemically synthesized
  source 1..22: mol_type = other DNA
cccccacccaggactggcaaat

SEQ ID NO: 159452 - DNA, 22 bp, synthetic construct
  misc_feature 1..22: note = chemically synthesized
  source 1..22: mol_type = other DNA
gcaaattagatttactcaacat

SEQ ID NO: 159453 - DNA, 22 bp, synthetic construct
  misc_feature 1..22: note = chemically synthesized
  source 1..22: mol_type = other DNA
gatttactcaacatgccctgag

SEQ ID NO: 159454 - DNA, 22 bp, synthetic construct
  misc_feature 1..22: note = chemically synthesized
  source 1..22: mol_type = other DNA
actcaacatgccctgagtcaga

SEQ ID NO: 159455 - DNA, 22 bp, synthetic construct
  misc_feature 1..22: note = chemically synthesized
  source 1..22: mol_type = other DNA
ctcaacatgccctgagtcagat

SEQ ID NO: 159456 - DNA, 22 bp, synthetic construct
  misc_feature 1..22: note = chemically synthesized
  source 1..22: mol_type = other DNA
aacatgccctgagtcagataac

SEQ ID NO: 159457 - DNA, 22 bp, synthetic construct
  misc_feature 1..22: note = chemically synthesized
  source 1..22: mol_type = other DNA
agtcagataactaaaatacctc

SEQ ID NO: 159458 - DNA, 22 bp, synthetic construct
  misc_feature 1..22: note = chemically synthesized
  source 1..22: mol_type = other DNA
aaatacctcttagtctaggtag

SEQ ID NO: 159459 - DNA, 22 bp, synthetic construct
  misc_feature 1..22: note = chemically synthesized
  source 1..22: mol_type = other DNA
ttagtctaggtagacactttca

SEQ ID NO: 159460 - DNA, 22 bp, synthetic construct
  misc_feature 1..22: note = chemically synthesized
  source 1..22: mol_type = other DNA
agtctaggtagacactttcact

SEQ ID NO: 159461 - DNA, 22 bp, synthetic construct
  misc_feature 1..22: note = chemically synthesized
  source 1..22: mol_type = other DNA
gtctaggtagacactttcactg

SEQ ID NO: 159462 - DNA, 22 bp, synthetic construct
  misc_feature 1..22: note = chemically synthesized
  source 1..22: mol_type = other DNA
ggtagacactttcactggataa

SEQ ID NO: 159463 - DNA, 22 bp, synthetic construct
  misc_feature 1..22: note = chemically synthesized
  source 1..22: mol_type = other DNA
tcactggataagtagaggtctt

SEQ ID NO: 159464 - DNA, 22 bp, synthetic construct
  misc_feature 1..22: note = chemically synthesized
  source 1..22: mol_type = other DNA
cactggataagtagaggtcttt

SEQ ID NO: 159465 - DNA, 22 bp, synthetic construct
  misc_feature 1..22: note = chemically synthesized
  source 1..22: mol_type = other DNA
actggataagtagaggtctttc

SEQ ID NO: 159466 - DNA, 22 bp, synthetic construct
  misc_feature 1..22: note = chemically synthesized
  source 1..22: mol_type = other DNA
gataagtagaggtctttcctac

SEQ ID NO: 159467 - DNA, 22 bp, synthetic construct
  misc_feature 1..22: note = chemically synthesized
  source 1..22: mol_type = other DNA
tcctacagggtctgagaaggcc

SEQ ID NO: 159468 - DNA, 22 bp, synthetic construct
  misc_feature 1..22: note = chemically synthesized
  source 1..22: mol_type = other DNA
cctacagggtctgagaaggcca

SEQ ID NO: 159469 - DNA, 22 bp, synthetic construct
  misc_feature 1..22: note = chemically synthesized
  source 1..22: mol_type = other DNA
ctacagggtctgagaaggccac

SEQ ID NO: 159470 - DNA, 22 bp, synthetic construct
  misc_feature 1..22: note = chemically synthesized
  source 1..22: mol_type = other DNA
cagggtctgagaaggccaccgc

SEQ ID NO: 159471 - DNA, 22 bp, synthetic construct
  misc_feature 1..22: note = chemically synthesized
  source 1..22: mol_type = other DNA
agaaggccaccgcagtcatttc

SEQ ID NO: 159472 - DNA, 22 bp, synthetic construct
  misc_feature 1..22: note = chemically synthesized
  source 1..22: mol_type = other DNA
cttcccttctgtcagacataat

SEQ ID NO: 159473 - DNA, 22 bp, synthetic construct
  misc_feature 1..22: note = chemically synthesized
  source 1..22: mol_type = other DNA
ttcccttctgtcagacataatt

SEQ ID NO: 159474 - DNA, 22 bp, synthetic construct
  misc_feature 1..22: note = chemically synthesized
  source 1..22: mol_type = other DNA
cccttctgtcagacataattcc

SEQ ID NO: 159475 - DNA, 22 bp, synthetic construct
  misc_feature 1..22: note = chemically synthesized
  source 1..22: mol_type = other DNA
ccttctgtcagacataattcct

SEQ ID NO: 159476 - DNA, 22 bp, synthetic construct
  misc_feature 1..22: note = chemically synthesized
  source 1..22: mol_type = other DNA
ctgtcagacataattcctcagt

SEQ ID NO: 159477 - DNA, 22 bp, synthetic construct
  misc_feature 1..22: note = chemically synthesized
  source 1..22: mol_type = other DNA
tgtcagacataattcctcagtt

SEQ ID NO: 159478 - DNA, 22 bp, synthetic construct
  misc_feature 1..22: note = chemically synthesized
  source 1..22: mol_type = other DNA
tcagacataattcctcagttta

SEQ ID NO: 159479 - DNA, 22 bp, synthetic construct
  misc_feature 1..22: note = chemically synthesized
  source 1..22: mol_type = other DNA
ctcagtttagccttcctacctc

SEQ ID NO: 159480 - DNA, 22 bp, synthetic construct
  misc_feature 1..22: note = chemically synthesized
  source 1..22: mol_type = other DNA
agtttagccttcctacctctat

SEQ ID NO: 159481 - DNA, 22 bp, synthetic construct
  misc_feature 1..22: note = chemically synthesized
  source 1..22: mol_type = other DNA
agccttcctacctctatacagt

SEQ ID NO: 159482 - DNA, 22 bp, synthetic construct
  misc_feature 1..22: note = chemically synthesized
  source 1..22: mol_type = other DNA
gccttcctacctctatacagtc

SEQ ID NO: 159483 - DNA, 22 bp, synthetic construct
  misc_feature 1..22: note = chemically synthesized
  source 1..22: mol_type = other DNA
cctacctctatacagtctgata

SEQ ID NO: 159484 - DNA, 22 bp, synthetic construct
  misc_feature 1..22: note = chemically synthesized
  source 1..22: mol_type = other DNA
ctacctctatacagtctgataa

SEQ ID NO: 159485 - DNA, 22 bp, synthetic construct
  misc_feature 1..22: note = chemically synthesized
  source 1..22: mol_type = other DNA
cctctatacagtctgataacag

SEQ ID NO: 159486 - DNA, 22 bp, synthetic construct
  misc_feature 1..22: note = chemically synthesized
  source 1..22: mol_type = other DNA
tatacagtctgataacagacca

SEQ ID NO: 159487 - DNA, 22 bp, synthetic construct
  misc_feature 1..22: note = chemically synthesized
  source 1..22: mol_type = other DNA
tacagtctgataacagaccagc

SEQ ID NO: 159488 - DNA, 22 bp, synthetic construct
  misc_feature 1..22: note = chemically synthesized
  source 1..22: mol_type = other DNA
ataacagaccagcctttattag

SEQ ID NO: 159489 - DNA, 22 bp, synthetic construct
  misc_feature 1..22: note = chemically synthesized
  source 1..22: mol_type = other DNA
tattagtcaaatcagccaagca

SEQ ID NO: 159490 - DNA, 22 bp, synthetic construct
  misc_feature 1..22: note = chemically synthesized
  source 1..22: mol_type = other DNA
attagtcaaatcagccaagcag

SEQ ID NO: 159491 - DNA, 22 bp, synthetic construct
  misc_feature 1..22: note = chemically synthesized
  source 1..22: mol_type = other DNA
ttagtcaaatcagccaagcagt

SEQ ID NO: 159492 - DNA, 22 bp, synthetic construct
  misc_feature 1..22: note = chemically synthesized
  source 1..22: mol_type = other DNA
gtcaaatcagccaagcagtttt

SEQ ID NO: 159493 - DNA, 22 bp, synthetic construct
  misc_feature 1..22: note = chemically synthesized
  source 1..22: mol_type = other DNA
ttcaggctcttagtattcagta

SEQ ID NO: 159494 - DNA, 22 bp, synthetic construct
  misc_feature 1..22: note = chemically synthesized
  source 1..22: mol_type = other DNA
tcaggctcttagtattcagtaa

SEQ ID NO: 159495 - DNA, 22 bp, synthetic construct
  misc_feature 1..22: note = chemically synthesized
  source 1..22: mol_type = other DNA
caggctcttagtattcagtaaa

SEQ ID NO: 159496 - DNA, 22 bp, synthetic construct
  misc_feature 1..22: note = chemically synthesized
  source 1..22: mol_type = other DNA
aggctcttagtattcagtaaaa

SEQ ID NO: 159497 - DNA, 22 bp, synthetic construct
  misc_feature 1..22: note = chemically synthesized
  source 1..22: mol_type = other DNA
ttagtattcagtaaaaccttta

SEQ ID NO: 159498 - DNA, 22 bp, synthetic construct
  misc_feature 1..22: note = chemically synthesized
  source 1..22: mol_type = other DNA
agtattcagtaaaacctttata

SEQ ID NO: 159499 - DNA, 22 bp, synthetic construct
  misc_feature 1..22: note = chemically synthesized
  source 1..22: mol_type = other DNA
gtattcagtaaaacctttatat

SEQ ID NO: 159500 - DNA, 22 bp, synthetic construct
  misc_feature 1..22: note = chemically synthesized
  source 1..22: mol_type = other DNA
agtaaaacctttatatccctta

SEQ ID NO: 159501 - DNA, 22 bp, synthetic construct
  misc_feature 1..22: note = chemically synthesized
  source 1..22: mol_type = other DNA
tatatcccttacggtcctccgt

SEQ ID NO: 159502 - DNA, 22 bp, synthetic construct
  misc_feature 1..22: note = chemically synthesized
  source 1..22: mol_type = other DNA
atatcccttacggtcctccgtc

SEQ ID NO: 159503 - DNA, 22 bp, synthetic construct
  misc_feature 1..22: note = chemically synthesized
  source 1..22: mol_type = other DNA
tatcccttacggtcctccgtct

SEQ ID NO: 159504 - DNA, 22 bp, synthetic construct
  misc_feature 1..22: note = chemically synthesized
  source 1..22: mol_type = other DNA
acggtcctccgtcttcaggaaa

SEQ ID NO: 159505 - DNA, 22 bp, synthetic construct
  misc_feature 1..22: note = chemically synthesized
  source 1..22: mol_type = other DNA
cggtcctccgtcttcaggaaaa

SEQ ID NO: 159506 - DNA, 22 bp, synthetic construct
  misc_feature 1..22: note = chemically synthesized
  source 1..22: mol_type = other DNA
cgtcttcaggaaaagtagaacg

SEQ ID NO: 159507 - DNA, 22 bp, synthetic construct
  misc_feature 1..22: note = chemically synthesized
  source 1..22: mol_type = other DNA
caggaaaagtagaacggactaa

SEQ ID NO: 159508 - DNA, 22 bp, synthetic construct
  misc_feature 1..22: note = chemically synthesized
  source 1..22: mol_type = other DNA
aggaaaagtagaacggactaaa

SEQ ID NO: 159509 - DNA, 22 bp, synthetic construct
  misc_feature 1..22: note = chemically synthesized
  source 1..22: mol_type = other DNA
aatgtcttttaaaaacacacct

SEQ ID NO: 159510 - DNA, 22 bp, synthetic construct
  misc_feature 1..22: note = chemically synthesized
  source 1..22: mol_type = other DNA
ttaaaaacacacctcaccaagc

SEQ ID NO: 159511 - DNA, 22 bp, synthetic construct
  misc_feature 1..22: note = chemically synthesized
  source 1..22: mol_type = other DNA
taaaaacacacctcaccaagct

SEQ ID NO: 159512 - DNA, 22 bp, synthetic construct
  misc_feature 1..22: note = chemically synthesized
  source 1..22: mol_type = other DNA
aaaaacacacctcaccaagctc

SEQ ID NO: 159513 - DNA, 22 bp, synthetic construct
  misc_feature 1..22: note = chemically synthesized
  source 1..22: mol_type = other DNA
aaaacacacctcaccaagctca

SEQ ID NO: 159514 - DNA, 22 bp, synthetic construct
  misc_feature 1..22: note = chemically synthesized
  source 1..22: mol_type = other DNA
accaagctcagccaccaactta

SEQ ID NO: 159515 - DNA, 22 bp, synthetic construct
  misc_feature 1..22: note = chemically synthesized
  source 1..22: mol_type = other DNA
agccaccaacttaaaaaggact

SEQ ID NO: 159516 - DNA, 22 bp, synthetic construct
  misc_feature 1..22: note = chemically synthesized
  source 1..22: mol_type = other DNA
aaaaaggactggacaatacttt

SEQ ID NO: 159517 - DNA, 22 bp, synthetic construct
  misc_feature 1..22: note = chemically synthesized
  source 1..22: mol_type = other DNA
aaaaggactggacaatactttt

SEQ ID NO: 159518 - DNA, 22 bp, synthetic construct
  misc_feature 1..22: note = chemically synthesized
  source 1..22: mol_type = other DNA
gacaatacttttaccacttttc

SEQ ID NO: 159519 - DNA, 22 bp, synthetic construct
  misc_feature 1..22: note = chemically synthesized
  source 1..22: mol_type = other DNA
ttaccacttttctttctcagaa

SEQ ID NO: 159520 - DNA, 22 bp, synthetic construct
  misc_feature 1..22: note = chemically synthesized
  source 1..22: mol_type = other DNA
taccacttttctttctcagaag

SEQ ID NO: 159521 - DNA, 22 bp, synthetic construct
  misc_feature 1..22: note = chemically synthesized
  source 1..22: mol_type = other DNA
accacttttctttctcagaagt

SEQ ID NO: 159522 - DNA, 22 bp, synthetic construct
  misc_feature 1..22: note = chemically synthesized
  source 1..22: mol_type = other DNA
ccacttttctttctcagaagtc

SEQ ID NO: 159523 - DNA, 22 bp, synthetic construct
  misc_feature 1..22: note = chemically synthesized
  source 1..22: mol_type = other DNA
ttctttctcagaagtcagacct

SEQ ID NO: 159524 - DNA, 22 bp, synthetic construct
  misc_feature 1..22: note = chemically synthesized
  source 1..22: mol_type = other DNA
tctttctcagaagtcagacctg

SEQ ID NO: 159525 - DNA, 22 bp, synthetic construct
  misc_feature 1..22: note = chemically synthesized
  source 1..22: mol_type = other DNA
ctttctcagaagtcagacctgt

SEQ ID NO: 159526 - DNA, 22 bp, synthetic construct
  misc_feature 1..22: note = chemically synthesized
  source 1..22: mol_type = other DNA
tttctcagaagtcagacctgtc

SEQ ID NO: 159527 - DNA, 22 bp, synthetic construct
  misc_feature 1..22: note = chemically synthesized
  source 1..22: mol_type = other DNA
tctcagaagtcagacctgtcct

SEQ ID NO: 159528 - DNA, 22 bp, synthetic construct
  misc_feature 1..22: note = chemically synthesized
  source 1..22: mol_type = other DNA
ctcagaagtcagacctgtcctc

SEQ ID NO: 159529 - DNA, 22 bp, synthetic construct
  misc_feature 1..22: note = chemically synthesized
  source 1..22: mol_type = other DNA
tcagaagtcagacctgtcctca

SEQ ID NO: 159530 - DNA, 22 bp, synthetic construct
  misc_feature 1..22: note = chemically synthesized
  source 1..22: mol_type = other DNA
agaagtcagacctgtcctcaga

SEQ ID NO: 159531 - DNA, 22 bp, synthetic construct
  misc_feature 1..22: note = chemically synthesized
  source 1..22: mol_type = other DNA
tcctcagaatgctacagggtac

SEQ ID NO: 159532 - DNA, 22 bp, synthetic construct
  misc_feature 1..22: note = chemically synthesized
  source 1..22: mol_type = other DNA
agaatgctacagggtacagccc

SEQ ID NO: 159533 - DNA, 22 bp, synthetic construct
  misc_feature 1..22: note = chemically synthesized
  source 1..22: mol_type = other DNA
cagggtacagcccatttgagct

SEQ ID NO: 159534 - DNA, 22 bp, synthetic construct
  misc_feature 1..22: note = chemically synthesized
  source 1..22: mol_type = other DNA
gagctcctgtatagatttgcct

SEQ ID NO: 159535 - DNA, 22 bp, synthetic construct
  misc_feature 1..22: note = chemically synthesized
  source 1..22: mol_type = other DNA
agctcctgtatagatttgcctt

SEQ ID NO: 159536 - DNA, 22 bp, synthetic construct
  misc_feature 1..22: note = chemically synthesized
  source 1..22: mol_type = other DNA
ctgtatagatttgcctttttat

SEQ ID NO: 159537 - DNA, 22 bp, synthetic construct
  misc_feature 1..22: note = chemically synthesized
  source 1..22: mol_type = other DNA
tatagatttgcctttttattag

SEQ ID NO: 159538 - DNA, 22 bp, synthetic construct
  misc_feature 1..22: note = chemically synthesized
  source 1..22: mol_type = other DNA
gcctttttattaggccccagtc

SEQ ID NO: 159539 - DNA, 22 bp, synthetic construct
  misc_feature 1..22: note = chemically synthesized
  source 1..22: mol_type = other DNA
cctttttattaggccccagtct

SEQ ID NO: 159540 - DNA, 22 bp, synthetic construct
  misc_feature 1..22: note = chemically synthesized
  source 1..22: mol_type = other DNA
tttattaggccccagtctaatt

SEQ ID NO: 159541 - DNA, 22 bp, synthetic construct
  misc_feature 1..22: note = chemically synthesized
  source 1..22: mol_type = other DNA
ttattaggccccagtctaattc

SEQ ID NO: 159542 - DNA, 22 bp, synthetic construct
  misc_feature 1..22: note = chemically synthesized
  source 1..22: mol_type = other DNA
tattaggccccagtctaattcc

SEQ ID NO: 159543 - DNA, 22 bp, synthetic construct
  misc_feature 1..22: note = chemically synthesized
  source 1..22: mol_type = other DNA
attaggccccagtctaattcca

SEQ ID NO: 159544 - DNA, 22 bp, synthetic construct
  misc_feature 1..22: note = chemically synthesized
  source 1..22: mol_type = other DNA
ttaggccccagtctaattccag

SEQ ID NO: 159545 - DNA, 22 bp, synthetic construct
  misc_feature 1..22: note = chemically synthesized
  source 1..22: mol_type = other DNA
ggccccagtctaattccagaca

SEQ ID NO: 159546 - DNA, 22 bp, synthetic construct
  misc_feature 1..22: note = chemically synthesized
  source 1..22: mol_type = other DNA
attccagacaccagaccaactt

SEQ ID NO: 159547 - DNA, 22 bp, synthetic construct
  misc_feature 1..22: note = chemically synthesized
  source 1..22: mol_type = other DNA
cagacaccagaccaacttagaa

SEQ ID NO: 159548 - DNA, 22 bp, synthetic construct
  misc_feature 1..22: note = chemically synthesized
  source 1..22: mol_type = other DNA
agaatgtgccccaaaaaaactt

SEQ ID NO: 159549 - DNA, 22 bp, synthetic construct
  misc_feature 1..22: note = chemically synthesized
  source 1..22: mol_type = other DNA
gaatgtgccccaaaaaaacttg

SEQ ID NO: 159550 - DNA, 22 bp, synthetic construct
  misc_feature 1..22: note = chemically synthesized
  source 1..22: mol_type = other DNA
gtcatccctgctatcttctgtc

SEQ ID NO: 159551 - DNA, 22 bp, synthetic construct
  misc_feature 1..22: note = chemically synthesized
  source 1..22: mol_type = other DNA
tcatccctgctatcttctgtct

SEQ ID NO: 159552 - DNA, 22 bp, synthetic construct
  misc_feature 1..22: note = chemically synthesized
  source 1..22: mol_type = other DNA
ctatcttctgtctagtcatact

SEQ ID NO: 159553 - DNA, 22 bp, synthetic construct
  misc_feature 1..22: note = chemically synthesized
  source 1..22: mol_type = other DNA
tcttctgtctagtcatactcct

SEQ ID NO: 159554 - DNA, 22 bp, synthetic construct
  misc_feature 1..22: note = chemically synthesized
  source 1..22: mol_type = other DNA
ctgtctagtcatactcctattc

SEQ ID NO: 159555 - DNA, 22 bp, synthetic construct
  misc_feature 1..22: note = chemically synthesized
  source 1..22: mol_type = other DNA
tgtctagtcatactcctattca

SEQ ID NO: 159556 - DNA, 22 bp, synthetic construct
  misc_feature 1..22: note = chemically synthesized
  source 1..22: mol_type = other DNA
tctagtcatactcctattcacc

SEQ ID NO: 159557 - DNA, 22 bp, synthetic construct
  misc_feature 1..22: note = chemically synthesized
  source 1..22: mol_type = other DNA
gtcatactcctattcaccattc

SEQ ID NO: 159558 - DNA, 22 bp, synthetic construct
  misc_feature 1..22: note = chemically synthesized
  source 1..22: mol_type = other DNA
ctattcaccattctcaactact

SEQ ID NO: 159559 - DNA, 22 bp, synthetic construct
  misc_feature 1..22: note = chemically synthesized
  source 1..22: mol_type = other DNA
ttcaccattctcaactactcat

SEQ ID NO: 159560 - DNA, 22 bp, synthetic construct
  misc_feature 1..22: note = chemically synthesized
  source 1..22: mol_type = other DNA
accattctcaactactcataca

SEQ ID NO: 159561 - DNA, 22 bp, synthetic construct
  misc_feature 1..22: note = chemically synthesized
  source 1..22: mol_type = other DNA
tcaactactcatacatgccctg

SEQ ID NO: 159562 - DNA, 22 bp, synthetic construct
  misc_feature 1..22: note = chemically synthesized
  source 1..22: mol_type = other DNA
aactactcatacatgccctgct

SEQ ID NO: 159563 - DNA, 22 bp, synthetic construct
  misc_feature 1..22: note = chemically synthesized
  source 1..22: mol_type = other DNA
ctcatacatgccctgctcttgt

SEQ ID NO: 159564 - DNA, 22 bp, synthetic construct
  misc_feature 1..22: note = chemically synthesized
  source 1..22: mol_type = other DNA
atacatgccctgctcttgttta

SEQ ID NO: 159565 - DNA, 22 bp, synthetic construct
  misc_feature 1..22: note = chemically synthesized
  source 1..22: mol_type = other DNA
ctcttgtttacactgccggttt

SEQ ID NO: 159566 - DNA, 22 bp, synthetic construct
  misc_feature 1..22: note = chemically synthesized
  source 1..22: mol_type = other DNA
ttgtttacactgccggtttaca

SEQ ID NO: 159567 - DNA, 22 bp, synthetic construct
  misc_feature 1..22: note = chemically synthesized
  source 1..22: mol_type = other DNA
gtttacactgccggtttacact

SEQ ID NO: 159568 - DNA, 22 bp, synthetic construct
  misc_feature 1..22: note = chemically synthesized
  source 1..22: mol_type = other DNA
tttacactgccggtttacactg

SEQ ID NO: 159569 - DNA, 22 bp, synthetic construct
  misc_feature 1..22: note = chemically synthesized
  source 1..22: mol_type = other DNA
acactgccggtttacactgttt

SEQ ID NO: 159570 - DNA, 22 bp, synthetic construct
  misc_feature 1..22: note = chemically synthesized
  source 1..22: mol_type = other DNA
cactgccggtttacactgtttt

SEQ ID NO: 159571 - DNA, 22 bp, synthetic construct
  misc_feature 1..22: note = chemically synthesized
  source 1..22: mol_type = other DNA
ccggtttacactgtttttccaa

SEQ ID NO: 159572 - DNA, 22 bp, synthetic construct
  misc_feature 1..22: note = chemically synthesized
  source 1..22: mol_type = other DNA
acactgtttttccaagccatca

SEQ ID NO: 159573 - DNA, 22 bp, synthetic construct
  misc_feature 1..22: note = chemically synthesized
  source 1..22: mol_type = other DNA
cactgtttttccaagccatcac

SEQ ID NO: 159574 - DNA, 22 bp, synthetic construct
  misc_feature 1..22: note = chemically synthesized
  source 1..22: mol_type = other DNA
tttttccaagccatcacagctg

SEQ ID NO: 159575 - DNA, 22 bp, synthetic construct
  misc_feature 1..22: note = chemically synthesized
  source 1..22: mol_type = other DNA
ttccaagccatcacagctgata

SEQ ID NO: 159576 - DNA, 22 bp, synthetic construct
  misc_feature 1..22: note = chemically synthesized
  source 1..22: mol_type = other DNA
tccaagccatcacagctgatat

SEQ ID NO: 159577 - DNA, 22 bp, synthetic construct
  misc_feature 1..22: note = chemically synthesized
  source 1..22: mol_type = other DNA
ccaagccatcacagctgatatc

SEQ ID NO: 159578 - DNA, 22 bp, synthetic construct
  misc_feature 1..22: note = chemically synthesized
  source 1..22: mol_type = other DNA
caagccatcacagctgatatct

SEQ ID NO: 159579 - DNA, 22 bp, synthetic construct
  misc_feature 1..22: note = chemically synthesized
  source 1..22: mol_type = other DNA
atatctcctggtgctatcccca

SEQ ID NO: 159580 - DNA, 22 bp, synthetic construct
  misc_feature 1..22: note = chemically synthesized
  source 1..22: mol_type = other DNA
ctggtgctatccccaaactgcc

SEQ ID NO: 159581 - DNA, 22 bp, synthetic construct
  misc_feature 1..22: note = chemically synthesized
  source 1..22: mol_type = other DNA
gtgctatccccaaactgccact

SEQ ID NO: 159582 - DNA, 22 bp, synthetic construct
  misc_feature 1..22: note = chemically synthesized
  source 1..22: mol_type = other DNA
tccccaaactgccactcttaac

SEQ ID NO: 159583 - DNA, 22 bp, synthetic construct
  misc_feature 1..22: note = chemically synthesized
  source 1..22: mol_type = other DNA
ccactcttaactcttgaagtaa

SEQ ID NO: 159584 - DNA, 22 bp, synthetic construct
  misc_feature 1..22: note = chemically synthesized
  source 1..22: mol_type = other DNA
ttaactcttgaagtaaataaat

SEQ ID NO: 159585 - DNA, 22 bp, synthetic construct
  misc_feature 1..22: note = chemically synthesized
  source 1..22: mol_type = other DNA
aactcttgaagtaaataaataa

SEQ ID NO: 159586 - DNA, 22 bp, synthetic construct
  misc_feature 1..22: note = chemically synthesized
  source 1..22: mol_type = other DNA
actcttgaagtaaataaataat

SEQ ID NO: 159587 - DNA, 22 bp, synthetic construct
  misc_feature 1..22: note = chemically synthesized
  source 1..22: mol_type = other DNA
ttgaagtaaataaataatcttt

SEQ ID NO: 159588 - DNA, 22 bp, synthetic construct
  misc_feature 1..22: note = chemically synthesized
  source 1..22: mol_type = other DNA
gaagtaaataaataatctttgc

SEQ ID NO: 159589 - DNA, 22 bp, synthetic construct
  misc_feature 1..22: note = chemically synthesized
  source 1..22: mol_type = other DNA
aagtaaataaataatctttgct

SEQ ID NO: 159590 - DNA, 22 bp, synthetic construct
  misc_feature 1..22: note = chemically synthesized
  source 1..22: mol_type = other DNA
tgctggcaggactatgttgaat

SEQ ID NO: 159591 - DNA, 22 bp, synthetic construct
  misc_feature 1..22: note = chemically synthesized
  source 1..22: mol_type = other DNA
gctggcaggactatgttgaatc

SEQ ID NO: 159592 - DNA, 22 bp, synthetic construct
  misc_feature 1..22: note = chemically synthesized
  source 1..22: mol_type = other DNA
ctggcaggactatgttgaatct

SEQ ID NO: 159593 - DNA, 22 bp, synthetic construct
  misc_feature 1..22: note = chemically synthesized
  source 1..22: mol_type = other DNA
gcaggactatgttgaatctcct

SEQ ID NO: 159594 - DNA, 22 bp, synthetic construct
  misc_feature 1..22: note = chemically synthesized
  source 1..22: mol_type = other DNA
tgttgaatctccttaggcactc

SEQ ID NO: 159595 - DNA, 22 bp, synthetic construct
  misc_feature 1..22: note = chemically synthesized
  source 1..22: mol_type = other DNA
aatctccttaggcactctttaa

SEQ ID NO: 159596 - DNA, 22 bp, synthetic construct
  misc_feature 1..22: note = chemically synthesized
  source 1..22: mol_type = other DNA
cttaggcactctttaatcagat

SEQ ID NO: 159597 - DNA, 22 bp, synthetic construct
  misc_feature 1..22: note = chemically synthesized
  source 1..22: mol_type = other DNA
aggcactctttaatcagatgtc

SEQ ID NO: 159598 - DNA, 22 bp, synthetic construct
  misc_feature 1..22: note = chemically synthesized
  source 1..22: mol_type = other DNA
ggcactctttaatcagatgtcc

SEQ ID NO: 159599 - DNA, 22 bp, synthetic construct
  misc_feature 1..22: note = chemically synthesized
  source 1..22: mol_type = other DNA
tttaatcagatgtcctaggtcc

SEQ ID NO: 159600 - DNA, 22 bp, synthetic construct
  misc_feature 1..22: note = chemically synthesized
  source 1..22: mol_type = other DNA
taatcagatgtcctaggtcctc

SEQ ID NO: 159601 - DNA, 22 bp, synthetic construct
  misc_feature 1..22: note = chemically synthesized
  source 1..22: mol_type = other DNA
aatcagatgtcctaggtcctcc

SEQ ID NO: 159602 - DNA, 22 bp, synthetic construct
  misc_feature 1..22: note = chemically synthesized
  source 1..22: mol_type = other DNA
atcagatgtcctaggtcctccc

SEQ ID NO: 159603 - DNA, 22 bp, synthetic construct
  misc_feature 1..22: note = chemically synthesized
  source 1..22: mol_type = other DNA
ggtcctcccacttcttagtcct

SEQ ID NO: 159604 - DNA, 22 bp, synthetic construct
  misc_feature 1..22: note = chemically synthesized
  source 1..22: mol_type = other DNA
ccacttcttagtcctttaatac

SEQ ID NO: 159605 - DNA, 22 bp, synthetic construct
  misc_feature 1..22: note = chemically synthesized
  source 1..22: mol_type = other DNA
cttagtcctttaatacctgttt

SEQ ID NO: 159606 - DNA, 22 bp, synthetic construct
  misc_feature 1..22: note = chemically synthesized
  source 1..22: mol_type = other DNA
ttagtcctttaatacctgtttt

SEQ ID NO: 159607 - DNA, 22 bp, synthetic construct
  misc_feature 1..22: note = chemically synthesized
  source 1..22: mol_type = other DNA
agtcctttaatacctgtttttc

SEQ ID NO: 159608 - DNA, 22 bp, synthetic construct
  misc_feature 1..22: note = chemically synthesized
  source 1..22: mol_type = other DNA
gtcctttaatacctgtttttct

SEQ ID NO: 159609 - DNA, 22 bp, synthetic construct
  misc_feature 1..22: note = chemically synthesized
  source 1..22: mol_type = other DNA
taatacctgtttttctccttct

SEQ ID NO: 159610 - DNA, 22 bp, synthetic construct
  misc_feature 1..22: note = chemically synthesized
  source 1..22: mol_type = other DNA
aatacctgtttttctccttctc

SEQ ID NO: 159611 - DNA, 22 bp, synthetic construct
  misc_feature 1..22: note = chemically synthesized
  source 1..22: mol_type = other DNA
atacctgtttttctccttctct

SEQ ID NO: 159612 - DNA, 22 bp, synthetic construct
  misc_feature 1..22: note = chemically synthesized
  source 1..22: mol_type = other DNA
tttttctccttctcttattcca

SEQ ID NO: 159613 - DNA, 22 bp, synthetic construct
  misc_feature 1..22: note = chemically synthesized
  source 1..22: mol_type = other DNA
ttctccttctcttattccattt

SEQ ID NO: 159614 - DNA, 22 bp, synthetic construct
  misc_feature 1..22: note = chemically synthesized
  source 1..22: mol_type = other DNA
tctccttctcttattccatttg

SEQ ID NO: 159615 - DNA, 22 bp, synthetic construct
  misc_feature 1..22: note = chemically synthesized
  source 1..22: mol_type = other DNA
ctccttctcttattccatttgg

SEQ ID NO: 159616 - DNA, 22 bp, synthetic construct
  misc_feature 1..22: note = chemically synthesized
  source 1..22: mol_type = other DNA
tccttctcttattccatttggt

SEQ ID NO: 159617 - DNA, 22 bp, synthetic construct
  misc_feature 1..22: note = chemically synthesized
  source 1..22: mol_type = other DNA
cttctcttattccatttggttt

SEQ ID NO: 159618 - DNA, 22 bp, synthetic construct
  misc_feature 1..22: note = chemically synthesized
  source 1..22: mol_type = other DNA
ctcttattccatttggtttttc

SEQ ID NO: 159619 - DNA, 22 bp, synthetic construct
  misc_feature 1..22: note = chemically synthesized
  source 1..22: mol_type = other DNA
tcttattccatttggtttttca

SEQ ID NO: 159620 - DNA, 22 bp, synthetic construct
  misc_feature 1..22: note = chemically synthesized
  source 1..22: mol_type = other DNA
ttattccatttggtttttcaat

SEQ ID NO: 159621 - DNA, 22 bp, synthetic construct
  misc_feature 1..22: note = chemically synthesized
  source 1..22: mol_type = other DNA
attccatttggtttttcaatcc

SEQ ID NO: 159622 - DNA, 22 bp, synthetic construct
  misc_feature 1..22: note = chemically synthesized
  source 1..22: mol_type = other DNA
ttccatttggtttttcaatcca

SEQ ID NO: 159623 - DNA, 22 bp, synthetic construct
  misc_feature 1..22: note = chemically synthesized
  source 1..22: mol_type = other DNA
catttggtttttcaatccatac

SEQ ID NO: 159624 - DNA, 22 bp, synthetic construct
  misc_feature 1..22: note = chemically synthesized
  source 1..22: mol_type = other DNA
ggtttttcaatccatacaaaac

SEQ ID NO: 159625 - DNA, 22 bp, synthetic construct
  misc_feature 1..22: note = chemically synthesized
  source 1..22: mol_type = other DNA
gtttttcaatccatacaaaacc

SEQ ID NO: 159626 - DNA, 22 bp, synthetic construct
  misc_feature 1..22: note = chemically synthesized
  source 1..22: mol_type = other DNA
ttcaatccatacaaaaccgtat

SEQ ID NO: 159627 - DNA, 22 bp, synthetic construct
  misc_feature 1..22: note = chemically synthesized
  source 1..22: mol_type = other DNA
tcaatccatacaaaaccgtatc

SEQ ID NO: 159628 - DNA, 22 bp, synthetic construct
  misc_feature 1..22: note = chemically synthesized
  source 1..22: mol_type = other DNA
caatccatacaaaaccgtatcc

SEQ ID NO: 159629 - DNA, 22 bp, synthetic construct
  misc_feature 1..22: note = chemically synthesized
  source 1..22: mol_type = other DNA
aatccatacaaaaccgtatcca

SEQ ID NO: 159630 - DNA, 22 bp, synthetic construct
  misc_feature 1..22: note = chemically synthesized
  source 1..22: mol_type = other DNA
tacatgacaaatgtttcttcta

SEQ ID NO: 159631 - DNA, 22 bp, synthetic construct
  misc_feature 1..22: note = chemically synthesized
  source 1..22: mol_type = other DNA
catgacaaatgtttcttctaac

SEQ ID NO: 159632 - DNA, 22 bp, synthetic construct
  misc_feature 1..22: note = chemically synthesized
  source 1..22: mol_type = other DNA
cttctaacaaccccacaatatc

SEQ ID NO: 159633 - DNA, 22 bp, synthetic construct
  misc_feature 1..22: note = chemically synthesized
  source 1..22: mol_type = other DNA
ttctaacaaccccacaatatca

SEQ ID NO: 159634 - DNA, 22 bp, synthetic construct
  misc_feature 1..22: note = chemically synthesized
  source 1..22: mol_type = other DNA
ctaacaaccccacaatatcacc

SEQ ID NO: 159635 - DNA, 22 bp, synthetic construct
  misc_feature 1..22: note = chemically synthesized
  source 1..22: mol_type = other DNA
taacaaccccacaatatcaccc

SEQ ID NO: 159636 - DNA, 22 bp, synthetic construct
  misc_feature 1..22: note = chemically synthesized
  source 1..22: mol_type = other DNA
acaaccccacaatatcacccct

SEQ ID NO: 159637 - DNA, 22 bp, synthetic construct
  misc_feature 1..22: note = chemically synthesized
  source 1..22: mol_type = other DNA
accacaaaatcttccttcagct

SEQ ID NO: 159638 - DNA, 22 bp, synthetic construct
  misc_feature 1..22: note = chemically synthesized
  source 1..22: mol_type = other DNA
ccacaaaatcttccttcagctt

SEQ ID NO: 159639 - DNA, 22 bp, synthetic construct
  misc_feature 1..22: note = chemically synthesized
  source 1..22: mol_type = other DNA
ccttcagcttaatctctcccac

SEQ ID NO: 159640 - DNA, 22 bp, synthetic construct
  misc_feature 1..22: note = chemically synthesized
  source 1..22: mol_type = other DNA
cttcagcttaatctctcccact

SEQ ID NO: 159641 - DNA, 22 bp, synthetic construct
  misc_feature 1..22: note = chemically synthesized
  source 1..22: mol_type = other DNA
cagcttaatctctcccactcta

SEQ ID NO: 159642 - DNA, 22 bp, synthetic construct
  misc_feature 1..22: note = chemically synthesized
  source 1..22: mol_type = other DNA
agcttaatctctcccactctag

SEQ ID NO: 159643 - DNA, 22 bp, synthetic construct
  misc_feature 1..22: note = chemically synthesized
  source 1..22: mol_type = other DNA
aatctctcccactctaggttcc

SEQ ID NO: 159644 - DNA, 22 bp, synthetic construct
  misc_feature 1..22: note = chemically synthesized
  source 1..22: mol_type = other DNA
atctctcccactctaggttccc

SEQ ID NO: 159645 - DNA, 22 bp, synthetic construct
  misc_feature 1..22: note = chemically synthesized
  source 1..22: mol_type = other DNA
tcccactctaggttcccacgcc

SEQ ID NO: 159646 - DNA, 22 bp, synthetic construct
  misc_feature 1..22: note = chemically synthesized
  source 1..22: mol_type = other DNA
ccactctaggttcccacgccgc

SEQ ID NO: 159647 - DNA, 22 bp, synthetic construct
  misc_feature 1..22: note = chemically synthesized
  source 1..22: mol_type = other DNA
taggttcccacgccgcccctaa

SEQ ID NO: 159648 - DNA, 22 bp, synthetic construct
  misc_feature 1..22: note = chemically synthesized
  source 1..22: mol_type = other DNA
ggttcccacgccgcccctaatc

SEQ ID NO: 159649 - DNA, 22 bp, synthetic construct
  misc_feature 1..22: note = chemically synthesized
  source 1..22: mol_type = other DNA
ccacgccgcccctaatcccgct

SEQ ID NO: 159650 - DNA, 22 bp, synthetic construct
  misc_feature 1..22: note = chemically synthesized
  source 1..22: mol_type = other DNA
atcccgctcgaagcagccctga

SEQ ID NO: 159651 - DNA, 22 bp, synthetic construct
  misc_feature 1..22: note = chemically synthesized
  source 1..22: mol_type = other DNA
gaagcagccctgagaaatatcg

SEQ ID NO: 159652 - DNA, 22 bp, synthetic construct
  misc_feature 1..22: note = chemically synthesized
  source 1..22: mol_type = other DNA
agaaatatcgcccattatctct

SEQ ID NO: 159653 - DNA, 22 bp, synthetic construct
  misc_feature 1..22: note = chemically synthesized
  source 1..22: mol_type = other DNA
tctctccataccatcccccaaa

SEQ ID NO: 159654 - DNA, 22 bp, synthetic construct
  misc_feature 1..22: note = chemically synthesized
  source 1..22: mol_type = other DNA
tccataccatcccccaaaattt

SEQ ID NO: 159655 - DNA, 22 bp, synthetic construct
  misc_feature 1..22: note = chemically synthesized
  source 1..22: mol_type = other DNA
cataccatcccccaaaattttc

SEQ ID NO: 159656 - DNA, 22 bp, synthetic construct
  misc_feature 1..22: note = chemically synthesized
  source 1..22: mol_type = other DNA
tcgctgccccaacacttcaaca

SEQ ID NO: 159657 - DNA, 22 bp, synthetic construct
  misc_feature 1..22: note = chemically synthesized
  source 1..22: mol_type = other DNA
cgctgccccaacacttcaacac

SEQ ID NO: 159658 - DNA, 22 bp, synthetic construct
  misc_feature 1..22: note = chemically synthesized
  source 1..22: mol_type = other DNA
gctgccccaacacttcaacact

SEQ ID NO: 159659 - DNA, 22 bp, synthetic construct
  misc_feature 1..22: note = chemically synthesized
  source 1..22: mol_type = other DNA
ccccaacacttcaacactatta

SEQ ID NO: 159660 - DNA, 22 bp, synthetic construct
  misc_feature 1..22: note = chemically synthesized
  source 1..22: mol_type = other DNA
caacactattatgttttatttt

SEQ ID NO: 159661 - DNA, 22 bp, synthetic construct
  misc_feature 1..22: note = chemically synthesized
  source 1..22: mol_type = other DNA
aacactattatgttttattttt

SEQ ID NO: 159662 - DNA, 22 bp, synthetic construct
  misc_feature 1..22: note = chemically synthesized
  source 1..22: mol_type = other DNA
ttatgttttatttttcttatta

SEQ ID NO: 159663 - DNA, 22 bp, synthetic construct
  misc_feature 1..22: note = chemically synthesized
  source 1..22: mol_type = other DNA
tgttttatttttcttattaata

SEQ ID NO: 159664 - DNA, 22 bp, synthetic construct
  misc_feature 1..22: note = chemically synthesized
  source 1..22: mol_type = other DNA
tatttttcttattaatataaga

SEQ ID NO: 159665 - DNA, 22 bp, synthetic construct
  misc_feature 1..22: note = chemically synthesized
  source 1..22: mol_type = other DNA
atttttcttattaatataagaa

SEQ ID NO: 159666 - DNA, 22 bp, synthetic construct
  misc_feature 1..22: note = chemically synthesized
  source 1..22: mol_type = other DNA
tttttcttattaatataagaag

SEQ ID NO: 159667 - DNA, 22 bp, synthetic construct
  misc_feature 1..22: note = chemically synthesized
  source 1..22: mol_type = other DNA
ttcttattaatataagaagaca

SEQ ID NO: 159668 - DNA, 22 bp, synthetic construct
  misc_feature 1..22: note = chemically synthesized
  source 1..22: mol_type = other DNA
tcttattaatataagaagacag

SEQ ID NO: 159669 - DNA, 22 bp, synthetic construct
  misc_feature 1..22: note = chemically synthesized
  source 1..22: mol_type = other DNA
cttattaatataagaagacagg

SEQ ID NO: 159670 - DNA, 22 bp, synthetic construct
  misc_feature 1..22: note = chemically synthesized
  source 1..22: mol_type = other DNA
ttattaatataagaagacagga

SEQ ID NO: 159671 - DNA, 22 bp, synthetic construct
  misc_feature 1..22: note = chemically synthesized
  source 1..22: mol_type = other DNA
attaatataagaagacaggaat

SEQ ID NO: 159672 - DNA, 22 bp, synthetic construct
  misc_feature 1..22: note = chemically synthesized
  source 1..22: mol_type = other DNA
ttaatataagaagacaggaatg

SEQ ID NO: 159673 - DNA, 22 bp, synthetic construct
  misc_feature 1..22: note = chemically synthesized
  source 1..22: mol_type = other DNA
atataagaagacaggaatgtca

SEQ ID NO: 159674 - DNA, 22 bp, synthetic construct
  misc_feature 1..22: note = chemically synthesized
  source 1..22: mol_type = other DNA
tgagcccaagctaagccatcat

SEQ ID NO: 159675 - DNA, 22 bp, synthetic construct
  misc_feature 1..22: note = chemically synthesized
  source 1..22: mol_type = other DNA
agcccaagctaagccatcatgt

SEQ ID NO: 159676 - DNA, 22 bp, synthetic construct
  misc_feature 1..22: note = chemically synthesized
  source 1..22: mol_type = other DNA
agccatcatgtcccctgtgacc

SEQ ID NO: 159677 - DNA, 22 bp, synthetic construct
  misc_feature 1..22: note = chemically synthesized
  source 1..22: mol_type = other DNA
tgacctgcaggtacacatacag

SEQ ID NO: 159678 - DNA, 22 bp, synthetic construct
  misc_feature 1..22: note = chemically synthesized
  source 1..22: mol_type = other DNA
caggtacacatacagatggcca

SEQ ID NO: 159679 - DNA, 22 bp, synthetic construct
  misc_feature 1..22: note = chemically synthesized
  source 1..22: mol_type = other DNA
ctgccttaactgatgacattcc

SEQ ID NO: 159680 - DNA, 22 bp, synthetic construct
  misc_feature 1..22: note = chemically synthesized
  source 1..22: mol_type = other DNA
ccttaactgatgacattccacc

SEQ ID NO: 159681 - DNA, 22 bp, synthetic construct
  misc_feature 1..22: note = chemically synthesized
  source 1..22: mol_type = other DNA
aactgatgacattccaccacaa

SEQ ID NO: 159682 - DNA, 22 bp, synthetic construct
  misc_feature 1..22: note = chemically synthesized
  source 1..22: mol_type = other DNA
actgatgacattccaccacaaa

SEQ ID NO: 159683 - DNA, 22 bp, synthetic construct
  misc_feature 1..22: note = chemically synthesized
  source 1..22: mol_type = other DNA
atgacattccaccacaaaagaa

SEQ ID NO: 159684 - DNA, 22 bp, synthetic construct
  misc_feature 1..22: note = chemically synthesized
  source 1..22: mol_type = other DNA
caccacaaaagaagtgaaaatg

SEQ ID NO: 159685 - DNA, 22 bp, synthetic construct
  misc_feature 1..22: note = chemically synthesized
  source 1..22: mol_type = other DNA
ttcctgccttaactgatgacat

SEQ ID NO: 159686 - DNA, 22 bp, synthetic construct
  misc_feature 1..22: note = chemically synthesized
  source 1..22: mol_type = other DNA
ctgccttaactgatgacattgt

SEQ ID NO: 159687 - DNA, 22 bp, synthetic construct
  misc_feature 1..22: note = chemically synthesized
  source 1..22: mol_type = other DNA
ccttaactgatgacattgtctt

SEQ ID NO: 159688 - DNA, 22 bp, synthetic construct
  misc_feature 1..22: note = chemically synthesized
  source 1..22: mol_type = other DNA
aactgatgacattgtcttgtga

SEQ ID NO: 159689 - DNA, 22 bp, synthetic construct
  misc_feature 1..22: note = chemically synthesized
  source 1..22: mol_type = other DNA
actgatgacattgtcttgtgaa

SEQ ID NO: 159690 - DNA, 22 bp, synthetic construct
  misc_feature 1..22: note = chemically synthesized
  source 1..22: mol_type = other DNA
atgacattgtcttgtgaaagtc

SEQ ID NO: 159691 - DNA, 22 bp, synthetic construct
  misc_feature 1..22: note = chemically synthesized
  source 1..22: mol_type = other DNA
tcttgtgaaagtccttctcctg

SEQ ID NO: 159692 - DNA, 22 bp, synthetic construct
  misc_feature 1..22: note = chemically synthesized
  source 1..22: mol_type = other DNA
gtgaaagtccttctcctggctc

SEQ ID NO: 159693 - DNA, 22 bp, synthetic construct
  misc_feature 1..22: note = chemically synthesized
  source 1..22: mol_type = other DNA
tgaaagtccttctcctggctca

SEQ ID NO: 159694 - DNA, 22 bp, synthetic construct
  misc_feature 1..22: note = chemically synthesized
  source 1..22: mol_type = other DNA
ctcctggctcatcctggctcaa

SEQ ID NO: 159695 - DNA, 22 bp, synthetic construct
  misc_feature 1..22: note = chemically synthesized
  source 1..22: mol_type = other DNA
tcctggctcatcctggctcaaa

SEQ ID NO: 159696 - DNA, 22 bp, synthetic construct
  misc_feature 1..22: note = chemically synthesized
  source 1..22: mol_type = other DNA
ctggctcatcctggctcaaaag

SEQ ID NO: 159697 - DNA, 22 bp, synthetic construct
  misc_feature 1..22: note = chemically synthesized
  source 1..22: mol_type = other DNA
gctcatcctggctcaaaagctc

SEQ ID NO: 159698 - DNA, 22 bp, synthetic construct
  misc_feature 1..22: note = chemically synthesized
  source 1..22: mol_type = other DNA
atcctggctcaaaagctcccct

SEQ ID NO: 159699 - DNA, 22 bp, synthetic construct
  misc_feature 1..22: note = chemically synthesized
  source 1..22: mol_type = other DNA
gctcaaaagctcccctactgag

SEQ ID NO: 159700 - DNA, 22 bp, synthetic construct
  misc_feature 1..22: note = chemically synthesized
  source 1..22: mol_type = other DNA
aaaagctcccctactgagcacc

SEQ ID NO: 159701 - DNA, 22 bp, synthetic construct
  misc_feature 1..22: note = chemically synthesized
  source 1..22: mol_type = other DNA
ccctactgagcaccttgtgacc

SEQ ID NO: 159702 - DNA, 22 bp, synthetic construct
  misc_feature 1..22: note = chemically synthesized
  source 1..22: mol_type = other DNA
ctgagcaccttgtgacccccca

SEQ ID NO: 159703 - DNA, 22 bp, synthetic construct
  misc_feature 1..22: note = chemically synthesized
  source 1..22: mol_type = other DNA
agcaccttgtgaccccccactc

SEQ ID NO: 159704 - DNA, 22 bp, synthetic construct
  misc_feature 1..22: note = chemically synthesized
  source 1..22: mol_type = other DNA
gtgaccccccactcctgcccgc

SEQ ID NO: 159705 - DNA, 22 bp, synthetic construct
  misc_feature 1..22: note = chemically synthesized
  source 1..22: mol_type = other DNA
tgaccccccactcctgcccgcc

SEQ ID NO: 159706 - DNA, 22 bp, synthetic construct
  misc_feature 1..22: note = chemically synthesized
  source 1..22: mol_type = other DNA
ctgcccgccagagaacaacccc

SEQ ID NO: 159707 - DNA, 22 bp, synthetic construct
  misc_feature 1..22: note = chemically synthesized
  source 1..22: mol_type = other DNA
cccgccagagaacaacccccct

SEQ ID NO: 159708 - DNA, 22 bp, synthetic construct
  misc_feature 1..22: note = chemically synthesized
  source 1..22: mol_type = other DNA
tgactgtaattttcctttacct

SEQ ID NO: 159709 - DNA, 22 bp, synthetic construct
  misc_feature 1..22: note = chemically synthesized
  source 1..22: mol_type = other DNA
gactgtaattttcctttaccta

SEQ ID NO: 159710 - DNA, 22 bp, synthetic construct
  misc_feature 1..22: note = chemically synthesized
  source 1..22: mol_type = other DNA
actgtaattttcctttacctac

SEQ ID NO: 159711 - DNA, 22 bp, synthetic construct
  misc_feature 1..22: note = chemically synthesized
  source 1..22: mol_type = other DNA
taattttcctttacctacccaa

SEQ ID NO: 159712 - DNA, 22 bp, synthetic construct
  misc_feature 1..22: note = chemically synthesized
  source 1..22: mol_type = other DNA
tcctttacctacccaaatctta

SEQ ID NO: 159713 - DNA, 22 bp, synthetic construct
  misc_feature 1..22: note = chemically synthesized
  source 1..22: mol_type = other DNA
cctttacctacccaaatcttat

SEQ ID NO: 159714 - DNA, 22 bp, synthetic construct
  misc_feature 1..22: note = chemically synthesized
  source 1..22: mol_type = other DNA
ctttacctacccaaatcttata

SEQ ID NO: 159715 - DNA, 22 bp, synthetic construct
  misc_feature 1..22: note = chemically synthesized
  source 1..22: mol_type = other DNA
tacctacccaaatcttataaaa

SEQ ID NO: 159716 - DNA, 22 bp, synthetic construct
  misc_feature 1..22: note = chemically synthesized
  source 1..22: mol_type = other DNA
acctacccaaatcttataaaac

SEQ ID NO: 159717 - DNA, 22 bp, synthetic construct
  misc_feature 1..22: note = chemically synthesized
  source 1..22: mol_type = other DNA
cctacccaaatcttataaaaca

SEQ ID NO: 159718 - DNA, 22 bp, synthetic construct
  misc_feature 1..22: note = chemically synthesized
  source 1..22: mol_type = other DNA
cccaaatcttataaaacagccc

SEQ ID NO: 159719 - DNA, 22 bp, synthetic construct
  misc_feature 1..22: note = chemically synthesized
  source 1..22: mol_type = other DNA
ataaaacagccccactcctatc

SEQ ID NO: 159720 - DNA, 22 bp, synthetic construct
  misc_feature 1..22: note = chemically synthesized
  source 1..22: mol_type = other DNA
taaaacagccccactcctatct

SEQ ID NO: 159721 - DNA, 22 bp, synthetic construct
  misc_feature 1..22: note = chemically synthesized
  source 1..22: mol_type = other DNA
ctatctccctttgctgactctc

SEQ ID NO: 159722 - DNA, 22 bp, synthetic construct
  misc_feature 1..22: note = chemically synthesized
  source 1..22: mol_type = other DNA
tctccctttgctgactctcttt

SEQ ID NO: 159723 - DNA, 22 bp, synthetic construct
  misc_feature 1..22: note = chemically synthesized
  source 1..22: mol_type = other DNA
cctttgctgactctcttttcgg

SEQ ID NO: 159724 - DNA, 22 bp, synthetic construct
  misc_feature 1..22: note = chemically synthesized
  source 1..22: mol_type = other DNA
tgctgactctcttttcggactc

SEQ ID NO: 159725 - DNA, 22 bp, synthetic construct
  misc_feature 1..22: note = chemically synthesized
  source 1..22: mol_type = other DNA
gctgactctcttttcggactca

SEQ ID NO: 159726 - DNA, 22 bp, synthetic construct
  misc_feature 1..22: note = chemically synthesized
  source 1..22: mol_type = other DNA
ctgactctcttttcggactcag

SEQ ID NO: 159727 - DNA, 22 bp, synthetic construct
  misc_feature 1..22: note = chemically synthesized
  source 1..22: mol_type = other DNA
actctcttttcggactcagccc

SEQ ID NO: 159728 - DNA, 22 bp, synthetic construct
  misc_feature 1..22: note = chemically synthesized
  source 1..22: mol_type = other DNA
tcttttcggactcagcccgcct

SEQ ID NO: 159729 - DNA, 22 bp, synthetic construct
  misc_feature 1..22: note = chemically synthesized
  source 1..22: mol_type = other DNA
ttttcggactcagcccgcctgc

SEQ ID NO: 159730 - DNA, 22 bp, synthetic construct
  misc_feature 1..22: note = chemically synthesized
  source 1..22: mol_type = other DNA
ttcggactcagcccgcctgcac

SEQ ID NO: 159731 - DNA, 22 bp, synthetic construct
  misc_feature 1..22: note = chemically synthesized
  source 1..22: mol_type = other DNA
tcggactcagcccgcctgcacc

SEQ ID NO: 159732 - DNA, 22 bp, synthetic construct
  misc_feature 1..22: note = chemically synthesized
  source 1..22: mol_type = other DNA
cggactcagcccgcctgcaccc

SEQ ID NO: 159733 - DNA, 22 bp, synthetic construct
  misc_feature 1..22: note = chemically synthesized
  source 1..22: mol_type = other DNA
ggactcagcccgcctgcaccca

SEQ ID NO: 159734 - DNA, 22 bp, synthetic construct
  misc_feature 1..22: note = chemically synthesized
  source 1..22: mol_type = other DNA
agcccgcctgcacccaggtgat

SEQ ID NO: 159735 - DNA, 22 bp, synthetic construct
  misc_feature 1..22: note = chemically synthesized
  source 1..22: mol_type = other DNA
cacccaggtgataaaaagcttt

SEQ ID NO: 159736 - DNA, 22 bp, synthetic construct
  misc_feature 1..22: note = chemically synthesized
  source 1..22: mol_type = other DNA
tattgctcacacaaagcctgtt

SEQ ID NO: 159737 - DNA, 22 bp, synthetic construct
  misc_feature 1..22: note = chemically synthesized
  source 1..22: mol_type = other DNA
attgctcacacaaagcctgttt

SEQ ID NO: 159738 - DNA, 22 bp, synthetic construct
  misc_feature 1..22: note = chemically synthesized
  source 1..22: mol_type = other DNA
ttgctcacacaaagcctgtttg

SEQ ID NO: 159739 - DNA, 22 bp, synthetic construct
  misc_feature 1..22: note = chemically synthesized
  source 1..22: mol_type = other DNA
ctcacacaaagcctgtttggta

SEQ ID NO: 159740 - DNA, 22 bp, synthetic construct
  misc_feature 1..22: note = chemically synthesized
  source 1..22: mol_type = other DNA
acacaaagcctgtttggtagtc

SEQ ID NO: 159741 - DNA, 22 bp, synthetic construct
  misc_feature 1..22: note = chemically synthesized
  source 1..22: mol_type = other DNA
tttggtagtctcctcacaggga

SEQ ID NO: 159742 - DNA, 22 bp, synthetic construct
  misc_feature 1..22: note = chemically synthesized
  source 1..22: mol_type = other DNA
ggtagtctcctcacagggatgc

SEQ ID NO: 159743 - DNA, 22 bp, synthetic construct
  misc_feature 1..22: note = chemically synthesized
  source 1..22: mol_type = other DNA
gtagtctcctcacagggatgcg

SEQ ID NO: 159744 - DNA, 22 bp, synthetic construct
  misc_feature 1..22: note = chemically synthesized
  source 1..22: mol_type = other DNA
ctcacagggatgcgcatgaaac

SEQ ID NO: 159745 - DNA, 22 bp, synthetic construct
  misc_feature 1..22: note = chemically synthesized
  source 1..22: mol_type = other DNA
acagggatgcgcatgaaactga

SEQ ID NO: 159746 - DNA, 22 bp, synthetic construct
  misc_feature 1..22: note = chemically synthesized
  source 1..22: mol_type = other DNA
aataaccaatgagtcactaaag

SEQ ID NO: 159747 - DNA, 22 bp, synthetic construct
  misc_feature 1..22: note = chemically synthesized
  source 1..22: mol_type = other DNA
aagaaattaagaaggaaatttt

SEQ ID NO: 159748 - DNA, 22 bp, synthetic construct
  misc_feature 1..22: note = chemically synthesized
  source 1..22: mol_type = other DNA
agaaggaaattttaaaacttct

SEQ ID NO: 159749 - DNA, 22 bp, synthetic construct
  misc_feature 1..22: note = chemically synthesized
  source 1..22: mol_type = other DNA
taaaacttcttgaaacaagtga

SEQ ID NO: 159750 - DNA, 22 bp, synthetic construct
  misc_feature 1..22: note = chemically synthesized
  source 1..22: mol_type = other DNA
aaaacttcttgaaacaagtgaa

SEQ ID NO: 159751 - DNA, 22 bp, synthetic construct
  misc_feature 1..22: note = chemically synthesized
  source 1..22: mol_type = other DNA
aaacttcttgaaacaagtgaaa

SEQ ID NO: 159752 - DNA, 22 bp, synthetic construct
  misc_feature 1..22: note = chemically synthesized
  source 1..22: mol_type = other DNA
cttgaaacaagtgaaaatggaa

SEQ ID NO: 159753 - DNA, 22 bp, synthetic construct
  misc_feature 1..22: note = chemically synthesized
  source 1..22: mol_type = other DNA
ttgaaacaagtgaaaatggaaa

SEQ ID NO: 159754 - DNA, 22 bp, synthetic construct
  misc_feature 1..22: note = chemically synthesized
  source 1..22: mol_type = other DNA
gaaacaagtgaaaatggaaata

SEQ ID NO: 159755 - DNA, 22 bp, synthetic construct
  misc_feature 1..22: note = chemically synthesized
  source 1..22: mol_type = other DNA
aaacaagtgaaaatggaaatac

SEQ ID NO: 159756 - DNA, 22 bp, synthetic construct
  misc_feature 1..22: note = chemically synthesized
  source 1..22: mol_type = other DNA
caggatatggcaaaagcagtac

SEQ ID NO: 159757 - DNA, 22 bp, synthetic construct
  misc_feature 1..22: note = chemically synthesized
  source 1..22: mol_type = other DNA
agagggaagttcatagcaataa

SEQ ID NO: 159758 - DNA, 22 bp, synthetic construct
  misc_feature 1..22: note = chemically synthesized
  source 1..22: mol_type = other DNA
gagggaagttcatagcaataaa

SEQ ID NO: 159759 - DNA, 22 bp, synthetic construct
  misc_feature 1..22: note = chemically synthesized
  source 1..22: mol_type = other DNA
atagcaataaacacctatatcc

SEQ ID NO: 159760 - DNA, 22 bp, synthetic construct
  misc_feature 1..22: note = chemically synthesized
  source 1..22: mol_type = other DNA
tatccaaaaaagtagaaaggct

SEQ ID NO: 159761 - DNA, 22 bp, synthetic construct
  misc_feature 1..22: note = chemically synthesized
  source 1..22: mol_type = other DNA
caactaagcaaccaaacaatgt

SEQ ID NO: 159762 - DNA, 22 bp, synthetic construct
  misc_feature 1..22: note = chemically synthesized
  source 1..22: mol_type = other DNA
aactaagcaaccaaacaatgta

SEQ ID NO: 159763 - DNA, 22 bp, synthetic construct
  misc_feature 1..22: note = chemically synthesized
  source 1..22: mol_type = other DNA
agcaaccaaacaatgtacctca

SEQ ID NO: 159764 - DNA, 22 bp, synthetic construct
  misc_feature 1..22: note = chemically synthesized
  source 1..22: mol_type = other DNA
aaggaaataggaaagcaagaac

SEQ ID NO: 159765 - DNA, 22 bp, synthetic construct
  misc_feature 1..22: note = chemically synthesized
  source 1..22: mol_type = other DNA
atagaaggggagaaataagaaa

SEQ ID NO: 159766 - DNA, 22 bp, synthetic construct
  misc_feature 1..22: note = chemically synthesized
  source 1..22: mol_type = other DNA
agaccaaaaaatacagaaaatc

SEQ ID NO: 159767 - DNA, 22 bp, synthetic construct
  misc_feature 1..22: note = chemically synthesized
  source 1..22: mol_type = other DNA
aaaacaaacagttgctttcttg

SEQ ID NO: 159768 - DNA, 22 bp, synthetic construct
  misc_feature 1..22: note = chemically synthesized
  source 1..22: mol_type = other DNA
ctttcttggaaaggtaaacaaa

SEQ ID NO: 159769 - DNA, 22 bp, synthetic construct
  misc_feature 1..22: note = chemically synthesized
  source 1..22: mol_type = other DNA
tcttggaaaggtaaacaaaatc

SEQ ID NO: 159770 - DNA, 22 bp, synthetic construct
  misc_feature 1..22: note = chemically synthesized
  source 1..22: mol_type = other DNA
cttggaaaggtaaacaaaatca

SEQ ID NO: 159771 - DNA, 22 bp, synthetic construct
  misc_feature 1..22: note = chemically synthesized
  source 1..22: mol_type = other DNA
ttggaaaggtaaacaaaatcaa

SEQ ID NO: 159772 - DNA, 22 bp, synthetic construct
  misc_feature 1..22: note = chemically synthesized
  source 1..22: mol_type = other DNA
ggaaaggtaaacaaaatcaaca

SEQ ID NO: 159773 - DNA, 22 bp, synthetic construct
  misc_feature 1..22: note = chemically synthesized
  source 1..22: mol_type = other DNA
gaaaggtaaacaaaatcaacaa

SEQ ID NO: 159774 - DNA, 22 bp, synthetic construct
  misc_feature 1..22: note = chemically synthesized
  source 1..22: mol_type = other DNA
taagaaaaaagagtcaaataaa

SEQ ID NO: 159775 - DNA, 22 bp, synthetic construct
  misc_feature 1..22: note = chemically synthesized
  source 1..22: mol_type = other DNA
aagaaaaaagagtcaaataaaa

SEQ ID NO: 159776 - DNA, 22 bp, synthetic construct
  misc_feature 1..22: note = chemically synthesized
  source 1..22: mol_type = other DNA
agaaaaaagagtcaaataaaat

SEQ ID NO: 159777 - DNA, 22 bp, synthetic construct
  misc_feature 1..22: note = chemically synthesized
  source 1..22: mol_type = other DNA
gaaaatgaaaaagaggatataa

SEQ ID NO: 159778 - DNA, 22 bp, synthetic construct
  misc_feature 1..22: note = chemically synthesized
  source 1..22: mol_type = other DNA
agacctcagcaacacaaagact

SEQ ID NO: 159779 - DNA, 22 bp, synthetic construct
  misc_feature 1..22: note = chemically synthesized
  source 1..22: mol_type = other DNA
agcaacacaaagactcattaga

SEQ ID NO: 159780 - DNA, 22 bp, synthetic construct
  misc_feature 1..22: note = chemically synthesized
  source 1..22: mol_type = other DNA
attagatactattatgaacaac

SEQ ID NO: 159781 - DNA, 22 bp, synthetic construct
  misc_feature 1..22: note = chemically synthesized
  source 1..22: mol_type = other DNA
gatactattatgaacaactgta

SEQ ID NO: 159782 - DNA, 22 bp, synthetic construct
  misc_feature 1..22: note = chemically synthesized
  source 1..22: mol_type = other DNA
ttatgaacaactgtattccaac

SEQ ID NO: 159783 - DNA, 22 bp, synthetic construct
  misc_feature 1..22: note = chemically synthesized
  source 1..22: mol_type = other DNA
tgaacaactgtattccaacaaa

SEQ ID NO: 159784 - DNA, 22 bp, synthetic construct
  misc_feature 1..22: note = chemically synthesized
  source 1..22: mol_type = other DNA
tattccaacaaattggaaaatc

SEQ ID NO: 159785 - DNA, 22 bp, synthetic construct
  misc_feature 1..22: note = chemically synthesized
  source 1..22: mol_type = other DNA
caacaaattggaaaatctagaa

SEQ ID NO: 159786 - DNA, 22 bp, synthetic construct
  misc_feature 1..22: note = chemically synthesized
  source 1..22: mol_type = other DNA
gaaaatctagaataaatggata

SEQ ID NO: 159787 - DNA, 22 bp, synthetic construct
  misc_feature 1..22: note = chemically synthesized
  source 1..22: mol_type = other DNA
gaataaatggataaattcctgg

SEQ ID NO: 159788 - DNA, 22 bp, synthetic construct
  misc_feature 1..22: note = chemically synthesized
  source 1..22: mol_type = other DNA
ctggacacatacagcctagcaa

SEQ ID NO: 159789 - DNA, 22 bp, synthetic construct
  misc_feature 1..22: note = chemically synthesized
  source 1..22: mol_type = other DNA
gacacatacagcctagcaagac

SEQ ID NO: 159790 - DNA, 22 bp, synthetic construct
  misc_feature 1..22: note = chemically synthesized
  source 1..22: mol_type = other DNA
gcaagactgaagcatgtagaaa

SEQ ID NO: 159791 - DNA, 22 bp, synthetic construct
  misc_feature 1..22: note = chemically synthesized
  source 1..22: mol_type = other DNA
aagcatgtagaaacagaaaacc

SEQ ID NO: 159792 - DNA, 22 bp, synthetic construct
  misc_feature 1..22: note = chemically synthesized
  source 1..22: mol_type = other DNA
aatagaacaataatgaataaca

SEQ ID NO: 159793 - DNA, 22 bp, synthetic construct
  misc_feature 1..22: note = chemically synthesized
  source 1..22: mol_type = other DNA
aagttgtaatataaagtttcct

SEQ ID NO: 159794 - DNA, 22 bp, synthetic construct
  misc_feature 1..22: note = chemically synthesized
  source 1..22: mol_type = other DNA
taatataaagtttcctattaaa

SEQ ID NO: 159795 - DNA, 22 bp, synthetic construct
  misc_feature 1..22: note = chemically synthesized
  source 1..22: mol_type = other DNA
cctattaaagaaaagcccagga

SEQ ID NO: 159796 - DNA, 22 bp, synthetic construct
  misc_feature 1..22: note = chemically synthesized
  source 1..22: mol_type = other DNA
ctattaaagaaaagcccaggac

SEQ ID NO: 159797 - DNA, 22 bp, synthetic construct
  misc_feature 1..22: note = chemically synthesized
  source 1..22: mol_type = other DNA
ttaaagaaaagcccaggactcg

SEQ ID NO: 159798 - DNA, 22 bp, synthetic construct
  misc_feature 1..22: note = chemically synthesized
  source 1..22: mol_type = other DNA
aagaaaagcccaggactcgatg

SEQ ID NO: 159799 - DNA, 22 bp, synthetic construct
  misc_feature 1..22: note = chemically synthesized
  source 1..22: mol_type = other DNA
gatgggctaccaaacatttcaa

SEQ ID NO: 159800 - DNA, 22 bp, synthetic construct
  misc_feature 1..22: note = chemically synthesized
  source 1..22: mol_type = other DNA
ccaaacatttcaagtagaacta

SEQ ID NO: 159801 - DNA, 22 bp, synthetic construct
  misc_feature 1..22: note = chemically synthesized
  source 1..22: mol_type = other DNA
caagtagaactaatactaatcg

SEQ ID NO: 159802 - DNA, 22 bp, synthetic construct
  misc_feature 1..22: note = chemically synthesized
  source 1..22: mol_type = other DNA
aagtagaactaatactaatcgt

SEQ ID NO: 159803 - DNA, 22 bp, synthetic construct
  misc_feature 1..22: note = chemically synthesized
  source 1..22: mol_type = other DNA
atactaatcgtactcaaattcc

SEQ ID NO: 159804 - DNA, 22 bp, synthetic construct
  misc_feature 1..22: note = chemically synthesized
  source 1..22: mol_type = other DNA
atcgtactcaaattcctcaaac

SEQ ID NO: 159805 - DNA, 22 bp, synthetic construct
  misc_feature 1..22: note = chemically synthesized
  source 1..22: mol_type = other DNA
aaattcctcaaacaaacaaaca

SEQ ID NO: 159806 - DNA, 22 bp, synthetic construct
  misc_feature 1..22: note = chemically synthesized
  source 1..22: mol_type = other DNA
ctcaaacaaacaaacaaataaa

SEQ ID NO: 159807 - DNA, 22 bp, synthetic construct
  misc_feature 1..22: note = chemically synthesized
  source 1..22: mol_type = other DNA
aaacaaacaaacaaataaaaac

SEQ ID NO: 159808 - DNA, 22 bp, synthetic construct
  misc_feature 1..22: note = chemically synthesized
  source 1..22: mol_type = other DNA
aaaagaagggcctacttctaaa

SEQ ID NO: 159809 - DNA, 22 bp, synthetic construct
  misc_feature 1..22: note = chemically synthesized
  source 1..22: mol_type = other DNA
cttctaaacttattctatgagg

SEQ ID NO: 159810 - DNA, 22 bp, synthetic construct
  misc_feature 1..22: note = chemically synthesized
  source 1..22: mol_type = other DNA
ctaaacttattctatgaggcaa

SEQ ID NO: 159811 - DNA, 22 bp, synthetic construct
  misc_feature 1..22: note = chemically synthesized
  source 1..22: mol_type = other DNA
taaacttattctatgaggcaag

SEQ ID NO: 159812 - DNA, 22 bp, synthetic construct
  misc_feature 1..22: note = chemically synthesized
  source 1..22: mol_type = other DNA
aacttattctatgaggcaagca

SEQ ID NO: 159813 - DNA, 22 bp, synthetic construct
  misc_feature 1..22: note = chemically synthesized
  source 1..22: mol_type = other DNA
attctatgaggcaagcattact

SEQ ID NO: 159814 - DNA, 22 bp, synthetic construct
  misc_feature 1..22: note = chemically synthesized
  source 1..22: mol_type = other DNA
ttctatgaggcaagcattactc

SEQ ID NO: 159815 - DNA, 22 bp, synthetic construct
  misc_feature 1..22: note = chemically synthesized
  source 1..22: mol_type = other DNA
tatgaggcaagcattactctaa

SEQ ID NO: 159816 - DNA, 22 bp, synthetic construct
  misc_feature 1..22: note = chemically synthesized
  source 1..22: mol_type = other DNA
tgaggcaagcattactctaata

SEQ ID NO: 159817 - DNA, 22 bp, synthetic construct
  misc_feature 1..22: note = chemically synthesized
  source 1..22: mol_type = other DNA
ctctaatatacccaaaccagac

SEQ ID NO: 159818 - DNA, 22 bp, synthetic construct
  misc_feature 1..22: note = chemically synthesized
  source 1..22: mol_type = other DNA
taatatacccaaaccagaccag

SEQ ID NO: 159819 - DNA, 22 bp, synthetic construct
  misc_feature 1..22: note = chemically synthesized
  source 1..22: mol_type = other DNA
atatacccaaaccagaccagga

SEQ ID NO: 159820 - DNA, 22 bp, synthetic construct
  misc_feature 1..22: note = chemically synthesized
  source 1..22: mol_type = other DNA
aaaggaggtacagtaggaacat

SEQ ID NO: 159821 - DNA, 22 bp, synthetic construct
  misc_feature 1..22: note = chemically synthesized
  source 1..22: mol_type = other DNA
aaaataataaaaaccatatagg

SEQ ID NO: 159822 - DNA, 22 bp, synthetic construct
  misc_feature 1..22: note = chemically synthesized
  source 1..22: mol_type = other DNA
acattatgctgaacagagaaac

SEQ ID NO: 159823 - DNA, 22 bp, synthetic construct
  misc_feature 1..22: note = chemically synthesized
  source 1..22: mol_type = other DNA
tgctgaacagagaaacattgaa

SEQ ID NO: 159824 - DNA, 22 bp, synthetic construct
  misc_feature 1..22: note = chemically synthesized
  source 1..22: mol_type = other DNA
aacagagaaacattgaaggcct

SEQ ID NO: 159825 - DNA, 22 bp, synthetic construct
  misc_feature 1..22: note = chemically synthesized
  source 1..22: mol_type = other DNA
aaggcctttcctctaaggactg

SEQ ID NO: 159826 - DNA, 22 bp, synthetic construct
  misc_feature 1..22: note = chemically synthesized
  source 1..22: mol_type = other DNA
tcctctaaggactgaaataagg

SEQ ID NO: 159827 - DNA, 22 bp, synthetic construct
  misc_feature 1..22: note = chemically synthesized
  source 1..22: mol_type = other DNA
cctctaaggactgaaataaggc

SEQ ID NO: 159828 - DNA, 22 bp, synthetic construct
  misc_feature 1..22: note = chemically synthesized
  source 1..22: mol_type = other DNA
ctctaaggactgaaataaggca

SEQ ID NO: 159829 - DNA, 22 bp, synthetic construct
  misc_feature 1..22: note = chemically synthesized
  source 1..22: mol_type = other DNA
taaggactgaaataaggcaaga

SEQ ID NO: 159830 - DNA, 22 bp, synthetic construct
  misc_feature 1..22: note = chemically synthesized
  source 1..22: mol_type = other DNA
aggactgaaataaggcaagaat

SEQ ID NO: 159831 - DNA, 22 bp, synthetic construct
  misc_feature 1..22: note = chemically synthesized
  source 1..22: mol_type = other DNA
aaataaggcaagaatgctcact

SEQ ID NO: 159832 - DNA, 22 bp, synthetic construct
  misc_feature 1..22: note = chemically synthesized
  source 1..22: mol_type = other DNA
actttcattgccattatttaac

SEQ ID NO: 159833 - DNA, 22 bp, synthetic construct
  misc_feature 1..22: note = chemically synthesized
  source 1..22: mol_type = other DNA
tcattgccattatttaacataa

SEQ ID NO: 159834 - DNA, 22 bp, synthetic construct
  misc_feature 1..22: note = chemically synthesized
  source 1..22: mol_type = other DNA
cattgccattatttaacataat

SEQ ID NO: 159835 - DNA, 22 bp, synthetic construct
  misc_feature 1..22: note = chemically synthesized
  source 1..22: mol_type = other DNA
attgccattatttaacataata

SEQ ID NO: 159836 - DNA, 22 bp, synthetic construct
  misc_feature 1..22: note = chemically synthesized
  source 1..22: mol_type = other DNA
ccattatttaacataatattgg

SEQ ID NO: 159837 - DNA, 22 bp, synthetic construct
  misc_feature 1..22: note = chemically synthesized
  source 1..22: mol_type = other DNA
tttaacataatattggaagtct

SEQ ID NO: 159838 - DNA, 22 bp, synthetic construct
  misc_feature 1..22: note = chemically synthesized
  source 1..22: mol_type = other DNA
aacataatattggaagtcttgg

SEQ ID NO: 159839 - DNA, 22 bp, synthetic construct
  misc_feature 1..22: note = chemically synthesized
  source 1..22: mol_type = other DNA
acataatattggaagtcttgga

SEQ ID NO: 159840 - DNA, 22 bp, synthetic construct
  misc_feature 1..22: note = chemically synthesized
  source 1..22: mol_type = other DNA
gaagtcttggaaagagaaattc

SEQ ID NO: 159841 - DNA, 22 bp, synthetic construct
  misc_feature 1..22: note = chemically synthesized
  source 1..22: mol_type = other DNA
ggaaagagaaattcaggaagag

SEQ ID NO: 159842 - DNA, 22 bp, synthetic construct
  misc_feature 1..22: note = chemically synthesized
  source 1..22: mol_type = other DNA
gaaagagaaattcaggaagaga

SEQ ID NO: 159843 - DNA, 22 bp, synthetic construct
  misc_feature 1..22: note = chemically synthesized
  source 1..22: mol_type = other DNA
aggaagagaaagaaagtgcatc

SEQ ID NO: 159844 - DNA, 22 bp, synthetic construct
  misc_feature 1..22: note = chemically synthesized
  source 1..22: mol_type = other DNA
gaaaggaagaagttaaattagc

SEQ ID NO: 159845 - DNA, 22 bp, synthetic construct
  misc_feature 1..22: note = chemically synthesized
  source 1..22: mol_type = other DNA
aattagcctagtttgtagatga

SEQ ID NO: 159846 - DNA, 22 bp, synthetic construct
  misc_feature 1..22: note = chemically synthesized
  source 1..22: mol_type = other DNA
gcctagtttgtagatgacatga

SEQ ID NO: 159847 - DNA, 22 bp, synthetic construct
  misc_feature 1..22: note = chemically synthesized
  source 1..22: mol_type = other DNA
gtttgtagatgacatgatctta

SEQ ID NO: 159848 - DNA, 22 bp, synthetic construct
  misc_feature 1..22: note = chemically synthesized
  source 1..22: mol_type = other DNA
gtagatgacatgatcttatact

SEQ ID NO: 159849 - DNA, 22 bp, synthetic construct
  misc_feature 1..22: note = chemically synthesized
  source 1..22: mol_type = other DNA
tagatgacatgatcttatactt

SEQ ID NO: 159850 - DNA, 22 bp, synthetic construct
  misc_feature 1..22: note = chemically synthesized
  source 1..22: mol_type = other DNA
atacttagaaaaaacctaaaaa

SEQ ID NO: 159851 - DNA, 22 bp, synthetic construct
  misc_feature 1..22: note = chemically synthesized
  source 1..22: mol_type = other DNA
tacttagaaaaaacctaaaaac

SEQ ID NO: 159852 - DNA, 22 bp, synthetic construct
  misc_feature 1..22: note = chemically synthesized
  source 1..22: mol_type = other DNA
agaaaaaacctaaaaacttcac

SEQ ID NO: 159853 - DNA, 22 bp, synthetic construct
  misc_feature 1..22: note = chemically synthesized
  source 1..22: mol_type = other DNA
gaaaaaacctaaaaacttcact

SEQ ID NO: 159854 - DNA, 22 bp, synthetic construct
  misc_feature 1..22: note = chemically synthesized
  source 1..22: mol_type = other DNA
aaaacttcactaaatactatta

SEQ ID NO: 159855 - DNA, 22 bp, synthetic construct
  misc_feature 1..22: note = chemically synthesized
  source 1..22: mol_type = other DNA
cactaaatactattaaaacgat

SEQ ID NO: 159856 - DNA, 22 bp, synthetic construct
  misc_feature 1..22: note = chemically synthesized
  source 1..22: mol_type = other DNA
actaaatactattaaaacgatt

SEQ ID NO: 159857 - DNA, 22 bp, synthetic construct
  misc_feature 1..22: note = chemically synthesized
  source 1..22: mol_type = other DNA
aatactattaaaacgatttaaa

SEQ ID NO: 159858 - DNA, 22 bp, synthetic construct
  misc_feature 1..22: note = chemically synthesized
  source 1..22: mol_type = other DNA
ttaaaacgatttaaaaaaatca

SEQ ID NO: 159859 - DNA, 22 bp, synthetic construct
  misc_feature 1..22: note = chemically synthesized
  source 1..22: mol_type = other DNA
aaacgatttaaaaaaatcaata

SEQ ID NO: 159860 - DNA, 22 bp, synthetic construct
  misc_feature 1..22: note = chemically synthesized
  source 1..22: mol_type = other DNA
aaaaaaatcaataaagttacag

SEQ ID NO: 159861 - DNA, 22 bp, synthetic construct
  misc_feature 1..22: note = chemically synthesized
  source 1..22: mol_type = other DNA
aaaaaatcaataaagttacagg

SEQ ID NO: 159862 - DNA, 22 bp, synthetic construct
  misc_feature 1..22: note = chemically synthesized
  source 1..22: mol_type = other DNA
caggatatgaaataaaaataca

SEQ ID NO: 159863 - DNA, 22 bp, synthetic construct
  misc_feature 1..22: note = chemically synthesized
  source 1..22: mol_type = other DNA
catatataaaaagttatcaatc

SEQ ID NO: 159864 - DNA, 22 bp, synthetic construct
  misc_feature 1..22: note = chemically synthesized
  source 1..22: mol_type = other DNA
atatataaaaagttatcaatct

SEQ ID NO: 159865 - DNA, 22 bp, synthetic construct
  misc_feature 1..22: note = chemically synthesized
  source 1..22: mol_type = other DNA
tcaatctgcaaaaaaaatcaat

SEQ ID NO: 159866 - DNA, 22 bp, synthetic construct
  misc_feature 1..22: note = chemically synthesized
  source 1..22: mol_type = other DNA
caaaaaaaatcaataaaacaat

SEQ ID NO: 159867 - DNA, 22 bp, synthetic construct
  misc_feature 1..22: note = chemically synthesized
  source 1..22: mol_type = other DNA
atttacaatagcaataaaaata

SEQ ID NO: 159868 - DNA, 22 bp, synthetic construct
  misc_feature 1..22: note = chemically synthesized
  source 1..22: mol_type = other DNA
tttacaatagcaataaaaatat

SEQ ID NO: 159869 - DNA, 22 bp, synthetic construct
  misc_feature 1..22: note = chemically synthesized
  source 1..22: mol_type = other DNA
acaatagcaataaaaatataaa

SEQ ID NO: 159870 - DNA, 22 bp, synthetic construct
  misc_feature 1..22: note = chemically synthesized
  source 1..22: mol_type = other DNA
caatagcaataaaaatataaaa

SEQ ID NO: 159871 - DNA, 22 bp, synthetic construct
  misc_feature 1..22: note = chemically synthesized
  source 1..22: mol_type = other DNA
acccaagaagtaaaagatctct

SEQ ID NO: 159872 - DNA, 22 bp, synthetic construct
  misc_feature 1..22: note = chemically synthesized
  source 1..22: mol_type = other DNA
tataagaaaaattataaaactc

SEQ ID NO: 159873 - DNA, 22 bp, synthetic construct
  misc_feature 1..22: note = chemically synthesized
  source 1..22: mol_type = other DNA
taagaaaaattataaaactctg

SEQ ID NO: 159874 - DNA, 22 bp, synthetic construct
  misc_feature 1..22: note = chemically synthesized
  source 1..22: mol_type = other DNA
taaaactctggtgaaagaaata

SEQ ID NO: 159875 - DNA, 22 bp, synthetic construct
  misc_feature 1..22: note = chemically synthesized
  source 1..22: mol_type = other DNA
tggtgaaagaaatagaagaggg

SEQ ID NO: 159876 - DNA, 22 bp, synthetic construct
  misc_feature 1..22: note = chemically synthesized
  source 1..22: mol_type = other DNA
gtgaaagaaatagaagagggca

SEQ ID NO: 159877 - DNA, 22 bp, synthetic construct
  misc_feature 1..22: note = chemically synthesized
  source 1..22: mol_type = other DNA
catgctcatgaactagaagaat

SEQ ID NO: 159878 - DNA, 22 bp, synthetic construct
  misc_feature 1..22: note = chemically synthesized
  source 1..22: mol_type = other DNA
atgaactagaagaattaatatt

SEQ ID NO: 159879 - DNA, 22 bp, synthetic construct
  misc_feature 1..22: note = chemically synthesized
  source 1..22: mol_type = other DNA
gaagaattaatattaaaatgac

SEQ ID NO: 159880 - DNA, 22 bp, synthetic construct
  misc_feature 1..22: note = chemically synthesized
  source 1..22: mol_type = other DNA
atattaaaatgacaatactacc

SEQ ID NO: 159881 - DNA, 22 bp, synthetic construct
  misc_feature 1..22: note = chemically synthesized
  source 1..22: mol_type = other DNA
aaatgacaatactacccaaagc

SEQ ID NO: 159882 - DNA, 22 bp, synthetic construct
  misc_feature 1..22: note = chemically synthesized
  source 1..22: mol_type = other DNA
cccaaagcaatgtacagattca

SEQ ID NO: 159883 - DNA, 22 bp, synthetic construct
  misc_feature 1..22: note = chemically synthesized
  source 1..22: mol_type = other DNA
agtgcaatttctgtcaaaatac

SEQ ID NO: 159884 - DNA, 22 bp, synthetic construct
  misc_feature 1..22: note = chemically synthesized
  source 1..22: mol_type = other DNA
ctgtcaaaataccaatggcatt

SEQ ID NO: 159885 - DNA, 22 bp, synthetic construct
  misc_feature 1..22: note = chemically synthesized
  source 1..22: mol_type = other DNA
tgtcaaaataccaatggcattc

SEQ ID NO: 159886 - DNA, 22 bp, synthetic construct
  misc_feature 1..22: note = chemically synthesized
  source 1..22: mol_type = other DNA
tcaaaataccaatggcattcac

SEQ ID NO: 159887 - DNA, 22 bp, synthetic construct
  misc_feature 1..22: note = chemically synthesized
  source 1..22: mol_type = other DNA
acagaaatagaaaaacaatcct

SEQ ID NO: 159888 - DNA, 22 bp, synthetic construct
  misc_feature 1..22: note = chemically synthesized
  source 1..22: mol_type = other DNA
atatttatatggaaccacaaaa

SEQ ID NO: 159889 - DNA, 22 bp, synthetic construct
  misc_feature 1..22: note = chemically synthesized
  source 1..22: mol_type = other DNA
atatggaaccacaaaagatccc

SEQ ID NO: 159890 - DNA, 22 bp, synthetic construct
  misc_feature 1..22: note = chemically synthesized
  source 1..22: mol_type = other DNA
tatggaaccacaaaagatcccc

SEQ ID NO: 159891 - DNA, 22 bp, synthetic construct
  misc_feature 1..22: note = chemically synthesized
  source 1..22: mol_type = other DNA
aagcaatcctgagcaaaaagaa

SEQ ID NO: 159892 - DNA, 22 bp, synthetic construct
  misc_feature 1..22: note = chemically synthesized
  source 1..22: mol_type = other DNA
agcaaaaagaacaaaaccaaag

SEQ ID NO: 159893 - DNA, 22 bp, synthetic construct
  misc_feature 1..22: note = chemically synthesized
  source 1..22: mol_type = other DNA
tcacactatatgacttcaaaat

SEQ ID NO: 159894 - DNA, 22 bp, synthetic construct
  misc_feature 1..22: note = chemically synthesized
  source 1..22: mol_type = other DNA
tatgacttcaaaatctactaca

SEQ ID NO: 159895 - DNA, 22 bp, synthetic construct
  misc_feature 1..22: note = chemically synthesized
  source 1..22: mol_type = other DNA
caaaatctactacaaagctaca

SEQ ID NO: 159896 - DNA, 22 bp, synthetic construct
  misc_feature 1..22: note = chemically synthesized
  source 1..22: mol_type = other DNA
aaaatctactacaaagctacag

SEQ ID NO: 159897 - DNA, 22 bp, synthetic construct
  misc_feature 1..22: note = chemically synthesized
  source 1..22: mol_type = other DNA
ctacaaagctacagtagccaaa

SEQ ID NO: 159898 - DNA, 22 bp, synthetic construct
  misc_feature 1..22: note = chemically synthesized
  source 1..22: mol_type = other DNA
caaagctacagtagccaaacag

SEQ ID NO: 159899 - DNA, 22 bp, synthetic construct
  misc_feature 1..22: note = chemically synthesized
  source 1..22: mol_type = other DNA
cagtagccaaacagcacagtac

SEQ ID NO: 159900 - DNA, 22 bp, synthetic construct
  misc_feature 1..22: note = chemically synthesized
  source 1..22: mol_type = other DNA
cataaagacagacatacagccc

SEQ ID NO: 159901 - DNA, 22 bp, synthetic construct
  misc_feature 1..22: note = chemically synthesized
  source 1..22: mol_type = other DNA
aacaaccaagtcatctttaaca

SEQ ID NO: 159902 - DNA, 22 bp, synthetic construct
  misc_feature 1..22: note = chemically synthesized
  source 1..22: mol_type = other DNA
acaaccaagtcatctttaacaa

SEQ ID NO: 159903 - DNA, 22 bp, synthetic construct
  misc_feature 1..22: note = chemically synthesized
  source 1..22: mol_type = other DNA
taacaaaggcatcaagaacata

SEQ ID NO: 159904 - DNA, 22 bp, synthetic construct
  misc_feature 1..22: note = chemically synthesized
  source 1..22: mol_type = other DNA
aacaaaggcatcaagaacataa

SEQ ID NO: 159905 - DNA, 22 bp, synthetic construct
  misc_feature 1..22: note = chemically synthesized
  source 1..22: mol_type = other DNA
acaaaggcatcaagaacataaa

SEQ ID NO: 159906 - DNA, 22 bp, synthetic construct
  misc_feature 1..22: note = chemically synthesized
  source 1..22: mol_type = other DNA
acacctgtaatcccagcacttt

SEQ ID NO: 159907 - DNA, 22 bp, synthetic construct
  misc_feature 1..22: note = chemically synthesized
  source 1..22: mol_type = other DNA
taatcccagcactttgtgaggc

SEQ ID NO: 159908 - DNA, 22 bp, synthetic construct
  misc_feature 1..22: note = chemically synthesized
  source 1..22: mol_type = other DNA
tgtgaggctgaggtggggggat

SEQ ID NO: 159909 - DNA, 22 bp, synthetic construct
  misc_feature 1..22: note = chemically synthesized
  source 1..22: mol_type = other DNA
gtgaggctgaggtggggggatc

SEQ ID NO: 159910 - DNA, 22 bp, synthetic construct
  misc_feature 1..22: note = chemically synthesized
  source 1..22: mol_type = other DNA
tgaggctgaggtggggggatca

SEQ ID NO: 159911 - DNA, 22 bp, synthetic construct
  misc_feature 1..22: note = chemically synthesized
  source 1..22: mol_type = other DNA
aggtggggggatcacgaggtca

SEQ ID NO: 159912 - DNA, 22 bp, synthetic construct
  misc_feature 1..22: note = chemically synthesized
  source 1..22: mol_type = other DNA
aagaccagcctgaccaacgtgg

SEQ ID NO: 159913 - DNA, 22 bp, synthetic construct
  misc_feature 1..22: note = chemically synthesized
  source 1..22: mol_type = other DNA
accaacgtggtgacactccgtc

SEQ ID NO: 159914 - DNA, 22 bp, synthetic construct
  misc_feature 1..22: note = chemically synthesized
  source 1..22: mol_type = other DNA
cgtctctactaaaaatacaaaa

SEQ ID NO: 159915 - DNA, 22 bp, synthetic construct
  misc_feature 1..22: note = chemically synthesized
  source 1..22: mol_type = other DNA
tactaaaaatacaaaaattagc

SEQ ID NO: 159916 - DNA, 22 bp, synthetic construct
  misc_feature 1..22: note = chemically synthesized
  source 1..22: mol_type = other DNA
ctaaaaatacaaaaattagcca

SEQ ID NO: 159917 - DNA, 22 bp, synthetic construct
  misc_feature 1..22: note = chemically synthesized
  source 1..22: mol_type = other DNA
aaaatacaaaaattagccaggc

SEQ ID NO: 159918 - DNA, 22 bp, synthetic construct
  misc_feature 1..22: note = chemically synthesized
  source 1..22: mol_type = other DNA
gccaggcatggtggggcgctcc

SEQ ID NO: 159919 - DNA, 22 bp, synthetic construct
  misc_feature 1..22: note = chemically synthesized
  source 1..22: mol_type = other DNA
ctgtaatcccagatactcagga

SEQ ID NO: 159920 - DNA, 22 bp, synthetic construct
  misc_feature 1..22: note = chemically synthesized
  source 1..22: mol_type = other DNA
taatcccagatactcaggaggc

SEQ ID NO: 159921 - DNA, 22 bp, synthetic construct
  misc_feature 1..22: note = chemically synthesized
  source 1..22: mol_type = other DNA
aggaggctgaggcaggagaatc

SEQ ID NO: 159922 - DNA, 22 bp, synthetic construct
  misc_feature 1..22: note = chemically synthesized
  source 1..22: mol_type = other DNA
aggcaggagaatcgcttgaacc

SEQ ID NO: 159923 - DNA, 22 bp, synthetic construct
  misc_feature 1..22: note = chemically synthesized
  source 1..22: mol_type = other DNA
gaacctgggaggcagaagttgc

SEQ ID NO: 159924 - DNA, 22 bp, synthetic construct
  misc_feature 1..22: note = chemically synthesized
  source 1..22: mol_type = other DNA
aacctgggaggcagaagttgca

SEQ ID NO: 159925 - DNA, 22 bp, synthetic construct
  misc_feature 1..22: note = chemically synthesized
  source 1..22: mol_type = other DNA
ggaggcagaagttgcagtgatc

SEQ ID NO: 159926 - DNA, 22 bp, synthetic construct
  misc_feature 1..22: note = chemically synthesized
  source 1..22: mol_type = other DNA
cagtgatccaagattgtgctgc

SEQ ID NO: 159927 - DNA, 22 bp, synthetic construct
  misc_feature 1..22: note = chemically synthesized
  source 1..22: mol_type = other DNA
tgctgccactgcactccagcct

SEQ ID NO: 159928 - DNA, 22 bp, synthetic construct
  misc_feature 1..22: note = chemically synthesized
  source 1..22: mol_type = other DNA
ccactgcactccagcctgggca

SEQ ID NO: 159929 - DNA, 22 bp, synthetic construct
  misc_feature 1..22: note = chemically synthesized
  source 1..22: mol_type = other DNA
cactccagcctgggcaacagtg

SEQ ID NO: 159930 - DNA, 22 bp, synthetic construct
  misc_feature 1..22: note = chemically synthesized
  source 1..22: mol_type = other DNA
cagcctgggcaacagtgagact

SEQ ID NO: 159931 - DNA, 22 bp, synthetic construct
  misc_feature 1..22: note = chemically synthesized
  source 1..22: mol_type = other DNA
ggcaacagtgagactccatctc

SEQ ID NO: 159932 - DNA, 22 bp, synthetic construct
  misc_feature 1..22: note = chemically synthesized
  source 1..22: mol_type = other DNA
catctcaaaaaaaaaaaaaaaa

SEQ ID NO: 159933 - DNA, 22 bp, synthetic construct
  misc_feature 1..22: note = chemically synthesized
  source 1..22: mol_type = other DNA
aaaaaaaaaaaaaaaaaaggta

SEQ ID NO: 159934 - DNA, 22 bp, synthetic construct
  misc_feature 1..22: note = chemically synthesized
  source 1..22: mol_type = other DNA
ttcaagaaacagtgctaggaaa

SEQ ID NO: 159935 - DNA, 22 bp, synthetic construct
  misc_feature 1..22: note = chemically synthesized
  source 1..22: mol_type = other DNA
tcaagaaacagtgctaggaaaa

SEQ ID NO: 159936 - DNA, 22 bp, synthetic construct
  misc_feature 1..22: note = chemically synthesized
  source 1..22: mol_type = other DNA
caagaaacagtgctaggaaaac

SEQ ID NO: 159937 - DNA, 22 bp, synthetic construct
  misc_feature 1..22: note = chemically synthesized
  source 1..22: mol_type = other DNA
aagaaacagtgctaggaaaact

SEQ ID NO: 159938 - DNA, 22 bp, synthetic construct
  misc_feature 1..22: note = chemically synthesized
  source 1..22: mol_type = other DNA
ggaaaactggatatccatttgc

SEQ ID NO: 159939 - DNA, 22 bp, synthetic construct
  misc_feature 1..22: note = chemically synthesized
  source 1..22: mol_type = other DNA
gatatccatttgcaaaagagta

SEQ ID NO: 159940 - DNA, 22 bp, synthetic construct
  misc_feature 1..22: note = chemically synthesized
  source 1..22: mol_type = other DNA
gcaaaagagtaaaatcggaccc

SEQ ID NO: 159941 - DNA, 22 bp, synthetic construct
  misc_feature 1..22: note = chemically synthesized
  source 1..22: mol_type = other DNA
caaaagagtaaaatcggacccc

SEQ ID NO: 159942 - DNA, 22 bp, synthetic construct
  misc_feature 1..22: note = chemically synthesized
  source 1..22: mol_type = other DNA
tctctcactatatacaaaaatc

SEQ ID NO: 159943 - DNA, 22 bp, synthetic construct
  misc_feature 1..22: note = chemically synthesized
  source 1..22: mol_type = other DNA
tcactatatacaaaaatcaaat

SEQ ID NO: 159944 - DNA, 22 bp, synthetic construct
  misc_feature 1..22: note = chemically synthesized
  source 1..22: mol_type = other DNA
actatatacaaaaatcaaatca

SEQ ID NO: 159945 - DNA, 22 bp, synthetic construct
  misc_feature 1..22: note = chemically synthesized
  source 1..22: mol_type = other DNA
tatacaaaaatcaaatcaagat

SEQ ID NO: 159946 - DNA, 22 bp, synthetic construct
  misc_feature 1..22: note = chemically synthesized
  source 1..22: mol_type = other DNA
aagacttgaatccaatacctga

SEQ ID NO: 159947 - DNA, 22 bp, synthetic construct
  misc_feature 1..22: note = chemically synthesized
  source 1..22: mol_type = other DNA
gaatccaatacctgaaattatg

SEQ ID NO: 159948 - DNA, 22 bp, synthetic construct
  misc_feature 1..22: note = chemically synthesized
  source 1..22: mol_type = other DNA
aatccaatacctgaaattatga

SEQ ID NO: 159949 - DNA, 22 bp, synthetic construct
  misc_feature 1..22: note = chemically synthesized
  source 1..22: mol_type = other DNA
aaattatgaaactactggaaga

SEQ ID NO: 159950 - DNA, 22 bp, synthetic construct
  misc_feature 1..22: note = chemically synthesized
  source 1..22: mol_type = other DNA
tgaaactactggaagaaaacag

SEQ ID NO: 159951 - DNA, 22 bp, synthetic construct
  misc_feature 1..22: note = chemically synthesized
  source 1..22: mol_type = other DNA
ctggaagaaaacagtggggaaa

SEQ ID NO: 159952 - DNA, 22 bp, synthetic construct
  misc_feature 1..22: note = chemically synthesized
  source 1..22: mol_type = other DNA
gaagaaaacagtggggaaaccc

SEQ ID NO: 159953 - DNA, 22 bp, synthetic construct
  misc_feature 1..22: note = chemically synthesized
  source 1..22: mol_type = other DNA
cagggcattcattgatttgggc

SEQ ID NO: 159954 - DNA, 22 bp, synthetic construct
  misc_feature 1..22: note = chemically synthesized
  source 1..22: mol_type = other DNA
attgatttgggcaaatactgtc

SEQ ID NO: 159955 - DNA, 22 bp, synthetic construct
  misc_feature 1..22: note = chemically synthesized
  source 1..22: mol_type = other DNA
atttgggcaaatactgtctatg

SEQ ID NO: 159956 - DNA, 22 bp, synthetic construct
  misc_feature 1..22: note = chemically synthesized
  source 1..22: mol_type = other DNA
gggcaaatactgtctatgagac

SEQ ID NO: 159957 - DNA, 22 bp, synthetic construct
  misc_feature 1..22: note = chemically synthesized
  source 1..22: mol_type = other DNA
ggcaaatactgtctatgagact

SEQ ID NO: 159958 - DNA, 22 bp, synthetic construct
  misc_feature 1..22: note = chemically synthesized
  source 1..22: mol_type = other DNA
tctatgagacttcaaaagcaca

SEQ ID NO: 159959 - DNA, 22 bp, synthetic construct
  misc_feature 1..22: note = chemically synthesized
  source 1..22: mol_type = other DNA
tgagacttcaaaagcacaaata

SEQ ID NO: 159960 - DNA, 22 bp, synthetic construct
  misc_feature 1..22: note = chemically synthesized
  source 1..22: mol_type = other DNA
caaaagcacaaataaccaaaac

SEQ ID NO: 159961 - DNA, 22 bp, synthetic construct
  misc_feature 1..22: note = chemically synthesized
  source 1..22: mol_type = other DNA
aaaagcacaaataaccaaaaca

SEQ ID NO: 159962 - DNA, 22 bp, synthetic construct
  misc_feature 1..22: note = chemically synthesized
  source 1..22: mol_type = other DNA
ggattgtttgaagctctgcaca

SEQ ID NO: 159963 - DNA, 22 bp, synthetic construct
  misc_feature 1..22: note = chemically synthesized
  source 1..22: mol_type = other DNA
tttgaagctctgcacagcaaag

SEQ ID NO: 159964 - DNA, 22 bp, synthetic construct
  misc_feature 1..22: note = chemically synthesized
  source 1..22: mol_type = other DNA
gaagctctgcacagcaaagaaa

SEQ ID NO: 159965 - DNA, 22 bp, synthetic construct
  misc_feature 1..22: note = chemically synthesized
  source 1..22: mol_type = other DNA
aagctctgcacagcaaagaaaa

SEQ ID NO: 159966 - DNA, 22 bp, synthetic construct
  misc_feature 1..22: note = chemically synthesized
  source 1..22: mol_type = other DNA
tgcacagcaaagaaaataataa

SEQ ID NO: 159967 - DNA, 22 bp, synthetic construct
  misc_feature 1..22: note = chemically synthesized
  source 1..22: mol_type = other DNA
cacagcaaagaaaataataaag

SEQ ID NO: 159968 - DNA, 22 bp, synthetic construct
  misc_feature 1..22: note = chemically synthesized
  source 1..22: mol_type = other DNA
gcaaactatatattttacaagg

SEQ ID NO: 159969 - DNA, 22 bp, synthetic construct
  misc_feature 1..22: note = chemically synthesized
  source 1..22: mol_type = other DNA
caaactatatattttacaagga

SEQ ID NO: 159970 - DNA, 22 bp, synthetic construct
  misc_feature 1..22: note = chemically synthesized
  source 1..22: mol_type = other DNA
tatattttacaaggaattgata

SEQ ID NO: 159971 - DNA, 22 bp, synthetic construct
  misc_feature 1..22: note = chemically synthesized
  source 1..22: mol_type = other DNA
tacaaggaattgataaccagaa

SEQ ID NO: 159972 - DNA, 22 bp, synthetic construct
  misc_feature 1..22: note = chemically synthesized
  source 1..22: mol_type = other DNA
acaaggaattgataaccagaat

SEQ ID NO: 159973 - DNA, 22 bp, synthetic construct
  misc_feature 1..22: note = chemically synthesized
  source 1..22: mol_type = other DNA
caaggaattgataaccagaata

SEQ ID NO: 159974 - DNA, 22 bp, synthetic construct
  misc_feature 1..22: note = chemically synthesized
  source 1..22: mol_type = other DNA
ataaccagaatatgcaagaaac

SEQ ID NO: 159975 - DNA, 22 bp, synthetic construct
  misc_feature 1..22: note = chemically synthesized
  source 1..22: mol_type = other DNA
aagcaactcaacagaaaataaa

SEQ ID NO: 159976 - DNA, 22 bp, synthetic construct
  misc_feature 1..22: note = chemically synthesized
  source 1..22: mol_type = other DNA
aacagaaaataaataaataaat

SEQ ID NO: 159977 - DNA, 22 bp, synthetic construct
  misc_feature 1..22: note = chemically synthesized
  source 1..22: mol_type = other DNA
aatagatatttctcaaaagaag

SEQ ID NO: 159978 - DNA, 22 bp, synthetic construct
  misc_feature 1..22: note = chemically synthesized
  source 1..22: mol_type = other DNA
ctcaaaagaagccatacaaatg

SEQ ID NO: 159979 - DNA, 22 bp, synthetic construct
  misc_feature 1..22: note = chemically synthesized
  source 1..22: mol_type = other DNA
tcaaaagaagccatacaaatgg

SEQ ID NO: 159980 - DNA, 22 bp, synthetic construct
  misc_feature 1..22: note = chemically synthesized
  source 1..22: mol_type = other DNA
aaaagaagccatacaaatggcc

SEQ ID NO: 159981 - DNA, 22 bp, synthetic construct
  misc_feature 1..22: note = chemically synthesized
  source 1..22: mol_type = other DNA
gaaaaaatgttcaatatcacta

SEQ ID NO: 159982 - DNA, 22 bp, synthetic construct
  misc_feature 1..22: note = chemically synthesized
  source 1..22: mol_type = other DNA
aaaaaatgttcaatatcactaa

SEQ ID NO: 159983 - DNA, 22 bp, synthetic construct
  misc_feature 1..22: note = chemically synthesized
  source 1..22: mol_type = other DNA
aatatcactaatcaccagataa

SEQ ID NO: 159984 - DNA, 22 bp, synthetic construct
  misc_feature 1..22: note = chemically synthesized
  source 1..22: mol_type = other DNA
atcaccagataaatcaaaacca

SEQ ID NO: 159985 - DNA, 22 bp, synthetic construct
  misc_feature 1..22: note = chemically synthesized
  source 1..22: mol_type = other DNA
accttagttaaaatagcttata

SEQ ID NO: 159986 - DNA, 22 bp, synthetic construct
  misc_feature 1..22: note = chemically synthesized
  source 1..22: mol_type = other DNA
agttaaaatagcttataacaaa

SEQ ID NO: 159987 - DNA, 22 bp, synthetic construct
  misc_feature 1..22: note = chemically synthesized
  source 1..22: mol_type = other DNA
gttaaaatagcttataacaaaa

SEQ ID NO: 159988 - DNA, 22 bp, synthetic construct
  misc_feature 1..22: note = chemically synthesized
  source 1..22: mol_type = other DNA
aaatagcttataacaaaacaaa

SEQ ID NO: 159989 - DNA, 22 bp, synthetic construct
  misc_feature 1..22: note = chemically synthesized
  source 1..22: mol_type = other DNA
ataacaaaacaaaaggaaataa

SEQ ID NO: 159990 - DNA, 22 bp, synthetic construct
  misc_feature 1..22: note = chemically synthesized
  source 1..22: mol_type = other DNA
taacaaaacaaaaggaaataac

SEQ ID NO: 159991 - DNA, 22 bp, synthetic construct
  misc_feature 1..22: note = chemically synthesized
  source 1..22: mol_type = other DNA
gtgtggatgtggacaaagggaa

SEQ ID NO: 159992 - DNA, 22 bp, synthetic construct
  misc_feature 1..22: note = chemically synthesized
  source 1..22: mol_type = other DNA
tgtggatgtggacaaagggaaa

SEQ ID NO: 159993 - DNA, 22 bp, synthetic construct
  misc_feature 1..22: note = chemically synthesized
  source 1..22: mol_type = other DNA
ttacactgttggtgggagtaca

SEQ ID NO: 159994 - DNA, 22 bp, synthetic construct
  misc_feature 1..22: note = chemically synthesized
  source 1..22: mol_type = other DNA
acactgttggtgggagtacaaa

SEQ ID NO: 159995 - DNA, 22 bp, synthetic construct
  misc_feature 1..22: note = chemically synthesized
  source 1..22: mol_type = other DNA
cactgttggtgggagtacaaat

SEQ ID NO: 159996 - DNA, 22 bp, synthetic construct
  misc_feature 1..22: note = chemically synthesized
  source 1..22: mol_type = other DNA
ttggtgggagtacaaattggta

SEQ ID NO: 159997 - DNA, 22 bp, synthetic construct
  misc_feature 1..22: note = chemically synthesized
  source 1..22: mol_type = other DNA
gtgggagtacaaattggtacag

SEQ ID NO: 159998 - DNA, 22 bp, synthetic construct
  misc_feature 1..22: note = chemically synthesized
  source 1..22: mol_type = other DNA
gtacagcaattatgaaggacag

SEQ ID NO: 159999 - DNA, 22 bp, synthetic construct
  misc_feature 1..22: note = chemically synthesized
  source 1..22: mol_type = other DNA
tgaaggacagtatggagatttg

SEQ ID NO: 160000 - DNA, 22 bp, synthetic construct
  misc_feature 1..22: note = chemically synthesized
  source 1..22: mol_type = other DNA
gtcaaaaatgtaaagtagaact

SEQ ID NO: 160001 - DNA, 22 bp, synthetic construct
  misc_feature 1..22: note = chemically synthesized
  source 1..22: mol_type = other DNA
tcaaaaatgtaaagtagaacta

SEQ ID NO: 160002 - DNA, 22 bp, synthetic construct
  misc_feature 1..22: note = chemically synthesized
  source 1..22: mol_type = other DNA
ccatatgatccagcaatatcac

SEQ ID NO: 160003 - DNA, 22 bp, synthetic construct
  misc_feature 1..22: note = chemically synthesized
  source 1..22: mol_type = other DNA
ctaggtatatacccttaaaaga

SEQ ID NO: 160004 - DNA, 22 bp, synthetic construct
  misc_feature 1..22: note = chemically synthesized
  source 1..22: mol_type = other DNA
ggtatatacccttaaaagaata

SEQ ID NO: 160005 - DNA, 22 bp, synthetic construct
  misc_feature 1..22: note = chemically synthesized
  source 1..22: mol_type = other DNA
aaaagaataaattagtatgtcg

SEQ ID NO: 160006 - DNA, 22 bp, synthetic construct
  misc_feature 1..22: note = chemically synthesized
  source 1..22: mol_type = other DNA
aaagaataaattagtatgtcga

SEQ ID NO: 160007 - DNA, 22 bp, synthetic construct
  misc_feature 1..22: note = chemically synthesized
  source 1..22: mol_type = other DNA
gtatgtcgaagatatatcagta

SEQ ID NO: 160008 - DNA, 22 bp, synthetic construct
  misc_feature 1..22: note = chemically synthesized
  source 1..22: mol_type = other DNA
ccatctttattatagcactatt

SEQ ID NO: 160009 - DNA, 22 bp, synthetic construct
  misc_feature 1..22: note = chemically synthesized
  source 1..22: mol_type = other DNA
tattatagcactattcacaaac

SEQ ID NO: 160010 - DNA, 22 bp, synthetic construct
  misc_feature 1..22: note = chemically synthesized
  source 1..22: mol_type = other DNA
attatagcactattcacaaacg

SEQ ID NO: 160011 - DNA, 22 bp, synthetic construct
  misc_feature 1..22: note = chemically synthesized
  source 1..22: mol_type = other DNA
ttatagcactattcacaaacgc

SEQ ID NO: 160012 - DNA, 22 bp, synthetic construct
  misc_feature 1..22: note = chemically synthesized
  source 1..22: mol_type = other DNA
tagcactattcacaaacgccaa

SEQ ID NO: 160013 - DNA, 22 bp, synthetic construct
  misc_feature 1..22: note = chemically synthesized
  source 1..22: mol_type = other DNA
ttcacaaacgccaagatttgaa

SEQ ID NO: 160014 - DNA, 22 bp, synthetic construct
  misc_feature 1..22: note = chemically synthesized
  source 1..22: mol_type = other DNA
acaaacgccaagatttgaaatc

SEQ ID NO: 160015 - DNA, 22 bp, synthetic construct
  misc_feature 1..22: note = chemically synthesized
  source 1..22: mol_type = other DNA
gaaatcaactgatgtattcgtc

SEQ ID NO: 160016 - DNA, 22 bp, synthetic construct
  misc_feature 1..22: note = chemically synthesized
  source 1..22: mol_type = other DNA
aaatcaactgatgtattcgtca

SEQ ID NO: 160017 - DNA, 22 bp, synthetic construct
  misc_feature 1..22: note = chemically synthesized
  source 1..22: mol_type = other DNA
atgtattcgtcaacagataaat

SEQ ID NO: 160018 - DNA, 22 bp, synthetic construct
  misc_feature 1..22: note = chemically synthesized
  source 1..22: mol_type = other DNA
gtcaacagataaatggataaag

SEQ ID NO: 160019 - DNA, 22 bp, synthetic construct
  misc_feature 1..22: note = chemically synthesized
  source 1..22: mol_type = other DNA
ttcaaccataaaaaagaatgaa

SEQ ID NO: 160020 - DNA, 22 bp, synthetic construct
  misc_feature 1..22: note = chemically synthesized
  source 1..22: mol_type = other DNA
aaccataaaaaagaatgaaata

SEQ ID NO: 160021 - DNA, 22 bp, synthetic construct
  misc_feature 1..22: note = chemically synthesized
  source 1..22: mol_type = other DNA
tcaattacagtaacataaatgg

SEQ ID NO: 160022 - DNA, 22 bp, synthetic construct
  misc_feature 1..22: note = chemically synthesized
  source 1..22: mol_type = other DNA
cagtaacataaatggtactgaa

SEQ ID NO: 160023 - DNA, 22 bp, synthetic construct
  misc_feature 1..22: note = chemically synthesized
  source 1..22: mol_type = other DNA
aaagcaattacgttaagtgaaa

SEQ ID NO: 160024 - DNA, 22 bp, synthetic construct
  misc_feature 1..22: note = chemically synthesized
  source 1..22: mol_type = other DNA
cgttaagtgaaataagccaagc

SEQ ID NO: 160025 - DNA, 22 bp, synthetic construct
  misc_feature 1..22: note = chemically synthesized
  source 1..22: mol_type = other DNA
agtgaaataagccaagcacaga

SEQ ID NO: 160026 - DNA, 22 bp, synthetic construct
  misc_feature 1..22: note = chemically synthesized
  source 1..22: mol_type = other DNA
taactcgtgtggaagttaaaaa

SEQ ID NO: 160027 - DNA, 22 bp, synthetic construct
  misc_feature 1..22: note = chemically synthesized
  source 1..22: mol_type = other DNA
actcgtgtggaagttaaaaacg

SEQ ID NO: 160028 - DNA, 22 bp, synthetic construct
  misc_feature 1..22: note = chemically synthesized
  source 1..22: mol_type = other DNA
gtgtggaagttaaaaacgtgga

SEQ ID NO: 160029 - DNA, 22 bp, synthetic construct
  misc_feature 1..22: note = chemically synthesized
  source 1..22: mol_type = other DNA
aaaacgtggatcttatgaagac

SEQ ID NO: 160030 - DNA, 22 bp, synthetic construct
  misc_feature 1..22: note = chemically synthesized
  source 1..22: mol_type = other DNA
atgaagacagagagtagattgg

SEQ ID NO: 160031 - DNA, 22 bp, synthetic construct
  misc_feature 1..22: note = chemically synthesized
  source 1..22: mol_type = other DNA
tgaagacagagagtagattggt

SEQ ID NO: 160032 - DNA, 22 bp, synthetic construct
  misc_feature 1..22: note = chemically synthesized
  source 1..22: mol_type = other DNA
gtagttaccggcggcgggaggg

SEQ ID NO: 160033 - DNA, 22 bp, synthetic construct
  misc_feature 1..22: note = chemically synthesized
  source 1..22: mol_type = other DNA
ccggcggcgggagggaagaaag

SEQ ID NO: 160034 - DNA, 22 bp, synthetic construct
  misc_feature 1..22: note = chemically synthesized
  source 1..22: mol_type = other DNA
ccactctctctctctccctctg

SEQ ID NO: 160035 - DNA, 22 bp, synthetic construct
  misc_feature 1..22: note = chemically synthesized
  source 1..22: mol_type = other DNA
tctctctctccctctgtgtgta

SEQ ID NO: 160036 - DNA, 22 bp, synthetic construct
  misc_feature 1..22: note = chemically synthesized
  source 1..22: mol_type = other DNA
tctctctccctctgtgtgtatg

SEQ ID NO: 160037 - DNA, 22 bp, synthetic construct
  misc_feature 1..22: note = chemically synthesized
  source 1..22: mol_type = other DNA
tctctccctctgtgtgtatgtg

SEQ ID NO: 160038 - DNA, 22 bp, synthetic construct
  misc_feature 1..22: note = chemically synthesized
  source 1..22: mol_type = other DNA
tctccctctgtgtgtatgtgtg

SEQ ID NO: 160039 - DNA, 22 bp, synthetic construct
  misc_feature 1..22: note = chemically synthesized
  source 1..22: mol_type = other DNA
tccctctgtgtgtatgtgtgca

SEQ ID NO: 160040 - DNA, 22 bp, synthetic construct
  misc_feature 1..22: note = chemically synthesized
  source 1..22: mol_type = other DNA
cctctgtgtgtatgtgtgcata

SEQ ID NO: 160041 - DNA, 22 bp, synthetic construct
  misc_feature 1..22: note = chemically synthesized
  source 1..22: mol_type = other DNA
tgtgtgtatgtgtgcatatgta

SEQ ID NO: 160042 - DNA, 22 bp, synthetic construct
  misc_feature 1..22: note = chemically synthesized
  source 1..22: mol_type = other DNA
tgtgtatgtgtgcatatgtatg

SEQ ID NO: 160043 - DNA, 22 bp, synthetic construct
  misc_feature 1..22: note = chemically synthesized
  source 1..22: mol_type = other DNA
gtatatatatgtatgtatgtat

SEQ ID NO: 160044 - DNA, 22 bp, synthetic construct
  misc_feature 1..22: note = chemically synthesized
  source 1..22: mol_type = other DNA
tatatatatgtatgtatgtatt

SEQ ID NO: 160045 - DNA, 22 bp, synthetic construct
  misc_feature 1..22: note = chemically synthesized
  source 1..22: mol_type = other DNA
ccactgaaccgtacactcaaaa

SEQ ID NO: 160046 - DNA, 22 bp, synthetic construct
  misc_feature 1..22: note = chemically synthesized
  source 1..22: mol_type = other DNA
aaccgtacactcaaaaatggta

SEQ ID NO: 160047 - DNA, 22 bp, synthetic construct
  misc_feature 1..22: note = chemically synthesized
  source 1..22: mol_type = other DNA
aaaaatggtaaagatgggctgg

SEQ ID NO: 160048 - DNA, 22 bp, synthetic construct
  misc_feature 1..22: note = chemically synthesized
  source 1..22: mol_type = other DNA
ggtgcggtggccaatgcctgta

SEQ ID NO: 160049 - DNA, 22 bp, synthetic construct
  misc_feature 1..22: note = chemically synthesized
  source 1..22: mol_type = other DNA
taatctcagcactttgggaggc

SEQ ID NO: 160050 - DNA, 22 bp, synthetic construct
  misc_feature 1..22: note = chemically synthesized
  source 1..22: mol_type = other DNA
agcactttgggaggccaaggca

SEQ ID NO: 160051 - DNA, 22 bp, synthetic construct
  misc_feature 1..22: note = chemically synthesized
  source 1..22: mol_type = other DNA
tgggaggccaaggcaggtggat

SEQ ID NO: 160052 - DNA, 22 bp, synthetic construct
  misc_feature 1..22: note = chemically synthesized
  source 1..22: mol_type = other DNA
gggaggccaaggcaggtggatc

SEQ ID NO: 160053 - DNA, 22 bp, synthetic construct
  misc_feature 1..22: note = chemically synthesized
  source 1..22: mol_type = other DNA
ggaggccaaggcaggtggatca

SEQ ID NO: 160054 - DNA, 22 bp, synthetic construct
  misc_feature 1..22: note = chemically synthesized
  source 1..22: mol_type = other DNA
accaacatggtgaaaccctgtc

SEQ ID NO: 160055 - DNA, 22 bp, synthetic construct
  misc_feature 1..22: note = chemically synthesized
  source 1..22: mol_type = other DNA
tctctactaaaaatacaaaaaa

SEQ ID NO: 160056 - DNA, 22 bp, synthetic construct
  misc_feature 1..22: note = chemically synthesized
  source 1..22: mol_type = other DNA
tactaaaaatacaaaaaattag

SEQ ID NO: 160057 - DNA, 22 bp, synthetic construct
  misc_feature 1..22: note = chemically synthesized
  source 1..22: mol_type = other DNA
ctaaaaatacaaaaaattagcc

SEQ ID NO: 160058 - DNA, 22 bp, synthetic construct
  misc_feature 1..22: note = chemically synthesized
  source 1..22: mol_type = other DNA
aaaatacaaaaaattagccagg

SEQ ID NO: 160059 - DNA, 22 bp, synthetic construct
  misc_feature 1..22: note = chemically synthesized
  source 1..22: mol_type = other DNA
gccaggcgtggtggcaggcgcc

SEQ ID NO: 160060 - DNA, 22 bp, synthetic construct
  misc_feature 1..22: note = chemically synthesized
  source 1..22: mol_type = other DNA
taatcccacctacttgggaggc

SEQ ID NO: 160061 - DNA, 22 bp, synthetic construct
  misc_feature 1..22: note = chemically synthesized
  source 1..22: mol_type = other DNA
cttgggaggcttgggcaggaga

SEQ ID NO: 160062 - DNA, 22 bp, synthetic construct
  misc_feature 1..22: note = chemically synthesized
  source 1..22: mol_type = other DNA
gggaggcttgggcaggagaatc

SEQ ID NO: 160063 - DNA, 22 bp, synthetic construct
  misc_feature 1..22: note = chemically synthesized
  source 1..22: mol_type = other DNA
ggaggcttgggcaggagaatcg

SEQ ID NO: 160064 - DNA, 22 bp, synthetic construct
  misc_feature 1..22: note = chemically synthesized
  source 1..22: mol_type = other DNA
gggcaggagaatcgcttgaacc

SEQ ID NO: 160065 - DNA, 22 bp, synthetic construct
  misc_feature 1..22: note = chemically synthesized
  source 1..22: mol_type = other DNA
ggcaggagaatcgcttgaacct

SEQ ID NO: 160066 - DNA, 22 bp, synthetic construct
  misc_feature 1..22: note = chemically synthesized
  source 1..22: mol_type = other DNA
gaacctggtgggggcggaggtt

SEQ ID NO: 160067 - DNA, 22 bp, synthetic construct
  misc_feature 1..22: note = chemically synthesized
  source 1..22: mol_type = other DNA
aacctggtgggggcggaggttg

SEQ ID NO: 160068 - DNA, 22 bp, synthetic construct
  misc_feature 1..22: note = chemically synthesized
  source 1..22: mol_type = other DNA
gtgggggcggaggttgcagtga

SEQ ID NO: 160069 - DNA, 22 bp, synthetic construct
  misc_feature 1..22: note = chemically synthesized
  source 1..22: mol_type = other DNA
cagtgagccaagatcctaccac

SEQ ID NO: 160070 - DNA, 22 bp, synthetic construct
  misc_feature 1..22: note = chemically synthesized
  source 1..22: mol_type = other DNA
ccactgcactccagcctggatg

SEQ ID NO: 160071 - DNA, 22 bp, synthetic construct
  misc_feature 1..22: note = chemically synthesized
  source 1..22: mol_type = other DNA
cactccagcctggatgacggag

SEQ ID NO: 160072 - DNA, 22 bp, synthetic construct
  misc_feature 1..22: note = chemically synthesized
  source 1..22: mol_type = other DNA
cagcctggatgacggagcgaga

SEQ ID NO: 160073 - DNA, 22 bp, synthetic construct
  misc_feature 1..22: note = chemically synthesized
  source 1..22: mol_type = other DNA
gatgacggagcgagactccgtc

SEQ ID NO: 160074 - DNA, 22 bp, synthetic construct
  misc_feature 1..22: note = chemically synthesized
  source 1..22: mol_type = other DNA
cgtctcaaggaaaaaaaaaaag

SEQ ID NO: 160075 - DNA, 22 bp, synthetic construct
  misc_feature 1..22: note = chemically synthesized
  source 1..22: mol_type = other DNA
aaggaaaaaaaaaaagtaaaga

SEQ ID NO: 160076 - DNA, 22 bp, synthetic construct
  misc_feature 1..22: note = chemically synthesized
  source 1..22: mol_type = other DNA
cgtatgtatattttaccttaat

SEQ ID NO: 160077 - DNA, 22 bp, synthetic construct
  misc_feature 1..22: note = chemically synthesized
  source 1..22: mol_type = other DNA
taccttaataaaaataaattta

SEQ ID NO: 160078 - DNA, 22 bp, synthetic construct
  misc_feature 1..22: note = chemically synthesized
  source 1..22: mol_type = other DNA
accttaataaaaataaatttaa

SEQ ID NO: 160079 - DNA, 22 bp, synthetic construct
  misc_feature 1..22: note = chemically synthesized
  source 1..22: mol_type = other DNA
ccttaataaaaataaatttaaa

SEQ ID NO: 160080 - DNA, 22 bp, synthetic construct
  misc_feature 1..22: note = chemically synthesized
  source 1..22: mol_type = other DNA
aataaaaataaatttaaaaaat

SEQ ID NO: 160081 - DNA, 22 bp, synthetic construct
  misc_feature 1..22: note = chemically synthesized
  source 1..22: mol_type = other DNA
ataaaaataaatttaaaaaata

SEQ ID NO: 160082 - DNA, 22 bp, synthetic construct
  misc_feature 1..22: note = chemically synthesized
  source 1..22: mol_type = other DNA
aaaaaatattcagtaggccggg

SEQ ID NO: 160083 - DNA, 22 bp, synthetic construct
  misc_feature 1..22: note = chemically synthesized
  source 1..22: mol_type = other DNA
aaaaatattcagtaggccgggt

SEQ ID NO: 160084 - DNA, 22 bp, synthetic construct
  misc_feature 1..22: note = chemically synthesized
  source 1..22: mol_type = other DNA
agtaggccgggtgcagtggctc

SEQ ID NO: 160085 - DNA, 22 bp, synthetic construct
  misc_feature 1..22: note = chemically synthesized
  source 1..22: mol_type = other DNA
acgcctgtgatcccagcacttt

SEQ ID NO: 160086 - DNA, 22 bp, synthetic construct
  misc_feature 1..22: note = chemically synthesized
  source 1..22: mol_type = other DNA
tgatcccagcactttgggaggc

SEQ ID NO: 160087 - DNA, 22 bp, synthetic construct
  misc_feature 1..22: note = chemically synthesized
  source 1..22: mol_type = other DNA
tgggaggcggaggcgggtggat

SEQ ID NO: 160088 - DNA, 22 bp, synthetic construct
  misc_feature 1..22: note = chemically synthesized
  source 1..22: mol_type = other DNA
gggaggcggaggcgggtggatc

SEQ ID NO: 160089 - DNA, 22 bp, synthetic construct
  misc_feature 1..22: note = chemically synthesized
  source 1..22: mol_type = other DNA
ggaggcggaggcgggtggatca

SEQ ID NO: 160090 - DNA, 22 bp, synthetic construct
  misc_feature 1..22: note = chemically synthesized
  source 1..22: mol_type = other DNA
gctaacacagtgaaaccccgtc

SEQ ID NO: 160091 - DNA, 22 bp, synthetic construct
  misc_feature 1..22: note = chemically synthesized
  source 1..22: mol_type = other DNA
acacagtgaaaccccgtctcta

SEQ ID NO: 160092 - DNA, 22 bp, synthetic construct
  misc_feature 1..22: note = chemically synthesized
  source 1..22: mol_type = other DNA
tactaaaaaaatacaaaaaatt

SEQ ID NO: 160093 - DNA, 22 bp, synthetic construct
  misc_feature 1..22: note = chemically synthesized
  source 1..22: mol_type = other DNA
ctaaaaaaatacaaaaaattag

SEQ ID NO: 160094 - DNA, 22 bp, synthetic construct
  misc_feature 1..22: note = chemically synthesized
  source 1..22: mol_type = other DNA
aaaaaatacaaaaaattagccg

SEQ ID NO: 160095 - DNA, 22 bp, synthetic construct
  misc_feature 1..22: note = chemically synthesized
  source 1..22: mol_type = other DNA
gccgggcttggtggcgggtgcc

SEQ ID NO: 160096 - DNA, 22 bp, synthetic construct
  misc_feature 1..22: note = chemically synthesized
  source 1..22: mol_type = other DNA
ggtggcgggtgcctgtagtccc

SEQ ID NO: 160097 - DNA, 22 bp, synthetic construct
  misc_feature 1..22: note = chemically synthesized
  source 1..22: mol_type = other DNA
gtggcgggtgcctgtagtccca

SEQ ID NO: 160098 - DNA, 22 bp, synthetic construct
  misc_feature 1..22: note = chemically synthesized
  source 1..22: mol_type = other DNA
tagtcccagctactatggaggc

SEQ ID NO: 160099 - DNA, 22 bp, synthetic construct
  misc_feature 1..22: note = chemically synthesized
  source 1..22: mol_type = other DNA
ctatggaggctgaggcgggaga

SEQ ID NO: 160100 - DNA, 22 bp, synthetic construct
  misc_feature 1..22: note = chemically synthesized
  source 1..22: mol_type = other DNA
tggaggctgaggcgggagaatg

SEQ ID NO: 160101 - DNA, 22 bp, synthetic construct
  misc_feature 1..22: note = chemically synthesized
  source 1..22: mol_type = other DNA
aggcgggagaatggcgtgaacg

SEQ ID NO: 160102 - DNA, 22 bp, synthetic construct
  misc_feature 1..22: note = chemically synthesized
  source 1..22: mol_type = other DNA
gcagtgagcagagatcaggggc

SEQ ID NO: 160103 - DNA, 22 bp, synthetic construct
  misc_feature 1..22: note = chemically synthesized
  source 1..22: mol_type = other DNA
cagtgagcagagatcaggggcc

SEQ ID NO: 160104 - DNA, 22 bp, synthetic construct
  misc_feature 1..22: note = chemically synthesized
  source 1..22: mol_type = other DNA
cactccagcctgggcgacagag

SEQ ID NO: 160105 - DNA, 22 bp, synthetic construct
  misc_feature 1..22: note = chemically synthesized
  source 1..22: mol_type = other DNA
cagcctgggcgacagagagaga

SEQ ID NO: 160106 - DNA, 22 bp, synthetic construct
  misc_feature 1..22: note = chemically synthesized
  source 1..22: mol_type = other DNA
ggcgacagagagagactctgtc

SEQ ID NO: 160107 - DNA, 22 bp, synthetic construct
  misc_feature 1..22: note = chemically synthesized
  source 1..22: mol_type = other DNA
tgtctcaaaaaaaagaaaaaaa

SEQ ID NO: 160108 - DNA, 22 bp, synthetic construct
  misc_feature 1..22: note = chemically synthesized
  source 1..22: mol_type = other DNA
tctcaaaaaaaagaaaaaaaaa

SEQ ID NO: 160109 - DNA, 22 bp, synthetic construct
  misc_feature 1..22: note = chemically synthesized
  source 1..22: mol_type = other DNA
aaaaaaaagaaaaaaaaaattt

SEQ ID NO: 160110 - DNA, 22 bp, synthetic construct
  misc_feature 1..22: note = chemically synthesized
  source 1..22: mol_type = other DNA
agtagactagctaaaaaaatcc

SEQ ID NO: 160111 - DNA, 22 bp, synthetic construct
  misc_feature 1..22: note = chemically synthesized
  source 1..22: mol_type = other DNA
gtagactagctaaaaaaatcca

SEQ ID NO: 160112 - DNA, 22 bp, synthetic construct
  misc_feature 1..22: note = chemically synthesized
  source 1..22: mol_type = other DNA
gctaaaaaaatccagagatagt

SEQ ID NO: 160113 - DNA, 22 bp, synthetic construct
  misc_feature 1..22: note = chemically synthesized
  source 1..22: mol_type = other DNA
aaaaaatccagagatagttatt

SEQ ID NO: 160114 - DNA, 22 bp, synthetic construct
  misc_feature 1..22: note = chemically synthesized
  source 1..22: mol_type = other DNA
ttgatgcatatgtaaaagtctt

SEQ ID NO: 160115 - DNA, 22 bp, synthetic construct
  misc_feature 1..22: note = chemically synthesized
  source 1..22: mol_type = other DNA
atgcatatgtaaaagtcttcca

SEQ ID NO: 160116 - DNA, 22 bp, synthetic construct
  misc_feature 1..22: note = chemically synthesized
  source 1..22: mol_type = other DNA
ccaatatttacaagtacaatga

SEQ ID NO: 160117 - DNA, 22 bp, synthetic construct
  misc_feature 1..22: note = chemically synthesized
  source 1..22: mol_type = other DNA
caatatttacaagtacaatgaa

SEQ ID NO: 160118 - DNA, 22 bp, synthetic construct
  misc_feature 1..22: note = chemically synthesized
  source 1..22: mol_type = other DNA
acaagtacaatgaaaaaaaaat

SEQ ID NO: 160119 - DNA, 22 bp, synthetic construct
  misc_feature 1..22: note = chemically synthesized
  source 1..22: mol_type = other DNA
caagtacaatgaaaaaaaaata

SEQ ID NO: 160120 - DNA, 22 bp, synthetic construct
  misc_feature 1..22: note = chemically synthesized
  source 1..22: mol_type = other DNA
gaattaagtgtagaactcattg

SEQ ID NO: 160121 - DNA, 22 bp, synthetic construct
  misc_feature 1..22: note = chemically synthesized
  source 1..22: mol_type = other DNA
aattaagtgtagaactcattga

SEQ ID NO: 160122 - DNA, 22 bp, synthetic construct
  misc_feature 1..22: note = chemically synthesized
  source 1..22: mol_type = other DNA
agtgtagaactcattgacaatg

SEQ ID NO: 160123 - DNA, 22 bp, synthetic construct
  misc_feature 1..22: note = chemically synthesized
  source 1..22: mol_type = other DNA
attgacaatgtttcaaaggatg

SEQ ID NO: 160124 - DNA, 22 bp, synthetic construct
  misc_feature 1..22: note = chemically synthesized
  source 1..22: mol_type = other DNA
acaatgtttcaaaggatgtgag

SEQ ID NO: 160125 - DNA, 22 bp, synthetic construct
  misc_feature 1..22: note = chemically synthesized
  source 1..22: mol_type = other DNA
caaaggatgtgagggataaact

SEQ ID NO: 160126 - DNA, 22 bp, synthetic construct
  misc_feature 1..22: note = chemically synthesized
  source 1..22: mol_type = other DNA
aaaggatgtgagggataaacta

SEQ ID NO: 160127 - DNA, 22 bp, synthetic construct
  misc_feature 1..22: note = chemically synthesized
  source 1..22: mol_type = other DNA
aaatttgggcagtacatgctgt

SEQ ID NO: 160128 - DNA, 22 bp, synthetic construct
  misc_feature 1..22: note = chemically synthesized
  source 1..22: mol_type = other DNA
gggcagtacatgctgttcctgt

SEQ ID NO: 160129 - DNA, 22 bp, synthetic construct
  misc_feature 1..22: note = chemically synthesized
  source 1..22: mol_type = other DNA
ggcagtacatgctgttcctgtg

SEQ ID NO: 160130 - DNA, 22 bp, synthetic construct
  misc_feature 1..22: note = chemically synthesized
  source 1..22: mol_type = other DNA
ttcctgtgtacttggaacagag

SEQ ID NO: 160131 - DNA, 22 bp, synthetic construct
  misc_feature 1..22: note = chemically synthesized
  source 1..22: mol_type = other DNA
ctgtgtacttggaacagaggga

SEQ ID NO: 160132 - DNA, 22 bp, synthetic construct
  misc_feature 1..22: note = chemically synthesized
  source 1..22: mol_type = other DNA
tgtacttggaacagagggagaa

SEQ ID NO: 160133 - DNA, 22 bp, synthetic construct
  misc_feature 1..22: note = chemically synthesized
  source 1..22: mol_type = other DNA
ggaacagagggagaaaatctgg

SEQ ID NO: 160134 - DNA, 22 bp, synthetic construct
  misc_feature 1..22: note = chemically synthesized
  source 1..22: mol_type = other DNA
gaacagagggagaaaatctggg

SEQ ID NO: 160135 - DNA, 22 bp, synthetic construct
  misc_feature 1..22: note = chemically synthesized
  source 1..22: mol_type = other DNA
ggctggaaatattgttatagga

SEQ ID NO: 160136 - DNA, 22 bp, synthetic construct
  misc_feature 1..22: note = chemically synthesized
  source 1..22: mol_type = other DNA
gaaatattgttataggagttag

SEQ ID NO: 160137 - DNA, 22 bp, synthetic construct
  misc_feature 1..22: note = chemically synthesized
  source 1..22: mol_type = other DNA
ttataggagttagcacatgaag

SEQ ID NO: 160138 - DNA, 22 bp, synthetic construct
  misc_feature 1..22: note = chemically synthesized
  source 1..22: mol_type = other DNA
taggagttagcacatgaaggtg

SEQ ID NO: 160139 - DNA, 22 bp, synthetic construct
  misc_feature 1..22: note = chemically synthesized
  source 1..22: mol_type = other DNA
gcacatgaaggtgacaactaaa

SEQ ID NO: 160140 - DNA, 22 bp, synthetic construct
  misc_feature 1..22: note = chemically synthesized
  source 1..22: mol_type = other DNA
aattatttggagtagatggagt

SEQ ID NO: 160141 - DNA, 22 bp, synthetic construct
  misc_feature 1..22: note = chemically synthesized
  source 1..22: mol_type = other DNA
tttggagtagatggagtcacca

SEQ ID NO: 160142 - DNA, 22 bp, synthetic construct
  misc_feature 1..22: note = chemically synthesized
  source 1..22: mol_type = other DNA
ggagtagatggagtcaccagca

SEQ ID NO: 160143 - DNA, 22 bp, synthetic construct
  misc_feature 1..22: note = chemically synthesized
  source 1..22: mol_type = other DNA
gagtagatggagtcaccagcac

SEQ ID NO: 160144 - DNA, 22 bp, synthetic construct
  misc_feature 1..22: note = chemically synthesized
  source 1..22: mol_type = other DNA
tagaatgaaatgacccaagata

SEQ ID NO: 160145 - DNA, 22 bp, synthetic construct
  misc_feature 1..22: note = chemically synthesized
  source 1..22: mol_type = other DNA
agaatgaaatgacccaagatag

SEQ ID NO: 160146 - DNA, 22 bp, synthetic construct
  misc_feature 1..22: note = chemically synthesized
  source 1..22: mol_type = other DNA
gaatgaaatgacccaagataga

SEQ ID NO: 160147 - DNA, 22 bp, synthetic construct
  misc_feature 1..22: note = chemically synthesized
  source 1..22: mol_type = other DNA
tggagagcccccaaatttaaat

SEQ ID NO: 160148 - DNA, 22 bp, synthetic construct
  misc_feature 1..22: note = chemically synthesized
  source 1..22: mol_type = other DNA
ggagagcccccaaatttaaata

SEQ ID NO: 160149 - DNA, 22 bp, synthetic construct
  misc_feature 1..22: note = chemically synthesized
  source 1..22: mol_type = other DNA
gagagcccccaaatttaaataa

SEQ ID NO: 160150 - DNA, 22 bp, synthetic construct
  misc_feature 1..22: note = chemically synthesized
  source 1..22: mol_type = other DNA
aaataaaatcagtataagagaa

SEQ ID NO: 160151 - DNA, 22 bp, synthetic construct
  misc_feature 1..22: note = chemically synthesized
  source 1..22: mol_type = other DNA
aataaaatcagtataagagaag

SEQ ID NO: 160152 - DNA, 22 bp, synthetic construct
  misc_feature 1..22: note = chemically synthesized
  source 1..22: mol_type = other DNA
gtctaaattgtttcttagtgac

SEQ ID NO: 160153 - DNA, 22 bp, synthetic construct
  misc_feature 1..22: note = chemically synthesized
  source 1..22: mol_type = other DNA
aattgtttcttagtgacaaaag

SEQ ID NO: 160154 - DNA, 22 bp, synthetic construct
  misc_feature 1..22: note = chemically synthesized
  source 1..22: mol_type = other DNA
tttcttagtgacaaaagaataa

SEQ ID NO: 160155 - DNA, 22 bp, synthetic construct
  misc_feature 1..22: note = chemically synthesized
  source 1..22: mol_type = other DNA
cttagtgacaaaagaataacct

SEQ ID NO: 160156 - DNA, 22 bp, synthetic construct
  misc_feature 1..22: note = chemically synthesized
  source 1..22: mol_type = other DNA
ttagtgacaaaagaataacctg

SEQ ID NO: 160157 - DNA, 22 bp, synthetic construct
  misc_feature 1..22: note = chemically synthesized
  source 1..22: mol_type = other DNA
agtgacaaaagaataacctgaa

SEQ ID NO: 160158 - DNA, 22 bp, synthetic construct
  misc_feature 1..22: note = chemically synthesized
  source 1..22: mol_type = other DNA
gtgacaaaagaataacctgaat

SEQ ID NO: 160159 - DNA, 22 bp, synthetic construct
  misc_feature 1..22: note = chemically synthesized
  source 1..22: mol_type = other DNA
aatattagattagctgcctata

SEQ ID NO: 160160 - DNA, 22 bp, synthetic construct
  misc_feature 1..22: note = chemically synthesized
  source 1..22: mol_type = other DNA
gattagctgcctatatgctctc

SEQ ID NO: 160161 - DNA, 22 bp, synthetic construct
  misc_feature 1..22: note = chemically synthesized
  source 1..22: mol_type = other DNA
gctgcctatatgctctctgaat

SEQ ID NO: 160162 - DNA, 22 bp, synthetic construct
  misc_feature 1..22: note = chemically synthesized
  source 1..22: mol_type = other DNA
cctatatgctctctgaatcaat

SEQ ID NO: 160163 - DNA, 22 bp, synthetic construct
  misc_feature 1..22: note = chemically synthesized
  source 1..22: mol_type = other DNA
tatgctctctgaatcaatttca

SEQ ID NO: 160164 - DNA, 22 bp, synthetic construct
  misc_feature 1..22: note = chemically synthesized
  source 1..22: mol_type = other DNA
tctgaatcaatttcattcaaca

SEQ ID NO: 160165 - DNA, 22 bp, synthetic construct
  misc_feature 1..22: note = chemically synthesized
  source 1..22: mol_type = other DNA
tgaatcaatttcattcaacatg

SEQ ID NO: 160166 - DNA, 22 bp, synthetic construct
  misc_feature 1..22: note = chemically synthesized
  source 1..22: mol_type = other DNA
aatcaatttcattcaacatgca

SEQ ID NO: 160167 - DNA, 22 bp, synthetic construct
  misc_feature 1..22: note = chemically synthesized
  source 1..22: mol_type = other DNA
cattcaacatgcaacagtacta

SEQ ID NO: 160168 - DNA, 22 bp, synthetic construct
  misc_feature 1..22: note = chemically synthesized
  source 1..22: mol_type = other DNA
attcaacatgcaacagtactat

SEQ ID NO: 160169 - DNA, 22 bp, synthetic construct
  misc_feature 1..22: note = chemically synthesized
  source 1..22: mol_type = other DNA
aacatgcaacagtactattgtt

SEQ ID NO: 160170 - DNA, 22 bp, synthetic construct
  misc_feature 1..22: note = chemically synthesized
  source 1..22: mol_type = other DNA
ttgttttatgctccttcacaga

SEQ ID NO: 160171 - DNA, 22 bp, synthetic construct
  misc_feature 1..22: note = chemically synthesized
  source 1..22: mol_type = other DNA
ttttatgctccttcacagagga

SEQ ID NO: 160172 - DNA, 22 bp, synthetic construct
  misc_feature 1..22: note = chemically synthesized
  source 1..22: mol_type = other DNA
tatgctccttcacagaggaaat

SEQ ID NO: 160173 - DNA, 22 bp, synthetic construct
  misc_feature 1..22: note = chemically synthesized
  source 1..22: mol_type = other DNA
atgctccttcacagaggaaatt

SEQ ID NO: 160174 - DNA, 22 bp, synthetic construct
  misc_feature 1..22: note = chemically synthesized
  source 1..22: mol_type = other DNA
tgctccttcacagaggaaattc

SEQ ID NO: 160175 - DNA, 22 bp, synthetic construct
  misc_feature 1..22: note = chemically synthesized
  source 1..22: mol_type = other DNA
cttcacagaggaaattctggaa

SEQ ID NO: 160176 - DNA, 22 bp, synthetic construct
  misc_feature 1..22: note = chemically synthesized
  source 1..22: mol_type = other DNA
cacagaggaaattctggaaaga

SEQ ID NO: 160177 - DNA, 22 bp, synthetic construct
  misc_feature 1..22: note = chemically synthesized
  source 1..22: mol_type = other DNA
acagaggaaattctggaaagag

SEQ ID NO: 160178 - DNA, 22 bp, synthetic construct
  misc_feature 1..22: note = chemically synthesized
  source 1..22: mol_type = other DNA
tggaaagagcacatggggttcc

SEQ ID NO: 160179 - DNA, 22 bp, synthetic construct
  misc_feature 1..22: note = chemically synthesized
  source 1..22: mol_type = other DNA
gaaagagcacatggggttcctt

SEQ ID NO: 160180 - DNA, 22 bp, synthetic construct
  misc_feature 1..22: note = chemically synthesized
  source 1..22: mol_type = other DNA
cttgccttttcatctgtattcc

SEQ ID NO: 160181 - DNA, 22 bp, synthetic construct
  misc_feature 1..22: note = chemically synthesized
  source 1..22: mol_type = other DNA
gccttttcatctgtattccttg

SEQ ID NO: 160182 - DNA, 22 bp, synthetic construct
  misc_feature 1..22: note = chemically synthesized
  source 1..22: mol_type = other DNA
ccttttcatctgtattccttgt

SEQ ID NO: 160183 - DNA, 22 bp, synthetic construct
  misc_feature 1..22: note = chemically synthesized
  source 1..22: mol_type = other DNA
ttcatctgtattccttgttctc

SEQ ID NO: 160184 - DNA, 22 bp, synthetic construct
  misc_feature 1..22: note = chemically synthesized
  source 1..22: mol_type = other DNA
tcatctgtattccttgttctcc

SEQ ID NO: 160185 - DNA, 22 bp, synthetic construct
  misc_feature 1..22: note = chemically synthesized
  source 1..22: mol_type = other DNA
catctgtattccttgttctcct

SEQ ID NO: 160186 - DNA, 22 bp, synthetic construct
  misc_feature 1..22: note = chemically synthesized
  source 1..22: mol_type = other DNA
atctgtattccttgttctcctg

SEQ ID NO: 160187 - DNA, 22 bp, synthetic construct
  misc_feature 1..22: note = chemically synthesized
  source 1..22: mol_type = other DNA
tattccttgttctcctggaaat

SEQ ID NO: 160188 - DNA, 22 bp, synthetic construct
  misc_feature 1..22: note = chemically synthesized
  source 1..22: mol_type = other DNA
cttgttctcctggaaatccatt

SEQ ID NO: 160189 - DNA, 22 bp, synthetic construct
  misc_feature 1..22: note = chemically synthesized
  source 1..22: mol_type = other DNA
gttctcctggaaatccattata

SEQ ID NO: 160190 - DNA, 22 bp, synthetic construct
  misc_feature 1..22: note = chemically synthesized
  source 1..22: mol_type = other DNA
ttctcctggaaatccattataa

SEQ ID NO: 160191 - DNA, 22 bp, synthetic construct
  misc_feature 1..22: note = chemically synthesized
  source 1..22: mol_type = other DNA
tcctggaaatccattataaata

SEQ ID NO: 160192 - DNA, 22 bp, synthetic construct
  misc_feature 1..22: note = chemically synthesized
  source 1..22: mol_type = other DNA
ctggaaatccattataaatatt

SEQ ID NO: 160193 - DNA, 22 bp, synthetic construct
  misc_feature 1..22: note = chemically synthesized
  source 1..22: mol_type = other DNA
gaaatccattataaatattctc

SEQ ID NO: 160194 - DNA, 22 bp, synthetic construct
  misc_feature 1..22: note = chemically synthesized
  source 1..22: mol_type = other DNA
taaatattctccaccattagta

SEQ ID NO: 160195 - DNA, 22 bp, synthetic construct
  misc_feature 1..22: note = chemically synthesized
  source 1..22: mol_type = other DNA
tccaccattagtatgcttccta

SEQ ID NO: 160196 - DNA, 22 bp, synthetic construct
  misc_feature 1..22: note = chemically synthesized
  source 1..22: mol_type = other DNA
caccattagtatgcttcctaaa

SEQ ID NO: 160197 - DNA, 22 bp, synthetic construct
  misc_feature 1..22: note = chemically synthesized
  source 1..22: mol_type = other DNA
gtatgcttcctaaatttgccaa

SEQ ID NO: 160198 - DNA, 22 bp, synthetic construct
  misc_feature 1..22: note = chemically synthesized
  source 1..22: mol_type = other DNA
cctaaatttgccaatgtctaaa

SEQ ID NO: 160199 - DNA, 22 bp, synthetic construct
  misc_feature 1..22: note = chemically synthesized
  source 1..22: mol_type = other DNA
ctaaatttgccaatgtctaaac

SEQ ID NO: 160200 - DNA, 22 bp, synthetic construct
  misc_feature 1..22: note = chemically synthesized
  source 1..22: mol_type = other DNA
aatttgccaatgtctaaacatt

SEQ ID NO: 160201 - DNA, 22 bp, synthetic construct
  misc_feature 1..22: note = chemically synthesized
  source 1..22: mol_type = other DNA
gccaatgtctaaacattatatc

SEQ ID NO: 160202 - DNA, 22 bp, synthetic construct
  misc_feature 1..22: note = chemically synthesized
  source 1..22: mol_type = other DNA
ccaatgtctaaacattatatca

SEQ ID NO: 160203 - DNA, 22 bp, synthetic construct
  misc_feature 1..22: note = chemically synthesized
  source 1..22: mol_type = other DNA
aacattatatcaagtgtctctt

SEQ ID NO: 160204 - DNA, 22 bp, synthetic construct
  misc_feature 1..22: note = chemically synthesized
  source 1..22: mol_type = other DNA
tatcaagtgtctcttagctaca

SEQ ID NO: 160205 - DNA, 22 bp, synthetic construct
  misc_feature 1..22: note = chemically synthesized
  source 1..22: mol_type = other DNA
ttagctacattcaagaaagcct

SEQ ID NO: 160206 - DNA, 22 bp, synthetic construct
  misc_feature 1..22: note = chemically synthesized
  source 1..22: mol_type = other DNA
agctacattcaagaaagcctag

SEQ ID NO: 160207 - DNA, 22 bp, synthetic construct
  misc_feature 1..22: note = chemically synthesized
  source 1..22: mol_type = other DNA
gctacattcaagaaagcctaga

SEQ ID NO: 160208 - DNA, 22 bp, synthetic construct
  misc_feature 1..22: note = chemically synthesized
  source 1..22: mol_type = other DNA
cattcaagaaagcctagaaacc

SEQ ID NO: 160209 - DNA, 22 bp, synthetic construct
  misc_feature 1..22: note = chemically synthesized
  source 1..22: mol_type = other DNA
aagaaagcctagaaaccagctg

SEQ ID NO: 160210 - DNA, 22 bp, synthetic construct
  misc_feature 1..22: note = chemically synthesized
  source 1..22: mol_type = other DNA
gaaaccagctgtaaaatgtcaa

SEQ ID NO: 160211 - DNA, 22 bp, synthetic construct
  misc_feature 1..22: note = chemically synthesized
  source 1..22: mol_type = other DNA
taaaatgtcaaggagaatagtg

SEQ ID NO: 160212 - DNA, 22 bp, synthetic construct
  misc_feature 1..22: note = chemically synthesized
  source 1..22: mol_type = other DNA
gcttagaatttatcagatactt

SEQ ID NO: 160213 - DNA, 22 bp, synthetic construct
  misc_feature 1..22: note = chemically synthesized
  source 1..22: mol_type = other DNA
cttagaatttatcagatactta

SEQ ID NO: 160214 - DNA, 22 bp, synthetic construct
  misc_feature 1..22: note = chemically synthesized
  source 1..22: mol_type = other DNA
agaatttatcagatacttacgt

SEQ ID NO: 160215 - DNA, 22 bp, synthetic construct
  misc_feature 1..22: note = chemically synthesized
  source 1..22: mol_type = other DNA
gaatttatcagatacttacgtg

SEQ ID NO: 160216 - DNA, 22 bp, synthetic construct
  misc_feature 1..22: note = chemically synthesized
  source 1..22: mol_type = other DNA
atcagatacttacgtgataaat

SEQ ID NO: 160217 - DNA, 22 bp, synthetic construct
  misc_feature 1..22: note = chemically synthesized
  source 1..22: mol_type = other DNA
tcagatacttacgtgataaatg

SEQ ID NO: 160218 - DNA, 22 bp, synthetic construct
  misc_feature 1..22: note = chemically synthesized
  source 1..22: mol_type = other DNA
acgtgataaatgaaattgtaat

SEQ ID NO: 160219 - DNA, 22 bp, synthetic construct
  misc_feature 1..22: note = chemically synthesized
  source 1..22: mol_type = other DNA
cgtgataaatgaaattgtaatg

SEQ ID NO: 160220 - DNA, 22 bp, synthetic construct
  misc_feature 1..22: note = chemically synthesized
  source 1..22: mol_type = other DNA
taatgcataatcccattttact

SEQ ID NO: 160221 - DNA, 22 bp, synthetic construct
  misc_feature 1..22: note = chemically synthesized
  source 1..22: mol_type = other DNA
tactaataatttaaaggtaaga

SEQ ID NO: 160222 - DNA, 22 bp, synthetic construct
  misc_feature 1..22: note = chemically synthesized
  source 1..22: mol_type = other DNA
actaataatttaaaggtaagac

SEQ ID NO: 160223 - DNA, 22 bp, synthetic construct
  misc_feature 1..22: note = chemically synthesized
  source 1..22: mol_type = other DNA
ctaataatttaaaggtaagact

SEQ ID NO: 160224 - DNA, 22 bp, synthetic construct
  misc_feature 1..22: note = chemically synthesized
  source 1..22: mol_type = other DNA
ataatttaaaggtaagactata

SEQ ID NO: 160225 - DNA, 22 bp, synthetic construct
  misc_feature 1..22: note = chemically synthesized
  source 1..22: mol_type = other DNA
aaaggtaagactataatttttt

SEQ ID NO: 160226 - DNA, 22 bp, synthetic construct
  misc_feature 1..22: note = chemically synthesized
  source 1..22: mol_type = other DNA
aaggtaagactataattttttt

SEQ ID NO: 160227 - DNA, 22 bp, synthetic construct
  misc_feature 1..22: note = chemically synthesized
  source 1..22: mol_type = other DNA
taatttttttcatttcatttag

SEQ ID NO: 160228 - DNA, 22 bp, synthetic construct
  misc_feature 1..22: note = chemically synthesized
  source 1..22: mol_type = other DNA
ttttcatttcatttagaatata

SEQ ID NO: 160229 - DNA, 22 bp, synthetic construct
  misc_feature 1..22: note = chemically synthesized
  source 1..22: mol_type = other DNA
tttcatttcatttagaatatat

SEQ ID NO: 160230 - DNA, 22 bp, synthetic construct
  misc_feature 1..22: note = chemically synthesized
  source 1..22: mol_type = other DNA
ttcatttcatttagaatatata

SEQ ID NO: 160231 - DNA, 22 bp, synthetic construct
  misc_feature 1..22: note = chemically synthesized
  source 1..22: mol_type = other DNA
tcatttcatttagaatatataa

SEQ ID NO: 160232 - DNA, 22 bp, synthetic construct
  misc_feature 1..22: note = chemically synthesized
  source 1..22: mol_type = other DNA
catttcatttagaatatataac

SEQ ID NO: 160233 - DNA, 22 bp, synthetic construct
  misc_feature 1..22: note = chemically synthesized
  source 1..22: mol_type = other DNA
atttcatttagaatatataaca

SEQ ID NO: 160234 - DNA, 22 bp, synthetic construct
  misc_feature 1..22: note = chemically synthesized
  source 1..22: mol_type = other DNA
catttagaatatataacatctc

SEQ ID NO: 160235 - DNA, 22 bp, synthetic construct
  misc_feature 1..22: note = chemically synthesized
  source 1..22: mol_type = other DNA
atttagaatatataacatctca

SEQ ID NO: 160236 - DNA, 22 bp, synthetic construct
  misc_feature 1..22: note = chemically synthesized
  source 1..22: mol_type = other DNA
agaatatataacatctcactca

SEQ ID NO: 160237 - DNA, 22 bp, synthetic construct
  misc_feature 1..22: note = chemically synthesized
  source 1..22: mol_type = other DNA
gaatatataacatctcactcat

SEQ ID NO: 160238 - DNA, 22 bp, synthetic construct
  misc_feature 1..22: note = chemically synthesized
  source 1..22: mol_type = other DNA
actcataaatagtaggaatata

SEQ ID NO: 160239 - DNA, 22 bp, synthetic construct
  misc_feature 1..22: note = chemically synthesized
  source 1..22: mol_type = other DNA
ataaatagtaggaatataatga

SEQ ID NO: 160240 - DNA, 22 bp, synthetic construct
  misc_feature 1..22: note = chemically synthesized
  source 1..22: mol_type = other DNA
ttttttgaaagaaaaagaagga

SEQ ID NO: 160241 - DNA, 22 bp, synthetic construct
  misc_feature 1..22: note = chemically synthesized
  source 1..22: mol_type = other DNA
tttgaaagaaaaagaaggaagg

SEQ ID NO: 160242 - DNA, 22 bp, synthetic construct
  misc_feature 1..22: note = chemically synthesized
  source 1..22: mol_type = other DNA
ttgaaagaaaaagaaggaagga

SEQ ID NO: 160243 - DNA, 22 bp, synthetic construct
  misc_feature 1..22: note = chemically synthesized
  source 1..22: mol_type = other DNA
tgaaagaaaaagaaggaaggaa

SEQ ID NO: 160244 - DNA, 22 bp, synthetic construct
  misc_feature 1..22: note = chemically synthesized
  source 1..22: mol_type = other DNA
gaaagaaaaagaaggaaggaaa

SEQ ID NO: 160245 - DNA, 22 bp, synthetic construct
  misc_feature 1..22: note = chemically synthesized
  source 1..22: mol_type = other DNA
aaagaaaaagaaggaaggaaag

SEQ ID NO: 160246 - DNA, 22 bp, synthetic construct
  misc_feature 1..22: note = chemically synthesized
  source 1..22: mol_type = other DNA
actcaaatgttcaacaacttgc

SEQ ID NO: 160247 - DNA, 22 bp, synthetic construct
  misc_feature 1..22: note = chemically synthesized
  source 1..22: mol_type = other DNA
ctcaaatgttcaacaacttgct

SEQ ID NO: 160248 - DNA, 22 bp, synthetic construct
  misc_feature 1..22: note = chemically synthesized
  source 1..22: mol_type = other DNA
aaatgttcaacaacttgcttcc

SEQ ID NO: 160249 - DNA, 22 bp, synthetic construct
  misc_feature 1..22: note = chemically synthesized
  source 1..22: mol_type = other DNA
aacaacttgcttccagctttac

SEQ ID NO: 160250 - DNA, 22 bp, synthetic construct
  misc_feature 1..22: note = chemically synthesized
  source 1..22: mol_type = other DNA
gcttccagctttacatttgtag

SEQ ID NO: 160251 - DNA, 22 bp, synthetic construct
  misc_feature 1..22: note = chemically synthesized
  source 1..22: mol_type = other DNA
cttccagctttacatttgtagg

SEQ ID NO: 160252 - DNA, 22 bp, synthetic construct
  misc_feature 1..22: note = chemically synthesized
  source 1..22: mol_type = other DNA
ccagctttacatttgtaggact

SEQ ID NO: 160253 - DNA, 22 bp, synthetic construct
  misc_feature 1..22: note = chemically synthesized
  source 1..22: mol_type = other DNA
cagctttacatttgtaggactt

SEQ ID NO: 160254 - DNA, 22 bp, synthetic construct
  misc_feature 1..22: note = chemically synthesized
  source 1..22: mol_type = other DNA
tacatttgtaggacttagaaat

SEQ ID NO: 160255 - DNA, 22 bp, synthetic construct
  misc_feature 1..22: note = chemically synthesized
  source 1..22: mol_type = other DNA
acatttgtaggacttagaaatg

SEQ ID NO: 160256 - DNA, 22 bp, synthetic construct
  misc_feature 1..22: note = chemically synthesized
  source 1..22: mol_type = other DNA
catttgtaggacttagaaatgt

SEQ ID NO: 160257 - DNA, 22 bp, synthetic construct
  misc_feature 1..22: note = chemically synthesized
  source 1..22: mol_type = other DNA
gtaggacttagaaatgtccatt

SEQ ID NO: 160258 - DNA, 22 bp, synthetic construct
  misc_feature 1..22: note = chemically synthesized
  source 1..22: mol_type = other DNA
taggacttagaaatgtccatta

SEQ ID NO: 160259 - DNA, 22 bp, synthetic construct
  misc_feature 1..22: note = chemically synthesized
  source 1..22: mol_type = other DNA
agaaatgtccattataatttgt

SEQ ID NO: 160260 - DNA, 22 bp, synthetic construct
  misc_feature 1..22: note = chemically synthesized
  source 1..22: mol_type = other DNA
gaaatgtccattataatttgtc

SEQ ID NO: 160261 - DNA, 22 bp, synthetic construct
  misc_feature 1..22: note = chemically synthesized
  source 1..22: mol_type = other DNA
taatttgtcactataagaatgt

SEQ ID NO: 160262 - DNA, 22 bp, synthetic construct
  misc_feature 1..22: note = chemically synthesized
  source 1..22: mol_type = other DNA
gtcactataagaatgttactta

SEQ ID NO: 160263 - DNA, 22 bp, synthetic construct
  misc_feature 1..22: note = chemically synthesized
  source 1..22: mol_type = other DNA
tcactataagaatgttacttaa

SEQ ID NO: 160264 - DNA, 22 bp, synthetic construct
  misc_feature 1..22: note = chemically synthesized
  source 1..22: mol_type = other DNA
taagaatgttacttaatttact

SEQ ID NO: 160265 - DNA, 22 bp, synthetic construct
  misc_feature 1..22: note = chemically synthesized
  source 1..22: mol_type = other DNA
cttaatttactaaaagataaaa

SEQ ID NO: 160266 - DNA, 22 bp, synthetic construct
  misc_feature 1..22: note = chemically synthesized
  source 1..22: mol_type = other DNA
aatttactaaaagataaaaaaa

SEQ ID NO: 160267 - DNA, 22 bp, synthetic construct
  misc_feature 1..22: note = chemically synthesized
  source 1..22: mol_type = other DNA
atttactaaaagataaaaaaaa

SEQ ID NO: 160268 - DNA, 22 bp, synthetic construct
  misc_feature 1..22: note = chemically synthesized
  source 1..22: mol_type = other DNA
actaaaagataaaaaaaacttc

SEQ ID NO: 160269 - DNA, 22 bp, synthetic construct
  misc_feature 1..22: note = chemically synthesized
  source 1..22: mol_type = other DNA
ctaaaagataaaaaaaacttca

SEQ ID NO: 160270 - DNA, 22 bp, synthetic construct
  misc_feature 1..22: note = chemically synthesized
  source 1..22: mol_type = other DNA
aaagataaaaaaaacttcaata

SEQ ID NO: 160271 - DNA, 22 bp, synthetic construct
  misc_feature 1..22: note = chemically synthesized
  source 1..22: mol_type = other DNA
caataaaataaaatgggaagaa

SEQ ID NO: 160272 - DNA, 22 bp, synthetic construct
  misc_feature 1..22: note = chemically synthesized
  source 1..22: mol_type = other DNA
aataaaataaaatgggaagaat

SEQ ID NO: 160273 - DNA, 22 bp, synthetic construct
  misc_feature 1..22: note = chemically synthesized
  source 1..22: mol_type = other DNA
aagaagactgaggaagtaattg

SEQ ID NO: 160274 - DNA, 22 bp, synthetic construct
  misc_feature 1..22: note = chemically synthesized
  source 1..22: mol_type = other DNA
aggaagtaattgtgtggtaaaa

SEQ ID NO: 160275 - DNA, 22 bp, synthetic construct
  misc_feature 1..22: note = chemically synthesized
  source 1..22: mol_type = other DNA
tgtggtaaaaagtagttatgaa

SEQ ID NO: 160276 - DNA, 22 bp, synthetic construct
  misc_feature 1..22: note = chemically synthesized
  source 1..22: mol_type = other DNA
tgaatacagatttttcttttct

SEQ ID NO: 160277 - DNA, 22 bp, synthetic construct
  misc_feature 1..22: note = chemically synthesized
  source 1..22: mol_type = other DNA
ttcttttctgaataaaaagaga

SEQ ID NO: 160278 - DNA, 22 bp, synthetic construct
  misc_feature 1..22: note = chemically synthesized
  source 1..22: mol_type = other DNA
tcttttctgaataaaaagagaa

SEQ ID NO: 160279 - DNA, 22 bp, synthetic construct
  misc_feature 1..22: note = chemically synthesized
  source 1..22: mol_type = other DNA
cttttctgaataaaaagagaaa

SEQ ID NO: 160280 - DNA, 22 bp, synthetic construct
  misc_feature 1..22: note = chemically synthesized
  source 1..22: mol_type = other DNA
ttttctgaataaaaagagaaaa

SEQ ID NO: 160281 - DNA, 22 bp, synthetic construct
  misc_feature 1..22: note = chemically synthesized
  source 1..22: mol_type = other DNA
ttctgaataaaaagagaaaaac

SEQ ID NO: 160282 - DNA, 22 bp, synthetic construct
  misc_feature 1..22: note = chemically synthesized
  source 1..22: mol_type = other DNA
tctgaataaaaagagaaaaacc

SEQ ID NO: 160283 - DNA, 22 bp, synthetic construct
  misc_feature 1..22: note = chemically synthesized
  source 1..22: mol_type = other DNA
ctgaataaaaagagaaaaacct

SEQ ID NO: 160284 - DNA, 22 bp, synthetic construct
  misc_feature 1..22: note = chemically synthesized
  source 1..22: mol_type = other DNA
tgaataaaaagagaaaaacctt

SEQ ID NO: 160285 - DNA, 22 bp, synthetic construct
  misc_feature 1..22: note = chemically synthesized
  source 1..22: mol_type = other DNA
aataaaaagagaaaaaccttgc

SEQ ID NO: 160286 - DNA, 22 bp, synthetic construct
  misc_feature 1..22: note = chemically synthesized
  source 1..22: mol_type = other DNA
gcctcagtgaaaatgtcaccaa

SEQ ID NO: 160287 - DNA, 22 bp, synthetic construct
  misc_feature 1..22: note = chemically synthesized
  source 1..22: mol_type = other DNA
cctcagtgaaaatgtcaccaag

SEQ ID NO: 160288 - DNA, 22 bp, synthetic construct
  misc_feature 1..22: note = chemically synthesized
  source 1..22: mol_type = other DNA
agtgaaaatgtcaccaagatat

SEQ ID NO: 160289 - DNA, 22 bp, synthetic construct
  misc_feature 1..22: note = chemically synthesized
  source 1..22: mol_type = other DNA
atttaaataggaattggcatag

SEQ ID NO: 160290 - DNA, 22 bp, synthetic construct
  misc_feature 1..22: note = chemically synthesized
  source 1..22: mol_type = other DNA
tttaaataggaattggcataga

SEQ ID NO: 160291 - DNA, 22 bp, synthetic construct
  misc_feature 1..22: note = chemically synthesized
  source 1..22: mol_type = other DNA
aaataggaattggcatagaaac

SEQ ID NO: 160292 - DNA, 22 bp, synthetic construct
  misc_feature 1..22: note = chemically synthesized
  source 1..22: mol_type = other DNA
aataggaattggcatagaaaca

SEQ ID NO: 160293 - DNA, 22 bp, synthetic construct
  misc_feature 1..22: note = chemically synthesized
  source 1..22: mol_type = other DNA
gcatagaaacatgtttgcatta

SEQ ID NO: 160294 - DNA, 22 bp, synthetic construct
  misc_feature 1..22: note = chemically synthesized
  source 1..22: mol_type = other DNA
gcattaaatgggctttagaatt

SEQ ID NO: 160295 - DNA, 22 bp, synthetic construct
  misc_feature 1..22: note = chemically synthesized
  source 1..22: mol_type = other DNA
cattaaatgggctttagaattt

SEQ ID NO: 160296 - DNA, 22 bp, synthetic construct
  misc_feature 1..22: note = chemically synthesized
  source 1..22: mol_type = other DNA
aatgggctttagaattttgcaa

SEQ ID NO: 160297 - DNA, 22 bp, synthetic construct
  misc_feature 1..22: note = chemically synthesized
  source 1..22: mol_type = other DNA
tagaattttgcaaatagaaatg

SEQ ID NO: 160298 - DNA, 22 bp, synthetic construct
  misc_feature 1..22: note = chemically synthesized
  source 1..22: mol_type = other DNA
agaattttgcaaatagaaatgg

SEQ ID NO: 160299 - DNA, 22 bp, synthetic construct
  misc_feature 1..22: note = chemically synthesized
  source 1..22: mol_type = other DNA
gaattttgcaaatagaaatggc

SEQ ID NO: 160300 - DNA, 22 bp, synthetic construct
  misc_feature 1..22: note = chemically synthesized
  source 1..22: mol_type = other DNA
tgcaaatagaaatggcagaaaa

SEQ ID NO: 160301 - DNA, 22 bp, synthetic construct
  misc_feature 1..22: note = chemically synthesized
  source 1..22: mol_type = other DNA
gcaaatagaaatggcagaaaag

SEQ ID NO: 160302 - DNA, 22 bp, synthetic construct
  misc_feature 1..22: note = chemically synthesized
  source 1..22: mol_type = other DNA
caaatagaaatggcagaaaagg

SEQ ID NO: 160303 - DNA, 22 bp, synthetic construct
  misc_feature 1..22: note = chemically synthesized
  source 1..22: mol_type = other DNA
gtaaaaaaattttttgcatatg

SEQ ID NO: 160304 - DNA, 22 bp, synthetic construct
  misc_feature 1..22: note = chemically synthesized
  source 1..22: mol_type = other DNA
taaaaaaattttttgcatatga

SEQ ID NO: 160305 - DNA, 22 bp, synthetic construct
  misc_feature 1..22: note = chemically synthesized
  source 1..22: mol_type = other DNA
tttgcatatgaattattctgca

SEQ ID NO: 160306 - DNA, 22 bp, synthetic construct
  misc_feature 1..22: note = chemically synthesized
  source 1..22: mol_type = other DNA
ttgcatatgaattattctgcat

SEQ ID NO: 160307 - DNA, 22 bp, synthetic construct
  misc_feature 1..22: note = chemically synthesized
  source 1..22: mol_type = other DNA
tgcatatgaattattctgcatt

SEQ ID NO: 160308 - DNA, 22 bp, synthetic construct
  misc_feature 1..22: note = chemically synthesized
  source 1..22: mol_type = other DNA
gcatatgaattattctgcattt

SEQ ID NO: 160309 - DNA, 22 bp, synthetic construct
  misc_feature 1..22: note = chemically synthesized
  source 1..22: mol_type = other DNA
catatgaattattctgcattta

SEQ ID NO: 160310 - DNA, 22 bp, synthetic construct
  misc_feature 1..22: note = chemically synthesized
  source 1..22: mol_type = other DNA
ttctgcatttagcctgtgggaa

SEQ ID NO: 160311 - DNA, 22 bp, synthetic construct
  misc_feature 1..22: note = chemically synthesized
  source 1..22: mol_type = other DNA
tgcatttagcctgtgggaaaag

SEQ ID NO: 160312 - DNA, 22 bp, synthetic construct
  misc_feature 1..22: note = chemically synthesized
  source 1..22: mol_type = other DNA
catttagcctgtgggaaaagag

SEQ ID NO: 160313 - DNA, 22 bp, synthetic construct
  misc_feature 1..22: note = chemically synthesized
  source 1..22: mol_type = other DNA
agcctgtgggaaaagagaaaaa

SEQ ID NO: 160314 - DNA, 22 bp, synthetic construct
  misc_feature 1..22: note = chemically synthesized
  source 1..22: mol_type = other DNA
gcctgtgggaaaagagaaaaag

SEQ ID NO: 160315 - DNA, 22 bp, synthetic construct
  misc_feature 1..22: note = chemically synthesized
  source 1..22: mol_type = other DNA
tgggaaaagagaaaaagagaga

SEQ ID NO: 160316 - DNA, 22 bp, synthetic construct
  misc_feature 1..22: note = chemically synthesized
  source 1..22: mol_type = other DNA
ctgcaagtgtagaaataattac

SEQ ID NO: 160317 - DNA, 22 bp, synthetic construct
  misc_feature 1..22: note = chemically synthesized
  source 1..22: mol_type = other DNA
tgcaagtgtagaaataattacg

SEQ ID NO: 160318 - DNA, 22 bp, synthetic construct
  misc_feature 1..22: note = chemically synthesized
  source 1..22: mol_type = other DNA
caagtgtagaaataattacggg

SEQ ID NO: 160319 - DNA, 22 bp, synthetic construct
  misc_feature 1..22: note = chemically synthesized
  source 1..22: mol_type = other DNA
cggggatattaggtgccagtga

SEQ ID NO: 160320 - DNA, 22 bp, synthetic construct
  misc_feature 1..22: note = chemically synthesized
  source 1..22: mol_type = other DNA
ggtgccagtgaacccaagaggg

SEQ ID NO: 160321 - DNA, 22 bp, synthetic construct
  misc_feature 1..22: note = chemically synthesized
  source 1..22: mol_type = other DNA
acttaaaatttgctgggtccct

SEQ ID NO: 160322 - DNA, 22 bp, synthetic construct
  misc_feature 1..22: note = chemically synthesized
  source 1..22: mol_type = other DNA
aaaatttgctgggtccctcgtg

SEQ ID NO: 160323 - DNA, 22 bp, synthetic construct
  misc_feature 1..22: note = chemically synthesized
  source 1..22: mol_type = other DNA
aaatttgctgggtccctcgtgg

SEQ ID NO: 160324 - DNA, 22 bp, synthetic construct
  misc_feature 1..22: note = chemically synthesized
  source 1..22: mol_type = other DNA
gctgggtccctcgtggttttgg

SEQ ID NO: 160325 - DNA, 22 bp, synthetic construct
  misc_feature 1..22: note = chemically synthesized
  source 1..22: mol_type = other DNA
ctgggtccctcgtggttttggc

SEQ ID NO: 160326 - DNA, 22 bp, synthetic construct
  misc_feature 1..22: note = chemically synthesized
  source 1..22: mol_type = other DNA
ggtccctcgtggttttggctat

SEQ ID NO: 160327 - DNA, 22 bp, synthetic construct
  misc_feature 1..22: note = chemically synthesized
  source 1..22: mol_type = other DNA
gtggttttggctatcaactagg

SEQ ID NO: 160328 - DNA, 22 bp, synthetic construct
  misc_feature 1..22: note = chemically synthesized
  source 1..22: mol_type = other DNA
tggctatcaactaggaaatccc

SEQ ID NO: 160329 - DNA, 22 bp, synthetic construct
  misc_feature 1..22: note = chemically synthesized
  source 1..22: mol_type = other DNA
ggctatcaactaggaaatccct

SEQ ID NO: 160330 - DNA, 22 bp, synthetic construct
  misc_feature 1..22: note = chemically synthesized
  source 1..22: mol_type = other DNA
gctatcaactaggaaatccctc

SEQ ID NO: 160331 - DNA, 22 bp, synthetic construct
  misc_feature 1..22: note = chemically synthesized
  source 1..22: mol_type = other DNA
tcaactaggaaatccctcattt

SEQ ID NO: 160332 - DNA, 22 bp, synthetic construct
  misc_feature 1..22: note = chemically synthesized
  source 1..22: mol_type = other DNA
ggaaatccctcatttcatgctc

SEQ ID NO: 160333 - DNA, 22 bp, synthetic construct
  misc_feature 1..22: note = chemically synthesized
  source 1..22: mol_type = other DNA
atttcatgctcataactcctcc

SEQ ID NO: 160334 - DNA, 22 bp, synthetic construct
  misc_feature 1..22: note = chemically synthesized
  source 1..22: mol_type = other DNA
catgctcataactcctcctact

SEQ ID NO: 160335 - DNA, 22 bp, synthetic construct
  misc_feature 1..22: note = chemically synthesized
  source 1..22: mol_type = other DNA
atgctcataactcctcctactt

SEQ ID NO: 160336 - DNA, 22 bp, synthetic construct
  misc_feature 1..22: note = chemically synthesized
  source 1..22: mol_type = other DNA
ataactcctcctacttctccac

SEQ ID NO: 160337 - DNA, 22 bp, synthetic construct
  misc_feature 1..22: note = chemically synthesized
  source 1..22: mol_type = other DNA
ctcctacttctccacacattca

SEQ ID NO: 160338 - DNA, 22 bp, synthetic construct
  misc_feature 1..22: note = chemically synthesized
  source 1..22: mol_type = other DNA
ctacttctccacacattcataa

SEQ ID NO: 160339 - DNA, 22 bp, synthetic construct
  misc_feature 1..22: note = chemically synthesized
  source 1..22: mol_type = other DNA
cttctccacacattcataaagg

SEQ ID NO: 160340 - DNA, 22 bp, synthetic construct
  misc_feature 1..22: note = chemically synthesized
  source 1..22: mol_type = other DNA
ctccacacattcataaaggaat

SEQ ID NO: 160341 - DNA, 22 bp, synthetic construct
  misc_feature 1..22: note = chemically synthesized
  source 1..22: mol_type = other DNA
tccacacattcataaaggaata

SEQ ID NO: 160342 - DNA, 22 bp, synthetic construct
  misc_feature 1..22: note = chemically synthesized
  source 1..22: mol_type = other DNA
cacacattcataaaggaatatt

SEQ ID NO: 160343 - DNA, 22 bp, synthetic construct
  misc_feature 1..22: note = chemically synthesized
  source 1..22: mol_type = other DNA
ataaaggaatattaaattggtg

SEQ ID NO: 160344 - DNA, 22 bp, synthetic construct
  misc_feature 1..22: note = chemically synthesized
  source 1..22: mol_type = other DNA
aattggtggatagccacttttt

SEQ ID NO: 160345 - DNA, 22 bp, synthetic construct
  misc_feature 1..22: note = chemically synthesized
  source 1..22: mol_type = other DNA
gtggatagccacttttttctcc

SEQ ID NO: 160346 - DNA, 22 bp, synthetic construct
  misc_feature 1..22: note = chemically synthesized
  source 1..22: mol_type = other DNA
ttttctccaatttgagctcaat

SEQ ID NO: 160347 - DNA, 22 bp, synthetic construct
  misc_feature 1..22: note = chemically synthesized
  source 1..22: mol_type = other DNA
tttctccaatttgagctcaata

SEQ ID NO: 160348 - DNA, 22 bp, synthetic construct
  misc_feature 1..22: note = chemically synthesized
  source 1..22: mol_type = other DNA
ttctccaatttgagctcaataa

SEQ ID NO: 160349 - DNA, 22 bp, synthetic construct
  misc_feature 1..22: note = chemically synthesized
  source 1..22: mol_type = other DNA
tctccaatttgagctcaataaa

SEQ ID NO: 160350 - DNA, 22 bp, synthetic construct
  misc_feature 1..22: note = chemically synthesized
  source 1..22: mol_type = other DNA
ctccaatttgagctcaataaat

SEQ ID NO: 160351 - DNA, 22 bp, synthetic construct
  misc_feature 1..22: note = chemically synthesized
  source 1..22: mol_type = other DNA
tccaatttgagctcaataaatt

SEQ ID NO: 160352 - DNA, 22 bp, synthetic construct
  misc_feature 1..22: note = chemically synthesized
  source 1..22: mol_type = other DNA
caatttgagctcaataaattca

SEQ ID NO: 160353 - DNA, 22 bp, synthetic construct
  misc_feature 1..22: note = chemically synthesized
  source 1..22: mol_type = other DNA
gagctcaataaattcatcccgt

SEQ ID NO: 160354 - DNA, 22 bp, synthetic construct
  misc_feature 1..22: note = chemically synthesized
  source 1..22: mol_type = other DNA
agctcaataaattcatcccgtg

SEQ ID NO: 160355 - DNA, 22 bp, synthetic construct
  misc_feature 1..22: note = chemically synthesized
  source 1..22: mol_type = other DNA
aataaattcatcccgtgtttca

SEQ ID NO: 160356 - DNA, 22 bp, synthetic construct
  misc_feature 1..22: note = chemically synthesized
  source 1..22: mol_type = other DNA
atcccgtgtttcagaatgctac

SEQ ID NO: 160357 - DNA, 22 bp, synthetic construct
  misc_feature 1..22: note = chemically synthesized
  source 1..22: mol_type = other DNA
cagaatgctacagacctcacta

SEQ ID NO: 160358 - DNA, 22 bp, synthetic construct
  misc_feature 1..22: note = chemically synthesized
  source 1..22: mol_type = other DNA
agaatgctacagacctcactat

SEQ ID NO: 160359 - DNA, 22 bp, synthetic construct
  misc_feature 1..22: note = chemically synthesized
  source 1..22: mol_type = other DNA
cagacctcactatgagttttac

SEQ ID NO: 160360 - DNA, 22 bp, synthetic construct
  misc_feature 1..22: note = chemically synthesized
  source 1..22: mol_type = other DNA
actatgagttttactgggggat

SEQ ID NO: 160361 - DNA, 22 bp, synthetic construct
  misc_feature 1..22: note = chemically synthesized
  source 1..22: mol_type = other DNA
tgagttttactgggggatgagc

SEQ ID NO: 160362 - DNA, 22 bp, synthetic construct
  misc_feature 1..22: note = chemically synthesized
  source 1..22: mol_type = other DNA
tactgggggatgagcacacaaa

SEQ ID NO: 160363 - DNA, 22 bp, synthetic construct
  misc_feature 1..22: note = chemically synthesized
  source 1..22: mol_type = other DNA
actgggggatgagcacacaaag

SEQ ID NO: 160364 - DNA, 22 bp, synthetic construct
  misc_feature 1..22: note = chemically synthesized
  source 1..22: mol_type = other DNA
ctgggggatgagcacacaaaga

SEQ ID NO: 160365 - DNA, 22 bp, synthetic construct
  misc_feature 1..22: note = chemically synthesized
  source 1..22: mol_type = other DNA
ggggatgagcacacaaagatgg

SEQ ID NO: 160366 - DNA, 22 bp, synthetic construct
  misc_feature 1..22: note = chemically synthesized
  source 1..22: mol_type = other DNA
agacagacttccagaagaagaa

SEQ ID NO: 160367 - DNA, 22 bp, synthetic construct
  misc_feature 1..22: note = chemically synthesized
  source 1..22: mol_type = other DNA
ccagaagaagaagaagatgtcc

SEQ ID NO: 160368 - DNA, 22 bp, synthetic construct
  misc_feature 1..22: note = chemically synthesized
  source 1..22: mol_type = other DNA
cagaagaagaagaagatgtccg

SEQ ID NO: 160369 - DNA, 22 bp, synthetic construct
  misc_feature 1..22: note = chemically synthesized
  source 1..22: mol_type = other DNA
gagataaatgaaaagtgtaaaa

SEQ ID NO: 160370 - DNA, 22 bp, synthetic construct
  misc_feature 1..22: note = chemically synthesized
  source 1..22: mol_type = other DNA
caaaatgtccacagtatattat

SEQ ID NO: 160371 - DNA, 22 bp, synthetic construct
  misc_feature 1..22: note = chemically synthesized
  source 1..22: mol_type = other DNA
tattggcacatatcctggcacc

SEQ ID NO: 160372 - DNA, 22 bp, synthetic construct
  misc_feature 1..22: note = chemically synthesized
  source 1..22: mol_type = other DNA
gcacatatcctggcaccaaaca

SEQ ID NO: 160373 - DNA, 22 bp, synthetic construct
  misc_feature 1..22: note = chemically synthesized
  source 1..22: mol_type = other DNA
gcaccaaacagagtaaaattta

SEQ ID NO: 160374 - DNA, 22 bp, synthetic construct
  misc_feature 1..22: note = chemically synthesized
  source 1..22: mol_type = other DNA
atgacattagctggatgctgtt

SEQ ID NO: 160375 - DNA, 22 bp, synthetic construct
  misc_feature 1..22: note = chemically synthesized
  source 1..22: mol_type = other DNA
tgacattagctggatgctgtta

SEQ ID NO: 160376 - DNA, 22 bp, synthetic construct
  misc_feature 1..22: note = chemically synthesized
  source 1..22: mol_type = other DNA
gctggatgctgttacacagagt

SEQ ID NO: 160377 - DNA, 22 bp, synthetic construct
  misc_feature 1..22: note = chemically synthesized
  source 1..22: mol_type = other DNA
gatgctgttacacagagtgcag

SEQ ID NO: 160378 - DNA, 22 bp, synthetic construct
  misc_feature 1..22: note = chemically synthesized
  source 1..22: mol_type = other DNA
ttacacagagtgcagacagaaa

SEQ ID NO: 160379 - DNA, 22 bp, synthetic construct
  misc_feature 1..22: note = chemically synthesized
  source 1..22: mol_type = other DNA
cacagagtgcagacagaaagta

SEQ ID NO: 160380 - DNA, 22 bp, synthetic construct
  misc_feature 1..22: note = chemically synthesized
  source 1..22: mol_type = other DNA
aagggaatgaagctggaatcct

SEQ ID NO: 160381 - DNA, 22 bp, synthetic construct
  misc_feature 1..22: note = chemically synthesized
  source 1..22: mol_type = other DNA
agggaatgaagctggaatcctt

SEQ ID NO: 160382 - DNA, 22 bp, synthetic construct
  misc_feature 1..22: note = chemically synthesized
  source 1..22: mol_type = other DNA
gaatccttggagaagaaaaatt

SEQ ID NO: 160383 - DNA, 22 bp, synthetic construct
  misc_feature 1..22: note = chemically synthesized
  source 1..22: mol_type = other DNA
ggagaagaaaaattggtgagtg

SEQ ID NO: 160384 - DNA, 22 bp, synthetic construct
  misc_feature 1..22: note = chemically synthesized
  source 1..22: mol_type = other DNA
gagaagaaaaattggtgagtga

SEQ ID NO: 160385 - DNA, 22 bp, synthetic construct
  misc_feature 1..22: note = chemically synthesized
  source 1..22: mol_type = other DNA
gtgagtgatgaatgaaagtgtt

SEQ ID NO: 160386 - DNA, 22 bp, synthetic construct
  misc_feature 1..22: note = chemically synthesized
  source 1..22: mol_type = other DNA
tgaaaaatggacaatattcttc

SEQ ID NO: 160387 - DNA, 22 bp, synthetic construct
  misc_feature 1..22: note = chemically synthesized
  source 1..22: mol_type = other DNA
ttcaggtatctggtaagagcaa

SEQ ID NO: 160388 - DNA, 22 bp, synthetic construct
  misc_feature 1..22: note = chemically synthesized
  source 1..22: mol_type = other DNA
caggtatctggtaagagcaaaa

SEQ ID NO: 160389 - DNA, 22 bp, synthetic construct
  misc_feature 1..22: note = chemically synthesized
  source 1..22: mol_type = other DNA
aggtatctggtaagagcaaaac

SEQ ID NO: 160390 - DNA, 22 bp, synthetic construct
  misc_feature 1..22: note = chemically synthesized
  source 1..22: mol_type = other DNA
gtaagagcaaaaccagctctca

SEQ ID NO: 160391 - DNA, 22 bp, synthetic construct
  misc_feature 1..22: note = chemically synthesized
  source 1..22: mol_type = other DNA
tcaataataattgaggagtaag

SEQ ID NO: 160392 - DNA, 22 bp, synthetic construct
  misc_feature 1..22: note = chemically synthesized
  source 1..22: mol_type = other DNA
aataataattgaggagtaagtc

SEQ ID NO: 160393 - DNA, 22 bp, synthetic construct
  misc_feature 1..22: note = chemically synthesized
  source 1..22: mol_type = other DNA
aggagtaagtctcacgattcca

SEQ ID NO: 160394 - DNA, 22 bp, synthetic construct
  misc_feature 1..22: note = chemically synthesized
  source 1..22: mol_type = other DNA
acgattccaagtttcctctcca

SEQ ID NO: 160395 - DNA, 22 bp, synthetic construct
  misc_feature 1..22: note = chemically synthesized
  source 1..22: mol_type = other DNA
caagtttcctctccataattta

SEQ ID NO: 160396 - DNA, 22 bp, synthetic construct
  misc_feature 1..22: note = chemically synthesized
  source 1..22: mol_type = other DNA
cctctccataatttaattacca

SEQ ID NO: 160397 - DNA, 22 bp, synthetic construct
  misc_feature 1..22: note = chemically synthesized
  source 1..22: mol_type = other DNA
ctctccataatttaattaccag

SEQ ID NO: 160398 - DNA, 22 bp, synthetic construct
  misc_feature 1..22: note = chemically synthesized
  source 1..22: mol_type = other DNA
tccataatttaattaccagctt

SEQ ID NO: 160399 - DNA, 22 bp, synthetic construct
  misc_feature 1..22: note = chemically synthesized
  source 1..22: mol_type = other DNA
cataatttaattaccagcttct

SEQ ID NO: 160400 - DNA, 22 bp, synthetic construct
  misc_feature 1..22: note = chemically synthesized
  source 1..22: mol_type = other DNA
aattaccagcttctccaataac

SEQ ID NO: 160401 - DNA, 22 bp, synthetic construct
  misc_feature 1..22: note = chemically synthesized
  source 1..22: mol_type = other DNA
attaccagcttctccaataaca

SEQ ID NO: 160402 - DNA, 22 bp, synthetic construct
  misc_feature 1..22: note = chemically synthesized
  source 1..22: mol_type = other DNA
ccagcttctccaataacaatca

SEQ ID NO: 160403 - DNA, 22 bp, synthetic construct
  misc_feature 1..22: note = chemically synthesized
  source 1..22: mol_type = other DNA
ctccaataacaatcactctatc

SEQ ID NO: 160404 - DNA, 22 bp, synthetic construct
  misc_feature 1..22: note = chemically synthesized
  source 1..22: mol_type = other DNA
tccaataacaatcactctatcc

SEQ ID NO: 160405 - DNA, 22 bp, synthetic construct
  misc_feature 1..22: note = chemically synthesized
  source 1..22: mol_type = other DNA
caataacaatcactctatccaa

SEQ ID NO: 160406 - DNA, 22 bp, synthetic construct
  misc_feature 1..22: note = chemically synthesized
  source 1..22: mol_type = other DNA
tatccaactaaccaggaactta

SEQ ID NO: 160407 - DNA, 22 bp, synthetic construct
  misc_feature 1..22: note = chemically synthesized
  source 1..22: mol_type = other DNA
tccaactaaccaggaacttaca

SEQ ID NO: 160408 - DNA, 22 bp, synthetic construct
  misc_feature 1..22: note = chemically synthesized
  source 1..22: mol_type = other DNA
accaggaacttacatacaccac

SEQ ID NO: 160409 - DNA, 22 bp, synthetic construct
  misc_feature 1..22: note = chemically synthesized
  source 1..22: mol_type = other DNA
acatacaccaccacctgcaacc

SEQ ID NO: 160410 - DNA, 22 bp, synthetic construct
  misc_feature 1..22: note = chemically synthesized
  source 1..22: mol_type = other DNA
catacaccaccacctgcaaccc

SEQ ID NO: 160411 - DNA, 22 bp, synthetic construct
  misc_feature 1..22: note = chemically synthesized
  source 1..22: mol_type = other DNA
caaccctgctatctgtgcctgt

SEQ ID NO: 160412 - DNA, 22 bp, synthetic construct
  misc_feature 1..22: note = chemically synthesized
  source 1..22: mol_type = other DNA
ctatctgtgcctgtcaggtagt

SEQ ID NO: 160413 - DNA, 22 bp, synthetic construct
  misc_feature 1..22: note = chemically synthesized
  source 1..22: mol_type = other DNA
tctgtgcctgtcaggtagtact

SEQ ID NO: 160414 - DNA, 22 bp, synthetic construct
  misc_feature 1..22: note = chemically synthesized
  source 1..22: mol_type = other DNA
tgcctgtcaggtagtactcaca

SEQ ID NO: 160415 - DNA, 22 bp, synthetic construct
  misc_feature 1..22: note = chemically synthesized
  source 1..22: mol_type = other DNA
tcaggtagtactcacatgtcag

SEQ ID NO: 160416 - DNA, 22 bp, synthetic construct
  misc_feature 1..22: note = chemically synthesized
  source 1..22: mol_type = other DNA
acatgtcagctctttggtcttg

SEQ ID NO: 160417 - DNA, 22 bp, synthetic construct
  misc_feature 1..22: note = chemically synthesized
  source 1..22: mol_type = other DNA
tttggtcttgaataagtcagac

SEQ ID NO: 160418 - DNA, 22 bp, synthetic construct
  misc_feature 1..22: note = chemically synthesized
  source 1..22: mol_type = other DNA
tggtcttgaataagtcagacat

SEQ ID NO: 160419 - DNA, 22 bp, synthetic construct
  misc_feature 1..22: note = chemically synthesized
  source 1..22: mol_type = other DNA
ggtcttgaataagtcagacatt

SEQ ID NO: 160420 - DNA, 22 bp, synthetic construct
  misc_feature 1..22: note = chemically synthesized
  source 1..22: mol_type = other DNA
gtcttgaataagtcagacattg

SEQ ID NO: 160421 - DNA, 22 bp, synthetic construct
  misc_feature 1..22: note = chemically synthesized
  source 1..22: mol_type = other DNA
gaataagtcagacattgtgatt

SEQ ID NO: 160422 - DNA, 22 bp, synthetic construct
  misc_feature 1..22: note = chemically synthesized
  source 1..22: mol_type = other DNA
aataagtcagacattgtgattg

SEQ ID NO: 160423 - DNA, 22 bp, synthetic construct
  misc_feature 1..22: note = chemically synthesized
  source 1..22: mol_type = other DNA
tgattgccattaaaggattctt

SEQ ID NO: 160424 - DNA, 22 bp, synthetic construct
  misc_feature 1..22: note = chemically synthesized
  source 1..22: mol_type = other DNA
ccattaaaggattcttattcta

SEQ ID NO: 160425 - DNA, 22 bp, synthetic construct
  misc_feature 1..22: note = chemically synthesized
  source 1..22: mol_type = other DNA
aaggattcttattctaattgtg

SEQ ID NO: 160426 - DNA, 22 bp, synthetic construct
  misc_feature 1..22: note = chemically synthesized
  source 1..22: mol_type = other DNA
ttattctaattgtgattatctt

SEQ ID NO: 160427 - DNA, 22 bp, synthetic construct
  misc_feature 1..22: note = chemically synthesized
  source 1..22: mol_type = other DNA
attctaattgtgattatctttg

SEQ ID NO: 160428 - DNA, 22 bp, synthetic construct
  misc_feature 1..22: note = chemically synthesized
  source 1..22: mol_type = other DNA
ttctaattgtgattatctttgg

SEQ ID NO: 160429 - DNA, 22 bp, synthetic construct
  misc_feature 1..22: note = chemically synthesized
  source 1..22: mol_type = other DNA
taattgtgattatctttggaga

SEQ ID NO: 160430 - DNA, 22 bp, synthetic construct
  misc_feature 1..22: note = chemically synthesized
  source 1..22: mol_type = other DNA
attgtgattatctttggagaag

SEQ ID NO: 160431 - DNA, 22 bp, synthetic construct
  misc_feature 1..22: note = chemically synthesized
  source 1..22: mol_type = other DNA
tgattatctttggagaagaaaa

SEQ ID NO: 160432 - DNA, 22 bp, synthetic construct
  misc_feature 1..22: note = chemically synthesized
  source 1..22: mol_type = other DNA
tctttggagaagaaaaaatttg

SEQ ID NO: 160433 - DNA, 22 bp, synthetic construct
  misc_feature 1..22: note = chemically synthesized
  source 1..22: mol_type = other DNA
tggagaagaaaaaatttgcccc

SEQ ID NO: 160434 - DNA, 22 bp, synthetic construct
  misc_feature 1..22: note = chemically synthesized
  source 1..22: mol_type = other DNA
ggagaagaaaaaatttgcccct

SEQ ID NO: 160435 - DNA, 22 bp, synthetic construct
  misc_feature 1..22: note = chemically synthesized
  source 1..22: mol_type = other DNA
gagaagaaaaaatttgccccta

SEQ ID NO: 160436 - DNA, 22 bp, synthetic construct
  misc_feature 1..22: note = chemically synthesized
  source 1..22: mol_type = other DNA
gcccctattagaaaaagccagt

SEQ ID NO: 160437 - DNA, 22 bp, synthetic construct
  misc_feature 1..22: note = chemically synthesized
  source 1..22: mol_type = other DNA
cccctattagaaaaagccagtg

SEQ ID NO: 160438 - DNA, 22 bp, synthetic construct
  misc_feature 1..22: note = chemically synthesized
  source 1..22: mol_type = other DNA
ttagaaaaagccagtgacttat

SEQ ID NO: 160439 - DNA, 22 bp, synthetic construct
  misc_feature 1..22: note = chemically synthesized
  source 1..22: mol_type = other DNA
gaaaaagccagtgacttatgga

SEQ ID NO: 160440 - DNA, 22 bp, synthetic construct
  misc_feature 1..22: note = chemically synthesized
  source 1..22: mol_type = other DNA
atggatgggagtgtcataaaac

SEQ ID NO: 160441 - DNA, 22 bp, synthetic construct
  misc_feature 1..22: note = chemically synthesized
  source 1..22: mol_type = other DNA
tggatgggagtgtcataaaact

SEQ ID NO: 160442 - DNA, 22 bp, synthetic construct
  misc_feature 1..22: note = chemically synthesized
  source 1..22: mol_type = other DNA
agcattggggatcaaatctgtg

SEQ ID NO: 160443 - DNA, 22 bp, synthetic construct
  misc_feature 1..22: note = chemically synthesized
  source 1..22: mol_type = other DNA
gggatcaaatctgtggaaatca

SEQ ID NO: 160444 - DNA, 22 bp, synthetic construct
  misc_feature 1..22: note = chemically synthesized
  source 1..22: mol_type = other DNA
tggaaatcaaagtatttaattg

SEQ ID NO: 160445 - DNA, 22 bp, synthetic construct
  misc_feature 1..22: note = chemically synthesized
  source 1..22: mol_type = other DNA
aattgacctactagtttacggt

SEQ ID NO: 160446 - DNA, 22 bp, synthetic construct
  misc_feature 1..22: note = chemically synthesized
  source 1..22: mol_type = other DNA
attgacctactagtttacggta

SEQ ID NO: 160447 - DNA, 22 bp, synthetic construct
  misc_feature 1..22: note = chemically synthesized
  source 1..22: mol_type = other DNA
acctactagtttacggtaaatg

SEQ ID NO: 160448 - DNA, 22 bp, synthetic construct
  misc_feature 1..22: note = chemically synthesized
  source 1..22: mol_type = other DNA
ctagtttacggtaaatgtatgt

SEQ ID NO: 160449 - DNA, 22 bp, synthetic construct
  misc_feature 1..22: note = chemically synthesized
  source 1..22: mol_type = other DNA
gtttacggtaaatgtatgttag

SEQ ID NO: 160450 - DNA, 22 bp, synthetic construct
  misc_feature 1..22: note = chemically synthesized
  source 1..22: mol_type = other DNA
acggtaaatgtatgttagctga

SEQ ID NO: 160451 - DNA, 22 bp, synthetic construct
  misc_feature 1..22: note = chemically synthesized
  source 1..22: mol_type = other DNA
cggtaaatgtatgttagctgat

SEQ ID NO: 160452 - DNA, 22 bp, synthetic construct
  misc_feature 1..22: note = chemically synthesized
  source 1..22: mol_type = other DNA
gctgatacagcctccctgtcat

SEQ ID NO: 160453 - DNA, 22 bp, synthetic construct
  misc_feature 1..22: note = chemically synthesized
  source 1..22: mol_type = other DNA
atacagcctccctgtcatgaaa

SEQ ID NO: 160454 - DNA, 22 bp, synthetic construct
  misc_feature 1..22: note = chemically synthesized
  source 1..22: mol_type = other DNA
cctgtcatgaaatgtcctctgc

SEQ ID NO: 160455 - DNA, 22 bp, synthetic construct
  misc_feature 1..22: note = chemically synthesized
  source 1..22: mol_type = other DNA
tcatgaaatgtcctctgctgat

SEQ ID NO: 160456 - DNA, 22 bp, synthetic construct
  misc_feature 1..22: note = chemically synthesized
  source 1..22: mol_type = other DNA
tgctgatttggttctttcattt

SEQ ID NO: 160457 - DNA, 22 bp, synthetic construct
  misc_feature 1..22: note = chemically synthesized
  source 1..22: mol_type = other DNA
ctgatttggttctttcatttga

SEQ ID NO: 160458 - DNA, 22 bp, synthetic construct
  misc_feature 1..22: note = chemically synthesized
  source 1..22: mol_type = other DNA
atttggttctttcatttgaagt

SEQ ID NO: 160459 - DNA, 22 bp, synthetic construct
  misc_feature 1..22: note = chemically synthesized
  source 1..22: mol_type = other DNA
ggttctttcatttgaagtttag

SEQ ID NO: 160460 - DNA, 22 bp, synthetic construct
  misc_feature 1..22: note = chemically synthesized
  source 1..22: mol_type = other DNA
gttctttcatttgaagtttagc

SEQ ID NO: 160461 - DNA, 22 bp, synthetic construct
  misc_feature 1..22: note = chemically synthesized
  source 1..22: mol_type = other DNA
tttcatttgaagtttagcagca

SEQ ID NO: 160462 - DNA, 22 bp, synthetic construct
  misc_feature 1..22: note = chemically synthesized
  source 1..22: mol_type = other DNA
tcatttgaagtttagcagcagt

SEQ ID NO: 160463 - DNA, 22 bp, synthetic construct
  misc_feature 1..22: note = chemically synthesized
  source 1..22: mol_type = other DNA
catttgaagtttagcagcagtt

SEQ ID NO: 160464 - DNA, 22 bp, synthetic construct
  misc_feature 1..22: note = chemically synthesized
  source 1..22: mol_type = other DNA
atttgaagtttagcagcagttg

SEQ ID NO: 160465 - DNA, 22 bp, synthetic construct
  misc_feature 1..22: note = chemically synthesized
  source 1..22: mol_type = other DNA
gaagtttagcagcagttgaaca

SEQ ID NO: 160466 - DNA, 22 bp, synthetic construct
  misc_feature 1..22: note = chemically synthesized
  source 1..22: mol_type = other DNA
aagtttagcagcagttgaacat

SEQ ID NO: 160467 - DNA, 22 bp, synthetic construct
  misc_feature 1..22: note = chemically synthesized
  source 1..22: mol_type = other DNA
agcagcagttgaacatttgttg

SEQ ID NO: 160468 - DNA, 22 bp, synthetic construct
  misc_feature 1..22: note = chemically synthesized
  source 1..22: mol_type = other DNA
gcagcagttgaacatttgttgt

SEQ ID NO: 160469 - DNA, 22 bp, synthetic construct
  misc_feature 1..22: note = chemically synthesized
  source 1..22: mol_type = other DNA
aacatttgttgttgaatatttg

SEQ ID NO: 160470 - DNA, 22 bp, synthetic construct
  misc_feature 1..22: note = chemically synthesized
  source 1..22: mol_type = other DNA
gttgttgaatatttgagtaaac

SEQ ID NO: 160471 - DNA, 22 bp, synthetic construct
  misc_feature 1..22: note = chemically synthesized
  source 1..22: mol_type = other DNA
ttgttgaatatttgagtaaact

SEQ ID NO: 160472 - DNA, 22 bp, synthetic construct
  misc_feature 1..22: note = chemically synthesized
  source 1..22: mol_type = other DNA
ttgaatatttgagtaaacttgt

SEQ ID NO: 160473 - DNA, 22 bp, synthetic construct
  misc_feature 1..22: note = chemically synthesized
  source 1..22: mol_type = other DNA
aatatttgagtaaacttgtatc

SEQ ID NO: 160474 - DNA, 22 bp, synthetic construct
  misc_feature 1..22: note = chemically synthesized
  source 1..22: mol_type = other DNA
gagtaaacttgtatccatttcc

SEQ ID NO: 160475 - DNA, 22 bp, synthetic construct
  misc_feature 1..22: note = chemically synthesized
  source 1..22: mol_type = other DNA
agtaaacttgtatccatttcct

SEQ ID NO: 160476 - DNA, 22 bp, synthetic construct
  misc_feature 1..22: note = chemically synthesized
  source 1..22: mol_type = other DNA
gtatccatttcctcttttctct

SEQ ID NO: 160477 - DNA, 22 bp, synthetic construct
  misc_feature 1..22: note = chemically synthesized
  source 1..22: mol_type = other DNA
tatccatttcctcttttctctt

SEQ ID NO: 160478 - DNA, 22 bp, synthetic construct
  misc_feature 1..22: note = chemically synthesized
  source 1..22: mol_type = other DNA
cctcttttctctttcttccttg

SEQ ID NO: 160479 - DNA, 22 bp, synthetic construct
  misc_feature 1..22: note = chemically synthesized
  source 1..22: mol_type = other DNA
ctcttttctctttcttccttgt

SEQ ID NO: 160480 - DNA, 22 bp, synthetic construct
  misc_feature 1..22: note = chemically synthesized
  source 1..22: mol_type = other DNA
ttttctctttcttccttgttac

SEQ ID NO: 160481 - DNA, 22 bp, synthetic construct
  misc_feature 1..22: note = chemically synthesized
  source 1..22: mol_type = other DNA
ttctctttcttccttgttactt

SEQ ID NO: 160482 - DNA, 22 bp, synthetic construct
  misc_feature 1..22: note = chemically synthesized
  source 1..22: mol_type = other DNA
tctctttcttccttgttactta

SEQ ID NO: 160483 - DNA, 22 bp, synthetic construct
  misc_feature 1..22: note = chemically synthesized
  source 1..22: mol_type = other DNA
ctctttcttccttgttacttac

SEQ ID NO: 160484 - DNA, 22 bp, synthetic construct
  misc_feature 1..22: note = chemically synthesized
  source 1..22: mol_type = other DNA
tctttcttccttgttacttacc

SEQ ID NO: 160485 - DNA, 22 bp, synthetic construct
  misc_feature 1..22: note = chemically synthesized
  source 1..22: mol_type = other DNA
tttcttccttgttacttacctt

SEQ ID NO: 160486 - DNA, 22 bp, synthetic construct
  misc_feature 1..22: note = chemically synthesized
  source 1..22: mol_type = other DNA
tcttccttgttacttaccttcc

SEQ ID NO: 160487 - DNA, 22 bp, synthetic construct
  misc_feature 1..22: note = chemically synthesized
  source 1..22: mol_type = other DNA
cttccttgttacttaccttcct

SEQ ID NO: 160488 - DNA, 22 bp, synthetic construct
  misc_feature 1..22: note = chemically synthesized
  source 1..22: mol_type = other DNA
ttccttgttacttaccttcctt

SEQ ID NO: 160489 - DNA, 22 bp, synthetic construct
  misc_feature 1..22: note = chemically synthesized
  source 1..22: mol_type = other DNA
ccttgttacttaccttcctttt

SEQ ID NO: 160490 - DNA, 22 bp, synthetic construct
  misc_feature 1..22: note = chemically synthesized
  source 1..22: mol_type = other DNA
cttgttacttaccttccttttc

SEQ ID NO: 160491 - DNA, 22 bp, synthetic construct
  misc_feature 1..22: note = chemically synthesized
  source 1..22: mol_type = other DNA
gttacttaccttccttttcttt

SEQ ID NO: 160492 - DNA, 22 bp, synthetic construct
  misc_feature 1..22: note = chemically synthesized
  source 1..22: mol_type = other DNA
ttacttaccttccttttctttc

SEQ ID NO: 160493 - DNA, 22 bp, synthetic construct
  misc_feature 1..22: note = chemically synthesized
  source 1..22: mol_type = other DNA
cttaccttccttttctttcaaa

SEQ ID NO: 160494 - DNA, 22 bp, synthetic construct
  misc_feature 1..22: note = chemically synthesized
  source 1..22: mol_type = other DNA
accttccttttctttcaaaaaa

SEQ ID NO: 160495 - DNA, 22 bp, synthetic construct
  misc_feature 1..22: note = chemically synthesized
  source 1..22: mol_type = other DNA
ccttccttttctttcaaaaaaa

SEQ ID NO: 160496 - DNA, 22 bp, synthetic construct
  misc_feature 1..22: note = chemically synthesized
  source 1..22: mol_type = other DNA
ccttttctttcaaaaaaaaaaa

SEQ ID NO: 160497 - DNA, 22 bp, synthetic construct
  misc_feature 1..22: note = chemically synthesized
  source 1..22: mol_type = other DNA
cttttctttcaaaaaaaaaaaa

SEQ ID NO: 160498 - DNA, 22 bp, synthetic construct
  misc_feature 1..22: note = chemically synthesized
  source 1..22: mol_type = other DNA
ttctttcaaaaaaaaaaaaaaa

SEQ ID NO: 160499 - DNA, 22 bp, synthetic construct
  misc_feature 1..22: note = chemically synthesized
  source 1..22: mol_type = other DNA
tctttcaaaaaaaaaaaaaaaa

SEQ ID NO: 160500 - DNA, 22 bp, synthetic construct
  misc_feature 1..22: note = chemically synthesized
  source 1..22: mol_type = other DNA
ctttcaaaaaaaaaaaaaaaaa

SEQ ID NO: 160501 - DNA, 22 bp, synthetic construct
  misc_feature 1..22: note = chemically synthesized
  source 1..22: mol_type = other DNA
tttcaaaaaaaaaaaaaaaaaa

SEQ ID NO: 160502 - DNA, 22 bp, synthetic construct
  misc_feature 1..22: note = chemically synthesized
  source 1..22: mol_type = other DNA
tcaaaaaaaaaaaaaaaaaaaa

SEQ ID NO: 160503 - DNA, 22 bp, synthetic construct
  misc_feature 1..22: note = chemically synthesized
  source 1..22: mol_type = other DNA
caaaaaaaaaaaaaaaaaaaaa

SEQ ID NO: 160504 - DNA, 22 bp, synthetic construct
  misc_feature 1..22: note = chemically synthesized
  source 1..22: mol_type = other DNA
aaaaaaaaaaaaaaaaaaaaag

SEQ ID NO: 160505 - DNA, 22 bp, synthetic construct
  misc_feature 1..22: note = chemically synthesized
  source 1..22: mol_type = other DNA
ctttttctttcaaagaacagct

SEQ ID NO: 160506 - DNA, 22 bp, synthetic construct
  misc_feature 1..22: note = chemically synthesized
  source 1..22: mol_type = other DNA
tttctttcaaagaacagctact

SEQ ID NO: 160507 - DNA, 22 bp, synthetic construct
  misc_feature 1..22: note = chemically synthesized
  source 1..22: mol_type = other DNA
ttctttcaaagaacagctactt

SEQ ID NO: 160508 - DNA, 22 bp, synthetic construct
  misc_feature 1..22: note = chemically synthesized
  source 1..22: mol_type = other DNA
tctttcaaagaacagctacttc

SEQ ID NO: 160509 - DNA, 22 bp, synthetic construct
  misc_feature 1..22: note = chemically synthesized
  source 1..22: mol_type = other DNA
ctttcaaagaacagctacttcc

SEQ ID NO: 160510 - DNA, 22 bp, synthetic construct
  misc_feature 1..22: note = chemically synthesized
  source 1..22: mol_type = other DNA
tttcaaagaacagctacttcct

SEQ ID NO: 160511 - DNA, 22 bp, synthetic construct
  misc_feature 1..22: note = chemically synthesized
  source 1..22: mol_type = other DNA
tcaaagaacagctacttcctga

SEQ ID NO: 160512 - DNA, 22 bp, synthetic construct
  misc_feature 1..22: note = chemically synthesized
  source 1..22: mol_type = other DNA
caaagaacagctacttcctgaa

SEQ ID NO: 160513 - DNA, 22 bp, synthetic construct
  misc_feature 1..22: note = chemically synthesized
  source 1..22: mol_type = other DNA
aaagaacagctacttcctgaat

SEQ ID NO: 160514 - DNA, 22 bp, synthetic construct
  misc_feature 1..22: note = chemically synthesized
  source 1..22: mol_type = other DNA
cttcctgaatttccagcatatt

SEQ ID NO: 160515 - DNA, 22 bp, synthetic construct
  misc_feature 1..22: note = chemically synthesized
  source 1..22: mol_type = other DNA
cctgaatttccagcatattggt

SEQ ID NO: 160516 - DNA, 22 bp, synthetic construct
  misc_feature 1..22: note = chemically synthesized
  source 1..22: mol_type = other DNA
ctgaatttccagcatattggtg

SEQ ID NO: 160517 - DNA, 22 bp, synthetic construct
  misc_feature 1..22: note = chemically synthesized
  source 1..22: mol_type = other DNA
aatttccagcatattggtgaca

SEQ ID NO: 160518 - DNA, 22 bp, synthetic construct
  misc_feature 1..22: note = chemically synthesized
  source 1..22: mol_type = other DNA
ccagcatattggtgacatgaag

SEQ ID NO: 160519 - DNA, 22 bp, synthetic construct
  misc_feature 1..22: note = chemically synthesized
  source 1..22: mol_type = other DNA
cagcatattggtgacatgaagc

SEQ ID NO: 160520 - DNA, 22 bp, synthetic construct
  misc_feature 1..22: note = chemically synthesized
  source 1..22: mol_type = other DNA
gtgacatgaagcatacggttag

SEQ ID NO: 160521 - DNA, 22 bp, synthetic construct
  misc_feature 1..22: note = chemically synthesized
  source 1..22: mol_type = other DNA
gctgattcatgagcttactgag

SEQ ID NO: 160522 - DNA, 22 bp, synthetic construct
  misc_feature 1..22: note = chemically synthesized
  source 1..22: mol_type = other DNA
attcatgagcttactgagataa

SEQ ID NO: 160523 - DNA, 22 bp, synthetic construct
  misc_feature 1..22: note = chemically synthesized
  source 1..22: mol_type = other DNA
atgagcttactgagataaaaca

SEQ ID NO: 160524 - DNA, 22 bp, synthetic construct
  misc_feature 1..22: note = chemically synthesized
  source 1..22: mol_type = other DNA
actgagataaaacaactttatt

SEQ ID NO: 160525 - DNA, 22 bp, synthetic construct
  misc_feature 1..22: note = chemically synthesized
  source 1..22: mol_type = other DNA
ctgagataaaacaactttattg

SEQ ID NO: 160526 - DNA, 22 bp, synthetic construct
  misc_feature 1..22: note = chemically synthesized
  source 1..22: mol_type = other DNA
agataaaacaactttattgaag

SEQ ID NO: 160527 - DNA, 22 bp, synthetic construct
  misc_feature 1..22: note = chemically synthesized
  source 1..22: mol_type = other DNA
tattgaagtgtctaggaaagaa

SEQ ID NO: 160528 - DNA, 22 bp, synthetic construct
  misc_feature 1..22: note = chemically synthesized
  source 1..22: mol_type = other DNA
attgaagtgtctaggaaagaat

SEQ ID NO: 160529 - DNA, 22 bp, synthetic construct
  misc_feature 1..22: note = chemically synthesized
  source 1..22: mol_type = other DNA
ttgaagtgtctaggaaagaatg

SEQ ID NO: 160530 - DNA, 22 bp, synthetic construct
  misc_feature 1..22: note = chemically synthesized
  source 1..22: mol_type = other DNA
aagtgtctaggaaagaatgaag

SEQ ID NO: 160531 - DNA, 22 bp, synthetic construct
  misc_feature 1..22: note = chemically synthesized
  source 1..22: mol_type = other DNA
ggaaagaatgaagtaactttac

SEQ ID NO: 160532 - DNA, 22 bp, synthetic construct
  misc_feature 1..22: note = chemically synthesized
  source 1..22: mol_type = other DNA
tacttttcactgtatcacaaac

SEQ ID NO: 160533 - DNA, 22 bp, synthetic construct
  misc_feature 1..22: note = chemically synthesized
  source 1..22: mol_type = other DNA
acttttcactgtatcacaaaca

SEQ ID NO: 160534 - DNA, 22 bp, synthetic construct
  misc_feature 1..22: note = chemically synthesized
  source 1..22: mol_type = other DNA
cttttcactgtatcacaaacat

SEQ ID NO: 160535 - DNA, 22 bp, synthetic construct
  misc_feature 1..22: note = chemically synthesized
  source 1..22: mol_type = other DNA
ttcactgtatcacaaacatttc

SEQ ID NO: 160536 - DNA, 22 bp, synthetic construct
  misc_feature 1..22: note = chemically synthesized
  source 1..22: mol_type = other DNA
tcactgtatcacaaacatttct

SEQ ID NO: 160537 - DNA, 22 bp, synthetic construct
  misc_feature 1..22: note = chemically synthesized
  source 1..22: mol_type = other DNA
cactgtatcacaaacatttctc

SEQ ID NO: 160538 - DNA, 22 bp, synthetic construct
  misc_feature 1..22: note = chemically synthesized
  source 1..22: mol_type = other DNA
actgtatcacaaacatttctct

SEQ ID NO: 160539 - DNA, 22 bp, synthetic construct
  misc_feature 1..22: note = chemically synthesized
  source 1..22: mol_type = other DNA
tatcacaaacatttctctaatg

SEQ ID NO: 160540 - DNA, 22 bp, synthetic construct
  misc_feature 1..22: note = chemically synthesized
  source 1..22: mol_type = other DNA
ctctaatgtatagcttaaaatg

SEQ ID NO: 160541 - DNA, 22 bp, synthetic construct
  misc_feature 1..22: note = chemically synthesized
  source 1..22: mol_type = other DNA
tctaatgtatagcttaaaatgt

SEQ ID NO: 160542 - DNA, 22 bp, synthetic construct
  misc_feature 1..22: note = chemically synthesized
  source 1..22: mol_type = other DNA
taatgtatagcttaaaatgtac

SEQ ID NO: 160543 - DNA, 22 bp, synthetic construct
  misc_feature 1..22: note = chemically synthesized
  source 1..22: mol_type = other DNA
atgtatagcttaaaatgtactg

SEQ ID NO: 160544 - DNA, 22 bp, synthetic construct
  misc_feature 1..22: note = chemically synthesized
  source 1..22: mol_type = other DNA
aaaatgtactgattcaaaatat

SEQ ID NO: 160545 - DNA, 22 bp, synthetic construct
  misc_feature 1..22: note = chemically synthesized
  source 1..22: mol_type = other DNA
aaatgtactgattcaaaatatg

SEQ ID NO: 160546 - DNA, 22 bp, synthetic construct
  misc_feature 1..22: note = chemically synthesized
  source 1..22: mol_type = other DNA
attcaaaatatgtaatttttag

SEQ ID NO: 160547 - DNA, 22 bp, synthetic construct
  misc_feature 1..22: note = chemically synthesized
  source 1..22: mol_type = other DNA
aaaatatgtaatttttagaaaa

SEQ ID NO: 160548 - DNA, 22 bp, synthetic construct
  misc_feature 1..22: note = chemically synthesized
  source 1..22: mol_type = other DNA
ttagaaaataactattttgatc

SEQ ID NO: 160549 - DNA, 22 bp, synthetic construct
  misc_feature 1..22: note = chemically synthesized
  source 1..22: mol_type = other DNA
tagaaaataactattttgatca

SEQ ID NO: 160550 - DNA, 22 bp, synthetic construct
  misc_feature 1..22: note = chemically synthesized
  source 1..22: mol_type = other DNA
agaaaataactattttgatcag

SEQ ID NO: 160551 - DNA, 22 bp, synthetic construct
  misc_feature 1..22: note = chemically synthesized
  source 1..22: mol_type = other DNA
gaaaataactattttgatcaga

SEQ ID NO: 160552 - DNA, 22 bp, synthetic construct
  misc_feature 1..22: note = chemically synthesized
  source 1..22: mol_type = other DNA
ttttgatcagagaacttttata

SEQ ID NO: 160553 - DNA, 22 bp, synthetic construct
  misc_feature 1..22: note = chemically synthesized
  source 1..22: mol_type = other DNA
tgatcagagaacttttatataa

SEQ ID NO: 160554 - DNA, 22 bp, synthetic construct
  misc_feature 1..22: note = chemically synthesized
  source 1..22: mol_type = other DNA
gatcagagaacttttatataaa

SEQ ID NO: 160555 - DNA, 22 bp, synthetic construct
  misc_feature 1..22: note = chemically synthesized
  source 1..22: mol_type = other DNA
atcagagaacttttatataaag

SEQ ID NO: 160556 - DNA, 22 bp, synthetic construct
  misc_feature 1..22: note = chemically synthesized
  source 1..22: mol_type = other DNA
ttatataaagcataagagccca

SEQ ID NO: 160557 - DNA, 22 bp, synthetic construct
  misc_feature 1..22: note = chemically synthesized
  source 1..22: mol_type = other DNA
tatataaagcataagagcccag

SEQ ID NO: 160558 - DNA, 22 bp, synthetic construct
  misc_feature 1..22: note = chemically synthesized
  source 1..22: mol_type = other DNA
atataaagcataagagcccagg

SEQ ID NO: 160559 - DNA, 22 bp, synthetic construct
  misc_feature 1..22: note = chemically synthesized
  source 1..22: mol_type = other DNA
tataaagcataagagcccaggt

SEQ ID NO: 160560 - DNA, 22 bp, synthetic construct
  misc_feature 1..22: note = chemically synthesized
  source 1..22: mol_type = other DNA
ttcagaaaattcaatcatcagt

SEQ ID NO: 160561 - DNA, 22 bp, synthetic construct
  misc_feature 1..22: note = chemically synthesized
  source 1..22: mol_type = other DNA
tcagaaaattcaatcatcagtg

SEQ ID NO: 160562 - DNA, 22 bp, synthetic construct
  misc_feature 1..22: note = chemically synthesized
  source 1..22: mol_type = other DNA
cagaaaattcaatcatcagtga

SEQ ID NO: 160563 - DNA, 22 bp, synthetic construct
  misc_feature 1..22: note = chemically synthesized
  source 1..22: mol_type = other DNA
agaaaattcaatcatcagtgaa

SEQ ID NO: 160564 - DNA, 22 bp, synthetic construct
  misc_feature 1..22: note = chemically synthesized
  source 1..22: mol_type = other DNA
aatcatcagtgaaattgaaaag

SEQ ID NO: 160565 - DNA, 22 bp, synthetic construct
  misc_feature 1..22: note = chemically synthesized
  source 1..22: mol_type = other DNA
aaaagtgactaaattttctttg

SEQ ID NO: 160566 - DNA, 22 bp, synthetic construct
  misc_feature 1..22: note = chemically synthesized
  source 1..22: mol_type = other DNA
aattttctttggttattcatag

SEQ ID NO: 160567 - DNA, 22 bp, synthetic construct
  misc_feature 1..22: note = chemically synthesized
  source 1..22: mol_type = other DNA
tctttggttattcatagtgctt

SEQ ID NO: 160568 - DNA, 22 bp, synthetic construct
  misc_feature 1..22: note = chemically synthesized
  source 1..22: mol_type = other DNA
ctttggttattcatagtgcttt

SEQ ID NO: 160569 - DNA, 22 bp, synthetic construct
  misc_feature 1..22: note = chemically synthesized
  source 1..22: mol_type = other DNA
tttggttattcatagtgctttc

SEQ ID NO: 160570 - DNA, 22 bp, synthetic construct
  misc_feature 1..22: note = chemically synthesized
  source 1..22: mol_type = other DNA
tggttattcatagtgctttcct

SEQ ID NO: 160571 - DNA, 22 bp, synthetic construct
  misc_feature 1..22: note = chemically synthesized
  source 1..22: mol_type = other DNA
ggttattcatagtgctttcctc

SEQ ID NO: 160572 - DNA, 22 bp, synthetic construct
  misc_feature 1..22: note = chemically synthesized
  source 1..22: mol_type = other DNA
gttattcatagtgctttcctca

SEQ ID NO: 160573 - DNA, 22 bp, synthetic construct
  misc_feature 1..22: note = chemically synthesized
  source 1..22: mol_type = other DNA
ttcatagtgctttcctcaattt

SEQ ID NO: 160574 - DNA, 22 bp, synthetic construct
  misc_feature 1..22: note = chemically synthesized
  source 1..22: mol_type = other DNA
atagtgctttcctcaattttag

SEQ ID NO: 160575 - DNA, 22 bp, synthetic construct
  misc_feature 1..22: note = chemically synthesized
  source 1..22: mol_type = other DNA
tcctcaattttagtctccccaa

SEQ ID NO: 160576 - DNA, 22 bp, synthetic construct
  misc_feature 1..22: note = chemically synthesized
  source 1..22: mol_type = other DNA
cctcaattttagtctccccaag

SEQ ID NO: 160577 - DNA, 22 bp, synthetic construct
  misc_feature 1..22: note = chemically synthesized
  source 1..22: mol_type = other DNA
ctcaattttagtctccccaagt

SEQ ID NO: 160578 - DNA, 22 bp, synthetic construct
  misc_feature 1..22: note = chemically synthesized
  source 1..22: mol_type = other DNA
aattttagtctccccaagtttg

SEQ ID NO: 160579 - DNA, 22 bp, synthetic construct
  misc_feature 1..22: note = chemically synthesized
  source 1..22: mol_type = other DNA
tagtctccccaagtttgtcctg

SEQ ID NO: 160580 - DNA, 22 bp, synthetic construct
  misc_feature 1..22: note = chemically synthesized
  source 1..22: mol_type = other DNA
agtctccccaagtttgtcctgt

SEQ ID NO: 160581 - DNA, 22 bp, synthetic construct
  misc_feature 1..22: note = chemically synthesized
  source 1..22: mol_type = other DNA
gtctccccaagtttgtcctgtc

SEQ ID NO: 160582 - DNA, 22 bp, synthetic construct
  misc_feature 1..22: note = chemically synthesized
  source 1..22: mol_type = other DNA
cccaagtttgtcctgtcttccc

SEQ ID NO: 160583 - DNA, 22 bp, synthetic construct
  misc_feature 1..22: note = chemically synthesized
  source 1..22: mol_type = other DNA
gtcctgtcttccctgtctagtt

SEQ ID NO: 160584 - DNA, 22 bp, synthetic construct
  misc_feature 1..22: note = chemically synthesized
  source 1..22: mol_type = other DNA
tcctgtcttccctgtctagttc

SEQ ID NO: 160585 - DNA, 22 bp, synthetic construct
  misc_feature 1..22: note = chemically synthesized
  source 1..22: mol_type = other DNA
tcttccctgtctagttctacat

SEQ ID NO: 160586 - DNA, 22 bp, synthetic construct
  misc_feature 1..22: note = chemically synthesized
  source 1..22: mol_type = other DNA
ccctgtctagttctacatttga

SEQ ID NO: 160587 - DNA, 22 bp, synthetic construct
  misc_feature 1..22: note = chemically synthesized
  source 1..22: mol_type = other DNA
cctgtctagttctacatttgac

SEQ ID NO: 160588 - DNA, 22 bp, synthetic construct
  misc_feature 1..22: note = chemically synthesized
  source 1..22: mol_type = other DNA
tctagttctacatttgacttct

SEQ ID NO: 160589 - DNA, 22 bp, synthetic construct
  misc_feature 1..22: note = chemically synthesized
  source 1..22: mol_type = other DNA
gttctacatttgacttcttcta

SEQ ID NO: 160590 - DNA, 22 bp, synthetic construct
  misc_feature 1..22: note = chemically synthesized
  source 1..22: mol_type = other DNA
tacatttgacttcttctaagaa

SEQ ID NO: 160591 - DNA, 22 bp, synthetic construct
  misc_feature 1..22: note = chemically synthesized
  source 1..22: mol_type = other DNA
catttgacttcttctaagaaat

SEQ ID NO: 160592 - DNA, 22 bp, synthetic construct
  misc_feature 1..22: note = chemically synthesized
  source 1..22: mol_type = other DNA
gacttcttctaagaaatctgtc

SEQ ID NO: 160593 - DNA, 22 bp, synthetic construct
  misc_feature 1..22: note = chemically synthesized
  source 1..22: mol_type = other DNA
acttcttctaagaaatctgtcc

SEQ ID NO: 160594 - DNA, 22 bp, synthetic construct
  misc_feature 1..22: note = chemically synthesized
  source 1..22: mol_type = other DNA
cttctaagaaatctgtccttta

SEQ ID NO: 160595 - DNA, 22 bp, synthetic construct
  misc_feature 1..22: note = chemically synthesized
  source 1..22: mol_type = other DNA
ttctaagaaatctgtcctttag

SEQ ID NO: 160596 - DNA, 22 bp, synthetic construct
  misc_feature 1..22: note = chemically synthesized
  source 1..22: mol_type = other DNA
ctaagaaatctgtcctttagct

SEQ ID NO: 160597 - DNA, 22 bp, synthetic construct
  misc_feature 1..22: note = chemically synthesized
  source 1..22: mol_type = other DNA
taagaaatctgtcctttagctt

SEQ ID NO: 160598 - DNA, 22 bp, synthetic construct
  misc_feature 1..22: note = chemically synthesized
  source 1..22: mol_type = other DNA
agaaatctgtcctttagctttt

SEQ ID NO: 160599 - DNA, 22 bp, synthetic construct
  misc_feature 1..22: note = chemically synthesized
  source 1..22: mol_type = other DNA
tcctttagcttttttattttta

SEQ ID NO: 160600 - DNA, 22 bp, synthetic construct
  misc_feature 1..22: note = chemically synthesized
  source 1..22: mol_type = other DNA
tagcttttttatttttactaat

SEQ ID NO: 160601 - DNA, 22 bp, synthetic construct
  misc_feature 1..22: note = chemically synthesized
  source 1..22: mol_type = other DNA
agcttttttatttttactaatt

SEQ ID NO: 160602 - DNA, 22 bp, synthetic construct
  misc_feature 1..22: note = chemically synthesized
  source 1..22: mol_type = other DNA
gcttttttatttttactaattt

SEQ ID NO: 160603 - DNA, 22 bp, synthetic construct
  misc_feature 1..22: note = chemically synthesized
  source 1..22: mol_type = other DNA
ttttatttttactaatttctta

SEQ ID NO: 160604 - DNA, 22 bp, synthetic construct
  misc_feature 1..22: note = chemically synthesized
  source 1..22: mol_type = other DNA
tttatttttactaatttcttat

SEQ ID NO: 160605 - DNA, 22 bp, synthetic construct
  misc_feature 1..22: note = chemically synthesized
  source 1..22: mol_type = other DNA
ttatttttactaatttcttatg

SEQ ID NO: 160606 - DNA, 22 bp, synthetic construct
  misc_feature 1..22: note = chemically synthesized
  source 1..22: mol_type = other DNA
tatttttactaatttcttatgt

SEQ ID NO: 160607 - DNA, 22 bp, synthetic construct
  misc_feature 1..22: note = chemically synthesized
  source 1..22: mol_type = other DNA
atttttactaatttcttatgtc

SEQ ID NO: 160608 - DNA, 22 bp, synthetic construct
  misc_feature 1..22: note = chemically synthesized
  source 1..22: mol_type = other DNA
tttttactaatttcttatgtca

SEQ ID NO: 160609 - DNA, 22 bp, synthetic construct
  misc_feature 1..22: note = chemically synthesized
  source 1..22: mol_type = other DNA
ttactaatttcttatgtcagag

SEQ ID NO: 160610 - DNA, 22 bp, synthetic construct
  misc_feature 1..22: note = chemically synthesized
  source 1..22: mol_type = other DNA
tactaatttcttatgtcagagc

SEQ ID NO: 160611 - DNA, 22 bp, synthetic construct
  misc_feature 1..22: note = chemically synthesized
  source 1..22: mol_type = other DNA
actaatttcttatgtcagagct

SEQ ID NO: 160612 - DNA, 22 bp, synthetic construct
  misc_feature 1..22: note = chemically synthesized
  source 1..22: mol_type = other DNA
ctaatttcttatgtcagagctc

SEQ ID NO: 160613 - DNA, 22 bp, synthetic construct
  misc_feature 1..22: note = chemically synthesized
  source 1..22: mol_type = other DNA
atttcttatgtcagagctcaca

SEQ ID NO: 160614 - DNA, 22 bp, synthetic construct
  misc_feature 1..22: note = chemically synthesized
  source 1..22: mol_type = other DNA
cttatgtcagagctcacaaaat

SEQ ID NO: 160615 - DNA, 22 bp, synthetic construct
  misc_feature 1..22: note = chemically synthesized
  source 1..22: mol_type = other DNA
ttatgtcagagctcacaaaatt

SEQ ID NO: 160616 - DNA, 22 bp, synthetic construct
  misc_feature 1..22: note = chemically synthesized
  source 1..22: mol_type = other DNA
atgtcagagctcacaaaattat

SEQ ID NO: 160617 - DNA, 22 bp, synthetic construct
  misc_feature 1..22: note = chemically synthesized
  source 1..22: mol_type = other DNA
tgtcagagctcacaaaattata

SEQ ID NO: 160618 - DNA, 22 bp, synthetic construct
  misc_feature 1..22: note = chemically synthesized
  source 1..22: mol_type = other DNA
acaaaattatataagcatctca

SEQ ID NO: 160619 - DNA, 22 bp, synthetic construct
  misc_feature 1..22: note = chemically synthesized
  source 1..22: mol_type = other DNA
tataagcatctcacctatattt

SEQ ID NO: 160620 - DNA, 22 bp, synthetic construct
  misc_feature 1..22: note = chemically synthesized
  source 1..22: mol_type = other DNA
acctatatttcattaagaacta

SEQ ID NO: 160621 - DNA, 22 bp, synthetic construct
  misc_feature 1..22: note = chemically synthesized
  source 1..22: mol_type = other DNA
tatttcattaagaactaatgag

SEQ ID NO: 160622 - DNA, 22 bp, synthetic construct
  misc_feature 1..22: note = chemically synthesized
  source 1..22: mol_type = other DNA
cattaagaactaatgagccttt

SEQ ID NO: 160623 - DNA, 22 bp, synthetic construct
  misc_feature 1..22: note = chemically synthesized
  source 1..22: mol_type = other DNA
attaagaactaatgagccttta

SEQ ID NO: 160624 - DNA, 22 bp, synthetic construct
  misc_feature 1..22: note = chemically synthesized
  source 1..22: mol_type = other DNA
agaactaatgagcctttattgg

SEQ ID NO: 160625 - DNA, 22 bp, synthetic construct
  misc_feature 1..22: note = chemically synthesized
  source 1..22: mol_type = other DNA
atgagcctttattgggctatat

SEQ ID NO: 160626 - DNA, 22 bp, synthetic construct
  misc_feature 1..22: note = chemically synthesized
  source 1..22: mol_type = other DNA
tattgggctatattatgctaat

SEQ ID NO: 160627 - DNA, 22 bp, synthetic construct
  misc_feature 1..22: note = chemically synthesized
  source 1..22: mol_type = other DNA
attgggctatattatgctaatt

SEQ ID NO: 160628 - DNA, 22 bp, synthetic construct
  misc_feature 1..22: note = chemically synthesized
  source 1..22: mol_type = other DNA
ttgggctatattatgctaatta

SEQ ID NO: 160629 - DNA, 22 bp, synthetic construct
  misc_feature 1..22: note = chemically synthesized
  source 1..22: mol_type = other DNA
ggctatattatgctaattataa

SEQ ID NO: 160630 - DNA, 22 bp, synthetic construct
  misc_feature 1..22: note = chemically synthesized
  source 1..22: mol_type = other DNA
tattatgctaattataactctg

SEQ ID NO: 160631 - DNA, 22 bp, synthetic construct
  misc_feature 1..22: note = chemically synthesized
  source 1..22: mol_type = other DNA
tgctaattataactctgaacat

SEQ ID NO: 160632 - DNA, 22 bp, synthetic construct
  misc_feature 1..22: note = chemically synthesized
  source 1..22: mol_type = other DNA
attataactctgaacattttaa

SEQ ID NO: 160633 - DNA, 22 bp, synthetic construct
  misc_feature 1..22: note = chemically synthesized
  source 1..22: mol_type = other DNA
taactctgaacattttaaaacc

SEQ ID NO: 160634 - DNA, 22 bp, synthetic construct
  misc_feature 1..22: note = chemically synthesized
  source 1..22: mol_type = other DNA
tgaacattttaaaaccaggaaa

SEQ ID NO: 160635 - DNA, 22 bp, synthetic construct
  misc_feature 1..22: note = chemically synthesized
  source 1..22: mol_type = other DNA
aacattttaaaaccaggaaact

SEQ ID NO: 160636 - DNA, 22 bp, synthetic construct
  misc_feature 1..22: note = chemically synthesized
  source 1..22: mol_type = other DNA
taaaaccaggaaactggactct

SEQ ID NO: 160637 - DNA, 22 bp, synthetic construct
  misc_feature 1..22: note = chemically synthesized
  source 1..22: mol_type = other DNA
aaaaccaggaaactggactcta

SEQ ID NO: 160638 - DNA, 22 bp, synthetic construct
  misc_feature 1..22: note = chemically synthesized
  source 1..22: mol_type = other DNA
aaaccaggaaactggactctat

SEQ ID NO: 160639 - DNA, 22 bp, synthetic construct
  misc_feature 1..22: note = chemically synthesized
  source 1..22: mol_type = other DNA
gactctattctggctaaatgat

SEQ ID NO: 160640 - DNA, 22 bp, synthetic construct
  misc_feature 1..22: note = chemically synthesized
  source 1..22: mol_type = other DNA
tattctggctaaatgattcatt

SEQ ID NO: 160641 - DNA, 22 bp, synthetic construct
  misc_feature 1..22: note = chemically synthesized
  source 1..22: mol_type = other DNA
ttctggctaaatgattcatttg

SEQ ID NO: 160642 - DNA, 22 bp, synthetic construct
  misc_feature 1..22: note = chemically synthesized
  source 1..22: mol_type = other DNA
tggctaaatgattcatttgccc

SEQ ID NO: 160643 - DNA, 22 bp, synthetic construct
  misc_feature 1..22: note = chemically synthesized
  source 1..22: mol_type = other DNA
gctaaatgattcatttgcccat

SEQ ID NO: 160644 - DNA, 22 bp, synthetic construct
  misc_feature 1..22: note = chemically synthesized
  source 1..22: mol_type = other DNA
aatgattcatttgcccattatt

SEQ ID NO: 160645 - DNA, 22 bp, synthetic construct
  misc_feature 1..22: note = chemically synthesized
  source 1..22: mol_type = other DNA
atttgcccattattcagtatct

SEQ ID NO: 160646 - DNA, 22 bp, synthetic construct
  misc_feature 1..22: note = chemically synthesized
  source 1..22: mol_type = other DNA
gcccattattcagtatctgtgg

SEQ ID NO: 160647 - DNA, 22 bp, synthetic construct
  misc_feature 1..22: note = chemically synthesized
  source 1..22: mol_type = other DNA
cccattattcagtatctgtggt

SEQ ID NO: 160648 - DNA, 22 bp, synthetic construct
  misc_feature 1..22: note = chemically synthesized
  source 1..22: mol_type = other DNA
ttcagtatctgtggtttatcag

SEQ ID NO: 160649 - DNA, 22 bp, synthetic construct
  misc_feature 1..22: note = chemically synthesized
  source 1..22: mol_type = other DNA
agtatctgtggtttatcaggag

SEQ ID NO: 160650 - DNA, 22 bp, synthetic construct
  misc_feature 1..22: note = chemically synthesized
  source 1..22: mol_type = other DNA
tggtttatcaggagcaagttct

SEQ ID NO: 160651 - DNA, 22 bp, synthetic construct
  misc_feature 1..22: note = chemically synthesized
  source 1..22: mol_type = other DNA
atcaggagcaagttctcttgcc

SEQ ID NO: 160652 - DNA, 22 bp, synthetic construct
  misc_feature 1..22: note = chemically synthesized
  source 1..22: mol_type = other DNA
tcaggagcaagttctcttgccg

SEQ ID NO: 160653 - DNA, 22 bp, synthetic construct
  misc_feature 1..22: note = chemically synthesized
  source 1..22: mol_type = other DNA
tcttgccgtaggcattgctgct

SEQ ID NO: 160654 - DNA, 22 bp, synthetic construct
  misc_feature 1..22: note = chemically synthesized
  source 1..22: mol_type = other DNA
ttgccgtaggcattgctgctgc

SEQ ID NO: 160655 - DNA, 22 bp, synthetic construct
  misc_feature 1..22: note = chemically synthesized
  source 1..22: mol_type = other DNA
gccgtaggcattgctgctgctc

SEQ ID NO: 160656 - DNA, 22 bp, synthetic construct
  misc_feature 1..22: note = chemically synthesized
  source 1..22: mol_type = other DNA
ccgtaggcattgctgctgctca

SEQ ID NO: 160657 - DNA, 22 bp, synthetic construct
  misc_feature 1..22: note = chemically synthesized
  source 1..22: mol_type = other DNA
ctgctgctcatcttgtccctta

SEQ ID NO: 160658 - DNA, 22 bp, synthetic construct
  misc_feature 1..22: note = chemically synthesized
  source 1..22: mol_type = other DNA
ctgctcatcttgtcccttagca

SEQ ID NO: 160659 - DNA, 22 bp, synthetic construct
  misc_feature 1..22: note = chemically synthesized
  source 1..22: mol_type = other DNA
ctcatcttgtcccttagcagtt

SEQ ID NO: 160660 - DNA, 22 bp, synthetic construct
  misc_feature 1..22: note = chemically synthesized
  source 1..22: mol_type = other DNA
atcttgtcccttagcagttcct

SEQ ID NO: 160661 - DNA, 22 bp, synthetic construct
  misc_feature 1..22: note = chemically synthesized
  source 1..22: mol_type = other DNA
gtcccttagcagttccttctct

SEQ ID NO: 160662 - DNA, 22 bp, synthetic construct
  misc_feature 1..22: note = chemically synthesized
  source 1..22: mol_type = other DNA
tcccttagcagttccttctctc

SEQ ID NO: 160663 - DNA, 22 bp, synthetic construct
  misc_feature 1..22: note = chemically synthesized
  source 1..22: mol_type = other DNA
agcagttccttctctctagata

SEQ ID NO: 160664 - DNA, 22 bp, synthetic construct
  misc_feature 1..22: note = chemically synthesized
  source 1..22: mol_type = other DNA
gcagttccttctctctagatat

SEQ ID NO: 160665 - DNA, 22 bp, synthetic construct
  misc_feature 1..22: note = chemically synthesized
  source 1..22: mol_type = other DNA
cttctctctagatattccataa

SEQ ID NO: 160666 - DNA, 22 bp, synthetic construct
  misc_feature 1..22: note = chemically synthesized
  source 1..22: mol_type = other DNA
ctctctagatattccataaagt

SEQ ID NO: 160667 - DNA, 22 bp, synthetic construct
  misc_feature 1..22: note = chemically synthesized
  source 1..22: mol_type = other DNA
tctctagatattccataaagtg

SEQ ID NO: 160668 - DNA, 22 bp, synthetic construct
  misc_feature 1..22: note = chemically synthesized
  source 1..22: mol_type = other DNA
tctagatattccataaagtgta

SEQ ID NO: 160669 - DNA, 22 bp, synthetic construct
  misc_feature 1..22: note = chemically synthesized
  source 1..22: mol_type = other DNA
tagatattccataaagtgtatt

SEQ ID NO: 160670 - DNA, 22 bp, synthetic construct
  misc_feature 1..22: note = chemically synthesized
  source 1..22: mol_type = other DNA
gatattccataaagtgtattaa

SEQ ID NO: 160671 - DNA, 22 bp, synthetic construct
  misc_feature 1..22: note = chemically synthesized
  source 1..22: mol_type = other DNA
cataaagtgtattaaaatttta

SEQ ID NO: 160672 - DNA, 22 bp, synthetic construct
  misc_feature 1..22: note = chemically synthesized
  source 1..22: mol_type = other DNA
aaattttaaactcacaacattt

SEQ ID NO: 160673 - DNA, 22 bp, synthetic construct
  misc_feature 1..22: note = chemically synthesized
  source 1..22: mol_type = other DNA
taaactcacaacatttcaagag

SEQ ID NO: 160674 - DNA, 22 bp, synthetic construct
  misc_feature 1..22: note = chemically synthesized
  source 1..22: mol_type = other DNA
aaactcacaacatttcaagagt

SEQ ID NO: 160675 - DNA, 22 bp, synthetic construct
  misc_feature 1..22: note = chemically synthesized
  source 1..22: mol_type = other DNA
aactcacaacatttcaagagtt

SEQ ID NO: 160676 - DNA, 22 bp, synthetic construct
  misc_feature 1..22: note = chemically synthesized
  source 1..22: mol_type = other DNA
acaacatttcaagagtttcagc

SEQ ID NO: 160677 - DNA, 22 bp, synthetic construct
  misc_feature 1..22: note = chemically synthesized
  source 1..22: mol_type = other DNA
caagagtttcagctgtttaaaa

SEQ ID NO: 160678 - DNA, 22 bp, synthetic construct
  misc_feature 1..22: note = chemically synthesized
  source 1..22: mol_type = other DNA
aagagtttcagctgtttaaaat

SEQ ID NO: 160679 - DNA, 22 bp, synthetic construct
  misc_feature 1..22: note = chemically synthesized
  source 1..22: mol_type = other DNA
cagctgtttaaaatatatagga

SEQ ID NO: 160680 - DNA, 22 bp, synthetic construct
  misc_feature 1..22: note = chemically synthesized
  source 1..22: mol_type = other DNA
agctgtttaaaatatataggaa

SEQ ID NO: 160681 - DNA, 22 bp, synthetic construct
  misc_feature 1..22: note = chemically synthesized
  source 1..22: mol_type = other DNA
tttaaaatatataggaaaaaat

SEQ ID NO: 160682 - DNA, 22 bp, synthetic construct
  misc_feature 1..22: note = chemically synthesized
  source 1..22: mol_type = other DNA
aaaatatataggaaaaaatata

SEQ ID NO: 160683 - DNA, 22 bp, synthetic construct
  misc_feature 1..22: note = chemically synthesized
  source 1..22: mol_type = other DNA
aaatatataggaaaaaatataa

SEQ ID NO: 160684 - DNA, 22 bp, synthetic construct
  misc_feature 1..22: note = chemically synthesized
  source 1..22: mol_type = other DNA
cctttaactttaaagaaatata

SEQ ID NO: 160685 - DNA, 22 bp, synthetic construct
  misc_feature 1..22: note = chemically synthesized
  source 1..22: mol_type = other DNA
taactttaaagaaatataaaaa

SEQ ID NO: 160686 - DNA, 22 bp, synthetic construct
  misc_feature 1..22: note = chemically synthesized
  source 1..22: mol_type = other DNA
aactttaaagaaatataaaaag

SEQ ID NO: 160687 - DNA, 22 bp, synthetic construct
  misc_feature 1..22: note = chemically synthesized
  source 1..22: mol_type = other DNA
actttaaagaaatataaaaagc

SEQ ID NO: 160688 - DNA, 22 bp, synthetic construct
  misc_feature 1..22: note = chemically synthesized
  source 1..22: mol_type = other DNA
taaagaaatataaaaagcaacc

SEQ ID NO: 160689 - DNA, 22 bp, synthetic construct
  misc_feature 1..22: note = chemically synthesized
  source 1..22: mol_type = other DNA
aaagaaatataaaaagcaacca

SEQ ID NO: 160690 - DNA, 22 bp, synthetic construct
  misc_feature 1..22: note = chemically synthesized
  source 1..22: mol_type = other DNA
aagaaatataaaaagcaaccag

SEQ ID NO: 160691 - DNA, 22 bp, synthetic construct
  misc_feature 1..22: note = chemically synthesized
  source 1..22: mol_type = other DNA
tggctcagatttgtcaaaagta

SEQ ID NO: 160692 - DNA, 22 bp, synthetic construct
  misc_feature 1..22: note = chemically synthesized
  source 1..22: mol_type = other DNA
ggctcagatttgtcaaaagtat

SEQ ID NO: 160693 - DNA, 22 bp, synthetic construct
  misc_feature 1..22: note = chemically synthesized
  source 1..22: mol_type = other DNA
gctcagatttgtcaaaagtata

SEQ ID NO: 160694 - DNA, 22 bp, synthetic construct
  misc_feature 1..22: note = chemically synthesized
  source 1..22: mol_type = other DNA
agatttgtcaaaagtataaaga

SEQ ID NO: 160695 - DNA, 22 bp, synthetic construct
  misc_feature 1..22: note = chemically synthesized
  source 1..22: mol_type = other DNA
gtcaaaagtataaagatttcaa

SEQ ID NO: 160696 - DNA, 22 bp, synthetic construct
  misc_feature 1..22: note = chemically synthesized
  source 1..22: mol_type = other DNA
tcaaaagtataaagatttcaat

SEQ ID NO: 160697 - DNA, 22 bp, synthetic construct
  misc_feature 1..22: note = chemically synthesized
  source 1..22: mol_type = other DNA
caattatttctaaagcattctc

SEQ ID NO: 160698 - DNA, 22 bp, synthetic construct
  misc_feature 1..22: note = chemically synthesized
  source 1..22: mol_type = other DNA
aattatttctaaagcattctct

SEQ ID NO: 160699 - DNA, 22 bp, synthetic construct
  misc_feature 1..22: note = chemically synthesized
  source 1..22: mol_type = other DNA
tttctaaagcattctctttaca

SEQ ID NO: 160700 - DNA, 22 bp, synthetic construct
  misc_feature 1..22: note = chemically synthesized
  source 1..22: mol_type = other DNA
ctaaagcattctctttacatta

SEQ ID NO: 160701 - DNA, 22 bp, synthetic construct
  misc_feature 1..22: note = chemically synthesized
  source 1..22: mol_type = other DNA
taaagcattctctttacattat

SEQ ID NO: 160702 - DNA, 22 bp, synthetic construct
  misc_feature 1..22: note = chemically synthesized
  source 1..22: mol_type = other DNA
aagcattctctttacattattc

SEQ ID NO: 160703 - DNA, 22 bp, synthetic construct
  misc_feature 1..22: note = chemically synthesized
  source 1..22: mol_type = other DNA
tctttacattattctgaatata

SEQ ID NO: 160704 - DNA, 22 bp, synthetic construct
  misc_feature 1..22: note = chemically synthesized
  source 1..22: mol_type = other DNA
tttacattattctgaatataaa

SEQ ID NO: 160705 - DNA, 22 bp, synthetic construct
  misc_feature 1..22: note = chemically synthesized
  source 1..22: mol_type = other DNA
tacattattctgaatataaaaa

SEQ ID NO: 160706 - DNA, 22 bp, synthetic construct
  misc_feature 1..22: note = chemically synthesized
  source 1..22: mol_type = other DNA
acattattctgaatataaaaag

SEQ ID NO: 160707 - DNA, 22 bp, synthetic construct
  misc_feature 1..22: note = chemically synthesized
  source 1..22: mol_type = other DNA
cattattctgaatataaaaaga

SEQ ID NO: 160708 - DNA, 22 bp, synthetic construct
  misc_feature 1..22: note = chemically synthesized
  source 1..22: mol_type = other DNA
ttctgaatataaaaagaaatat

SEQ ID NO: 160709 - DNA, 22 bp, synthetic construct
  misc_feature 1..22: note = chemically synthesized
  source 1..22: mol_type = other DNA
tgaatataaaaagaaatatatt

SEQ ID NO: 160710 - DNA, 22 bp, synthetic construct
  misc_feature 1..22: note = chemically synthesized
  source 1..22: mol_type = other DNA
aatataaaaagaaatatattat

SEQ ID NO: 160711 - DNA, 22 bp, synthetic construct
  misc_feature 1..22: note = chemically synthesized
  source 1..22: mol_type = other DNA
tgttcttgggtgtcaattattt

SEQ ID NO: 160712 - DNA, 22 bp, synthetic construct
  misc_feature 1..22: note = chemically synthesized
  source 1..22: mol_type = other DNA
ttgggtgtcaattatttctacc

SEQ ID NO: 160713 - DNA, 22 bp, synthetic construct
  misc_feature 1..22: note = chemically synthesized
  source 1..22: mol_type = other DNA
gggtgtcaattatttctacctc

SEQ ID NO: 160714 - DNA, 22 bp, synthetic construct
  misc_feature 1..22: note = chemically synthesized
  source 1..22: mol_type = other DNA
ggtgtcaattatttctacctct

SEQ ID NO: 160715 - DNA, 22 bp, synthetic construct
  misc_feature 1..22: note = chemically synthesized
  source 1..22: mol_type = other DNA
tttctacctctattctctttca

SEQ ID NO: 160716 - DNA, 22 bp, synthetic construct
  misc_feature 1..22: note = chemically synthesized
  source 1..22: mol_type = other DNA
ctacctctattctctttcattg

SEQ ID NO: 160717 - DNA, 22 bp, synthetic construct
  misc_feature 1..22: note = chemically synthesized
  source 1..22: mol_type = other DNA
tacctctattctctttcattgg

SEQ ID NO: 160718 - DNA, 22 bp, synthetic construct
  misc_feature 1..22: note = chemically synthesized
  source 1..22: mol_type = other DNA
cctctattctctttcattggga

SEQ ID NO: 160719 - DNA, 22 bp, synthetic construct
  misc_feature 1..22: note = chemically synthesized
  source 1..22: mol_type = other DNA
tattctctttcattgggaatct

SEQ ID NO: 160720 - DNA, 22 bp, synthetic construct
  misc_feature 1..22: note = chemically synthesized
  source 1..22: mol_type = other DNA
ttctctttcattgggaatcttt

SEQ ID NO: 160721 - DNA, 22 bp, synthetic construct
  misc_feature 1..22: note = chemically synthesized
  source 1..22: mol_type = other DNA
tctttcattgggaatcttttac

SEQ ID NO: 160722 - DNA, 22 bp, synthetic construct
  misc_feature 1..22: note = chemically synthesized
  source 1..22: mol_type = other DNA
tttcattgggaatcttttacac

SEQ ID NO: 160723 - DNA, 22 bp, synthetic construct
  misc_feature 1..22: note = chemically synthesized
  source 1..22: mol_type = other DNA
tcattgggaatcttttacacca

SEQ ID NO: 160724 - DNA, 22 bp, synthetic construct
  misc_feature 1..22: note = chemically synthesized
  source 1..22: mol_type = other DNA
cattgggaatcttttacaccaa

SEQ ID NO: 160725 - DNA, 22 bp, synthetic construct
  misc_feature 1..22: note = chemically synthesized
  source 1..22: mol_type = other DNA
attgggaatcttttacaccaat

SEQ ID NO: 160726 - DNA, 22 bp, synthetic construct
  misc_feature 1..22: note = chemically synthesized
  source 1..22: mol_type = other DNA
ggaatcttttacaccaatgtac

SEQ ID NO: 160727 - DNA, 22 bp, synthetic construct
  misc_feature 1..22: note = chemically synthesized
  source 1..22: mol_type = other DNA
ttacaccaatgtactggtcaga

SEQ ID NO: 160728 - DNA, 22 bp, synthetic construct
  misc_feature 1..22: note = chemically synthesized
  source 1..22: mol_type = other DNA
tacaccaatgtactggtcagag

SEQ ID NO: 160729 - DNA, 22 bp, synthetic construct
  misc_feature 1..22: note = chemically synthesized
  source 1..22: mol_type = other DNA
acaccaatgtactggtcagagt

SEQ ID NO: 160730 - DNA, 22 bp, synthetic construct
  misc_feature 1..22: note = chemically synthesized
  source 1..22: mol_type = other DNA
caccaatgtactggtcagagtc

SEQ ID NO: 160731 - DNA, 22 bp, synthetic construct
  misc_feature 1..22: note = chemically synthesized
  source 1..22: mol_type = other DNA
gtcagagtctgttaatttgctt

SEQ ID NO: 160732 - DNA, 22 bp, synthetic construct
  misc_feature 1..22: note = chemically synthesized
  source 1..22: mol_type = other DNA
ttaatttgcttgtctaaaatgt

SEQ ID NO: 160733 - DNA, 22 bp, synthetic construct
  misc_feature 1..22: note = chemically synthesized
  source 1..22: mol_type = other DNA
atttgcttgtctaaaatgttct

SEQ ID NO: 160734 - DNA, 22 bp, synthetic construct
  misc_feature 1..22: note = chemically synthesized
  source 1..22: mol_type = other DNA
gcttgtctaaaatgttcttaaa

SEQ ID NO: 160735 - DNA, 22 bp, synthetic construct
  misc_feature 1..22: note = chemically synthesized
  source 1..22: mol_type = other DNA
cttgtctaaaatgttcttaaag

SEQ ID NO: 160736 - DNA, 22 bp, synthetic construct
  misc_feature 1..22: note = chemically synthesized
  source 1..22: mol_type = other DNA
gtctaaaatgttcttaaagaaa

SEQ ID NO: 160737 - DNA, 22 bp, synthetic construct
  misc_feature 1..22: note = chemically synthesized
  source 1..22: mol_type = other DNA
tctaaaatgttcttaaagaaaa

SEQ ID NO: 160738 - DNA, 22 bp, synthetic construct
  misc_feature 1..22: note = chemically synthesized
  source 1..22: mol_type = other DNA
aaatgttcttaaagaaaattgg

SEQ ID NO: 160739 - DNA, 22 bp, synthetic construct
  misc_feature 1..22: note = chemically synthesized
  source 1..22: mol_type = other DNA
ttaaagaaaattggaaatagtt

SEQ ID NO: 160740 - DNA, 22 bp, synthetic construct
  misc_feature 1..22: note = chemically synthesized
  source 1..22: mol_type = other DNA
aaagaaaattggaaatagttaa

SEQ ID NO: 160741 - DNA, 22 bp, synthetic construct
  misc_feature 1..22: note = chemically synthesized
  source 1..22: mol_type = other DNA
aagaaaattggaaatagttaaa

SEQ ID NO: 160742 - DNA, 22 bp, synthetic construct
  misc_feature 1..22: note = chemically synthesized
  source 1..22: mol_type = other DNA
gaaatagttaaatactagagga

SEQ ID NO: 160743 - DNA, 22 bp, synthetic construct
  misc_feature 1..22: note = chemically synthesized
  source 1..22: mol_type = other DNA
aatactagaggaatagctgaaa

SEQ ID NO: 160744 - DNA, 22 bp, synthetic construct
  misc_feature 1..22: note = chemically synthesized
  source 1..22: mol_type = other DNA
gaggaatagctgaaatgtgaaa

SEQ ID NO: 160745 - DNA, 22 bp, synthetic construct
  misc_feature 1..22: note = chemically synthesized
  source 1..22: mol_type = other DNA
aaatgtgaaatatggagaggtt

SEQ ID NO: 160746 - DNA, 22 bp, synthetic construct
  misc_feature 1..22: note = chemically synthesized
  source 1..22: mol_type = other DNA
attaaccaaattaaaatgcaat

SEQ ID NO: 160747 - DNA, 22 bp, synthetic construct
  misc_feature 1..22: note = chemically synthesized
  source 1..22: mol_type = other DNA
ttaaccaaattaaaatgcaatg

SEQ ID NO: 160748 - DNA, 22 bp, synthetic construct
  misc_feature 1..22: note = chemically synthesized
  source 1..22: mol_type = other DNA
accaaattaaaatgcaatgtcc

SEQ ID NO: 160749 - DNA, 22 bp, synthetic construct
  misc_feature 1..22: note = chemically synthesized
  source 1..22: mol_type = other DNA
aaatgcaatgtccaataaaaat

SEQ ID NO: 160750 - DNA, 22 bp, synthetic construct
  misc_feature 1..22: note = chemically synthesized
  source 1..22: mol_type = other DNA
ctttttttttttgtccacaggt

SEQ ID NO: 160751 - DNA, 22 bp, synthetic construct
  misc_feature 1..22: note = chemically synthesized
  source 1..22: mol_type = other DNA
tttttttttttgtccacaggtc

SEQ ID NO: 160752 - DNA, 22 bp, synthetic construct
  misc_feature 1..22: note = chemically synthesized
  source 1..22: mol_type = other DNA
tttttttttgtccacaggtctg

SEQ ID NO: 160753 - DNA, 22 bp, synthetic construct
  misc_feature 1..22: note = chemically synthesized
  source 1..22: mol_type = other DNA
ttttttttgtccacaggtctgg

SEQ ID NO: 160754 - DNA, 22 bp, synthetic construct
  misc_feature 1..22: note = chemically synthesized
  source 1..22: mol_type = other DNA
tttttttgtccacaggtctgga

SEQ ID NO: 160755 - DNA, 22 bp, synthetic construct
  misc_feature 1..22: note = chemically synthesized
  source 1..22: mol_type = other DNA
ttttttgtccacaggtctggaa

SEQ ID NO: 160756 - DNA, 22 bp, synthetic construct
  misc_feature 1..22: note = chemically synthesized
  source 1..22: mol_type = other DNA
tttttgtccacaggtctggaaa

SEQ ID NO: 160757 - DNA, 22 bp, synthetic construct
  misc_feature 1..22: note = chemically synthesized
  source 1..22: mol_type = other DNA
ttttgtccacaggtctggaaag

SEQ ID NO: 160758 - DNA, 22 bp, synthetic construct
  misc_feature 1..22: note = chemically synthesized
  source 1..22: mol_type = other DNA
tttgtccacaggtctggaaaga

SEQ ID NO: 160759 - DNA, 22 bp, synthetic construct
  misc_feature 1..22: note = chemically synthesized
  source 1..22: mol_type = other DNA
ttgtccacaggtctggaaagaa

SEQ ID NO: 160760 - DNA, 22 bp, synthetic construct
  misc_feature 1..22: note = chemically synthesized
  source 1..22: mol_type = other DNA
tgtccacaggtctggaaagaaa

SEQ ID NO: 160761 - DNA, 22 bp, synthetic construct
  misc_feature 1..22: note = chemically synthesized
  source 1..22: mol_type = other DNA
gtccacaggtctggaaagaaat

SEQ ID NO: 160762 - DNA, 22 bp, synthetic construct
  misc_feature 1..22: note = chemically synthesized
  source 1..22: mol_type = other DNA
tccacaggtctggaaagaaata

SEQ ID NO: 160763 - DNA, 22 bp, synthetic construct
  misc_feature 1..22: note = chemically synthesized
  source 1..22: mol_type = other DNA
gaaagaaataacagactggcca

SEQ ID NO: 160764 - DNA, 22 bp, synthetic construct
  misc_feature 1..22: note = chemically synthesized
  source 1..22: mol_type = other DNA
gccagtagtccaatcccctgtc

SEQ ID NO: 160765 - DNA, 22 bp, synthetic construct
  misc_feature 1..22: note = chemically synthesized
  source 1..22: mol_type = other DNA
tccaggtgattttgctggttct

SEQ ID NO: 160766 - DNA, 22 bp, synthetic construct
  misc_feature 1..22: note = chemically synthesized
  source 1..22: mol_type = other DNA
tgctggttctaatgtatttgga

SEQ ID NO: 160767 - DNA, 22 bp, synthetic construct
  misc_feature 1..22: note = chemically synthesized
  source 1..22: mol_type = other DNA
gctggttctaatgtatttggat

SEQ ID NO: 160768 - DNA, 22 bp, synthetic construct
  misc_feature 1..22: note = chemically synthesized
  source 1..22: mol_type = other DNA
ctggttctaatgtatttggatt

SEQ ID NO: 160769 - DNA, 22 bp, synthetic construct
  misc_feature 1..22: note = chemically synthesized
  source 1..22: mol_type = other DNA
gttctaatgtatttggattgcc

SEQ ID NO: 160770 - DNA, 22 bp, synthetic construct
  misc_feature 1..22: note = chemically synthesized
  source 1..22: mol_type = other DNA
taatgtatttggattgccatgc

SEQ ID NO: 160771 - DNA, 22 bp, synthetic construct
  misc_feature 1..22: note = chemically synthesized
  source 1..22: mol_type = other DNA
atgtatttggattgccatgcac

SEQ ID NO: 160772 - DNA, 22 bp, synthetic construct
  misc_feature 1..22: note = chemically synthesized
  source 1..22: mol_type = other DNA
ggattgccatgcacataacatc

SEQ ID NO: 160773 - DNA, 22 bp, synthetic construct
  misc_feature 1..22: note = chemically synthesized
  source 1..22: mol_type = other DNA
gattgccatgcacataacatcc

SEQ ID NO: 160774 - DNA, 22 bp, synthetic construct
  misc_feature 1..22: note = chemically synthesized
  source 1..22: mol_type = other DNA
ccatgcacataacatcctatta

SEQ ID NO: 160775 - DNA, 22 bp, synthetic construct
  misc_feature 1..22: note = chemically synthesized
  source 1..22: mol_type = other DNA
ttatggcacagtgcctgtgaat

SEQ ID NO: 160776 - DNA, 22 bp, synthetic construct
  misc_feature 1..22: note = chemically synthesized
  source 1..22: mol_type = other DNA
tggcacagtgcctgtgaatgcc

SEQ ID NO: 160777 - DNA, 22 bp, synthetic construct
  misc_feature 1..22: note = chemically synthesized
  source 1..22: mol_type = other DNA
tgaatgccccacctgaaaacag

SEQ ID NO: 160778 - DNA, 22 bp, synthetic construct
  misc_feature 1..22: note = chemically synthesized
  source 1..22: mol_type = other DNA
aaaacagtgatgtatctccatg

SEQ ID NO: 160779 - DNA, 22 bp, synthetic construct
  misc_feature 1..22: note = chemically synthesized
  source 1..22: mol_type = other DNA
catgaatccatcttttcctttc

SEQ ID NO: 160780 - DNA, 22 bp, synthetic construct
  misc_feature 1..22: note = chemically synthesized
  source 1..22: mol_type = other DNA
ttcctttcaaaactgtgaataa

SEQ ID NO: 160781 - DNA, 22 bp, synthetic construct
  misc_feature 1..22: note = chemically synthesized
  source 1..22: mol_type = other DNA
tcctttcaaaactgtgaataag

SEQ ID NO: 160782 - DNA, 22 bp, synthetic construct
  misc_feature 1..22: note = chemically synthesized
  source 1..22: mol_type = other DNA
cctttcaaaactgtgaataaga

SEQ ID NO: 160783 - DNA, 22 bp, synthetic construct
  misc_feature 1..22: note = chemically synthesized
  source 1..22: mol_type = other DNA
ctttcaaaactgtgaataagat

SEQ ID NO: 160784 - DNA, 22 bp, synthetic construct
  misc_feature 1..22: note = chemically synthesized
  source 1..22: mol_type = other DNA
tcaaaactgtgaataagatgga

SEQ ID NO: 160785 - DNA, 22 bp, synthetic construct
  misc_feature 1..22: note = chemically synthesized
  source 1..22: mol_type = other DNA
caaaactgtgaataagatggat

SEQ ID NO: 160786 - DNA, 22 bp, synthetic construct
  misc_feature 1..22: note = chemically synthesized
  source 1..22: mol_type = other DNA
aaaactgtgaataagatggatg

SEQ ID NO: 160787 - DNA, 22 bp, synthetic construct
  misc_feature 1..22: note = chemically synthesized
  source 1..22: mol_type = other DNA
tgaataagatggatgattttag

SEQ ID NO: 160788 - DNA, 22 bp, synthetic construct
  misc_feature 1..22: note = chemically synthesized
  source 1..22: mol_type = other DNA
tagagttatacccaaatcagac

SEQ ID NO: 160789 - DNA, 22 bp, synthetic construct
  misc_feature 1..22: note = chemically synthesized
  source 1..22: mol_type = other DNA
agagttatacccaaatcagaca

SEQ ID NO: 160790 - DNA, 22 bp, synthetic construct
  misc_feature 1..22: note = chemically synthesized
  source 1..22: mol_type = other DNA
gagttatacccaaatcagacag

SEQ ID NO: 160791 - DNA, 22 bp, synthetic construct
  misc_feature 1..22: note = chemically synthesized
  source 1..22: mol_type = other DNA
tacccaaatcagacagactcaa

SEQ ID NO: 160792 - DNA, 22 bp, synthetic construct
  misc_feature 1..22: note = chemically synthesized
  source 1..22: mol_type = other DNA
aatataatgagtttggagaaaa

SEQ ID NO: 160793 - DNA, 22 bp, synthetic construct
  misc_feature 1..22: note = chemically synthesized
  source 1..22: mol_type = other DNA
ggagaaaatcagaaagcagaag

SEQ ID NO: 160794 - DNA, 22 bp, synthetic construct
  misc_feature 1..22: note = chemically synthesized
  source 1..22: mol_type = other DNA
gagaaaatcagaaagcagaaga

SEQ ID NO: 160795 - DNA, 22 bp, synthetic construct
  misc_feature 1..22: note = chemically synthesized
  source 1..22: mol_type = other DNA
actgagaaacttcttttgtttg

SEQ ID NO: 160796 - DNA, 22 bp, synthetic construct
  misc_feature 1..22: note = chemically synthesized
  source 1..22: mol_type = other DNA
agaaacttcttttgtttgcatc

SEQ ID NO: 160797 - DNA, 22 bp, synthetic construct
  misc_feature 1..22: note = chemically synthesized
  source 1..22: mol_type = other DNA
cttttgtttgcatcaggagacc

SEQ ID NO: 160798 - DNA, 22 bp, synthetic construct
  misc_feature 1..22: note = chemically synthesized
  source 1..22: mol_type = other DNA
ttttgtttgcatcaggagaccc

SEQ ID NO: 160799 - DNA, 22 bp, synthetic construct
  misc_feature 1..22: note = chemically synthesized
  source 1..22: mol_type = other DNA
ttgtttgcatcaggagacccaa

SEQ ID NO: 160800 - DNA, 22 bp, synthetic construct
  misc_feature 1..22: note = chemically synthesized
  source 1..22: mol_type = other DNA
tgtttgcatcaggagacccaac

SEQ ID NO: 160801 - DNA, 22 bp, synthetic construct
  misc_feature 1..22: note = chemically synthesized
  source 1..22: mol_type = other DNA
gtttgcatcaggagacccaacg

SEQ ID NO: 160802 - DNA, 22 bp, synthetic construct
  misc_feature 1..22: note = chemically synthesized
  source 1..22: mol_type = other DNA
tttgcatcaggagacccaacga

SEQ ID NO: 160803 - DNA, 22 bp, synthetic construct
  misc_feature 1..22: note = chemically synthesized
  source 1..22: mol_type = other DNA
gcatcaggagacccaacgacac

SEQ ID NO: 160804 - DNA, 22 bp, synthetic construct
  misc_feature 1..22: note = chemically synthesized
  source 1..22: mol_type = other DNA
catcaggagacccaacgacact

SEQ ID NO: 160805 - DNA, 22 bp, synthetic construct
  misc_feature 1..22: note = chemically synthesized
  source 1..22: mol_type = other DNA
tgtccatttccaacatcacagt

SEQ ID NO: 160806 - DNA, 22 bp, synthetic construct
  misc_feature 1..22: note = chemically synthesized
  source 1..22: mol_type = other DNA
ccaacatcacagtctacatgcc

SEQ ID NO: 160807 - DNA, 22 bp, synthetic construct
  misc_feature 1..22: note = chemically synthesized
  source 1..22: mol_type = other DNA
caacatcacagtctacatgccc

SEQ ID NO: 160808 - DNA, 22 bp, synthetic construct
  misc_feature 1..22: note = chemically synthesized
  source 1..22: mol_type = other DNA
catgccctctgtgttgacacta

SEQ ID NO: 160809 - DNA, 22 bp, synthetic construct
  misc_feature 1..22: note = chemically synthesized
  source 1..22: mol_type = other DNA
tgtgttgacactagtagggatc

SEQ ID NO: 160810 - DNA, 22 bp, synthetic construct
  misc_feature 1..22: note = chemically synthesized
  source 1..22: mol_type = other DNA
tgttgacactagtagggatccc

SEQ ID NO: 160811 - DNA, 22 bp, synthetic construct
  misc_feature 1..22: note = chemically synthesized
  source 1..22: mol_type = other DNA
acactagtagggatcccaggcc

SEQ ID NO: 160812 - DNA, 22 bp, synthetic construct
  misc_feature 1..22: note = chemically synthesized
  source 1..22: mol_type = other DNA
gtagggatcccaggcctagaat

SEQ ID NO: 160813 - DNA, 22 bp, synthetic construct
  misc_feature 1..22: note = chemically synthesized
  source 1..22: mol_type = other DNA
gaatctgtgcagtgctggattg

SEQ ID NO: 160814 - DNA, 22 bp, synthetic construct
  misc_feature 1..22: note = chemically synthesized
  source 1..22: mol_type = other DNA
tgcagtgctggattgggattcc

SEQ ID NO: 160815 - DNA, 22 bp, synthetic construct
  misc_feature 1..22: note = chemically synthesized
  source 1..22: mol_type = other DNA
gattgggattccattctgtgcc

SEQ ID NO: 160816 - DNA, 22 bp, synthetic construct
  misc_feature 1..22: note = chemically synthesized
  source 1..22: mol_type = other DNA
ggattccattctgtgccattta

SEQ ID NO: 160817 - DNA, 22 bp, synthetic construct
  misc_feature 1..22: note = chemically synthesized
  source 1..22: mol_type = other DNA
cattctgtgccatttatctcat

SEQ ID NO: 160818 - DNA, 22 bp, synthetic construct
  misc_feature 1..22: note = chemically synthesized
  source 1..22: mol_type = other DNA
tgtgccatttatctcattgcta

SEQ ID NO: 160819 - DNA, 22 bp, synthetic construct
  misc_feature 1..22: note = chemically synthesized
  source 1..22: mol_type = other DNA
tgccatttatctcattgctatg

SEQ ID NO: 160820 - DNA, 22 bp, synthetic construct
  misc_feature 1..22: note = chemically synthesized
  source 1..22: mol_type = other DNA
atctcattgctatgattggaaa

SEQ ID NO: 160821 - DNA, 22 bp, synthetic construct
  misc_feature 1..22: note = chemically synthesized
  source 1..22: mol_type = other DNA
tctcattgctatgattggaaat

SEQ ID NO: 160822 - DNA, 22 bp, synthetic construct
  misc_feature 1..22: note = chemically synthesized
  source 1..22: mol_type = other DNA
attgctatgattggaaattcct

SEQ ID NO: 160823 - DNA, 22 bp, synthetic construct
  misc_feature 1..22: note = chemically synthesized
  source 1..22: mol_type = other DNA
ctatgattggaaattccttgct

SEQ ID NO: 160824 - DNA, 22 bp, synthetic construct
  misc_feature 1..22: note = chemically synthesized
  source 1..22: mol_type = other DNA
tgattggaaattccttgcttct

SEQ ID NO: 160825 - DNA, 22 bp, synthetic construct
  misc_feature 1..22: note = chemically synthesized
  source 1..22: mol_type = other DNA
gaaattccttgcttctgagcat

SEQ ID NO: 160826 - DNA, 22 bp, synthetic construct
  misc_feature 1..22: note = chemically synthesized
  source 1..22: mol_type = other DNA
cttgcttctgagcatcatcaaa

SEQ ID NO: 160827 - DNA, 22 bp, synthetic construct
  misc_feature 1..22: note = chemically synthesized
  source 1..22: mol_type = other DNA
gcttctgagcatcatcaaatct

SEQ ID NO: 160828 - DNA, 22 bp, synthetic construct
  misc_feature 1..22: note = chemically synthesized
  source 1..22: mol_type = other DNA
cttctgagcatcatcaaatctg

SEQ ID NO: 160829 - DNA, 22 bp, synthetic construct
  misc_feature 1..22: note = chemically synthesized
  source 1..22: mol_type = other DNA
ctgagcatcatcaaatctgagc

SEQ ID NO: 160830 - DNA, 22 bp, synthetic construct
  misc_feature 1..22: note = chemically synthesized
  source 1..22: mol_type = other DNA
tgagcatcatcaaatctgagcg

SEQ ID NO: 160831 - DNA, 22 bp, synthetic construct
  misc_feature 1..22: note = chemically synthesized
  source 1..22: mol_type = other DNA
agcatcatcaaatctgagcgca

SEQ ID NO: 160832 - DNA, 22 bp, synthetic construct
  misc_feature 1..22: note = chemically synthesized
  source 1..22: mol_type = other DNA
agcgcagtctccatgagccctt

SEQ ID NO: 160833 - DNA, 22 bp, synthetic construct
  misc_feature 1..22: note = chemically synthesized
  source 1..22: mol_type = other DNA
catgagcccttgtacattttct

SEQ ID NO: 160834 - DNA, 22 bp, synthetic construct
  misc_feature 1..22: note = chemically synthesized
  source 1..22: mol_type = other DNA
gtacattttcttaggcatgcta

SEQ ID NO: 160835 - DNA, 22 bp, synthetic construct
  misc_feature 1..22: note = chemically synthesized
  source 1..22: mol_type = other DNA
tacattttcttaggcatgctag

SEQ ID NO: 160836 - DNA, 22 bp, synthetic construct
  misc_feature 1..22: note = chemically synthesized
  source 1..22: mol_type = other DNA
tcttaggcatgctaggagccac

SEQ ID NO: 160837 - DNA, 22 bp, synthetic construct
  misc_feature 1..22: note = chemically synthesized
  source 1..22: mol_type = other DNA
cttaggcatgctaggagccaca

SEQ ID NO: 160838 - DNA, 22 bp, synthetic construct
  misc_feature 1..22: note = chemically synthesized
  source 1..22: mol_type = other DNA
ttaggcatgctaggagccacag

SEQ ID NO: 160839 - DNA, 22 bp, synthetic construct
  misc_feature 1..22: note = chemically synthesized
  source 1..22: mol_type = other DNA
aggcatgctaggagccacagac

SEQ ID NO: 160840 - DNA, 22 bp, synthetic construct
  misc_feature 1..22: note = chemically synthesized
  source 1..22: mol_type = other DNA
ggcatgctaggagccacagaca

SEQ ID NO: 160841 - DNA, 22 bp, synthetic construct
  misc_feature 1..22: note = chemically synthesized
  source 1..22: mol_type = other DNA
ggagccacagacattgcacttg
